United States Patent Application Publication US 2022/0213167 A1 - sequence listing, part 17

SEQ ID NO: 349643 - protein, 14 aa, Homo sapiens
  CDR3 for alpha chain variable domain of TCR clone 174822 (TRAV12-1, TRAJ17)
CVVNYKAAGTKLTF

SEQ ID NO: 349644 - protein, 17 aa, Homo sapiens
  CDR3 for beta chain variable domain of TCR clone 174822 (TRBV20-1, TRBJ2-1)
CSASSSGLAGSYNEQLF

SEQ ID NO: 349645 - protein, 14 aa, Homo sapiens
  CDR3 for alpha chain variable domain of TCR clone 174823 (TRAV9-2, TRAJ39)
CALYIYNAGNMLPF

SEQ ID NO: 349646 - protein, 14 aa, Homo sapiens
  CDR3 for beta chain variable domain of TCR clone 174823 (TRBV7-9, TRBJ2-1)
CASSPRDSHYEQFF

SEQ ID NO: 349647 - protein, 12 aa, Homo sapiens
  CDR3 for alpha chain variable domain of TCR clone 174824 (TRAV12-1, TRAJ40)
CVVYSGTYKYIF

SEQ ID NO: 349648 - protein, 17 aa, Homo sapiens
  CDR3 for beta chain variable domain of TCR clone 174824 (TRBV11-2, TRBJ2-3)
CQQLRGASRRAPNTQYF

SEQ ID NO: 349649 - protein, 14 aa, Homo sapiens
  CDR3 for alpha chain variable domain of TCR clone 174825 (TRAV8-1, TRAJ22)
CAAPSSGSARQLTF

SEQ ID NO: 349650 - protein, 15 aa, Homo sapiens
  CDR3 for beta chain variable domain of TCR clone 174825 (TRBV5-1, TRBJ2-1)
CASIPPRAPYNEQFF

SEQ ID NO: 349651 - protein, 12 aa, Homo sapiens
  CDR3 for alpha chain variable domain of TCR clone 174826 (TRAV13-1, TRAJ53)
AASGGSNYKLTF

SEQ ID NO: 349652 - protein, 13 aa, Homo sapiens
  CDR3 for beta chain variable domain of TCR clone 174826 (TRBV7-3, TRBJ2-5)
CASSFRGGETQYF

SEQ ID NO: 349653 - protein, 14 aa, Homo sapiens
  CDR3 for alpha chain variable domain of TCR clone 174827 (TRAV8-4, TRAJ13)
CAVTLSWGYQKVTF

SEQ ID NO: 349654 - protein, 13 aa, Homo sapiens
  CDR3 for beta chain variable domain of TCR clone 174827 (TRBV4-2, TRBJ1-1)
CASSQAGNTEAFF

SEQ ID NO: 349655 - protein, 19 aa, Homo sapiens
  CDR3 for alpha chain variable domain of TCR clone 174828 (TRAV2, TRAJ20)
ILQVREADAAVYRDCKLSF

SEQ ID NO: 349656 - protein, 11 aa, Homo sapiens
  CDR3 for beta chain variable domain of TCR clone 174828 (TRBV29-1, TRBJ1-1)
CSVEGGTEAFF

SEQ ID NO: 349657 - protein, 15 aa, Homo sapiens
  CDR3 for alpha chain variable domain of TCR clone 174829 (TRAV27, TRAJ38)
CAARRNAGNNRKLIW

SEQ ID NO: 349658 - protein, 15 aa, Homo sapiens
  CDR3 for beta chain variable domain of TCR clone 174829 (TRBV9, TRBJ2-1)
CASSLAGSSYNEQFF

SEQ ID NO: 349659 - protein, 13 aa, Homo sapiens
  CDR3 for alpha chain variable domain of TCR clone 174830 (TRAV12-3, TRAJ33)
CAMSVNSNYQLIW

SEQ ID NO: 349660 - protein, 13 aa, Homo sapiens
  CDR3 for beta chain variable domain of TCR clone 174830 (TRBV11-2, TRBJ2-5)
CASSFSSQETQYF

SEQ ID NO: 349661 - protein, 13 aa, Homo sapiens
  CDR3 for alpha chain variable domain of TCR clone 174831 (TRAV4, TRAJ12)
CLVGGDSSYKLIF

SEQ ID NO: 349662 - protein, 14 aa, Homo sapiens
  CDR3 for beta chain variable domain of TCR clone 174831 (TRBV19, TRBJ2-1)
CASPTFVLSGEQFF

SEQ ID NO: 349663 - protein, 12 aa, Homo sapiens
  CDR3 for alpha chain variable domain of TCR clone 174832 (TRAV3, TRAJ7)
CADLLWEQQTRF

SEQ ID NO: 349664 - protein, 12 aa, Homo sapiens
  CDR3 for beta chain variable domain of TCR clone 174832 (TRBV7-3, TRBJ2-5)
CQQLPGGGDQYF

SEQ ID NO: 349665 - protein, 15 aa, Homo sapiens
  CDR3 for alpha chain variable domain of TCR clone 174833 (TRAV26-1, TRAJ29)
CIVRVEGSGNTPLGF

SEQ ID NO: 349666 - protein, 15 aa, Homo sapiens
  CDR3 for beta chain variable domain of TCR clone 174833 (TRBV6-3, TRBJ2-1)
CASSAGLAGNNEQFF

SEQ ID NO: 349667 - protein, 18 aa, Homo sapiens
  CDR3 for alpha chain variable domain of TCR clone 174834 (TRAV17, TRAJ45)
CATSLDLYSGGGDDGLTF

SEQ ID NO: 349668 - protein, 15 aa, Homo sapiens
  CDR3 for beta chain variable domain of TCR clone 174834 (TRBV11-2, TRBJ2-1)
CASSKNRGLIYEQFF

SEQ ID NO: 349669 - protein, 19 aa, Homo sapiens
  CDR3 for alpha chain variable domain of TCR clone 174835 (TRAV29/DV5, TRAJ49)
CSVLLCSKLTVDTGNQFYF

SEQ ID NO: 349670 - protein, 19 aa, Homo sapiens
  CDR3 for beta chain variable domain of TCR clone 174835 (TRBV11-2, TRBJ2-3)
CASSLTSGTRFRVTDTQYF

SEQ ID NO: 349671 - protein, 12 aa, Homo sapiens
  CDR3 for alpha chain variable domain of TCR clone 174836 (TRAV8-3, TRAJ20)
CAVGANDYKLSF

SEQ ID NO: 349672 - protein, 14 aa, Homo sapiens
  CDR3 for beta chain variable domain of TCR clone 174836 (TRBV7-9, TRBJ2-2)
CASSLGHRTGELFF

SEQ ID NO: 349673 - protein, 17 aa, Homo sapiens
  CDR3 for alpha chain variable domain of TCR clone 174837 (TRAV8-6, TRAJ58)
CAVSSWVGETSGSRLTF

SEQ ID NO: 349674 - protein, 15 aa, Homo sapiens
  CDR3 for beta chain variable domain of TCR clone 174837 (TRBV19, TRBJ2-1)
CASIKGRGPYNEQFF

SEQ ID NO: 349675 - protein, 13 aa, Homo sapiens
  CDR3 for alpha chain variable domain of TCR clone 174838 (TRAV8-3, TRAJ36)
CAVGATGANNLFF

SEQ ID NO: 349676 - protein, 13 aa, Homo sapiens
  CDR3 for beta chain variable domain of TCR clone 174838 (TRBV12-4, TRBJ1-2)
CDSSLRQGKGYTF

SEQ ID NO: 349677 - protein, 16 aa, Homo sapiens
  CDR3 for alpha chain variable domain of TCR clone 174839 (TRAV3, TRAJ10)
CAVRDMRAGGGNKLTF

SEQ ID NO: 349678 - protein, 13 aa, Homo sapiens
  CDR3 for beta chain variable domain of TCR clone 174839 (TRBV24-1, TRBJ2-2)
CATSDWSTGELFF

SEQ ID NO: 349679 - protein, 15 aa, Homo sapiens
  CDR3 for alpha chain variable domain of TCR clone 174840 (TRAV12-1, TRAJ44)
CVADFPTGTASKLTF

SEQ ID NO: 349680 - protein, 13 aa, Homo sapiens
  CDR3 for beta chain variable domain of TCR clone 174840 (TRBV6-5, TRBJ2-5)
CASSPQGGETQYF

SEQ ID NO: 349681 - protein, 12 aa, Homo sapiens
  CDR3 for alpha chain variable domain of TCR clone 174841 (TRAV23/DV6, TRAJ17)
CAAKAAGNKLTF

SEQ ID NO: 349682 - protein, 14 aa, Homo sapiens
  CDR3 for beta chain variable domain of TCR clone 174841 (TRBV12-5, TRBJ2-5)
CASGSRTHQETQYF

SEQ ID NO: 349683 - protein, 12 aa, Homo sapiens
  CDR3 for alpha chain variable domain of TCR clone 174842 (TRAV27, TRAJ9)
CAGESGGFKTIF

SEQ ID NO: 349684 - protein, 11 aa, Homo sapiens
  CDR3 for beta chain variable domain of TCR clone 174842 (TRBV10-2, TRBJ2-2)
CASSASTSGGG

SEQ ID NO: 349685 - protein, 14 aa, Homo sapiens
  CDR3 for alpha chain variable domain of TCR clone 174843 (TRAV12-1, TRAJ17)
CVVNYKAAGNKLTF

SEQ ID NO: 349686 - protein, 13 aa, Homo sapiens
  CDR3 for beta chain variable domain of TCR clone 174843 (TRBV7-6, TRBJ2-7)
CASSLDHNHEQYF

SEQ ID NO: 349687 - protein, 15 aa, Homo sapiens
  CDR3 for alpha chain variable domain of TCR clone 174844 (TRAV3, TRAJ20)
CAVRDIKLSDYKLSF

SEQ ID NO: 349688 - protein, 17 aa, Homo sapiens
  CDR3 for beta chain variable domain of TCR clone 174844 (TRBV20-1, TRBJ2-2)
CSASGSGQGGLTGELFV

SEQ ID NO: 349689 - protein, 14 aa, Homo sapiens
  CDR3 for alpha chain variable domain of TCR clone 174845 (TRAV1-2, TRAJ16)
CAVNRFSDGQKLLF

SEQ ID NO: 349690 - protein, 14 aa, Homo sapiens
  CDR3 for beta chain variable domain of TCR clone 174845 (TRBV7-2, TRBJ2-7)
CDSSPKTSFYEQYF

SEQ ID NO: 349691 - protein, 14 aa, Homo sapiens
  CDR3 for alpha chain variable domain of TCR clone 174846 (TRAV26-1, TRAJ38)
CIADNAGNNRKLIW

SEQ ID NO: 349692 - protein, 13 aa, Homo sapiens
  CDR3 for beta chain variable domain of TCR clone 174846 (TRBV5-7, TRBJ2-6)
CASTSSGANVLTF

SEQ ID NO: 349693 - protein, 14 aa, Homo sapiens
  CDR3 for alpha chain variable domain of TCR clone 174847 (TRAV1-2, TRAJ8)
CAVSEDTGFQKLVF

SEQ ID NO: 349694 - protein, 16 aa, Homo sapiens
  CDR3 for beta chain variable domain of TCR clone 174847 (TRBV20-1, TRBJ1-4)
CSAPGQGLLTNEKLFF

SEQ ID NO: 349695 - protein, 14 aa, Homo sapiens
  CDR3 for alpha chain variable domain of TCR clone 174848 (TRAV38-1, TRAJ45)
CASPSGGGADGLTF

SEQ ID NO: 349696 - protein, 15 aa, Homo sapiens
  CDR3 for beta chain variable domain of TCR clone 174848 (TRBV10-2, TRBJ2-6)
CASSEQGTGANVLTF

SEQ ID NO: 349697 - protein, 15 aa, Homo sapiens
  CDR3 for alpha chain variable domain of TCR clone 174849 (TRAV13-1, TRAJ52)
SYYNSGGTSYGKLTF

SEQ ID NO: 349698 - protein, 11 aa, Homo sapiens
  CDR3 for beta chain variable domain of TCR clone 174849 (TRBV12-4, TRBJ2-2)
CASSSAGELFF

SEQ ID NO: 349699 - protein, 15 aa, Homo sapiens
  CDR3 for alpha chain variable domain of TCR clone 174850 (TRAV26-1, TRAJ44)
CIVRIGTGTASKLTF

SEQ ID NO: 349700 - protein, 13 aa, Homo sapiens
  CDR3 for beta chain variable domain of TCR clone 174850 (TRBV6-1, TRBJ2-2)
CANSGHNTGELFF

SEQ ID NO: 349701 - protein, 16 aa, Homo sapiens
  CDR3 for alpha chain variable domain of TCR clone 174851 (TRAV21, TRAJ52)
CAVTNSGGTSYGKLTF

SEQ ID NO: 349702 - protein, 17 aa, Homo sapiens
  CDR3 for beta chain variable domain of TCR clone 174851 (TRBV28, TRBJ2-5)
CASSRQGGLAGAETQYF

SEQ ID NO: 349703 - protein, 15 aa, Homo sapiens
  CDR3 for alpha chain variable domain of TCR clone 174852 (TRAV3, TRAJ3)
CAVRDGHSSASKIIF

SEQ ID NO: 349704 - protein, 17 aa, Homo sapiens
  CDR3 for beta chain variable domain of TCR clone 174852 (TRBV25-1, TRBJ2-7)
CASSDARVVFSSYEQYL

SEQ ID NO: 349705 - protein, 16 aa, Homo sapiens
  CDR3 for alpha chain variable domain of TCR clone 174853 (TRAV3, TRAJ37)
CAVRPHGSGNTGKLIF

SEQ ID NO: 349706 - protein, 14 aa, Homo sapiens
  CDR3 for beta chain variable domain of TCR clone 174853 (TRBV7-9, TRBJ1-2)
CASSRQGANYGYTF

SEQ ID NO: 349707 - protein, 12 aa, Homo sapiens
  CDR3 for alpha chain variable domain of TCR clone 174854 (TRAV13-2, TRAJ23)
CAERYRGGKLIF

SEQ ID NO: 349708 - protein, 16 aa, Homo sapiens
  CDR3 for beta chain variable domain of TCR clone 174854 (TRBV20-1, TRBJ1-4)
CNAPGQGLLTNEKLFF

SEQ ID NO: 349709 - protein, 13 aa, Homo sapiens
  CDR3 for alpha chain variable domain of TCR clone 174855 (TRAV38-1, TRAJ52)
CDFRGTSYGKLTF

SEQ ID NO: 349710 - protein, 15 aa, Homo sapiens
  CDR3 for beta chain variable domain of TCR clone 174855 (TRBV7-8, TRBJ2-5)
CASSDAAGSQETQYF

SEQ ID NO: 349711 - protein, 14 aa, Homo sapiens
  CDR3 for alpha chain variable domain of TCR clone 174856 (TRAV12-3, TRAJ10)
SHLPLTGGGNKLTF

SEQ ID NO: 349712 - protein, 15 aa, Homo sapiens
  CDR3 for beta chain variable domain of TCR clone 174856 (TRBV9, TRBJ1-6)
CASSVAGTGDSHLHF

SEQ ID NO: 349713 - protein, 11 aa, Homo sapiens
  CDR3 for alpha chain variable domain of TCR clone 174857 (TRAV12-2, TRAJ31)
CAVTKWARLMF

SEQ ID NO: 349714 - protein, 15 aa, Homo sapiens
  CDR3 for beta chain variable domain of TCR clone 174857 (TRBV19, TRBJ2-7)
CASSIGGGLVNEQYF

SEQ ID NO: 349715 - protein, 13 aa, Homo sapiens
  CDR3 for alpha chain variable domain of TCR clone 174858 (TRAV12-2, TRAJ50)
CAVIVTSYDKVIS

SEQ ID NO: 349716 - protein, 14 aa, Homo sapiens
  CDR3 for beta chain variable domain of TCR clone 174858 (TRBV9, TRBJ2-1)
CASSVDPRGKEQFF

SEQ ID NO: 349717 - protein, 14 aa, Homo sapiens
  CDR3 for alpha chain variable domain of TCR clone 174859 (TRAV1-2, TRAJ16)
CAVNRVSDGQKLLF

SEQ ID NO: 349718 - protein, 15 aa, Homo sapiens
  CDR3 for beta chain variable domain of TCR clone 174859 (TRBV4-1, TRBJ2-2)
CASSEGQGITGELFF

SEQ ID NO: 349719 - protein, 13 aa, Homo sapiens
  CDR3 for alpha chain variable domain of TCR clone 174860 (TRAV12-1, TRAJ33)
CGDAPDSNYELIW

SEQ ID NO: 349720 - protein, 15 aa, Homo sapiens
  CDR3 for beta chain variable domain of TCR clone 174860 (TRBV27, TRBJ2-1)
CASSNGGGSSNEQFF

SEQ ID NO: 349721 - protein, 14 aa, Homo sapiens
  CDR3 for alpha chain variable domain of TCR clone 174861 (TRAV38-1, TRAJ28)
CAFTSGAGSYQLTF

SEQ ID NO: 349722 - protein, 18 aa, Homo sapiens
  CDR3 for beta chain variable domain of TCR clone 174861 (TRBV11-2, TRBJ2-3)
CASSLGGASRGAPNTQYF

SEQ ID NO: 349723 - protein, 13 aa, Homo sapiens
  CDR3 for alpha chain variable domain of TCR clone 174862 (TRAV20, TRAJ48)
CAVQGVGNEKLTF

SEQ ID NO: 349724 - protein, 14 aa, Homo sapiens
  CDR3 for beta chain variable domain of TCR clone 174862 (TRBV27, TRBJ2-7)
CASSCRDGPYEQYF

SEQ ID NO: 349725 - protein, 14 aa, Homo sapiens
  CDR3 for alpha chain variable domain of TCR clone 174863 (TRAV27, TRAJ12)
CAGARMDSSYKLIF

SEQ ID NO: 349726 - protein, 19 aa, Homo sapiens
  CDR3 for beta chain variable domain of TCR clone 174863 (TRBV25-1, TRBJ2-2)
CAILVYRVDRGRKTGELFF

SEQ ID NO: 349727 - protein, 14 aa, Homo sapiens
  CDR3 for alpha chain variable domain of TCR clone 174864 (TRAV29/DV5, TRAJ32)
CAAAYGGATNKSIF

SEQ ID NO: 349728 - protein, 15 aa, Homo sapiens
  CDR3 for beta chain variable domain of TCR clone 174864 (TRBV27, TRBJ2-7)
CASSTAGTGSYEQYF

SEQ ID NO: 349729 - protein, 12 aa, Homo sapiens
  CDR3 for alpha chain variable domain of TCR clone 174865 (TRAV12-1, TRAJ40)
CVVYSGTYNYII

SEQ ID NO: 349730 - protein, 18 aa, Homo sapiens
  CDR3 for beta chain variable domain of TCR clone 174865 (TRBV11-2, TRBJ2-3)
CASSLGGASRGAPNTQYF

SEQ ID NO: 349731 - protein, 14 aa, Homo sapiens
  CDR3 for alpha chain variable domain of TCR clone 174866 (TRAV12-3, TRAJ42)
CAMNYGGSQGNLIF

SEQ ID NO: 349732 - protein, 12 aa, Homo sapiens
  CDR3 for beta chain variable domain of TCR clone 174866 (TRBV11-2, TRBJ2-2)
CAGSLGGGELFF

SEQ ID NO: 349733 - protein, 14 aa, Homo sapiens
  CDR3 for alpha chain variable domain of TCR clone 174867 (TRAV2, TRAJ20)
CAVDLRKHDYKLSF

SEQ ID NO: 349734 - protein, 15 aa, Homo sapiens
  CDR3 for beta chain variable domain of TCR clone 174867 (TRBV11-3, TRBJ2-7)
CASSLVSGSSYEQYF

SEQ ID NO: 349735 - protein, 15 aa, Homo sapiens
  CDR3 for alpha chain variable domain of TCR clone 174868 (TRAV4, TRAJ39)
CLVGPNNNAGNMRTF

SEQ ID NO: 349736 - protein, 15 aa, Homo sapiens
  CDR3 for beta chain variable domain of TCR clone 174868 (TRBV7-9, TRBJ1-6)
CASSSPGRGNSPLHF

SEQ ID NO: 349737 - protein, 13 aa, Homo sapiens
  CDR3 for alpha chain variable domain of TCR clone 174869 (TRAV8-4, TRAJ9)
CAVSETGGFKNIF

SEQ ID NO: 349738 - protein, 14 aa, Homo sapiens
  CDR3 for beta chain variable domain of TCR clone 174869 (TRBV13, TRBJ2-5)
CASSLERVGETQYF

SEQ ID NO: 349739 - protein, 18 aa, Homo sapiens
  CDR3 for alpha chain variable domain of TCR clone 174870 (TRAV12-3, TRAJ52)
CAMSRTNAGGTSYGKLTF

SEQ ID NO: 349740 - protein, 11 aa, Homo sapiens
  CDR3 for beta chain variable domain of TCR clone 174870 (TRBV12-4, TRBJ2-5)
CASSFQGAQYF

SEQ ID NO: 349741 - protein, 14 aa, Homo sapiens
  CDR3 for alpha chain variable domain of TCR clone 174871 (TRAV12-2, TRAJ17)
CAVLFKAAGNKLTF

SEQ ID NO: 349742 - protein, 12 aa, Homo sapiens
  CDR3 for beta chain variable domain of TCR clone 174871 (TRBV25-1, TRBJ2-1)
CASSIRDNEQFF

SEQ ID NO: 349743 - protein, 14 aa, Homo sapiens
  CDR3 for alpha chain variable domain of TCR clone 174872 (TRAV1-2, TRAJ16)
CAVNRFSDGQKLLF

SEQ ID NO: 349744 - protein, 12 aa, Homo sapiens
  CDR3 for beta chain variable domain of TCR clone 174872 (TRBV7-2, TRBJ2-1)
CASSPQDIEQFF

SEQ ID NO: 349745 - protein, 12 aa, Homo sapiens
  CDR3 for alpha chain variable domain of TCR clone 174873 (TRAV12-3, TRAJ17)
CAMTLTGNKLTF

SEQ ID NO: 349746 - protein, 13 aa, Homo sapiens
  CDR3 for beta chain variable domain of TCR clone 174873 (TRBV28, TRBJ2-7)
CASSLGGAYEQYF

SEQ ID NO: 349747 - protein, 17 aa, Homo sapiens
  CDR3 for alpha chain variable domain of TCR clone 174874 (TRAV3, TRAJ38)
CAVRDCLNAGNNSKLIW

SEQ ID NO: 349748 - protein, 14 aa, Homo sapiens
  CDR3 for beta chain variable domain of TCR clone 174874 (TRBV12-5, TRBJ2-5)
CASGSRTHQETQYF

SEQ ID NO: 349749 - protein, 14 aa, Homo sapiens
  CDR3 for alpha chain variable domain of TCR clone 174875 (TRAV1-2, TRAJ16)
CAVNRVSDGQKLLF

SEQ ID NO: 349750 - protein, 13 aa, Homo sapiens
  CDR3 for beta chain variable domain of TCR clone 174875 (TRBV7-9, TRBJ2-3)
CASSPGSTDTQYF

SEQ ID NO: 349751 - protein, 12 aa, Homo sapiens
  CDR3 for alpha chain variable domain of TCR clone 174876 (TRAV21, TRAJ49)
CAVRNTGNQFYF

SEQ ID NO: 349752 - protein, 15 aa, Homo sapiens
  CDR3 for beta chain variable domain of TCR clone 174876 (TRBV20-1, TRBJ2-2)
CSARGGQGNTGELFF

SEQ ID NO: 349753 - protein, 14 aa, Homo sapiens
  CDR3 for alpha chain variable domain of TCR clone 174877 (TRAV2, TRAJ37)
CAVEDQGNTGILIF

SEQ ID NO: 349754 - protein, 14 aa, Homo sapiens
  CDR3 for beta chain variable domain of TCR clone 174877 (TRBV18, TRBJ2-1)
CASSPQGRFNEQFF

SEQ ID NO: 349755 - protein, 15 aa, Homo sapiens
  CDR3 for alpha chain variable domain of TCR clone 174878 (TRAV38-1, TRAJ37)
CAFIFGSGNTGKLIF

SEQ ID NO: 349756 - protein, 12 aa, Homo sapiens
  CDR3 for beta chain variable domain of TCR clone 174878 (TRBV6-3, TRBJ2-1)
CASSGSYNEQFF

SEQ ID NO: 349757 - protein, 15 aa, Homo sapiens
  CDR3 for alpha chain variable domain of TCR clone 174879 (TRAV26-1, TRAJ37)
CIVENGSGNTGKLIF

SEQ ID NO: 349758 - protein, 14 aa, Homo sapiens
  CDR3 for beta chain variable domain of TCR clone 174879 (TRBV4-1, TRBJ2-2)
CASSQAVNTGELFF

SEQ ID NO: 349759 - protein, 15 aa, Homo sapiens
  CDR3 for alpha chain variable domain of TCR clone 174880 (TRAV3, TRAJ22)
CAVRDRGGSAMQLTF

SEQ ID NO: 349760 - protein, 13 aa, Homo sapiens
  CDR3 for beta chain variable domain of TCR clone 174880 (TRBV20-1, TRBJ1-1)
CSARVGGNTEAFF

SEQ ID NO: 349761 - protein, 18 aa, Homo sapiens
  CDR3 for alpha chain variable domain of TCR clone 174881 (TRAV13-1, TRAJ45)
CAASIGVYSGGGADGLTF

SEQ ID NO: 349762 - protein, 13 aa, Homo sapiens
  CDR3 for beta chain variable domain of TCR clone 174881 (TRBV5-5, TRBJ1-2)
CASSFWRGEDYSF

SEQ ID NO: 349763 - protein, 16 aa, Homo sapiens
  CDR3 for alpha chain variable domain of TCR clone 174882 (TRAV30, TRAJ24)
CGTEIVDADSWGKFQF

SEQ ID NO: 349764 - protein, 13 aa, Homo sapiens
  CDR3 for beta chain variable domain of TCR clone 174882 (TRBV9, TRBJ2-7)
CASSVGQGGEQYF

SEQ ID NO: 349765 - protein, 14 aa, Homo sapiens
  CDR3 for alpha chain variable domain of TCR clone 174883 (TRAV30, TRAJ33)
CGTVAPRSNYQLIW

SEQ ID NO: 349766 - protein, 15 aa, Homo sapiens
  CDR3 for beta chain variable domain of TCR clone 174883 (TRBV19, TRBJ1-1)
CASTSGQIQNTEAFF

SEQ ID NO: 349767 - protein, 16 aa, Homo sapiens
  CDR3 for alpha chain variable domain of TCR clone 174884 (TRAV16, TRAJ4)
CGLSRMFSGGYNKLIF

SEQ ID NO: 349768 - protein, 16 aa, Homo sapiens
  CDR3 for beta chain variable domain of TCR clone 174884 (TRBV24-1, TRBJ2-3)
CATRDPGTGATDTQYF

SEQ ID NO: 349769 - protein, 14 aa, Homo sapiens
  CDR3 for alpha chain variable domain of TCR clone 174885 (TRAV23/DV6, TRAJ8)
FAASKATGFQKLVF

SEQ ID NO: 349770 - protein, 13 aa, Homo sapiens
  CDR3 for beta chain variable domain of TCR clone 174885 (TRBV11-3, TRBJ2-5)
CASSSGLQETQYF

SEQ ID NO: 349771 - protein, 14 aa, Homo sapiens
  CDR3 for alpha chain variable domain of TCR clone 174886 (TRAV12-2, TRAJ5)
CSVNRSTGRRALTF

SEQ ID NO: 349772 - protein, 11 aa, Homo sapiens
  CDR3 for beta chain variable domain of TCR clone 174886 (TRBV29-1, TRBJ2-5)
CSEDRTGTQYF

SEQ ID NO: 349773 - protein, 23 aa, Homo sapiens
  CDR3 for alpha chain variable domain of TCR clone 174887 (TRAV26-1, TRAJ38)
CIADNAGNNHIKNPDPAVYQLRD

SEQ ID NO: 349774 - protein, 13 aa, Homo sapiens
  CDR3 for beta chain variable domain of TCR clone 174887 (TRBV20-1, TRBJ1-1)
CSARGGGSTEAFF

SEQ ID NO: 349775 - protein, 18 aa, Homo sapiens
  CDR3 for alpha chain variable domain of TCR clone 174888 (TRAV12-3, TRAJ52)
CAMSVGGAGGTSFGKPTF

SEQ ID NO: 349776 - protein, 15 aa, Homo sapiens
  CDR3 for beta chain variable domain of TCR clone 174888 (TRBV27, TRBJ1-6)
CASSLDRGLGSPLHF

SEQ ID NO: 349777 - protein, 14 aa, Homo sapiens
  CDR3 for alpha chain variable domain of TCR clone 174889 (TRAV1-1, TRAJ27)
CAVIYNTHAGKSTF

SEQ ID NO: 349778 - protein, 12 aa, Homo sapiens
  CDR3 for beta chain variable domain of TCR clone 174889 (TRBV11-2, TRBJ2-1)
CASSPGNNEQFF

SEQ ID NO: 349779 - protein, 14 aa, Homo sapiens
  CDR3 for alpha chain variable domain of TCR clone 174890 (TRAV1-1, TRAJ27)
CAVIYNTIAGKSTF

SEQ ID NO: 349780 - protein, 15 aa, Homo sapiens
  CDR3 for beta chain variable domain of TCR clone 174890 (TRBV19, TRBJ1-2)
CASSVGQVLNYGYTF

SEQ ID NO: 349781 - protein, 12 aa, Homo sapiens
  CDR3 for alpha chain variable domain of TCR clone 174891 (TRAV1-1, TRAJ8)
CAGGTGFQKLVF

SEQ ID NO: 349782 - protein, 15 aa, Homo sapiens
  CDR3 for beta chain variable domain of TCR clone 174891 (TRBV20-1, TRBJ2-7)
CSARDRVTGMDEQYF

SEQ ID NO: 349783 - protein, 12 aa, Homo sapiens
  CDR3 for alpha chain variable domain of TCR clone 174892 (TRAV16, TRAJ10)
CSRTGGGNKLTF

SEQ ID NO: 349784 - protein, 19 aa, Homo sapiens
  CDR3 for beta chain variable domain of TCR clone 174892 (TRBV25-1, TRBJ2-2)
CAILVYRVDRGRKTGELCF

SEQ ID NO: 349785 - protein, 18 aa, Homo sapiens
  CDR3 for alpha chain variable domain of TCR clone 174893 (TRAV21, TRAJ52)
CAVRPSPAGGTSYGKLTF

SEQ ID NO: 349786 - protein, 16 aa, Homo sapiens
  CDR3 for beta chain variable domain of TCR clone 174893 (TRBV7-3, TRBJ2-3)
CQQLFTSSLNTDTQYF

SEQ ID NO: 349787 - protein, 15 aa, Homo sapiens
  CDR3 for alpha chain variable domain of TCR clone 174894 (TRAV27, TRAJ38)
CAARRNAGNNRKLIW

SEQ ID NO: 349788 - protein, 14 aa, Homo sapiens
  CDR3 for beta chain variable domain of TCR clone 174894 (TRBV7-2, TRBJ2-7)
CASSPREGAYEQYF

SEQ ID NO: 349789 - protein, 12 aa, Homo sapiens
  CDR3 for alpha chain variable domain of TCR clone 174895 (TRAV13-1, TRAJ21)
CAAKEGCNKFYF

SEQ ID NO: 349790 - protein, 20 aa, Homo sapiens
  CDR3 for beta chain variable domain of TCR clone 174895 (TRBV7-8, TRBJ2-2)
CASSHLFPGPTIHITGELFF

SEQ ID NO: 349791 - protein, 14 aa, Homo sapiens
  CDR3 for alpha chain variable domain of TCR clone 174896 (TRAV12-2, TRAJ3)
CAVKGYSSASKIFF

SEQ ID NO: 349792 - protein, 14 aa, Homo sapiens
  CDR3 for beta chain variable domain of TCR clone 174896 (TRBV6-3, TRBJ1-2)
CASSEGGGSYGYTF

SEQ ID NO: 349793 - protein, 18 aa, Homo sapiens
  CDR3 for alpha chain variable domain of TCR clone 174897 (TRAV13-1, TRAJ52)
CAAKNHNAGGTSYGKLKF

SEQ ID NO: 349794 - protein, 15 aa, Homo sapiens
  CDR3 for beta chain variable domain of TCR clone 174897 (TRBV6-1, TRBJ2-3)
CASSERGGITDTQYF

SEQ ID NO: 349795 - protein, 14 aa, Homo sapiens
  CDR3 for alpha chain variable domain of TCR clone 174898 (TRAV20, TRAJ10)
CAVRVEGGGNKLTF

SEQ ID NO: 349796 - protein, 13 aa, Homo sapiens
  CDR3 for beta chain variable domain of TCR clone 174898 (TRBV13, TRBJ2-2)
CASSPGLTGQLFF

SEQ ID NO: 349797 - protein, 14 aa, Homo sapiens
  CDR3 for alpha chain variable domain of TCR clone 174899 (TRAV2, TRAJ9)
CAVEDRSGGFKTIF

SEQ ID NO: 349798 - protein, 12 aa, Homo sapiens
  CDR3 for beta chain variable domain of TCR clone 174899 (TRBV11-2, TRBJ2-3)
GASRGAPNTQYF

SEQ ID NO: 349799 - protein, 13 aa, Homo sapiens
  CDR3 for alpha chain variable domain of TCR clone 174900 (TRAV29/DV5, TRAJ47)
CAASAEYGNKLVF

SEQ ID NO: 349800 - protein, 12 aa, Homo sapiens
  CDR3 for beta chain variable domain of TCR clone 174900 (TRBV7-8, TRBJ2-7)
CASSLGDREQYF

SEQ ID NO: 349801 - protein, 14 aa, Homo sapiens
  CDR3 for alpha chain variable domain of TCR clone 174901 (TRAV12-1, TRAJ3)
CVVRGYSSASKIIF

SEQ ID NO: 349802 - protein, 14 aa, Homo sapiens
  CDR3 for beta chain variable domain of TCR clone 174901 (TRBV6-6, TRBJ1-3)
CASSRQGSGNTIYF

SEQ ID NO: 349803 - protein, 16 aa, Homo sapiens
  CDR3 for alpha chain variable domain of TCR clone 174902 (TRAV13-1, TRAJ28)
CAASPPYSGWELPTHF

SEQ ID NO: 349804 - protein, 13 aa, Homo sapiens
  CDR3 for beta chain variable domain of TCR clone 174902 (TRBV12-5, TRBJ2-3)
CASGDRQSDTQYF

SEQ ID NO: 349805 - protein, 14 aa, Homo sapiens
  CDR3 for alpha chain variable domain of TCR clone 174903 (TRAV1-2, TRAJ16)
YAVNRFSDGQKLLF

SEQ ID NO: 349806 - protein, 16 aa, Homo sapiens
  CDR3 for beta chain variable domain of TCR clone 174903 (TRBV19, TRBJ2-1)
CASSKAGPSSYNEQFF

SEQ ID NO: 349807 - protein, 11 aa, Homo sapiens
  CDR3 for alpha chain variable domain of TCR clone 174904 (TRAV36/DV7, TRAJ49)
CAGDSNTGNQF

SEQ ID NO: 349808 - protein, 12 aa, Homo sapiens
  CDR3 for beta chain variable domain of TCR clone 174904 (TRBV11-2, TRBJ2-2)
CASSLGGGELFF

SEQ ID NO: 349809 - protein, 14 aa, Homo sapiens
  CDR3 for alpha chain variable domain of TCR clone 174905 (TRAV1-2, TRAJ27)
CAVRSGTNAVKSTF

SEQ ID NO: 349810 - protein, 15 aa, Homo sapiens
  CDR3 for beta chain variable domain of TCR clone 174905 (TRBV18, TRBJ2-7)
CASSPLQGRPYEQYF

SEQ ID NO: 349811 - protein, 17 aa, Homo sapiens
  CDR3 for alpha chain variable domain of TCR clone 174906 (TRAV3, TRAJ6)
CAVRDGPRAGGSYIPTF

SEQ ID NO: 349812 - protein, 11 aa, Homo sapiens
  CDR3 for beta chain variable domain of TCR clone 174906 (TRBV7-2, TRBJ2-5)
CASSFQETQYF

SEQ ID NO: 349813 - protein, 14 aa, Homo sapiens
  CDR3 for alpha chain variable domain of TCR clone 174907 (TRAV1-1, TRAJ23)
CAVSIYNQGGKLIF

SEQ ID NO: 349814 - protein, 14 aa, Homo sapiens
  CDR3 for beta chain variable domain of TCR clone 174907 (TRBV11-2, TRBJ2-7)
CASRSTGEGYEQYF

SEQ ID NO: 349815 - protein, 13 aa, Homo sapiens
  CDR3 for alpha chain variable domain of TCR clone 174908 (TRAV2, TRAJ15)
CAVASQAGTALIF

SEQ ID NO: 349816 - protein, 15 aa, Homo sapiens
  CDR3 for beta chain variable domain of TCR clone 174908 (TRBV20-1, TRBJ2-7)
CSARDRVSGMDEQFF

SEQ ID NO: 349817 - protein, 12 aa, Homo sapiens
  CDR3 for alpha chain variable domain of TCR clone 174909 (TRAV21, TRAJ49)
CAVTNTGNQFYL

SEQ ID NO: 349818 - protein, 17 aa, Homo sapiens
  CDR3 for beta chain variable domain of TCR clone 174909 (TRBV13, TRBJ2-3)
CASSLSRVAGGRNTQYF

SEQ ID NO: 349819 - protein, 14 aa, Homo sapiens
  CDR3 for alpha chain variable domain of TCR clone 174910 (TRAV17, TRAJ22)
CATSPSGSARQLTF

SEQ ID NO: 349820 - protein, 14 aa, Homo sapiens
  CDR3 for beta chain variable domain of TCR clone 174910 (TRBV4-1, TRBJ2-5)
RQQPMDLYQETQYF

SEQ ID NO: 349821 - protein, 13 aa, Homo sapiens
  CDR3 for alpha chain variable domain of TCR clone 174911 (TRAV20, TRAJ35)
CAVQEGFGNVLHC

SEQ ID NO: 349822 - protein, 14 aa, Homo sapiens
  CDR3 for beta chain variable domain of TCR clone 174911 (TRBV5-1, TRBJ1-1)
CASSSATGGTEAVF

SEQ ID NO: 349823 - protein, 13 aa, Homo sapiens
  CDR3 for alpha chain variable domain of TCR clone 174912 (TRAV12-3, TRAJ9)
CAMRNTAGFKTIF

SEQ ID NO: 349824 - protein, 14 aa, Homo sapiens
  CDR3 for beta chain variable domain of TCR clone 174912 (TRBV11-2, TRBJ2-7)
CASSSTGEGYEQYF

SEQ ID NO: 349825 - protein, 13 aa, Homo sapiens
  CDR3 for alpha chain variable domain of TCR clone 174913 (TRAV3, TRAJ41)
CAVSSNSGYALNL

SEQ ID NO: 349826 - protein, 13 aa, Homo sapiens
  CDR3 for beta chain variable domain of TCR clone 174913 (TRBV20-1, TRBJ2-2)
CSALSGGAGELFF

SEQ ID NO: 349827 - protein, 14 aa, Homo sapiens
  CDR3 for alpha chain variable domain of TCR clone 174914 (TRAV8-2, TRAJ4)
CVVSPSGGYNKLIF

SEQ ID NO: 349828 - protein, 16 aa, Homo sapiens
  CDR3 for beta chain variable domain of TCR clone 174914 (TRBV7-2, TRBJ2-7)
CASSLPPGQGPQYLGR

SEQ ID NO: 349829 - protein, 11 aa, Homo sapiens
  CDR3 for alpha chain variable domain of TCR clone 174915 (TRAV12-1, TRAJ43)
CVVIRNKDMRF

SEQ ID NO: 349830 - protein, 16 aa, Homo sapiens
  CDR3 for beta chain variable domain of TCR clone 174915 (TRBV14, TRBJ2-1)
CASSPRLAGEGNEQFF

SEQ ID NO: 349831 - protein, 16 aa, Homo sapiens
  CDR3 for alpha chain variable domain of TCR clone 174916 (TRAV3, TRAJ10)
CAVRDMRAGGGNKTTF

SEQ ID NO: 349832 - protein, 14 aa, Homo sapiens
  CDR3 for beta chain variable domain of TCR clone 174916 (TRBV12-4, TRBJ1-4)
CASRMTGRSEKLFF

SEQ ID NO: 349833 - protein, 13 aa, Homo sapiens
  CDR3 for alpha chain variable domain of TCR clone 174917 (TRAV1-2, TRAJ9)
CAALNTGGFKTIF

SEQ ID NO: 349834 - protein, 12 aa, Homo sapiens
  CDR3 for beta chain variable domain of TCR clone 174917 (TRBV5-4, TRBJ2-7)
CASSLEAYEQYF

SEQ ID NO: 349835 - protein, 13 aa, Homo sapiens
  CDR3 for alpha chain variable domain of TCR clone 174918 (TRAV2, TRAJ16)
CAVEFGDGQKLLF

SEQ ID NO: 349836 - protein, 14 aa, Homo sapiens
  CDR3 for beta chain variable domain of TCR clone 174918 (TRBV6-3, TRBJ2-5)
CASSYSSREKTQYF

SEQ ID NO: 349837 - protein, 11 aa, Homo sapiens
  CDR3 for alpha chain variable domain of TCR clone 174919 (TRAV12-2, TRAJ30)
CPVGRDDKIIF

SEQ ID NO: 349838 - protein, 15 aa, Homo sapiens
  CDR3 for beta chain variable domain of TCR clone 174919 (TRBV18, TRBJ2-7)
CASSPLQGRTYEQYF

SEQ ID NO: 349839 - protein, 14 aa, Homo sapiens
  CDR3 for alpha chain variable domain of TCR clone 174920 (TRAV3, TRAJ34)
CAVRDINNTDKLIF

SEQ ID NO: 349840 - protein, 15 aa, Homo sapiens
  CDR3 for beta chain variable domain of TCR clone 174920 (TRBV20-1, TRBJ2-7)
CSARDRVAEMDEQYF

SEQ ID NO: 349841 - protein, 14 aa, Homo sapiens
  CDR3 for alpha chain variable domain of TCR clone 174921 (TRAV17, TRAJ16)
CATADFSDGQKLLF

SEQ ID NO: 349842 - protein, 13 aa, Homo sapiens
  CDR3 for beta chain variable domain of TCR clone 174921 (TRBV4-1, TRBJ2-1)
CASSQEVQYEQFF

SEQ ID NO: 349843 - protein, 15 aa, Homo sapiens
  CDR3 for alpha chain variable domain of TCR clone 174922 (TRAV13-2, TRAJ10)
CAENRETGGGNKLTF

SEQ ID NO: 349844 - protein, 17 aa, Homo sapiens
  CDR3 for beta chain variable domain of TCR clone 174922 (TRBV28, TRBJ2-5)
CASSRQGGLAGAETQYF

SEQ ID NO: 349845 - protein, 15 aa, Homo sapiens
  CDR3 for alpha chain variable domain of TCR clone 174923 (TRAV8-1, TRAJ4)
CAVIDVSGGYNKLIF

SEQ ID NO: 349846 - protein, 14 aa, Homo sapiens
  CDR3 for beta chain variable domain of TCR clone 174923 (TRBV18, TRBJ2-7)
CASSPRGGAYEQYF

SEQ ID NO: 349847 - protein, 14 aa, Homo sapiens
  CDR3 for alpha chain variable domain of TCR clone 174924 (TRAV16, TRAJ15)
CALSGPQAGTALIF

SEQ ID NO: 349848 - protein, 14 aa, Homo sapiens
  CDR3 for beta chain variable domain of TCR clone 174924 (TRBV19, TRBJ2-2)
CASSTLHRSGELFF

SEQ ID NO: 349849 - protein, 14 aa, Homo sapiens
  CDR3 for alpha chain variable domain of TCR clone 174925 (TRAV1-2, TRAJ16)
CAVNRFSDGQNLLF

SEQ ID NO: 349850 - protein, 13 aa, Homo sapiens
  CDR3 for beta chain variable domain of TCR clone 174925 (TRBV6-6, TRBJ2-7)
CASSPKHLAEQYF

SEQ ID NO: 349851 - protein, 16 aa, Homo sapiens
  CDR3 for alpha chain variable domain of TCR clone 174926 (TRAV26-1, TRAJ48)
IASSDLSNFGNDKLTF

SEQ ID NO: 349852 - protein, 14 aa, Homo sapiens
  CDR3 for beta chain variable domain of TCR clone 174926 (TRBV13, TRBJ2-7)
CASSLKGASYEQYF

SEQ ID NO: 349853 - protein, 14 aa, Homo sapiens
  CDR3 for alpha chain variable domain of TCR clone 174927 (TRAV13-1, TRAJ35)
CAASKGGCGNVLHC

SEQ ID NO: 349854 - protein, 14 aa, Homo sapiens
  CDR3 for beta chain variable domain of TCR clone 174927 (TRBV7-2, TRBJ2-7)
CASSPKTSFYEQYF

SEQ ID NO: 349855 - protein, 14 aa, Homo sapiens
  CDR3 for alpha chain variable domain of TCR clone 174928 (TRAV21, TRAJ4)
CADPGVGGYNKLIF

SEQ ID NO: 349856 - protein, 13 aa, Homo sapiens
  CDR3 for beta chain variable domain of TCR clone 174928 (TRBV7-3, TRBJ2-1)
CASSPGSYNEQFF

SEQ ID NO: 349857 - protein, 14 aa, Homo sapiens
  CDR3 for alpha chain variable domain of TCR clone 174929 (TRAV12-1, TRAJ17)
CVLNYKAAGNKLTF

SEQ ID NO: 349858 - protein, 15 aa, Homo sapiens
  CDR3 for beta chain variable domain of TCR clone 174929 (TRBV7-2, TRBJ2-1)
CASTHGTGIYNEQFF

SEQ ID NO: 349859 - protein, 16 aa, Homo sapiens
  CDR3 for alpha chain variable domain of TCR clone 174930 (TRAV20, TRAJ10)
CAGLRGLTGGGNKLTF

SEQ ID NO: 349860 - protein, 14 aa, Homo sapiens
  CDR3 for beta chain variable domain of TCR clone 174930 (TRBV19, TRBJ1-5)
CASRAPDSFLSQHF

SEQ ID NO: 349861 - protein, 13 aa, Homo sapiens
  CDR3 for alpha chain variable domain of TCR clone 174931 (TRAV27, TRAJ5)
CRSGDTGRRALTF

SEQ ID NO: 349862 - protein, 15 aa, Homo sapiens
  CDR3 for beta chain variable domain of TCR clone 174931 (TRBV19, TRBJ1-2)
CASSVGQVLNYGYTF

SEQ ID NO: 349863 - protein, 14 aa, Homo sapiens
  CDR3 for alpha chain variable domain of TCR clone 174932 (TRAV1-2, TRAJ33)
CAVRAPDSNYRLIW

SEQ ID NO: 349864 - protein, 12 aa, Homo sapiens
  CDR3 for beta chain variable domain of TCR clone 174932 (TRBV12-4, TRBJ2-7)
CASSLGGYEQYF

SEQ ID NO: 349865 - protein, 13 aa, Homo sapiens
  CDR3 for alpha chain variable domain of TCR clone 174933 (TRAV13-1, TRAJ11)
CAASKEGYSTLTF

SEQ ID NO: 349866 - protein, 21 aa, Homo sapiens
  CDR3 for beta chain variable domain of TCR clone 174933 (TRBV23-1, TRBJ2-5)
CASTPPGHGPGGDPVLRARHA

SEQ ID NO: 349867 - protein, 13 aa, Homo sapiens
  CDR3 for alpha chain variable domain of TCR clone 174934 (TRAV8-1, TRAJ23)
CAVTGGQGGKLIF

SEQ ID NO: 349868 - protein, 14 aa, Homo sapiens
  CDR3 for beta chain variable domain of TCR clone 174934 (TRBV20-1, TRBJ1-1)
CSAQTRIGATEAFF

SEQ ID NO: 349869 - protein, 16 aa, Homo sapiens
  CDR3 for alpha chain variable domain of TCR clone 174935 (TRAV8-3, TRAJ28)
CAVGATLGLGVTNSLS

SEQ ID NO: 349870 - protein, 18 aa, Homo sapiens
  CDR3 for beta chain variable domain of TCR clone 174935 (TRBV7-9, TRBJ2-7)
CASSLTTSGSRTWYEQYF

SEQ ID NO: 349871 - protein, 12 aa, Homo sapiens
  CDR3 for alpha chain variable domain of TCR clone 174936 (TRAV12-1, TRAJ34)
CVVAGATDQLIF

SEQ ID NO: 349872 - protein, 12 aa, Homo sapiens
  CDR3 for beta chain variable domain of TCR clone 174936 (TRBV7-9, TRBJ1-1)
CASSVVRGEAFF

SEQ ID NO: 349873 - protein, 14 aa, Homo sapiens
  CDR3 for alpha chain variable domain of TCR clone 174937 (TRAV1-2, TRAJ13)
CAVKHYGGYQKVTF

SEQ ID NO: 349874 - protein, 12 aa, Homo sapiens
  CDR3 for beta chain variable domain of TCR clone 174937 (TRBV7-3, TRBJ2-5)
CASSSPGGTQYF

SEQ ID NO: 349875 - protein, 14 aa, Homo sapiens
  CDR3 for alpha chain variable domain of TCR clone 174938 (TRAV12-2, TRAJ17)
CAALFKSAGNNLTF

SEQ ID NO: 349876 - protein, 16 aa, Homo sapiens
  CDR3 for beta chain variable domain of TCR clone 174938 (TRBV20-1, TRBJ2-2)
CSASASGIPGAGELFF

SEQ ID NO: 349877 - protein, 16 aa, Homo sapiens
  CDR3 for alpha chain variable domain of TCR clone 174939 (TRAV38-1, TRAJ32)
CAFMKGGGGAINKLIF

SEQ ID NO: 349878 - protein, 13 aa, Homo sapiens
  CDR3 for beta chain variable domain of TCR clone 174939 (TRBV20-1, TRBJ2-5)
CSAREAFQETQYF

SEQ ID NO: 349879 - protein, 15 aa, Homo sapiens
  CDR3 for alpha chain variable domain of TCR clone 174940 (TRAV8-2, TRAJ40)
CVVLGTTSGTYKYIF

SEQ ID NO: 349880 - protein, 15 aa, Homo sapiens
  CDR3 for beta chain variable domain of TCR clone 174940 (TRBV5-1, TRBJ2-3)
CASSVTSGSTDTQYF

SEQ ID NO: 349881 - protein, 10 aa, Homo sapiens
  CDR3 for alpha chain variable domain of TCR clone 174941 (TRAV12-2, TRAJ22)
CAVNETQLTF

SEQ ID NO: 349882 - protein, 14 aa, Homo sapiens
  CDR3 for beta chain variable domain of TCR clone 174941 (TRBV13, TRBJ2-5)
CASYRRLAEETQYF

SEQ ID NO: 349883 - protein, 15 aa, Homo sapiens
  CDR3 for alpha chain variable domain of TCR clone 174942 (TRAV3, TRAJ9)
CAVRARNTGGFKNIF

SEQ ID NO: 349884 - protein, 15 aa, Homo sapiens
  CDR3 for beta chain variable domain of TCR clone 174942 (TRBV27, TRBJ1-1)
CASSPYADPYTEAFF

SEQ ID NO: 349885 - protein, 15 aa, Homo sapiens
  CDR3 for alpha chain variable domain of TCR clone 174943 (TRAV13-2, TRAJ45)
CAEHHSGGGADGLTF

SEQ ID NO: 349886 - protein, 16 aa, Homo sapiens
  CDR3 for beta chain variable domain of TCR clone 174943 (TRBV12-4, TRBJ1-4)
CASSLKGIGHGEKLFF

SEQ ID NO: 349887 - protein, 17 aa, Homo sapiens
  CDR3 for alpha chain variable domain of TCR clone 174944 (TRAV16, TRAJ42)
CALSRKLYGGSQGNLIF

SEQ ID NO: 349888 - protein, 13 aa, Homo sapiens
  CDR3 for beta chain variable domain of TCR clone 174944 (TRBV19, TRBJ1-5)
CASSTRRDQPQHF

SEQ ID NO: 349889 - protein, 11 aa, Homo sapiens
  CDR3 for alpha chain variable domain of TCR clone 174945 (TRAV1-1, TRAJ23)
CAVRQGGKLIF

SEQ ID NO: 349890 - protein, 16 aa, Homo sapiens
  CDR3 for beta chain variable domain of TCR clone 174945 (TRBV7-9, TRBJ1-2)
CASSLGFSSGEDGYTF

SEQ ID NO: 349891 - protein, 17 aa, Homo sapiens
  CDR3 for alpha chain variable domain of TCR clone 174946 (TRAV3, TRAJ6)
CAVRDGPRAGGSYIPTS

SEQ ID NO: 349892 - protein, 14 aa, Homo sapiens
  CDR3 for beta chain variable domain of TCR clone 174946 (TRBV4-2, TRBJ2-1)
CASGLDRAYNEQFF

SEQ ID NO: 349893 - protein, 13 aa, Homo sapiens
  CDR3 for alpha chain variable domain of TCR clone 174947 (TRAV8-6, TRAJ8)
CAVCNTGFQKLVF

SEQ ID NO: 349894 - protein, 19 aa, Homo sapiens
  CDR3 for beta chain variable domain of TCR clone 174947 (TRBV28, TRBJ2-5)
CASSSGRTINRPSTSGQAR

SEQ ID NO: 349895 - protein, 17 aa, Homo sapiens
  CDR3 for alpha chain variable domain of TCR clone 174948 (TRAV3, TRAJ6)
CAVRDGPRAGGSYIPTF

SEQ ID NO: 349896 - protein, 12 aa, Homo sapiens
  CDR3 for beta chain variable domain of TCR clone 174948 (TRBV5-4, TRBJ2-7)
CASSLEAYEQYF

SEQ ID NO: 349897 - protein, 16 aa, Homo sapiens
  CDR3 for alpha chain variable domain of TCR clone 174949 (TRAV3, TRAJ37)
YAVRGKGSGNTGKLIF

SEQ ID NO: 349898 - protein, 14 aa, Homo sapiens
  CDR3 for beta chain variable domain of TCR clone 174949 (TRBV6-1, TRBJ1-3)
CASVQGGGGNTIYF

SEQ ID NO: 349899 - protein, 13 aa, Homo sapiens
  CDR3 for alpha chain variable domain of TCR clone 174950 (TRAV8-6, TRAJ16)
CAVSSPDGQKLIF

SEQ ID NO: 349900 - protein, 16 aa, Homo sapiens
  CDR3 for beta chain variable domain of TCR clone 174950 (TRBV5-7, TRBJ2-3)
CASSSLGGAITDTQYF

SEQ ID NO: 349901 - protein, 14 aa, Homo sapiens
  CDR3 for alpha chain variable domain of TCR clone 174951 (TRAV38-1, TRAJ40)
CALRPTSGTYKYIF

SEQ ID NO: 349902 - protein, 15 aa, Homo sapiens
  CDR3 for beta chain variable domain of TCR clone 174951 (TRBV25-1, TRBJ1-4)
CASSPGDSTNEKLFF

SEQ ID NO: 349903 - protein, 13 aa, Homo sapiens
  CDR3 for alpha chain variable domain of TCR clone 174952 (TRAV26-1, TRAJ29)
CIVRRSGNTPLVF

SEQ ID NO: 349904 - protein, 15 aa, Homo sapiens
  CDR3 for beta chain variable domain of TCR clone 174952 (TRBV7-3, TRBJ2-2)
CASSETGQGTGELFF

SEQ ID NO: 349905 - protein, 15 aa, Homo sapiens
  CDR3 for alpha chain variable domain of TCR clone 174953 (TRAV27, TRAJ38)
CAGRVNAGNNRKLIW

SEQ ID NO: 349906 - protein, 13 aa, Homo sapiens
  CDR3 for beta chain variable domain of TCR clone 174953 (TRBV12-5, TRBJ2-3)
CASQNRGTDTQYL

SEQ ID NO: 349907 - protein, 16 aa, Homo sapiens
  CDR3 for alpha chain variable domain of TCR clone 174954 (TRAV12-2, TRAJ52)
CRLANAGGNSYGKLTF

SEQ ID NO: 349908 - protein, 13 aa, Homo sapiens
  CDR3 for beta chain variable domain of TCR clone 174954 (TRBV10-3, TRBJ2-7)
CASKLAVNYEQYF

SEQ ID NO: 349909 - protein, 14 aa, Homo sapiens
  CDR3 for alpha chain variable domain of TCR clone 174955 (TRAV2, TRAJ37)
CAVDFTSNTGKLIF

SEQ ID NO: 349910 - protein, 15 aa, Homo sapiens
  CDR3 for beta chain variable domain of TCR clone 174955 (TRBV6-3, TRBJ2-7)
CASSSPGAVFYEQYF

SEQ ID NO: 349911 - protein, 16 aa, Homo sapiens
  CDR3 for alpha chain variable domain of TCR clone 174956 (TRAV14/DV4, TRAJ53)
CAMREGGGGSNYKLTF

SEQ ID NO: 349912 - protein, 13 aa, Homo sapiens
  CDR3 for beta chain variable domain of TCR clone 174956 (TRBV20-1, TRBJ2-5)
CSAREAFQETQYF

SEQ ID NO: 349913 - protein, 12 aa, Homo sapiens
  CDR3 for alpha chain variable domain of TCR clone 174957 (TRAV30, TRAJ43)
CGTEERGNDMRF

SEQ ID NO: 349914 - protein, 12 aa, Homo sapiens
  CDR3 for beta chain variable domain of TCR clone 174957 (TRBV12-4, TRBJ1-2)
CSSSGSKDGYTF

SEQ ID NO: 349915 - protein, 14 aa, Homo sapiens
  CDR3 for alpha chain variable domain of TCR clone 174958 (TRAV9-2, TRAJ49)
CALSDPGTGNQFYF

SEQ ID NO: 349916 - protein, 16 aa, Homo sapiens
  CDR3 for beta chain variable domain of TCR clone 174958 (TRBV27, TRBJ2-1)
SMNVEPGTSGDNEQFF

SEQ ID NO: 349917 - protein, 14 aa, Homo sapiens
  CDR3 for alpha chain variable domain of TCR clone 174959 (TRAV12-2, TRAJ17)
CAVLFKAAGNKLTF

SEQ ID NO: 349918 - protein, 14 aa, Homo sapiens
  CDR3 for beta chain variable domain of TCR clone 174959 (TRBV15, TRBJ1-2)
CATSRDFDRVGYTC

SEQ ID NO: 349919 - protein, 15 aa, Homo sapiens
  CDR3 for alpha chain variable domain of TCR clone 174960 (TRAV3, TRAJ47)
CAVRDIGEYGNKLVF

SEQ ID NO: 349920 - protein, 15 aa, Homo sapiens
  CDR3 for beta chain variable domain of TCR clone 174960 (TRBV11-2, TRBJ2-1)
CASSKNRGLIYEQFF

SEQ ID NO: 349921 - protein, 14 aa, Homo sapiens
  CDR3 for alpha chain variable domain of TCR clone 174961 (TRAV12-3, TRAJ54)
CAMSALHGAQKLVF

SEQ ID NO: 349922 - protein, 15 aa, Homo sapiens
  CDR3 for beta chain variable domain of TCR clone 174961 (TRBV19, TRBJ2-4)
CASSTPGIAKNIQYF

SEQ ID NO: 349923 - protein, 12 aa, Homo sapiens
  CDR3 for alpha chain variable domain of TCR clone 174962 (TRAV1-2, TRAJ29)
CAVPSGNTPLVF

SEQ ID NO: 349924 - protein, 15 aa, Homo sapiens
  CDR3 for beta chain variable domain of TCR clone 174962 (TRBV5-1, TRBJ2-7)
CASSLNGGPAREQYF

SEQ ID NO: 349925 - protein, 15 aa, Homo sapiens
  CDR3 for alpha chain variable domain of TCR clone 174963 (TRAV12-3, TRAJ27)
CAMRAYNTNAGKSTF

SEQ ID NO: 349926 - protein, 16 aa, Homo sapiens
  CDR3 for beta chain variable domain of TCR clone 174963 (TRBV20-1, TRBJ1-4)
CSAPGQGLLTNEKLFF

SEQ ID NO: 349927 - protein, 16 aa, Homo sapiens
  CDR3 for alpha chain variable domain of TCR clone 174964 (TRAV3, TRAJ10)
CAVRDMRAGGGDKLTF

SEQ ID NO: 349928 - protein, 14 aa, Homo sapiens
  CDR3 for beta chain variable domain of TCR clone 174964 (TRBV5-1, TRBJ2-3)
CASSASGGQDTQYF

SEQ ID NO: 349929 - protein, 21 aa, Homo sapiens
  CDR3 for alpha chain variable domain of TCR clone 174965 (TRAV30, TRAJ43)
GLPAQLLRNLLPIIELNDMRF

SEQ ID NO: 349930 - protein, 14 aa, Homo sapiens
  CDR3 for beta chain variable domain of TCR clone 174965 (TRBV27, TRBJ2-1)
CVSRHLGGGKEQFF

SEQ ID NO: 349931 - protein, 12 aa, Homo sapiens
  CDR3 for alpha chain variable domain of TCR clone 174966 (TRAV12-3, TRAJ17)
CAMTLTGNKLTV

SEQ ID NO: 349932 - protein, 16 aa, Homo sapiens
  CDR3 for beta chain variable domain of TCR clone 174966 (TRBV29-1, TRBJ2-7)
CSVEDAEDGTAYEQYF

SEQ ID NO: 349933 - protein, 18 aa, Homo sapiens
  CDR3 for alpha chain variable domain of TCR clone 174967 (TRAV8-3, TRAJ4)
WVRDPTSNDPGGYNKLIF

SEQ ID NO: 349934 - protein, 13 aa, Homo sapiens
  CDR3 for beta chain variable domain of TCR clone 174967 (TRBV20-1, TRBJ1-2)
CSATGIQGSGYTC

SEQ ID NO: 349935 - protein, 14 aa, Homo sapiens
  CDR3 for alpha chain variable domain of TCR clone 174968 (TRAV39, TRAJ33)
CAVDIKNSNYQLIG

SEQ ID NO: 349936 - protein, 13 aa, Homo sapiens
  CDR3 for beta chain variable domain of TCR clone 174968 (TRBV4-2, TRBJ2-1)
CASSPGTYNEQFF

SEQ ID NO: 349937 - protein, 21 aa, Homo sapiens
  CDR3 for alpha chain variable domain of TCR clone 174969 (TRAV27, TRAJ11)
CAGARVASPLGRGLCFSSLQI

SEQ ID NO: 349938 - protein, 13 aa, Homo sapiens
  CDR3 for beta chain variable domain of TCR clone 174969 (TRBV20-1, TRBJ2-1)
CSASTGGYNEQFF

SEQ ID NO: 349939 - protein, 12 aa, Homo sapiens
  CDR3 for alpha chain variable domain of TCR clone 174970 (TRAV26-1, TRAJ26)
CIVYNYGQNFVF

SEQ ID NO: 349940 - protein, 14 aa, Homo sapiens
  CDR3 for beta chain variable domain of TCR clone 174970 (TRBV19, TRBJ2-1)
CASPTFVLSGEQFF

SEQ ID NO: 349941 - protein, 14 aa, Homo sapiens
  CDR3 for alpha chain variable domain of TCR clone 174971 (TRAV4, TRAJ6)
CLVGEAGGSYIPTF

SEQ ID NO: 349942 - protein, 14 aa, Homo sapiens
  CDR3 for beta chain variable domain of TCR clone 174971 (TRBV7-7, TRBJ2-2)
CATRQDSDTGELFF

SEQ ID NO: 349943 - protein, 16 aa, Homo sapiens
  CDR3 for alpha chain variable domain of TCR clone 174972 (TRAV3, TRAJ37)
CTVRVRGSGNTGKLIF

SEQ ID NO: 349944 - protein, 16 aa, Homo sapiens
  CDR3 for beta chain variable domain of TCR clone 174972 (TRBV19, TRBJ2-1)
CASSKAGPSSYNEQFF

SEQ ID NO: 349945 - protein, 17 aa, Homo sapiens
  CDR3 for alpha chain variable domain of TCR clone 174973 (TRAV3, TRAJ12)
CAVRDGGRMDSSFKLIF

SEQ ID NO: 349946 - protein, 14 aa, Homo sapiens
  CDR3 for beta chain variable domain of TCR clone 174973 (TRBV12-4, TRBJ1-3)
CASTLTGAGNTMYF

SEQ ID NO: 349947 - protein, 14 aa, Homo sapiens
  CDR3 for alpha chain variable domain of TCR clone 174974 (TRAV20, TRAJ44)
CAVQDTGTASKLTF

SEQ ID NO: 349948 - protein, 13 aa, Homo sapiens
  CDR3 for beta chain variable domain of TCR clone 174974 (TRBV29-1, TRBJ1-3)
CSAGTGRGNTIYC

SEQ ID NO: 349949 - protein, 13 aa, Homo sapiens
  CDR3 for alpha chain variable domain of TCR clone 174975 (TRAV12-1, TRAJ31)
CVVVPNNNARLMF

SEQ ID NO: 349950 - protein, 15 aa, Homo sapiens
  CDR3 for beta chain variable domain of TCR clone 174975 (TRBV19, TRBJ1-2)
CASNLGGETPYGYSF

SEQ ID NO: 349951 - protein, 14 aa, Homo sapiens
  CDR3 for alpha chain variable domain of TCR clone 174976 (TRAV1-2, TRAJ16)
CAVNRFSDGQKLLF

SEQ ID NO: 349952 - protein, 13 aa, Homo sapiens
  CDR3 for beta chain variable domain of TCR clone 174976 (TRBV27, TRBJ2-1)
CASRTRGVGEQFF

SEQ ID NO: 349953 - protein, 14 aa, Homo sapiens
  CDR3 for alpha chain variable domain of TCR clone 174977 (TRAV12-2, TRAJ13)
CAVKKTGGYQKVTF

SEQ ID NO: 349954 - protein, 14 aa, Homo sapiens
  CDR3 for beta chain variable domain of TCR clone 174977 (TRBV6-3, TRBJ2-7)
CPQFPGTVFYEQYF

SEQ ID NO: 349955 - protein, 14 aa, Homo sapiens
  CDR3 for alpha chain variable domain of TCR clone 174978 (TRAV23/DV6, TRAJ40)
CAASLTSGTYKYIF

SEQ ID NO: 349956 - protein, 13 aa, Homo sapiens
  CDR3 for beta chain variable domain of TCR clone 174978 (TRBV24-1, TRBJ2-1)
CATSAGPYNEQFF

SEQ ID NO: 349957 - protein, 17 aa, Homo sapiens
  CDR3 for alpha chain variable domain of TCR clone 174979 (TRAV38-2/DV8, TRAJ57)
CAYRSVLTQGGSEKLVF

SEQ ID NO: 349958 - protein, 16 aa, Homo sapiens
  CDR3 for beta chain variable domain of TCR clone 174979 (TRBV7-3, TRBJ2-2)
CASSFKRGTLSGELFF

SEQ ID NO: 349959 - protein, 14 aa, Homo sapiens
  CDR3 for alpha chain variable domain of TCR clone 174980 (TRAV20, TRAJ56)
CAVQFGGANSKLTF

SEQ ID NO: 349960 - protein, 16 aa, Homo sapiens
  CDR3 for beta chain variable domain of TCR clone 174980 (TRBV20-1, TRBJ2-1)
CSARDRLKSLYNEQFF

SEQ ID NO: 349961 - protein, 12 aa, Homo sapiens
  CDR3 for alpha chain variable domain of TCR clone 174981 (TRAV1-2, TRAJ37)
CAFPGNTGKLIF

SEQ ID NO: 349962 - protein, 15 aa, Homo sapiens
  CDR3 for beta chain variable domain of TCR clone 174981 (TRBV6-3, TRBJ2-2)
CASSFLATLTGELFF

SEQ ID NO: 349963 - protein, 11 aa, Homo sapiens
  CDR3 for alpha chain variable domain of TCR clone 174982 (TRAV16, TRAJ42)
CALASQGNLIF

SEQ ID NO: 349964 - protein, 11 aa, Homo sapiens
  CDR3 for beta chain variable domain of TCR clone 174982 (TRBV19, TRBJ1-1)
CASSIGSEAFF

SEQ ID NO: 349965 - protein, 11 aa, Homo sapiens
  CDR3 for alpha chain variable domain of TCR clone 174983 (TRAV16, TRAJ29)
WAPSGNTPLVL

SEQ ID NO: 349966 - protein, 15 aa, Homo sapiens
  CDR3 for beta chain variable domain of TCR clone 174983 (TRBV5-7, TRBJ2-7)
CASSPYFEGSYEQYF

SEQ ID NO: 349967 - protein, 15 aa, Homo sapiens
  CDR3 for alpha chain variable domain of TCR clone 174984 (TRAV12-2, TRAJ43)
CAFDMRFGAGTRLTV

SEQ ID NO: 349968 - protein, 14 aa, Homo sapiens
  CDR3 for beta chain variable domain of TCR clone 174984 (TRBV11-2, TRBJ2-5)
CASSRTGGIETQYF

SEQ ID NO: 349969 - protein, 13 aa, Homo sapiens
  CDR3 for alpha chain variable domain of TCR clone 174985 (TRAV17, TRAJ40)
CAGALGGTYKYIF

SEQ ID NO: 349970 - protein, 12 aa, Homo sapiens
  CDR3 for beta chain variable domain of TCR clone 174985 (TRBV11-2, TRBJ1-2)
CASSLDTGAQTM

SEQ ID NO: 349971 - protein, 11 aa, Homo sapiens
  CDR3 for alpha chain variable domain of TCR clone 174986 (TRAV17, TRAJ9)
CGFTGGFKTIF

SEQ ID NO: 349972 - protein, 14 aa, Homo sapiens
  CDR3 for beta chain variable domain of TCR clone 174986 (TRBV11-2, TRBJ2-5)
CASSRTGVIETQYF

SEQ ID NO: 349973 - protein, 18 aa, Homo sapiens
  CDR3 for alpha chain variable domain of TCR clone 174987 (TRAV6, TRAJ30)
CALELTRSSLEKGHDFIF

SEQ ID NO: 349974 - protein, 15 aa, Homo sapiens
  CDR3 for beta chain variable domain of TCR clone 174987 (TRBV20-1, TRBJ2-2)
CSAIPGQSNTGELFF

SEQ ID NO: 349975 - protein, 13 aa, Homo sapiens
  CDR3 for alpha chain variable domain of TCR clone 174988 (TRAV12-3, TRAJ13)
CAMTSGGYQKVTF

SEQ ID NO: 349976 - protein, 13 aa, Homo sapiens
  CDR3 for beta chain variable domain of TCR clone 174988 (TRBV28, TRBJ2-7)
CASKAGGVYEQYF

SEQ ID NO: 349977 - protein, 17 aa, Homo sapiens
  CDR3 for alpha chain variable domain of TCR clone 174989 (TRAV3, TRAJ6)
CAVRDGPRAGGSYIPTF

SEQ ID NO: 349978 - protein, 18 aa, Homo sapiens
  CDR3 for beta chain variable domain of TCR clone 174989 (TRBV7-9, TRBJ2-7)
CASSLTTSGSRTWYGQYF

SEQ ID NO: 349979 - protein, 16 aa, Homo sapiens
  CDR3 for alpha chain variable domain of TCR clone 174990 (TRAV3, TRAJ37)
CAVRPHGSGNTGTLIF

SEQ ID NO: 349980 - protein, 14 aa, Homo sapiens
  CDR3 for beta chain variable domain of TCR clone 174990 (TRBV25-1, TRBJ1-1)
CAGTHLGGNTEAFF

SEQ ID NO: 349981 - protein, 16 aa, Homo sapiens
  CDR3 for alpha chain variable domain of TCR clone 174991 (TRAV26-2, TRAJ52)
CIRGPAGGTSYGKLTF

SEQ ID NO: 349982 - protein, 15 aa, Homo sapiens
  CDR3 for beta chain variable domain of TCR clone 174991 (TRBV20-1, TRBJ1-1)
CSASRGVTGNTEAFV

SEQ ID NO: 349983 - protein, 16 aa, Homo sapiens
  CDR3 for alpha chain variable domain of TCR clone 174992 (TRAV4, TRAJ22)
CLVGDLYSGSARQLTF

SEQ ID NO: 349984 - protein, 16 aa, Homo sapiens
  CDR3 for beta chain variable domain of TCR clone 174992 (TRBV7-9, TRBJ2-3)
CASRTWREVGTDTQYF

SEQ ID NO: 349985 - protein, 13 aa, Homo sapiens
  CDR3 for alpha chain variable domain of TCR clone 174993 (TRAV1-2, TRAJ9)
CAVLNTGGFKTIF

SEQ ID NO: 349986 - protein, 14 aa, Homo sapiens
  CDR3 for beta chain variable domain of TCR clone 174993 (TRBV19, TRBJ2-1)
CASPTCVLSGEQFF

SEQ ID NO: 349987 - protein, 15 aa, Homo sapiens
  CDR3 for alpha chain variable domain of TCR clone 174994 (TRAV17, TRAJ23)
CATDAEDNQGGKLIF

SEQ ID NO: 349988 - protein, 14 aa, Homo sapiens
  CDR3 for beta chain variable domain of TCR clone 174994 (TRBV2, TRBJ2-1)
CTSVPSEGYNEQFF

SEQ ID NO: 349989 - protein, 12 aa, Homo sapiens
  CDR3 for alpha chain variable domain of TCR clone 174995 (TRAV12-2, TRAJ10)
WGVTGGGNKLTV

SEQ ID NO: 349990 - protein, 14 aa, Homo sapiens
  CDR3 for beta chain variable domain of TCR clone 174995 (TRBV19, TRBJ2-3)
CASSAPRGTDTQYF

SEQ ID NO: 349991 - protein, 14 aa, Homo sapiens
  CDR3 for alpha chain variable domain of TCR clone 174996 (TRAV12-3, TRAJ58)
CTMSTETSGSRLTF

SEQ ID NO: 349992 - protein, 12 aa, Homo sapiens
  CDR3 for beta chain variable domain of TCR clone 174996 (TRBV7-8, TRBJ2-7)
CASSLGDREQYF

SEQ ID NO: 349993 - protein, 19 aa, Homo sapiens
  CDR3 for alpha chain variable domain of TCR clone 174997 (TRAV16, TRAJ26)
CAPEELWSEFCLWSRNQIF

SEQ ID NO: 349994 - protein, 13 aa, Homo sapiens
  CDR3 for beta chain variable domain of TCR clone 174997 (TRBV10-3, TRBJ2-7)
CASKLAVNYEQYF

SEQ ID NO: 349995 - protein, 19 aa, Homo sapiens
  CDR3 for alpha chain variable domain of TCR clone 174998 (TRAV26-1, TRAJ52)
YIVRAHRNAGGTSYGKLTF

SEQ ID NO: 349996 - protein, 14 aa, Homo sapiens
  CDR3 for beta chain variable domain of TCR clone 174998 (TRBV4-1, TRBJ2-2)
CASSQAVNTGELFF

SEQ ID NO: 349997 - protein, 20 aa, Homo sapiens
  CDR3 for alpha chain variable domain of TCR clone 174999 (TRAV13-1, )
CAASPMDIQNPDPAVYQLRD

SEQ ID NO: 349998 - protein, 13 aa, Homo sapiens
  CDR3 for beta chain variable domain of TCR clone 174999 (TRBV20-1, TRBJ2-2)
CSASAAGTGELIF

SEQ ID NO: 349999 - protein, 12 aa, Homo sapiens
  CDR3 for alpha chain variable domain of TCR clone 175000 (TRAV8-3, TRAJ26)
CAGDNYGQNFVF

SEQ ID NO: 350000 - protein, 11 aa, Homo sapiens
  CDR3 for beta chain variable domain of TCR clone 175000 (TRBV20-1, TRBJ2-1)
CSARARKEQFF

SEQ ID NO: 350001 - protein, 16 aa, Homo sapiens
  CDR3 for alpha chain variable domain of TCR clone 175001 (TRAV12-3, TRAJ53)
CAMSPGRGGSNYKLPF

SEQ ID NO: 350002 - protein, 11 aa, Homo sapiens
  CDR3 for beta chain variable domain of TCR clone 175001 (TRBV29-1, TRBJ2-5)
CSEDRTGTQYF

SEQ ID NO: 350003 - protein, 16 aa, Homo sapiens
  CDR3 for alpha chain variable domain of TCR clone 175002 (TRAV30, TRAJ24)
SGTEIVDADSWGKFQF

SEQ ID NO: 350004 - protein, 19 aa, Homo sapiens
  CDR3 for beta chain variable domain of TCR clone 175002 (TRBV25-1, TRBJ2-2)
CAILVYRVDRGRKTGELFF

SEQ ID NO: 350005 - protein, 15 aa, Homo sapiens
  CDR3 for alpha chain variable domain of TCR clone 175003 (TRAV23/DV6, TRAJ18)
CAARYRGPTLGRLYF

SEQ ID NO: 350006 - protein, 15 aa, Homo sapiens
  CDR3 for beta chain variable domain of TCR clone 175003 (TRBV20-1, TRBJ2-7)
CSARDRVSGMDEQYF

SEQ ID NO: 350007 - protein, 12 aa, Homo sapiens
  CDR3 for alpha chain variable domain of TCR clone 175004 (TRAV8-4, TRAJ37)
CAVRSNTGKLLF

SEQ ID NO: 350008 - protein, 16 aa, Homo sapiens
  CDR3 for beta chain variable domain of TCR clone 175004 (TRBV7-2, TRBJ2-3)
CASSLVGDASTDTQYF

SEQ ID NO: 350009 - protein, 14 aa, Homo sapiens
  CDR3 for alpha chain variable domain of TCR clone 175005 (TRAV13-1, TRAJ16)
CAAAYFFRWPEAAL

SEQ ID NO: 350010 - protein, 14 aa, Homo sapiens
  CDR3 for beta chain variable domain of TCR clone 175005 (TRBV4-1, TRBJ2-2)
CASSQAVNTGELFF

SEQ ID NO: 350011 - protein, 16 aa, Homo sapiens
  CDR3 for alpha chain variable domain of TCR clone 175006 (TRAV20, TRAJ53)
CAVQAESGGSNYKLTF

SEQ ID NO: 350012 - protein, 14 aa, Homo sapiens
  CDR3 for beta chain variable domain of TCR clone 175006 (TRBV20-1, TRBJ2-4)
CSASGRVGENIQYF

SEQ ID NO: 350013 - protein, 13 aa, Homo sapiens
  CDR3 for alpha chain variable domain of TCR clone 175007 (TRAV36/DV7, TRAJ38)
WVANAGNNRKRIW

SEQ ID NO: 350014 - protein, 14 aa, Homo sapiens
  CDR3 for beta chain variable domain of TCR clone 175007 (TRBV7-2, TRBJ2-7)
CASSLRWEVNEQYF

SEQ ID NO: 350015 - protein, 14 aa, Homo sapiens
  CDR3 for alpha chain variable domain of TCR clone 175008 (TRAV2, TRAJ37)
CAVDLLATQANQSL

SEQ ID NO: 350016 - protein, 15 aa, Homo sapiens
  CDR3 for beta chain variable domain of TCR clone 175008 (TRBV20-1, TRBJ1-1)
CSASRGVTGNTEAFF

SEQ ID NO: 350017 - protein, 17 aa, Homo sapiens
  CDR3 for alpha chain variable domain of TCR clone 175009 (TRAV3, TRAJ6)
CAVRDGPRAGGSYIPKF

SEQ ID NO: 350018 - protein, 13 aa, Homo sapiens
  CDR3 for beta chain variable domain of TCR clone 175009 (TRBV4-1, TRBJ2-2)
CASSQENTGELFF

SEQ ID NO: 350019 - protein, 13 aa, Homo sapiens
  CDR3 for alpha chain variable domain of TCR clone 175010 (TRAV39, TRAJ48)
CAAVNLGNEKFTF

SEQ ID NO: 350020 - protein, 12 aa, Homo sapiens
  CDR3 for beta chain variable domain of TCR clone 175010 (TRBV5-5, TRBJ2-5)
CASSYFGETQYF

SEQ ID NO: 350021 - protein, 14 aa, Homo sapiens
  CDR3 for alpha chain variable domain of TCR clone 175011 (TRAV1-2, TRAJ8)
CAGREDTGFQKLVF

SEQ ID NO: 350022 - protein, 15 aa, Homo sapiens
  CDR3 for beta chain variable domain of TCR clone 175011 (TRBV28, TRBJ2-6)
CASSLAGSGANVLTF

SEQ ID NO: 350023 - protein, 14 aa, Homo sapiens
  CDR3 for alpha chain variable domain of TCR clone 175012 (TRAV38-1, TRAJ29)
CAFITPSGNTPLVF

SEQ ID NO: 350024 - protein, 15 aa, Homo sapiens
  CDR3 for beta chain variable domain of TCR clone 175012 (TRBV7-9, TRBJ2-7)
CASSLDLQGPYEQYF

SEQ ID NO: 350025 - protein, 14 aa, Homo sapiens
  CDR3 for alpha chain variable domain of TCR clone 175013 (TRAV16, TRAJ22)
CALRGQGSARQLTF

SEQ ID NO: 350026 - protein, 15 aa, Homo sapiens
  CDR3 for beta chain variable domain of TCR clone 175013 (TRBV20-1, TRBJ2-7)
CSSRDRVSGMDEQYF

SEQ ID NO: 350027 - protein, 12 aa, Homo sapiens
  CDR3 for alpha chain variable domain of TCR clone 175014 (TRAV12-1, TRAJ40)
CVVNGETYKYIF

SEQ ID NO: 350028 - protein, 13 aa, Homo sapiens
  CDR3 for beta chain variable domain of TCR clone 175014 (TRBV4-1, TRBJ2-2)
CASSQENTGELFF

SEQ ID NO: 350029 - protein, 13 aa, Homo sapiens
  CDR3 for alpha chain variable domain of TCR clone 175015 (TRAV30, TRAJ24)
CGTVTDSWGKLQF

SEQ ID NO: 350030 - protein, 13 aa, Homo sapiens
  CDR3 for beta chain variable domain of TCR clone 175015 (TRBV19, TRBJ1-2)
CASSVPGQDGYTF

SEQ ID NO: 350031 - protein, 14 aa, Homo sapiens
  CDR3 for alpha chain variable domain of TCR clone 175016 (TRAV12-2, TRAJ13)
CAVKKTGGYQQVTF

SEQ ID NO: 350032 - protein, 13 aa, Homo sapiens
  CDR3 for beta chain variable domain of TCR clone 175016 (TRBV19, TRBJ1-2)
CASSVPGQDGYTF

SEQ ID NO: 350033 - protein, 13 aa, Homo sapiens
  CDR3 for alpha chain variable domain of TCR clone 175017 (TRAV16, TRAJ30)
CALAQNRDDKTIF

SEQ ID NO: 350034 - protein, 15 aa, Homo sapiens
  CDR3 for beta chain variable domain of TCR clone 175017 (TRBV2, TRBJ1-1)
CASTEPGQGASGAFF

SEQ ID NO: 350035 - protein, 16 aa, Homo sapiens
  CDR3 for alpha chain variable domain of TCR clone 175018 (TRAV16, TRAJ52)
CALSAAGGTSYGKLTF

SEQ ID NO: 350036 - protein, 16 aa, Homo sapiens
  CDR3 for beta chain variable domain of TCR clone 175018 (TRBV7-2, TRBJ2-6)
CAILSGVSSGANVLTF

SEQ ID NO: 350037 - protein, 14 aa, Homo sapiens
  CDR3 for alpha chain variable domain of TCR clone 175019 (TRAV8-3, TRAJ9)
CAVVYNTGGFKTIF

SEQ ID NO: 350038 - protein, 16 aa, Homo sapiens
  CDR3 for beta chain variable domain of TCR clone 175019 (TRBV27, TRBJ2-2)
CASSSSGVSNTGELFF

SEQ ID NO: 350039 - protein, 14 aa, Homo sapiens
  CDR3 for alpha chain variable domain of TCR clone 175020 (TRAV2, TRAJ37)
CAVDFTSNTGKLIF

SEQ ID NO: 350040 - protein, 20 aa, Homo sapiens
  CDR3 for beta chain variable domain of TCR clone 175020 (TRBV7-8, TRBJ2-2)
CASSHLFPGPTVHITGELFF

SEQ ID NO: 350041 - protein, 16 aa, Homo sapiens
  CDR3 for alpha chain variable domain of TCR clone 175021 (TRAV30, TRAJ24)
CGTEIVDADSWGKFQF

SEQ ID NO: 350042 - protein, 12 aa, Homo sapiens
  CDR3 for beta chain variable domain of TCR clone 175021 (TRBV28, TRBJ2-7)
CASTGNHYEQYF

SEQ ID NO: 350043 - protein, 14 aa, Homo sapiens
  CDR3 for alpha chain variable domain of TCR clone 175022 (TRAV1-2, TRAJ16)
WAVNRFSDGQKLLF

SEQ ID NO: 350044 - protein, 16 aa, Homo sapiens
  CDR3 for beta chain variable domain of TCR clone 175022 (TRBV11-2, TRBJ1-2)
CASSLDTGGADYGYTF

SEQ ID NO: 350045 - protein, 13 aa, Homo sapiens
  CDR3 for alpha chain variable domain of TCR clone 175023 (TRAV12-2, TRAJ49)
CAVNMRTGNQFFF

SEQ ID NO: 350046 - protein, 11 aa, Homo sapiens
  CDR3 for beta chain variable domain of TCR clone 175023 (TRBV5-5, TRBJ1-1)
CASSLGVEAFF

SEQ ID NO: 350047 - protein, 18 aa, Homo sapiens
  CDR3 for alpha chain variable domain of TCR clone 175024 (TRAV12-3, TRAJ52)
CAMSRTNAGGPSYGKLTF

SEQ ID NO: 350048 - protein, 17 aa, Homo sapiens
  CDR3 for beta chain variable domain of TCR clone 175024 (TRBV7-3, TRBJ2-3)
CASSLMKRVRGADTQYF

SEQ ID NO: 350049 - protein, 14 aa, Homo sapiens
  CDR3 for alpha chain variable domain of TCR clone 175025 (TRAV30, TRAJ26)
CGTEIVSYGQNFVF

SEQ ID NO: 350050 - protein, 15 aa, Homo sapiens
  CDR3 for beta chain variable domain of TCR clone 175025 (TRBV11-2, TRBJ2-1)
CASSVTSGGYNEQFF

SEQ ID NO: 350051 - protein, 13 aa, Homo sapiens
  CDR3 for alpha chain variable domain of TCR clone 175026 (TRAV30, TRAJ49)
CGTESQPVTSSIL

SEQ ID NO: 350052 - protein, 13 aa, Homo sapiens
  CDR3 for beta chain variable domain of TCR clone 175026 (TRBV7-9, TRBJ1-2)
CASSLKQNYGYTF

SEQ ID NO: 350053 - protein, 17 aa, Homo sapiens
  CDR3 for alpha chain variable domain of TCR clone 175027 (TRAV4, TRAJ13)
CLVVVQGSSGGYQKVTF

SEQ ID NO: 350054 - protein, 18 aa, Homo sapiens
  CDR3 for beta chain variable domain of TCR clone 175027 (TRBV15, TRBJ2-3)
CATSRDGARSWDADTQYF

SEQ ID NO: 350055 - protein, 16 aa, Homo sapiens
  CDR3 for alpha chain variable domain of TCR clone 175028 (TRAV30, TRAJ24)
CGTEIVDADSWGKFQV

SEQ ID NO: 350056 - protein, 15 aa, Homo sapiens
  CDR3 for beta chain variable domain of TCR clone 175028 (TRBV7-9, TRBJ1-4)
CASSARTGGNEKLFF

SEQ ID NO: 350057 - protein, 12 aa, Homo sapiens
  CDR3 for alpha chain variable domain of TCR clone 175029 (TRAV3, TRAJ43)
CAVRDPNNDMRF

SEQ ID NO: 350058 - protein, 15 aa, Homo sapiens
  CDR3 for beta chain variable domain of TCR clone 175029 (TRBV5-1, TRBJ2-3)
CASSVTSGSTDTQCF

SEQ ID NO: 350059 - protein, 18 aa, Homo sapiens
  CDR3 for alpha chain variable domain of TCR clone 175030 (TRAV3, TRAJ32)
CAVRDIRGYVVATNKLIF

SEQ ID NO: 350060 - protein, 15 aa, Homo sapiens
  CDR3 for beta chain variable domain of TCR clone 175030 (TRBV12-4, TRBJ2-2)
CASSLGVRHTGELFF

SEQ ID NO: 350061 - protein, 15 aa, Homo sapiens
  CDR3 for alpha chain variable domain of TCR clone 175031 (TRAV8-4, TRAJ48)
CAVSAGYFGNEKLTF

SEQ ID NO: 350062 - protein, 12 aa, Homo sapiens
  CDR3 for beta chain variable domain of TCR clone 175031 (TRBV3-1, TRBJ2-5)
CASSQRGETQYF

SEQ ID NO: 350063 - protein, 16 aa, Homo sapiens
  CDR3 for alpha chain variable domain of TCR clone 175032 (TRAV22, TRAJ45)
CAVERGKRGGPDGLTF

SEQ ID NO: 350064 - protein, 11 aa, Homo sapiens
  CDR3 for beta chain variable domain of TCR clone 175032 (TRBV29-1, TRBJ2-5)
CSEDRTGTQYF

SEQ ID NO: 350065 - protein, 11 aa, Homo sapiens
  CDR3 for alpha chain variable domain of TCR clone 175033 (TRAV12-2, TRAJ29)
CAVTLRSPLVF

SEQ ID NO: 350066 - protein, 12 aa, Homo sapiens
  CDR3 for beta chain variable domain of TCR clone 175033 (TRBV19, TRBJ2-5)
CASSLGGETQYF

SEQ ID NO: 350067 - protein, 14 aa, Homo sapiens
  CDR3 for alpha chain variable domain of TCR clone 175034 (TRAV2, TRAJ9)
CAVEDRSGGFKTIL

SEQ ID NO: 350068 - protein, 14 aa, Homo sapiens
  CDR3 for beta chain variable domain of TCR clone 175034 (TRBV7-2, TRBJ2-7)
CASSPKTSFYEQYF

SEQ ID NO: 350069 - protein, 10 aa, Homo sapiens
  CDR3 for alpha chain variable domain of TCR clone 175035 (TRAV30, TRAJ48)
CGIGNEKLTF

SEQ ID NO: 350070 - protein, 16 aa, Homo sapiens
  CDR3 for beta chain variable domain of TCR clone 175035 (TRBV19, TRBJ1-5)
CASSTWTGGGNQPQNF

SEQ ID NO: 350071 - protein, 12 aa, Homo sapiens
  CDR3 for alpha chain variable domain of TCR clone 175036 (TRAV2, TRAJ24)
CAATDSWGKFQF

SEQ ID NO: 350072 - protein, 14 aa, Homo sapiens
  CDR3 for beta chain variable domain of TCR clone 175036 (TRBV4-2, TRBJ2-1)
CASGPDRAYNEQFF

SEQ ID NO: 350073 - protein, 13 aa, Homo sapiens
  CDR3 for alpha chain variable domain of TCR clone 175037 (TRAV1-2, TRAJ9)
CAALNTGGLKTIF

SEQ ID NO: 350074 - protein, 13 aa, Homo sapiens
  CDR3 for beta chain variable domain of TCR clone 175037 (TRBV15, TRBJ1-6)
CATSGGLNSPLHF

SEQ ID NO: 350075 - protein, 15 aa, Homo sapiens
  CDR3 for alpha chain variable domain of TCR clone 175038 (TRAV26-1, TRAJ24)
CINVGATDSWGKLQF

SEQ ID NO: 350076 - protein, 18 aa, Homo sapiens
  CDR3 for beta chain variable domain of TCR clone 175038 (TRBV11-2, TRBJ2-3)
CASSLGGASRGAPNTQYF

SEQ ID NO: 350077 - protein, 15 aa, Homo sapiens
  CDR3 for alpha chain variable domain of TCR clone 175039 (TRAV8-3, TRAJ27)
CAVGPSKANAGKSTF

SEQ ID NO: 350078 - protein, 13 aa, Homo sapiens
  CDR3 for beta chain variable domain of TCR clone 175039 (TRBV12-5, TRBJ1-2)
CASGVRTGNGYTF

SEQ ID NO: 350079 - protein, 14 aa, Homo sapiens
  CDR3 for alpha chain variable domain of TCR clone 175040 (TRAV29/DV5, TRAJ49)
CAASLSNTGNQFYF

SEQ ID NO: 350080 - protein, 16 aa, Homo sapiens
  CDR3 for beta chain variable domain of TCR clone 175040 (TRBV9, TRBJ2-5)
CASRGRLGEGRKTQYF

SEQ ID NO: 350081 - protein, 16 aa, Homo sapiens
  CDR3 for alpha chain variable domain of TCR clone 175041 (TRAV13-1, TRAJ18)
CAASRMRGSTLGRLYF

SEQ ID NO: 350082 - protein, 16 aa, Homo sapiens
  CDR3 for beta chain variable domain of TCR clone 175041 (TRBV12-5, TRBJ2-5)
CASGPRTGGNQETQYF

SEQ ID NO: 350083 - protein, 12 aa, Homo sapiens
  CDR3 for alpha chain variable domain of TCR clone 175042 (TRAV13-1, TRAJ27)
CSAHTNAGKSTF

SEQ ID NO: 350084 - protein, 15 aa, Homo sapiens
  CDR3 for beta chain variable domain of TCR clone 175042 (TRBV7-9, TRBJ1-6)
CASSSPGRGNSPLHF

SEQ ID NO: 350085 - protein, 14 aa, Homo sapiens
  CDR3 for alpha chain variable domain of TCR clone 175043 (TRAV21, TRAJ28)
YAVGSGAGSYQLTF

SEQ ID NO: 350086 - protein, 20 aa, Homo sapiens
  CDR3 for beta chain variable domain of TCR clone 175043 (TRBV7-8, TRBJ2-2)
CASSHLFPGPTIHITGELFF

SEQ ID NO: 350087 - protein, 15 aa, Homo sapiens
  CDR3 for alpha chain variable domain of TCR clone 175044 (TRAV26-1, TRAJ29)
CIVRVEGSGNTPLVF

SEQ ID NO: 350088 - protein, 15 aa, Homo sapiens
  CDR3 for beta chain variable domain of TCR clone 175044 (TRBV7-9, TRBJ1-5)
CASSQGHQPKQTQYF

SEQ ID NO: 350089 - protein, 13 aa, Homo sapiens
  CDR3 for alpha chain variable domain of TCR clone 175045 (TRAV13-1, TRAJ5)
CAASDTGRRAFTF

SEQ ID NO: 350090 - protein, 14 aa, Homo sapiens
  CDR3 for beta chain variable domain of TCR clone 175045 (TRBV4-2, TRBJ2-1)
CASGLDRAYNEQFF

SEQ ID NO: 350091 - protein, 14 aa, Homo sapiens
  CDR3 for alpha chain variable domain of TCR clone 175046 (TRAV12-2, TRAJ13)
CAVKKTGGYQKVTF

SEQ ID NO: 350092 - protein, 14 aa, Homo sapiens
  CDR3 for beta chain variable domain of TCR clone 175046 (TRBV6-1, TRBJ2-1)
CASAKDGFYNEQFF

SEQ ID NO: 350093 - protein, 15 aa, Homo sapiens
  CDR3 for alpha chain variable domain of TCR clone 175047 (TRAV23/DV6, TRAJ18)
CAASFRGPTLGRRYF

SEQ ID NO: 350094 - protein, 13 aa, Homo sapiens
  CDR3 for beta chain variable domain of TCR clone 175047 (TRBV28, TRBJ2-7)
RAILDRAGGEQYF

SEQ ID NO: 350095 - protein, 16 aa, Homo sapiens
  CDR3 for alpha chain variable domain of TCR clone 175048 (TRAV13-1, TRAJ48)
CATSIFGNFGNEKLTF

SEQ ID NO: 350096 - protein, 16 aa, Homo sapiens
  CDR3 for beta chain variable domain of TCR clone 175048 (TRBV7-2, TRBJ2-6)
CASSERRASGTNVLTF

SEQ ID NO: 350097 - protein, 15 aa, Homo sapiens
  CDR3 for alpha chain variable domain of TCR clone 175049 (TRAV3, TRAJ47)
GAVRDIGEYGNKLVF

SEQ ID NO: 350098 - protein, 14 aa, Homo sapiens
  CDR3 for beta chain variable domain of TCR clone 175049 (TRBV13, TRBJ2-5)
CGSSLERVGETQYF

SEQ ID NO: 350099 - protein, 13 aa, Homo sapiens
  CDR3 for alpha chain variable domain of TCR clone 175050 (TRAV29/DV5, TRAJ31)
CAASRNNNARLMF

SEQ ID NO: 350100 - protein, 12 aa, Homo sapiens
  CDR3 for beta chain variable domain of TCR clone 175050 (TRBV14, TRBJ1-1)
CASSELKGLAFF

SEQ ID NO: 350101 - protein, 16 aa, Homo sapiens
  CDR3 for alpha chain variable domain of TCR clone 175051 (TRAV8-3, TRAJ8)
CAVPRDWNTGFQKLVF

SEQ ID NO: 350102 - protein, 15 aa, Homo sapiens
  CDR3 for beta chain variable domain of TCR clone 175051 (TRBV6-1, TRBJ2-6)
CASSSRPSGANALTF

SEQ ID NO: 350103 - protein, 14 aa, Homo sapiens
  CDR3 for alpha chain variable domain of TCR clone 175052 (TRAV2, TRAJ3)
CAVEDNSSASKIIF

SEQ ID NO: 350104 - protein, 16 aa, Homo sapiens
  CDR3 for beta chain variable domain of TCR clone 175052 (TRBV7-3, TRBJ2-1)
CASSLEGYRSYNEQFF

SEQ ID NO: 350105 - protein, 12 aa, Homo sapiens
  CDR3 for alpha chain variable domain of TCR clone 175053 (TRAV12-3, TRAJ17)
CAMTPTGNKLTF

SEQ ID NO: 350106 - protein, 15 aa, Homo sapiens
  CDR3 for beta chain variable domain of TCR clone 175053 (TRBV20-1, TRBJ2-7)
CSARDWVSGMDEQYF

SEQ ID NO: 350107 - protein, 23 aa, Homo sapiens
  CDR3 for alpha chain variable domain of TCR clone 175054 (TRAV26-1, TRAJ38)
CIADNAGNNHIQNPDPAVYQLRD

SEQ ID NO: 350108 - protein, 12 aa, Homo sapiens
  CDR3 for beta chain variable domain of TCR clone 175054 (TRBV27, TRBJ2-7)
CASSGGFYEQYF

SEQ ID NO: 350109 - protein, 13 aa, Homo sapiens
  CDR3 for alpha chain variable domain of TCR clone 175055 (TRAV3, TRAJ27)
CAVRPLGAGESTC

SEQ ID NO: 350110 - protein, 13 aa, Homo sapiens
  CDR3 for beta chain variable domain of TCR clone 175055 (TRBV7-9, TRBJ2-3)
CASSPGSTDTQYF

SEQ ID NO: 350111 - protein, 14 aa, Homo sapiens
  CDR3 for alpha chain variable domain of TCR clone 175056 (TRAV13-2, TRAJ43)
CAEIPTYNNNDMRF

SEQ ID NO: 350112 - protein, 14 aa, Homo sapiens
  CDR3 for beta chain variable domain of TCR clone 175056 (TRBV12-4, TRBJ1-1)
CASSLGTGGTEAFF

SEQ ID NO: 350113 - protein, 16 aa, Homo sapiens
  CDR3 for alpha chain variable domain of TCR clone 175057 (TRAV3, TRAJ10)
CAVRDMRAGGGNKLTF

SEQ ID NO: 350114 - protein, 13 aa, Homo sapiens
  CDR3 for beta chain variable domain of TCR clone 175057 (TRBV7-6, TRBJ1-2)
CASSLVADYGYTF

SEQ ID NO: 350115 - protein, 13 aa, Homo sapiens
  CDR3 for alpha chain variable domain of TCR clone 175058 (TRAV6, TRAJ4)
CALLRGGYTKLIF

SEQ ID NO: 350116 - protein, 16 aa, Homo sapiens
  CDR3 for beta chain variable domain of TCR clone 175058 (TRBV5-1, TRBJ2-1)
CASSIRSGGSYNEQFF

SEQ ID NO: 350117 - protein, 16 aa, Homo sapiens
  CDR3 for alpha chain variable domain of TCR clone 175059 (TRAV8-3, TRAJ8)
CAVPRDGNTGFQKLVF

SEQ ID NO: 350118 - protein, 15 aa, Homo sapiens
  CDR3 for beta chain variable domain of TCR clone 175059 (TRBV6-1, TRBJ2-6)
SASSSRPSGANVLTF

SEQ ID NO: 350119 - protein, 18 aa, Homo sapiens
  CDR3 for alpha chain variable domain of TCR clone 175060 (TRAV26-1, TRAJ56)
CIVRVASRVTGANSKMTF

SEQ ID NO: 350120 - protein, 15 aa, Homo sapiens
  CDR3 for beta chain variable domain of TCR clone 175060 (TRBV7-9, TRBJ2-5)
CASSDTGRGRETQYF

SEQ ID NO: 350121 - protein, 14 aa, Homo sapiens
  CDR3 for alpha chain variable domain of TCR clone 175061 (TRAV17, TRAJ57)
CATEAQGGSEKLVF

SEQ ID NO: 350122 - protein, 15 aa, Homo sapiens
  CDR3 for beta chain variable domain of TCR clone 175061 (TRBV7-2, TRBJ2-5)
CASSLRGASGETQYF

SEQ ID NO: 350123 - protein, 14 aa, Homo sapiens
  CDR3 for alpha chain variable domain of TCR clone 175062 (TRAV26-1, TRAJ29)
CIVRLASGNTPLVF

SEQ ID NO: 350124 - protein, 17 aa, Homo sapiens
  CDR3 for beta chain variable domain of TCR clone 175062 (TRBV28, TRBJ2-3)
CASSPTSGRAASDTQYF

SEQ ID NO: 350125 - protein, 15 aa, Homo sapiens
  CDR3 for alpha chain variable domain of TCR clone 175063 (TRAV17, TRAJ57)
CATGPSQGGSEKLVF

SEQ ID NO: 350126 - protein, 11 aa, Homo sapiens
  CDR3 for beta chain variable domain of TCR clone 175063 (TRBV29-1, TRBJ2-5)
CSEDRTGTHYF

SEQ ID NO: 350127 - protein, 16 aa, Homo sapiens
  CDR3 for alpha chain variable domain of TCR clone 175064 (TRAV12-3, TRAJ53)
YAMSPGSGGSNYKLTF

SEQ ID NO: 350128 - protein, 15 aa, Homo sapiens
  CDR3 for beta chain variable domain of TCR clone 175064 (TRBV4-3, TRBJ2-7)
CASSQGGRGIYEQYF

SEQ ID NO: 350129 - protein, 15 aa, Homo sapiens
  CDR3 for alpha chain variable domain of TCR clone 175065 (TRAV38-1, TRAJ30)
CAFVMSYGGDDKIIF

SEQ ID NO: 350130 - protein, 16 aa, Homo sapiens
  CDR3 for beta chain variable domain of TCR clone 175065 (TRBV7-9, TRBJ2-7)
CASSFGLAGPSYEQYF

SEQ ID NO: 350131 - protein, 16 aa, Homo sapiens
  CDR3 for alpha chain variable domain of TCR clone 175066 (TRAV30, TRAJ24)
CGTEIVDADSWGKFQF

SEQ ID NO: 350132 - protein, 14 aa, Homo sapiens
  CDR3 for beta chain variable domain of TCR clone 175066 (TRBV12-4, TRBJ2-5)
CASSAGLVSETQYF

SEQ ID NO: 350133 - protein, 15 aa, Homo sapiens
  CDR3 for alpha chain variable domain of TCR clone 175067 (TRAV26-1, TRAJ29)
CIVRVEGSGNTPLVF

SEQ ID NO: 350134 - protein, 15 aa, Homo sapiens
  CDR3 for beta chain variable domain of TCR clone 175067 (TRBV6-6, TRBJ1-5)
CASSSIQGTNQPQHF

SEQ ID NO: 350135 - protein, 23 aa, Homo sapiens
  CDR3 for alpha chain variable domain of TCR clone 175068 (TRAV8-4, )
CAVSYAGNNHIQNPDPAVYQLRD

SEQ ID NO: 350136 - protein, 16 aa, Homo sapiens
  CDR3 for beta chain variable domain of TCR clone 175068 (TRBV13, TRBJ2-2)
CASSPRTGEHTGELFF

SEQ ID NO: 350137 - protein, 14 aa, Homo sapiens
  CDR3 for alpha chain variable domain of TCR clone 175069 (TRAV29/DV5, TRAJ28)
CAARAGAGSYQLTF

SEQ ID NO: 350138 - protein, 14 aa, Homo sapiens
  CDR3 for beta chain variable domain of TCR clone 175069 (TRBV7-9, TRBJ2-2)
CASSGLADTGELFF

SEQ ID NO: 350139 - protein, 17 aa, Homo sapiens
  CDR3 for alpha chain variable domain of TCR clone 175070 (TRAV3, TRAJ38)
CAVRDCLNAGNNRKLIW

SEQ ID NO: 350140 - protein, 16 aa, Homo sapiens
  CDR3 for beta chain variable domain of TCR clone 175070 (TRBV20-1, TRBJ1-4)
CSAPGQGLLTNETLFF

SEQ ID NO: 350141 - protein, 15 aa, Homo sapiens
  CDR3 for alpha chain variable domain of TCR clone 175071 (TRAV21, TRAJ45)
CAVSYSGGGADGLTF

SEQ ID NO: 350142 - protein, 11 aa, Homo sapiens
  CDR3 for beta chain variable domain of TCR clone 175071 (TRBV19, TRBJ1-1)
CASSIGSEAFF

SEQ ID NO: 350143 - protein, 15 aa, Homo sapiens
  CDR3 for alpha chain variable domain of TCR clone 175072 (TRAV3, TRAJ20)
CAVRDIKLSDYKLSF

SEQ ID NO: 350144 - protein, 14 aa, Homo sapiens
  CDR3 for beta chain variable domain of TCR clone 175072 (TRBV28, TRBJ2-4)
CASTQVTGVNIQYF

SEQ ID NO: 350145 - protein, 23 aa, Homo sapiens
  CDR3 for alpha chain variable domain of TCR clone 175073 (TRAV27, TRAJ40)
TAAQPGDTGLHLSLTSGTYKYIF

SEQ ID NO: 350146 - protein, 12 aa, Homo sapiens
  CDR3 for beta chain variable domain of TCR clone 175073 (TRBV18, TRBJ2-3)
CQLNQNTDTQYF

SEQ ID NO: 350147 - protein, 14 aa, Homo sapiens
  CDR3 for alpha chain variable domain of TCR clone 175074 (TRAV27, TRAJ44)
CAAAFTGTASKLTF

SEQ ID NO: 350148 - protein, 15 aa, Homo sapiens
  CDR3 for beta chain variable domain of TCR clone 175074 (TRBV4-1, TRBJ2-7)
CASSQQGQGFDEQYF

SEQ ID NO: 350149 - protein, 11 aa, Homo sapiens
  CDR3 for alpha chain variable domain of TCR clone 175075 (TRAV17, TRAJ49)
CATNTGNQFYF

SEQ ID NO: 350150 - protein, 14 aa, Homo sapiens
  CDR3 for beta chain variable domain of TCR clone 175075 (TRBV2, TRBJ2-7)
CASSGGSGIRTSGR

SEQ ID NO: 350151 - protein, 16 aa, Homo sapiens
  CDR3 for alpha chain variable domain of TCR clone 175076 (TRAV12-2, TRAJ6)
CAAPLAGSGGSYIPTF

SEQ ID NO: 350152 - protein, 13 aa, Homo sapiens
  CDR3 for beta chain variable domain of TCR clone 175076 (TRBV6-9, TRBJ2-5)
CAIKGDGRRTQYF

SEQ ID NO: 350153 - protein, 17 aa, Homo sapiens
  CDR3 for alpha chain variable domain of TCR clone 175077 (TRAV13-1, TRAJ53)
CAASWKSSGGSNYKLTF

SEQ ID NO: 350154 - protein, 19 aa, Homo sapiens
  CDR3 for beta chain variable domain of TCR clone 175077 (TRBV7-9, TRBJ2-1)
CASSHNRGAPLRSYNEQFF

SEQ ID NO: 350155 - protein, 15 aa, Homo sapiens
  CDR3 for alpha chain variable domain of TCR clone 175078 (TRAV21, TRAJ10)
CAVPLLTGGGNKLNY

SEQ ID NO: 350156 - protein, 14 aa, Homo sapiens
  CDR3 for beta chain variable domain of TCR clone 175078 (TRBV12-4, TRBJ1-1)
CASSLGTGGTEAFF

SEQ ID NO: 350157 - protein, 12 aa, Homo sapiens
  CDR3 for alpha chain variable domain of TCR clone 175079 (TRAV38-1, TRAJ47)
CAFETYGNKLVF

SEQ ID NO: 350158 - protein, 15 aa, Homo sapiens
  CDR3 for beta chain variable domain of TCR clone 175079 (TRBV13, TRBJ2-1)
CASSLLSGLNNEQFF

SEQ ID NO: 350159 - protein, 11 aa, Homo sapiens
  CDR3 for alpha chain variable domain of TCR clone 175080 (TRAV19, TRAJ34)
CARQDTDKLIF

SEQ ID NO: 350160 - protein, 15 aa, Homo sapiens
  CDR3 for beta chain variable domain of TCR clone 175080 (TRBV12-4, TRBJ2-5)
CASSLPSHGVETQYF

SEQ ID NO: 350161 - protein, 13 aa, Homo sapiens
  CDR3 for alpha chain variable domain of TCR clone 175081 (TRAV17, TRAJ9)
CATFLTGGFKTIF

SEQ ID NO: 350162 - protein, 16 aa, Homo sapiens
  CDR3 for beta chain variable domain of TCR clone 175081 (TRBV5-7, TRBJ1-4)
CASSPSGGLKTEELFF

SEQ ID NO: 350163 - protein, 11 aa, Homo sapiens
  CDR3 for alpha chain variable domain of TCR clone 175082 (TRAV3, TRAJ21)
CAVGNFNKFYF

SEQ ID NO: 350164 - protein, 13 aa, Homo sapiens
  CDR3 for beta chain variable domain of TCR clone 175082 (TRBV27, TRBJ1-1)
CASSLSIGAEAFF

SEQ ID NO: 350165 - protein, 13 aa, Homo sapiens
  CDR3 for alpha chain variable domain of TCR clone 175083 (TRAV16, TRAJ5)
CALTNTGRRALTF

SEQ ID NO: 350166 - protein, 15 aa, Homo sapiens
  CDR3 for beta chain variable domain of TCR clone 175083 (TRBV11-2, TRBJ2-4)
FASSRPGTGINIQYF

SEQ ID NO: 350167 - protein, 13 aa, Homo sapiens
  CDR3 for alpha chain variable domain of TCR clone 175084 (TRAV2, TRAJ40)
CAVVTSGTYKYIF

SEQ ID NO: 350168 - protein, 15 aa, Homo sapiens
  CDR3 for beta chain variable domain of TCR clone 175084 (TRBV6-5, TRBJ1-2)
CASSYSQAFNYGYTF

SEQ ID NO: 350169 - protein, 12 aa, Homo sapiens
  CDR3 for alpha chain variable domain of TCR clone 175085 (TRAV13-1, TRAJ21)
CAAKEGFNKFYF

SEQ ID NO: 350170 - protein, 14 aa, Homo sapiens
  CDR3 for beta chain variable domain of TCR clone 175085 (TRBV23-1, TRBJ2-5)
CASSFLRSKETQYF

SEQ ID NO: 350171 - protein, 12 aa, Homo sapiens
  CDR3 for alpha chain variable domain of TCR clone 175086 (TRAV16, TRAJ10)
CSRTGGGNKLTF

SEQ ID NO: 350172 - protein, 19 aa, Homo sapiens
  CDR3 for beta chain variable domain of TCR clone 175086 (TRBV25-1, TRBJ2-2)
CAILVYRVDRGRTTGELFF

SEQ ID NO: 350173 - protein, 15 aa, Homo sapiens
  CDR3 for alpha chain variable domain of TCR clone 175087 (TRAV27, TRAJ38)
CAARHNAGNNRKLIW

SEQ ID NO: 350174 - protein, 13 aa, Homo sapiens
  CDR3 for beta chain variable domain of TCR clone 175087 (TRBV12-5, TRBJ2-3)
CASGVRQSDTQYF

SEQ ID NO: 350175 - protein, 13 aa, Homo sapiens
  CDR3 for alpha chain variable domain of TCR clone 175088 (TRAV36/DV7, TRAJ7)
CAGTRYGNNRLAF

SEQ ID NO: 350176 - protein, 14 aa, Homo sapiens
  CDR3 for beta chain variable domain of TCR clone 175088 (TRBV19, TRBJ2-1)
CASPTCVLSGEQFC

SEQ ID NO: 350177 - protein, 14 aa, Homo sapiens
  CDR3 for alpha chain variable domain of TCR clone 175089 (TRAV17, TRAJ32)
CATDPGGATNKLIF

SEQ ID NO: 350178 - protein, 15 aa, Homo sapiens
  CDR3 for beta chain variable domain of TCR clone 175089 (TRBV6-5, TRBJ2-1)
CASSYDAGAGNEQFF

SEQ ID NO: 350179 - protein, 16 aa, Homo sapiens
  CDR3 for alpha chain variable domain of TCR clone 175090 (TRAV16, TRAJ57)
FAPYLITQGGSEKLVF

SEQ ID NO: 350180 - protein, 17 aa, Homo sapiens
  CDR3 for beta chain variable domain of TCR clone 175090 (TRBV24-1, TRBJ2-4)
CATSDAEARGVRNMQYF

SEQ ID NO: 350181 - protein, 12 aa, Homo sapiens
  CDR3 for alpha chain variable domain of TCR clone 175091 (TRAV17, TRAJ57)
CATDGGSETLVF

SEQ ID NO: 350182 - protein, 15 aa, Homo sapiens
  CDR3 for beta chain variable domain of TCR clone 175091 (TRBV6-3, TRBJ2-2)
CASSFLATLTGELFF

SEQ ID NO: 350183 - protein, 11 aa, Homo sapiens
  CDR3 for alpha chain variable domain of TCR clone 175092 (TRAV13-1, TRAJ49)
CACVGGNQFYF

SEQ ID NO: 350184 - protein, 16 aa, Homo sapiens
  CDR3 for beta chain variable domain of TCR clone 175092 (TRBV11-2, TRBJ2-2)
CASSLRTGNPIGELFF

SEQ ID NO: 350185 - protein, 13 aa, Homo sapiens
  CDR3 for alpha chain variable domain of TCR clone 175093 (TRAV21, TRAJ27)
CAARPGNAGKSTF

SEQ ID NO: 350186 - protein, 14 aa, Homo sapiens
  CDR3 for beta chain variable domain of TCR clone 175093 (TRBV20-1, TRBJ2-1)
CNAAGSGEYNEQFF

SEQ ID NO: 350187 - protein, 14 aa, Homo sapiens
  CDR3 for alpha chain variable domain of TCR clone 175094 (TRAV29/DV5, TRAJ36)
CAARRKTGANNLFF

SEQ ID NO: 350188 - protein, 16 aa, Homo sapiens
  CDR3 for beta chain variable domain of TCR clone 175094 (TRBV12-5, TRBJ2-5)
CASGPRTSGNQETQYF

SEQ ID NO: 350189 - protein, 17 aa, Homo sapiens
  CDR3 for alpha chain variable domain of TCR clone 175095 (TRAV16, TRAJ42)
CALSPKLYGGSQGNLIF

SEQ ID NO: 350190 - protein, 13 aa, Homo sapiens
  CDR3 for beta chain variable domain of TCR clone 175095 (TRBV19, TRBJ1-5)
CTSSTRRDQPQHF

SEQ ID NO: 350191 - protein, 15 aa, Homo sapiens
  CDR3 for alpha chain variable domain of TCR clone 175096 (TRAV3, TRAJ22)
CAVRDRGGSVRQLTF

SEQ ID NO: 350192 - protein, 13 aa, Homo sapiens
  CDR3 for beta chain variable domain of TCR clone 175096 (TRBV12-4, TRBJ1-2)
CASSLRQGKGYTF

SEQ ID NO: 350193 - protein, 10 aa, Homo sapiens
  CDR3 for alpha chain variable domain of TCR clone 175097 (TRAV12-3, TRAJ47)
CAMKKEYETN

SEQ ID NO: 350194 - protein, 16 aa, Homo sapiens
  CDR3 for beta chain variable domain of TCR clone 175097 (TRBV3-1, TRBJ2-6)
CASSLTWVSGANVLTF

SEQ ID NO: 350195 - protein, 17 aa, Homo sapiens
  CDR3 for alpha chain variable domain of TCR clone 175098 (TRAV4, TRAJ18)
CLVVAAGRGSTLGRLYF

SEQ ID NO: 350196 - protein, 14 aa, Homo sapiens
  CDR3 for beta chain variable domain of TCR clone 175098 (TRBV7-2, TRBJ1-1)
CASSFLTGTTEAFF

SEQ ID NO: 350197 - protein, 15 aa, Homo sapiens
  CDR3 for alpha chain variable domain of TCR clone 175099 (TRAV8-3, TRAJ11)
CAVGLLNSGYSTLTF

SEQ ID NO: 350198 - protein, 16 aa, Homo sapiens
  CDR3 for beta chain variable domain of TCR clone 175099 (TRBV7-9, TRBJ1-2)
CASSLGFSSAEDGYTF

SEQ ID NO: 350199 - protein, 14 aa, Homo sapiens
  CDR3 for alpha chain variable domain of TCR clone 175100 (TRAV8-3, TRAJ10)
CAVGNAGGGNKITF

SEQ ID NO: 350200 - protein, 16 aa, Homo sapiens
  CDR3 for beta chain variable domain of TCR clone 175100 (TRBV11-2, TRBJ1-2)
CASSLDTGGADYGYTF

SEQ ID NO: 350201 - protein, 14 aa, Homo sapiens
  CDR3 for alpha chain variable domain of TCR clone 175101 (TRAV1-2, TRAJ16)
CAVNRFSNGQKLLF

SEQ ID NO: 350202 - protein, 18 aa, Homo sapiens
  CDR3 for beta chain variable domain of TCR clone 175101 (TRBV11-1, TRBJ2-6)
CASSFPGAGISGANVLTF

SEQ ID NO: 350203 - protein, 12 aa, Homo sapiens
  CDR3 for alpha chain variable domain of TCR clone 175102 (TRAV8-6, TRAJ21)
CAESFFPQQILL

SEQ ID NO: 350204 - protein, 14 aa, Homo sapiens
  CDR3 for beta chain variable domain of TCR clone 175102 (TRBV7-9, TRBJ2-5)
CASSLDTAQETQYF

SEQ ID NO: 350205 - protein, 14 aa, Homo sapiens
  CDR3 for alpha chain variable domain of TCR clone 175103 (TRAV29/DV5, TRAJ32)
CAAAYGGATNKLIF

SEQ ID NO: 350206 - protein, 15 aa, Homo sapiens
  CDR3 for beta chain variable domain of TCR clone 175103 (TRBV12-4, TRBJ2-5)
CASSPPTGLQETQYF

SEQ ID NO: 350207 - protein, 18 aa, Homo sapiens
  CDR3 for alpha chain variable domain of TCR clone 175104 (TRAV13-1, TRAJ52)
CAASKRSAGGTSDGKLTF

SEQ ID NO: 350208 - protein, 15 aa, Homo sapiens
  CDR3 for beta chain variable domain of TCR clone 175104 (TRBV6-3, TRBJ2-7)
CASSSPGTVFYEQYF

SEQ ID NO: 350209 - protein, 13 aa, Homo sapiens
  CDR3 for alpha chain variable domain of TCR clone 175105 (TRAV16, TRAJ48)
CSPLNFGIEKLTF

SEQ ID NO: 350210 - protein, 11 aa, Homo sapiens
  CDR3 for beta chain variable domain of TCR clone 175105 (TRBV7-9, TRBJ2-3)
CASSPTDTQYF

SEQ ID NO: 350211 - protein, 12 aa, Homo sapiens
  CDR3 for alpha chain variable domain of TCR clone 175106 (TRAV3, TRAJ31)
CAVRPRGPRLMF

SEQ ID NO: 350212 - protein, 17 aa, Homo sapiens
  CDR3 for beta chain variable domain of TCR clone 175106 (TRBV7-9, TRBJ1-5)
CASSATQGGYSNQPQHF

SEQ ID NO: 350213 - protein, 18 aa, Homo sapiens
  CDR3 for alpha chain variable domain of TCR clone 175107 (TRAV13-1, TRAJ52)
CAASKGSAGGTSYGRLTF

SEQ ID NO: 350214 - protein, 13 aa, Homo sapiens
  CDR3 for beta chain variable domain of TCR clone 175107 (TRBV12-4, TRBJ1-2)
CASSLRQGKGYTF

SEQ ID NO: 350215 - protein, 12 aa, Homo sapiens
  CDR3 for alpha chain variable domain of TCR clone 175108 (TRAV13-1, TRAJ43)
CAAGRFNNDMRF

SEQ ID NO: 350216 - protein, 11 aa, Homo sapiens
  CDR3 for beta chain variable domain of TCR clone 175108 (TRBV29-1, TRBJ2-5)
CSEDRTETQYF

SEQ ID NO: 350217 - protein, 16 aa, Homo sapiens
  CDR3 for alpha chain variable domain of TCR clone 175109 (TRAV14/DV4, TRAJ20)
CAMREGRSRDDSKLSF

SEQ ID NO: 350218 - protein, 17 aa, Homo sapiens
  CDR3 for beta chain variable domain of TCR clone 175109 (TRBV15, TRBJ1-1)
CATSRVGGADGDTEAFF

SEQ ID NO: 350219 - protein, 14 aa, Homo sapiens
  CDR3 for alpha chain variable domain of TCR clone 175110 (TRAV16, TRAJ54)
CALSLIQGAQKLGS

SEQ ID NO: 350220 - protein, 15 aa, Homo sapiens
  CDR3 for beta chain variable domain of TCR clone 175110 (TRBV20-1, TRBJ2-7)
CSARDRVSGMDEQYF

SEQ ID NO: 350221 - protein, 14 aa, Homo sapiens
  CDR3 for alpha chain variable domain of TCR clone 175111 (TRAV12-2, TRAJ13)
CAVKKTGGYQKVTF

SEQ ID NO: 350222 - protein, 15 aa, Homo sapiens
  CDR3 for beta chain variable domain of TCR clone 175111 (TRBV12-4, TRBJ2-1)
CASSLRDAAYNEQFF

SEQ ID NO: 350223 - protein, 17 aa, Homo sapiens
  CDR3 for alpha chain variable domain of TCR clone 175112 (TRAV26-1, TRAJ53)
CIVRVDDSGGSNYKLTF

SEQ ID NO: 350224 - protein, 14 aa, Homo sapiens
  CDR3 for beta chain variable domain of TCR clone 175112 (TRBV5-1, TRBJ2-7)
CASSRGESLYEQYF

SEQ ID NO: 350225 - protein, 14 aa, Homo sapiens
  CDR3 for alpha chain variable domain of TCR clone 175113 (TRAV21, TRAJ23)
CAIMFYNQGGKLIF

SEQ ID NO: 350226 - protein, 18 aa, Homo sapiens
  CDR3 for beta chain variable domain of TCR clone 175113 (TRBV20-1, TRBJ2-6)
CSAETTPTHGSGANVLTF

SEQ ID NO: 350227 - protein, 13 aa, Homo sapiens
  CDR3 for alpha chain variable domain of TCR clone 175114 (TRAV12-3, TRAJ33)
CAMSVNSNYQLIW

SEQ ID NO: 350228 - protein, 16 aa, Homo sapiens
  CDR3 for beta chain variable domain of TCR clone 175114 (TRBV7-2, TRBJ2-7)
CASSPLAGGPRYEQYF

SEQ ID NO: 350229 - protein, 14 aa, Homo sapiens
  CDR3 for alpha chain variable domain of TCR clone 175115 (TRAV13-1, TRAJ28)
CAASKGAGSYQLTF

SEQ ID NO: 350230 - protein, 12 aa, Homo sapiens
  CDR3 for beta chain variable domain of TCR clone 175115 (TRBV7-8, TRBJ2-1)
CASSLGHNEQFF

SEQ ID NO: 350231 - protein, 14 aa, Homo sapiens
  CDR3 for alpha chain variable domain of TCR clone 175116 (TRAV8-3, TRAJ4)
CAVGAAGGYNKLIF

SEQ ID NO: 350232 - protein, 12 aa, Homo sapiens
  CDR3 for beta chain variable domain of TCR clone 175116 (TRBV29-1, TRBJ1-3)
CSTRDSGNTIYF

SEQ ID NO: 350233 - protein, 13 aa, Homo sapiens
  CDR3 for alpha chain variable domain of TCR clone 175117 (TRAV12-3, TRAJ33)
CAKSVNSNYQLIW

SEQ ID NO: 350234 - protein, 13 aa, Homo sapiens
  CDR3 for beta chain variable domain of TCR clone 175117 (TRBV7-2, TRBJ2-2)
CASSLAVTRELFF

SEQ ID NO: 350235 - protein, 14 aa, Homo sapiens
  CDR3 for alpha chain variable domain of TCR clone 175118 (TRAV1-2, TRAJ8)
CAVREDTGFQILVF

SEQ ID NO: 350236 - protein, 17 aa, Homo sapiens
  CDR3 for beta chain variable domain of TCR clone 175118 (TRBV25-1, TRBJ2-5)
CASSRRGGRGGQETQYF

SEQ ID NO: 350237 - protein, 14 aa, Homo sapiens
  CDR3 for alpha chain variable domain of TCR clone 175119 (TRAV12-2, TRAJ24)
CSVTPADSWGQLQF

SEQ ID NO: 350238 - protein, 15 aa, Homo sapiens
  CDR3 for beta chain variable domain of TCR clone 175119 (TRBV27, TRBJ2-1)
CASSNGGGSSNEQFF

SEQ ID NO: 350239 - protein, 13 aa, Homo sapiens
  CDR3 for alpha chain variable domain of TCR clone 175120 (TRAV8-3, TRAJ10)
WAILTGGGKKLTF

SEQ ID NO: 350240 - protein, 10 aa, Homo sapiens
  CDR3 for beta chain variable domain of TCR clone 175120 (TRBV20-1, TRBJ2-5)
CSARFETQYF

SEQ ID NO: 350241 - protein, 13 aa, Homo sapiens
  CDR3 for alpha chain variable domain of TCR clone 175121 (TRAV20, TRAJ54)
CAVQAGGAQKLVF

SEQ ID NO: 350242 - protein, 14 aa, Homo sapiens
  CDR3 for beta chain variable domain of TCR clone 175121 (TRBV7-2, TRBJ2-7)
CASSPKTSFYEQYF

SEQ ID NO: 350243 - protein, 12 aa, Homo sapiens
  CDR3 for alpha chain variable domain of TCR clone 175122 (TRAV38-1, TRAJ30)
CAFMGRDDKIIF

SEQ ID NO: 350244 - protein, 12 aa, Homo sapiens
  CDR3 for beta chain variable domain of TCR clone 175122 (TRBV14, TRBJ2-5)
CASSQLKETQYF

SEQ ID NO: 350245 - protein, 17 aa, Homo sapiens
  CDR3 for alpha chain variable domain of TCR clone 175123 (TRAV3, TRAJ6)
CAVRDGTRAGGSYIPTF

SEQ ID NO: 350246 - protein, 14 aa, Homo sapiens
  CDR3 for beta chain variable domain of TCR clone 175123 (TRBV7-2, TRBJ2-7)
FASSPKTSFYEQYF

SEQ ID NO: 350247 - protein, 13 aa, Homo sapiens
  CDR3 for alpha chain variable domain of TCR clone 175124 (TRAV4, TRAJ20)
CLVGSSNDYKLSF

SEQ ID NO: 350248 - protein, 14 aa, Homo sapiens
  CDR3 for beta chain variable domain of TCR clone 175124 (TRBV6-1, TRBJ1-3)
CASVQGGGGNTIYF

SEQ ID NO: 350249 - protein, 11 aa, Homo sapiens
  CDR3 for alpha chain variable domain of TCR clone 175125 (TRAV12-1, TRAJ15)
CVVNAGTALIF

SEQ ID NO: 350250 - protein, 16 aa, Homo sapiens
  CDR3 for beta chain variable domain of TCR clone 175125 (TRBV28, TRBJ2-1)
CASSSRVRVSYNEQFF

SEQ ID NO: 350251 - protein, 13 aa, Homo sapiens
  CDR3 for alpha chain variable domain of TCR clone 175126 (TRAV27, TRAJ56)
CAGKPGANSKLTF

SEQ ID NO: 350252 - protein, 17 aa, Homo sapiens
  CDR3 for beta chain variable domain of TCR clone 175126 (TRBV5-1, TRBJ2-7)
FAPAADNPGRIPYEQYF

SEQ ID NO: 350253 - protein, 14 aa, Homo sapiens
  CDR3 for alpha chain variable domain of TCR clone 175127 (TRAV12-2, TRAJ13)
CAVKKTGGYQKVTF

SEQ ID NO: 350254 - protein, 15 aa, Homo sapiens
  CDR3 for beta chain variable domain of TCR clone 175127 (TRBV27, TRBJ2-1)
CAGSNGGRSSNEQFF

SEQ ID NO: 350255 - protein, 13 aa, Homo sapiens
  CDR3 for alpha chain variable domain of TCR clone 175128 (TRAV13-2, TRAJ40)
CAELTSGTYKYIF

SEQ ID NO: 350256 - protein, 14 aa, Homo sapiens
  CDR3 for beta chain variable domain of TCR clone 175128 (TRBV10-2, TRBJ1-5)
CASSSTGRNQHQHF

SEQ ID NO: 350257 - protein, 15 aa, Homo sapiens
  CDR3 for alpha chain variable domain of TCR clone 175129 (TRAV2, TRAJ9)
CAVEDRGTGVFKTIF

SEQ ID NO: 350258 - protein, 14 aa, Homo sapiens
  CDR3 for beta chain variable domain of TCR clone 175129 (TRBV4-1, TRBJ2-2)
CASSQAVNTGELFF

SEQ ID NO: 350259 - protein, 18 aa, Homo sapiens
  CDR3 for alpha chain variable domain of TCR clone 175130 (TRAV21, TRAJ52)
CAVRPSPAGGTSYGKLTF

SEQ ID NO: 350260 - protein, 13 aa, Homo sapiens
  CDR3 for beta chain variable domain of TCR clone 175130 (TRBV10-3, TRBJ2-7)
CDSKLAVNYEQYF

SEQ ID NO: 350261 - protein, 13 aa, Homo sapiens
  CDR3 for alpha chain variable domain of TCR clone 175131 (TRAV12-1, TRAJ33)
CGDAPDSNYQLIW

SEQ ID NO: 350262 - protein, 15 aa, Homo sapiens
  CDR3 for beta chain variable domain of TCR clone 175131 (TRBV7-3, TRBJ2-1)
CASSPTGGGEVEQFF

SEQ ID NO: 350263 - protein, 14 aa, Homo sapiens
  CDR3 for alpha chain variable domain of TCR clone 175132 (TRAV14/DV4, TRAJ15)
CAMRRDQAGTALIF

SEQ ID NO: 350264 - protein, 11 aa, Homo sapiens
  CDR3 for beta chain variable domain of TCR clone 175132 (TRBV7-2, TRBJ2-7)
CASSSGLWQCF

SEQ ID NO: 350265 - protein, 18 aa, Homo sapiens
  CDR3 for alpha chain variable domain of TCR clone 175133 (TRAV26-1, TRAJ23)
CIVRVGLEVWNQGGKLIF

SEQ ID NO: 350266 - protein, 17 aa, Homo sapiens
  CDR3 for beta chain variable domain of TCR clone 175133 (TRBV5-1, TRBJ1-6)
CASSPSLQGSDNSPLHF

SEQ ID NO: 350267 - protein, 13 aa, Homo sapiens
  CDR3 for alpha chain variable domain of TCR clone 175134 (TRAV16, TRAJ5)
CALTNTGRRALTF

SEQ ID NO: 350268 - protein, 15 aa, Homo sapiens
  CDR3 for beta chain variable domain of TCR clone 175134 (TRBV11-2, TRBJ2-4)
CASSCPGTGINIQYF

SEQ ID NO: 350269 - protein, 11 aa, Homo sapiens
  CDR3 for alpha chain variable domain of TCR clone 175135 (TRAV2, TRAJ33)
CAVESNYQLIW

SEQ ID NO: 350270 - protein, 15 aa, Homo sapiens
  CDR3 for beta chain variable domain of TCR clone 175135 (TRBV5-1, TRBJ2-1)
CASKGLAGVYNEQFF

SEQ ID NO: 350271 - protein, 12 aa, Homo sapiens
  CDR3 for alpha chain variable domain of TCR clone 175136 (TRAV29/DV5, TRAJ49)
CAARAIGNQFYF

SEQ ID NO: 350272 - protein, 17 aa, Homo sapiens
  CDR3 for beta chain variable domain of TCR clone 175136 (TRBV5-1, TRBJ2-2)
CASSRTSGRFSTGELFF

SEQ ID NO: 350273 - protein, 17 aa, Homo sapiens
  CDR3 for alpha chain variable domain of TCR clone 175137 (TRAV3, TRAJ6)
CAVRDGPRAGGSYIPTF

SEQ ID NO: 350274 - protein, 15 aa, Homo sapiens
  CDR3 for beta chain variable domain of TCR clone 175137 (TRBV12-4, TRBJ1-1)
CASSSSGTGNTEAFF

SEQ ID NO: 350275 - protein, 14 aa, Homo sapiens
  CDR3 for alpha chain variable domain of TCR clone 175138 (TRAV26-1, TRAJ38)
CIADNAGNNRKLIW

SEQ ID NO: 350276 - protein, 16 aa, Homo sapiens
  CDR3 for beta chain variable domain of TCR clone 175138 (TRBV12-5, TRBJ2-5)
CASGPRTSGNLETRYF

SEQ ID NO: 350277 - protein, 13 aa, Homo sapiens
  CDR3 for alpha chain variable domain of TCR clone 175139 (TRAV38-1, TRAJ42)
CARWGGSQGNLIF

SEQ ID NO: 350278 - protein, 13 aa, Homo sapiens
  CDR3 for beta chain variable domain of TCR clone 175139 (TRBV20-1, TRBJ2-7)
CSATHTSGYEQYF

SEQ ID NO: 350279 - protein, 12 aa, Homo sapiens
  CDR3 for alpha chain variable domain of TCR clone 175140 (TRAV13-2, TRAJ23)
CAERHRGGKLIF

SEQ ID NO: 350280 - protein, 13 aa, Homo sapiens
  CDR3 for beta chain variable domain of TCR clone 175140 (TRBV10-3, TRBJ2-7)
CASKRAVNYEQYF

SEQ ID NO: 350281 - protein, 15 aa, Homo sapiens
  CDR3 for alpha chain variable domain of TCR clone 175141 (TRAV21, TRAJ22)
CAVRLFFWFCKATDL

SEQ ID NO: 350282 - protein, 14 aa, Homo sapiens
  CDR3 for beta chain variable domain of TCR clone 175141 (TRBV19, TRBJ1-5)
CASRAPGSFLSQHF

SEQ ID NO: 350283 - protein, 12 aa, Homo sapiens
  CDR3 for alpha chain variable domain of TCR clone 175142 (TRAV8-6, TRAJ43)
CAFSNNNNDMRF

SEQ ID NO: 350284 - protein, 15 aa, Homo sapiens
  CDR3 for beta chain variable domain of TCR clone 175142 (TRBV7-3, TRBJ2-6)
CASSLGGSGANVLTF

SEQ ID NO: 350285 - protein, 14 aa, Homo sapiens
  CDR3 for alpha chain variable domain of TCR clone 175143 (TRAV27, TRAJ44)
CAASFTGTASKLTF

SEQ ID NO: 350286 - protein, 13 aa, Homo sapiens
  CDR3 for beta chain variable domain of TCR clone 175143 (TRBV27, TRBJ2-3)
CAPSRGGLYTQYF

SEQ ID NO: 350287 - protein, 12 aa, Homo sapiens
  CDR3 for alpha chain variable domain of TCR clone 175144 (TRAV26-1, TRAJ36)
CIVRVRAGNLFF

SEQ ID NO: 350288 - protein, 13 aa, Homo sapiens
  CDR3 for beta chain variable domain of TCR clone 175144 (TRBV11-2, TRBJ2-5)
CASSRAPSETQYF

SEQ ID NO: 350289 - protein, 12 aa, Homo sapiens
  CDR3 for alpha chain variable domain of TCR clone 175145 (TRAV16, TRAJ10)
CSRTGGGNKLTF

SEQ ID NO: 350290 - protein, 13 aa, Homo sapiens
  CDR3 for beta chain variable domain of TCR clone 175145 (TRBV7-3, TRBJ1-1)
CARRPAWGAAAFF

SEQ ID NO: 350291 - protein, 15 aa, Homo sapiens
  CDR3 for alpha chain variable domain of TCR clone 175146 (TRAV1-2, TRAJ17)
CAVRGYGAAGNKLTF

SEQ ID NO: 350292 - protein, 23 aa, Homo sapiens
  CDR3 for beta chain variable domain of TCR clone 175146 (TRBV11-2, TRBJ2-5)
CASRSPGGEGAASRDPVLRARHA

SEQ ID NO: 350293 - protein, 13 aa, Homo sapiens
  CDR3 for alpha chain variable domain of TCR clone 175147 (TRAV8-3, TRAJ28)
CAVGAVGSYQLTF

SEQ ID NO: 350294 - protein, 16 aa, Homo sapiens
  CDR3 for beta chain variable domain of TCR clone 175147 (TRBV19, TRBJ2-4)
CATGGLAGGTKNIQYF

SEQ ID NO: 350295 - protein, 15 aa, Homo sapiens
  CDR3 for alpha chain variable domain of TCR clone 175148 (TRAV21, TRAJ40)
CAVRPQTSGTYKDIF

SEQ ID NO: 350296 - protein, 13 aa, Homo sapiens
  CDR3 for beta chain variable domain of TCR clone 175148 (TRBV7-2, TRBJ2-2)
CASSSVRAGELFF

SEQ ID NO: 350297 - protein, 15 aa, Homo sapiens
  CDR3 for alpha chain variable domain of TCR clone 175149 (TRAV17, TRAJ45)
CATAYSGGGADGLTF

SEQ ID NO: 350298 - protein, 11 aa, Homo sapiens
  CDR3 for beta chain variable domain of TCR clone 175149 (TRBV7-8, TRBJ2-7)
CASSLSPEQYF

SEQ ID NO: 350299 - protein, 15 aa, Homo sapiens
  CDR3 for alpha chain variable domain of TCR clone 175150 (TRAV3, TRAJ3)
CAGRDRDSSASKIIF

SEQ ID NO: 350300 - protein, 12 aa, Homo sapiens
  CDR3 for beta chain variable domain of TCR clone 175150 (TRBV29-1, TRBJ2-3)
CSVTGGADTQYF

SEQ ID NO: 350301 - protein, 14 aa, Homo sapiens
  CDR3 for alpha chain variable domain of TCR clone 175151 (TRAV1-2, TRAJ16)
CAVNRLSDGQKLLF

SEQ ID NO: 350302 - protein, 14 aa, Homo sapiens
  CDR3 for beta chain variable domain of TCR clone 175151 (TRBV20-1, TRBJ1-1)
CSAQTRIGGTEAFF

SEQ ID NO: 350303 - protein, 13 aa, Homo sapiens
  CDR3 for alpha chain variable domain of TCR clone 175152 (TRAV21, TRAJ27)
CVALNTNAGKSTF

SEQ ID NO: 350304 - protein, 14 aa, Homo sapiens
  CDR3 for beta chain variable domain of TCR clone 175152 (TRBV27, TRBJ1-1)
CASSLLSGLSEAFF

SEQ ID NO: 350305 - protein, 13 aa, Homo sapiens
  CDR3 for alpha chain variable domain of TCR clone 175153 (TRAV35, TRAJ21)
CAGQLSNFNQFYF

SEQ ID NO: 350306 - protein, 11 aa, Homo sapiens
  CDR3 for beta chain variable domain of TCR clone 175153 (TRBV7-6, TRBJ2-5)
CASSSQETQYF

SEQ ID NO: 350307 - protein, 15 aa, Homo sapiens
  CDR3 for alpha chain variable domain of TCR clone 175154 (TRAV12-3, TRAJ6)
CAMSATTGGSYIPTF

SEQ ID NO: 350308 - protein, 16 aa, Homo sapiens
  CDR3 for beta chain variable domain of TCR clone 175154 (TRBV19, TRBJ2-3)
CASSPGAASRTDTQYF

SEQ ID NO: 350309 - protein, 15 aa, Homo sapiens
  CDR3 for alpha chain variable domain of TCR clone 175155 (TRAV27, TRAJ38)
CAARRNAGNNRKMIW

SEQ ID NO: 350310 - protein, 13 aa, Homo sapiens
  CDR3 for beta chain variable domain of TCR clone 175155 (TRBV12-5, TRBJ2-3)
CASGDRQSDTQYV

SEQ ID NO: 350311 - protein, 15 aa, Homo sapiens
  CDR3 for alpha chain variable domain of TCR clone 175156 (TRAV12-2, TRAJ57)
CAVSRGQGGSEKLVF

SEQ ID NO: 350312 - protein, 13 aa, Homo sapiens
  CDR3 for beta chain variable domain of TCR clone 175156 (TRBV7-8, TRBJ2-3)
CASSLRGPDTQYF

SEQ ID NO: 350313 - protein, 13 aa, Homo sapiens
  CDR3 for alpha chain variable domain of TCR clone 175157 (TRAV23/DV6, TRAJ22)
CAPYSDSARQLTF

SEQ ID NO: 350314 - protein, 15 aa, Homo sapiens
  CDR3 for beta chain variable domain of TCR clone 175157 (TRBV11-2, TRBJ1-6)
CASSLDPWAVSPLHF

SEQ ID NO: 350315 - protein, 13 aa, Homo sapiens
  CDR3 for alpha chain variable domain of TCR clone 175158 (TRAV12-3, TRAJ7)
CAMTPYGNNRLAF

SEQ ID NO: 350316 - protein, 14 aa, Homo sapiens
  CDR3 for beta chain variable domain of TCR clone 175158 (TRBV4-2, TRBJ2-1)
CASGLGRAYNEQFF

SEQ ID NO: 350317 - protein, 18 aa, Homo sapiens
  CDR3 for alpha chain variable domain of TCR clone 175159 (TRAV26-1, TRAJ52)
CIVRVEGAGGTSYGKLSF

SEQ ID NO: 350318 - protein, 13 aa, Homo sapiens
  CDR3 for beta chain variable domain of TCR clone 175159 (TRBV7-3, TRBJ1-2)
CASSLKRGYGYAF

SEQ ID NO: 350319 - protein, 14 aa, Homo sapiens
  CDR3 for alpha chain variable domain of TCR clone 175160 (TRAV8-6, TRAJ29)
CAVSRAPGNTPLVF

SEQ ID NO: 350320 - protein, 15 aa, Homo sapiens
  CDR3 for beta chain variable domain of TCR clone 175160 (TRBV19, TRBJ2-2)
CASSPRTGWTGELFF

SEQ ID NO: 350321 - protein, 14 aa, Homo sapiens
  CDR3 for alpha chain variable domain of TCR clone 175161 (TRAV30, TRAJ33)
CGTVAPRSNYKLIW

SEQ ID NO: 350322 - protein, 14 aa, Homo sapiens
  CDR3 for beta chain variable domain of TCR clone 175161 (TRBV15, TRBJ2-7)
CATSRVARGYEQYF

SEQ ID NO: 350323 - protein, 14 aa, Homo sapiens
  CDR3 for alpha chain variable domain of TCR clone 175162 (TRAV12-1, TRAJ17)
CVVNYKAAGNKVTF

SEQ ID NO: 350324 - protein, 17 aa, Homo sapiens
  CDR3 for beta chain variable domain of TCR clone 175162 (TRBV20-1, TRBJ2-1)
CSASSSGLAGSYNEQFF

SEQ ID NO: 350325 - protein, 22 aa, Homo sapiens
  CDR3 for alpha chain variable domain of TCR clone 175163 (TRAV4, )
CLVGPHNYDIQNPDPAVYQLRD

SEQ ID NO: 350326 - protein, 17 aa, Homo sapiens
  CDR3 for beta chain variable domain of TCR clone 175163 (TRBV24-1, TRBJ2-1)
CATSDVSTGGTYNEQFF

SEQ ID NO: 350327 - protein, 13 aa, Homo sapiens
  CDR3 for alpha chain variable domain of TCR clone 175164 (TRAV12-3, TRAJ47)
CAMKKEYGKKLVF

SEQ ID NO: 350328 - protein, 17 aa, Homo sapiens
  CDR3 for beta chain variable domain of TCR clone 175164 (TRBV11-2, TRBJ2-1)
CASSLCPPGVEYNEQFF

SEQ ID NO: 350329 - protein, 15 aa, Homo sapiens
  CDR3 for alpha chain variable domain of TCR clone 175165 (TRAV23/DV6, TRAJ37)
CAAGEGSSNTGNIIF

SEQ ID NO: 350330 - protein, 17 aa, Homo sapiens
  CDR3 for beta chain variable domain of TCR clone 175165 (TRBV20-1, TRBJ2-7)
CSATRAGGVAGVEEQYF

SEQ ID NO: 350331 - protein, 11 aa, Homo sapiens
  CDR3 for alpha chain variable domain of TCR clone 175166 (TRAV12-2, TRAJ36)
CAVDGANNIFF

SEQ ID NO: 350332 - protein, 13 aa, Homo sapiens
  CDR3 for beta chain variable domain of TCR clone 175166 (TRBV28, TRBJ2-5)
CAGVSRGEETQYF

SEQ ID NO: 350333 - protein, 13 aa, Homo sapiens
  CDR3 for alpha chain variable domain of TCR clone 175167 (TRAV12-1, TRAJ13)
SATMIGGYQKVTF

SEQ ID NO: 350334 - protein, 14 aa, Homo sapiens
  CDR3 for beta chain variable domain of TCR clone 175167 (TRBV7-8, TRBJ2-7)
CASSPGLADYEQYF

SEQ ID NO: 350335 - protein, 12 aa, Homo sapiens
  CDR3 for alpha chain variable domain of TCR clone 175168 (TRAV8-3, TRAJ20)
CAVGANDYKLSF

SEQ ID NO: 350336 - protein, 14 aa, Homo sapiens
  CDR3 for beta chain variable domain of TCR clone 175168 (TRBV18, TRBJ2-7)
CASSPRGGAYEQYF

SEQ ID NO: 350337 - protein, 14 aa, Homo sapiens
  CDR3 for alpha chain variable domain of TCR clone 175169 (TRAV12-1, TRAJ17)
CVVNYKAAGNKLTF

SEQ ID NO: 350338 - protein, 13 aa, Homo sapiens
  CDR3 for beta chain variable domain of TCR clone 175169 (TRBV4-1, TRBJ2-1)
CASSQAGGDEQFF

SEQ ID NO: 350339 - protein, 14 aa, Homo sapiens
  CDR3 for alpha chain variable domain of TCR clone 175170 (TRAV12-2, TRAJ53)
CAVKGGGSNYKLTF

SEQ ID NO: 350340 - protein, 13 aa, Homo sapiens
  CDR3 for beta chain variable domain of TCR clone 175170 (TRBV2, TRBJ2-7)
CASSVGGSGEQYF

SEQ ID NO: 350341 - protein, 18 aa, Homo sapiens
  CDR3 for alpha chain variable domain of TCR clone 175171 (TRAV21, TRAJ52)
CAVRPSPAGGTSYGKLTF

SEQ ID NO: 350342 - protein, 16 aa, Homo sapiens
  CDR3 for beta chain variable domain of TCR clone 175171 (TRBV7-2, TRBJ2-1)
CASSLVAGAGYNEQFF

SEQ ID NO: 350343 - protein, 17 aa, Homo sapiens
  CDR3 for alpha chain variable domain of TCR clone 175172 (TRAV3, TRAJ6)
CAVRDGSRAGGSYIPTF

SEQ ID NO: 350344 - protein, 18 aa, Homo sapiens
  CDR3 for beta chain variable domain of TCR clone 175172 (TRBV7-3, TRBJ2-3)
CASSSTGTYPGSTDTQYF

SEQ ID NO: 350345 - protein, 15 aa, Homo sapiens
  CDR3 for alpha chain variable domain of TCR clone 175173 (TRAV8-3, TRAJ45)
CASSYSGGGADGLTL

SEQ ID NO: 350346 - protein, 16 aa, Homo sapiens
  CDR3 for beta chain variable domain of TCR clone 175173 (TRBV20-1, TRBJ2-2)
CSASASGIPGAGELFF

SEQ ID NO: 350347 - protein, 13 aa, Homo sapiens
  CDR3 for alpha chain variable domain of TCR clone 175174 (TRAV13-2, TRAJ13)
CAERQGGYQKVTF

SEQ ID NO: 350348 - protein, 13 aa, Homo sapiens
  CDR3 for beta chain variable domain of TCR clone 175174 (TRBV28, TRBJ1-2)
CAGRDRGNYGYTF

SEQ ID NO: 350349 - protein, 14 aa, Homo sapiens
  CDR3 for alpha chain variable domain of TCR clone 175175 (TRAV1-1, TRAJ27)
CAVIYNTNAGKSTF

SEQ ID NO: 350350 - protein, 14 aa, Homo sapiens
  CDR3 for beta chain variable domain of TCR clone 175175 (TRBV6-5, TRBJ1-2)
CASSYDGTGGGYIF

SEQ ID NO: 350351 - protein, 12 aa, Homo sapiens
  CDR3 for alpha chain variable domain of TCR clone 175176 (TRAV1-1, TRAJ39)
CAVPVVGNMLPF

SEQ ID NO: 350352 - protein, 17 aa, Homo sapiens
  CDR3 for beta chain variable domain of TCR clone 175176 (TRBV28, TRBJ2-5)
CASSTPEGDALQETQYF

SEQ ID NO: 350353 - protein, 13 aa, Homo sapiens
  CDR3 for alpha chain variable domain of TCR clone 175177 (TRAV23/DV6, TRAJ34)
CAAIANNTDKLIF

SEQ ID NO: 350354 - protein, 13 aa, Homo sapiens
  CDR3 for beta chain variable domain of TCR clone 175177 (TRBV29-1, TRBJ2-7)
CSVGPSGGYEQYF

SEQ ID NO: 350355 - protein, 15 aa, Homo sapiens
  CDR3 for alpha chain variable domain of TCR clone 175178 (TRAV3, TRAJ22)
CAVRDRGGSARQLTF

SEQ ID NO: 350356 - protein, 11 aa, Homo sapiens
  CDR3 for beta chain variable domain of TCR clone 175178 (TRBV19, TRBJ2-5)
CASSIKETQYF

SEQ ID NO: 350357 - protein, 15 aa, Homo sapiens
  CDR3 for alpha chain variable domain of TCR clone 175179 (TRAV12-2, TRAJ5)
CAVNGKDTGRRALTF

SEQ ID NO: 350358 - protein, 13 aa, Homo sapiens
  CDR3 for beta chain variable domain of TCR clone 175179 (TRBV5-1, TRBJ2-7)
CASIGTDSYEQYF

SEQ ID NO: 350359 - protein, 14 aa, Homo sapiens
  CDR3 for alpha chain variable domain of TCR clone 175180 (TRAV1-2, TRAJ8)
CAVREDTGFQKLGF

SEQ ID NO: 350360 - protein, 14 aa, Homo sapiens
  CDR3 for beta chain variable domain of TCR clone 175180 (TRBV29-1, TRBJ2-5)
CSVETSGSGETQYF

SEQ ID NO: 350361 - protein, 14 aa, Homo sapiens
  CDR3 for alpha chain variable domain of TCR clone 175181 (TRAV17, TRAJ35)
CATDRPGFVNVLHC

SEQ ID NO: 350362 - protein, 14 aa, Homo sapiens
  CDR3 for beta chain variable domain of TCR clone 175181 (TRBV7-8, TRBJ2-3)
CASSLEAGTDTQYF

SEQ ID NO: 350363 - protein, 14 aa, Homo sapiens
  CDR3 for alpha chain variable domain of TCR clone 175182 (TRAV12-1, TRAJ22)
CVVPYRGSSRQLTF

SEQ ID NO: 350364 - protein, 15 aa, Homo sapiens
  CDR3 for beta chain variable domain of TCR clone 175182 (TRBV12-4, TRBJ2-1)
CASSLGTSAVNEQFF

SEQ ID NO: 350365 - protein, 11 aa, Homo sapiens
  CDR3 for alpha chain variable domain of TCR clone 175183 (TRAV26-1, TRAJ37)
CIVRVGRKLIF

SEQ ID NO: 350366 - protein, 13 aa, Homo sapiens
  CDR3 for beta chain variable domain of TCR clone 175183 (TRBV14, TRBJ1-2)
CASSEDWRYGYTF

SEQ ID NO: 350367 - protein, 13 aa, Homo sapiens
  CDR3 for alpha chain variable domain of TCR clone 175184 (TRAV13-1, TRAJ40)
CAASKGGTYKYNF

SEQ ID NO: 350368 - protein, 13 aa, Homo sapiens
  CDR3 for beta chain variable domain of TCR clone 175184 (TRBV7-6, TRBJ1-2)
CASSLVADYGYTF

SEQ ID NO: 350369 - protein, 14 aa, Homo sapiens
  CDR3 for alpha chain variable domain of TCR clone 175185 (TRAV35, TRAJ33)
CAGSSQDSNYQLIW

SEQ ID NO: 350370 - protein, 15 aa, Homo sapiens
  CDR3 for beta chain variable domain of TCR clone 175185 (TRBV5-1, TRBJ1-4)
VAPAAWKDGNEKLFF

SEQ ID NO: 350371 - protein, 18 aa, Homo sapiens
  CDR3 for alpha chain variable domain of TCR clone 175186 (TRAV21, TRAJ52)
CAVRPSPAGGTRYGKLTF

SEQ ID NO: 350372 - protein, 16 aa, Homo sapiens
  CDR3 for beta chain variable domain of TCR clone 175186 (TRBV7-3, TRBJ2-1)
CASSLEGYGSYNEQFF

SEQ ID NO: 350373 - protein, 15 aa, Homo sapiens
  CDR3 for alpha chain variable domain of TCR clone 175187 (TRAV8-2, TRAJ15)
CVVTMGTQAGTALIF

SEQ ID NO: 350374 - protein, 13 aa, Homo sapiens
  CDR3 for beta chain variable domain of TCR clone 175187 (TRBV2, TRBJ1-5)
CATAGPGNQPQHF

SEQ ID NO: 350375 - protein, 13 aa, Homo sapiens
  CDR3 for alpha chain variable domain of TCR clone 175188 (TRAV2, TRAJ12)
CAVGADSSYKLIF

SEQ ID NO: 350376 - protein, 15 aa, Homo sapiens
  CDR3 for beta chain variable domain of TCR clone 175188 (TRBV7-9, TRBJ1-5)
CASSQGHQPNQPQHF

SEQ ID NO: 350377 - protein, 12 aa, Homo sapiens
  CDR3 for alpha chain variable domain of TCR clone 175189 (TRAV12-2, TRAJ9)
CRERTGGFKTIF

SEQ ID NO: 350378 - protein, 13 aa, Homo sapiens
  CDR3 for beta chain variable domain of TCR clone 175189 (TRBV7-3, TRBJ1-2)
CASSLKRGYGYTF

SEQ ID NO: 350379 - protein, 14 aa, Homo sapiens
  CDR3 for alpha chain variable domain of TCR clone 175190 (TRAV2, TRAJ9)
CAVEDRSGGFKTIF

SEQ ID NO: 350380 - protein, 17 aa, Homo sapiens
  CDR3 for beta chain variable domain of TCR clone 175190 (TRBV7-7, TRBJ2-2)
CASSSVPAGGEIGELFF

SEQ ID NO: 350381 - protein, 16 aa, Homo sapiens
  CDR3 for alpha chain variable domain of TCR clone 175191 (TRAV1-1, TRAJ36)
CAVRDTLLPGANNLFF

SEQ ID NO: 350382 - protein, 14 aa, Homo sapiens
  CDR3 for beta chain variable domain of TCR clone 175191 (TRBV7-2, TRBJ2-5)
CQQLTGASGETQYF

SEQ ID NO: 350383 - protein, 14 aa, Homo sapiens
  CDR3 for alpha chain variable domain of TCR clone 175192 (TRAV12-1, TRAJ12)
CVVFWMDSSYKLIF

SEQ ID NO: 350384 - protein, 13 aa, Homo sapiens
  CDR3 for beta chain variable domain of TCR clone 175192 (TRBV10-3, TRBJ1-2)
CAISERDSYGYTF

SEQ ID NO: 350385 - protein, 13 aa, Homo sapiens
  CDR3 for alpha chain variable domain of TCR clone 175193 (TRAV8-3, TRAJ36)
CAVGATGANNLFF

SEQ ID NO: 350386 - protein, 15 aa, Homo sapiens
  CDR3 for beta chain variable domain of TCR clone 175193 (TRBV7-2, TRBJ1-2)
CASSPSAGWNYGYSF

SEQ ID NO: 350387 - protein, 13 aa, Homo sapiens
  CDR3 for alpha chain variable domain of TCR clone 175194 (TRAV20, TRAJ40)
CAVRTSGTYKYIF

SEQ ID NO: 350388 - protein, 14 aa, Homo sapiens
  CDR3 for beta chain variable domain of TCR clone 175194 (TRBV12-5, TRBJ2-5)
CASGSRTHQETQYF

SEQ ID NO: 350389 - protein, 14 aa, Homo sapiens
  CDR3 for alpha chain variable domain of TCR clone 175195 (TRAV8-3, TRAJ4)
CAVGAAGGYNKLIF

SEQ ID NO: 350390 - protein, 15 aa, Homo sapiens
  CDR3 for beta chain variable domain of TCR clone 175195 (TRBV7-3, TRBJ1-1)
CASSLSYYMNTEAFF

SEQ ID NO: 350391 - protein, 11 aa, Homo sapiens
  CDR3 for alpha chain variable domain of TCR clone 175196 (TRAV12-1, TRAJ30)
CVVNGQDKIIF

SEQ ID NO: 350392 - protein, 16 aa, Homo sapiens
  CDR3 for beta chain variable domain of TCR clone 175196 (TRBV13, TRBJ2-2)
CASSPRTGEHTGELFF

SEQ ID NO: 350393 - protein, 13 aa, Homo sapiens
  CDR3 for alpha chain variable domain of TCR clone 175197 (TRAV21, TRAJ47)
CAVSGLYGNKLVF

SEQ ID NO: 350394 - protein, 17 aa, Homo sapiens
  CDR3 for beta chain variable domain of TCR clone 175197 (TRBV15, TRBJ2-3)
CATIGTTSEEGTDTQYF

SEQ ID NO: 350395 - protein, 11 aa, Homo sapiens
  CDR3 for alpha chain variable domain of TCR clone 175198 (TRAV12-1, TRAJ30)
CVVNGQDKIIF

SEQ ID NO: 350396 - protein, 12 aa, Homo sapiens
  CDR3 for beta chain variable domain of TCR clone 175198 (TRBV27, TRBJ2-2)
CASKLFTGELFL

SEQ ID NO: 350397 - protein, 14 aa, Homo sapiens
  CDR3 for alpha chain variable domain of TCR clone 175199 (TRAV35, TRAJ13)
CAGSPSGGYQKVTF

SEQ ID NO: 350398 - protein, 17 aa, Homo sapiens
  CDR3 for beta chain variable domain of TCR clone 175199 (TRBV18, TRBJ1-5)
CQLTTCRVRQKNQPQHF

SEQ ID NO: 350399 - protein, 13 aa, Homo sapiens
  CDR3 for alpha chain variable domain of TCR clone 175200 (TRAV2, TRAJ15)
CAVASQAGTALIF

SEQ ID NO: 350400 - protein, 15 aa, Homo sapiens
  CDR3 for beta chain variable domain of TCR clone 175200 (TRBV20-1, TRBJ2-7)
RSARDRVSGMDEQYF

SEQ ID NO: 350401 - protein, 12 aa, Homo sapiens
  CDR3 for alpha chain variable domain of TCR clone 175201 (TRAV12-3, TRAJ17)
CAMTLTGNEITF

SEQ ID NO: 350402 - protein, 18 aa, Homo sapiens
  CDR3 for beta chain variable domain of TCR clone 175201 (TRBV4-3, TRBJ1-6)
CASSQETPASSYNSPLHF

SEQ ID NO: 350403 - protein, 13 aa, Homo sapiens
  CDR3 for alpha chain variable domain of TCR clone 175202 (TRAV19, TRAJ54)
CALSDGEPRSWYF

SEQ ID NO: 350404 - protein, 13 aa, Homo sapiens
  CDR3 for beta chain variable domain of TCR clone 175202 (TRBV10-3, TRBJ2-5)
CAMTSGAGETQYF

SEQ ID NO: 350405 - protein, 15 aa, Homo sapiens
  CDR3 for alpha chain variable domain of TCR clone 175203 (TRAV8-1, TRAJ42)
CAVTNYGGSQGNLIF

SEQ ID NO: 350406 - protein, 13 aa, Homo sapiens
  CDR3 for beta chain variable domain of TCR clone 175203 (TRBV12-5, TRBJ2-3)
CASQNRGTDTQYF

SEQ ID NO: 350407 - protein, 16 aa, Homo sapiens
  CDR3 for alpha chain variable domain of TCR clone 175204 (TRAV26-1, TRAJ53)
CIVRVAMGGCNYKLTF

SEQ ID NO: 350408 - protein, 12 aa, Homo sapiens
  CDR3 for beta chain variable domain of TCR clone 175204 (TRBV7-9, TRBJ1-5)
CASSPQGQPQHF

SEQ ID NO: 350409 - protein, 17 aa, Homo sapiens
  CDR3 for alpha chain variable domain of TCR clone 175205 (TRAV27, TRAJ42)
CAERVIYYGGSQGNIIF

SEQ ID NO: 350410 - protein, 14 aa, Homo sapiens
  CDR3 for beta chain variable domain of TCR clone 175205 (TRBV20-1, TRBJ2-1)
CSAQIGGSANEQFF

SEQ ID NO: 350411 - protein, 17 aa, Homo sapiens
  CDR3 for alpha chain variable domain of TCR clone 175206 (TRAV3, TRAJ42)
CAVRDRDYGGSQGNLIF

SEQ ID NO: 350412 - protein, 16 aa, Homo sapiens
  CDR3 for beta chain variable domain of TCR clone 175206 (TRBV19, TRBJ1-6)
CARRLEGNLHNSPLHF

SEQ ID NO: 350413 - protein, 18 aa, Homo sapiens
  CDR3 for alpha chain variable domain of TCR clone 175207 (TRAV21, TRAJ52)
CAVRPSPAGGTSYGELTF

SEQ ID NO: 350414 - protein, 17 aa, Homo sapiens
  CDR3 for beta chain variable domain of TCR clone 175207 (TRBV13, TRBJ2-3)
CASSLSRGAGGRNTQYF

SEQ ID NO: 350415 - protein, 13 aa, Homo sapiens
  CDR3 for alpha chain variable domain of TCR clone 175208 (TRAV12-3, TRAJ13)
CAMGTGCYQKVTF

SEQ ID NO: 350416 - protein, 16 aa, Homo sapiens
  CDR3 for beta chain variable domain of TCR clone 175208 (TRBV9, TRBJ2-1)
CASSVGGGGNYNEQFF

SEQ ID NO: 350417 - protein, 16 aa, Homo sapiens
  CDR3 for alpha chain variable domain of TCR clone 175209 (TRAV12-1, TRAJ12)
CVVNTLLMDSSYKLIF

SEQ ID NO: 350418 - protein, 13 aa, Homo sapiens
  CDR3 for beta chain variable domain of TCR clone 175209 (TRBV11-2, TRBJ2-1)
CASSSEAYNEQLF

SEQ ID NO: 350419 - protein, 15 aa, Homo sapiens
  CDR3 for alpha chain variable domain of TCR clone 175210 (TRAV8-3, TRAJ40)
CAAPSLGSGTYKYIF

SEQ ID NO: 350420 - protein, 16 aa, Homo sapiens
  CDR3 for beta chain variable domain of TCR clone 175210 (TRBV13, TRBJ2-2)
CASSPRTGEHTEELFF

SEQ ID NO: 350421 - protein, 16 aa, Homo sapiens
  CDR3 for alpha chain variable domain of TCR clone 175211 (TRAV20, TRAJ10)
CAVLRGLTGGGNKLTF

SEQ ID NO: 350422 - protein, 14 aa, Homo sapiens
  CDR3 for beta chain variable domain of TCR clone 175211 (TRBV19, TRBJ1-5)
CASRAPESFLSQHF

SEQ ID NO: 350423 - protein, 13 aa, Homo sapiens
  CDR3 for alpha chain variable domain of TCR clone 175212 (TRAV8-3, TRAJ48)
CAVVRFGNEKLTF

SEQ ID NO: 350424 - protein, 16 aa, Homo sapiens
  CDR3 for beta chain variable domain of TCR clone 175212 (TRBV20-1, TRBJ2-5)
CSARDFASGLQETQYF

SEQ ID NO: 350425 - protein, 15 aa, Homo sapiens
  CDR3 for alpha chain variable domain of TCR clone 175213 (TRAV17, TRAJ57)
FATGPSQGGSEKLVF

SEQ ID NO: 350426 - protein, 16 aa, Homo sapiens
  CDR3 for beta chain variable domain of TCR clone 175213 (TRBV12-4, TRBJ1-5)
CASSRPVGGSNQHQHF

SEQ ID NO: 350427 - protein, 13 aa, Homo sapiens
  CDR3 for alpha chain variable domain of TCR clone 175214 (TRAV2, TRAJ40)
CAVFTSGTYKYIS

SEQ ID NO: 350428 - protein, 14 aa, Homo sapiens
  CDR3 for beta chain variable domain of TCR clone 175214 (TRBV19, TRBJ2-1)
CASPTFVLSGEQFF

SEQ ID NO: 350429 - protein, 12 aa, Homo sapiens
  CDR3 for alpha chain variable domain of TCR clone 175215 (TRAV8-4, TRAJ33)
CAVSEGNNQLIW

SEQ ID NO: 350430 - protein, 13 aa, Homo sapiens
  CDR3 for beta chain variable domain of TCR clone 175215 (TRBV10-3, TRBJ2-7)
CASKLAVNYEQYF

SEQ ID NO: 350431 - protein, 11 aa, Homo sapiens
  CDR3 for alpha chain variable domain of TCR clone 175216 (TRAV27, )
CAARRNAGTNH

SEQ ID NO: 350432 - protein, 13 aa, Homo sapiens
  CDR3 for beta chain variable domain of TCR clone 175216 (TRBV12-5, TRBJ2-3)
CASGDRQSDTQYF

SEQ ID NO: 350433 - protein, 16 aa, Homo sapiens
  CDR3 for alpha chain variable domain of TCR clone 175217 (TRAV12-2, TRAJ40)
CAVIRGGTSGTYKYIF

SEQ ID NO: 350434 - protein, 14 aa, Homo sapiens
  CDR3 for beta chain variable domain of TCR clone 175217 (TRBV20-1, TRBJ2-5)
CSARDGRAGETQYI

SEQ ID NO: 350435 - protein, 14 aa, Homo sapiens
  CDR3 for alpha chain variable domain of TCR clone 175218 (TRAV3, TRAJ9)
CAVRLNTGGFKPIF

SEQ ID NO: 350436 - protein, 14 aa, Homo sapiens
  CDR3 for beta chain variable domain of TCR clone 175218 (TRBV20-1, TRBJ1-1)
CSAQTRIGGTEAFF

SEQ ID NO: 350437 - protein, 13 aa, Homo sapiens
  CDR3 for alpha chain variable domain of TCR clone 175219 (TRAV27, TRAJ56)
CAGKPGANSKLTF

SEQ ID NO: 350438 - protein, 15 aa, Homo sapiens
  CDR3 for beta chain variable domain of TCR clone 175219 (TRBV11-2, TRBJ1-2)
CASSLEGVQRNGYTF

SEQ ID NO: 350439 - protein, 14 aa, Homo sapiens
  CDR3 for alpha chain variable domain of TCR clone 175220 (TRAV26-1, TRAJ38)
CIADNAGNNRKLIW

SEQ ID NO: 350440 - protein, 11 aa, Homo sapiens
  CDR3 for beta chain variable domain of TCR clone 175220 (TRBV6-1, TRBJ2-1)
CASISSNEQFF

SEQ ID NO: 350441 - protein, 10 aa, Homo sapiens
  CDR3 for alpha chain variable domain of TCR clone 175221 (TRAV1-2, TRAJ31)
CAFFDARLMF

SEQ ID NO: 350442 - protein, 11 aa, Homo sapiens
  CDR3 for beta chain variable domain of TCR clone 175221 (TRBV29-1, TRBJ2-5)
CSEDRTGTQHF

SEQ ID NO: 350443 - protein, 12 aa, Homo sapiens
  CDR3 for alpha chain variable domain of TCR clone 175222 (TRAV8-3, TRAJ41)
CAVVALGYALNF

SEQ ID NO: 350444 - protein, 16 aa, Homo sapiens
  CDR3 for beta chain variable domain of TCR clone 175222 (TRBV7-6, TRBJ2-3)
CASSDSRGEGTDTQYF

SEQ ID NO: 350445 - protein, 18 aa, Homo sapiens
  CDR3 for alpha chain variable domain of TCR clone 175223 (TRAV9-2, TRAJ52)
CALSRHNAGGTNYGKLTF

SEQ ID NO: 350446 - protein, 13 aa, Homo sapiens
  CDR3 for beta chain variable domain of TCR clone 175223 (TRBV7-9, TRBJ1-2)
CASSLKQNYGYTF

SEQ ID NO: 350447 - protein, 15 aa, Homo sapiens
  CDR3 for alpha chain variable domain of TCR clone 175224 (TRAV17, TRAJ16)
CSTALRFSDGQKLLF

SEQ ID NO: 350448 - protein, 15 aa, Homo sapiens
  CDR3 for beta chain variable domain of TCR clone 175224 (TRBV20-1, TRBJ1-1)
CSASRGVTGNTEAFF

SEQ ID NO: 350449 - protein, 13 aa, Homo sapiens
  CDR3 for alpha chain variable domain of TCR clone 175225 (TRAV8-3, TRAJ43)
CAVVPYNNNDVRF

SEQ ID NO: 350450 - protein, 17 aa, Homo sapiens
  CDR3 for beta chain variable domain of TCR clone 175225 (TRBV7-7, TRBJ1-1)
CASIGDRPNLGVTEAFF

SEQ ID NO: 350451 - protein, 11 aa, Homo sapiens
  CDR3 for alpha chain variable domain of TCR clone 175226 (TRAV3, TRAJ17)
CAEAAGNKLTF

SEQ ID NO: 350452 - protein, 14 aa, Homo sapiens
  CDR3 for beta chain variable domain of TCR clone 175226 (TRBV12-5, TRBJ2-5)
CASGSRTHQETQYF

SEQ ID NO: 350453 - protein, 19 aa, Homo sapiens
  CDR3 for alpha chain variable domain of TCR clone 175227 (TRAV38-1, TRAJ53)
CAFMKHGLESGGSNYKLTF

SEQ ID NO: 350454 - protein, 15 aa, Homo sapiens
  CDR3 for beta chain variable domain of TCR clone 175227 (TRBV6-4, TRBJ2-1)
CASSDSTGGYNEQFF

SEQ ID NO: 350455 - protein, 12 aa, Homo sapiens
  CDR3 for alpha chain variable domain of TCR clone 175228 (TRAV12-2, TRAJ21)
CAVRYNFNQFYF

SEQ ID NO: 350456 - protein, 14 aa, Homo sapiens
  CDR3 for beta chain variable domain of TCR clone 175228 (TRBV28, TRBJ2-1)
CASSYYTAYNEQFF

SEQ ID NO: 350457 - protein, 13 aa, Homo sapiens
  CDR3 for alpha chain variable domain of TCR clone 175229 (TRAV27, TRAJ45)
CRSSGGGADGLTF

SEQ ID NO: 350458 - protein, 13 aa, Homo sapiens
  CDR3 for beta chain variable domain of TCR clone 175229 (TRBV29-1, TRBJ2-2)
CSTTGVNTGELFF

SEQ ID NO: 350459 - protein, 16 aa, Homo sapiens
  CDR3 for alpha chain variable domain of TCR clone 175230 (TRAV30, TRAJ24)
CGTEIVDADSWGKLQF

SEQ ID NO: 350460 - protein, 16 aa, Homo sapiens
  CDR3 for beta chain variable domain of TCR clone 175230 (TRBV6-3, TRBJ1-1)
CASTDLGTVPNTEAFF

SEQ ID NO: 350461 - protein, 13 aa, Homo sapiens
  CDR3 for alpha chain variable domain of TCR clone 175231 (TRAV1-1, TRAJ38)
CASNAGNNRKLIC

SEQ ID NO: 350462 - protein, 14 aa, Homo sapiens
  CDR3 for beta chain variable domain of TCR clone 175231 (TRBV15, TRBJ2-1)
CATSGVEDYNEQFF

SEQ ID NO: 350463 - protein, 13 aa, Homo sapiens
  CDR3 for alpha chain variable domain of TCR clone 175232 (TRAV17, TRAJ5)
CAPMDTGRRALTF

SEQ ID NO: 350464 - protein, 15 aa, Homo sapiens
  CDR3 for beta chain variable domain of TCR clone 175232 (TRBV7-3, TRBJ2-2)
CASSETGQGTGELFF

SEQ ID NO: 350465 - protein, 14 aa, Homo sapiens
  CDR3 for alpha chain variable domain of TCR clone 175233 (TRAV3, TRAJ21)
CAVESQANFNKFYF

SEQ ID NO: 350466 - protein, 18 aa, Homo sapiens
  CDR3 for beta chain variable domain of TCR clone 175233 (TRBV7-9, TRBJ2-1)
CASSLAVSGTSGRDEQFF

SEQ ID NO: 350467 - protein, 14 aa, Homo sapiens
  CDR3 for alpha chain variable domain of TCR clone 175234 (TRAV13-1, TRAJ35)
CAASKGGFGNVLHG

SEQ ID NO: 350468 - protein, 14 aa, Homo sapiens
  CDR3 for beta chain variable domain of TCR clone 175234 (TRBV19, TRBJ2-1)
CASPTFVLSGEQFF

SEQ ID NO: 350469 - protein, 12 aa, Homo sapiens
  CDR3 for alpha chain variable domain of TCR clone 175235 (TRAV26-2, TRAJ21)
CILKGNFNKFYF

SEQ ID NO: 350470 - protein, 14 aa, Homo sapiens
  CDR3 for beta chain variable domain of TCR clone 175235 (TRBV12-4, TRBJ1-1)
CPSSLGTGGTEAFF

SEQ ID NO: 350471 - protein, 14 aa, Homo sapiens
  CDR3 for alpha chain variable domain of TCR clone 175236 (TRAV27, TRAJ13)
CRSSNSGGYQKVTF

SEQ ID NO: 350472 - protein, 10 aa, Homo sapiens
  CDR3 for beta chain variable domain of TCR clone 175236 (TRBV2, TRBJ2-5)
CDSSAETQYF

SEQ ID NO: 350473 - protein, 18 aa, Homo sapiens
  CDR3 for alpha chain variable domain of TCR clone 175237 (TRAV26-1, TRAJ52)
CIVRVAGAGGTSYGKLTF

SEQ ID NO: 350474 - protein, 13 aa, Homo sapiens
  CDR3 for beta chain variable domain of TCR clone 175237 (TRBV7-8, TRBJ1-2)
CASSAQSYYGYSL

SEQ ID NO: 350475 - protein, 23 aa, Homo sapiens
  CDR3 for alpha chain variable domain of TCR clone 175238 (TRAV12-2, TRAJ22)
CAVSFRVHPGPPIVSGSARQLAF

SEQ ID NO: 350476 - protein, 13 aa, Homo sapiens
  CDR3 for beta chain variable domain of TCR clone 175238 (TRBV12-4, TRBJ1-2)
CASSLDSNYGYNF

SEQ ID NO: 350477 - protein, 14 aa, Homo sapiens
  CDR3 for alpha chain variable domain of TCR clone 175239 (TRAV1-2, TRAJ8)
CAVREDTGFQKLVF

SEQ ID NO: 350478 - protein, 15 aa, Homo sapiens
  CDR3 for beta chain variable domain of TCR clone 175239 (TRBV7-2, TRBJ2-3)
CASSLEQGGTDTQYF

SEQ ID NO: 350479 - protein, 16 aa, Homo sapiens
  CDR3 for alpha chain variable domain of TCR clone 175240 (TRAV26-1, TRAJ37)
CIVRVDGSGNTGKLIF

SEQ ID NO: 350480 - protein, 17 aa, Homo sapiens
  CDR3 for beta chain variable domain of TCR clone 175240 (TRBV4-1, TRBJ2-7)
CASSRDPLGVRGGEQYF

SEQ ID NO: 350481 - protein, 16 aa, Homo sapiens
  CDR3 for alpha chain variable domain of TCR clone 175241 (TRAV30, TRAJ49)
SAAQRVGPKTGNQFYF

SEQ ID NO: 350482 - protein, 15 aa, Homo sapiens
  CDR3 for beta chain variable domain of TCR clone 175241 (TRBV7-2, TRBJ2-1)
CASSSGLAGGNEQFF

SEQ ID NO: 350483 - protein, 15 aa, Homo sapiens
  CDR3 for alpha chain variable domain of TCR clone 175242 (TRAV3, TRAJ22)
CAVRDRGGSARQLTF

SEQ ID NO: 350484 - protein, 15 aa, Homo sapiens
  CDR3 for beta chain variable domain of TCR clone 175242 (TRBV11-2, TRBJ1-1)
CASSSRSSLLLSVDK

SEQ ID NO: 350485 - protein, 14 aa, Homo sapiens
  CDR3 for alpha chain variable domain of TCR clone 175243 (TRAV35, TRAJ34)
CAGRGTPTSSSLRL

SEQ ID NO: 350486 - protein, 14 aa, Homo sapiens
  CDR3 for beta chain variable domain of TCR clone 175243 (TRBV19, TRBJ2-1)
CASPTFVLSGEQFF

SEQ ID NO: 350487 - protein, 19 aa, Homo sapiens
  CDR3 for alpha chain variable domain of TCR clone 175244 (TRAV29/DV5, TRAJ49)
CSVLLCSKLTVDTGNQFDF

SEQ ID NO: 350488 - protein, 17 aa, Homo sapiens
  CDR3 for beta chain variable domain of TCR clone 175244 (TRBV13, TRBJ2-3)
WASSLSRVAGGRNTQYF

SEQ ID NO: 350489 - protein, 13 aa, Homo sapiens
  CDR3 for alpha chain variable domain of TCR clone 175245 (TRAV35, TRAJ42)
CAGFPGSQGNLIF

SEQ ID NO: 350490 - protein, 14 aa, Homo sapiens
  CDR3 for beta chain variable domain of TCR clone 175245 (TRBV19, TRBJ2-1)
CASPTFVLSGEQFV

SEQ ID NO: 350491 - protein, 14 aa, Homo sapiens
  CDR3 for alpha chain variable domain of TCR clone 175246 (TRAV17, TRAJ54)
CATDANQGAQKLVL

SEQ ID NO: 350492 - protein, 14 aa, Homo sapiens
  CDR3 for beta chain variable domain of TCR clone 175246 (TRBV12-5, TRBJ2-5)
CASGSRTHQETQYF

SEQ ID NO: 350493 - protein, 12 aa, Homo sapiens
  CDR3 for alpha chain variable domain of TCR clone 175247 (TRAV3, TRAJ43)
CAVRDPNSDMRF

SEQ ID NO: 350494 - protein, 17 aa, Homo sapiens
  CDR3 for beta chain variable domain of TCR clone 175247 (TRBV7-8, TRBJ2-6)
CASSAWTGGAGANVLTF

SEQ ID NO: 350495 - protein, 13 aa, Homo sapiens
  CDR3 for alpha chain variable domain of TCR clone 175248 (TRAV17, TRAJ40)
CATAPGGTYNYIV

SEQ ID NO: 350496 - protein, 12 aa, Homo sapiens
  CDR3 for beta chain variable domain of TCR clone 175248 (TRBV2, TRBJ1-5)
CASSENRTPQHF

SEQ ID NO: 350497 - protein, 15 aa, Homo sapiens
  CDR3 for alpha chain variable domain of TCR clone 175249 (TRAV8-3, TRAJ40)
CAAPSLGSGIYKYIF

SEQ ID NO: 350498 - protein, 16 aa, Homo sapiens
  CDR3 for beta chain variable domain of TCR clone 175249 (TRBV7-3, TRBJ2-3)
CASSLSGYRPEDTQYF

SEQ ID NO: 350499 - protein, 10 aa, Homo sapiens
  CDR3 for alpha chain variable domain of TCR clone 175250 (TRAV21, TRAJ35)
CAVFGNVLHC

SEQ ID NO: 350500 - protein, 16 aa, Homo sapiens
  CDR3 for beta chain variable domain of TCR clone 175250 (TRBV2, TRBJ2-1)
CASSVGGSLSYNEQFF

SEQ ID NO: 350501 - protein, 14 aa, Homo sapiens
  CDR3 for alpha chain variable domain of TCR clone 175251 (TRAV24, TRAJ16)
CAVPPFSDGQKLLF

SEQ ID NO: 350502 - protein, 14 aa, Homo sapiens
  CDR3 for beta chain variable domain of TCR clone 175251 (TRBV19, TRBJ1-1)
ISVPVPAGGGEAFF

SEQ ID NO: 350503 - protein, 14 aa, Homo sapiens
  CDR3 for alpha chain variable domain of TCR clone 175252 (TRAV12-2, TRAJ17)
CAVLFKAAGNKLTF

SEQ ID NO: 350504 - protein, 15 aa, Homo sapiens
  CDR3 for beta chain variable domain of TCR clone 175252 (TRBV4-1, TRBJ2-5)
CASSQWDLYQETQYF

SEQ ID NO: 350505 - protein, 12 aa, Homo sapiens
  CDR3 for alpha chain variable domain of TCR clone 175253 (TRAV21, TRAJ39)
CAADNAGNMLTF

SEQ ID NO: 350506 - protein, 15 aa, Homo sapiens
  CDR3 for beta chain variable domain of TCR clone 175253 (TRBV11-3, TRBJ2-7)
CASSPGPASSYEQYF

SEQ ID NO: 350507 - protein, 11 aa, Homo sapiens
  CDR3 for alpha chain variable domain of TCR clone 175254 (TRAV3, TRAJ13)
CSVTSYQQVTF

SEQ ID NO: 350508 - protein, 15 aa, Homo sapiens
  CDR3 for beta chain variable domain of TCR clone 175254 (TRBV7-9, TRBJ2-7)
CASSSSGLAVYEQYF

SEQ ID NO: 350509 - protein, 12 aa, Homo sapiens
  CDR3 for alpha chain variable domain of TCR clone 175255 (TRAV12-3, TRAJ17)
CAMTLSGNKLTF

SEQ ID NO: 350510 - protein, 12 aa, Homo sapiens
  CDR3 for beta chain variable domain of TCR clone 175255 (TRBV4-1, TRBJ2-3)
CASSQGTDTQYF

SEQ ID NO: 350511 - protein, 12 aa, Homo sapiens
  CDR3 for alpha chain variable domain of TCR clone 175256 (TRAV27, TRAJ13)
CAGVRGYQKVTF

SEQ ID NO: 350512 - protein, 16 aa, Homo sapiens
  CDR3 for beta chain variable domain of TCR clone 175256 (TRBV28, TRBJ2-1)
CANSSSYSGSLNEQFF

SEQ ID NO: 350513 - protein, 15 aa, Homo sapiens
  CDR3 for alpha chain variable domain of TCR clone 175257 (TRAV8-4, TRAJ37)
CAVSRGSGNTGKLIC

SEQ ID NO: 350514 - protein, 14 aa, Homo sapiens
  CDR3 for beta chain variable domain of TCR clone 175257 (TRBV7-6, TRBJ2-3)
CASSLGTVTDTQYF

SEQ ID NO: 350515 - protein, 23 aa, Homo sapiens
  CDR3 for alpha chain variable domain of TCR clone 175258 (TRAV12-2, TRAJ36)
SLLIRDSQPSDSATLERANNLFF

SEQ ID NO: 350516 - protein, 15 aa, Homo sapiens
  CDR3 for beta chain variable domain of TCR clone 175258 (TRBV19, TRBJ2-1)
CASSIQATSYNEQFF

SEQ ID NO: 350517 - protein, 11 aa, Homo sapiens
  CDR3 for alpha chain variable domain of TCR clone 175259 (TRAV21, TRAJ48)
CSVDGNEKLTF

SEQ ID NO: 350518 - protein, 16 aa, Homo sapiens
  CDR3 for beta chain variable domain of TCR clone 175259 (TRBV12-4, TRBJ1-5)
CASSSGPRGSNQHQHF

SEQ ID NO: 350519 - protein, 13 aa, Homo sapiens
  CDR3 for alpha chain variable domain of TCR clone 175260 (TRAV8-4, TRAJ30)
CAVSVNRDDKIIF

SEQ ID NO: 350520 - protein, 13 aa, Homo sapiens
  CDR3 for beta chain variable domain of TCR clone 175260 (TRBV3-1, TRBJ2-2)
CASLARDSGELFF

SEQ ID NO: 350521 - protein, 11 aa, Homo sapiens
  CDR3 for alpha chain variable domain of TCR clone 175261 (TRAV1-2, TRAJ40)
CAVPGTYKYIF

SEQ ID NO: 350522 - protein, 14 aa, Homo sapiens
  CDR3 for beta chain variable domain of TCR clone 175261 (TRBV7-9, TRBJ2-2)
CASSLVQDTGELFF

SEQ ID NO: 350523 - protein, 18 aa, Homo sapiens
  CDR3 for alpha chain variable domain of TCR clone 175262 (TRAV29/DV5, TRAJ52)
CLAGFRGAGGTSYGKLTF

SEQ ID NO: 350524 - protein, 16 aa, Homo sapiens
  CDR3 for beta chain variable domain of TCR clone 175262 (TRBV7-3, TRBJ2-2)
CASSLKRGTLSGELFF

SEQ ID NO: 350525 - protein, 12 aa, Homo sapiens
  CDR3 for alpha chain variable domain of TCR clone 175263 (TRAV12-3, TRAJ17)
CAMTLTGIKLTF

SEQ ID NO: 350526 - protein, 13 aa, Homo sapiens
  CDR3 for beta chain variable domain of TCR clone 175263 (TRBV27, TRBJ2-1)
CVSRTLGVGEQFF

SEQ ID NO: 350527 - protein, 14 aa, Homo sapiens
  CDR3 for alpha chain variable domain of TCR clone 175264 (TRAV13-2, TRAJ9)
CAENSFTGGFKTIF

SEQ ID NO: 350528 - protein, 13 aa, Homo sapiens
  CDR3 for beta chain variable domain of TCR clone 175264 (TRBV19, TRBJ2-7)
CASSIYRTYEQYF

SEQ ID NO: 350529 - protein, 13 aa, Homo sapiens
  CDR3 for alpha chain variable domain of TCR clone 175265 (TRAV12-3, TRAJ43)
CAMIRPNNNDMRF

SEQ ID NO: 350530 - protein, 17 aa, Homo sapiens
  CDR3 for beta chain variable domain of TCR clone 175265 (TRBV11-2, TRBJ2-1)
CASSLYPPGVEYNEQFF

SEQ ID NO: 350531 - protein, 14 aa, Homo sapiens
  CDR3 for alpha chain variable domain of TCR clone 175266 (TRAV26-1, TRAJ49)
CIVRLTNTGNQFYF

SEQ ID NO: 350532 - protein, 15 aa, Homo sapiens
  CDR3 for beta chain variable domain of TCR clone 175266 (TRBV6-1, TRBJ2-1)
CASSELRGEYNEQFF

SEQ ID NO: 350533 - protein, 14 aa, Homo sapiens
  CDR3 for alpha chain variable domain of TCR clone 175267 (TRAV3, TRAJ22)
CAVRDYGSARQLTL

SEQ ID NO: 350534 - protein, 13 aa, Homo sapiens
  CDR3 for beta chain variable domain of TCR clone 175267 (TRBV11-2, TRBJ2-5)
CASGHGAKETQCF

SEQ ID NO: 350535 - protein, 14 aa, Homo sapiens
  CDR3 for alpha chain variable domain of TCR clone 175268 (TRAV27, TRAJ44)
CAASFTGTASKLTF

SEQ ID NO: 350536 - protein, 14 aa, Homo sapiens
  CDR3 for beta chain variable domain of TCR clone 175268 (TRBV7-2, TRBJ2-7)
CASSLPPGQGPQYF

SEQ ID NO: 350537 - protein, 13 aa, Homo sapiens
  CDR3 for alpha chain variable domain of TCR clone 175269 (TRAV3, TRAJ27)
CSVRLLGAGKSTF

SEQ ID NO: 350538 - protein, 13 aa, Homo sapiens
  CDR3 for beta chain variable domain of TCR clone 175269 (TRBV7-9, TRBJ2-3)
CASSPGPTDTQYF

SEQ ID NO: 350539 - protein, 14 aa, Homo sapiens
  CDR3 for alpha chain variable domain of TCR clone 175270 (TRAV23/DV6, TRAJ39)
CAARMRGAGNMLTF

SEQ ID NO: 350540 - protein, 14 aa, Homo sapiens
  CDR3 for beta chain variable domain of TCR clone 175270 (TRBV10-3, TRBJ2-3)
CAISVTRSRDTQYF

SEQ ID NO: 350541 - protein, 17 aa, Homo sapiens
  CDR3 for alpha chain variable domain of TCR clone 175271 (TRAV36/DV7, TRAJ52)
CAVAQRAGGTSYGKLTF

SEQ ID NO: 350542 - protein, 14 aa, Homo sapiens
  CDR3 for beta chain variable domain of TCR clone 175271 (TRBV19, TRBJ1-5)
CASRAPDSFLSQHF

SEQ ID NO: 350543 - protein, 18 aa, Homo sapiens
  CDR3 for alpha chain variable domain of TCR clone 175272 (TRAV13-1, TRAJ52)
CAAKNPNAGGTSYGKLTF

SEQ ID NO: 350544 - protein, 18 aa, Homo sapiens
  CDR3 for beta chain variable domain of TCR clone 175272 (TRBV4-1, TRBJ1-4)
CASSPGTGGAWTNEKLFF

SEQ ID NO: 350545 - protein, 16 aa, Homo sapiens
  CDR3 for alpha chain variable domain of TCR clone 175273 (TRAV30, TRAJ24)
CGTEIVDAESWGKFQF

SEQ ID NO: 350546 - protein, 14 aa, Homo sapiens
  CDR3 for beta chain variable domain of TCR clone 175273 (TRBV9, TRBJ2-7)
CASSVGVGSYEQYF

SEQ ID NO: 350547 - protein, 12 aa, Homo sapiens
  CDR3 for alpha chain variable domain of TCR clone 175274 (TRAV12-3, TRAJ40)
CAMSSGTYKYIF

SEQ ID NO: 350548 - protein, 14 aa, Homo sapiens
  CDR3 for beta chain variable domain of TCR clone 175274 (TRBV10-3, TRBJ1-1)
CAISDTDRGVEAFF

SEQ ID NO: 350549 - protein, 16 aa, Homo sapiens
  CDR3 for alpha chain variable domain of TCR clone 175275 (TRAV13-1, TRAJ37)
CAASSLGSSNTGKLIF

SEQ ID NO: 350550 - protein, 14 aa, Homo sapiens
  CDR3 for beta chain variable domain of TCR clone 175275 (TRBV12-5, TRBJ2-5)
CASGSRTHQETHYF

SEQ ID NO: 350551 - protein, 12 aa, Homo sapiens
  CDR3 for alpha chain variable domain of TCR clone 175276 (TRAV23/DV6, TRAJ17)
CARGSCRQQATF

SEQ ID NO: 350552 - protein, 14 aa, Homo sapiens
  CDR3 for beta chain variable domain of TCR clone 175276 (TRBV7-2, TRBJ1-2)
RASSQTGSTYGYTF

SEQ ID NO: 350553 - protein, 13 aa, Homo sapiens
  CDR3 for alpha chain variable domain of TCR clone 175277 (TRAV12-3, TRAJ49)
CAMSRNTGNQFYF

SEQ ID NO: 350554 - protein, 15 aa, Homo sapiens
  CDR3 for beta chain variable domain of TCR clone 175277 (TRBV11-3, TRBJ2-3)
CASLKDGREGDTQYF

SEQ ID NO: 350555 - protein, 14 aa, Homo sapiens
  CDR3 for alpha chain variable domain of TCR clone 175278 (TRAV17, TRAJ12)
CAILPMDSSYKLIF

SEQ ID NO: 350556 - protein, 13 aa, Homo sapiens
  CDR3 for beta chain variable domain of TCR clone 175278 (TRBV4-1, TRBJ2-2)
CASSQVNTGELFF

SEQ ID NO: 350557 - protein, 11 aa, Homo sapiens
  CDR3 for alpha chain variable domain of TCR clone 175279 (TRAV3, TRAJ21)
CAVGNFNKFYF

SEQ ID NO: 350558 - protein, 15 aa, Homo sapiens
  CDR3 for beta chain variable domain of TCR clone 175279 (TRBV28, TRBJ2-5)
CASSQTSGSLETQYF

SEQ ID NO: 350559 - protein, 17 aa, Homo sapiens
  CDR3 for alpha chain variable domain of TCR clone 175280 (TRAV38-1, TRAJ28)
CAFMEPTSGAGSYQLTF

SEQ ID NO: 350560 - protein, 15 aa, Homo sapiens
  CDR3 for beta chain variable domain of TCR clone 175280 (TRBV5-1, TRBJ2-4)
CASSLGGGGSYMQYF

SEQ ID NO: 350561 - protein, 13 aa, Homo sapiens
  CDR3 for alpha chain variable domain of TCR clone 175281 (TRAV12-1, TRAJ37)
CVVNAGNTGKLVF

SEQ ID NO: 350562 - protein, 14 aa, Homo sapiens
  CDR3 for beta chain variable domain of TCR clone 175281 (TRBV7-2, TRBJ2-3)
CASRRGLAADTQYF

SEQ ID NO: 350563 - protein, 12 aa, Homo sapiens
  CDR3 for alpha chain variable domain of TCR clone 175282 (TRAV3, TRAJ43)
CAVRDTNNDMRF

SEQ ID NO: 350564 - protein, 14 aa, Homo sapiens
  CDR3 for beta chain variable domain of TCR clone 175282 (TRBV5-1, TRBJ2-3)
CASSLFGPTDTQYF

SEQ ID NO: 350565 - protein, 13 aa, Homo sapiens
  CDR3 for alpha chain variable domain of TCR clone 175283 (TRAV8-1, TRAJ34)
CAVGGYNTDKLIF

SEQ ID NO: 350566 - protein, 17 aa, Homo sapiens
  CDR3 for beta chain variable domain of TCR clone 175283 (TRBV7-3, TRBJ2-3)
CASSLMKRMRGADTQYF

SEQ ID NO: 350567 - protein, 14 aa, Homo sapiens
  CDR3 for alpha chain variable domain of TCR clone 175284 (TRAV26-1, TRAJ15)
CIVRANQAGTALLF

SEQ ID NO: 350568 - protein, 16 aa, Homo sapiens
  CDR3 for beta chain variable domain of TCR clone 175284 (TRBV20-1, TRBJ1-4)
CSAIGGPRGANEKLFF

SEQ ID NO: 350569 - protein, 13 aa, Homo sapiens
  CDR3 for alpha chain variable domain of TCR clone 175285 (TRAV23/DV6, TRAJ16)
CAASISDGQKLLF

SEQ ID NO: 350570 - protein, 16 aa, Homo sapiens
  CDR3 for beta chain variable domain of TCR clone 175285 (TRBV5-7, TRBJ2-5)
CASTLAPAGGRETQYF

SEQ ID NO: 350571 - protein, 15 aa, Homo sapiens
  CDR3 for alpha chain variable domain of TCR clone 175286 (TRAV25, TRAJ52)
CAGRPGGTSYGKLTF

SEQ ID NO: 350572 - protein, 16 aa, Homo sapiens
  CDR3 for beta chain variable domain of TCR clone 175286 (TRBV9, TRBJ2-2)
CASSAMGKGNTGELFF

SEQ ID NO: 350573 - protein, 16 aa, Homo sapiens
  CDR3 for alpha chain variable domain of TCR clone 175287 (TRAV12-2, TRAJ56)
CAVRRVDIGANSKLTF

SEQ ID NO: 350574 - protein, 11 aa, Homo sapiens
  CDR3 for beta chain variable domain of TCR clone 175287 (TRBV3-1, TRBJ2-7)
CASSQVREQYF

SEQ ID NO: 350575 - protein, 11 aa, Homo sapiens
  CDR3 for alpha chain variable domain of TCR clone 175288 (TRAV3, TRAJ13)
CAVTSYQKVTF

SEQ ID NO: 350576 - protein, 14 aa, Homo sapiens
  CDR3 for beta chain variable domain of TCR clone 175288 (TRBV7-2, TRBJ2-5)
CASSPRGSSETQYF

SEQ ID NO: 350577 - protein, 14 aa, Homo sapiens
  CDR3 for alpha chain variable domain of TCR clone 175289 (TRAV12-3, TRAJ42)
CAMNYGGSQGNLIF

SEQ ID NO: 350578 - protein, 12 aa, Homo sapiens
  CDR3 for beta chain variable domain of TCR clone 175289 (TRBV18, TRBJ1-1)
CASSPGGTEAFF

SEQ ID NO: 350579 - protein, 13 aa, Homo sapiens
  CDR3 for alpha chain variable domain of TCR clone 175290 (TRAV27, TRAJ45)
CRSSGGGADGLTF

SEQ ID NO: 350580 - protein, 14 aa, Homo sapiens
  CDR3 for beta chain variable domain of TCR clone 175290 (TRBV5-1, TRBJ2-7)
CASSRGESLYEQYF

SEQ ID NO: 350581 - protein, 15 aa, Homo sapiens
  CDR3 for alpha chain variable domain of TCR clone 175291 (TRAV16, TRAJ12)
CSKWPLRDSSYKLIF

SEQ ID NO: 350582 - protein, 15 aa, Homo sapiens
  CDR3 for beta chain variable domain of TCR clone 175291 (TRBV24-1, TRBJ2-4)
CATSDPRDRANIQYF

SEQ ID NO: 350583 - protein, 13 aa, Homo sapiens
  CDR3 for alpha chain variable domain of TCR clone 175292 (TRAV1-2, TRAJ12)
CAVSMDSSYKLIF

SEQ ID NO: 350584 - protein, 13 aa, Homo sapiens
  CDR3 for beta chain variable domain of TCR clone 175292 (TRBV28, TRBJ2-7)
CASSPSGTCEQYF

SEQ ID NO: 350585 - protein, 16 aa, Homo sapiens
  CDR3 for alpha chain variable domain of TCR clone 175293 (TRAV21, TRAJ17)
CAVRPGEEAAGNKLTF

SEQ ID NO: 350586 - protein, 15 aa, Homo sapiens
  CDR3 for beta chain variable domain of TCR clone 175293 (TRBV2, TRBJ2-7)
CASSENRQGKGEQYF

SEQ ID NO: 350587 - protein, 14 aa, Homo sapiens
  CDR3 for alpha chain variable domain of TCR clone 175294 (TRAV35, TRAJ22)
CAGLRLGSARQLTF

SEQ ID NO: 350588 - protein, 15 aa, Homo sapiens
  CDR3 for beta chain variable domain of TCR clone 175294 (TRBV20-1, TRBJ2-7)
CSARDRVSGMDEQYF

SEQ ID NO: 350589 - protein, 11 aa, Homo sapiens
  CDR3 for alpha chain variable domain of TCR clone 175295 (TRAV2, TRAJ13)
CASGCYQKVTF

SEQ ID NO: 350590 - protein, 13 aa, Homo sapiens
  CDR3 for beta chain variable domain of TCR clone 175295 (TRBV24-1, TRBJ2-3)
CATSTGGTDTQYF

SEQ ID NO: 350591 - protein, 13 aa, Homo sapiens
  CDR3 for alpha chain variable domain of TCR clone 175296 (TRAV21, TRAJ37)
CAVSSGNTGKLIF

SEQ ID NO: 350592 - protein, 16 aa, Homo sapiens
  CDR3 for beta chain variable domain of TCR clone 175296 (TRBV7-9, TRBJ2-1)
CASSDVAGGSYNEQFF

SEQ ID NO: 350593 - protein, 13 aa, Homo sapiens
  CDR3 for alpha chain variable domain of TCR clone 175297 (TRAV12-1, TRAJ26)
CVVRRNYGQNFVF

SEQ ID NO: 350594 - protein, 14 aa, Homo sapiens
  CDR3 for beta chain variable domain of TCR clone 175297 (TRBV19, TRBJ2-1)
CASPTFVLSGEQFF

SEQ ID NO: 350595 - protein, 13 aa, Homo sapiens
  CDR3 for alpha chain variable domain of TCR clone 175298 (TRAV1-2, TRAJ26)
CAVRPNYGQNFVF

SEQ ID NO: 350596 - protein, 14 aa, Homo sapiens
  CDR3 for beta chain variable domain of TCR clone 175298 (TRBV4-1, TRBJ2-7)
CASSQDLALETQYF

SEQ ID NO: 350597 - protein, 14 aa, Homo sapiens
  CDR3 for alpha chain variable domain of TCR clone 175299 (TRAV17, TRAJ34)
CAPAEVRVSDKLIF

SEQ ID NO: 350598 - protein, 17 aa, Homo sapiens
  CDR3 for beta chain variable domain of TCR clone 175299 (TRBV13, TRBJ2-3)
CASSLSRVAGGRNTQYF

SEQ ID NO: 350599 - protein, 14 aa, Homo sapiens
  CDR3 for alpha chain variable domain of TCR clone 175300 (TRAV1-2, TRAJ16)
FAVNRFSDGQKLLF

SEQ ID NO: 350600 - protein, 15 aa, Homo sapiens
  CDR3 for beta chain variable domain of TCR clone 175300 (TRBV9, TRBJ2-1)
CASSLAGSSYNEQFF

SEQ ID NO: 350601 - protein, 14 aa, Homo sapiens
  CDR3 for alpha chain variable domain of TCR clone 175301 (TRAV38-1, TRAJ45)
CAYYSGGGADGLTF

SEQ ID NO: 350602 - protein, 15 aa, Homo sapiens
  CDR3 for beta chain variable domain of TCR clone 175301 (TRBV15, TRBJ1-4)
CATSRAMGSYEKLFF

SEQ ID NO: 350603 - protein, 15 aa, Homo sapiens
  CDR3 for alpha chain variable domain of TCR clone 175302 (TRAV12-1, TRAJ44)
CVADLPTGTASKLTL

SEQ ID NO: 350604 - protein, 13 aa, Homo sapiens
  CDR3 for beta chain variable domain of TCR clone 175302 (TRBV6-5, TRBJ2-5)
CASSPQGGETQSF

SEQ ID NO: 350605 - protein, 11 aa, Homo sapiens
  CDR3 for alpha chain variable domain of TCR clone 175303 (TRAV12-1, TRAJ30)
CVVNGQDKIIV

SEQ ID NO: 350606 - protein, 15 aa, Homo sapiens
  CDR3 for beta chain variable domain of TCR clone 175303 (TRBV28, TRBJ2-5)
CASSSGRTIQETQYF

SEQ ID NO: 350607 - protein, 13 aa, Homo sapiens
  CDR3 for alpha chain variable domain of TCR clone 175304 (TRAV2, TRAJ15)
CAVASQAGTALIF

SEQ ID NO: 350608 - protein, 17 aa, Homo sapiens
  CDR3 for beta chain variable domain of TCR clone 175304 (TRBV28, TRBJ2-1)
CASSSARQALTYNEQFF

SEQ ID NO: 350609 - protein, 14 aa, Homo sapiens
  CDR3 for alpha chain variable domain of TCR clone 175305 (TRAV12-2, TRAJ40)
CAVKIPSGTYKYIF

SEQ ID NO: 350610 - protein, 13 aa, Homo sapiens
  CDR3 for beta chain variable domain of TCR clone 175305 (TRBV20-1, TRBJ1-1)
QCKTRIGGTEAFF

SEQ ID NO: 350611 - protein, 16 aa, Homo sapiens
  CDR3 for alpha chain variable domain of TCR clone 175306 (TRAV13-1, TRAJ48)
CAASVFGNFGNEKLTF

SEQ ID NO: 350612 - protein, 16 aa, Homo sapiens
  CDR3 for beta chain variable domain of TCR clone 175306 (TRBV7-2, TRBJ2-6)
CASSERRASGANVLTF

SEQ ID NO: 350613 - protein, 15 aa, Homo sapiens
  CDR3 for alpha chain variable domain of TCR clone 175307 (TRAV9-2, TRAJ45)
CALLDSGGGADGLTF

SEQ ID NO: 350614 - protein, 13 aa, Homo sapiens
  CDR3 for beta chain variable domain of TCR clone 175307 (TRBV10-2, TRBJ2-7)
CASGASGGYEQYF

SEQ ID NO: 350615 - protein, 13 aa, Homo sapiens
  CDR3 for alpha chain variable domain of TCR clone 175308 (TRAV13-2, TRAJ48)
CAAMDFGNEKLTF

SEQ ID NO: 350616 - protein, 15 aa, Homo sapiens
  CDR3 for beta chain variable domain of TCR clone 175308 (TRBV2, TRBJ2-1)
CASSELAGSYNEQFF

SEQ ID NO: 350617 - protein, 12 aa, Homo sapiens
  CDR3 for alpha chain variable domain of TCR clone 175309 (TRAV13-2, TRAJ23)
CAERHRGGKLIF

SEQ ID NO: 350618 - protein, 12 aa, Homo sapiens
  CDR3 for beta chain variable domain of TCR clone 175309 (TRBV5-4, TRBJ2-2)
CASSPLTGELFF

SEQ ID NO: 350619 - protein, 17 aa, Homo sapiens
  CDR3 for alpha chain variable domain of TCR clone 175310 (TRAV3, TRAJ6)
CAVRDGPRAGGSYIPTF

SEQ ID NO: 350620 - protein, 15 aa, Homo sapiens
  CDR3 for beta chain variable domain of TCR clone 175310 (TRBV11-2, TRBJ2-1)
CASSLTSGGYNEQFF

SEQ ID NO: 350621 - protein, 14 aa, Homo sapiens
  CDR3 for alpha chain variable domain of TCR clone 175311 (TRAV14/DV4, TRAJ20)
CAMRESLNDYKLSF

SEQ ID NO: 350622 - protein, 15 aa, Homo sapiens
  CDR3 for beta chain variable domain of TCR clone 175311 (TRBV7-9, TRBJ2-7)
CASSLALAEAYEQYL

SEQ ID NO: 350623 - protein, 16 aa, Homo sapiens
  CDR3 for alpha chain variable domain of TCR clone 175312 (TRAV3, TRAJ37)
CAVRPHGSGNTGKLIF

SEQ ID NO: 350624 - protein, 15 aa, Homo sapiens
  CDR3 for beta chain variable domain of TCR clone 175312 (TRBV29-1, TRBJ2-7)
CSVEFFDRGSYEQYF

SEQ ID NO: 350625 - protein, 14 aa, Homo sapiens
  CDR3 for alpha chain variable domain of TCR clone 175313 (TRAV13-1, TRAJ20)
CAARPGSNDYKLSF

SEQ ID NO: 350626 - protein, 16 aa, Homo sapiens
  CDR3 for beta chain variable domain of TCR clone 175313 (TRBV19, TRBJ2-3)
CASSPGAASRTDTQYF

SEQ ID NO: 350627 - protein, 11 aa, Homo sapiens
  CDR3 for alpha chain variable domain of TCR clone 175314 (TRAV16, TRAJ33)
CALHSNYQLIR

SEQ ID NO: 350628 - protein, 14 aa, Homo sapiens
  CDR3 for beta chain variable domain of TCR clone 175314 (TRBV7-2, TRBJ2-7)
CASRSQGAAYEQYF

SEQ ID NO: 350629 - protein, 14 aa, Homo sapiens
  CDR3 for alpha chain variable domain of TCR clone 175315 (TRAV2, TRAJ37)
CAVDFTSNTGKLIF

SEQ ID NO: 350630 - protein, 12 aa, Homo sapiens
  CDR3 for beta chain variable domain of TCR clone 175315 (TRBV6-3, TRBJ2-7)
CASSRQGYEQYF

SEQ ID NO: 350631 - protein, 14 aa, Homo sapiens
  CDR3 for alpha chain variable domain of TCR clone 175316 (TRAV16, TRAJ33)
CALSAMDSNYQLIW

SEQ ID NO: 350632 - protein, 16 aa, Homo sapiens
  CDR3 for beta chain variable domain of TCR clone 175316 (TRBV19, TRBJ1-5)
CASSIDRGGPRQPQHF

SEQ ID NO: 350633 - protein, 11 aa, Homo sapiens
  CDR3 for alpha chain variable domain of TCR clone 175317 (TRAV12-1, TRAJ8)
CVVTGFQTLVF

SEQ ID NO: 350634 - protein, 14 aa, Homo sapiens
  CDR3 for beta chain variable domain of TCR clone 175317 (TRBV19, TRBJ2-1)
CASGKSTQYNEQFF

SEQ ID NO: 350635 - protein, 13 aa, Homo sapiens
  CDR3 for alpha chain variable domain of TCR clone 175318 (TRAV27, TRAJ45)
CRSSGGGADGLTF

SEQ ID NO: 350636 - protein, 13 aa, Homo sapiens
  CDR3 for beta chain variable domain of TCR clone 175318 (TRBV7-7, TRBJ2-5)
CASGRSGQETQYF

SEQ ID NO: 350637 - protein, 15 aa, Homo sapiens
  CDR3 for alpha chain variable domain of TCR clone 175319 (TRAV16, TRAJ26)
CITVLQSNYGQNFVF

SEQ ID NO: 350638 - protein, 15 aa, Homo sapiens
  CDR3 for beta chain variable domain of TCR clone 175319 (TRBV7-2, TRBJ2-3)
CASSLTGTSTDTQYF

SEQ ID NO: 350639 - protein, 13 aa, Homo sapiens
  CDR3 for alpha chain variable domain of TCR clone 175320 (TRAV21, TRAJ27)
CAARPGNAGKSTF

SEQ ID NO: 350640 - protein, 14 aa, Homo sapiens
  CDR3 for beta chain variable domain of TCR clone 175320 (TRBV11-1, TRBJ2-7)
CASSFRQGSYEQYF

SEQ ID NO: 350641 - protein, 16 aa, Homo sapiens
  CDR3 for alpha chain variable domain of TCR clone 175321 (TRAV14/DV4, TRAJ20)
CAMREGRSRDDSKLSF

SEQ ID NO: 350642 - protein, 14 aa, Homo sapiens
  CDR3 for beta chain variable domain of TCR clone 175321 (TRBV7-2, TRBJ1-1)
CASSFLTGTTEAFF

SEQ ID NO: 350643 - protein, 12 aa, Homo sapiens
  CDR3 for alpha chain variable domain of TCR clone 175322 (TRAV21, TRAJ49)
CAVNDGGNQFYF

SEQ ID NO: 350644 - protein, 15 aa, Homo sapiens
  CDR3 for beta chain variable domain of TCR clone 175322 (TRBV9, TRBJ1-6)
CASSVAGTGDSPLHF

SEQ ID NO: 350645 - protein, 10 aa, Homo sapiens
  CDR3 for alpha chain variable domain of TCR clone 175323 (TRAV1-2, TRAJ20)
CALNDYKLSF

SEQ ID NO: 350646 - protein, 13 aa, Homo sapiens
  CDR3 for beta chain variable domain of TCR clone 175323 (TRBV7-3, TRBJ1-1)
CASSQDWGAEAFF

SEQ ID NO: 350647 - protein, 18 aa, Homo sapiens
  CDR3 for alpha chain variable domain of TCR clone 175324 (TRAV13-1, TRAJ52)
CAAKNPNAVGTSYGKLTF

SEQ ID NO: 350648 - protein, 17 aa, Homo sapiens
  CDR3 for beta chain variable domain of TCR clone 175324 (TRBV20-1, TRBJ2-1)
CSASSSGLAGSYNEQFF

SEQ ID NO: 350649 - protein, 12 aa, Homo sapiens
  CDR3 for alpha chain variable domain of TCR clone 175325 (TRAV27, TRAJ36)
ASTPAGANNLFF

SEQ ID NO: 350650 - protein, 14 aa, Homo sapiens
  CDR3 for beta chain variable domain of TCR clone 175325 (TRBV11-2, TRBJ2-3)
CASSRLARTDTQYF

SEQ ID NO: 350651 - protein, 13 aa, Homo sapiens
  CDR3 for alpha chain variable domain of TCR clone 175326 (TRAV12-3, TRAJ32)
CAMRDGATNKLIF

SEQ ID NO: 350652 - protein, 12 aa, Homo sapiens
  CDR3 for beta chain variable domain of TCR clone 175326 (TRBV19, TRBJ1-5)
CASSIAQQPQHF

SEQ ID NO: 350653 - protein, 13 aa, Homo sapiens
  CDR3 for alpha chain variable domain of TCR clone 175327 (TRAV26-2, TRAJ54)
CIPRVGGAQKLVF

SEQ ID NO: 350654 - protein, 16 aa, Homo sapiens
  CDR3 for beta chain variable domain of TCR clone 175327 (TRBV12-4, TRBJ2-5)
CASSFFVRGRQETQYF

SEQ ID NO: 350655 - protein, 14 aa, Homo sapiens
  CDR3 for alpha chain variable domain of TCR clone 175328 (TRAV12-1, TRAJ12)
CVVTRMDSSYKLIF

SEQ ID NO: 350656 - protein, 13 aa, Homo sapiens
  CDR3 for beta chain variable domain of TCR clone 175328 (TRBV20-1, TRBJ1-1)
CSAKGGGNTEAVF

SEQ ID NO: 350657 - protein, 14 aa, Homo sapiens
  CDR3 for alpha chain variable domain of TCR clone 175329 (TRAV1-2, TRAJ16)
CAVNRFSDGQKQLF

SEQ ID NO: 350658 - protein, 12 aa, Homo sapiens
  CDR3 for beta chain variable domain of TCR clone 175329 (TRBV11-2, TRBJ2-2)
CASSLGGGELFF

SEQ ID NO: 350659 - protein, 15 aa, Homo sapiens
  CDR3 for alpha chain variable domain of TCR clone 175330 (TRAV12-1, TRAJ37)
CVVNIMGGNTGKLLF

SEQ ID NO: 350660 - protein, 14 aa, Homo sapiens
  CDR3 for beta chain variable domain of TCR clone 175330 (TRBV12-4, TRBJ1-1)
CASSLGTGGTEAFF

SEQ ID NO: 350661 - protein, 12 aa, Homo sapiens
  CDR3 for alpha chain variable domain of TCR clone 175331 (TRAV8-3, TRAJ20)
CAVGANDYKLSF

SEQ ID NO: 350662 - protein, 14 aa, Homo sapiens
  CDR3 for beta chain variable domain of TCR clone 175331 (TRBV9, TRBJ2-7)
CASSVGVGSYEQYF

SEQ ID NO: 350663 - protein, 18 aa, Homo sapiens
  CDR3 for alpha chain variable domain of TCR clone 175332 (TRAV3, TRAJ17)
CAGRARRGGRSCRQQANF

SEQ ID NO: 350664 - protein, 14 aa, Homo sapiens
  CDR3 for beta chain variable domain of TCR clone 175332 (TRBV4-1, TRBJ2-2)
CASSQAVNTGELFF

SEQ ID NO: 350665 - protein, 13 aa, Homo sapiens
  CDR3 for alpha chain variable domain of TCR clone 175333 (TRAV21, TRAJ57)
CAVTQGGSEKLVF

SEQ ID NO: 350666 - protein, 14 aa, Homo sapiens
  CDR3 for beta chain variable domain of TCR clone 175333 (TRBV10-3, TRBJ2-1)
CAISSDLAYNEQFF

SEQ ID NO: 350667 - protein, 15 aa, Homo sapiens
  CDR3 for alpha chain variable domain of TCR clone 175334 (TRAV2, TRAJ9)
CAVEDRGTGGFKTIF

SEQ ID NO: 350668 - protein, 19 aa, Homo sapiens
  CDR3 for beta chain variable domain of TCR clone 175334 (TRBV28, TRBJ2-7)
CASSYSGTTRLGWVYEQYF

SEQ ID NO: 350669 - protein, 14 aa, Homo sapiens
  CDR3 for alpha chain variable domain of TCR clone 175335 (TRAV16, TRAJ44)
CALSTTCTASKLTF

SEQ ID NO: 350670 - protein, 14 aa, Homo sapiens
  CDR3 for beta chain variable domain of TCR clone 175335 (TRBV20-1, TRBJ2-7)
CSAISREASYEQYF

SEQ ID NO: 350671 - protein, 14 aa, Homo sapiens
  CDR3 for alpha chain variable domain of TCR clone 175336 (TRAV16, TRAJ57)
CALSGQGGSEKLVF

SEQ ID NO: 350672 - protein, 15 aa, Homo sapiens
  CDR3 for beta chain variable domain of TCR clone 175336 (TRBV19, TRBJ1-6)
CASSTQGAVGSPLHF

SEQ ID NO: 350673 - protein, 15 aa, Homo sapiens
  CDR3 for alpha chain variable domain of TCR clone 175337 (TRAV23/DV6, TRAJ36)
CAALRAQTGANNLFF

SEQ ID NO: 350674 - protein, 15 aa, Homo sapiens
  CDR3 for beta chain variable domain of TCR clone 175337 (TRBV12-4, TRBJ1-2)
CASSPITGGGYGDTF

SEQ ID NO: 350675 - protein, 12 aa, Homo sapiens
  CDR3 for alpha chain variable domain of TCR clone 175338 (TRAV13-1, TRAJ15)
CAASQAETALIF

SEQ ID NO: 350676 - protein, 13 aa, Homo sapiens
  CDR3 for beta chain variable domain of TCR clone 175338 (TRBV10-3, TRBJ1-2)
CAISKRDSYGYTF

SEQ ID NO: 350677 - protein, 12 aa, Homo sapiens
  CDR3 for alpha chain variable domain of TCR clone 175339 (TRAV1-1, TRAJ43)
CAPRVSSNDMRF

SEQ ID NO: 350678 - protein, 16 aa, Homo sapiens
  CDR3 for beta chain variable domain of TCR clone 175339 (TRBV15, TRBJ1-2)
CATSRGPRTGGGGYTF

SEQ ID NO: 350679 - protein, 12 aa, Homo sapiens
  CDR3 for alpha chain variable domain of TCR clone 175340 (TRAV27, TRAJ58)
CAGARDTSRLTF

SEQ ID NO: 350680 - protein, 14 aa, Homo sapiens
  CDR3 for beta chain variable domain of TCR clone 175340 (TRBV27, TRBJ2-7)
CASSSRPLFYEQYF

SEQ ID NO: 350681 - protein, 13 aa, Homo sapiens
  CDR3 for alpha chain variable domain of TCR clone 175341 (TRAV16, TRAJ28)
CALTGAGSYQLTF

SEQ ID NO: 350682 - protein, 15 aa, Homo sapiens
  CDR3 for beta chain variable domain of TCR clone 175341 (TRBV28, TRBJ1-5)
CQQSDRTGLNQPQHF

SEQ ID NO: 350683 - protein, 16 aa, Homo sapiens
  CDR3 for alpha chain variable domain of TCR clone 175342 (TRAV30, TRAJ57)
CGTGWAPQSGSEKLVF

SEQ ID NO: 350684 - protein, 14 aa, Homo sapiens
  CDR3 for beta chain variable domain of TCR clone 175342 (TRBV18, TRBJ1-1)
CASSPGSQGVEAFF

SEQ ID NO: 350685 - protein, 14 aa, Homo sapiens
  CDR3 for alpha chain variable domain of TCR clone 175343 (TRAV3, TRAJ27)
CAVRDDTNVGKSTF

SEQ ID NO: 350686 - protein, 15 aa, Homo sapiens
  CDR3 for beta chain variable domain of TCR clone 175343 (TRBV7-7, TRBJ2-2)
CATSKLAKNTGELFF

SEQ ID NO: 350687 - protein, 13 aa, Homo sapiens
  CDR3 for alpha chain variable domain of TCR clone 175344 (TRAV20, TRAJ31)
CAVQAIGGARLMF

SEQ ID NO: 350688 - protein, 17 aa, Homo sapiens
  CDR3 for beta chain variable domain of TCR clone 175344 (TRBV19, TRBJ1-1)
CASSIAGRGLMNTEAFF

SEQ ID NO: 350689 - protein, 16 aa, Homo sapiens
  CDR3 for alpha chain variable domain of TCR clone 175345 (TRAV12-3, TRAJ53)
CAMSPGSGGSNYKLTF

SEQ ID NO: 350690 - protein, 15 aa, Homo sapiens
  CDR3 for beta chain variable domain of TCR clone 175345 (TRBV7-2, TRBJ2-1)
CASRKTGSSYNEQFF

SEQ ID NO: 350691 - protein, 12 aa, Homo sapiens
  CDR3 for alpha chain variable domain of TCR clone 175346 (TRAV12-3, TRAJ17)
CAMTLTGNKLTF

SEQ ID NO: 350692 - protein, 20 aa, Homo sapiens
  CDR3 for beta chain variable domain of TCR clone 175346 (TRBV19, TRBJ2-1)
GASSISRTVTSARLNNEQFF

SEQ ID NO: 350693 - protein, 15 aa, Homo sapiens
  CDR3 for alpha chain variable domain of TCR clone 175347 (TRAV23/DV6, TRAJ30)
CAASSQESRDDKIIF

SEQ ID NO: 350694 - protein, 17 aa, Homo sapiens
  CDR3 for beta chain variable domain of TCR clone 175347 (TRBV4-3, TRBJ2-1)
CASSQVSSGRASGEQFF

SEQ ID NO: 350695 - protein, 12 aa, Homo sapiens
  CDR3 for alpha chain variable domain of TCR clone 175348 (TRAV12-2, TRAJ10)
WGVTGGGNKLTF

SEQ ID NO: 350696 - protein, 16 aa, Homo sapiens
  CDR3 for beta chain variable domain of TCR clone 175348 (TRBV6-1, TRBJ2-1)
CASILRQGSSYNEQFF

SEQ ID NO: 350697 - protein, 14 aa, Homo sapiens
  CDR3 for alpha chain variable domain of TCR clone 175349 (TRAV21, TRAJ45)
CAVSSGGGADGLTF

SEQ ID NO: 350698 - protein, 15 aa, Homo sapiens
  CDR3 for beta chain variable domain of TCR clone 175349 (TRBV6-1, TRBJ2-4)
CASSEAVWNINMQFF

SEQ ID NO: 350699 - protein, 16 aa, Homo sapiens
  CDR3 for alpha chain variable domain of TCR clone 175350 (TRAV26-1, TRAJ40)
CIVRGYPTSGTYKYIF

SEQ ID NO: 350700 - protein, 14 aa, Homo sapiens
  CDR3 for beta chain variable domain of TCR clone 175350 (TRBV5-1, TRBJ1-4)
CASSSGQGGEELFF

SEQ ID NO: 350701 - protein, 12 aa, Homo sapiens
  CDR3 for alpha chain variable domain of TCR clone 175351 (TRAV3, TRAJ43)
CAVRDPNNDMRF

SEQ ID NO: 350702 - protein, 15 aa, Homo sapiens
  CDR3 for beta chain variable domain of TCR clone 175351 (TRBV27, TRBJ1-5)
CASSLGTGFHQPQHF

SEQ ID NO: 350703 - protein, 11 aa, Homo sapiens
  CDR3 for alpha chain variable domain of TCR clone 175352 (TRAV12-2, TRAJ43)
CASPIGNDMRF

SEQ ID NO: 350704 - protein, 13 aa, Homo sapiens
  CDR3 for beta chain variable domain of TCR clone 175352 (TRBV7-3, TRBJ1-2)
YASSLKRGYGYTF

SEQ ID NO: 350705 - protein, 15 aa, Homo sapiens
  CDR3 for alpha chain variable domain of TCR clone 175353 (TRAV17, TRAJ56)
CATEPFTGANSELTF

SEQ ID NO: 350706 - protein, 15 aa, Homo sapiens
  CDR3 for beta chain variable domain of TCR clone 175353 (TRBV28, TRBJ1-5)
RASSRTGGYVQPQHF

SEQ ID NO: 350707 - protein, 14 aa, Homo sapiens
  CDR3 for alpha chain variable domain of TCR clone 175354 (TRAV4, TRAJ26)
CLVGPHNYGQNFVF

SEQ ID NO: 350708 - protein, 17 aa, Homo sapiens
  CDR3 for beta chain variable domain of TCR clone 175354 (TRBV24-1, TRBJ2-1)
CATSEVSTSGTYNEQFF

SEQ ID NO: 350709 - protein, 14 aa, Homo sapiens
  CDR3 for alpha chain variable domain of TCR clone 175355 (TRAV12-3, TRAJ10)
SHLPLTGGGNKLTF

SEQ ID NO: 350710 - protein, 18 aa, Homo sapiens
  CDR3 for beta chain variable domain of TCR clone 175355 (TRBV19, TRBJ1-5)
CASSKGQVSIHSNQPQHF

SEQ ID NO: 350711 - protein, 17 aa, Homo sapiens
  CDR3 for alpha chain variable domain of TCR clone 175356 (TRAV4, TRAJ13)
CLVGVQGSSGGYQKVTF

SEQ ID NO: 350712 - protein, 16 aa, Homo sapiens
  CDR3 for beta chain variable domain of TCR clone 175356 (TRBV7-7, TRBJ2-1)
CASSLASGTSYNEQFF

SEQ ID NO: 350713 - protein, 14 aa, Homo sapiens
  CDR3 for alpha chain variable domain of TCR clone 175357 (TRAV3, TRAJ22)
CAVRDYGSARQLTF

SEQ ID NO: 350714 - protein, 13 aa, Homo sapiens
  CDR3 for beta chain variable domain of TCR clone 175357 (TRBV11-2, TRBJ2-5)
CARGHGAKETQYF

SEQ ID NO: 350715 - protein, 16 aa, Homo sapiens
  CDR3 for alpha chain variable domain of TCR clone 175358 (TRAV21, TRAJ37)
CAVRPRGSINTGKLIF

SEQ ID NO: 350716 - protein, 13 aa, Homo sapiens
  CDR3 for beta chain variable domain of TCR clone 175358 (TRBV7-9, TRBJ2-5)
CASLSPGQETQYF

SEQ ID NO: 350717 - protein, 13 aa, Homo sapiens
  CDR3 for alpha chain variable domain of TCR clone 175359 (TRAV8-6, TRAJ50)
CAVIKTYYDKVIF

SEQ ID NO: 350718 - protein, 13 aa, Homo sapiens
  CDR3 for beta chain variable domain of TCR clone 175359 (TRBV4-2, TRBJ1-1)
CASSQAGNTEAFF

SEQ ID NO: 350719 - protein, 16 aa, Homo sapiens
  CDR3 for alpha chain variable domain of TCR clone 175360 (TRAV26-1, TRAJ37)
CIYARHGSSNTGKLIF

SEQ ID NO: 350720 - protein, 13 aa, Homo sapiens
  CDR3 for beta chain variable domain of TCR clone 175360 (TRBV7-9, TRBJ1-2)
CASSLKQNYGYTF

SEQ ID NO: 350721 - protein, 14 aa, Homo sapiens
  CDR3 for alpha chain variable domain of TCR clone 175361 (TRAV1-2, TRAJ8)
CAVREDTGFQKLVF

SEQ ID NO: 350722 - protein, 16 aa, Homo sapiens
  CDR3 for beta chain variable domain of TCR clone 175361 (TRBV20-1, TRBJ2-4)
CSASAILAGQGDNQYF

SEQ ID NO: 350723 - protein, 12 aa, Homo sapiens
  CDR3 for alpha chain variable domain of TCR clone 175362 (TRAV1-1, TRAJ9)
CAVDTGGFKTIF

SEQ ID NO: 350724 - protein, 14 aa, Homo sapiens
  CDR3 for beta chain variable domain of TCR clone 175362 (TRBV7-8, TRBJ2-5)
CASSATGGQETQYS

SEQ ID NO: 350725 - protein, 13 aa, Homo sapiens
  CDR3 for alpha chain variable domain of TCR clone 175363 (TRAV12-1, TRAJ31)
CVVNMNNNARLMF

SEQ ID NO: 350726 - protein, 15 aa, Homo sapiens
  CDR3 for beta chain variable domain of TCR clone 175363 (TRBV2, TRBJ2-1)
CASSEEREGDNEQFF

SEQ ID NO: 350727 - protein, 15 aa, Homo sapiens
  CDR3 for alpha chain variable domain of TCR clone 175364 (TRAV8-6, TRAJ8)
CAVSPLNTGFQKLVF

SEQ ID NO: 350728 - protein, 12 aa, Homo sapiens
  CDR3 for beta chain variable domain of TCR clone 175364 (TRBV7-9, TRBJ1-1)
CASSPSSTEAFF

SEQ ID NO: 350729 - protein, 14 aa, Homo sapiens
  CDR3 for alpha chain variable domain of TCR clone 175365 (TRAV12-3, TRAJ10)
SHLPLTGGGNKLTF

SEQ ID NO: 350730 - protein, 15 aa, Homo sapiens
  CDR3 for beta chain variable domain of TCR clone 175365 (TRBV2, TRBJ2-3)
CASSDFERATDTQYF

SEQ ID NO: 350731 - protein, 14 aa, Homo sapiens
  CDR3 for alpha chain variable domain of TCR clone 175366 (TRAV17, TRAJ31)
CATVLRNNNARLMF

SEQ ID NO: 350732 - protein, 14 aa, Homo sapiens
  CDR3 for beta chain variable domain of TCR clone 175366 (TRBV7-2, TRBJ2-7)
CASSFLGRVYEQYF

SEQ ID NO: 350733 - protein, 14 aa, Homo sapiens
  CDR3 for alpha chain variable domain of TCR clone 175367 (TRAV26-1, TRAJ21)
CIVRVAHNFNKFYF

SEQ ID NO: 350734 - protein, 15 aa, Homo sapiens
  CDR3 for beta chain variable domain of TCR clone 175367 (TRBV15, TRBJ1-1)
CATSLQGGRNTEAFF

SEQ ID NO: 350735 - protein, 13 aa, Homo sapiens
  CDR3 for alpha chain variable domain of TCR clone 175368 (TRAV25, TRAJ10)
CAGRTGGGNKLTF

SEQ ID NO: 350736 - protein, 15 aa, Homo sapiens
  CDR3 for beta chain variable domain of TCR clone 175368 (TRBV19, TRBJ2-1)
CASSSPGVPVDEQFF

SEQ ID NO: 350737 - protein, 16 aa, Homo sapiens
  CDR3 for alpha chain variable domain of TCR clone 175369 (TRAV12-3, TRAJ53)
CAMSPGSGGSNYKLTF

SEQ ID NO: 350738 - protein, 11 aa, Homo sapiens
  CDR3 for beta chain variable domain of TCR clone 175369 (TRBV29-1, TRBJ2-5)
CREARTGTQYF

SEQ ID NO: 350739 - protein, 10 aa, Homo sapiens
  CDR3 for alpha chain variable domain of TCR clone 175370 (TRAV12-2, TRAJ22)
CAVNETQLTF

SEQ ID NO: 350740 - protein, 14 aa, Homo sapiens
  CDR3 for beta chain variable domain of TCR clone 175370 (TRBV18, TRBJ2-5)
CASSPGVSQETQYF

SEQ ID NO: 350741 - protein, 12 aa, Homo sapiens
  CDR3 for alpha chain variable domain of TCR clone 175371 (TRAV8-4, TRAJ37)
CAKSSNTGKLIF

SEQ ID NO: 350742 - protein, 14 aa, Homo sapiens
  CDR3 for beta chain variable domain of TCR clone 175371 (TRBV18, TRBJ2-7)
CASSPRGGAYEQYF

SEQ ID NO: 350743 - protein, 16 aa, Homo sapiens
  CDR3 for alpha chain variable domain of TCR clone 175372 (TRAV26-1, TRAJ52)
CIVSNAGCTSYGKLTF

SEQ ID NO: 350744 - protein, 15 aa, Homo sapiens
  CDR3 for beta chain variable domain of TCR clone 175372 (TRBV7-3, TRBJ2-1)
CASSPTGGGEVEQFF

SEQ ID NO: 350745 - protein, 10 aa, Homo sapiens
  CDR3 for alpha chain variable domain of TCR clone 175373 (TRAV8-4, TRAJ43)
CAVSADDMRF

SEQ ID NO: 350746 - protein, 14 aa, Homo sapiens
  CDR3 for beta chain variable domain of TCR clone 175373 (TRBV28, TRBJ2-3)
CASSWRGRADTQYF

SEQ ID NO: 350747 - protein, 18 aa, Homo sapiens
  CDR3 for alpha chain variable domain of TCR clone 175374 (TRAV26-1, TRAJ5)
CIVRAVPPRDTGRRALTF

SEQ ID NO: 350748 - protein, 15 aa, Homo sapiens
  CDR3 for beta chain variable domain of TCR clone 175374 (TRBV7-9, TRBJ2-7)
CASSLLMGQANEQYF

SEQ ID NO: 350749 - protein, 12 aa, Homo sapiens
  CDR3 for alpha chain variable domain of TCR clone 175375 (TRAV27, TRAJ13)
CAGVRGYQKVTF

SEQ ID NO: 350750 - protein, 16 aa, Homo sapiens
  CDR3 for beta chain variable domain of TCR clone 175375 (TRBV28, TRBJ2-1)
CASSSSYSGSLNEQVF

SEQ ID NO: 350751 - protein, 14 aa, Homo sapiens
  CDR3 for alpha chain variable domain of TCR clone 175376 (TRAV12-1, TRAJ9)
CVVNIITGGFKTIF

SEQ ID NO: 350752 - protein, 13 aa, Homo sapiens
  CDR3 for beta chain variable domain of TCR clone 175376 (TRBV19, TRBJ1-2)
CASSVPGQDGYTF

SEQ ID NO: 350753 - protein, 16 aa, Homo sapiens
  CDR3 for alpha chain variable domain of TCR clone 175377 (TRAV12-2, TRAJ6)
CAAPLAGSGGSYIHTF

SEQ ID NO: 350754 - protein, 10 aa, Homo sapiens
  CDR3 for beta chain variable domain of TCR clone 175377 (TRBV28, TRBJ1-2)
CASSSDRAVF

SEQ ID NO: 350755 - protein, 18 aa, Homo sapiens
  CDR3 for alpha chain variable domain of TCR clone 175378 (TRAV13-2, TRAJ10)
CAASLPPILTGGGNKLTF

SEQ ID NO: 350756 - protein, 13 aa, Homo sapiens
  CDR3 for beta chain variable domain of TCR clone 175378 (TRBV20-1, TRBJ1-1)
CSARGGGNTEAFF

SEQ ID NO: 350757 - protein, 13 aa, Homo sapiens
  CDR3 for alpha chain variable domain of TCR clone 175379 (TRAV8-6, TRAJ49)
CAVSTNTGNRFYF

SEQ ID NO: 350758 - protein, 15 aa, Homo sapiens
  CDR3 for beta chain variable domain of TCR clone 175379 (TRBV9, TRBJ1-6)
CASSVAGTGDSPLHF

SEQ ID NO: 350759 - protein, 13 aa, Homo sapiens
  CDR3 for alpha chain variable domain of TCR clone 175380 (TRAV21, TRAJ32)
CAVSGGATNKLIF

SEQ ID NO: 350760 - protein, 15 aa, Homo sapiens
  CDR3 for beta chain variable domain of TCR clone 175380 (TRBV23-1, TRBJ2-1)
CASSQWPQLTMSTSS

SEQ ID NO: 350761 - protein, 14 aa, Homo sapiens
  CDR3 for alpha chain variable domain of TCR clone 175381 (TRAV1-2, TRAJ16)
CAVNRFSDGQKLLF

SEQ ID NO: 350762 - protein, 15 aa, Homo sapiens
  CDR3 for beta chain variable domain of TCR clone 175381 (TRBV20-1, TRBJ1-5)
CSAFKTGQRNQPQHF

SEQ ID NO: 350763 - protein, 14 aa, Homo sapiens
  CDR3 for alpha chain variable domain of TCR clone 175382 (TRAV38-1, TRAJ43)
CAFMRHNNNNDMRF

SEQ ID NO: 350764 - protein, 17 aa, Homo sapiens
  CDR3 for beta chain variable domain of TCR clone 175382 (TRBV7-7, TRBJ1-4)
CASSLVGQGASNEKLFF

SEQ ID NO: 350765 - protein, 12 aa, Homo sapiens
  CDR3 for alpha chain variable domain of TCR clone 175383 (TRAV13-1, TRAJ42)
VNYVGSQGNLIF

SEQ ID NO: 350766 - protein, 15 aa, Homo sapiens
  CDR3 for beta chain variable domain of TCR clone 175383 (TRBV20-1, TRBJ2-1)
CSASSAGSSYNEQFF

SEQ ID NO: 350767 - protein, 14 aa, Homo sapiens
  CDR3 for alpha chain variable domain of TCR clone 175384 (TRAV1-2, TRAJ16)
CAVNRFSDGQKLLF

SEQ ID NO: 350768 - protein, 13 aa, Homo sapiens
  CDR3 for beta chain variable domain of TCR clone 175384 (TRBV24-1, TRBJ2-2)
CATRAGSSGELFF

SEQ ID NO: 350769 - protein, 17 aa, Homo sapiens
  CDR3 for alpha chain variable domain of TCR clone 175385 (TRAV26-2, TRAJ42)
CILRDVGYGGSQGNLIF

SEQ ID NO: 350770 - protein, 16 aa, Homo sapiens
  CDR3 for beta chain variable domain of TCR clone 175385 (TRBV12-3, TRBJ2-7)
CASSLIGVTGTYEQYF

SEQ ID NO: 350771 - protein, 13 aa, Homo sapiens
  CDR3 for alpha chain variable domain of TCR clone 175386 (TRAV3, TRAJ20)
CAVRDTGDYKLSF

SEQ ID NO: 350772 - protein, 16 aa, Homo sapiens
  CDR3 for beta chain variable domain of TCR clone 175386 (TRBV28, TRBJ2-1)
CASSSPEYPRDNEQFF

SEQ ID NO: 350773 - protein, 13 aa, Homo sapiens
  CDR3 for alpha chain variable domain of TCR clone 175387 (TRAV8-4, TRAJ30)
CAVSVNRDDKIIF

SEQ ID NO: 350774 - protein, 13 aa, Homo sapiens
  CDR3 for beta chain variable domain of TCR clone 175387 (TRBV7-9, TRBJ1-2)
CASSLKQNYGYTF

SEQ ID NO: 350775 - protein, 14 aa, Homo sapiens
  CDR3 for alpha chain variable domain of TCR clone 175388 (TRAV8-3, TRAJ6)
CAVGASVGSYILTF

SEQ ID NO: 350776 - protein, 17 aa, Homo sapiens
  CDR3 for beta chain variable domain of TCR clone 175388 (TRBV18, TRBJ2-2)
CASSPSDPWQNTGELFF

SEQ ID NO: 350777 - protein, 14 aa, Homo sapiens
  CDR3 for alpha chain variable domain of TCR clone 175389 (TRAV13-1, TRAJ44)
CAAKATGTASKLTF

SEQ ID NO: 350778 - protein, 15 aa, Homo sapiens
  CDR3 for beta chain variable domain of TCR clone 175389 (TRBV28, TRBJ2-5)
CASSLGLGNQETQYF

SEQ ID NO: 350779 - protein, 18 aa, Homo sapiens
  CDR3 for alpha chain variable domain of TCR clone 175390 (TRAV13-1, TRAJ52)
CAASKRSARGTSYGKLTF

SEQ ID NO: 350780 - protein, 13 aa, Homo sapiens
  CDR3 for beta chain variable domain of TCR clone 175390 (TRBV12-4, TRBJ1-2)
CASSLRQGKGYTF

SEQ ID NO: 350781 - protein, 15 aa, Homo sapiens
  CDR3 for alpha chain variable domain of TCR clone 175391 (TRAV29/DV5, TRAJ29)
CAASERSSGNTPLVF

SEQ ID NO: 350782 - protein, 15 aa, Homo sapiens
  CDR3 for beta chain variable domain of TCR clone 175391 (TRBV5-1, TRBJ1-1)
CASSLSDLGGTEAFF

SEQ ID NO: 350783 - protein, 11 aa, Homo sapiens
  CDR3 for alpha chain variable domain of TCR clone 175392 (TRAV26-1, TRAJ37)
CIVRVGRKLIF

SEQ ID NO: 350784 - protein, 14 aa, Homo sapiens
  CDR3 for beta chain variable domain of TCR clone 175392 (TRBV27, TRBJ2-1)
CASRHLGGGKEQFF

SEQ ID NO: 350785 - protein, 16 aa, Homo sapiens
  CDR3 for alpha chain variable domain of TCR clone 175393 (TRAV3, TRAJ32)
CAVRENYGGATNKLIF

SEQ ID NO: 350786 - protein, 12 aa, Homo sapiens
  CDR3 for beta chain variable domain of TCR clone 175393 (TRBV20-1, TRBJ1-2)
CSVTPEGYVYTF

SEQ ID NO: 350787 - protein, 14 aa, Homo sapiens
  CDR3 for alpha chain variable domain of TCR clone 175394 (TRAV8-2, TRAJ4)
CVVSPSGGYNKLIF

SEQ ID NO: 350788 - protein, 15 aa, Homo sapiens
  CDR3 for beta chain variable domain of TCR clone 175394 (TRBV11-2, TRBJ2-1)
CASSKNRGLIYEQFF

SEQ ID NO: 350789 - protein, 12 aa, Homo sapiens
  CDR3 for alpha chain variable domain of TCR clone 175395 (TRAV23/DV6, TRAJ16)
CAATGTGQKPLF

SEQ ID NO: 350790 - protein, 20 aa, Homo sapiens
  CDR3 for beta chain variable domain of TCR clone 175395 (TRBV6-7, TRBJ1-2)
CASSYSAGQGNPLRVYGYTF

SEQ ID NO: 350791 - protein, 14 aa, Homo sapiens
  CDR3 for alpha chain variable domain of TCR clone 175396 (TRAV12-3, TRAJ10)
SHLPLKGGGNKLTF

SEQ ID NO: 350792 - protein, 18 aa, Homo sapiens
  CDR3 for beta chain variable domain of TCR clone 175396 (TRBV11-2, TRBJ2-3)
CASSLGGASRGAPNTQYF

SEQ ID NO: 350793 - protein, 15 aa, Homo sapiens
  CDR3 for alpha chain variable domain of TCR clone 175397 (TRAV8-3, TRAJ7)
CAVCSISYGNNRLAF

SEQ ID NO: 350794 - protein, 16 aa, Homo sapiens
  CDR3 for beta chain variable domain of TCR clone 175397 (TRBV28, TRBJ2-3)
CASSFFRDPRLGTQYF

SEQ ID NO: 350795 - protein, 16 aa, Homo sapiens
  CDR3 for alpha chain variable domain of TCR clone 175398 (TRAV30, TRAJ24)
CGTEIVDADSWGKFQF

SEQ ID NO: 350796 - protein, 14 aa, Homo sapiens
  CDR3 for beta chain variable domain of TCR clone 175398 (TRBV12-5, TRBJ2-5)
RASGSQTHQETQYF

SEQ ID NO: 350797 - protein, 13 aa, Homo sapiens
  CDR3 for alpha chain variable domain of TCR clone 175399 (TRAV12-3, TRAJ9)
CAMRNTRGFKTIF

SEQ ID NO: 350798 - protein, 16 aa, Homo sapiens
  CDR3 for beta chain variable domain of TCR clone 175399 (TRBV15, TRBJ2-3)
CATSIDLGIVTDTQYF

SEQ ID NO: 350799 - protein, 14 aa, Homo sapiens
  CDR3 for alpha chain variable domain of TCR clone 175400 (TRAV17, TRAJ45)
CATASGGGADGLTF

SEQ ID NO: 350800 - protein, 15 aa, Homo sapiens
  CDR3 for beta chain variable domain of TCR clone 175400 (TRBV11-2, TRBJ2-1)
CASSRNRELMYEQFF

SEQ ID NO: 350801 - protein, 14 aa, Homo sapiens
  CDR3 for alpha chain variable domain of TCR clone 175401 (TRAV8-2, TRAJ11)
CVVSEKSGQSNLTF

SEQ ID NO: 350802 - protein, 16 aa, Homo sapiens
  CDR3 for beta chain variable domain of TCR clone 175401 (TRBV28, TRBJ2-1)
CASSSPEYPRDNEQFF

SEQ ID NO: 350803 - protein, 16 aa, Homo sapiens
  CDR3 for alpha chain variable domain of TCR clone 175402 (TRAV12-1, TRAJ10)
CVVNLILTGGGNKLTF

SEQ ID NO: 350804 - protein, 15 aa, Homo sapiens
  CDR3 for beta chain variable domain of TCR clone 175402 (TRBV19, TRBJ2-4)
CASRGPRRGENIQYF

SEQ ID NO: 350805 - protein, 14 aa, Homo sapiens
  CDR3 for alpha chain variable domain of TCR clone 175403 (TRAV1-2, TRAJ8)
CAVREDTGFQKLVF

SEQ ID NO: 350806 - protein, 16 aa, Homo sapiens
  CDR3 for beta chain variable domain of TCR clone 175403 (TRBV19, TRBJ2-1)
CASSKAGPSAYNEQFF

SEQ ID NO: 350807 - protein, 15 aa, Homo sapiens
  CDR3 for alpha chain variable domain of TCR clone 175404 (TRAV4, TRAJ39)
CLVGPHNNAGNMLTF

SEQ ID NO: 350808 - protein, 15 aa, Homo sapiens
  CDR3 for beta chain variable domain of TCR clone 175404 (TRBV19, TRBJ1-1)
CASTSGQIQNTEAFF

SEQ ID NO: 350809 - protein, 15 aa, Homo sapiens
  CDR3 for alpha chain variable domain of TCR clone 175405 (TRAV21, TRAJ53)
CATLNRGGSNYKLTF

SEQ ID NO: 350810 - protein, 15 aa, Homo sapiens
  CDR3 for beta chain variable domain of TCR clone 175405 (TRBV20-1, TRBJ2-7)
CSARDRVSGMDEQYF

SEQ ID NO: 350811 - protein, 14 aa, Homo sapiens
  CDR3 for alpha chain variable domain of TCR clone 175406 (TRAV1-2, TRAJ8)
CAVREDTGFQQLVF

SEQ ID NO: 350812 - protein, 16 aa, Homo sapiens
  CDR3 for beta chain variable domain of TCR clone 175406 (TRBV20-1, TRBJ1-4)
CSAPGQGLLTNEKLFF

SEQ ID NO: 350813 - protein, 12 aa, Homo sapiens
  CDR3 for alpha chain variable domain of TCR clone 175407 (TRAV12-2, TRAJ10)
WGVTGGGNNLTF

SEQ ID NO: 350814 - protein, 14 aa, Homo sapiens
  CDR3 for beta chain variable domain of TCR clone 175407 (TRBV19, TRBJ2-3)
CASSAPRGTDTQYF

SEQ ID NO: 350815 - protein, 14 aa, Homo sapiens
  CDR3 for alpha chain variable domain of TCR clone 175408 (TRAV26-1, TRAJ38)
CIADHAGNNRKLIW

SEQ ID NO: 350816 - protein, 17 aa, Homo sapiens
  CDR3 for beta chain variable domain of TCR clone 175408 (TRBV7-9, TRBJ2-3)
CASSPTVAGDLTDTQYF

SEQ ID NO: 350817 - protein, 16 aa, Homo sapiens
  CDR3 for alpha chain variable domain of TCR clone 175409 (TRAV16, TRAJ18)
CALSDDRGSTLGRLYF

SEQ ID NO: 350818 - protein, 17 aa, Homo sapiens
  CDR3 for beta chain variable domain of TCR clone 175409 (TRBV13, TRBJ2-3)
CASSLSRVAGGRNTQYF

SEQ ID NO: 350819 - protein, 14 aa, Homo sapiens
  CDR3 for alpha chain variable domain of TCR clone 175410 (TRAV26-1, TRAJ38)
CIADNAGNNRKLIW

SEQ ID NO: 350820 - protein, 14 aa, Homo sapiens
  CDR3 for beta chain variable domain of TCR clone 175410 (TRBV12-5, TRBJ2-5)
CASGSRTHQEAQYF

SEQ ID NO: 350821 - protein, 12 aa, Homo sapiens
  CDR3 for alpha chain variable domain of TCR clone 175411 (TRAV13-1, TRAJ21)
CAAKEGFNKFYF

SEQ ID NO: 350822 - protein, 18 aa, Homo sapiens
  CDR3 for beta chain variable domain of TCR clone 175411 (TRBV20-1, TRBJ2-6)
CSAETTPNHGSGANVLTF

SEQ ID NO: 350823 - protein, 13 aa, Homo sapiens
  CDR3 for alpha chain variable domain of TCR clone 175412 (TRAV2, TRAJ15)
CAVASQAGTALIF

SEQ ID NO: 350824 - protein, 13 aa, Homo sapiens
  CDR3 for beta chain variable domain of TCR clone 175412 (TRBV7-2, TRBJ2-5)
CASSRGGLETQYF

SEQ ID NO: 350825 - protein, 10 aa, Homo sapiens
  CDR3 for alpha chain variable domain of TCR clone 175413 (TRAV39, TRAJ49)
CAAAGNQFYF

SEQ ID NO: 350826 - protein, 14 aa, Homo sapiens
  CDR3 for beta chain variable domain of TCR clone 175413 (TRBV7-8, TRBJ2-7)
CASSPRDRVYEQYF

SEQ ID NO: 350827 - protein, 14 aa, Homo sapiens
  CDR3 for alpha chain variable domain of TCR clone 175414 (TRAV12-3, TRAJ30)
CTMSLLNRDDKIIF

SEQ ID NO: 350828 - protein, 12 aa, Homo sapiens
  CDR3 for beta chain variable domain of TCR clone 175414 (TRBV11-2, TRBJ2-2)
CASSLGGGELFF

SEQ ID NO: 350829 - protein, 15 aa, Homo sapiens
  CDR3 for alpha chain variable domain of TCR clone 175415 (TRAV26-1, TRAJ22)
CIVRVSFWFCKATDL

SEQ ID NO: 350830 - protein, 12 aa, Homo sapiens
  CDR3 for beta chain variable domain of TCR clone 175415 (TRBV11-2, TRBJ2-2)
CASSVGGGELFF

SEQ ID NO: 350831 - protein, 14 aa, Homo sapiens
  CDR3 for alpha chain variable domain of TCR clone 175416 (TRAV2, TRAJ23)
CAVGLRNQGGKLIF

SEQ ID NO: 350832 - protein, 15 aa, Homo sapiens
  CDR3 for beta chain variable domain of TCR clone 175416 (TRBV10-3, TRBJ2-1)
CATRNGTSGHNEQFF

SEQ ID NO: 350833 - protein, 13 aa, Homo sapiens
  CDR3 for alpha chain variable domain of TCR clone 175417 (TRAV27, TRAJ39)
CAVDTPAGNMLTF

SEQ ID NO: 350834 - protein, 13 aa, Homo sapiens
  CDR3 for beta chain variable domain of TCR clone 175417 (TRBV4-1, TRBJ2-4)
CASSQVGIDIQYF

SEQ ID NO: 350835 - protein, 12 aa, Homo sapiens
  CDR3 for alpha chain variable domain of TCR clone 175418 (TRAV17, TRAJ30)
CVPERRDDKIIF

SEQ ID NO: 350836 - protein, 13 aa, Homo sapiens
  CDR3 for beta chain variable domain of TCR clone 175418 (TRBV7-3, TRBJ1-1)
CASSQDWGAEAFF

SEQ ID NO: 350837 - protein, 14 aa, Homo sapiens
  CDR3 for alpha chain variable domain of TCR clone 175419 (TRAV4, TRAJ37)
CLVVVAGNTGKLIF

SEQ ID NO: 350838 - protein, 14 aa, Homo sapiens
  CDR3 for beta chain variable domain of TCR clone 175419 (TRBV7-2, TRBJ2-2)
CASSLEANTGELFF

SEQ ID NO: 350839 - protein, 16 aa, Homo sapiens
  CDR3 for alpha chain variable domain of TCR clone 175420 (TRAV8-3, TRAJ18)
CAVALDRGSTLGRLYF

SEQ ID NO: 350840 - protein, 13 aa, Homo sapiens
  CDR3 for beta chain variable domain of TCR clone 175420 (TRBV7-9, TRBJ2-5)
CASTQRGGETQYF

SEQ ID NO: 350841 - protein, 11 aa, Homo sapiens
  CDR3 for alpha chain variable domain of TCR clone 175421 (TRAV21, TRAJ23)
CAPQRRGKLIF

SEQ ID NO: 350842 - protein, 15 aa, Homo sapiens
  CDR3 for beta chain variable domain of TCR clone 175421 (TRBV4-2, TRBJ1-2)
CASSQRTGGRDGYTF

SEQ ID NO: 350843 - protein, 14 aa, Homo sapiens
  CDR3 for alpha chain variable domain of TCR clone 175422 (TRAV8-4, TRAJ34)
CAVSDPGDTDKLIF

SEQ ID NO: 350844 - protein, 13 aa, Homo sapiens
  CDR3 for beta chain variable domain of TCR clone 175422 (TRBV7-6, TRBJ1-2)
CASSLVADYGYTF

SEQ ID NO: 350845 - protein, 14 aa, Homo sapiens
  CDR3 for alpha chain variable domain of TCR clone 175423 (TRAV8-3, TRAJ9)
CAVVYNTGGVKTIF

SEQ ID NO: 350846 - protein, 16 aa, Homo sapiens
  CDR3 for beta chain variable domain of TCR clone 175423 (TRBV7-3, TRBJ2-2)
CASSLKRGTLSGELFF

SEQ ID NO: 350847 - protein, 14 aa, Homo sapiens
  CDR3 for alpha chain variable domain of TCR clone 175424 (TRAV12-3, TRAJ29)
CAMSPYSGNTPLVF

SEQ ID NO: 350848 - protein, 12 aa, Homo sapiens
  CDR3 for beta chain variable domain of TCR clone 175424 (TRBV29-1, TRBJ2-2)
CSVDKYTGELFF

SEQ ID NO: 350849 - protein, 15 aa, Homo sapiens
  CDR3 for alpha chain variable domain of TCR clone 175425 (TRAV38-1, TRAJ37)
CAFIFGSGNTGKLIF

SEQ ID NO: 350850 - protein, 16 aa, Homo sapiens
  CDR3 for beta chain variable domain of TCR clone 175425 (TRBV28, TRBJ1-4)
CASSSRTGAANEKLFF

SEQ ID NO: 350851 - protein, 15 aa, Homo sapiens
  CDR3 for alpha chain variable domain of TCR clone 175426 (TRAV3, TRAJ5)
CAVRDLDTGRRAVPF

SEQ ID NO: 350852 - protein, 13 aa, Homo sapiens
  CDR3 for beta chain variable domain of TCR clone 175426 (TRBV12-4, TRBJ2-7)
CASSPTETYEQYF

SEQ ID NO: 350853 - protein, 14 aa, Homo sapiens
  CDR3 for alpha chain variable domain of TCR clone 175427 (TRAV38-1, TRAJ45)
CAYYSGGGAYGLTF

SEQ ID NO: 350854 - protein, 14 aa, Homo sapiens
  CDR3 for beta chain variable domain of TCR clone 175427 (TRBV25-1, TRBJ1-1)
CASTHLGGNTEAFF

SEQ ID NO: 350855 - protein, 12 aa, Homo sapiens
  CDR3 for alpha chain variable domain of TCR clone 175428 (TRAV8-4, TRAJ43)
CAVSVNNNDMRF

SEQ ID NO: 350856 - protein, 15 aa, Homo sapiens
  CDR3 for beta chain variable domain of TCR clone 175428 (TRBV10-3, TRBJ1-5)
CAISDTGLGGQPQHF

SEQ ID NO: 350857 - protein, 14 aa, Homo sapiens
  CDR3 for alpha chain variable domain of TCR clone 175429 (TRAV29/DV5, TRAJ45)
CAASFRGGAEDSPL

SEQ ID NO: 350858 - protein, 11 aa, Homo sapiens
  CDR3 for beta chain variable domain of TCR clone 175429 (TRBV11-2, TRBJ2-2)
CASSLPGELFF

SEQ ID NO: 350859 - protein, 12 aa, Homo sapiens
  CDR3 for alpha chain variable domain of TCR clone 175430 (TRAV12-3, TRAJ17)
CAMTLTGNKLTF

SEQ ID NO: 350860 - protein, 15 aa, Homo sapiens
  CDR3 for beta chain variable domain of TCR clone 175430 (TRBV12-5, TRBJ2-2)
CASGFQGSGTGELFF

SEQ ID NO: 350861 - protein, 14 aa, Homo sapiens
  CDR3 for alpha chain variable domain of TCR clone 175431 (TRAV1-2, TRAJ16)
CAVNRFSDGQTLLF

SEQ ID NO: 350862 - protein, 13 aa, Homo sapiens
  CDR3 for beta chain variable domain of TCR clone 175431 (TRBV4-1, TRBJ2-1)
CASSQAGGDEQFF

SEQ ID NO: 350863 - protein, 13 aa, Homo sapiens
  CDR3 for alpha chain variable domain of TCR clone 175432 (TRAV27, TRAJ45)
CRSSGGGADGLTF

SEQ ID NO: 350864 - protein, 17 aa, Homo sapiens
  CDR3 for beta chain variable domain of TCR clone 175432 (TRBV4-1, TRBJ1-4)
CASSQEGPRGVEEKLFF

SEQ ID NO: 350865 - protein, 12 aa, Homo sapiens
  CDR3 for alpha chain variable domain of TCR clone 175433 (TRAV1-2, TRAJ26)
CAVRCYGQNFVF

SEQ ID NO: 350866 - protein, 13 aa, Homo sapiens
  CDR3 for beta chain variable domain of TCR clone 175433 (TRBV20-1, TRBJ2-2)
CSASAAGTGELFF

SEQ ID NO: 350867 - protein, 15 aa, Homo sapiens
  CDR3 for alpha chain variable domain of TCR clone 175434 (TRAV17, TRAJ22)
CATVAPSGSARQLTF

SEQ ID NO: 350868 - protein, 16 aa, Homo sapiens
  CDR3 for beta chain variable domain of TCR clone 175434 (TRBV12-4, TRBJ1-5)
CASSRPVGGSNQPQHF

SEQ ID NO: 350869 - protein, 15 aa, Homo sapiens
  CDR3 for alpha chain variable domain of TCR clone 175435 (TRAV8-3, TRAJ27)
CAVGPSKTTAGKSTF

SEQ ID NO: 350870 - protein, 14 aa, Homo sapiens
  CDR3 for beta chain variable domain of TCR clone 175435 (TRBV19, TRBJ2-1)
CASSPGLAPNEQFF

SEQ ID NO: 350871 - protein, 14 aa, Homo sapiens
  CDR3 for alpha chain variable domain of TCR clone 175436 (TRAV23/DV6, TRAJ24)
CAASLSDSWGTLQL

SEQ ID NO: 350872 - protein, 15 aa, Homo sapiens
  CDR3 for beta chain variable domain of TCR clone 175436 (TRBV9, TRBJ1-6)
CASSVAGTGDSPLHF

SEQ ID NO: 350873 - protein, 13 aa, Homo sapiens
  CDR3 for alpha chain variable domain of TCR clone 175437 (TRAV21, TRAJ24)
GLMTTDSWGKLQF

SEQ ID NO: 350874 - protein, 14 aa, Homo sapiens
  CDR3 for beta chain variable domain of TCR clone 175437 (TRBV11-2, TRBJ1-2)
CASSLGTANYGYTF

SEQ ID NO: 350875 - protein, 16 aa, Homo sapiens
  CDR3 for alpha chain variable domain of TCR clone 175438 (TRAV26-1, TRAJ32)
CIVRTNYGGATNKTIF

SEQ ID NO: 350876 - protein, 14 aa, Homo sapiens
  CDR3 for beta chain variable domain of TCR clone 175438 (TRBV27, TRBJ1-1)
CASSLLSGLSEAFF

SEQ ID NO: 350877 - protein, 14 aa, Homo sapiens
  CDR3 for alpha chain variable domain of TCR clone 175439 (TRAV2, TRAJ39)
CAVAGDNAGNMLTF

SEQ ID NO: 350878 - protein, 14 aa, Homo sapiens
  CDR3 for beta chain variable domain of TCR clone 175439 (TRBV28, TRBJ2-7)
CASSLRARGNEQYF

SEQ ID NO: 350879 - protein, 13 aa, Homo sapiens
  CDR3 for alpha chain variable domain of TCR clone 175440 (TRAV3, TRAJ15)
CSVRDQAGTALIF

SEQ ID NO: 350880 - protein, 15 aa, Homo sapiens
  CDR3 for beta chain variable domain of TCR clone 175440 (TRBV11-1, TRBJ2-7)
CASSLNYGAYYEQYF

SEQ ID NO: 350881 - protein, 16 aa, Homo sapiens
  CDR3 for alpha chain variable domain of TCR clone 175441 (TRAV16, TRAJ4)
CALSRMFSGGYTKLIF

SEQ ID NO: 350882 - protein, 16 aa, Homo sapiens
  CDR3 for beta chain variable domain of TCR clone 175441 (TRBV24-1, TRBJ2-3)
CATSDPVTGATDTQYF

SEQ ID NO: 350883 - protein, 14 aa, Homo sapiens
  CDR3 for alpha chain variable domain of TCR clone 175442 (TRAV12-3, TRAJ15)
CAMIPPQARTALIF

SEQ ID NO: 350884 - protein, 12 aa, Homo sapiens
  CDR3 for beta chain variable domain of TCR clone 175442 (TRBV11-2, TRBJ2-2)
CASSFGGGELFF

SEQ ID NO: 350885 - protein, 13 aa, Homo sapiens
  CDR3 for alpha chain variable domain of TCR clone 175443 (TRAV22, TRAJ49)
CAVGMYTGNQFYF

SEQ ID NO: 350886 - protein, 13 aa, Homo sapiens
  CDR3 for beta chain variable domain of TCR clone 175443 (TRBV7-3, TRBJ1-1)
CASSQDWGAEAFF

SEQ ID NO: 350887 - protein, 14 aa, Homo sapiens
  CDR3 for alpha chain variable domain of TCR clone 175444 (TRAV12-1, TRAJ17)
CVVNYKAAGNKLTF

SEQ ID NO: 350888 - protein, 15 aa, Homo sapiens
  CDR3 for beta chain variable domain of TCR clone 175444 (TRBV5-5, TRBJ2-5)
CASSLGQIFQETQYF

SEQ ID NO: 350889 - protein, 16 aa, Homo sapiens
  CDR3 for alpha chain variable domain of TCR clone 175445 (TRAV8-3, TRAJ10)
CAVGPILTGGGNKLTF

SEQ ID NO: 350890 - protein, 16 aa, Homo sapiens
  CDR3 for beta chain variable domain of TCR clone 175445 (TRBV7-2, TRBJ2-5)
CASSSKWLSGQETHYF

SEQ ID NO: 350891 - protein, 17 aa, Homo sapiens
  CDR3 for alpha chain variable domain of TCR clone 175446 (TRAV3, TRAJ6)
CAVRDGTRAGGSYIPTF

SEQ ID NO: 350892 - protein, 20 aa, Homo sapiens
  CDR3 for beta chain variable domain of TCR clone 175446 (TRBV28, TRBJ2-1)
CASTPIGRSPGLAGGNEQFL

SEQ ID NO: 350893 - protein, 16 aa, Homo sapiens
  CDR3 for alpha chain variable domain of TCR clone 175447 (TRAV4, TRAJ22)
CFVGDLYSGSARQLTF

SEQ ID NO: 350894 - protein, 16 aa, Homo sapiens
  CDR3 for beta chain variable domain of TCR clone 175447 (TRBV7-9, TRBJ2-3)
CASSPWREVGTDTQYF

SEQ ID NO: 350895 - protein, 12 aa, Homo sapiens
  CDR3 for alpha chain variable domain of TCR clone 175448 (TRAV2, TRAJ26)
CAGSPGRLWSEF

SEQ ID NO: 350896 - protein, 12 aa, Homo sapiens
  CDR3 for beta chain variable domain of TCR clone 175448 (TRBV6-3, TRBJ2-7)
CASSLTPYEQYF

SEQ ID NO: 350897 - protein, 20 aa, Homo sapiens
  CDR3 for alpha chain variable domain of TCR clone 175449 (TRAV3, TRAJ7)
CAVREEEREQQTRCWEGEPS

SEQ ID NO: 350898 - protein, 15 aa, Homo sapiens
  CDR3 for beta chain variable domain of TCR clone 175449 (TRBV20-1, TRBJ1-5)
CSAFKNGQRNQPQHF

SEQ ID NO: 350899 - protein, 16 aa, Homo sapiens
  CDR3 for alpha chain variable domain of TCR clone 175450 (TRAV8-1, TRAJ39)
CAVNVPSYNAGNMLTF

SEQ ID NO: 350900 - protein, 13 aa, Homo sapiens
  CDR3 for beta chain variable domain of TCR clone 175450 (TRBV7-9, TRBJ1-2)
CASSLKQNYGYTF

SEQ ID NO: 350901 - protein, 13 aa, Homo sapiens
  CDR3 for alpha chain variable domain of TCR clone 175451 (TRAV12-3, TRAJ44)
CARTTGTASKLTF

SEQ ID NO: 350902 - protein, 15 aa, Homo sapiens
  CDR3 for beta chain variable domain of TCR clone 175451 (TRBV29-1, TRBJ1-2)
CSGLDVRGANYGYSF

SEQ ID NO: 350903 - protein, 14 aa, Homo sapiens
  CDR3 for alpha chain variable domain of TCR clone 175452 (TRAV1-2, TRAJ8)
CAVREDTGFQKLVF

SEQ ID NO: 350904 - protein, 17 aa, Homo sapiens
  CDR3 for beta chain variable domain of TCR clone 175452 (TRBV11-2, TRBJ2-1)
CASSLYPPGVEYSEQFF

SEQ ID NO: 350905 - protein, 16 aa, Homo sapiens
  CDR3 for alpha chain variable domain of TCR clone 175453 (TRAV30, TRAJ24)
CGTEIVDADSWGKFQF

SEQ ID NO: 350906 - protein, 14 aa, Homo sapiens
  CDR3 for beta chain variable domain of TCR clone 175453 (TRBV7-2, TRBJ2-7)
CASSPKTIFYEQYF

SEQ ID NO: 350907 - protein, 14 aa, Homo sapiens
  CDR3 for alpha chain variable domain of TCR clone 175454 (TRAV8-6, TRAJ12)
CAVKAADSSYKLIF

SEQ ID NO: 350908 - protein, 13 aa, Homo sapiens
  CDR3 for beta chain variable domain of TCR clone 175454 (TRBV12-5, TRBJ2-3)
CASGDRQSDTQYF

SEQ ID NO: 350909 - protein, 15 aa, Homo sapiens
  CDR3 for alpha chain variable domain of TCR clone 175455 (TRAV26-1, TRAJ44)
CNVRANTGTASKLTF

SEQ ID NO: 350910 - protein, 12 aa, Homo sapiens
  CDR3 for beta chain variable domain of TCR clone 175455 (TRBV28, TRBJ2-3)
CASSLYRDTQYF

SEQ ID NO: 350911 - protein, 12 aa, Homo sapiens
  CDR3 for alpha chain variable domain of TCR clone 175456 (TRAV1-2, TRAJ42)
CVAGGSQGNLIF

SEQ ID NO: 350912 - protein, 12 aa, Homo sapiens
  CDR3 for beta chain variable domain of TCR clone 175456 (TRBV28, TRBJ2-3)
CASSLYRDTQYF

SEQ ID NO: 350913 - protein, 16 aa, Homo sapiens
  CDR3 for alpha chain variable domain of TCR clone 175457 (TRAV8-6, TRAJ4)
CAVSERISGGYNKLIF

SEQ ID NO: 350914 - protein, 19 aa, Homo sapiens
  CDR3 for beta chain variable domain of TCR clone 175457 (TRBV19, TRBJ1-5)
CASSISPPQTGGGNQPQHF

SEQ ID NO: 350915 - protein, 12 aa, Homo sapiens
  CDR3 for alpha chain variable domain of TCR clone 175458 (TRAV12-3, TRAJ17)
FALTLTGNKLTF

SEQ ID NO: 350916 - protein, 15 aa, Homo sapiens
  CDR3 for beta chain variable domain of TCR clone 175458 (TRBV20-1, TRBJ2-7)
CSARDRVSGMDEQYF

SEQ ID NO: 350917 - protein, 13 aa, Homo sapiens
  CDR3 for alpha chain variable domain of TCR clone 175459 (TRAV26-1, TRAJ34)
CIVRPWITDKLIF

SEQ ID NO: 350918 - protein, 14 aa, Homo sapiens
  CDR3 for beta chain variable domain of TCR clone 175459 (TRBV4-1, TRBJ2-2)
CASSQAVNTGELFF

SEQ ID NO: 350919 - protein, 16 aa, Homo sapiens
  CDR3 for alpha chain variable domain of TCR clone 175460 (TRAV30, TRAJ24)
CGSEIVDADSWGKFQF

SEQ ID NO: 350920 - protein, 15 aa, Homo sapiens
  CDR3 for beta chain variable domain of TCR clone 175460 (TRBV20-1, TRBJ2-7)
CSARDRVSGMDEQYF

SEQ ID NO: 350921 - protein, 19 aa, Homo sapiens
  CDR3 for alpha chain variable domain of TCR clone 175461 (TRAV26-1, TRAJ52)
CIVRAHRNAGGTSYGKLTF

SEQ ID NO: 350922 - protein, 15 aa, Homo sapiens
  CDR3 for beta chain variable domain of TCR clone 175461 (TRBV29-1, TRBJ2-1)
CSGWDRKSSYNEQFF

SEQ ID NO: 350923 - protein, 15 aa, Homo sapiens
  CDR3 for alpha chain variable domain of TCR clone 175462 (TRAV16, TRAJ12)
CSKWPLRDSSYKLIF

SEQ ID NO: 350924 - protein, 16 aa, Homo sapiens
  CDR3 for beta chain variable domain of TCR clone 175462 (TRBV5-1, TRBJ1-1)
CASSSGGNSLNTEAFF

SEQ ID NO: 350925 - protein, 15 aa, Homo sapiens
  CDR3 for alpha chain variable domain of TCR clone 175463 (TRAV8-3, TRAJ41)
CAGGSNSNSGYALNF

SEQ ID NO: 350926 - protein, 17 aa, Homo sapiens
  CDR3 for beta chain variable domain of TCR clone 175463 (TRBV25-1, TRBJ2-1)
CASSAYGQGRGVYEQFF

SEQ ID NO: 350927 - protein, 14 aa, Homo sapiens
  CDR3 for alpha chain variable domain of TCR clone 175464 (TRAV12-1, TRAJ12)
CVVTRMASSYKLIF

SEQ ID NO: 350928 - protein, 14 aa, Homo sapiens
  CDR3 for beta chain variable domain of TCR clone 175464 (TRBV4-1, TRBJ2-7)
CASSPVAGGDEQYF

SEQ ID NO: 350929 - protein, 12 aa, Homo sapiens
  CDR3 for alpha chain variable domain of TCR clone 175465 (TRAV20, TRAJ45)
CAVRGGADGLTF

SEQ ID NO: 350930 - protein, 14 aa, Homo sapiens
  CDR3 for beta chain variable domain of TCR clone 175465 (TRBV5-7, TRBJ2-5)
CASMETGDSETQYF

SEQ ID NO: 350931 - protein, 16 aa, Homo sapiens
  CDR3 for alpha chain variable domain of TCR clone 175466 (TRAV8-3, TRAJ42)
CAVGEGNGGSQGNLIF

SEQ ID NO: 350932 - protein, 15 aa, Homo sapiens
  CDR3 for beta chain variable domain of TCR clone 175466 (TRBV6-5, TRBJ2-6)
CASSQWEAGANVLTF

SEQ ID NO: 350933 - protein, 16 aa, Homo sapiens
  CDR3 for alpha chain variable domain of TCR clone 175467 (TRAV14/DV4, TRAJ53)
CAMREGGGGRNYKLTF

SEQ ID NO: 350934 - protein, 14 aa, Homo sapiens
  CDR3 for beta chain variable domain of TCR clone 175467 (TRBV20-1, TRBJ2-7)
CSAKTGTGGYEQYF

SEQ ID NO: 350935 - protein, 11 aa, Homo sapiens
  CDR3 for alpha chain variable domain of TCR clone 175468 (TRAV39, TRAJ49)
CAVDISNQFYF

SEQ ID NO: 350936 - protein, 16 aa, Homo sapiens
  CDR3 for beta chain variable domain of TCR clone 175468 (TRBV10-3, TRBJ2-1)
CAISGVGDGGGGEQFF

SEQ ID NO: 350937 - protein, 13 aa, Homo sapiens
  CDR3 for alpha chain variable domain of TCR clone 175469 (TRAV12-2, TRAJ20)
CAVNRFDDYKLSF

SEQ ID NO: 350938 - protein, 15 aa, Homo sapiens
  CDR3 for beta chain variable domain of TCR clone 175469 (TRBV20-1, TRBJ2-7)
CGARDRVSGMDEQYF

SEQ ID NO: 350939 - protein, 14 aa, Homo sapiens
  CDR3 for alpha chain variable domain of TCR clone 175470 (TRAV17, TRAJ8)
CATDLNTGFQKLVF

SEQ ID NO: 350940 - protein, 17 aa, Homo sapiens
  CDR3 for beta chain variable domain of TCR clone 175470 (TRBV11-2, TRBJ2-1)
CASSLYPPGVEYNEQFF

SEQ ID NO: 350941 - protein, 11 aa, Homo sapiens
  CDR3 for alpha chain variable domain of TCR clone 175471 (TRAV4, TRAJ23)
CLVAPGGKLIF

SEQ ID NO: 350942 - protein, 18 aa, Homo sapiens
  CDR3 for beta chain variable domain of TCR clone 175471 (TRBV12-4, TRBJ2-2)
CASSLVAGTRGRTGELFF

SEQ ID NO: 350943 - protein, 16 aa, Homo sapiens
  CDR3 for alpha chain variable domain of TCR clone 175472 (TRAV3, TRAJ10)
CAVRDMRAGGGHKLTF

SEQ ID NO: 350944 - protein, 15 aa, Homo sapiens
  CDR3 for beta chain variable domain of TCR clone 175472 (TRBV9, TRBJ1-6)
CASSVAGTGDSPLHF

SEQ ID NO: 350945 - protein, 14 aa, Homo sapiens
  CDR3 for alpha chain variable domain of TCR clone 175473 (TRAV12-1, TRAJ12)
CVVISMDSSYKLIF

SEQ ID NO: 350946 - protein, 17 aa, Homo sapiens
  CDR3 for beta chain variable domain of TCR clone 175473 (TRBV7-2, TRBJ1-4)
CASSFKAGPTTNEKLFF

SEQ ID NO: 350947 - protein, 15 aa, Homo sapiens
  CDR3 for alpha chain variable domain of TCR clone 175474 (TRAV12-2, TRAJ20)
CAVKGGFGAGTTVTV

SEQ ID NO: 350948 - protein, 13 aa, Homo sapiens
  CDR3 for beta chain variable domain of TCR clone 175474 (TRBV12-4, TRBJ2-7)
CASSPRQLYEQYF

SEQ ID NO: 350949 - protein, 14 aa, Homo sapiens
  CDR3 for alpha chain variable domain of TCR clone 175475 (TRAV20, TRAJ56)
CAVRFGGANSKLTL

SEQ ID NO: 350950 - protein, 14 aa, Homo sapiens
  CDR3 for beta chain variable domain of TCR clone 175475 (TRBV20-1, TRBJ2-7)
CSAKRGRSSYEQYF

SEQ ID NO: 350951 - protein, 12 aa, Homo sapiens
  CDR3 for alpha chain variable domain of TCR clone 175476 (TRAV8-4, TRAJ43)
CAVSVNNNDMRF

SEQ ID NO: 350952 - protein, 13 aa, Homo sapiens
  CDR3 for beta chain variable domain of TCR clone 175476 (TRBV19, TRBJ1-1)
CASKLPLNTEAFF

SEQ ID NO: 350953 - protein, 13 aa, Homo sapiens
  CDR3 for alpha chain variable domain of TCR clone 175477 (TRAV36/DV7, TRAJ37)
CAVFSSNTGKLIF

SEQ ID NO: 350954 - protein, 15 aa, Homo sapiens
  CDR3 for beta chain variable domain of TCR clone 175477 (TRBV20-1, TRBJ1-1)
CSARDSRGEYTEAFF

SEQ ID NO: 350955 - protein, 14 aa, Homo sapiens
  CDR3 for alpha chain variable domain of TCR clone 175478 (TRAV4, TRAJ6)
CLGPASGGSYIPTF

SEQ ID NO: 350956 - protein, 12 aa, Homo sapiens
  CDR3 for beta chain variable domain of TCR clone 175478 (TRBV6-5, TRBJ2-3)
CACSPSTDTQYF

SEQ ID NO: 350957 - protein, 17 aa, Homo sapiens
  CDR3 for alpha chain variable domain of TCR clone 175479 (TRAV26-2, TRAJ42)
CILRDVGCGGSQGNLIF

SEQ ID NO: 350958 - protein, 16 aa, Homo sapiens
  CDR3 for beta chain variable domain of TCR clone 175479 (TRBV6-5, TRBJ2-1)
CASSETLAGHYNEQFF

SEQ ID NO: 350959 - protein, 14 aa, Homo sapiens
  CDR3 for alpha chain variable domain of TCR clone 175480 (TRAV16, TRAJ57)
CAIPTQGGSEKLVF

SEQ ID NO: 350960 - protein, 15 aa, Homo sapiens
  CDR3 for beta chain variable domain of TCR clone 175480 (TRBV28, TRBJ1-3)
CASWGGHLSGNTIYF

SEQ ID NO: 350961 - protein, 14 aa, Homo sapiens
  CDR3 for alpha chain variable domain of TCR clone 175481 (TRAV13-1, TRAJ24)
CAASPADSWGKFQF

SEQ ID NO: 350962 - protein, 13 aa, Homo sapiens
  CDR3 for beta chain variable domain of TCR clone 175481 (TRBV19, TRBJ2-2)
CASSQRSTGELFL

SEQ ID NO: 350963 - protein, 14 aa, Homo sapiens
  CDR3 for alpha chain variable domain of TCR clone 175482 (TRAV12-3, TRAJ10)
SHLPLTGGGNKLTF

SEQ ID NO: 350964 - protein, 15 aa, Homo sapiens
  CDR3 for beta chain variable domain of TCR clone 175482 (TRBV9, TRBJ2-1)
CASSVGSGLYNEQFF

SEQ ID NO: 350965 - protein, 14 aa, Homo sapiens
  CDR3 for alpha chain variable domain of TCR clone 175483 (TRAV8-6, TRAJ37)
CAVRARSNTGKLIF

SEQ ID NO: 350966 - protein, 14 aa, Homo sapiens
  CDR3 for beta chain variable domain of TCR clone 175483 (TRBV6-5, TRBJ1-1)
CASRKPDRDTEAFF

SEQ ID NO: 350967 - protein, 14 aa, Homo sapiens
  CDR3 for alpha chain variable domain of TCR clone 175484 (TRAV12-2, TRAJ9)
CAVRVNTGGFKTIF

SEQ ID NO: 350968 - protein, 15 aa, Homo sapiens
  CDR3 for beta chain variable domain of TCR clone 175484 (TRBV4-1, TRBJ1-4)
CASSDTGGTNEKLFF

SEQ ID NO: 350969 - protein, 17 aa, Homo sapiens
  CDR3 for alpha chain variable domain of TCR clone 175485 (TRAV3, TRAJ6)
CAVRDGPRAGGSYIPTF

SEQ ID NO: 350970 - protein, 17 aa, Homo sapiens
  CDR3 for beta chain variable domain of TCR clone 175485 (TRBV20-1, TRBJ2-1)
CSARDPLAGVSYNEQFF

SEQ ID NO: 350971 - protein, 10 aa, Homo sapiens
  CDR3 for alpha chain variable domain of TCR clone 175486 (TRAV12-1, TRAJ43)
CVVHKNDMRF

SEQ ID NO: 350972 - protein, 13 aa, Homo sapiens
  CDR3 for beta chain variable domain of TCR clone 175486 (TRBV12-4, TRBJ1-2)
CASSSGLTVISTF

SEQ ID NO: 350973 - protein, 17 aa, Homo sapiens
  CDR3 for alpha chain variable domain of TCR clone 175487 (TRAV13-1, TRAJ52)
CAASSGAGGTSYGTLTL

SEQ ID NO: 350974 - protein, 15 aa, Homo sapiens
  CDR3 for beta chain variable domain of TCR clone 175487 (TRBV2, TRBJ2-1)
CASSELAGSYNEQFF

SEQ ID NO: 350975 - protein, 16 aa, Homo sapiens
  CDR3 for alpha chain variable domain of TCR clone 175488 (TRAV30, TRAJ24)
CGTEIADADSWGKFKF

SEQ ID NO: 350976 - protein, 14 aa, Homo sapiens
  CDR3 for beta chain variable domain of TCR clone 175488 (TRBV12-5, TRBJ2-5)
CASGSRTHQETQYF

SEQ ID NO: 350977 - protein, 13 aa, Homo sapiens
  CDR3 for alpha chain variable domain of TCR clone 175489 (TRAV8-3, TRAJ7)
CAVGAYGNNILAF

SEQ ID NO: 350978 - protein, 13 aa, Homo sapiens
  CDR3 for beta chain variable domain of TCR clone 175489 (TRBV7-3, TRBJ1-5)
CASSLDSNQPQHF

SEQ ID NO: 350979 - protein, 12 aa, Homo sapiens
  CDR3 for alpha chain variable domain of TCR clone 175490 (TRAV21, TRAJ13)
PGPSGGYQKVTF

SEQ ID NO: 350980 - protein, 15 aa, Homo sapiens
  CDR3 for beta chain variable domain of TCR clone 175490 (TRBV20-1, TRBJ2-7)
RSARDRVSGMDEQYF

SEQ ID NO: 350981 - protein, 20 aa, Homo sapiens
  CDR3 for alpha chain variable domain of TCR clone 175491 (TRAV12-3, TRAJ52)
CAMTQSYQNAGGTSYGKLTF

SEQ ID NO: 350982 - protein, 15 aa, Homo sapiens
  CDR3 for beta chain variable domain of TCR clone 175491 (TRBV19, TRBJ1-2)
CASSVGQVLNYGYTF

SEQ ID NO: 350983 - protein, 16 aa, Homo sapiens
  CDR3 for alpha chain variable domain of TCR clone 175492 (TRAV30, TRAJ24)
CGTEIVDADSWGKFQF

SEQ ID NO: 350984 - protein, 17 aa, Homo sapiens
  CDR3 for beta chain variable domain of TCR clone 175492 (TRBV11-1, TRBJ2-7)
CASSLTGSFGLDYEQYF

SEQ ID NO: 350985 - protein, 13 aa, Homo sapiens
  CDR3 for alpha chain variable domain of TCR clone 175493 (TRAV20, TRAJ37)
CAGCSSNTGILIF

SEQ ID NO: 350986 - protein, 11 aa, Homo sapiens
  CDR3 for beta chain variable domain of TCR clone 175493 (TRBV12-4, TRBJ2-3)
CASTATDTQYF

SEQ ID NO: 350987 - protein, 18 aa, Homo sapiens
  CDR3 for alpha chain variable domain of TCR clone 175494 (TRAV12-3, TRAJ52)
CAMSVGGAGGTSYGKLTF

SEQ ID NO: 350988 - protein, 20 aa, Homo sapiens
  CDR3 for beta chain variable domain of TCR clone 175494 (TRBV11-2, TRBJ2-2)
LRTRPCISVPAALEAGSCFF

SEQ ID NO: 350989 - protein, 14 aa, Homo sapiens
  CDR3 for alpha chain variable domain of TCR clone 175495 (TRAV21, TRAJ32)
CCGDYGGATNKLIF

SEQ ID NO: 350990 - protein, 13 aa, Homo sapiens
  CDR3 for beta chain variable domain of TCR clone 175495 (TRBV2, TRBJ1-6)
CASGRGGISSLHF

SEQ ID NO: 350991 - protein, 14 aa, Homo sapiens
  CDR3 for alpha chain variable domain of TCR clone 175496 (TRAV4, TRAJ43)
CLVGPMYNNNDMRF

SEQ ID NO: 350992 - protein, 16 aa, Homo sapiens
  CDR3 for beta chain variable domain of TCR clone 175496 (TRBV19, TRBJ2-1)
CASSKAGPSSYNEQFF

SEQ ID NO: 350993 - protein, 14 aa, Homo sapiens
  CDR3 for alpha chain variable domain of TCR clone 175497 (TRAV1-1, TRAJ28)
CAAPSGAGSYQLTF

SEQ ID NO: 350994 - protein, 12 aa, Homo sapiens
  CDR3 for beta chain variable domain of TCR clone 175497 (TRBV19, TRBJ1-5)
CASSIAQQPQHF

SEQ ID NO: 350995 - protein, 11 aa, Homo sapiens
  CDR3 for alpha chain variable domain of TCR clone 175498 (TRAV27, TRAJ47)
SIVEYGNKLVF

SEQ ID NO: 350996 - protein, 16 aa, Homo sapiens
  CDR3 for beta chain variable domain of TCR clone 175498 (TRBV15, TRBJ1-4)
CATSRDSPPGREKLFF

SEQ ID NO: 350997 - protein, 14 aa, Homo sapiens
  CDR3 for alpha chain variable domain of TCR clone 175499 (TRAV12-2, TRAJ40)
CAAKIPSGTYKYIF

SEQ ID NO: 350998 - protein, 14 aa, Homo sapiens
  CDR3 for beta chain variable domain of TCR clone 175499 (TRBV18, TRBJ2-5)
CASSPPGHQETQYF

SEQ ID NO: 350999 - protein, 15 aa, Homo sapiens
  CDR3 for alpha chain variable domain of TCR clone 175500 (TRAV27, TRAJ38)
CAARRNAGNNRKLIW

SEQ ID NO: 351000 - protein, 14 aa, Homo sapiens
  CDR3 for beta chain variable domain of TCR clone 175500 (TRBV7-2, TRBJ2-3)
CASSLTSGTDTQYF

SEQ ID NO: 351001 - protein, 16 aa, Homo sapiens
  CDR3 for alpha chain variable domain of TCR clone 175501 (TRAV30, TRAJ24)
CGTEIVDADSWGKFQF

SEQ ID NO: 351002 - protein, 14 aa, Homo sapiens
  CDR3 for beta chain variable domain of TCR clone 175501 (TRBV9, TRBJ1-6)
CSSVAGTGDSPLHF

SEQ ID NO: 351003 - protein, 13 aa, Homo sapiens
  CDR3 for alpha chain variable domain of TCR clone 175502 (TRAV13-1, TRAJ39)
CSKYSNAGNMLTF

SEQ ID NO: 351004 - protein, 15 aa, Homo sapiens
  CDR3 for beta chain variable domain of TCR clone 175502 (TRBV28, TRBJ2-5)
CASSSGRTIQETQYF

SEQ ID NO: 351005 - protein, 18 aa, Homo sapiens
  CDR3 for alpha chain variable domain of TCR clone 175503 (TRAV13-1, TRAJ52)
CAASKRSAGGTSYGKLTF

SEQ ID NO: 351006 - protein, 13 aa, Homo sapiens
  CDR3 for beta chain variable domain of TCR clone 175503 (TRBV12-4, TRBJ1-2)
CTSSLRQGKGYTF

SEQ ID NO: 351007 - protein, 11 aa, Homo sapiens
  CDR3 for alpha chain variable domain of TCR clone 175504 (TRAV16, TRAJ26)
CALTRWSEFCL

SEQ ID NO: 351008 - protein, 14 aa, Homo sapiens
  CDR3 for beta chain variable domain of TCR clone 175504 (TRBV25-1, TRBJ1-1)
CASTHLGGNTEAFF

SEQ ID NO: 351009 - protein, 11 aa, Homo sapiens
  CDR3 for alpha chain variable domain of TCR clone 175505 (TRAV36/DV7, TRAJ45)
VGGGGADGLTF

SEQ ID NO: 351010 - protein, 13 aa, Homo sapiens
  CDR3 for beta chain variable domain of TCR clone 175505 (TRBV28, TRBJ2-7)
CASSPSGTYEQYF

SEQ ID NO: 351011 - protein, 14 aa, Homo sapiens
  CDR3 for alpha chain variable domain of TCR clone 175506 (TRAV35, TRAJ22)
CAGLRPGSARQLTF

SEQ ID NO: 351012 - protein, 14 aa, Homo sapiens
  CDR3 for beta chain variable domain of TCR clone 175506 (TRBV11-3, TRBJ2-3)
CASSAGQGPDTQYF

SEQ ID NO: 351013 - protein, 12 aa, Homo sapiens
  CDR3 for alpha chain variable domain of TCR clone 175507 (TRAV1-2, TRAJ26)
CAVRGYGQNFVF

SEQ ID NO: 351014 - protein, 13 aa, Homo sapiens
  CDR3 for beta chain variable domain of TCR clone 175507 (TRBV12-4, TRBJ1-5)
CASSPDRAQPQHF

SEQ ID NO: 351015 - protein, 14 aa, Homo sapiens
  CDR3 for alpha chain variable domain of TCR clone 175508 (TRAV3, TRAJ7)
CAVREEEREQQTRF

SEQ ID NO: 351016 - protein, 16 aa, Homo sapiens
  CDR3 for beta chain variable domain of TCR clone 175508 (TRBV19, TRBJ2-1)
CASSKAGPSSYNEQFF

SEQ ID NO: 351017 - protein, 17 aa, Homo sapiens
  CDR3 for alpha chain variable domain of TCR clone 175509 (TRAV3, TRAJ6)
CAVRDGPRAGGSYIPTF

SEQ ID NO: 351018 - protein, 11 aa, Homo sapiens
  CDR3 for beta chain variable domain of TCR clone 175509 (TRBV29-1, TRBJ2-5)
CSEDRRGTQYF

SEQ ID NO: 351019 - protein, 15 aa, Homo sapiens
  CDR3 for alpha chain variable domain of TCR clone 175510 (TRAV26-1, TRAJ44)
CIVRIGTGTASKPTF

SEQ ID NO: 351020 - protein, 14 aa, Homo sapiens
  CDR3 for beta chain variable domain of TCR clone 175510 (TRBV7-8, TRBJ2-5)
CASSATGGQETQYF

SEQ ID NO: 351021 - protein, 14 aa, Homo sapiens
  CDR3 for alpha chain variable domain of TCR clone 175511 (TRAV9-2, TRAJ39)
CALYIYNAGNMLTF

SEQ ID NO: 351022 - protein, 15 aa, Homo sapiens
  CDR3 for beta chain variable domain of TCR clone 175511 (TRBV7-8, TRBJ2-7)
CASSLERAGSYEQYF

SEQ ID NO: 351023 - protein, 16 aa, Homo sapiens
  CDR3 for alpha chain variable domain of TCR clone 175512 (TRAV26-1, TRAJ56)
CFVRARERGANSKLTF

SEQ ID NO: 351024 - protein, 13 aa, Homo sapiens
  CDR3 for beta chain variable domain of TCR clone 175512 (TRBV7-2, TRBJ1-1)
CASSLRANTEAFF

SEQ ID NO: 351025 - protein, 14 aa, Homo sapiens
  CDR3 for alpha chain variable domain of TCR clone 175513 (TRAV13-1, TRAJ44)
CAAKATGTASKLTF

SEQ ID NO: 351026 - protein, 12 aa, Homo sapiens
  CDR3 for beta chain variable domain of TCR clone 175513 (TRBV7-8, TRBJ2-7)
CASSLGGREQYF

SEQ ID NO: 351027 - protein, 14 aa, Homo sapiens
  CDR3 for alpha chain variable domain of TCR clone 175514 (TRAV21, TRAJ35)
CAVMPIGFGNVLHC

SEQ ID NO: 351028 - protein, 12 aa, Homo sapiens
  CDR3 for beta chain variable domain of TCR clone 175514 (TRBV7-9, TRBJ1-1)
CASSLVRGEAFF

SEQ ID NO: 351029 - protein, 11 aa, Homo sapiens
  CDR3 for alpha chain variable domain of TCR clone 175515 (TRAV17, TRAJ49)
CATDAGNQFYF

SEQ ID NO: 351030 - protein, 16 aa, Homo sapiens
  CDR3 for beta chain variable domain of TCR clone 175515 (TRBV7-2, TRBJ1-2)
CASSPTSGTSVGGYTF

SEQ ID NO: 351031 - protein, 13 aa, Homo sapiens
  CDR3 for alpha chain variable domain of TCR clone 175516 (TRAV21, TRAJ15)
CAVANQAGTALIF

SEQ ID NO: 351032 - protein, 14 aa, Homo sapiens
  CDR3 for beta chain variable domain of TCR clone 175516 (TRBV18, TRBJ2-7)
CASSPRGGAYEQYF

SEQ ID NO: 351033 - protein, 16 aa, Homo sapiens
  CDR3 for alpha chain variable domain of TCR clone 175517 (TRAV20, TRAJ28)
CAVRDPSGAGSYQLTF

SEQ ID NO: 351034 - protein, 19 aa, Homo sapiens
  CDR3 for beta chain variable domain of TCR clone 175517 (TRBV7-2, TRBJ2-3)
CASSFLSRNWGGGTDTQYF

SEQ ID NO: 351035 - protein, 15 aa, Homo sapiens
  CDR3 for alpha chain variable domain of TCR clone 175518 (TRAV2, TRAJ11)
CAVGGRNSGYSTLTC

SEQ ID NO: 351036 - protein, 14 aa, Homo sapiens
  CDR3 for beta chain variable domain of TCR clone 175518 (TRBV4-1, TRBJ2-2)
CASSQAVNTGELFF

SEQ ID NO: 351037 - protein, 15 aa, Homo sapiens
  CDR3 for alpha chain variable domain of TCR clone 175519 (TRAV26-1, TRAJ12)
IASSELMDSSYKLIF

SEQ ID NO: 351038 - protein, 15 aa, Homo sapiens
  CDR3 for beta chain variable domain of TCR clone 175519 (TRBV10-2, TRBJ2-5)
CASKPEDRRQETQYF

SEQ ID NO: 351039 - protein, 13 aa, Homo sapiens
  CDR3 for alpha chain variable domain of TCR clone 175520 (TRAV4, TRAJ40)
CLVEGSGTYKYIF

SEQ ID NO: 351040 - protein, 16 aa, Homo sapiens
  CDR3 for beta chain variable domain of TCR clone 175520 (TRBV20-1, TRBJ2-1)
CSVSQHLAGDNNEQFF

SEQ ID NO: 351041 - protein, 15 aa, Homo sapiens
  CDR3 for alpha chain variable domain of TCR clone 175521 (TRAV1-1, TRAJ20)
CAVRDNVANDYKRSF

SEQ ID NO: 351042 - protein, 13 aa, Homo sapiens
  CDR3 for beta chain variable domain of TCR clone 175521 (TRBV4-1, TRBJ2-2)
CASSQENTGELFF

SEQ ID NO: 351043 - protein, 13 aa, Homo sapiens
  CDR3 for alpha chain variable domain of TCR clone 175522 (TRAV13-1, TRAJ39)
CAASIWAGDMLTF

SEQ ID NO: 351044 - protein, 15 aa, Homo sapiens
  CDR3 for beta chain variable domain of TCR clone 175522 (TRBV7-9, TRBJ1-1)
CASSLLEQGGTEAFF

SEQ ID NO: 351045 - protein, 14 aa, Homo sapiens
  CDR3 for alpha chain variable domain of TCR clone 175523 (TRAV12-3, TRAJ58)
CAISTETSGSRLTF

SEQ ID NO: 351046 - protein, 15 aa, Homo sapiens
  CDR3 for beta chain variable domain of TCR clone 175523 (TRBV27, TRBJ2-1)
CASSNGGGSSNEQFF

SEQ ID NO: 351047 - protein, 13 aa, Homo sapiens
  CDR3 for alpha chain variable domain of TCR clone 175524 (TRAV27, TRAJ6)
CAGGTRGSYIPTF

SEQ ID NO: 351048 - protein, 14 aa, Homo sapiens
  CDR3 for beta chain variable domain of TCR clone 175524 (TRBV4-2, TRBJ2-5)
CASSQDRGRETQYF

SEQ ID NO: 351049 - protein, 13 aa, Homo sapiens
  CDR3 for alpha chain variable domain of TCR clone 175525 (TRAV22, TRAJ29)
CAVGGSGNTPLVF

SEQ ID NO: 351050 - protein, 15 aa, Homo sapiens
  CDR3 for beta chain variable domain of TCR clone 175525 (TRBV19, TRBJ2-7)
CASRKAGGSEQYLGR

SEQ ID NO: 351051 - protein, 13 aa, Homo sapiens
  CDR3 for alpha chain variable domain of TCR clone 175526 (TRAV13-1, TRAJ40)
CAASKGGTYKYIF

SEQ ID NO: 351052 - protein, 13 aa, Homo sapiens
  CDR3 for beta chain variable domain of TCR clone 175526 (TRBV7-7, TRBJ1-2)
CASSLVADYGYTF

SEQ ID NO: 351053 - protein, 13 aa, Homo sapiens
  CDR3 for alpha chain variable domain of TCR clone 175527 (TRAV12-1, TRAJ6)
CVVTPGGSYIPTF

SEQ ID NO: 351054 - protein, 16 aa, Homo sapiens
  CDR3 for beta chain variable domain of TCR clone 175527 (TRBV12-5, TRBJ2-5)
CASGPRTSGNQETQYF

SEQ ID NO: 351055 - protein, 15 aa, Homo sapiens
  CDR3 for alpha chain variable domain of TCR clone 175528 (TRAV14/DV4, TRAJ33)
CAMREGRDSNYQLIW

SEQ ID NO: 351056 - protein, 13 aa, Homo sapiens
  CDR3 for beta chain variable domain of TCR clone 175528 (TRBV19, TRBJ1-2)
CASSVPGQDGYTF

SEQ ID NO: 351057 - protein, 13 aa, Homo sapiens
  CDR3 for alpha chain variable domain of TCR clone 175529 (TRAV27, TRAJ54)
CAGAGQGAQKQVF

SEQ ID NO: 351058 - protein, 15 aa, Homo sapiens
  CDR3 for beta chain variable domain of TCR clone 175529 (TRBV18, TRBJ2-6)
CASSPSYAGANVLTF

SEQ ID NO: 351059 - protein, 21 aa, Homo sapiens
  CDR3 for alpha chain variable domain of TCR clone 175530 (TRAV1-2, TRAJ37)
CLLPPCCERFHGSGNTGKLIF

SEQ ID NO: 351060 - protein, 14 aa, Homo sapiens
  CDR3 for beta chain variable domain of TCR clone 175530 (TRBV2, TRBJ2-5)
CASSEVLAQETQYF

SEQ ID NO: 351061 - protein, 14 aa, Homo sapiens
  CDR3 for alpha chain variable domain of TCR clone 175531 (TRAV8-3, TRAJ4)
CAVGAAGGYNKLIF

SEQ ID NO: 351062 - protein, 14 aa, Homo sapiens
  CDR3 for beta chain variable domain of TCR clone 175531 (TRBV12-5, TRBJ2-5)
CASGSRTHQEAQYF

SEQ ID NO: 351063 - protein, 14 aa, Homo sapiens
  CDR3 for alpha chain variable domain of TCR clone 175532 (TRAV17, TRAJ12)
CATHEKDSSYKLIF

SEQ ID NO: 351064 - protein, 16 aa, Homo sapiens
  CDR3 for beta chain variable domain of TCR clone 175532 (TRBV11-2, TRBJ2-1)
CASSPRLAGVYNEQFF

SEQ ID NO: 351065 - protein, 15 aa, Homo sapiens
  CDR3 for alpha chain variable domain of TCR clone 175533 (TRAV38-2/DV8, TRAJ57)
CAYKSGLGGSEKLFF

SEQ ID NO: 351066 - protein, 16 aa, Homo sapiens
  CDR3 for beta chain variable domain of TCR clone 175533 (TRBV28, TRBJ1-5)
CASSFRGGYSNQPQHF

SEQ ID NO: 351067 - protein, 16 aa, Homo sapiens
  CDR3 for alpha chain variable domain of TCR clone 175534 (TRAV3, TRAJ18)
CAVRDGRGSTLGGLYV

SEQ ID NO: 351068 - protein, 15 aa, Homo sapiens
  CDR3 for beta chain variable domain of TCR clone 175534 (TRBV7-9, TRBJ1-6)
CASSSPGRGNSPLHF

SEQ ID NO: 351069 - protein, 13 aa, Homo sapiens
  CDR3 for alpha chain variable domain of TCR clone 175535 (TRAV13-1, TRAJ21)
CAASIYNFNKFYF

SEQ ID NO: 351070 - protein, 14 aa, Homo sapiens
  CDR3 for beta chain variable domain of TCR clone 175535 (TRBV4-1, TRBJ2-2)
CASSQAVNIGELFF

SEQ ID NO: 351071 - protein, 12 aa, Homo sapiens
  CDR3 for alpha chain variable domain of TCR clone 175536 (TRAV13-1, TRAJ42)
SVLRGSQGNLIF

SEQ ID NO: 351072 - protein, 13 aa, Homo sapiens
  CDR3 for beta chain variable domain of TCR clone 175536 (TRBV2, IGHJ2)
CASSELGVEKLFF

SEQ ID NO: 351073 - protein, 16 aa, Homo sapiens
  CDR3 for alpha chain variable domain of TCR clone 175537 (TRAV12-3, TRAJ53)
CAMSPGSGGRNYKLTF

SEQ ID NO: 351074 - protein, 15 aa, Homo sapiens
  CDR3 for beta chain variable domain of TCR clone 175537 (TRBV25-1, TRBJ1-4)
CASSKRIATNEKLFF

SEQ ID NO: 351075 - protein, 11 aa, Homo sapiens
  CDR3 for alpha chain variable domain of TCR clone 175538 (TRAV12-3, TRAJ43)
CAISVSNDMRF

SEQ ID NO: 351076 - protein, 17 aa, Homo sapiens
  CDR3 for beta chain variable domain of TCR clone 175538 (TRBV4-3, TRBJ2-7)
CASSQGGEGSTSSTSGR

SEQ ID NO: 351077 - protein, 17 aa, Homo sapiens
  CDR3 for alpha chain variable domain of TCR clone 175539 (TRAV38-2/DV8, TRAJ28)
CAYRFAYSGAGSYQLTF

SEQ ID NO: 351078 - protein, 10 aa, Homo sapiens
  CDR3 for beta chain variable domain of TCR clone 175539 (TRBV4-3, TRBJ2-2)
CASSQDTSAR

SEQ ID NO: 351079 - protein, 15 aa, Homo sapiens
  CDR3 for alpha chain variable domain of TCR clone 175540 (TRAV8-6, TRAJ38)
CAVSSNPGNNRKLIW

SEQ ID NO: 351080 - protein, 15 aa, Homo sapiens
  CDR3 for beta chain variable domain of TCR clone 175540 (TRBV6-4, TRBJ2-1)
CASSSGTSGYNEQFF

SEQ ID NO: 351081 - protein, 14 aa, Homo sapiens
  CDR3 for alpha chain variable domain of TCR clone 175541 (TRAV1-2, TRAJ8)
CAVSEDTGFQTLVF

SEQ ID NO: 351082 - protein, 15 aa, Homo sapiens
  CDR3 for beta chain variable domain of TCR clone 175541 (TRBV6-3, TRBJ2-7)
CASSSPGTVFYEQYF

SEQ ID NO: 351083 - protein, 13 aa, Homo sapiens
  CDR3 for alpha chain variable domain of TCR clone 175542 (TRAV12-1, TRAJ6)
CVVFPGGSYKPTF

SEQ ID NO: 351084 - protein, 14 aa, Homo sapiens
  CDR3 for beta chain variable domain of TCR clone 175542 (TRBV20-1, TRBJ1-3)
CSASPTGAGNTMYF

SEQ ID NO: 351085 - protein, 17 aa, Homo sapiens
  CDR3 for alpha chain variable domain of TCR clone 175543 (TRAV8-4, TRAJ11)
CAVSDRGENSGYSNLTF

SEQ ID NO: 351086 - protein, 14 aa, Homo sapiens
  CDR3 for beta chain variable domain of TCR clone 175543 (TRBV20-1, TRBJ2-1)
CSPNDEASYNEQFF

SEQ ID NO: 351087 - protein, 14 aa, Homo sapiens
  CDR3 for alpha chain variable domain of TCR clone 175544 (TRAV14/DV4, TRAJ15)
CAMRRDQAGTALIF

SEQ ID NO: 351088 - protein, 16 aa, Homo sapiens
  CDR3 for beta chain variable domain of TCR clone 175544 (TRBV15, TRBJ2-3)
CATRRDLGIVTDTQYF

SEQ ID NO: 351089 - protein, 13 aa, Homo sapiens
  CDR3 for alpha chain variable domain of TCR clone 175545 (TRAV16, TRAJ30)
CALAQNRDYKIIF

SEQ ID NO: 351090 - protein, 15 aa, Homo sapiens
  CDR3 for beta chain variable domain of TCR clone 175545 (TRBV2, TRBJ1-1)
CASTEPGQGASGAFF

SEQ ID NO: 351091 - protein, 14 aa, Homo sapiens
  CDR3 for alpha chain variable domain of TCR clone 175546 (TRAV8-1, TRAJ34)
CAVFTTYNTDKLIF

SEQ ID NO: 351092 - protein, 14 aa, Homo sapiens
  CDR3 for beta chain variable domain of TCR clone 175546 (TRBV11-3, TRBJ1-3)
CASSHNGQGNTIYF

SEQ ID NO: 351093 - protein, 12 aa, Homo sapiens
  CDR3 for alpha chain variable domain of TCR clone 175547 (TRAV12-1, TRAJ33)
CVVIGSNYQLIW

SEQ ID NO: 351094 - protein, 14 aa, Homo sapiens
  CDR3 for beta chain variable domain of TCR clone 175547 (TRBV19, TRBJ2-1)
CASPTFVLSGEQFF

SEQ ID NO: 351095 - protein, 11 aa, Homo sapiens
  CDR3 for alpha chain variable domain of TCR clone 175548 (TRAV8-3, TRAJ49)
CAVNTGNQFYL

SEQ ID NO: 351096 - protein, 12 aa, Homo sapiens
  CDR3 for beta chain variable domain of TCR clone 175548 (TRBV11-2, TRBJ2-7)
CASSPPADEQYF

SEQ ID NO: 351097 - protein, 14 aa, Homo sapiens
  CDR3 for alpha chain variable domain of TCR clone 175549 (TRAV8-3, TRAJ4)
CAVGAYGGYNKLIF

SEQ ID NO: 351098 - protein, 17 aa, Homo sapiens
  CDR3 for beta chain variable domain of TCR clone 175549 (TRBV11-2, TRBJ2-1)
CASSLYPPGVEYNEQFF

SEQ ID NO: 351099 - protein, 15 aa, Homo sapiens
  CDR3 for alpha chain variable domain of TCR clone 175550 (TRAV12-1, TRAJ41)
CVVNSRTGSGYALNF

SEQ ID NO: 351100 - protein, 19 aa, Homo sapiens
  CDR3 for beta chain variable domain of TCR clone 175550 (TRBV25-1, TRBJ2-2)
CAILVYRVDRGRKTGELFF

SEQ ID NO: 351101 - protein, 16 aa, Homo sapiens
  CDR3 for alpha chain variable domain of TCR clone 175551 (TRAV16, TRAJ52)
CALSVAGGTSYGKLTF

SEQ ID NO: 351102 - protein, 16 aa, Homo sapiens
  CDR3 for beta chain variable domain of TCR clone 175551 (TRBV12-4, TRBJ1-5)
CASSRPVGGSNQPQHF

SEQ ID NO: 351103 - protein, 11 aa, Homo sapiens
  CDR3 for alpha chain variable domain of TCR clone 175552 (TRAV12-3, TRAJ43)
CAMSVSNDMRF

SEQ ID NO: 351104 - protein, 13 aa, Homo sapiens
  CDR3 for beta chain variable domain of TCR clone 175552 (TRBV20-1, TRBJ1-1)
CSAPLGGGTEEFF

SEQ ID NO: 351105 - protein, 19 aa, Homo sapiens
  CDR3 for alpha chain variable domain of TCR clone 175553 (TRAV2, TRAJ20)
ILQVREADAAVYRDCKLSF

SEQ ID NO: 351106 - protein, 14 aa, Homo sapiens
  CDR3 for beta chain variable domain of TCR clone 175553 (TRBV5-1, TRBJ2-3)
CASSLFGPTDTQYF

SEQ ID NO: 351107 - protein, 14 aa, Homo sapiens
  CDR3 for alpha chain variable domain of TCR clone 175554 (TRAV13-1, TRAJ20)
FAARPGSNDYKLSF

SEQ ID NO: 351108 - protein, 13 aa, Homo sapiens
  CDR3 for beta chain variable domain of TCR clone 175554 (TRBV20-1, TRBJ1-1)
CSAPPGGHTEAFF

SEQ ID NO: 351109 - protein, 12 aa, Homo sapiens
  CDR3 for alpha chain variable domain of TCR clone 175555 (TRAV20, TRAJ39)
CAVGNAGNMLTF

SEQ ID NO: 351110 - protein, 16 aa, Homo sapiens
  CDR3 for beta chain variable domain of TCR clone 175555 (TRBV5-1, TRBJ1-1)
CASSSGGNSLNTEAFF

SEQ ID NO: 351111 - protein, 14 aa, Homo sapiens
  CDR3 for alpha chain variable domain of TCR clone 175556 (TRAV27, TRAJ39)
CAGRPTGAGNMLTF

SEQ ID NO: 351112 - protein, 15 aa, Homo sapiens
  CDR3 for beta chain variable domain of TCR clone 175556 (TRBV19, TRBJ2-1)
CASSSPGVPLDEQFF

SEQ ID NO: 351113 - protein, 11 aa, Homo sapiens
  CDR3 for alpha chain variable domain of TCR clone 175557 (TRAV27, TRAJ20)
CAGLNDYKLSF

SEQ ID NO: 351114 - protein, 16 aa, Homo sapiens
  CDR3 for beta chain variable domain of TCR clone 175557 (TRBV27, TRBJ2-2)
CASNFRGLVRTGELFF

SEQ ID NO: 351115 - protein, 13 aa, Homo sapiens
  CDR3 for alpha chain variable domain of TCR clone 175558 (TRAV3, TRAJ21)
CAVREPDFNKFYF

SEQ ID NO: 351116 - protein, 16 aa, Homo sapiens
  CDR3 for beta chain variable domain of TCR clone 175558 (TRBV6-6, TRBJ2-1)
CASSWGGQGPYNEQFF

SEQ ID NO: 351117 - protein, 15 aa, Homo sapiens
  CDR3 for alpha chain variable domain of TCR clone 175559 (TRAV12-3, TRAJ6)
CAMSATTGGSYIPTF

SEQ ID NO: 351118 - protein, 15 aa, Homo sapiens
  CDR3 for beta chain variable domain of TCR clone 175559 (TRBV18, TRBJ2-7)
CASSPRSGTAYEQYF

SEQ ID NO: 351119 - protein, 13 aa, Homo sapiens
  CDR3 for alpha chain variable domain of TCR clone 175560 (TRAV3, TRAJ29)
CAVRDIIDTLLVF

SEQ ID NO: 351120 - protein, 14 aa, Homo sapiens
  CDR3 for beta chain variable domain of TCR clone 175560 (TRBV27, TRBJ2-1)
CASSVTGGYKEQFF

SEQ ID NO: 351121 - protein, 18 aa, Homo sapiens
  CDR3 for alpha chain variable domain of TCR clone 175561 (TRAV21, TRAJ52)
CAVRPSPAGGTSYGKLKF

SEQ ID NO: 351122 - protein, 17 aa, Homo sapiens
  CDR3 for beta chain variable domain of TCR clone 175561 (TRBV13, TRBJ2-3)
CARSLSRVAGGRNTQYF

SEQ ID NO: 351123 - protein, 16 aa, Homo sapiens
  CDR3 for alpha chain variable domain of TCR clone 175562 (TRAV12-2, TRAJ43)
CAGDDMRFGAGTRLTV

SEQ ID NO: 351124 - protein, 16 aa, Homo sapiens
  CDR3 for beta chain variable domain of TCR clone 175562 (TRBV2, TRBJ2-4)
CASSDAPGGEQNMQYF

SEQ ID NO: 351125 - protein, 15 aa, Homo sapiens
  CDR3 for alpha chain variable domain of TCR clone 175563 (TRAV17, TRAJ23)
CATDAEANQGGKLIL

SEQ ID NO: 351126 - protein, 12 aa, Homo sapiens
  CDR3 for beta chain variable domain of TCR clone 175563 (TRBV2, TRBJ2-1)
CAKREGYNEQFF

SEQ ID NO: 351127 - protein, 15 aa, Homo sapiens
  CDR3 for alpha chain variable domain of TCR clone 175564 (TRAV12-1, TRAJ45)
CVVLSRGGGAAGLTF

SEQ ID NO: 351128 - protein, 15 aa, Homo sapiens
  CDR3 for beta chain variable domain of TCR clone 175564 (TRBV12-5, TRBJ2-5)
CASGSGLAGRETQYF

SEQ ID NO: 351129 - protein, 10 aa, Homo sapiens
  CDR3 for alpha chain variable domain of TCR clone 175565 (TRAV2, TRAJ34)
CAVVNVKLIF

SEQ ID NO: 351130 - protein, 14 aa, Homo sapiens
  CDR3 for beta chain variable domain of TCR clone 175565 (TRBV11-2, TRBJ2-3)
CASSRLARTDTQYF

SEQ ID NO: 351131 - protein, 13 aa, Homo sapiens
  CDR3 for alpha chain variable domain of TCR clone 175566 (TRAV2, TRAJ34)
CAVEEDNTDKLIF

SEQ ID NO: 351132 - protein, 13 aa, Homo sapiens
  CDR3 for beta chain variable domain of TCR clone 175566 (TRBV12-4, TRBJ2-5)
CASSPGTEETQYF

SEQ ID NO: 351133 - protein, 15 aa, Homo sapiens
  CDR3 for alpha chain variable domain of TCR clone 175567 (TRAV12-3, TRAJ13)
CAMSARSGGYQKVTF

SEQ ID NO: 351134 - protein, 15 aa, Homo sapiens
  CDR3 for beta chain variable domain of TCR clone 175567 (TRBV10-2, TRBJ2-6)
CASSEQGTGANVLTF

SEQ ID NO: 351135 - protein, 14 aa, Homo sapiens
  CDR3 for alpha chain variable domain of TCR clone 175568 (TRAV17, TRAJ24)
CATLTTDSWWKFQF

SEQ ID NO: 351136 - protein, 16 aa, Homo sapiens
  CDR3 for beta chain variable domain of TCR clone 175568 (TRBV4-2, TRBJ2-7)
CASSQDGGSLRGEQYF

SEQ ID NO: 351137 - protein, 12 aa, Homo sapiens
  CDR3 for alpha chain variable domain of TCR clone 175569 (TRAV26-1, TRAJ35)
CIGLSFGNVLHC

SEQ ID NO: 351138 - protein, 15 aa, Homo sapiens
  CDR3 for beta chain variable domain of TCR clone 175569 (TRBV5-1, TRBJ2-7)
CASSLYPDGGYEQYF

SEQ ID NO: 351139 - protein, 12 aa, Homo sapiens
  CDR3 for alpha chain variable domain of TCR clone 175570 (TRAV8-3, TRAJ15)
GAPNQAGTALIF

SEQ ID NO: 351140 - protein, 14 aa, Homo sapiens
  CDR3 for beta chain variable domain of TCR clone 175570 (TRBV20-1, TRBJ2-1)
CGPNDEASYNEQFF

SEQ ID NO: 351141 - protein, 12 aa, Homo sapiens
  CDR3 for alpha chain variable domain of TCR clone 175571 (TRAV3, TRAJ20)
CAVRDGDYKLSF

SEQ ID NO: 351142 - protein, 17 aa, Homo sapiens
  CDR3 for beta chain variable domain of TCR clone 175571 (TRBV6-1, TRBJ2-7)
CASRARLAGSPSYEQYF

SEQ ID NO: 351143 - protein, 15 aa, Homo sapiens
  CDR3 for alpha chain variable domain of TCR clone 175572 (TRAV21, TRAJ56)
CAVTKYTRANSKLTF

SEQ ID NO: 351144 - protein, 14 aa, Homo sapiens
  CDR3 for beta chain variable domain of TCR clone 175572 (TRBV20-1, TRBJ2-3)
CSARVRGSTDTQYF

SEQ ID NO: 351145 - protein, 14 aa, Homo sapiens
  CDR3 for alpha chain variable domain of TCR clone 175573 (TRAV1-2, TRAJ16)
CAVNPFSDGQKLLF

SEQ ID NO: 351146 - protein, 13 aa, Homo sapiens
  CDR3 for beta chain variable domain of TCR clone 175573 (TRBV20-1, TRBJ1-1)
CSARAGGNTEAFF

SEQ ID NO: 351147 - protein, 13 aa, Homo sapiens
  CDR3 for alpha chain variable domain of TCR clone 175574 (TRAV21, TRAJ27)
CSALNTNAGKSTF

SEQ ID NO: 351148 - protein, 15 aa, Homo sapiens
  CDR3 for beta chain variable domain of TCR clone 175574 (TRBV20-1, TRBJ2-7)
CSARKGLAESYEQYF

SEQ ID NO: 351149 - protein, 14 aa, Homo sapiens
  CDR3 for alpha chain variable domain of TCR clone 175575 (TRAV12-2, TRAJ13)
CAVKKTGGYQKVTV

SEQ ID NO: 351150 - protein, 17 aa, Homo sapiens
  CDR3 for beta chain variable domain of TCR clone 175575 (TRBV20-1, TRBJ2-2)
CSASGSGQGGLTGELFF

SEQ ID NO: 351151 - protein, 17 aa, Homo sapiens
  CDR3 for alpha chain variable domain of TCR clone 175576 (TRAV13-1, TRAJ52)
CAASSGAGGTSYGKLTF

SEQ ID NO: 351152 - protein, 15 aa, Homo sapiens
  CDR3 for beta chain variable domain of TCR clone 175576 (TRBV13, TRBJ1-5)
CASSFGQGGVQTQHF

SEQ ID NO: 351153 - protein, 19 aa, Homo sapiens
  CDR3 for alpha chain variable domain of TCR clone 175577 (TRAV3, TRAJ37)
CAVRDIVGGYPSKTGKLIF

SEQ ID NO: 351154 - protein, 14 aa, Homo sapiens
  CDR3 for beta chain variable domain of TCR clone 175577 (TRBV7-8, TRBJ2-3)
CASSLEAGTDTQYF

SEQ ID NO: 351155 - protein, 16 aa, Homo sapiens
  CDR3 for alpha chain variable domain of TCR clone 175578 (TRAV14/DV4, TRAJ53)
CAMREGGGGSNYKLTF

SEQ ID NO: 351156 - protein, 17 aa, Homo sapiens
  CDR3 for beta chain variable domain of TCR clone 175578 (TRBV7-3, TRBJ2-3)
CACSLMKGMRGADTQYF

SEQ ID NO: 351157 - protein, 12 aa, Homo sapiens
  CDR3 for alpha chain variable domain of TCR clone 175579 (TRAV16, TRAJ26)
CALRSYGKNFFF

SEQ ID NO: 351158 - protein, 14 aa, Homo sapiens
  CDR3 for beta chain variable domain of TCR clone 175579 (TRBV10-3, TRBJ2-1)
CAISSDLAYNEQFF

SEQ ID NO: 351159 - protein, 17 aa, Homo sapiens
  CDR3 for alpha chain variable domain of TCR clone 175580 (TRAV27, TRAJ42)
CAERVIYYGGSQGNLIF

SEQ ID NO: 351160 - protein, 16 aa, Homo sapiens
  CDR3 for beta chain variable domain of TCR clone 175580 (TRBV6-1, TRBJ2-1)
CASILRQGSSYNEQFF

SEQ ID NO: 351161 - protein, 13 aa, Homo sapiens
  CDR3 for alpha chain variable domain of TCR clone 175581 (TRAV36/DV7, TRAJ54)
CAVDIQGAQKLVF

SEQ ID NO: 351162 - protein, 14 aa, Homo sapiens
  CDR3 for beta chain variable domain of TCR clone 175581 (TRBV19, TRBJ2-7)
CASNFRDAFTGMYF

SEQ ID NO: 351163 - protein, 15 aa, Homo sapiens
  CDR3 for alpha chain variable domain of TCR clone 175582 (TRAV12-1, TRAJ9)
CVVSFGDTGGFKTIL

SEQ ID NO: 351164 - protein, 13 aa, Homo sapiens
  CDR3 for beta chain variable domain of TCR clone 175582 (TRBV2, TRBJ1-4)
CASSERAGETLFF

SEQ ID NO: 351165 - protein, 16 aa, Homo sapiens
  CDR3 for alpha chain variable domain of TCR clone 175583 (TRAV36/DV7, TRAJ52)
CAVTNAGGTSYGKLTF

SEQ ID NO: 351166 - protein, 13 aa, Homo sapiens
  CDR3 for beta chain variable domain of TCR clone 175583 (TRBV20-1, TRBJ2-3)
CSARLAGTDTQYF

SEQ ID NO: 351167 - protein, 15 aa, Homo sapiens
  CDR3 for alpha chain variable domain of TCR clone 175584 (TRAV16, TRAJ48)
CALLTSNFGNEKLTF

SEQ ID NO: 351168 - protein, 15 aa, Homo sapiens
  CDR3 for beta chain variable domain of TCR clone 175584 (TRBV5-4, TRBJ2-7)
CASSRFGTGSYEPYF

SEQ ID NO: 351169 - protein, 15 aa, Homo sapiens
  CDR3 for alpha chain variable domain of TCR clone 175585 (TRAV38-1, TRAJ37)
CAFIHGSGNTGKLIF

SEQ ID NO: 351170 - protein, 14 aa, Homo sapiens
  CDR3 for beta chain variable domain of TCR clone 175585 (TRBV29-1, TRBJ2-5)
CSVETSGSGETQSF

SEQ ID NO: 351171 - protein, 15 aa, Homo sapiens
  CDR3 for alpha chain variable domain of TCR clone 175586 (TRAV12-2, TRAJ53)
CAVNGGGGSNYKLTF

SEQ ID NO: 351172 - protein, 12 aa, Homo sapiens
  CDR3 for beta chain variable domain of TCR clone 175586 (TRBV12-4, TRBJ1-2)
CASSVIWLHLRF

SEQ ID NO: 351173 - protein, 11 aa, Homo sapiens
  CDR3 for alpha chain variable domain of TCR clone 175587 (TRAV17, TRAJ31)
CATSNNARLMF

SEQ ID NO: 351174 - protein, 14 aa, Homo sapiens
  CDR3 for beta chain variable domain of TCR clone 175587 (TRBV18, TRBJ2-7)
CASSPRGGAYEQFF

SEQ ID NO: 351175 - protein, 12 aa, Homo sapiens
  CDR3 for alpha chain variable domain of TCR clone 175588 (TRAV8-3, TRAJ20)
CAVDLNDYKLSF

SEQ ID NO: 351176 - protein, 17 aa, Homo sapiens
  CDR3 for beta chain variable domain of TCR clone 175588 (TRBV7-8, TRBJ2-6)
CASSAGTGGAGANVLTF

SEQ ID NO: 351177 - protein, 13 aa, Homo sapiens
  CDR3 for alpha chain variable domain of TCR clone 175589 (TRAV8-6, TRAJ8)
CAVSNTGFQKLVF

SEQ ID NO: 351178 - protein, 14 aa, Homo sapiens
  CDR3 for beta chain variable domain of TCR clone 175589 (TRBV19, TRBJ2-7)
CASSMGQGAIEQYF

SEQ ID NO: 351179 - protein, 10 aa, Homo sapiens
  CDR3 for alpha chain variable domain of TCR clone 175590 (TRAV1-2, TRAJ20)
CACNDYKLSF

SEQ ID NO: 351180 - protein, 16 aa, Homo sapiens
  CDR3 for beta chain variable domain of TCR clone 175590 (TRBV20-1, TRBJ2-1)
CSARDLKQGMNNVQFF

SEQ ID NO: 351181 - protein, 17 aa, Homo sapiens
  CDR3 for alpha chain variable domain of TCR clone 175591 (TRAV12-2, TRAJ36)
CALKDNLFFGTGPRLTV

SEQ ID NO: 351182 - protein, 15 aa, Homo sapiens
  CDR3 for beta chain variable domain of TCR clone 175591 (TRBV28, TRBJ2-2)
CASTVAGANTGELFF

SEQ ID NO: 351183 - protein, 16 aa, Homo sapiens
  CDR3 for alpha chain variable domain of TCR clone 175592 (TRAV30, TRAJ24)
RGTEIVDADSWGKFQF

SEQ ID NO: 351184 - protein, 15 aa, Homo sapiens
  CDR3 for beta chain variable domain of TCR clone 175592 (TRBV28, TRBJ2-5)
CASSPPWSYQETQYF

SEQ ID NO: 351185 - protein, 16 aa, Homo sapiens
  CDR3 for alpha chain variable domain of TCR clone 175593 (TRAV17, TRAJ22)
CATDAIFSGSARQLTF

SEQ ID NO: 351186 - protein, 15 aa, Homo sapiens
  CDR3 for beta chain variable domain of TCR clone 175593 (TRBV5-1, TRBJ2-1)
CASSPPRAPYNEQFF

SEQ ID NO: 351187 - protein, 14 aa, Homo sapiens
  CDR3 for alpha chain variable domain of TCR clone 175594 (TRAV8-3, TRAJ4)
CAAGAAGGYNKLIF

SEQ ID NO: 351188 - protein, 12 aa, Homo sapiens
  CDR3 for beta chain variable domain of TCR clone 175594 (TRBV7-8, TRBJ2-7)
CASSLGDREQYF

SEQ ID NO: 351189 - protein, 13 aa, Homo sapiens
  CDR3 for alpha chain variable domain of TCR clone 175595 (TRAV2, TRAJ24)
CAVSTDSWGKLQF

SEQ ID NO: 351190 - protein, 14 aa, Homo sapiens
  CDR3 for beta chain variable domain of TCR clone 175595 (TRBV13, TRBJ2-5)
CASSLGTAQVTQYF

SEQ ID NO: 351191 - protein, 14 aa, Homo sapiens
  CDR3 for alpha chain variable domain of TCR clone 175596 (TRAV20, TRAJ18)
CAVGRGPTLGRRYF

SEQ ID NO: 351192 - protein, 14 aa, Homo sapiens
  CDR3 for beta chain variable domain of TCR clone 175596 (TRBV28, TRBJ2-4)
CASTQVTGVNSQYF

SEQ ID NO: 351193 - protein, 16 aa, Homo sapiens
  CDR3 for alpha chain variable domain of TCR clone 175597 (TRAV27, TRAJ13)
CAGAKSDSGGYQKVTF

SEQ ID NO: 351194 - protein, 12 aa, Homo sapiens
  CDR3 for beta chain variable domain of TCR clone 175597 (TRBV29-1, TRBJ2-1)
RKTRLFYNEQFF

SEQ ID NO: 351195 - protein, 14 aa, Homo sapiens
  CDR3 for alpha chain variable domain of TCR clone 175598 (TRAV4, TRAJ30)
CLVGDMNRDDKIIF

SEQ ID NO: 351196 - protein, 16 aa, Homo sapiens
  CDR3 for beta chain variable domain of TCR clone 175598 (TRBV20-1, TRBJ1-4)
CSAPGQGLFTNEKLFC

SEQ ID NO: 351197 - protein, 13 aa, Homo sapiens
  CDR3 for alpha chain variable domain of TCR clone 175599 (TRAV2, TRAJ15)
CAVASQAGTAPIF

SEQ ID NO: 351198 - protein, 14 aa, Homo sapiens
  CDR3 for beta chain variable domain of TCR clone 175599 (TRBV10-3, TRBJ2-7)
CAISAPRGAYEQYF

SEQ ID NO: 351199 - protein, 12 aa, Homo sapiens
  CDR3 for alpha chain variable domain of TCR clone 175600 (TRAV17, TRAJ12)
CATLRSSYKLIF

SEQ ID NO: 351200 - protein, 14 aa, Homo sapiens
  CDR3 for beta chain variable domain of TCR clone 175600 (TRBV11-1, TRBJ1-1)
CASSLEHPNTEAFF

SEQ ID NO: 351201 - protein, 12 aa, Homo sapiens
  CDR3 for alpha chain variable domain of TCR clone 175601 (TRAV13-1, TRAJ21)
CAAKKGFNKFYF

SEQ ID NO: 351202 - protein, 14 aa, Homo sapiens
  CDR3 for beta chain variable domain of TCR clone 175601 (TRBV7-2, TRBJ2-7)
CASSPKTSFYEQYF

SEQ ID NO: 351203 - protein, 17 aa, Homo sapiens
  CDR3 for alpha chain variable domain of TCR clone 175602 (TRAV13-1, TRAJ28)
CAASPPYSGAGRYQLTF

SEQ ID NO: 351204 - protein, 19 aa, Homo sapiens
  CDR3 for beta chain variable domain of TCR clone 175602 (TRBV25-1, TRBJ2-2)
CAILVYRVDRGRKTGELFL

SEQ ID NO: 351205 - protein, 14 aa, Homo sapiens
  CDR3 for alpha chain variable domain of TCR clone 175603 (TRAV16, TRAJ42)
CALLAGGSQGNLTF

SEQ ID NO: 351206 - protein, 13 aa, Homo sapiens
  CDR3 for beta chain variable domain of TCR clone 175603 (TRBV7-9, TRBJ1-2)
CASSLKQNYSYTF

SEQ ID NO: 351207 - protein, 12 aa, Homo sapiens
  CDR3 for alpha chain variable domain of TCR clone 175604 (TRAV8-3, TRAJ20)
CAVGANDYKLSF

SEQ ID NO: 351208 - protein, 17 aa, Homo sapiens
  CDR3 for beta chain variable domain of TCR clone 175604 (TRBV4-1, TRBJ1-4)
CASSQEGPRGVEEKLFF

SEQ ID NO: 351209 - protein, 16 aa, Homo sapiens
  CDR3 for alpha chain variable domain of TCR clone 175605 (TRAV30, TRAJ24)
CGTEIVGADSWGKFQF

SEQ ID NO: 351210 - protein, 14 aa, Homo sapiens
  CDR3 for beta chain variable domain of TCR clone 175605 (TRBV12-5, TRBJ2-7)
CASGSRTHQETQYF

SEQ ID NO: 351211 - protein, 14 aa, Homo sapiens
  CDR3 for alpha chain variable domain of TCR clone 175606 (TRAV30, TRAJ26)
CGTEIVSYGQNFVF

SEQ ID NO: 351212 - protein, 14 aa, Homo sapiens
  CDR3 for beta chain variable domain of TCR clone 175606 (TRBV7-3, TRBJ2-1)
CASSLGTSANEQFF

SEQ ID NO: 351213 - protein, 16 aa, Homo sapiens
  CDR3 for alpha chain variable domain of TCR clone 175607 (TRAV17, TRAJ17)
CATALQEEAAGTKLTF

SEQ ID NO: 351214 - protein, 12 aa, Homo sapiens
  CDR3 for beta chain variable domain of TCR clone 175607 (TRBV4-2, TRBJ2-5)
CASGGAQGTQYF

SEQ ID NO: 351215 - protein, 12 aa, Homo sapiens
  CDR3 for alpha chain variable domain of TCR clone 175608 (TRAV30, TRAJ43)
CGTEERGNDMRF

SEQ ID NO: 351216 - protein, 13 aa, Homo sapiens
  CDR3 for beta chain variable domain of TCR clone 175608 (TRBV27, TRBJ2-7)
CASSFSQGYEHYF

SEQ ID NO: 351217 - protein, 17 aa, Homo sapiens
  CDR3 for alpha chain variable domain of TCR clone 175609 (TRAV8-6, TRAJ8)
CAAEEGLENTGFQKLVF

SEQ ID NO: 351218 - protein, 12 aa, Homo sapiens
  CDR3 for beta chain variable domain of TCR clone 175609 (TRBV19, TRBJ1-4)
CASKDWPGGLFF

SEQ ID NO: 351219 - protein, 11 aa, Homo sapiens
  CDR3 for alpha chain variable domain of TCR clone 175610 (TRAV3, TRAJ21)
CAVGNFSKFYF

SEQ ID NO: 351220 - protein, 16 aa, Homo sapiens
  CDR3 for beta chain variable domain of TCR clone 175610 (TRBV19, TRBJ2-1)
CASSKAGPSSYNEQFF

SEQ ID NO: 351221 - protein, 13 aa, Homo sapiens
  CDR3 for alpha chain variable domain of TCR clone 175611 (TRAV17, TRAJ9)
CATDYTGGFKTIF

SEQ ID NO: 351222 - protein, 14 aa, Homo sapiens
  CDR3 for beta chain variable domain of TCR clone 175611 (TRBV11-2, TRBJ2-3)
CASSRLARTDTQYF

SEQ ID NO: 351223 - protein, 16 aa, Homo sapiens
  CDR3 for alpha chain variable domain of TCR clone 175612 (TRAV16, TRAJ4)
CALSRMFSGGFNKLIF

SEQ ID NO: 351224 - protein, 16 aa, Homo sapiens
  CDR3 for beta chain variable domain of TCR clone 175612 (TRBV24-1, TRBJ2-3)
CATSDPGAGATDTQYF

SEQ ID NO: 351225 - protein, 14 aa, Homo sapiens
  CDR3 for alpha chain variable domain of TCR clone 175613 (TRAV26-1, TRAJ34)
CIVRVAYNTDKLIF

SEQ ID NO: 351226 - protein, 14 aa, Homo sapiens
  CDR3 for beta chain variable domain of TCR clone 175613 (TRBV19, TRBJ2-2)
CASSTLHRSGELFF

SEQ ID NO: 351227 - protein, 14 aa, Homo sapiens
  CDR3 for alpha chain variable domain of TCR clone 175614 (TRAV8-3, TRAJ9)
CAVVYNTGGFKTIF

SEQ ID NO: 351228 - protein, 16 aa, Homo sapiens
  CDR3 for beta chain variable domain of TCR clone 175614 (TRBV7-3, TRBJ2-2)
CASSLKRWTLSGELFF

SEQ ID NO: 351229 - protein, 14 aa, Homo sapiens
  CDR3 for alpha chain variable domain of TCR clone 175615 (TRAV2, TRAJ9)
CAVEDRSGGFKTIF

SEQ ID NO: 351230 - protein, 14 aa, Homo sapiens
  CDR3 for beta chain variable domain of TCR clone 175615 (TRBV7-2, TRBJ2-1)
CASSLGVGYNEQFF

SEQ ID NO: 351231 - protein, 11 aa, Homo sapiens
  CDR3 for alpha chain variable domain of TCR clone 175616 (TRAV12-2, TRAJ39)
CAVNNMLTFGG

SEQ ID NO: 351232 - protein, 16 aa, Homo sapiens
  CDR3 for beta chain variable domain of TCR clone 175616 (TRBV19, TRBJ2-1)
CASSKAGPSSYNEQFF

SEQ ID NO: 351233 - protein, 12 aa, Homo sapiens
  CDR3 for alpha chain variable domain of TCR clone 175617 (TRAV4, TRAJ26)
CLVGDYGQNFVF

SEQ ID NO: 351234 - protein, 16 aa, Homo sapiens
  CDR3 for beta chain variable domain of TCR clone 175617 (TRBV19, TRBJ1-1)
CASRFGGPVTGTEAFF

SEQ ID NO: 351235 - protein, 13 aa, Homo sapiens
  CDR3 for alpha chain variable domain of TCR clone 175618 (TRAV2, TRAJ40)
CAVVTSGTYKCIF

SEQ ID NO: 351236 - protein, 14 aa, Homo sapiens
  CDR3 for beta chain variable domain of TCR clone 175618 (TRBV19, TRBJ2-1)
CASPTVVLSGEQFF

SEQ ID NO: 351237 - protein, 18 aa, Homo sapiens
  CDR3 for alpha chain variable domain of TCR clone 175619 (TRAV13-1, TRAJ52)
CAASKRSAGGTSDGKLTF

SEQ ID NO: 351238 - protein, 14 aa, Homo sapiens
  CDR3 for beta chain variable domain of TCR clone 175619 (TRBV19, TRBJ2-1)
CASPTFVLSGEQFF

SEQ ID NO: 351239 - protein, 17 aa, Homo sapiens
  CDR3 for alpha chain variable domain of TCR clone 175620 (TRAV3, TRAJ6)
CAVRDGPRAGGSYIPTF

SEQ ID NO: 351240 - protein, 20 aa, Homo sapiens
  CDR3 for beta chain variable domain of TCR clone 175620 (TRBV28, TRBJ2-1)
CASTPIGRSPGLAGGNEQFV

SEQ ID NO: 351241 - protein, 13 aa, Homo sapiens
  CDR3 for alpha chain variable domain of TCR clone 175621 (TRAV20, TRAJ49)
CAVQARTGNQFYF

SEQ ID NO: 351242 - protein, 14 aa, Homo sapiens
  CDR3 for beta chain variable domain of TCR clone 175621 (TRBV5-1, TRBJ1-1)
CASSLQGTSTEDFF

SEQ ID NO: 351243 - protein, 13 aa, Homo sapiens
  CDR3 for alpha chain variable domain of TCR clone 175622 (TRAV13-2, TRAJ53)
CAENMGSNYKLTF

SEQ ID NO: 351244 - protein, 13 aa, Homo sapiens
  CDR3 for beta chain variable domain of TCR clone 175622 (TRBV11-3, TRBJ2-7)
CASSLDKLYEQYF

SEQ ID NO: 351245 - protein, 15 aa, Homo sapiens
  CDR3 for alpha chain variable domain of TCR clone 175623 (TRAV21, TRAJ53)
CATLNSGGSNYKLTF

SEQ ID NO: 351246 - protein, 16 aa, Homo sapiens
  CDR3 for beta chain variable domain of TCR clone 175623 (TRBV29-1, TRBJ1-2)
CSVEANRDVANYGYTF

SEQ ID NO: 351247 - protein, 15 aa, Homo sapiens
  CDR3 for alpha chain variable domain of TCR clone 175624 (TRAV3, TRAJ5)
CAVRDLDTGRRALTF

SEQ ID NO: 351248 - protein, 14 aa, Homo sapiens
  CDR3 for beta chain variable domain of TCR clone 175624 (TRBV20-1, TRBJ2-7)
CSAKTGTGGYEQYF

SEQ ID NO: 351249 - protein, 13 aa, Homo sapiens
  CDR3 for alpha chain variable domain of TCR clone 175625 (TRAV12-2, TRAJ18)
CAVRGSTLGRLYF

SEQ ID NO: 351250 - protein, 20 aa, Homo sapiens
  CDR3 for beta chain variable domain of TCR clone 175625 (TRBV7-8, TRBJ2-2)
CASSHLFPGPTVHITGELFF

SEQ ID NO: 351251 - protein, 11 aa, Homo sapiens
  CDR3 for alpha chain variable domain of TCR clone 175626 (TRAV2, TRAJ33)
CAVESNYQLIW

SEQ ID NO: 351252 - protein, 16 aa, Homo sapiens
  CDR3 for beta chain variable domain of TCR clone 175626 (TRBV7-8, TRBJ2-3)
CASSLDPAGAADTQYF

SEQ ID NO: 351253 - protein, 15 aa, Homo sapiens
  CDR3 for alpha chain variable domain of TCR clone 175627 (TRAV12-2, TRAJ52)
PPARAGGTSYGKLTF

SEQ ID NO: 351254 - protein, 16 aa, Homo sapiens
  CDR3 for beta chain variable domain of TCR clone 175627 (TRBV15, TRBJ1-2)
CATSRGPRTGGGGYTF

SEQ ID NO: 351255 - protein, 11 aa, Homo sapiens
  CDR3 for alpha chain variable domain of TCR clone 175628 (TRAV1-1, TRAJ23)
CSVRQGGKLIF

SEQ ID NO: 351256 - protein, 15 aa, Homo sapiens
  CDR3 for beta chain variable domain of TCR clone 175628 (TRBV20-1, TRBJ1-1)
CSASRGVTGNTEAFF

SEQ ID NO: 351257 - protein, 14 aa, Homo sapiens
  CDR3 for alpha chain variable domain of TCR clone 175629 (TRAV17, TRAJ23)
CATASYNQGGNLIL

SEQ ID NO: 351258 - protein, 16 aa, Homo sapiens
  CDR3 for beta chain variable domain of TCR clone 175629 (TRBV12-4, TRBJ1-5)
CASSRPVGGSNQPQHF

SEQ ID NO: 351259 - protein, 14 aa, Homo sapiens
  CDR3 for alpha chain variable domain of TCR clone 175630 (TRAV17, TRAJ54)
CATDANRGAQKLVF

SEQ ID NO: 351260 - protein, 12 aa, Homo sapiens
  CDR3 for beta chain variable domain of TCR clone 175630 (TRBV6-3, TRBJ2-1)
CASSGSYNEQFF

SEQ ID NO: 351261 - protein, 16 aa, Homo sapiens
  CDR3 for alpha chain variable domain of TCR clone 175631 (TRAV3, TRAJ10)
CAVRDMRAGGGNKLTF

SEQ ID NO: 351262 - protein, 14 aa, Homo sapiens
  CDR3 for beta chain variable domain of TCR clone 175631 (TRBV2, TRBJ1-6)
CASRRLSSNSPLHF

SEQ ID NO: 351263 - protein, 13 aa, Homo sapiens
  CDR3 for alpha chain variable domain of TCR clone 175632 (TRAV8-3, TRAJ21)
CAVRAYNFNKFYF

SEQ ID NO: 351264 - protein, 16 aa, Homo sapiens
  CDR3 for beta chain variable domain of TCR clone 175632 (TRBV19, TRBJ2-1)
CASSMGGRSSYNEQFF

SEQ ID NO: 351265 - protein, 12 aa, Homo sapiens
  CDR3 for alpha chain variable domain of TCR clone 175633 (TRAV12-3, TRAJ41)
CAMTYSGYALNF

SEQ ID NO: 351266 - protein, 13 aa, Homo sapiens
  CDR3 for beta chain variable domain of TCR clone 175633 (TRBV7-3, TRBJ2-1)
CASSLDSYNEQFF

SEQ ID NO: 351267 - protein, 16 aa, Homo sapiens
  CDR3 for alpha chain variable domain of TCR clone 175634 (TRAV30, TRAJ24)
CGTEIVDADSWGKFQF

SEQ ID NO: 351268 - protein, 15 aa, Homo sapiens
  CDR3 for beta chain variable domain of TCR clone 175634 (TRBV7-9, TRBJ1-4)
CASSARTGGNEKLLF

SEQ ID NO: 351269 - protein, 17 aa, Homo sapiens
  CDR3 for alpha chain variable domain of TCR clone 175635 (TRAV36/DV7, TRAJ52)
CAVAQRAGGTSYGKLTF

SEQ ID NO: 351270 - protein, 15 aa, Homo sapiens
  CDR3 for beta chain variable domain of TCR clone 175635 (TRBV10-3, TRBJ2-1)
CAIRNGTSGHNEQFF

SEQ ID NO: 351271 - protein, 15 aa, Homo sapiens
  CDR3 for alpha chain variable domain of TCR clone 175636 (TRAV38-2/DV8, TRAJ57)
CSSARAQGGSEKLVF

SEQ ID NO: 351272 - protein, 17 aa, Homo sapiens
  CDR3 for beta chain variable domain of TCR clone 175636 (TRBV18, TRBJ1-5)
CASSPTMGQGTNQPQHF

SEQ ID NO: 351273 - protein, 12 aa, Homo sapiens
  CDR3 for alpha chain variable domain of TCR clone 175637 (TRAV3, TRAJ20)
FAVRDHDYKLSF

SEQ ID NO: 351274 - protein, 13 aa, Homo sapiens
  CDR3 for beta chain variable domain of TCR clone 175637 (TRBV9, TRBJ2-7)
CASSVGQGGEQYF

SEQ ID NO: 351275 - protein, 14 aa, Homo sapiens
  CDR3 for alpha chain variable domain of TCR clone 175638 (TRAV38-1, TRAJ39)
CAFAYNNAGNMLTF

SEQ ID NO: 351276 - protein, 15 aa, Homo sapiens
  CDR3 for beta chain variable domain of TCR clone 175638 (TRBV19, TRBJ2-6)
CASSIGPSGANVLTF

SEQ ID NO: 351277 - protein, 15 aa, Homo sapiens
  CDR3 for alpha chain variable domain of TCR clone 175639 (TRAV3, TRAJ9)
CAVRGLNTGGFKTIF

SEQ ID NO: 351278 - protein, 13 aa, Homo sapiens
  CDR3 for beta chain variable domain of TCR clone 175639 (TRBV7-9, TRBJ1-2)
CASSLKQNYGYTF

SEQ ID NO: 351279 - protein, 15 aa, Homo sapiens
  CDR3 for alpha chain variable domain of TCR clone 175640 (TRAV21, TRAJ57)
CAVIITQGGSEKLVF

SEQ ID NO: 351280 - protein, 14 aa, Homo sapiens
  CDR3 for beta chain variable domain of TCR clone 175640 (TRBV12-5, TRBJ2-5)
CASGSRTHQETQYF

SEQ ID NO: 351281 - protein, 12 aa, Homo sapiens
  CDR3 for alpha chain variable domain of TCR clone 175641 (TRAV23/DV6, TRAJ30)
CAASKGDDKIIF

SEQ ID NO: 351282 - protein, 17 aa, Homo sapiens
  CDR3 for beta chain variable domain of TCR clone 175641 (TRBV13, TRBJ2-3)
RASSLSRVAGGRNTQYF

SEQ ID NO: 351283 - protein, 12 aa, Homo sapiens
  CDR3 for alpha chain variable domain of TCR clone 175642 (TRAV12-2, TRAJ10)
WGVTGGGNKLTF

SEQ ID NO: 351284 - protein, 13 aa, Homo sapiens
  CDR3 for beta chain variable domain of TCR clone 175642 (TRBV24-1, TRBJ2-1)
CATRQGAGNEQFF

SEQ ID NO: 351285 - protein, 17 aa, Homo sapiens
  CDR3 for alpha chain variable domain of TCR clone 175643 (TRAV3, TRAJ6)
CAVRDGPRAGGSYIPTF

SEQ ID NO: 351286 - protein, 14 aa, Homo sapiens
  CDR3 for beta chain variable domain of TCR clone 175643 (TRBV7-2, TRBJ2-7)
CASSPTTSLYEQYF

SEQ ID NO: 351287 - protein, 14 aa, Homo sapiens
  CDR3 for alpha chain variable domain of TCR clone 175644 (TRAV1-2, TRAJ29)
CAVRELTSATPLVF

SEQ ID NO: 351288 - protein, 14 aa, Homo sapiens
  CDR3 for beta chain variable domain of TCR clone 175644 (TRBV19, TRBJ2-1)
CASPTFVLSGEQFF

SEQ ID NO: 351289 - protein, 15 aa, Homo sapiens
  CDR3 for alpha chain variable domain of TCR clone 175645 (TRAV2, TRAJ9)
CAVEDRGTGGFKTIF

SEQ ID NO: 351290 - protein, 15 aa, Homo sapiens
  CDR3 for beta chain variable domain of TCR clone 175645 (TRBV6-4, TRBJ1-5)
CASSASSRINQPQHF

SEQ ID NO: 351291 - protein, 12 aa, Homo sapiens
  CDR3 for alpha chain variable domain of TCR clone 175646 (TRAV21, TRAJ3)
CCFYSSSSKIIF

SEQ ID NO: 351292 - protein, 13 aa, Homo sapiens
  CDR3 for beta chain variable domain of TCR clone 175646 (TRBV7-3, TRBJ2-5)
CASSIGFFETQYF

SEQ ID NO: 351293 - protein, 16 aa, Homo sapiens
  CDR3 for alpha chain variable domain of TCR clone 175647 (TRAV23/DV6, TRAJ9)
CAASIGGNTGGFKTIF

SEQ ID NO: 351294 - protein, 14 aa, Homo sapiens
  CDR3 for beta chain variable domain of TCR clone 175647 (TRBV9, TRBJ2-7)
CASSGGVGSYEQYF

SEQ ID NO: 351295 - protein, 17 aa, Homo sapiens
  CDR3 for alpha chain variable domain of TCR clone 175648 (TRAV3, TRAJ42)
CAVRDRDYGGSQGNLIF

SEQ ID NO: 351296 - protein, 14 aa, Homo sapiens
  CDR3 for beta chain variable domain of TCR clone 175648 (TRBV19, TRBJ2-5)
CACSMTGQQETQYF

SEQ ID NO: 351297 - protein, 19 aa, Homo sapiens
  CDR3 for alpha chain variable domain of TCR clone 175649 (TRAV26-1, TRAJ22)
CCVLLHRWVFSGSARQLTF

SEQ ID NO: 351298 - protein, 19 aa, Homo sapiens
  CDR3 for beta chain variable domain of TCR clone 175649 (TRBV19, TRBJ2-5)
YASSIGQVTDFFLGETQYF

SEQ ID NO: 351299 - protein, 12 aa, Homo sapiens
  CDR3 for alpha chain variable domain of TCR clone 175650 (TRAV12-1, TRAJ40)
CVVSSGTYKYIF

SEQ ID NO: 351300 - protein, 17 aa, Homo sapiens
  CDR3 for beta chain variable domain of TCR clone 175650 (TRBV20-1, TRBJ2-2)
CSASGSGQGGLTEELFF

SEQ ID NO: 351301 - protein, 13 aa, Homo sapiens
  CDR3 for alpha chain variable domain of TCR clone 175651 (TRAV30, TRAJ20)
CGTVVSNDYKLSF

SEQ ID NO: 351302 - protein, 15 aa, Homo sapiens
  CDR3 for beta chain variable domain of TCR clone 175651 (TRBV6-5, TRBJ2-1)
CASSYDAGAGNEQFF

SEQ ID NO: 351303 - protein, 14 aa, Homo sapiens
  CDR3 for alpha chain variable domain of TCR clone 175652 (TRAV13-2, TRAJ29)
CAEHIEPGNTPLVF

SEQ ID NO: 351304 - protein, 14 aa, Homo sapiens
  CDR3 for beta chain variable domain of TCR clone 175652 (TRBV19, TRBJ2-2)
CATTGHANTGEMFF

SEQ ID NO: 351305 - protein, 10 aa, Homo sapiens
  CDR3 for alpha chain variable domain of TCR clone 175653 (TRAV21, TRAJ43)
CAVRIGDMRF

SEQ ID NO: 351306 - protein, 11 aa, Homo sapiens
  CDR3 for beta chain variable domain of TCR clone 175653 (TRBV29-1, TRBJ2-5)
CSEDRTGTQYF

SEQ ID NO: 351307 - protein, 10 aa, Homo sapiens
  CDR3 for alpha chain variable domain of TCR clone 175654 (TRAV12-2, TRAJ52)
RSTSYGKLTF

SEQ ID NO: 351308 - protein, 16 aa, Homo sapiens
  CDR3 for beta chain variable domain of TCR clone 175654 (TRBV7-3, TRBJ2-2)
CASSSRGGTSTGELFF

SEQ ID NO: 351309 - protein, 17 aa, Homo sapiens
  CDR3 for alpha chain variable domain of TCR clone 175655 (TRAV8-4, TRAJ11)
CAVSDRGENSGYSTLTF

SEQ ID NO: 351310 - protein, 14 aa, Homo sapiens
  CDR3 for beta chain variable domain of TCR clone 175655 (TRBV20-1, TRBJ2-1)
CSPNDEASCNEQFF

SEQ ID NO: 351311 - protein, 16 aa, Homo sapiens
  CDR3 for alpha chain variable domain of TCR clone 175656 (TRAV26-2, TRAJ52)
CIRGPAGGTIYGKLTF

SEQ ID NO: 351312 - protein, 15 aa, Homo sapiens
  CDR3 for beta chain variable domain of TCR clone 175656 (TRBV5-1, TRBJ2-1)
CASSWGPGPGGEQFF

SEQ ID NO: 351313 - protein, 13 aa, Homo sapiens
  CDR3 for alpha chain variable domain of TCR clone 175657 (TRAV35, TRAJ42)
CAGFPGSQGNLTF

SEQ ID NO: 351314 - protein, 14 aa, Homo sapiens
  CDR3 for beta chain variable domain of TCR clone 175657 (TRBV19, TRBJ2-1)
CASPTFVLSGEQFV

SEQ ID NO: 351315 - protein, 14 aa, Homo sapiens
  CDR3 for alpha chain variable domain of TCR clone 175658 (TRAV1-2, TRAJ16)
CAVNRFSDCQKLLF

SEQ ID NO: 351316 - protein, 13 aa, Homo sapiens
  CDR3 for beta chain variable domain of TCR clone 175658 (TRBV19, TRBJ2-7)
CASSTSGSYEQYF

SEQ ID NO: 351317 - protein, 19 aa, Homo sapiens
  CDR3 for alpha chain variable domain of TCR clone 175659 (TRAV1-2, TRAJ26)
CLLPLCCERPDNYGQNFVF

SEQ ID NO: 351318 - protein, 14 aa, Homo sapiens
  CDR3 for beta chain variable domain of TCR clone 175659 (TRBV20-1, TRBJ1-1)
CSAQTRIGGTEAFF

SEQ ID NO: 351319 - protein, 18 aa, Homo sapiens
  CDR3 for alpha chain variable domain of TCR clone 175660 (TRAV26-1, TRAJ22)
CIVRVALISSCPARQLTF

SEQ ID NO: 351320 - protein, 13 aa, Homo sapiens
  CDR3 for beta chain variable domain of TCR clone 175660 (TRBV13, TRBJ2-5)
CASSPEVGETQYF

SEQ ID NO: 351321 - protein, 19 aa, Homo sapiens
  CDR3 for alpha chain variable domain of TCR clone 175661 (TRAV2, TRAJ20)
ILQVREADSAVYRDCKLSF

SEQ ID NO: 351322 - protein, 12 aa, Homo sapiens
  CDR3 for beta chain variable domain of TCR clone 175661 (TRBV11-2, TRBJ2-1)
CASSPGNNEQFF

SEQ ID NO: 351323 - protein, 14 aa, Homo sapiens
  CDR3 for alpha chain variable domain of TCR clone 175662 (TRAV12-2, TRAJ36)
CAVNPPTGANNLFF

SEQ ID NO: 351324 - protein, 18 aa, Homo sapiens
  CDR3 for beta chain variable domain of TCR clone 175662 (TRBV11-3, TRBJ2-1)
CASSLGLAGGPIDDEQFF

SEQ ID NO: 351325 - protein, 12 aa, Homo sapiens
  CDR3 for alpha chain variable domain of TCR clone 175663 (TRAV1-1, TRAJ9)
CAGDTGGFKTIF

SEQ ID NO: 351326 - protein, 15 aa, Homo sapiens
  CDR3 for beta chain variable domain of TCR clone 175663 (TRBV6-3, TRBJ2-7)
CASSSPGTVFYEQYF

SEQ ID NO: 351327 - protein, 11 aa, Homo sapiens
  CDR3 for alpha chain variable domain of TCR clone 175664 (TRAV8-4, TRAJ20)
CAVTNVLTTTS

SEQ ID NO: 351328 - protein, 16 aa, Homo sapiens
  CDR3 for beta chain variable domain of TCR clone 175664 (TRBV12-4, TRBJ1-5)
CASSRPVGGSNQPQHF

SEQ ID NO: 351329 - protein, 18 aa, Homo sapiens
  CDR3 for alpha chain variable domain of TCR clone 175665 (TRAV21, TRAJ52)
CAVGPSPAGGTSSGKLTF

SEQ ID NO: 351330 - protein, 11 aa, Homo sapiens
  CDR3 for beta chain variable domain of TCR clone 175665 (TRBV12-4, TRBJ2-3)
CASTATDTQYF

SEQ ID NO: 351331 - protein, 11 aa, Homo sapiens
  CDR3 for alpha chain variable domain of TCR clone 175666 (TRAV3, TRAJ21)
CAVGAFNKFYF

SEQ ID NO: 351332 - protein, 16 aa, Homo sapiens
  CDR3 for beta chain variable domain of TCR clone 175666 (TRBV19, TRBJ2-1)
CASSKAGPSSYNEQFF

SEQ ID NO: 351333 - protein, 12 aa, Homo sapiens
  CDR3 for alpha chain variable domain of TCR clone 175667 (TRAV13-2, TRAJ23)
CAERHRGGKLIF

SEQ ID NO: 351334 - protein, 18 aa, Homo sapiens
  CDR3 for beta chain variable domain of TCR clone 175667 (TRBV11-2, TRBJ2-3)
CASSLGGASRGAPSTQYF

SEQ ID NO: 351335 - protein, 15 aa, Homo sapiens
  CDR3 for alpha chain variable domain of TCR clone 175668 (TRAV17, TRAJ57)
CATGPPQGGTEKLVF

SEQ ID NO: 351336 - protein, 17 aa, Homo sapiens
  CDR3 for beta chain variable domain of TCR clone 175668 (TRBV7-8, TRBJ2-6)
CASSAGTGGAGANVLTF

SEQ ID NO: 351337 - protein, 23 aa, Homo sapiens
  CDR3 for alpha chain variable domain of TCR clone 175669 (TRAV26-1, TRAJ38)
CIVRPLNAGNNHIQNPDPAVYQL

SEQ ID NO: 351338 - protein, 13 aa, Homo sapiens
  CDR3 for beta chain variable domain of TCR clone 175669 (TRBV18, TRBJ1-1)
CASSPNGGTEAFF

SEQ ID NO: 351339 - protein, 14 aa, Homo sapiens
  CDR3 for alpha chain variable domain of TCR clone 175670 (TRAV1-2, TRAJ16)
CAVIRFSDGQKLLF

SEQ ID NO: 351340 - protein, 14 aa, Homo sapiens
  CDR3 for beta chain variable domain of TCR clone 175670 (TRBV13, TRBJ2-5)
CASSLGRGQETQYF

SEQ ID NO: 351341 - protein, 14 aa, Homo sapiens
  CDR3 for alpha chain variable domain of TCR clone 175671 (TRAV1-2, TRAJ16)
CAANRFSDGQKLLF

SEQ ID NO: 351342 - protein, 14 aa, Homo sapiens
  CDR3 for beta chain variable domain of TCR clone 175671 (TRBV12-5, TRBJ2-5)
CASGSRTHQETQYF

SEQ ID NO: 351343 - protein, 17 aa, Homo sapiens
  CDR3 for alpha chain variable domain of TCR clone 175672 (TRAV27, TRAJ57)
CAGERGWTQGGSEKLVF

SEQ ID NO: 351344 - protein, 15 aa, Homo sapiens
  CDR3 for beta chain variable domain of TCR clone 175672 (TRBV27, TRBJ1-6)
CASSFDRGLGSPLHF

SEQ ID NO: 351345 - protein, 13 aa, Homo sapiens
  CDR3 for alpha chain variable domain of TCR clone 175673 (TRAV12-1, TRAJ7)
CVVNMRGNNRLAF

SEQ ID NO: 351346 - protein, 16 aa, Homo sapiens
  CDR3 for beta chain variable domain of TCR clone 175673 (TRBV20-1, TRBJ1-4)
CSAPGQGLLTNEKLVF

SEQ ID NO: 351347 - protein, 17 aa, Homo sapiens
  CDR3 for alpha chain variable domain of TCR clone 175674 (TRAV3, TRAJ42)
CAVRARDYGGSQGNLIY

SEQ ID NO: 351348 - protein, 13 aa, Homo sapiens
  CDR3 for beta chain variable domain of TCR clone 175674 (TRBV3-1, TRBJ1-1)
CASSPGVITEAFF

SEQ ID NO: 351349 - protein, 14 aa, Homo sapiens
  CDR3 for alpha chain variable domain of TCR clone 175675 (TRAV17, TRAJ57)
CATDPQGGSEKLGF

SEQ ID NO: 351350 - protein, 18 aa, Homo sapiens
  CDR3 for beta chain variable domain of TCR clone 175675 (TRBV6-6, TRBJ1-3)
CASSYSKWDSISGNTLHF

SEQ ID NO: 351351 - protein, 15 aa, Homo sapiens
  CDR3 for alpha chain variable domain of TCR clone 175676 (TRAV4, TRAJ39)
CLVGPNNNAGNMLTF

SEQ ID NO: 351352 - protein, 15 aa, Homo sapiens
  CDR3 for beta chain variable domain of TCR clone 175676 (TRBV9, TRBJ1-6)
CASSVAGTGDSPLHF

SEQ ID NO: 351353 - protein, 12 aa, Homo sapiens
  CDR3 for alpha chain variable domain of TCR clone 175677 (TRAV23/DV6, TRAJ30)
CAASKGDDKIIF

SEQ ID NO: 351354 - protein, 15 aa, Homo sapiens
  CDR3 for beta chain variable domain of TCR clone 175677 (TRBV11-2, TRBJ1-6)
CASTGFGTAVSPLHF

SEQ ID NO: 351355 - protein, 16 aa, Homo sapiens
  CDR3 for alpha chain variable domain of TCR clone 175678 (TRAV1-2, TRAJ10)
CAVRGVLTGGGNKLIF

SEQ ID NO: 351356 - protein, 13 aa, Homo sapiens
  CDR3 for beta chain variable domain of TCR clone 175678 (TRBV10-3, TRBJ2-7)
CASKLAVNYEQYF

SEQ ID NO: 351357 - protein, 14 aa, Homo sapiens
  CDR3 for alpha chain variable domain of TCR clone 175679 (TRAV38-1, TRAJ40)
CALRPTSGTYKYNF

SEQ ID NO: 351358 - protein, 14 aa, Homo sapiens
  CDR3 for beta chain variable domain of TCR clone 175679 (TRBV5-4, TRBJ1-2)
CASTRQTDNYGYTF

SEQ ID NO: 351359 - protein, 14 aa, Homo sapiens
  CDR3 for alpha chain variable domain of TCR clone 175680 (TRAV12-2, TRAJ40)
CSVKIPSGTYKYIF

SEQ ID NO: 351360 - protein, 14 aa, Homo sapiens
  CDR3 for beta chain variable domain of TCR clone 175680 (TRBV20-1, TRBJ1-1)
CSAQTRIGGTEASF

SEQ ID NO: 351361 - protein, 20 aa, Homo sapiens
  CDR3 for alpha chain variable domain of TCR clone 175681 (TRAV12-3, TRAJ41)
SLFIRDSQPSDSATPEALNF

SEQ ID NO: 351362 - protein, 15 aa, Homo sapiens
  CDR3 for beta chain variable domain of TCR clone 175681 (TRBV5-1, TRBJ2-1)
CASSPPRAPYNEQFF

SEQ ID NO: 351363 - protein, 12 aa, Homo sapiens
  CDR3 for alpha chain variable domain of TCR clone 175682 (TRAV35, TRAJ49)
CAGCNTGNQFYF

SEQ ID NO: 351364 - protein, 16 aa, Homo sapiens
  CDR3 for beta chain variable domain of TCR clone 175682 (TRBV5-1, TRBJ2-2)
CASSLWDTTNTGELFF

SEQ ID NO: 351365 - protein, 12 aa, Homo sapiens
  CDR3 for alpha chain variable domain of TCR clone 175683 (TRAV8-3, TRAJ4)
PAFSGGDNKLIF

SEQ ID NO: 351366 - protein, 13 aa, Homo sapiens
  CDR3 for beta chain variable domain of TCR clone 175683 (TRBV20-1, TRBJ1-3)
CSAGAYSGNTIYF

SEQ ID NO: 351367 - protein, 21 aa, Homo sapiens
  CDR3 for alpha chain variable domain of TCR clone 175684 (TRAV17, TRAJ7)
CATLADSLLGRGTKWWSYQIS

SEQ ID NO: 351368 - protein, 13 aa, Homo sapiens
  CDR3 for beta chain variable domain of TCR clone 175684 (TRBV12-4, TRBJ2-7)
CASSLERVREQYF

SEQ ID NO: 351369 - protein, 11 aa, Homo sapiens
  CDR3 for alpha chain variable domain of TCR clone 175685 (TRAV1-1, TRAJ3)
CAVRSASKIIF

SEQ ID NO: 351370 - protein, 12 aa, Homo sapiens
  CDR3 for beta chain variable domain of TCR clone 175685 (TRBV7-2, TRBJ1-5)
CASSLWSQPQHF

SEQ ID NO: 351371 - protein, 13 aa, Homo sapiens
  CDR3 for alpha chain variable domain of TCR clone 175686 (TRAV3, TRAJ3)
CAVADSSASKIIF

SEQ ID NO: 351372 - protein, 13 aa, Homo sapiens
  CDR3 for beta chain variable domain of TCR clone 175686 (TRBV2, TRBJ2-7)
CASSVGGSGEQYF

SEQ ID NO: 351373 - protein, 16 aa, Homo sapiens
  CDR3 for alpha chain variable domain of TCR clone 175687 (TRAV4, TRAJ5)
CLVGPDHGHGQESTYF

SEQ ID NO: 351374 - protein, 13 aa, Homo sapiens
  CDR3 for beta chain variable domain of TCR clone 175687 (TRBV4-2, TRBJ1-2)
CASSPSASGGYTF

SEQ ID NO: 351375 - protein, 12 aa, Homo sapiens
  CDR3 for alpha chain variable domain of TCR clone 175688 (TRAV12-3, TRAJ17)
CAMTLTGNKLTF

SEQ ID NO: 351376 - protein, 16 aa, Homo sapiens
  CDR3 for beta chain variable domain of TCR clone 175688 (TRBV7-6, TRBJ2-3)
CASSDSRGEGTDTQYF

SEQ ID NO: 351377 - protein, 12 aa, Homo sapiens
  CDR3 for alpha chain variable domain of TCR clone 175689 (TRAV25, TRAJ11)
CAGASGYSTLTF

SEQ ID NO: 351378 - protein, 13 aa, Homo sapiens
  CDR3 for beta chain variable domain of TCR clone 175689 (TRBV5-8, TRBJ2-3)
CQQLGAGTDTQYF

SEQ ID NO: 351379 - protein, 13 aa, Homo sapiens
  CDR3 for alpha chain variable domain of TCR clone 175690 (TRAV8-3, TRAJ28)
CAVGAGGSYQLTF

SEQ ID NO: 351380 - protein, 13 aa, Homo sapiens
  CDR3 for beta chain variable domain of TCR clone 175690 (TRBV29-1, TRBJ2-1)
CSVEGGRVNEQFF

SEQ ID NO: 351381 - protein, 16 aa, Homo sapiens
  CDR3 for alpha chain variable domain of TCR clone 175691 (TRAV14/DV4, TRAJ53)
CAMREGGGGSNYKRTF

SEQ ID NO: 351382 - protein, 18 aa, Homo sapiens
  CDR3 for beta chain variable domain of TCR clone 175691 (TRBV18, TRBJ1-3)
CASSPRGGAGPSGNTIYF

SEQ ID NO: 351383 - protein, 13 aa, Homo sapiens
  CDR3 for alpha chain variable domain of TCR clone 175692 (TRAV17, TRAJ22)
CAHHSGSARQLTF

SEQ ID NO: 351384 - protein, 14 aa, Homo sapiens
  CDR3 for beta chain variable domain of TCR clone 175692 (TRBV16, TRBJ1-1)
CASSQAGPNTEAVF

SEQ ID NO: 351385 - protein, 14 aa, Homo sapiens
  CDR3 for alpha chain variable domain of TCR clone 175693 (TRAV12-2, TRAJ13)
CAVKKTGGYQKVTF

SEQ ID NO: 351386 - protein, 13 aa, Homo sapiens
  CDR3 for beta chain variable domain of TCR clone 175693 (TRBV5-5, TRBJ1-1)
CASSQAGNTEAFF

SEQ ID NO: 351387 - protein, 14 aa, Homo sapiens
  CDR3 for alpha chain variable domain of TCR clone 175694 (TRAV13-1, TRAJ44)
CAAKATGTASKLTF

SEQ ID NO: 351388 - protein, 15 aa, Homo sapiens
  CDR3 for beta chain variable domain of TCR clone 175694 (TRBV10-2, TRBJ2-6)
CASSTQSPGANVLTF

SEQ ID NO: 351389 - protein, 21 aa, Homo sapiens
  CDR3 for alpha chain variable domain of TCR clone 175695 (TRAV12-1, TRAJ37)
CVVNGGLWQHRQTNLWARDNF

SEQ ID NO: 351390 - protein, 16 aa, Homo sapiens
  CDR3 for beta chain variable domain of TCR clone 175695 (TRBV7-8, TRBJ2-4)
CASSAERTLAKNIQYF

SEQ ID NO: 351391 - protein, 13 aa, Homo sapiens
  CDR3 for alpha chain variable domain of TCR clone 175696 (TRAV12-3, TRAJ5)
CAMRPTGRRALTF

SEQ ID NO: 351392 - protein, 15 aa, Homo sapiens
  CDR3 for beta chain variable domain of TCR clone 175696 (TRBV20-1, TRBJ2-7)
CSARDRVSGMDEQYF

SEQ ID NO: 351393 - protein, 13 aa, Homo sapiens
  CDR3 for alpha chain variable domain of TCR clone 175697 (TRAV26-1, TRAJ29)
CIVRRSGNTPLVF

SEQ ID NO: 351394 - protein, 16 aa, Homo sapiens
  CDR3 for beta chain variable domain of TCR clone 175697 (TRBV11-2, TRBJ2-7)
CASSLAATGVNYEQYF

SEQ ID NO: 351395 - protein, 14 aa, Homo sapiens
  CDR3 for alpha chain variable domain of TCR clone 175698 (TRAV10, TRAJ29)
CVVSANSGNTPLVF

SEQ ID NO: 351396 - protein, 16 aa, Homo sapiens
  CDR3 for beta chain variable domain of TCR clone 175698 (TRBV29-1, TRBJ2-7)
CSVEHAEDGTAYEQYF

SEQ ID NO: 351397 - protein, 16 aa, Homo sapiens
  CDR3 for alpha chain variable domain of TCR clone 175699 (TRAV30, TRAJ24)
CGTEIVDADSWGKFQF

SEQ ID NO: 351398 - protein, 15 aa, Homo sapiens
  CDR3 for beta chain variable domain of TCR clone 175699 (TRBV7-9, TRBJ1-4)
CASSARTGGNENLFV

SEQ ID NO: 351399 - protein, 13 aa, Homo sapiens
  CDR3 for alpha chain variable domain of TCR clone 175700 (TRAV17, TRAJ20)
CATDAAGDYKLSF

SEQ ID NO: 351400 - protein, 15 aa, Homo sapiens
  CDR3 for beta chain variable domain of TCR clone 175700 (TRBV9, TRBJ1-3)
CASSARAGGGNTIYF

SEQ ID NO: 351401 - protein, 15 aa, Homo sapiens
  CDR3 for alpha chain variable domain of TCR clone 175701 (TRAV1-2, TRAJ38)
CAVSENAGNNRKLIW

SEQ ID NO: 351402 - protein, 16 aa, Homo sapiens
  CDR3 for beta chain variable domain of TCR clone 175701 (TRBV4-1, TRBJ2-7)
CASSRTAGQATYEQYF

SEQ ID NO: 351403 - protein, 12 aa, Homo sapiens
  CDR3 for alpha chain variable domain of TCR clone 175702 (TRAV13-1, TRAJ21)
CAAKEGFNKFYF

SEQ ID NO: 351404 - protein, 17 aa, Homo sapiens
  CDR3 for beta chain variable domain of TCR clone 175702 (TRBV28, TRBJ2-5)
WASSFGGEWGGQETQYF

SEQ ID NO: 351405 - protein, 12 aa, Homo sapiens
  CDR3 for alpha chain variable domain of TCR clone 175703 (TRAV21, TRAJ27)
CAARPGNAGINL

SEQ ID NO: 351406 - protein, 14 aa, Homo sapiens
  CDR3 for beta chain variable domain of TCR clone 175703 (TRBV7-6, TRBJ2-3)
CASSLGTVTDTQYF

SEQ ID NO: 351407 - protein, 10 aa, Homo sapiens
  CDR3 for alpha chain variable domain of TCR clone 175704 (TRAV1-2, TRAJ20)
CALNDYKLSF

SEQ ID NO: 351408 - protein, 11 aa, Homo sapiens
  CDR3 for beta chain variable domain of TCR clone 175704 (TRBV29-1, TRBJ2-5)
CSVDRTGTQYF

SEQ ID NO: 351409 - protein, 11 aa, Homo sapiens
  CDR3 for alpha chain variable domain of TCR clone 175705 (TRAV9-2, TRAJ36)
CSEKGANNLFF

SEQ ID NO: 351410 - protein, 12 aa, Homo sapiens
  CDR3 for beta chain variable domain of TCR clone 175705 (TRBV5-5, TRBJ2-5)
CASSYFGETQYF

SEQ ID NO: 351411 - protein, 13 aa, Homo sapiens
  CDR3 for alpha chain variable domain of TCR clone 175706 (TRAV13-1, TRAJ9)
CAASGTGGFNTIF

SEQ ID NO: 351412 - protein, 13 aa, Homo sapiens
  CDR3 for beta chain variable domain of TCR clone 175706 (TRBV12-4, TRBJ2-7)
CASSVERVREQYF

SEQ ID NO: 351413 - protein, 15 aa, Homo sapiens
  CDR3 for alpha chain variable domain of TCR clone 175707 (TRAV20, TRAJ43)
CAVQAGKSSNNDMRF

SEQ ID NO: 351414 - protein, 13 aa, Homo sapiens
  CDR3 for beta chain variable domain of TCR clone 175707 (TRBV27, TRBJ1-1)
CASSLSIGAEASF

SEQ ID NO: 351415 - protein, 11 aa, Homo sapiens
  CDR3 for alpha chain variable domain of TCR clone 175708 (TRAV12-2, TRAJ49)
CAVYTGNQFYF

SEQ ID NO: 351416 - protein, 12 aa, Homo sapiens
  CDR3 for beta chain variable domain of TCR clone 175708 (TRBV2, TRBJ2-3)
CASSGRFDTQYF

SEQ ID NO: 351417 - protein, 15 aa, Homo sapiens
  CDR3 for alpha chain variable domain of TCR clone 175709 (TRAV4, TRAJ17)
CLVGDIGAAGHKLTF

SEQ ID NO: 351418 - protein, 14 aa, Homo sapiens
  CDR3 for beta chain variable domain of TCR clone 175709 (TRBV6-3, TRBJ2-7)
CASSYSVRVYEQYF

SEQ ID NO: 351419 - protein, 18 aa, Homo sapiens
  CDR3 for alpha chain variable domain of TCR clone 175710 (TRAV16, TRAJ52)
CALSGVDAGGTSYGTLTF

SEQ ID NO: 351420 - protein, 15 aa, Homo sapiens
  CDR3 for beta chain variable domain of TCR clone 175710 (TRBV11-3, TRBJ2-3)
CASSAGTVVTNTQYF

SEQ ID NO: 351421 - protein, 17 aa, Homo sapiens
  CDR3 for alpha chain variable domain of TCR clone 175711 (TRAV4, TRAJ18)
CLVGERSVGSTLGRLYF

SEQ ID NO: 351422 - protein, 15 aa, Homo sapiens
  CDR3 for beta chain variable domain of TCR clone 175711 (TRBV20-1, TRBJ2-2)
CSARDTRLNTGELFF

SEQ ID NO: 351423 - protein, 15 aa, Homo sapiens
  CDR3 for alpha chain variable domain of TCR clone 175712 (TRAV21, TRAJ40)
CAVRPQTAGTYKYIF

SEQ ID NO: 351424 - protein, 18 aa, Homo sapiens
  CDR3 for beta chain variable domain of TCR clone 175712 (TRBV4-1, TRBJ1-5)
CASSQDPRGQGLNQPQHF

SEQ ID NO: 351425 - protein, 12 aa, Homo sapiens
  CDR3 for alpha chain variable domain of TCR clone 175713 (TRAV38-1, TRAJ47)
CALETYGNKLVF

SEQ ID NO: 351426 - protein, 15 aa, Homo sapiens
  CDR3 for beta chain variable domain of TCR clone 175713 (TRBV5-7, TRBJ2-7)
CASSGGRPVPYEQYF

SEQ ID NO: 351427 - protein, 13 aa, Homo sapiens
  CDR3 for alpha chain variable domain of TCR clone 175714 (TRAV20, TRAJ34)
CVVRSYNTDKLIF

SEQ ID NO: 351428 - protein, 15 aa, Homo sapiens
  CDR3 for beta chain variable domain of TCR clone 175714 (TRBV27, TRBJ1-3)
CASSPSPGSGNTIYF

SEQ ID NO: 351429 - protein, 13 aa, Homo sapiens
  CDR3 for alpha chain variable domain of TCR clone 175715 (TRAV8-6, TRAJ9)
CAGWATGGFKTIF

SEQ ID NO: 351430 - protein, 13 aa, Homo sapiens
  CDR3 for beta chain variable domain of TCR clone 175715 (TRBV27, TRBJ1-1)
CASSLSIGAEAFF

SEQ ID NO: 351431 - protein, 14 aa, Homo sapiens
  CDR3 for alpha chain variable domain of TCR clone 175716 (TRAV13-2, TRAJ41)
FAERPDWAGYALNF

SEQ ID NO: 351432 - protein, 16 aa, Homo sapiens
  CDR3 for beta chain variable domain of TCR clone 175716 (TRBV9, TRBJ2-3)
CASSGTSGKDTDTQYF

SEQ ID NO: 351433 - protein, 12 aa, Homo sapiens
  CDR3 for alpha chain variable domain of TCR clone 175717 (TRAV12-3, TRAJ17)
CAMTLTGNNLTF

SEQ ID NO: 351434 - protein, 16 aa, Homo sapiens
  CDR3 for beta chain variable domain of TCR clone 175717 (TRBV13, TRBJ2-2)
CASSPRTGEHTGELFF

SEQ ID NO: 351435 - protein, 17 aa, Homo sapiens
  CDR3 for alpha chain variable domain of TCR clone 175718 (TRAV13-1, TRAJ28)
CAASPPHSGAGSYQLTF

SEQ ID NO: 351436 - protein, 12 aa, Homo sapiens
  CDR3 for beta chain variable domain of TCR clone 175718 (TRBV11-2, TRBJ2-2)
CASSLPTGELFF

SEQ ID NO: 351437 - protein, 14 aa, Homo sapiens
  CDR3 for alpha chain variable domain of TCR clone 175719 (TRAV2, TRAJ3)
CAVDRYSSASKVIF

SEQ ID NO: 351438 - protein, 16 aa, Homo sapiens
  CDR3 for beta chain variable domain of TCR clone 175719 (TRBV19, TRBJ2-2)
CASRSPGTGATGELFF

SEQ ID NO: 351439 - protein, 12 aa, Homo sapiens
  CDR3 for alpha chain variable domain of TCR clone 175720 (TRAV13-1, TRAJ53)
AASGGSNYKLTF

SEQ ID NO: 351440 - protein, 13 aa, Homo sapiens
  CDR3 for beta chain variable domain of TCR clone 175720 (TRBV19, TRBJ2-7)
CASSPRQSYEQYF

SEQ ID NO: 351441 - protein, 14 aa, Homo sapiens
  CDR3 for alpha chain variable domain of TCR clone 175721 (TRAV16, TRAJ42)
CALLAGGSQGNLIF

SEQ ID NO: 351442 - protein, 14 aa, Homo sapiens
  CDR3 for beta chain variable domain of TCR clone 175721 (TRBV25-1, TRBJ1-2)
CASSEATGPYGYTF

SEQ ID NO: 351443 - protein, 11 aa, Homo sapiens
  CDR3 for alpha chain variable domain of TCR clone 175722 (TRAV2, TRAJ13)
CASGGYQKVTF

SEQ ID NO: 351444 - protein, 14 aa, Homo sapiens
  CDR3 for beta chain variable domain of TCR clone 175722 (TRBV18, TRBJ2-5)
CASSPAVSQETQYF

SEQ ID NO: 351445 - protein, 13 aa, Homo sapiens
  CDR3 for alpha chain variable domain of TCR clone 175723 (TRAV2, TRAJ40)
CAVVTSGTYKYIF

SEQ ID NO: 351446 - protein, 16 aa, Homo sapiens
  CDR3 for beta chain variable domain of TCR clone 175723 (TRBV19, TRBJ2-2)
CASRSPGTGATGELFS

SEQ ID NO: 351447 - protein, 13 aa, Homo sapiens
  CDR3 for alpha chain variable domain of TCR clone 175724 (TRAV12-1, TRAJ33)
CGDAPDSNYQLIW

SEQ ID NO: 351448 - protein, 14 aa, Homo sapiens
  CDR3 for beta chain variable domain of TCR clone 175724 (TRBV4-2, TRBJ1-2)
CASSQVGQNYGYTF

SEQ ID NO: 351449 - protein, 15 aa, Homo sapiens
  CDR3 for alpha chain variable domain of TCR clone 175725 (TRAV26-1, TRAJ29)
CIVRVEGSGNTTLVF

SEQ ID NO: 351450 - protein, 14 aa, Homo sapiens
  CDR3 for beta chain variable domain of TCR clone 175725 (TRBV18, TRBJ2-7)
CASSPGVSQETQYF

SEQ ID NO: 351451 - protein, 12 aa, Homo sapiens
  CDR3 for alpha chain variable domain of TCR clone 175726 (TRAV12-2, TRAJ10)
WGVTGGGNKLNF

SEQ ID NO: 351452 - protein, 16 aa, Homo sapiens
  CDR3 for beta chain variable domain of TCR clone 175726 (TRBV6-4, TRBJ1-2)
CSSSEAVGDPNYGYTF

SEQ ID NO: 351453 - protein, 16 aa, Homo sapiens
  CDR3 for alpha chain variable domain of TCR clone 175727 (TRAV30, TRAJ42)
CGTSKNYGGSQGNLIF

SEQ ID NO: 351454 - protein, 14 aa, Homo sapiens
  CDR3 for beta chain variable domain of TCR clone 175727 (TRBV19, TRBJ1-5)
CSSNSYGTHQPQHF

SEQ ID NO: 351455 - protein, 14 aa, Homo sapiens
  CDR3 for alpha chain variable domain of TCR clone 175728 (TRAV8-3, TRAJ4)
CAVGAAGGYNKLIF

SEQ ID NO: 351456 - protein, 16 aa, Homo sapiens
  CDR3 for beta chain variable domain of TCR clone 175728 (TRBV7-3, TRBJ2-1)
CASSKPLAGGYNEQFF

SEQ ID NO: 351457 - protein, 12 aa, Homo sapiens
  CDR3 for alpha chain variable domain of TCR clone 175729 (TRAV23/DV6, TRAJ18)
CAASSSHRGSTP

SEQ ID NO: 351458 - protein, 15 aa, Homo sapiens
  CDR3 for beta chain variable domain of TCR clone 175729 (TRBV7-9, TRBJ1-5)
CASSQGHQPNQPQHF

SEQ ID NO: 351459 - protein, 13 aa, Homo sapiens
  CDR3 for alpha chain variable domain of TCR clone 175730 (TRAV35, TRAJ36)
CAGPRIGANNLFF

SEQ ID NO: 351460 - protein, 14 aa, Homo sapiens
  CDR3 for beta chain variable domain of TCR clone 175730 (TRBV11-2, TRBJ2-3)
CASSRLARTDTQYF

SEQ ID NO: 351461 - protein, 11 aa, Homo sapiens
  CDR3 for alpha chain variable domain of TCR clone 175731 (TRAV12-3, TRAJ17)
CNDAYRNKLTF

SEQ ID NO: 351462 - protein, 15 aa, Homo sapiens
  CDR3 for beta chain variable domain of TCR clone 175731 (TRBV20-1, TRBJ2-7)
CSARGRVSGMDEQYF

SEQ ID NO: 351463 - protein, 15 aa, Homo sapiens
  CDR3 for alpha chain variable domain of TCR clone 175732 (TRAV25, TRAJ52)
CAGRPGGTSYGKLTF

SEQ ID NO: 351464 - protein, 14 aa, Homo sapiens
  CDR3 for beta chain variable domain of TCR clone 175732 (TRBV4-3, TRBJ1-4)
CASSPLQRNEKLFF

SEQ ID NO: 351465 - protein, 20 aa, Homo sapiens
  CDR3 for alpha chain variable domain of TCR clone 175733 (TRAV26-1, TRAJ52)
CCVLSHRPSAGGTSYGKLTF

SEQ ID NO: 351466 - protein, 14 aa, Homo sapiens
  CDR3 for beta chain variable domain of TCR clone 175733 (TRBV7-2, TRBJ1-4)
CASSHSKTNEKLFF

SEQ ID NO: 351467 - protein, 13 aa, Homo sapiens
  CDR3 for alpha chain variable domain of TCR clone 175734 (TRAV1-2, TRAJ9)
CAALNTGGFKTIF

SEQ ID NO: 351468 - protein, 20 aa, Homo sapiens
  CDR3 for beta chain variable domain of TCR clone 175734 (TRBV28, TRBJ2-1)
GASTPIGRSPGLAGGNEQFF

SEQ ID NO: 351469 - protein, 16 aa, Homo sapiens
  CDR3 for alpha chain variable domain of TCR clone 175735 (TRAV30, TRAJ24)
CGTEIVDAESWGKFQF

SEQ ID NO: 351470 - protein, 18 aa, Homo sapiens
  CDR3 for beta chain variable domain of TCR clone 175735 (TRBV7-9, TRBJ2-7)
CASSLTTSGSRTWYEQYF

SEQ ID NO: 351471 - protein, 16 aa, Homo sapiens
  CDR3 for alpha chain variable domain of TCR clone 175736 (TRAV30, TRAJ24)
CGTEIVDADSWGKFQF

SEQ ID NO: 351472 - protein, 13 aa, Homo sapiens
  CDR3 for beta chain variable domain of TCR clone 175736 (TRBV12-5, TRBJ2-3)
CAGGDRQSDTQYF

SEQ ID NO: 351473 - protein, 16 aa, Homo sapiens
  CDR3 for alpha chain variable domain of TCR clone 175737 (TRAV38-1, TRAJ37)
CAFKGDGSSNTGKIIF

SEQ ID NO: 351474 - protein, 13 aa, Homo sapiens
  CDR3 for beta chain variable domain of TCR clone 175737 (TRBV12-4, TRBJ2-5)
CASSLFSRETQYF

SEQ ID NO: 351475 - protein, 15 aa, Homo sapiens
  CDR3 for alpha chain variable domain of TCR clone 175738 (TRAV3, TRAJ22)
CAVRDRGGSARQLTF

SEQ ID NO: 351476 - protein, 20 aa, Homo sapiens
  CDR3 for beta chain variable domain of TCR clone 175738 (TRBV11-2, TRBJ1-6)
CASSLVFATGGSGHPSTLGT

SEQ ID NO: 351477 - protein, 15 aa, Homo sapiens
  CDR3 for alpha chain variable domain of TCR clone 175739 (TRAV34, TRAJ38)
CGADFTPGNNRKLIW

SEQ ID NO: 351478 - protein, 13 aa, Homo sapiens
  CDR3 for beta chain variable domain of TCR clone 175739 (TRBV6-1, TRBJ1-2)
CASSEGTHYGYTF

SEQ ID NO: 351479 - protein, 16 aa, Homo sapiens
  CDR3 for alpha chain variable domain of TCR clone 175740 (TRAV30, TRAJ24)
CGTEIGDADSWGKFQL

SEQ ID NO: 351480 - protein, 14 aa, Homo sapiens
  CDR3 for beta chain variable domain of TCR clone 175740 (TRBV12-5, TRBJ2-5)
CASGSWTHQETQYF

SEQ ID NO: 351481 - protein, 14 aa, Homo sapiens
  CDR3 for alpha chain variable domain of TCR clone 175741 (TRAV8-2, TRAJ13)
CVVTASGGYQKVTF

SEQ ID NO: 351482 - protein, 16 aa, Homo sapiens
  CDR3 for beta chain variable domain of TCR clone 175741 (TRBV12-4, TRBJ1-5)
CASSRPVGESNQPQHF

SEQ ID NO: 351483 - protein, 15 aa, Homo sapiens
  CDR3 for alpha chain variable domain of TCR clone 175742 (TRAV17, TRAJ37)
CATGGGSSNTGKLIF

SEQ ID NO: 351484 - protein, 15 aa, Homo sapiens
  CDR3 for beta chain variable domain of TCR clone 175742 (TRBV28, TRBJ2-5)
CASSSGRTIQETQYF

SEQ ID NO: 351485 - protein, 12 aa, Homo sapiens
  CDR3 for alpha chain variable domain of TCR clone 175743 (TRAV12-3, TRAJ17)
CAMTLTGNKLTF

SEQ ID NO: 351486 - protein, 15 aa, Homo sapiens
  CDR3 for beta chain variable domain of TCR clone 175743 (TRBV20-1, TRBJ2-7)
CGARDRVSWMDEQYF

SEQ ID NO: 351487 - protein, 13 aa, Homo sapiens
  CDR3 for alpha chain variable domain of TCR clone 175744 (TRAV20, TRAJ37)
CAGCSSNTGKLIF

SEQ ID NO: 351488 - protein, 15 aa, Homo sapiens
  CDR3 for beta chain variable domain of TCR clone 175744 (TRBV7-3, TRBJ2-1)
CASSLAGAGADEQFF

SEQ ID NO: 351489 - protein, 18 aa, Homo sapiens
  CDR3 for alpha chain variable domain of TCR clone 175745 (TRAV26-2, TRAJ54)
CILRDVEVGIQGDQKLVF

SEQ ID NO: 351490 - protein, 13 aa, Homo sapiens
  CDR3 for beta chain variable domain of TCR clone 175745 (TRBV12-5, TRBJ2-3)
CASGDRQSDTQYF

SEQ ID NO: 351491 - protein, 13 aa, Homo sapiens
  CDR3 for alpha chain variable domain of TCR clone 175746 (TRAV12-1, TRAJ13)
CVVALLGYKKVTF

SEQ ID NO: 351492 - protein, 13 aa, Homo sapiens
  CDR3 for beta chain variable domain of TCR clone 175746 (TRBV20-1, TRBJ2-5)
CSAILTGQETQYF

SEQ ID NO: 351493 - protein, 15 aa, Homo sapiens
  CDR3 for alpha chain variable domain of TCR clone 175747 (TRAV8-3, TRAJ6)
CAVGEDRGGSYIPTF

SEQ ID NO: 351494 - protein, 14 aa, Homo sapiens
  CDR3 for beta chain variable domain of TCR clone 175747 (TRBV27, TRBJ2-2)
CASLRAPPGEELFF

SEQ ID NO: 351495 - protein, 17 aa, Homo sapiens
  CDR3 for alpha chain variable domain of TCR clone 175748 (TRAV1-2, TRAJ18)
CAVRDMGDRGSTLGAIL

SEQ ID NO: 351496 - protein, 16 aa, Homo sapiens
  CDR3 for beta chain variable domain of TCR clone 175748 (TRBV29-1, TRBJ1-2)
CSVEANRDIANYGYTF

SEQ ID NO: 351497 - protein, 14 aa, Homo sapiens
  CDR3 for alpha chain variable domain of TCR clone 175749 (TRAV1-2, TRAJ16)
CAVNRFPDGQKLLF

SEQ ID NO: 351498 - protein, 13 aa, Homo sapiens
  CDR3 for beta chain variable domain of TCR clone 175749 (TRBV20-1, TRBJ1-1)
CSAPLGGGTEAFF

SEQ ID NO: 351499 - protein, 12 aa, Homo sapiens
  CDR3 for alpha chain variable domain of TCR clone 175750 (TRAV13-2, TRAJ23)
CAERHRGGKLIF

SEQ ID NO: 351500 - protein, 16 aa, Homo sapiens
  CDR3 for beta chain variable domain of TCR clone 175750 (TRBV20-1, TRBJ1-1)
CSARALTQGMNTEAVF

SEQ ID NO: 351501 - protein, 15 aa, Homo sapiens
  CDR3 for alpha chain variable domain of TCR clone 175751 (TRAV25, TRAJ10)
CAGRLLTGGGNKLTF

SEQ ID NO: 351502 - protein, 13 aa, Homo sapiens
  CDR3 for beta chain variable domain of TCR clone 175751 (TRBV7-9, TRBJ1-2)
CASSLKQNYGYTF

SEQ ID NO: 351503 - protein, 12 aa, Homo sapiens
  CDR3 for alpha chain variable domain of TCR clone 175752 (TRAV12-1, TRAJ40)
CVVYSGTYEYIF

SEQ ID NO: 351504 - protein, 14 aa, Homo sapiens
  CDR3 for beta chain variable domain of TCR clone 175752 (TRBV7-9, TRBJ2-5)
CASSLDTAQETQYF

SEQ ID NO: 351505 - protein, 13 aa, Homo sapiens
  CDR3 for alpha chain variable domain of TCR clone 175753 (TRAV1-2, TRAJ11)
CAVRDSGYSTLTF

SEQ ID NO: 351506 - protein, 16 aa, Homo sapiens
  CDR3 for beta chain variable domain of TCR clone 175753 (TRBV5-1, TRBJ2-7)
CASSWGTGGLAWEQYF

SEQ ID NO: 351507 - protein, 15 aa, Homo sapiens
  CDR3 for alpha chain variable domain of TCR clone 175754 (TRAV3, TRAJ22)
CAVRDRGGSARQLTF

SEQ ID NO: 351508 - protein, 12 aa, Homo sapiens
  CDR3 for beta chain variable domain of TCR clone 175754 (TRBV11-3, TRBJ2-4)
CASSAGRVIQYF

SEQ ID NO: 351509 - protein, 17 aa, Homo sapiens
  CDR3 for alpha chain variable domain of TCR clone 175755 (TRAV8-1, TRAJ42)
CAVKWGNHGGSQGNPIF

SEQ ID NO: 351510 - protein, 15 aa, Homo sapiens
  CDR3 for beta chain variable domain of TCR clone 175755 (TRBV9, TRBJ1-6)
CASSVAGTGDSPLHF

SEQ ID NO: 351511 - protein, 11 aa, Homo sapiens
  CDR3 for alpha chain variable domain of TCR clone 175756 (TRAV2, TRAJ23)
CAVETRGKLIF

SEQ ID NO: 351512 - protein, 17 aa, Homo sapiens
  CDR3 for beta chain variable domain of TCR clone 175756 (TRBV20-1, TRBJ2-1)
CSASSSGLAGSYNEQFC

SEQ ID NO: 351513 - protein, 11 aa, Homo sapiens
  CDR3 for alpha chain variable domain of TCR clone 175757 (TRAV13-1, TRAJ40)
CAVSGSYKYIF

SEQ ID NO: 351514 - protein, 13 aa, Homo sapiens
  CDR3 for beta chain variable domain of TCR clone 175757 (TRBV19, TRBJ1-5)
CASSIGGNQPQHF

SEQ ID NO: 351515 - protein, 15 aa, Homo sapiens
  CDR3 for alpha chain variable domain of TCR clone 175758 (TRAV13-1, TRAJ18)
CAARGGGSTLGRLYF

SEQ ID NO: 351516 - protein, 13 aa, Homo sapiens
  CDR3 for beta chain variable domain of TCR clone 175758 (TRBV18, TRBJ2-1)
CASGLSSNNEQFL

SEQ ID NO: 351517 - protein, 14 aa, Homo sapiens
  CDR3 for alpha chain variable domain of TCR clone 175759 (TRAV38-1, TRAJ45)
CASHSGGGADGLTC

SEQ ID NO: 351518 - protein, 13 aa, Homo sapiens
  CDR3 for beta chain variable domain of TCR clone 175759 (TRBV10-3, TRBJ1-2)
CAISERDSYGYTF

SEQ ID NO: 351519 - protein, 16 aa, Homo sapiens
  CDR3 for alpha chain variable domain of TCR clone 175760 (TRAV4, TRAJ42)
CLGVLNYGGSQGNLIF

SEQ ID NO: 351520 - protein, 12 aa, Homo sapiens
  CDR3 for beta chain variable domain of TCR clone 175760 (TRBV20-1, TRBJ2-1)
CSAQYTYNEQFF

SEQ ID NO: 351521 - protein, 14 aa, Homo sapiens
  CDR3 for alpha chain variable domain of TCR clone 175761 (TRAV26-1, TRAJ39)
CIVRGSTAGNMLTF

SEQ ID NO: 351522 - protein, 15 aa, Homo sapiens
  CDR3 for beta chain variable domain of TCR clone 175761 (TRBV7-9, TRBJ1-5)
CASSQGHQPNQPQHF

SEQ ID NO: 351523 - protein, 13 aa, Homo sapiens
  CDR3 for alpha chain variable domain of TCR clone 175762 (TRAV2, TRAJ47)
CAVDRAYGNKLVF

SEQ ID NO: 351524 - protein, 17 aa, Homo sapiens
  CDR3 for beta chain variable domain of TCR clone 175762 (TRBV15, TRBJ1-5)
CATSRVKGIYSNQPQHF

SEQ ID NO: 351525 - protein, 15 aa, Homo sapiens
  CDR3 for alpha chain variable domain of TCR clone 175763 (TRAV29/DV5, TRAJ24)
CAASGATDSWGNFQF

SEQ ID NO: 351526 - protein, 20 aa, Homo sapiens
  CDR3 for beta chain variable domain of TCR clone 175763 (TRBV11-2, TRBJ2-2)
LRARPCISVPAASLPGSCFF

SEQ ID NO: 351527 - protein, 11 aa, Homo sapiens
  CDR3 for alpha chain variable domain of TCR clone 175764 (TRAV2, TRAJ33)
CAVESNYQLIW

SEQ ID NO: 351528 - protein, 14 aa, Homo sapiens
  CDR3 for beta chain variable domain of TCR clone 175764 (TRBV7-9, TRBJ1-1)
CASSLAGMMTEAFF

SEQ ID NO: 351529 - protein, 13 aa, Homo sapiens
  CDR3 for alpha chain variable domain of TCR clone 175765 (TRAV8-1, TRAJ30)
CAVIMNRDDKIIF

SEQ ID NO: 351530 - protein, 14 aa, Homo sapiens
  CDR3 for beta chain variable domain of TCR clone 175765 (TRBV7-2, TRBJ1-6)
CASSLQGANSPFHF

SEQ ID NO: 351531 - protein, 14 aa, Homo sapiens
  CDR3 for alpha chain variable domain of TCR clone 175766 (TRAV12-3, TRAJ10)
SHLPLTGGGNKLTF

SEQ ID NO: 351532 - protein, 16 aa, Homo sapiens
  CDR3 for beta chain variable domain of TCR clone 175766 (TRBV5-1, TRBJ2-7)
CASSYASTSSGGEQYF

SEQ ID NO: 351533 - protein, 11 aa, Homo sapiens
  CDR3 for alpha chain variable domain of TCR clone 175767 (TRAV4, TRAJ23)
CLVAPGGKLIF

SEQ ID NO: 351534 - protein, 15 aa, Homo sapiens
  CDR3 for beta chain variable domain of TCR clone 175767 (TRBV10-3, TRBJ2-3)
CAISLTSGGTDTQYF

SEQ ID NO: 351535 - protein, 16 aa, Homo sapiens
  CDR3 for alpha chain variable domain of TCR clone 175768 (TRAV12-2, TRAJ18)
CAVTTDRGSTRGRLYF

SEQ ID NO: 351536 - protein, 13 aa, Homo sapiens
  CDR3 for beta chain variable domain of TCR clone 175768 (TRBV19, TRBJ2-3)
CATWDKITDTQYF

SEQ ID NO: 351537 - protein, 23 aa, Homo sapiens
  CDR3 for alpha chain variable domain of TCR clone 175769 (TRAV1-1, TRAJ8)
CAGGTGFQKLVLELAPDFWSVQI

SEQ ID NO: 351538 - protein, 15 aa, Homo sapiens
  CDR3 for beta chain variable domain of TCR clone 175769 (TRBV7-9, TRBJ1-4)
CASSRTGGFNEKLFF

SEQ ID NO: 351539 - protein, 13 aa, Homo sapiens
  CDR3 for alpha chain variable domain of TCR clone 175770 (TRAV13-1, TRAJ39)
CIKYSNAGNMLTF

SEQ ID NO: 351540 - protein, 16 aa, Homo sapiens
  CDR3 for beta chain variable domain of TCR clone 175770 (TRBV20-1, TRBJ1-4)
CSAPGQGLLTNEKLFF

SEQ ID NO: 351541 - protein, 14 aa, Homo sapiens
  CDR3 for alpha chain variable domain of TCR clone 175771 (TRAV12-3, TRAJ42)
CAMNYGGSQGNLIF

SEQ ID NO: 351542 - protein, 15 aa, Homo sapiens
  CDR3 for beta chain variable domain of TCR clone 175771 (TRBV12-4, TRBJ2-5)
CASSPPTGLQETQYF

SEQ ID NO: 351543 - protein, 14 aa, Homo sapiens
  CDR3 for alpha chain variable domain of TCR clone 175772 (TRAV13-1, TRAJ44)
CAAKATGTASKLTF

SEQ ID NO: 351544 - protein, 13 aa, Homo sapiens
  CDR3 for beta chain variable domain of TCR clone 175772 (TRBV5-5, TRBJ1-2)
CASSLWRGEDCTF

SEQ ID NO: 351545 - protein, 18 aa, Homo sapiens
  CDR3 for alpha chain variable domain of TCR clone 175773 (TRAV13-1, TRAJ52)
CAASKRSAGGTSYGKLTF

SEQ ID NO: 351546 - protein, 16 aa, Homo sapiens
  CDR3 for beta chain variable domain of TCR clone 175773 (TRBV5-1, TRBJ2-5)
CASSFTTSLGKETQYF

SEQ ID NO: 351547 - protein, 14 aa, Homo sapiens
  CDR3 for alpha chain variable domain of TCR clone 175774 (TRAV17, TRAJ6)
CATNPAGGSYIPTF

SEQ ID NO: 351548 - protein, 15 aa, Homo sapiens
  CDR3 for beta chain variable domain of TCR clone 175774 (TRBV2, TRBJ2-5)
CASSGTVAARETQYF

SEQ ID NO: 351549 - protein, 15 aa, Homo sapiens
  CDR3 for alpha chain variable domain of TCR clone 175775 (TRAV13-1, TRAJ32)
CAASIYGGATNKLIF

SEQ ID NO: 351550 - protein, 15 aa, Homo sapiens
  CDR3 for beta chain variable domain of TCR clone 175775 (TRBV11-2, TRBJ1-3)
CASSLDGTVGNTIYF

SEQ ID NO: 351551 - protein, 16 aa, Homo sapiens
  CDR3 for alpha chain variable domain of TCR clone 175776 (TRAV12-3, TRAJ53)
CAMSPGSGGSKYKLTF

SEQ ID NO: 351552 - protein, 14 aa, Homo sapiens
  CDR3 for beta chain variable domain of TCR clone 175776 (TRBV20-1, TRBJ2-1)
CSAQIGGSANEQFF

SEQ ID NO: 351553 - protein, 14 aa, Homo sapiens
  CDR3 for alpha chain variable domain of TCR clone 175777 (TRAV8-3, TRAJ13)
CAVGARGGYQKGTF

SEQ ID NO: 351554 - protein, 16 aa, Homo sapiens
  CDR3 for beta chain variable domain of TCR clone 175777 (TRBV27, TRBJ2-7)
CASSLGSRTGPYEQCF

SEQ ID NO: 351555 - protein, 16 aa, Homo sapiens
  CDR3 for alpha chain variable domain of TCR clone 175778 (TRAV1-2, TRAJ33)
FAVRAISMDSNYQLIW

SEQ ID NO: 351556 - protein, 17 aa, Homo sapiens
  CDR3 for beta chain variable domain of TCR clone 175778 (TRBV5-3, TRBJ1-5)
CARSPRRDRRCTQPQHF

SEQ ID NO: 351557 - protein, 16 aa, Homo sapiens
  CDR3 for alpha chain variable domain of TCR clone 175779 (TRAV16, TRAJ4)
CALSRMFSGGYNKLIF

SEQ ID NO: 351558 - protein, 15 aa, Homo sapiens
  CDR3 for beta chain variable domain of TCR clone 175779 (TRBV7-3, TRBJ2-7)
CASSLNAQGAYEQYF

SEQ ID NO: 351559 - protein, 12 aa, Homo sapiens
  CDR3 for alpha chain variable domain of TCR clone 175780 (TRAV12-3, TRAJ17)
CAMTLTGNKLTF

SEQ ID NO: 351560 - protein, 16 aa, Homo sapiens
  CDR3 for beta chain variable domain of TCR clone 175780 (TRBV19, TRBJ2-2)
CASSPSGGLNTGELFF

SEQ ID NO: 351561 - protein, 15 aa, Homo sapiens
  CDR3 for alpha chain variable domain of TCR clone 175781 (TRAV27, TRAJ53)
CAGGDSGGSNYKLTF

SEQ ID NO: 351562 - protein, 15 aa, Homo sapiens
  CDR3 for beta chain variable domain of TCR clone 175781 (TRBV5-1, TRBJ2-1)
CASTGSGRTYNEQFF

SEQ ID NO: 351563 - protein, 14 aa, Homo sapiens
  CDR3 for alpha chain variable domain of TCR clone 175782 (TRAV27, TRAJ36)
CAGPPKRGANNLFF

SEQ ID NO: 351564 - protein, 12 aa, Homo sapiens
  CDR3 for beta chain variable domain of TCR clone 175782 (TRBV6-3, TRBJ2-7)
CASSLTPYEQYF

SEQ ID NO: 351565 - protein, 13 aa, Homo sapiens
  CDR3 for alpha chain variable domain of TCR clone 175783 (TRAV2, TRAJ40)
CAVVTSGTYKYIF

SEQ ID NO: 351566 - protein, 12 aa, Homo sapiens
  CDR3 for beta chain variable domain of TCR clone 175783 (TRBV11-2, TRBJ2-3)
GASRGAPNTQYF

SEQ ID NO: 351567 - protein, 18 aa, Homo sapiens
  CDR3 for alpha chain variable domain of TCR clone 175784 (TRAV29/DV5, TRAJ52)
CAAGFSGAGGTSYGKLTF

SEQ ID NO: 351568 - protein, 16 aa, Homo sapiens
  CDR3 for beta chain variable domain of TCR clone 175784 (TRBV7-3, TRBJ2-2)
FASSVKRGTLSGELFF

SEQ ID NO: 351569 - protein, 15 aa, Homo sapiens
  CDR3 for alpha chain variable domain of TCR clone 175785 (TRAV17, TRAJ4)
CATGTWSGGYNKLIF

SEQ ID NO: 351570 - protein, 13 aa, Homo sapiens
  CDR3 for beta chain variable domain of TCR clone 175785 (TRBV12-4, TRBJ1-1)
CASSPGTGFEAFF

SEQ ID NO: 351571 - protein, 15 aa, Homo sapiens
  CDR3 for alpha chain variable domain of TCR clone 175786 (TRAV3, TRAJ22)
CAVRDRGGSARQLTF

SEQ ID NO: 351572 - protein, 15 aa, Homo sapiens
  CDR3 for beta chain variable domain of TCR clone 175786 (TRBV4-1, TRBJ2-7)
CASSQQGQGFDEQYF

SEQ ID NO: 351573 - protein, 14 aa, Homo sapiens
  CDR3 for alpha chain variable domain of TCR clone 175787 (TRAV13-1, TRAJ24)
CAASRTDSWGTLQF

SEQ ID NO: 351574 - protein, 17 aa, Homo sapiens
  CDR3 for beta chain variable domain of TCR clone 175787 (TRBV6-1, TRBJ2-7)
CASSEPIAAPRSSTSGR

SEQ ID NO: 351575 - protein, 16 aa, Homo sapiens
  CDR3 for alpha chain variable domain of TCR clone 175788 (TRAV13-2, TRAJ32)
CAENMNYGGATNKLIF

SEQ ID NO: 351576 - protein, 14 aa, Homo sapiens
  CDR3 for beta chain variable domain of TCR clone 175788 (TRBV4-3, TRBJ2-7)
CASSQDVVGGEQYF

SEQ ID NO: 351577 - protein, 13 aa, Homo sapiens
  CDR3 for alpha chain variable domain of TCR clone 175789 (TRAV21, TRAJ27)
CAARPGNTGKSTF

SEQ ID NO: 351578 - protein, 15 aa, Homo sapiens
  CDR3 for beta chain variable domain of TCR clone 175789 (TRBV12-4, TRBJ2-5)
CASSPPTGLQETQYF

SEQ ID NO: 351579 - protein, 23 aa, Homo sapiens
  CDR3 for alpha chain variable domain of TCR clone 175790 (TRAV26-1, )
CIADTAGNNHIQNPDPAGYQLRD

SEQ ID NO: 351580 - protein, 13 aa, Homo sapiens
  CDR3 for beta chain variable domain of TCR clone 175790 (TRBV20-1, TRBJ1-1)
CSARGGGNTEAFF

SEQ ID NO: 351581 - protein, 12 aa, Homo sapiens
  CDR3 for alpha chain variable domain of TCR clone 175791 (TRAV12-3, TRAJ42)
CAPGGSQGNLIF

SEQ ID NO: 351582 - protein, 12 aa, Homo sapiens
  CDR3 for beta chain variable domain of TCR clone 175791 (TRBV11-2, TRBJ2-1)
CASSPGNNEQFF

SEQ ID NO: 351583 - protein, 16 aa, Homo sapiens
  CDR3 for alpha chain variable domain of TCR clone 175792 (TRAV8-4, TRAJ28)
CAVESNSGAGSYQLTF

SEQ ID NO: 351584 - protein, 14 aa, Homo sapiens
  CDR3 for beta chain variable domain of TCR clone 175792 (TRBV19, TRBJ2-1)
CASPTFVLSGEQFF

SEQ ID NO: 351585 - protein, 15 aa, Homo sapiens
  CDR3 for alpha chain variable domain of TCR clone 175793 (TRAV26-1, TRAJ48)
CIVRVGDFGNEKLTF

SEQ ID NO: 351586 - protein, 14 aa, Homo sapiens
  CDR3 for beta chain variable domain of TCR clone 175793 (TRBV6-1, TRBJ1-3)
CASVQGGGGNTMYF

SEQ ID NO: 351587 - protein, 13 aa, Homo sapiens
  CDR3 for alpha chain variable domain of TCR clone 175794 (TRAV8-3, TRAJ43)
CAVGPDNNNDMRF

SEQ ID NO: 351588 - protein, 16 aa, Homo sapiens
  CDR3 for beta chain variable domain of TCR clone 175794 (TRBV29-1, TRBJ2-1)
SAALKAGPSSYNEQFF

SEQ ID NO: 351589 - protein, 14 aa, Homo sapiens
  CDR3 for alpha chain variable domain of TCR clone 175795 (TRAV1-2, TRAJ16)
CAVNRFSDGQKLFF

SEQ ID NO: 351590 - protein, 13 aa, Homo sapiens
  CDR3 for beta chain variable domain of TCR clone 175795 (TRBV29-1, TRBJ1-1)
CSVGDSRNTEAFF

SEQ ID NO: 351591 - protein, 14 aa, Homo sapiens
  CDR3 for alpha chain variable domain of TCR clone 175796 (TRAV12-1, TRAJ26)
CVLKGSNYGQNFVF

SEQ ID NO: 351592 - protein, 17 aa, Homo sapiens
  CDR3 for beta chain variable domain of TCR clone 175796 (TRBV11-2, TRBJ2-6)
CASSQRDIFSGANVLTF

SEQ ID NO: 351593 - protein, 12 aa, Homo sapiens
  CDR3 for alpha chain variable domain of TCR clone 175797 (TRAV8-3, TRAJ20)
CALDFNDYKLSF

SEQ ID NO: 351594 - protein, 12 aa, Homo sapiens
  CDR3 for beta chain variable domain of TCR clone 175797 (TRBV12-4, TRBJ1-3)
CASSFSGNTIYF

SEQ ID NO: 351595 - protein, 15 aa, Homo sapiens
  CDR3 for alpha chain variable domain of TCR clone 175798 (TRAV12-1, TRAJ5)
CEVNMLETGRRALTF

SEQ ID NO: 351596 - protein, 12 aa, Homo sapiens
  CDR3 for beta chain variable domain of TCR clone 175798 (TRBV11-2, TRBJ2-2)
CASSLGGGELFF

SEQ ID NO: 351597 - protein, 11 aa, Homo sapiens
  CDR3 for alpha chain variable domain of TCR clone 175799 (TRAV12-2, TRAJ36)
CAVDGANNLFF

SEQ ID NO: 351598 - protein, 13 aa, Homo sapiens
  CDR3 for beta chain variable domain of TCR clone 175799 (TRBV7-2, TRBJ2-7)
CASSSPSGREQYF

SEQ ID NO: 351599 - protein, 14 aa, Homo sapiens
  CDR3 for alpha chain variable domain of TCR clone 175800 (TRAV1-2, TRAJ8)
CAVREDTGFQKLVF

SEQ ID NO: 351600 - protein, 15 aa, Homo sapiens
  CDR3 for beta chain variable domain of TCR clone 175800 (TRBV12-4, TRBJ2-5)
CASSRTGMNQETQYF

SEQ ID NO: 351601 - protein, 15 aa, Homo sapiens
  CDR3 for alpha chain variable domain of TCR clone 175801 (TRAV3, TRAJ22)
CAVRDRGGSARQLTF

SEQ ID NO: 351602 - protein, 16 aa, Homo sapiens
  CDR3 for beta chain variable domain of TCR clone 175801 (TRBV11-2, TRBJ2-1)
CAGARGSYSHHNEQFF

SEQ ID NO: 351603 - protein, 11 aa, Homo sapiens
  CDR3 for alpha chain variable domain of TCR clone 175802 (TRAV2, TRAJ33)
CAVESNYPLIW

SEQ ID NO: 351604 - protein, 15 aa, Homo sapiens
  CDR3 for beta chain variable domain of TCR clone 175802 (TRBV19, TRBJ1-1)
CASTSGQIQDTEAFF

SEQ ID NO: 351605 - protein, 14 aa, Homo sapiens
  CDR3 for alpha chain variable domain of TCR clone 175803 (TRAV26-1, TRAJ21)
CVVRPPYNFNKFYF

SEQ ID NO: 351606 - protein, 14 aa, Homo sapiens
  CDR3 for beta chain variable domain of TCR clone 175803 (TRBV19, TRBJ2-1)
CASPTFVLSGEQFF

SEQ ID NO: 351607 - protein, 13 aa, Homo sapiens
  CDR3 for alpha chain variable domain of TCR clone 175804 (TRAV36/DV7, TRAJ49)
CAGDSNTGNKFYF

SEQ ID NO: 351608 - protein, 12 aa, Homo sapiens
  CDR3 for beta chain variable domain of TCR clone 175804 (TRBV11-2, TRBJ2-2)
CASSLGGGELFF

SEQ ID NO: 351609 - protein, 18 aa, Homo sapiens
  CDR3 for alpha chain variable domain of TCR clone 175805 (TRAV1-2, TRAJ18)
CAVRDMGDRGSTLGRRYF

SEQ ID NO: 351610 - protein, 17 aa, Homo sapiens
  CDR3 for beta chain variable domain of TCR clone 175805 (TRBV20-1, TRBJ2-1)
CSASSSGLAGSYNEQFF

SEQ ID NO: 351611 - protein, 13 aa, Homo sapiens
  CDR3 for alpha chain variable domain of TCR clone 175806 (TRAV23/DV6, TRAJ22)
FAPYSGSARQLTF

SEQ ID NO: 351612 - protein, 13 aa, Homo sapiens
  CDR3 for beta chain variable domain of TCR clone 175806 (TRBV6-1, TRBJ1-1)
CASSRQGNTEAFF

SEQ ID NO: 351613 - protein, 11 aa, Homo sapiens
  CDR3 for alpha chain variable domain of TCR clone 175807 (TRAV3, TRAJ21)
CAVGNFNKFYF

SEQ ID NO: 351614 - protein, 15 aa, Homo sapiens
  CDR3 for beta chain variable domain of TCR clone 175807 (TRBV11-3, TRBJ2-7)
CASSPGPASSYEQYF

SEQ ID NO: 351615 - protein, 13 aa, Homo sapiens
  CDR3 for alpha chain variable domain of TCR clone 175808 (TRAV26-1, TRAJ30)
YIVRVESNDKIIF

SEQ ID NO: 351616 - protein, 17 aa, Homo sapiens
  CDR3 for beta chain variable domain of TCR clone 175808 (TRBV13, TRBJ2-3)
CASSLSRVAGGRNTQYF

SEQ ID NO: 351617 - protein, 16 aa, Homo sapiens
  CDR3 for alpha chain variable domain of TCR clone 175809 (TRAV8-3, TRAJ8)
CAVPRDGNTGFQKLVF

SEQ ID NO: 351618 - protein, 14 aa, Homo sapiens
  CDR3 for beta chain variable domain of TCR clone 175809 (TRBV4-1, TRBJ2-2)
CASSQAVNTGELFV

SEQ ID NO: 351619 - protein, 13 aa, Homo sapiens
  CDR3 for alpha chain variable domain of TCR clone 175810 (TRAV36/DV7, TRAJ37)
CAVFSSNTGKLIF

SEQ ID NO: 351620 - protein, 12 aa, Homo sapiens
  CDR3 for beta chain variable domain of TCR clone 175810 (TRBV11-3, TRBJ2-2)
CASSLGGGELFF

SEQ ID NO: 351621 - protein, 10 aa, Homo sapiens
  CDR3 for alpha chain variable domain of TCR clone 175811 (TRAV1-2, TRAJ31)
CVSEDARLMF

SEQ ID NO: 351622 - protein, 16 aa, Homo sapiens
  CDR3 for beta chain variable domain of TCR clone 175811 (TRBV5-1, TRBJ2-5)
CASSLANHRGRETQYF

SEQ ID NO: 351623 - protein, 12 aa, Homo sapiens
  CDR3 for alpha chain variable domain of TCR clone 175812 (TRAV16, TRAJ5)
CAQLTGRRALTF

SEQ ID NO: 351624 - protein, 14 aa, Homo sapiens
  CDR3 for beta chain variable domain of TCR clone 175812 (TRBV19, TRBJ1-1)
CASTGHRLNTEAFF

SEQ ID NO: 351625 - protein, 11 aa, Homo sapiens
  CDR3 for alpha chain variable domain of TCR clone 175813 (TRAV27, TRAJ45)
CAGAQEEVLTD

SEQ ID NO: 351626 - protein, 16 aa, Homo sapiens
  CDR3 for beta chain variable domain of TCR clone 175813 (TRBV19, TRBJ2-1)
CASSKAGPSSYNEQFF

SEQ ID NO: 351627 - protein, 15 aa, Homo sapiens
  CDR3 for alpha chain variable domain of TCR clone 175814 (TRAV35, TRAJ52)
CAGPRGGTSYGKLTF

SEQ ID NO: 351628 - protein, 14 aa, Homo sapiens
  CDR3 for beta chain variable domain of TCR clone 175814 (TRBV20-1, TRBJ2-7)
CSAWTALRSYEQYF

SEQ ID NO: 351629 - protein, 13 aa, Homo sapiens
  CDR3 for alpha chain variable domain of TCR clone 175815 (TRAV21, TRAJ27)
CAARPGNAGKSTF

SEQ ID NO: 351630 - protein, 16 aa, Homo sapiens
  CDR3 for beta chain variable domain of TCR clone 175815 (TRBV11-3, TRBJ2-1)
CQQLSEYKSSYNEQFF

SEQ ID NO: 351631 - protein, 14 aa, Homo sapiens
  CDR3 for alpha chain variable domain of TCR clone 175816 (TRAV26-1, TRAJ21)
CIVRVVYNFKQFYF

SEQ ID NO: 351632 - protein, 11 aa, Homo sapiens
  CDR3 for beta chain variable domain of TCR clone 175816 (TRBV5-7, TRBJ2-5)
CASSLERTQYF

SEQ ID NO: 351633 - protein, 16 aa, Homo sapiens
  CDR3 for alpha chain variable domain of TCR clone 175817 (TRAV30, TRAJ24)
CGTEIVDADSWGKFQF

SEQ ID NO: 351634 - protein, 13 aa, Homo sapiens
  CDR3 for beta chain variable domain of TCR clone 175817 (TRBV11-2, TRBJ1-3)
CASSLEPVNTMYF

SEQ ID NO: 351635 - protein, 13 aa, Homo sapiens
  CDR3 for alpha chain variable domain of TCR clone 175818 (TRAV2, TRAJ15)
CAVEAQAGTALIF

SEQ ID NO: 351636 - protein, 17 aa, Homo sapiens
  CDR3 for beta chain variable domain of TCR clone 175818 (TRBV7-3, TRBJ2-3)
RASSLMKRMRGADTQYF

SEQ ID NO: 351637 - protein, 13 aa, Homo sapiens
  CDR3 for alpha chain variable domain of TCR clone 175819 (TRAV12-1, TRAJ22)
CVASGGSARQLTF

SEQ ID NO: 351638 - protein, 11 aa, Homo sapiens
  CDR3 for beta chain variable domain of TCR clone 175819 (TRBV7-2, TRBJ2-3)
CASSSSDTQYF

SEQ ID NO: 351639 - protein, 16 aa, Homo sapiens
  CDR3 for alpha chain variable domain of TCR clone 175820 (TRAV26-2, TRAJ48)
CILRLPFNFGNEKLTF

SEQ ID NO: 351640 - protein, 14 aa, Homo sapiens
  CDR3 for beta chain variable domain of TCR clone 175820 (TRBV25-1, TRBJ1-1)
CASTHLGGNTEAFF

SEQ ID NO: 351641 - protein, 16 aa, Homo sapiens
  CDR3 for alpha chain variable domain of TCR clone 175821 (TRAV12-3, TRAJ45)
CAMGWGSGGGADGLTF

SEQ ID NO: 351642 - protein, 12 aa, Homo sapiens
  CDR3 for beta chain variable domain of TCR clone 175821 (TRBV14, TRBJ2-5)
CASSHLKETQYF

SEQ ID NO: 351643 - protein, 13 aa, Homo sapiens
  CDR3 for alpha chain variable domain of TCR clone 175822 (TRAV8-3, TRAJ43)
CAVVPYINNDMRF

SEQ ID NO: 351644 - protein, 16 aa, Homo sapiens
  CDR3 for beta chain variable domain of TCR clone 175822 (TRBV7-2, TRBJ2-5)
CASSPFPTGGEETQYF

SEQ ID NO: 351645 - protein, 12 aa, Homo sapiens
  CDR3 for alpha chain variable domain of TCR clone 175823 (TRAV2, TRAJ9)
CAVGAGGCKTIF

SEQ ID NO: 351646 - protein, 19 aa, Homo sapiens
  CDR3 for beta chain variable domain of TCR clone 175823 (TRBV7-9, TRBJ2-6)
CASSLESATVLPGANVLTF

SEQ ID NO: 351647 - protein, 17 aa, Homo sapiens
  CDR3 for alpha chain variable domain of TCR clone 175824 (TRAV3, TRAJ6)
CAVRDGPRAGGSYIPTF

SEQ ID NO: 351648 - protein, 16 aa, Homo sapiens
  CDR3 for beta chain variable domain of TCR clone 175824 (TRBV19, TRBJ1-6)
CASSVAPVAGNSPLHF

SEQ ID NO: 351649 - protein, 13 aa, Homo sapiens
  CDR3 for alpha chain variable domain of TCR clone 175825 (TRAV26-2, TRAJ33)
CILTLESNYQLIW

SEQ ID NO: 351650 - protein, 17 aa, Homo sapiens
  CDR3 for beta chain variable domain of TCR clone 175825 (TRBV7-8, TRBJ2-6)
CASSAGTGGAGANVLTF

SEQ ID NO: 351651 - protein, 14 aa, Homo sapiens
  CDR3 for alpha chain variable domain of TCR clone 175826 (TRAV21, TRAJ37)
CAVKGSSNTGKLIF

SEQ ID NO: 351652 - protein, 14 aa, Homo sapiens
  CDR3 for beta chain variable domain of TCR clone 175826 (TRBV7-2, TRBJ2-1)
CASSRGGARNEQFV

SEQ ID NO: 351653 - protein, 14 aa, Homo sapiens
  CDR3 for alpha chain variable domain of TCR clone 175827 (TRAV12-1, TRAJ30)
FVVNIGGRDDKIIF

SEQ ID NO: 351654 - protein, 13 aa, Homo sapiens
  CDR3 for beta chain variable domain of TCR clone 175827 (TRBV12-5, TRBJ2-1)
CASGLGRGNEQFF

SEQ ID NO: 351655 - protein, 12 aa, Homo sapiens
  CDR3 for alpha chain variable domain of TCR clone 175828 (TRAV13-1, TRAJ15)
CAASQAGTALIF

SEQ ID NO: 351656 - protein, 18 aa, Homo sapiens
  CDR3 for beta chain variable domain of TCR clone 175828 (TRBV7-9, TRBJ2-3)
CASSLPINGQISTDTQYC

SEQ ID NO: 351657 - protein, 15 aa, Homo sapiens
  CDR3 for alpha chain variable domain of TCR clone 175829 (TRAV12-2, TRAJ53)
CAVNGGGGSNYKLTF

SEQ ID NO: 351658 - protein, 14 aa, Homo sapiens
  CDR3 for beta chain variable domain of TCR clone 175829 (TRBV11-2, TRBJ2-3)
CASSRLARTDTQYF

SEQ ID NO: 351659 - protein, 17 aa, Homo sapiens
  CDR3 for alpha chain variable domain of TCR clone 175830 (TRAV12-2, TRAJ52)
CAVNPYAGGTSYGNLTF

SEQ ID NO: 351660 - protein, 12 aa, Homo sapiens
  CDR3 for beta chain variable domain of TCR clone 175830 (TRBV7-2, TRBJ2-5)
CASSLYGETQYF

SEQ ID NO: 351661 - protein, 17 aa, Homo sapiens
  CDR3 for alpha chain variable domain of TCR clone 175831 (TRAV36/DV7, TRAJ52)
CAVAQRAGGTSYGKLTF

SEQ ID NO: 351662 - protein, 14 aa, Homo sapiens
  CDR3 for beta chain variable domain of TCR clone 175831 (TRBV5-7, TRBJ1-5)
CASSRTGGGQPQHF

SEQ ID NO: 351663 - protein, 13 aa, Homo sapiens
  CDR3 for alpha chain variable domain of TCR clone 175832 (TRAV6, TRAJ45)
SPFSGGGADGLTF

SEQ ID NO: 351664 - protein, 17 aa, Homo sapiens
  CDR3 for beta chain variable domain of TCR clone 175832 (TRBV4-1, TRBJ2-5)
CASSQDQTGGPQETQYF

SEQ ID NO: 351665 - protein, 18 aa, Homo sapiens
  CDR3 for alpha chain variable domain of TCR clone 175833 (TRAV21, TRAJ52)
CAVRPSPAGGTSYGKLAF

SEQ ID NO: 351666 - protein, 17 aa, Homo sapiens
  CDR3 for beta chain variable domain of TCR clone 175833 (TRBV13, TRBJ2-3)
CASSLSRVAGGRKTQYF

SEQ ID NO: 351667 - protein, 17 aa, Homo sapiens
  CDR3 for alpha chain variable domain of TCR clone 175834 (TRAV12-2, TRAJ22)
CAVNRIPFSGSARQLTF

SEQ ID NO: 351668 - protein, 14 aa, Homo sapiens
  CDR3 for beta chain variable domain of TCR clone 175834 (TRBV3-1, TRBJ2-5)
CASSQGPDQETQYF

SEQ ID NO: 351669 - protein, 15 aa, Homo sapiens
  CDR3 for alpha chain variable domain of TCR clone 175835 (TRAV12-1, TRAJ4)
CVVNPFSGGYNKLIF

SEQ ID NO: 351670 - protein, 16 aa, Homo sapiens
  CDR3 for beta chain variable domain of TCR clone 175835 (TRBV5-1, TRBJ1-1)
CASSKTGNEVGTEAFF

SEQ ID NO: 351671 - protein, 14 aa, Homo sapiens
  CDR3 for alpha chain variable domain of TCR clone 175836 (TRAV26-1, TRAJ39)
CIVSPNNAGNMLTF

SEQ ID NO: 351672 - protein, 17 aa, Homo sapiens
  CDR3 for beta chain variable domain of TCR clone 175836 (TRBV20-1, TRBJ2-2)
CSASGSGQGGLTGELFF

SEQ ID NO: 351673 - protein, 14 aa, Homo sapiens
  CDR3 for alpha chain variable domain of TCR clone 175837 (TRAV8-3, TRAJ48)
CCGCGRFGNEKLTF

SEQ ID NO: 351674 - protein, 15 aa, Homo sapiens
  CDR3 for beta chain variable domain of TCR clone 175837 (TRBV28, TRBJ2-4)
CAAGSGTLLMGIQYF

SEQ ID NO: 351675 - protein, 15 aa, Homo sapiens
  CDR3 for alpha chain variable domain of TCR clone 175838 (TRAV23/DV6, TRAJ37)
CAAGEGSSNTGKLVF

SEQ ID NO: 351676 - protein, 17 aa, Homo sapiens
  CDR3 for beta chain variable domain of TCR clone 175838 (TRBV20-1, TRBJ2-7)
CSATRAGGVAGVEEQYF

SEQ ID NO: 351677 - protein, 13 aa, Homo sapiens
  CDR3 for alpha chain variable domain of TCR clone 175839 (TRAV4, TRAJ42)
CLVGGGSQGNLIF

SEQ ID NO: 351678 - protein, 13 aa, Homo sapiens
  CDR3 for beta chain variable domain of TCR clone 175839 (TRBV24-1, TRBJ2-2)
CATSDWSTGELFF

SEQ ID NO: 351679 - protein, 15 aa, Homo sapiens
  CDR3 for alpha chain variable domain of TCR clone 175840 (TRAV26-1, TRAJ29)
CIVRVEGSGNTPLVF

SEQ ID NO: 351680 - protein, 13 aa, Homo sapiens
  CDR3 for beta chain variable domain of TCR clone 175840 (TRBV5-1, TRBJ1-1)
CASSADWDTEAFF

SEQ ID NO: 351681 - protein, 11 aa, Homo sapiens
  CDR3 for alpha chain variable domain of TCR clone 175841 (TRAV2, TRAJ13)
CASGGYQKVTF

SEQ ID NO: 351682 - protein, 18 aa, Homo sapiens
  CDR3 for beta chain variable domain of TCR clone 175841 (TRBV19, TRBJ2-6)
CASTGPTSGGSGANVLTF

SEQ ID NO: 351683 - protein, 13 aa, Homo sapiens
  CDR3 for alpha chain variable domain of TCR clone 175842 (TRAV12-3, TRAJ13)
CAMGTGGYQKVTF

SEQ ID NO: 351684 - protein, 16 aa, Homo sapiens
  CDR3 for beta chain variable domain of TCR clone 175842 (TRBV9, TRBJ2-1)
CASSVGGGGNCNEQFF

SEQ ID NO: 351685 - protein, 14 aa, Homo sapiens
  CDR3 for alpha chain variable domain of TCR clone 175843 (TRAV8-3, TRAJ4)
CAVGASGGYNKLSF

SEQ ID NO: 351686 - protein, 13 aa, Homo sapiens
  CDR3 for beta chain variable domain of TCR clone 175843 (TRBV18, TRBJ2-5)
CASSLQGQETQYF

SEQ ID NO: 351687 - protein, 13 aa, Homo sapiens
  CDR3 for alpha chain variable domain of TCR clone 175844 (TRAV12-3, TRAJ7)
CAMTPYGNNRLAF

SEQ ID NO: 351688 - protein, 16 aa, Homo sapiens
  CDR3 for beta chain variable domain of TCR clone 175844 (TRBV20-1, TRBJ1-4)
CSARPYGAELNEKLFF

SEQ ID NO: 351689 - protein, 16 aa, Homo sapiens
  CDR3 for alpha chain variable domain of TCR clone 175845 (TRAV12-1, TRAJ53)
CVVTSVAGGSNYKLTF

SEQ ID NO: 351690 - protein, 16 aa, Homo sapiens
  CDR3 for beta chain variable domain of TCR clone 175845 (TRBV6-6, TRBJ2-3)
CASSYSHAGSSDTQYF

SEQ ID NO: 351691 - protein, 15 aa, Homo sapiens
  CDR3 for alpha chain variable domain of TCR clone 175846 (TRAV26-1, TRAJ52)
CIVSDLGTSYGKLTF

SEQ ID NO: 351692 - protein, 15 aa, Homo sapiens
  CDR3 for beta chain variable domain of TCR clone 175846 (TRBV7-9, TRBJ1-6)
CASSSPGRGNSHLHF

SEQ ID NO: 351693 - protein, 12 aa, Homo sapiens
  CDR3 for alpha chain variable domain of TCR clone 175847 (TRAV12-2, TRAJ36)
CAAPRGANNLFF

SEQ ID NO: 351694 - protein, 15 aa, Homo sapiens
  CDR3 for beta chain variable domain of TCR clone 175847 (TRBV7-2, TRBJ2-7)
CASSLKGALTYEQYF

SEQ ID NO: 351695 - protein, 14 aa, Homo sapiens
  CDR3 for alpha chain variable domain of TCR clone 175848 (TRAV8-6, TRAJ8)
CAVNDNTGFQKLVF

SEQ ID NO: 351696 - protein, 11 aa, Homo sapiens
  CDR3 for beta chain variable domain of TCR clone 175848 (TRBV29-1, TRBJ2-5)
CSEDRTGTQYF

SEQ ID NO: 351697 - protein, 14 aa, Homo sapiens
  CDR3 for alpha chain variable domain of TCR clone 175849 (TRAV1-2, TRAJ8)
CAVREDTGFKKLVF

SEQ ID NO: 351698 - protein, 14 aa, Homo sapiens
  CDR3 for beta chain variable domain of TCR clone 175849 (TRBV7-6, TRBJ2-3)
CASSLGTVTDTQYF

SEQ ID NO: 351699 - protein, 14 aa, Homo sapiens
  CDR3 for alpha chain variable domain of TCR clone 175850 (TRAV13-1, TRAJ44)
CAAKATGTASKLTF

SEQ ID NO: 351700 - protein, 16 aa, Homo sapiens
  CDR3 for beta chain variable domain of TCR clone 175850 (TRBV25-1, TRBJ1-1)
CASSGDRDRGRIEAFF

SEQ ID NO: 351701 - protein, 13 aa, Homo sapiens
  CDR3 for alpha chain variable domain of TCR clone 175851 (TRAV21, TRAJ57)
CAVIEGGSEKLVF

SEQ ID NO: 351702 - protein, 15 aa, Homo sapiens
  CDR3 for beta chain variable domain of TCR clone 175851 (TRBV10-3, TRBJ2-5)
CAISEFGRGQEIQYF

SEQ ID NO: 351703 - protein, 13 aa, Homo sapiens
  CDR3 for alpha chain variable domain of TCR clone 175852 (TRAV4, TRAJ34)
CLVGDYNTDKLIF

SEQ ID NO: 351704 - protein, 23 aa, Homo sapiens
  CDR3 for beta chain variable domain of TCR clone 175852 (TRBV4-2, TRBJ2-3)
CASSQDPPRACSISGGRGDTQYF

SEQ ID NO: 351705 - protein, 17 aa, Homo sapiens
  CDR3 for alpha chain variable domain of TCR clone 175853 (TRAV35, TRAJ28)
CAGIQVYSGAGSYQLTF

SEQ ID NO: 351706 - protein, 15 aa, Homo sapiens
  CDR3 for beta chain variable domain of TCR clone 175853 (TRBV2, TRBJ1-2)
CASSEIGGANYGYTF

SEQ ID NO: 351707 - protein, 13 aa, Homo sapiens
  CDR3 for alpha chain variable domain of TCR clone 175854 (TRAV26-1, TRAJ29)
CIVRRSGNTPLVF

SEQ ID NO: 351708 - protein, 14 aa, Homo sapiens
  CDR3 for beta chain variable domain of TCR clone 175854 (TRBV20-1, TRBJ2-2)
CSARDNGATGELFF

SEQ ID NO: 351709 - protein, 13 aa, Homo sapiens
  CDR3 for alpha chain variable domain of TCR clone 175855 (TRAV20, TRAJ20)
CAVRWVRDYKLSF

SEQ ID NO: 351710 - protein, 20 aa, Homo sapiens
  CDR3 for beta chain variable domain of TCR clone 175855 (TRBV28, TRBJ2-1)
CASTPIGRSPGLAGGNEQFF

SEQ ID NO: 351711 - protein, 14 aa, Homo sapiens
  CDR3 for alpha chain variable domain of TCR clone 175856 (TRAV12-3, TRAJ10)
SHLPLTGGGNKLTF

SEQ ID NO: 351712 - protein, 16 aa, Homo sapiens
  CDR3 for beta chain variable domain of TCR clone 175856 (TRBV19, TRBJ1-1)
CASRVGGPVTGTEAFF

SEQ ID NO: 351713 - protein, 17 aa, Homo sapiens
  CDR3 for alpha chain variable domain of TCR clone 175857 (TRAV29/DV5, TRAJ42)
CAASAGTYGGSQGNLIF

SEQ ID NO: 351714 - protein, 16 aa, Homo sapiens
  CDR3 for beta chain variable domain of TCR clone 175857 (TRBV27, TRBJ2-2)
CASSFRGLVRTGELFF

SEQ ID NO: 351715 - protein, 14 aa, Homo sapiens
  CDR3 for alpha chain variable domain of TCR clone 175858 (TRAV12-3, TRAJ10)
SHLPLTGGGNKLTF

SEQ ID NO: 351716 - protein, 15 aa, Homo sapiens
  CDR3 for beta chain variable domain of TCR clone 175858 (TRBV3-1, TRBJ2-5)
CASCANLGGPETQYF

SEQ ID NO: 351717 - protein, 15 aa, Homo sapiens
  CDR3 for alpha chain variable domain of TCR clone 175859 (TRAV8-3, TRAJ27)
CALGPSKTNAGKSTF

SEQ ID NO: 351718 - protein, 15 aa, Homo sapiens
  CDR3 for beta chain variable domain of TCR clone 175859 (TRBV27, TRBJ2-1)
CASSNGGGSSNEQFF

SEQ ID NO: 351719 - protein, 15 aa, Homo sapiens
  CDR3 for alpha chain variable domain of TCR clone 175860 (TRAV3, TRAJ5)
CAVRDRKTGRRALTF

SEQ ID NO: 351720 - protein, 13 aa, Homo sapiens
  CDR3 for beta chain variable domain of TCR clone 175860 (TRBV12-4, TRBJ1-1)
CASSPGTGCEAFF

SEQ ID NO: 351721 - protein, 13 aa, Homo sapiens
  CDR3 for alpha chain variable domain of TCR clone 175861 (TRAV1-1, TRAJ30)
CAVRSDRDDKVIF

SEQ ID NO: 351722 - protein, 14 aa, Homo sapiens
  CDR3 for beta chain variable domain of TCR clone 175861 (TRBV28, TRBJ2-7)
CASTFYGRAHEQYF

SEQ ID NO: 351723 - protein, 14 aa, Homo sapiens
  CDR3 for alpha chain variable domain of TCR clone 175862 (TRAV35, TRAJ22)
CAGHLSGSARQLTF

SEQ ID NO: 351724 - protein, 17 aa, Homo sapiens
  CDR3 for beta chain variable domain of TCR clone 175862 (TRBV28, TRBJ2-5)
CASSTPEGDALQETQYF

SEQ ID NO: 351725 - protein, 14 aa, Homo sapiens
  CDR3 for alpha chain variable domain of TCR clone 175863 (TRAV8-4, TRAJ8)
CAVSVGTGFQKLVF

SEQ ID NO: 351726 - protein, 16 aa, Homo sapiens
  CDR3 for beta chain variable domain of TCR clone 175863 (TRBV7-9, TRBJ1-2)
CASSLGFSSGEDGYTF

SEQ ID NO: 351727 - protein, 13 aa, Homo sapiens
  CDR3 for alpha chain variable domain of TCR clone 175864 (TRAV17, TRAJ29)
CATDAFRKHTSCL

SEQ ID NO: 351728 - protein, 14 aa, Homo sapiens
  CDR3 for beta chain variable domain of TCR clone 175864 (TRBV7-2, TRBJ2-7)
CASRSQGAAYEQYF

SEQ ID NO: 351729 - protein, 12 aa, Homo sapiens
  CDR3 for alpha chain variable domain of TCR clone 175865 (TRAV21, TRAJ23)
CAVMLQVGKLIL

SEQ ID NO: 351730 - protein, 14 aa, Homo sapiens
  CDR3 for beta chain variable domain of TCR clone 175865 (TRBV7-9, TRBJ1-4)
CAITEGEANEKLFF

SEQ ID NO: 351731 - protein, 13 aa, Homo sapiens
  CDR3 for alpha chain variable domain of TCR clone 175866 (TRAV2, TRAJ21)
CAVEDLNFNKFYF

SEQ ID NO: 351732 - protein, 15 aa, Homo sapiens
  CDR3 for beta chain variable domain of TCR clone 175866 (TRBV11-2, TRBJ2-2)
CASSSDRVNAGELFF

SEQ ID NO: 351733 - protein, 14 aa, Homo sapiens
  CDR3 for alpha chain variable domain of TCR clone 175867 (TRAV1-2, TRAJ8)
CAVREDTGFQKLVF

SEQ ID NO: 351734 - protein, 12 aa, Homo sapiens
  CDR3 for beta chain variable domain of TCR clone 175867 (TRBV7-8, TRBJ2-7)
CASSLGEREQYF

SEQ ID NO: 351735 - protein, 11 aa, Homo sapiens
  CDR3 for alpha chain variable domain of TCR clone 175868 (TRAV3, TRAJ21)
CAVGNFNKFYF

SEQ ID NO: 351736 - protein, 14 aa, Homo sapiens
  CDR3 for beta chain variable domain of TCR clone 175868 (TRBV5-1, TRBJ1-5)
CASSLGQGAQPQHF

SEQ ID NO: 351737 - protein, 14 aa, Homo sapiens
  CDR3 for alpha chain variable domain of TCR clone 175869 (TRAV1-2, TRAJ8)
CAVREDTGFQKLVF

SEQ ID NO: 351738 - protein, 19 aa, Homo sapiens
  CDR3 for beta chain variable domain of TCR clone 175869 (TRBV7-2, TRBJ2-3)
CASSFLSRSWGGGTDTQYF

SEQ ID NO: 351739 - protein, 10 aa, Homo sapiens
  CDR3 for alpha chain variable domain of TCR clone 175870 (TRAV13-1, TRAJ8)
CAAPFQKLVF

SEQ ID NO: 351740 - protein, 15 aa, Homo sapiens
  CDR3 for beta chain variable domain of TCR clone 175870 (TRBV27, TRBJ2-3)
CASSSLAGVIDTQYF

SEQ ID NO: 351741 - protein, 11 aa, Homo sapiens
  CDR3 for alpha chain variable domain of TCR clone 175871 (TRAV8-3, TRAJ18)
CAVGGRQRLNP

SEQ ID NO: 351742 - protein, 14 aa, Homo sapiens
  CDR3 for beta chain variable domain of TCR clone 175871 (TRBV5-4, TRBJ1-6)
CASSLWSDNSPLHF

SEQ ID NO: 351743 - protein, 15 aa, Homo sapiens
  CDR3 for alpha chain variable domain of TCR clone 175872 (TRAV8-3, TRAJ40)
CSVGPYTSGTYKYIF

SEQ ID NO: 351744 - protein, 16 aa, Homo sapiens
  CDR3 for beta chain variable domain of TCR clone 175872 (TRBV7-2, TRBJ2-7)
CASSLDPGGGSGEQYF

SEQ ID NO: 351745 - protein, 11 aa, Homo sapiens
  CDR3 for alpha chain variable domain of TCR clone 175873 (TRAV35, TRAJ22)
CAGPGVGQLTF

SEQ ID NO: 351746 - protein, 15 aa, Homo sapiens
  CDR3 for beta chain variable domain of TCR clone 175873 (TRBV9, TRBJ1-6)
CASSVAGTGDSPLHF

SEQ ID NO: 351747 - protein, 16 aa, Homo sapiens
  CDR3 for alpha chain variable domain of TCR clone 175874 (TRAV12-1, TRAJ42)
CVVTPYYGGSQGNLIF

SEQ ID NO: 351748 - protein, 15 aa, Homo sapiens
  CDR3 for beta chain variable domain of TCR clone 175874 (TRBV4-3, TRBJ2-7)
CASSQGGRGIYEQYL

SEQ ID NO: 351749 - protein, 14 aa, Homo sapiens
  CDR3 for alpha chain variable domain of TCR clone 175875 (TRAV2, TRAJ9)
CAVEDRSGGFKTIF

SEQ ID NO: 351750 - protein, 15 aa, Homo sapiens
  CDR3 for beta chain variable domain of TCR clone 175875 (TRBV9, TRBJ2-5)
CASSVGQGGWETQYF

SEQ ID NO: 351751 - protein, 13 aa, Homo sapiens
  CDR3 for alpha chain variable domain of TCR clone 175876 (TRAV3, TRAJ27)
CAVRPLGAGKSTV

SEQ ID NO: 351752 - protein, 13 aa, Homo sapiens
  CDR3 for beta chain variable domain of TCR clone 175876 (TRBV7-9, TRBJ2-3)
CASRPGSTDTQYF

SEQ ID NO: 351753 - protein, 18 aa, Homo sapiens
  CDR3 for alpha chain variable domain of TCR clone 175877 (TRAV21, TRAJ52)
CAVRPSPAGGPSSGKLTF

SEQ ID NO: 351754 - protein, 17 aa, Homo sapiens
  CDR3 for beta chain variable domain of TCR clone 175877 (TRBV13, TRBJ2-3)
CASSLSRVAGGRNTQYF

SEQ ID NO: 351755 - protein, 16 aa, Homo sapiens
  CDR3 for alpha chain variable domain of TCR clone 175878 (TRAV30, TRAJ24)
CGTEIVDADSWGKFQF

SEQ ID NO: 351756 - protein, 12 aa, Homo sapiens
  CDR3 for beta chain variable domain of TCR clone 175878 (TRBV11-2, TRBJ2-2)
CASGLPPGELFF

SEQ ID NO: 351757 - protein, 15 aa, Homo sapiens
  CDR3 for alpha chain variable domain of TCR clone 175879 (TRAV2, TRAJ11)
CAVGGRYSGYSTLTF

SEQ ID NO: 351758 - protein, 12 aa, Homo sapiens
  CDR3 for beta chain variable domain of TCR clone 175879 (TRBV5-4, TRBJ2-7)
CASSLEAYEQYF

SEQ ID NO: 351759 - protein, 15 aa, Homo sapiens
  CDR3 for alpha chain variable domain of TCR clone 175880 (TRAV20, TRAJ58)
CAVQDLETSGSRLTF

SEQ ID NO: 351760 - protein, 13 aa, Homo sapiens
  CDR3 for beta chain variable domain of TCR clone 175880 (TRBV20-1, TRBJ1-1)
CSARGGGNTEDFF

SEQ ID NO: 351761 - protein, 16 aa, Homo sapiens
  CDR3 for alpha chain variable domain of TCR clone 175881 (TRAV30, TRAJ24)
CGTEFVDADSWGKFQL

SEQ ID NO: 351762 - protein, 14 aa, Homo sapiens
  CDR3 for beta chain variable domain of TCR clone 175881 (TRBV12-5, TRBJ2-5)
CASGSRTHQETQYF

SEQ ID NO: 351763 - protein, 16 aa, Homo sapiens
  CDR3 for alpha chain variable domain of TCR clone 175882 (TRAV3, TRAJ5)
CAVRNLMDTGRRALTF

SEQ ID NO: 351764 - protein, 16 aa, Homo sapiens
  CDR3 for beta chain variable domain of TCR clone 175882 (TRBV4-2, TRBJ2-7)
CASSQEGLSNSYEQYF

SEQ ID NO: 351765 - protein, 18 aa, Homo sapiens
  CDR3 for alpha chain variable domain of TCR clone 175883 (TRAV29/DV5, TRAJ52)
CAAGFRGAGGTSYGKLTF

SEQ ID NO: 351766 - protein, 15 aa, Homo sapiens
  CDR3 for beta chain variable domain of TCR clone 175883 (TRBV18, TRBJ1-5)
CASSPEGRGYQPQHF

SEQ ID NO: 351767 - protein, 13 aa, Homo sapiens
  CDR3 for alpha chain variable domain of TCR clone 175884 (TRAV27, TRAJ45)
CRSSGGGADGLTF

SEQ ID NO: 351768 - protein, 17 aa, Homo sapiens
  CDR3 for beta chain variable domain of TCR clone 175884 (TRBV7-8, TRBJ2-6)
CASSAGTGGAGANGLTF

SEQ ID NO: 351769 - protein, 14 aa, Homo sapiens
  CDR3 for alpha chain variable domain of TCR clone 175885 (TRAV38-1, TRAJ29)
CAFITPSGNTPLVF

SEQ ID NO: 351770 - protein, 14 aa, Homo sapiens
  CDR3 for beta chain variable domain of TCR clone 175885 (TRBV19, TRBJ2-1)
CASKDPSSYNEQFF

SEQ ID NO: 351771 - protein, 15 aa, Homo sapiens
  CDR3 for alpha chain variable domain of TCR clone 175886 (TRAV20, TRAJ4)
CAVEGSSGGYNKLIF

SEQ ID NO: 351772 - protein, 14 aa, Homo sapiens
  CDR3 for beta chain variable domain of TCR clone 175886 (TRBV7-8, TRBJ2-7)
CASTLRGALGEQYF

SEQ ID NO: 351773 - protein, 16 aa, Homo sapiens
  CDR3 for alpha chain variable domain of TCR clone 175887 (TRAV3, TRAJ5)
CAVRYLMDTGRRALTF

SEQ ID NO: 351774 - protein, 16 aa, Homo sapiens
  CDR3 for beta chain variable domain of TCR clone 175887 (TRBV4-2, TRBJ2-7)
CASSQEGLAISYEQYF

SEQ ID NO: 351775 - protein, 13 aa, Homo sapiens
  CDR3 for alpha chain variable domain of TCR clone 175888 (TRAV27, TRAJ39)
CAGVTNAGNMLTF

SEQ ID NO: 351776 - protein, 19 aa, Homo sapiens
  CDR3 for beta chain variable domain of TCR clone 175888 (TRBV5-1, TRBJ2-3)
CASSLWLAGGITTTDTQYF

SEQ ID NO: 351777 - protein, 16 aa, Homo sapiens
  CDR3 for alpha chain variable domain of TCR clone 175889 (TRAV3, TRAJ37)
CAVRPHGSGNKGKLIF

SEQ ID NO: 351778 - protein, 15 aa, Homo sapiens
  CDR3 for beta chain variable domain of TCR clone 175889 (TRBV10-2, TRBJ2-6)
CASSEQGTGANVLTF

SEQ ID NO: 351779 - protein, 15 aa, Homo sapiens
  CDR3 for alpha chain variable domain of TCR clone 175890 (TRAV13-1, TRAJ42)
CAALNYGGSQGNLIF

SEQ ID NO: 351780 - protein, 16 aa, Homo sapiens
  CDR3 for beta chain variable domain of TCR clone 175890 (TRBV12-5, TRBJ2-5)
CASGPRTSGNQETQYF

SEQ ID NO: 351781 - protein, 13 aa, Homo sapiens
  CDR3 for alpha chain variable domain of TCR clone 175891 (TRAV2, TRAJ29)
CAAQNSGNTPLVF

SEQ ID NO: 351782 - protein, 16 aa, Homo sapiens
  CDR3 for beta chain variable domain of TCR clone 175891 (TRBV15, TRBJ2-3)
CATSRSRQGGTDTQYF

SEQ ID NO: 351783 - protein, 16 aa, Homo sapiens
  CDR3 for alpha chain variable domain of TCR clone 175892 (TRAV3, TRAJ6)
CAVRDGTGRRKLHTYI

SEQ ID NO: 351784 - protein, 15 aa, Homo sapiens
  CDR3 for beta chain variable domain of TCR clone 175892 (TRBV5-1, TRBJ2-7)
CASSLGDFTTYEQYF

SEQ ID NO: 351785 - protein, 13 aa, Homo sapiens
  CDR3 for alpha chain variable domain of TCR clone 175893 (TRAV2, TRAJ16)
CAVEFGDGQNLLF

SEQ ID NO: 351786 - protein, 14 aa, Homo sapiens
  CDR3 for beta chain variable domain of TCR clone 175893 (TRBV6-3, TRBJ2-5)
CASSYSLREKTQYF

SEQ ID NO: 351787 - protein, 14 aa, Homo sapiens
  CDR3 for alpha chain variable domain of TCR clone 175894 (TRAV12-1, TRAJ8)
CVVNSNTGFQKLVF

SEQ ID NO: 351788 - protein, 16 aa, Homo sapiens
  CDR3 for beta chain variable domain of TCR clone 175894 (TRBV20-1, TRBJ2-2)
CSARDERVGLTGELFF

SEQ ID NO: 351789 - protein, 17 aa, Homo sapiens
  CDR3 for alpha chain variable domain of TCR clone 175895 (TRAV3, TRAJ42)
CAVRDRDYGGSQGKLIF

SEQ ID NO: 351790 - protein, 15 aa, Homo sapiens
  CDR3 for beta chain variable domain of TCR clone 175895 (TRBV7-2, TRBJ2-1)
CASSSGLAGGNEQFF

SEQ ID NO: 351791 - protein, 17 aa, Homo sapiens
  CDR3 for alpha chain variable domain of TCR clone 175896 (TRAV13-1, TRAJ31)
CAPRDRLMFGDGTQLVV

SEQ ID NO: 351792 - protein, 15 aa, Homo sapiens
  CDR3 for beta chain variable domain of TCR clone 175896 (TRBV7-9, TRBJ2-5)
CASSQWDLYQETQYF

SEQ ID NO: 351793 - protein, 15 aa, Homo sapiens
  CDR3 for alpha chain variable domain of TCR clone 175897 (TRAV2, TRAJ37)
CAVDDGSSNTGKLIF

SEQ ID NO: 351794 - protein, 13 aa, Homo sapiens
  CDR3 for beta chain variable domain of TCR clone 175897 (TRBV20-1, TRBJ1-6)
CSTFREGNSPLHF

SEQ ID NO: 351795 - protein, 12 aa, Homo sapiens
  CDR3 for alpha chain variable domain of TCR clone 175898 (TRAV21, TRAJ13)
PGPSGGYQKVTF

SEQ ID NO: 351796 - protein, 17 aa, Homo sapiens
  CDR3 for beta chain variable domain of TCR clone 175898 (TRBV20-1, TRBJ2-2)
CSASGSGQGGLTGELFF

SEQ ID NO: 351797 - protein, 14 aa, Homo sapiens
  CDR3 for alpha chain variable domain of TCR clone 175899 (TRAV1-1, TRAJ27)
CAVFYNTNAGKSTF

SEQ ID NO: 351798 - protein, 15 aa, Homo sapiens
  CDR3 for beta chain variable domain of TCR clone 175899 (TRBV7-2, TRBJ2-1)
CTSSSGLAGGNEQFF

SEQ ID NO: 351799 - protein, 14 aa, Homo sapiens
  CDR3 for alpha chain variable domain of TCR clone 175900 (TRAV12-2, TRAJ32)
CAHPESGATNKLIF

SEQ ID NO: 351800 - protein, 11 aa, Homo sapiens
  CDR3 for beta chain variable domain of TCR clone 175900 (TRBV20-1, TRBJ2-7)
CSASGRIEQYF

SEQ ID NO: 351801 - protein, 14 aa, Homo sapiens
  CDR3 for alpha chain variable domain of TCR clone 175901 (TRAV12-2, TRAJ13)
CAVKKTGGYQKVTF

SEQ ID NO: 351802 - protein, 15 aa, Homo sapiens
  CDR3 for beta chain variable domain of TCR clone 175901 (TRBV20-1, TRBJ2-7)
CSARDRVSGMYEQYF

SEQ ID NO: 351803 - protein, 16 aa, Homo sapiens
  CDR3 for alpha chain variable domain of TCR clone 175902 (TRAV12-2, TRAJ6)
CAAPLAGSGGSDIPTF

SEQ ID NO: 351804 - protein, 10 aa, Homo sapiens
  CDR3 for beta chain variable domain of TCR clone 175902 (TRBV28, TRBJ1-2)
CASSSDRAVF

SEQ ID NO: 351805 - protein, 16 aa, Homo sapiens
  CDR3 for alpha chain variable domain of TCR clone 175903 (TRAV4, TRAJ22)
CLVGDLYSGSARQLTF

SEQ ID NO: 351806 - protein, 15 aa, Homo sapiens
  CDR3 for beta chain variable domain of TCR clone 175903 (TRBV25-1, TRBJ1-6)
CASSGDRGLNSPLHF

SEQ ID NO: 351807 - protein, 13 aa, Homo sapiens
  CDR3 for alpha chain variable domain of TCR clone 175904 (TRAV13-1, TRAJ21)
CAASIYNFNKFYF

SEQ ID NO: 351808 - protein, 13 aa, Homo sapiens
  CDR3 for beta chain variable domain of TCR clone 175904 (TRBV27, TRBJ1-4)
CASSLMGDEILFF

SEQ ID NO: 351809 - protein, 14 aa, Homo sapiens
  CDR3 for alpha chain variable domain of TCR clone 175905 (TRAV12-2, TRAJ13)
YAVKKTGGYQKVTF

SEQ ID NO: 351810 - protein, 15 aa, Homo sapiens
  CDR3 for beta chain variable domain of TCR clone 175905 (TRBV27, TRBJ2-1)
CAISNGGGSSNEQFF

SEQ ID NO: 351811 - protein, 14 aa, Homo sapiens
  CDR3 for alpha chain variable domain of TCR clone 175906 (TRAV12-1, TRAJ22)
CVAFSSGSARQLTF

SEQ ID NO: 351812 - protein, 16 aa, Homo sapiens
  CDR3 for beta chain variable domain of TCR clone 175906 (TRBV13, TRBJ2-2)
CASSLGRGYGTGELFF

SEQ ID NO: 351813 - protein, 15 aa, Homo sapiens
  CDR3 for alpha chain variable domain of TCR clone 175907 (TRAV5, TRAJ33)
CAEAPAMDSNYQLIW

SEQ ID NO: 351814 - protein, 13 aa, Homo sapiens
  CDR3 for beta chain variable domain of TCR clone 175907 (TRBV19, TRBJ2-7)
CASSPRQSYEQYF

SEQ ID NO: 351815 - protein, 14 aa, Homo sapiens
  CDR3 for alpha chain variable domain of TCR clone 175908 (TRAV23/DV6, TRAJ50)
CAADMKTSYDKVIF

SEQ ID NO: 351816 - protein, 15 aa, Homo sapiens
  CDR3 for beta chain variable domain of TCR clone 175908 (TRBV7-9, TRBJ2-2)
CASGPLDTFPGELFF

SEQ ID NO: 351817 - protein, 15 aa, Homo sapiens
  CDR3 for alpha chain variable domain of TCR clone 175909 (TRAV12-3, TRAJ6)
CAMSATTGGSYIPTF

SEQ ID NO: 351818 - protein, 12 aa, Homo sapiens
  CDR3 for beta chain variable domain of TCR clone 175909 (TRBV11-2, TRBJ2-5)
CASSLGQETQYF

SEQ ID NO: 351819 - protein, 13 aa, Homo sapiens
  CDR3 for alpha chain variable domain of TCR clone 175910 (TRAV17, TRAJ9)
CATDYTGGFKTIF

SEQ ID NO: 351820 - protein, 15 aa, Homo sapiens
  CDR3 for beta chain variable domain of TCR clone 175910 (TRBV7-9, TRBJ1-1)
CASSLLEQGGTEAFF

SEQ ID NO: 351821 - protein, 12 aa, Homo sapiens
  CDR3 for alpha chain variable domain of TCR clone 175911 (TRAV23/DV6, TRAJ27)
CAASKSAGKSTF

SEQ ID NO: 351822 - protein, 14 aa, Homo sapiens
  CDR3 for beta chain variable domain of TCR clone 175911 (TRBV11-2, TRBJ2-5)
CASRPLAGRETQYF

SEQ ID NO: 351823 - protein, 14 aa, Homo sapiens
  CDR3 for alpha chain variable domain of TCR clone 175912 (TRAV8-4, TRAJ11)
CAVSLNSGYSTLTF

SEQ ID NO: 351824 - protein, 14 aa, Homo sapiens
  CDR3 for beta chain variable domain of TCR clone 175912 (TRBV19, TRBJ2-1)
CSSKDPGLANEQFF

SEQ ID NO: 351825 - protein, 18 aa, Homo sapiens
  CDR3 for alpha chain variable domain of TCR clone 175913 (TRAV1-2, TRAJ10)
CAVRAPTPVTGGGNKLTF

SEQ ID NO: 351826 - protein, 14 aa, Homo sapiens
  CDR3 for beta chain variable domain of TCR clone 175913 (TRBV4-1, TRBJ1-1)
FASSQQGNGNEAFF

SEQ ID NO: 351827 - protein, 13 aa, Homo sapiens
  CDR3 for alpha chain variable domain of TCR clone 175914 (TRAV13-1, TRAJ6)
CAASRGGSYIPPF

SEQ ID NO: 351828 - protein, 15 aa, Homo sapiens
  CDR3 for beta chain variable domain of TCR clone 175914 (TRBV25-1, TRBJ2-5)
CASSDTGTHQETQYF

SEQ ID NO: 351829 - protein, 12 aa, Homo sapiens
  CDR3 for alpha chain variable domain of TCR clone 175915 (TRAV3, TRAJ27)
CAVRDGAGKSTF

SEQ ID NO: 351830 - protein, 13 aa, Homo sapiens
  CDR3 for beta chain variable domain of TCR clone 175915 (TRBV10-3, TRBJ1-2)
CAINADLNYGYSL

SEQ ID NO: 351831 - protein, 14 aa, Homo sapiens
  CDR3 for alpha chain variable domain of TCR clone 175916 (TRAV3, TRAJ34)
CAVRAPGNTDKLIF

SEQ ID NO: 351832 - protein, 17 aa, Homo sapiens
  CDR3 for beta chain variable domain of TCR clone 175916 (TRBV20-1, TRBJ2-7)
CSPAPGLARGISYEQYF

SEQ ID NO: 351833 - protein, 15 aa, Homo sapiens
  CDR3 for alpha chain variable domain of TCR clone 175917 (TRAV26-1, TRAJ12)
IASSELMDSSYKLIF

SEQ ID NO: 351834 - protein, 11 aa, Homo sapiens
  CDR3 for beta chain variable domain of TCR clone 175917 (TRBV7-9, TRBJ2-3)
CTSSPPDTQYF

SEQ ID NO: 351835 - protein, 13 aa, Homo sapiens
  CDR3 for alpha chain variable domain of TCR clone 175918 (TRAV1-2, TRAJ9)
CAALTTGGFKTIF

SEQ ID NO: 351836 - protein, 13 aa, Homo sapiens
  CDR3 for beta chain variable domain of TCR clone 175918 (TRBV4-2, TRBJ1-1)
CASSQAGNTEAFF

SEQ ID NO: 351837 - protein, 10 aa, Homo sapiens
  CDR3 for alpha chain variable domain of TCR clone 175919 (TRAV3, )
CAVRDCLNAG

SEQ ID NO: 351838 - protein, 14 aa, Homo sapiens
  CDR3 for beta chain variable domain of TCR clone 175919 (TRBV5-5, TRBJ1-5)
CASSGQGVDQPQHF

SEQ ID NO: 351839 - protein, 13 aa, Homo sapiens
  CDR3 for alpha chain variable domain of TCR clone 175920 (TRAV12-3, TRAJ33)
CAMSVNSNYQLIW

SEQ ID NO: 351840 - protein, 17 aa, Homo sapiens
  CDR3 for beta chain variable domain of TCR clone 175920 (TRBV25-1, TRBJ2-5)
CASSRRGGRGGQETQYF

SEQ ID NO: 351841 - protein, 16 aa, Homo sapiens
  CDR3 for alpha chain variable domain of TCR clone 175921 (TRAV3, TRAJ10)
CAVRDMNAGGGKKLTF

SEQ ID NO: 351842 - protein, 16 aa, Homo sapiens
  CDR3 for beta chain variable domain of TCR clone 175921 (TRBV6-3, TRBJ1-2)
CASSYSRRASNYGYTF

SEQ ID NO: 351843 - protein, 17 aa, Homo sapiens
  CDR3 for alpha chain variable domain of TCR clone 175922 (TRAV3, TRAJ6)
CAVRDGPRAGGSDIPTF

SEQ ID NO: 351844 - protein, 14 aa, Homo sapiens
  CDR3 for beta chain variable domain of TCR clone 175922 (TRBV7-2, TRBJ2-7)
FASSPKTSFYQQYF

SEQ ID NO: 351845 - protein, 11 aa, Homo sapiens
  CDR3 for alpha chain variable domain of TCR clone 175923 (TRAV26-1, TRAJ37)
CIVRVGRKLIF

SEQ ID NO: 351846 - protein, 14 aa, Homo sapiens
  CDR3 for beta chain variable domain of TCR clone 175923 (TRBV7-9, TRBJ2-1)
CASSDNSGYNEQLF

SEQ ID NO: 351847 - protein, 14 aa, Homo sapiens
  CDR3 for alpha chain variable domain of TCR clone 175924 (TRAV3, TRAJ21)
CAVRDAYNFNKFYF

SEQ ID NO: 351848 - protein, 17 aa, Homo sapiens
  CDR3 for beta chain variable domain of TCR clone 175924 (TRBV20-1, TRBJ1-6)
CSARGGYTFSHNSPLHF

SEQ ID NO: 351849 - protein, 14 aa, Homo sapiens
  CDR3 for alpha chain variable domain of TCR clone 175925 (TRAV8-4, TRAJ15)
CAVSPYQAGTALIF

SEQ ID NO: 351850 - protein, 15 aa, Homo sapiens
  CDR3 for beta chain variable domain of TCR clone 175925 (TRBV27, TRBJ2-3)
CASSSLAGVIDTQYF

SEQ ID NO: 351851 - protein, 21 aa, Homo sapiens
  CDR3 for alpha chain variable domain of TCR clone 175926 (TRAV8-3, TRAJ10)
CAVGHTHGRRKKTHLWDRHSA

SEQ ID NO: 351852 - protein, 10 aa, Homo sapiens
  CDR3 for beta chain variable domain of TCR clone 175926 (TRBV20-1, TRBJ2-5)
CSARFETQYF

SEQ ID NO: 351853 - protein, 13 aa, Homo sapiens
  CDR3 for alpha chain variable domain of TCR clone 175927 (TRAV26-2, TRAJ54)
CIPRVGGAQKLVF

SEQ ID NO: 351854 - protein, 14 aa, Homo sapiens
  CDR3 for beta chain variable domain of TCR clone 175927 (TRBV7-9, TRBJ2-5)
CASSLAPDQETQYF

SEQ ID NO: 351855 - protein, 12 aa, Homo sapiens
  CDR3 for alpha chain variable domain of TCR clone 175928 (TRAV2, TRAJ31)
CAVEDNNARLMF

SEQ ID NO: 351856 - protein, 16 aa, Homo sapiens
  CDR3 for beta chain variable domain of TCR clone 175928 (TRBV7-2, TRBJ2-3)
CASSLVALYSTDTQYF

SEQ ID NO: 351857 - protein, 16 aa, Homo sapiens
  CDR3 for alpha chain variable domain of TCR clone 175929 (TRAV12-3, TRAJ53)
CAMSPGSGGSNHKLTF

SEQ ID NO: 351858 - protein, 15 aa, Homo sapiens
  CDR3 for beta chain variable domain of TCR clone 175929 (TRBV7-2, TRBJ2-1)
CASSSGLAGGNEQFF

SEQ ID NO: 351859 - protein, 10 aa, Homo sapiens
  CDR3 for alpha chain variable domain of TCR clone 175930 (TRAV3, TRAJ30)
CAVREIEIIF

SEQ ID NO: 351860 - protein, 17 aa, Homo sapiens
  CDR3 for beta chain variable domain of TCR clone 175930 (TRBV7-9, TRBJ2-2)
CASSLGVAGMNTGELFF

SEQ ID NO: 351861 - protein, 13 aa, Homo sapiens
  CDR3 for alpha chain variable domain of TCR clone 175931 (TRAV12-1, TRAJ49)
CVVILNTGNQFYF

SEQ ID NO: 351862 - protein, 14 aa, Homo sapiens
  CDR3 for beta chain variable domain of TCR clone 175931 (TRBV19, TRBJ2-1)
CASPTFVLSGEQFF

SEQ ID NO: 351863 - protein, 12 aa, Homo sapiens
  CDR3 for alpha chain variable domain of TCR clone 175932 (TRAV2, TRAJ3)
CAVRSSASKIIF

SEQ ID NO: 351864 - protein, 16 aa, Homo sapiens
  CDR3 for beta chain variable domain of TCR clone 175932 (TRBV13, TRBJ2-2)
CASSPRTGGHTGELFF

SEQ ID NO: 351865 - protein, 16 aa, Homo sapiens
  CDR3 for alpha chain variable domain of TCR clone 175933 (TRAV3, TRAJ37)
CAVRGKGSGNTGKLIF

SEQ ID NO: 351866 - protein, 12 aa, Homo sapiens
  CDR3 for beta chain variable domain of TCR clone 175933 (TRBV7-8, TRBJ2-7)
CASSLSDIGRYF

SEQ ID NO: 351867 - protein, 18 aa, Homo sapiens
  CDR3 for alpha chain variable domain of TCR clone 175934 (TRAV21, TRAJ52)
CAVRPSPAGGTSYGKLTF

SEQ ID NO: 351868 - protein, 15 aa, Homo sapiens
  CDR3 for beta chain variable domain of TCR clone 175934 (TRBV7-9, TRBJ2-7)
CASSSCGLAVYEQYF

SEQ ID NO: 351869 - protein, 11 aa, Homo sapiens
  CDR3 for alpha chain variable domain of TCR clone 175935 (TRAV2, TRAJ20)
AAVYRDCKLSF

SEQ ID NO: 351870 - protein, 13 aa, Homo sapiens
  CDR3 for beta chain variable domain of TCR clone 175935 (TRBV15, TRBJ1-6)
CATSGGLNSPLHF

SEQ ID NO: 351871 - protein, 15 aa, Homo sapiens
  CDR3 for alpha chain variable domain of TCR clone 175936 (TRAV13-1, TRAJ45)
CAASGSGGGADGLTF

SEQ ID NO: 351872 - protein, 14 aa, Homo sapiens
  CDR3 for beta chain variable domain of TCR clone 175936 (TRBV12-4, TRBJ1-2)
CVSSFVGTAYGYTF

SEQ ID NO: 351873 - protein, 12 aa, Homo sapiens
  CDR3 for alpha chain variable domain of TCR clone 175937 (TRAV38-1, TRAJ43)
CAFMTRLADMRF

SEQ ID NO: 351874 - protein, 14 aa, Homo sapiens
  CDR3 for beta chain variable domain of TCR clone 175937 (TRBV27, TRBJ2-2)
CASSLSVVDGRMLF

SEQ ID NO: 351875 - protein, 16 aa, Homo sapiens
  CDR3 for alpha chain variable domain of TCR clone 175938 (TRAV3, TRAJ10)
CAVRDMRAGGGNKLTF

SEQ ID NO: 351876 - protein, 20 aa, Homo sapiens
  CDR3 for beta chain variable domain of TCR clone 175938 (TRBV7-8, TRBJ2-2)
CASSHLFPGPTIHITGELFF

SEQ ID NO: 351877 - protein, 12 aa, Homo sapiens
  CDR3 for alpha chain variable domain of TCR clone 175939 (TRAV12-2, TRAJ10)
WGVTGGGNKLTF

SEQ ID NO: 351878 - protein, 16 aa, Homo sapiens
  CDR3 for beta chain variable domain of TCR clone 175939 (TRBV6-4, TRBJ1-2)
CASSEAVGDPNYGYTF

SEQ ID NO: 351879 - protein, 11 aa, Homo sapiens
  CDR3 for alpha chain variable domain of TCR clone 175940 (TRAV1-2, TRAJ40)
CAVPGTYKYIF

SEQ ID NO: 351880 - protein, 18 aa, Homo sapiens
  CDR3 for beta chain variable domain of TCR clone 175940 (TRBV29-1, TRBJ2-7)
CSVEVGGLAGATSSTSGR

SEQ ID NO: 351881 - protein, 15 aa, Homo sapiens
  CDR3 for alpha chain variable domain of TCR clone 175941 (TRAV2, TRAJ21)
CAVDFTTSTNFTLDL

SEQ ID NO: 351882 - protein, 16 aa, Homo sapiens
  CDR3 for beta chain variable domain of TCR clone 175941 (TRBV12-4, TRBJ1-5)
CASSRPVGGSNQPQHF

SEQ ID NO: 351883 - protein, 15 aa, Homo sapiens
  CDR3 for alpha chain variable domain of TCR clone 175942 (TRAV3, TRAJ9)
CAVRDSNTGCFKTIF

SEQ ID NO: 351884 - protein, 16 aa, Homo sapiens
  CDR3 for beta chain variable domain of TCR clone 175942 (TRBV15, TRBJ2-5)
CATSPTTGQGMGTQYF

SEQ ID NO: 351885 - protein, 13 aa, Homo sapiens
  CDR3 for alpha chain variable domain of TCR clone 175943 (TRAV8-3, TRAJ28)
CAVGAVGSYQLHF

SEQ ID NO: 351886 - protein, 14 aa, Homo sapiens
  CDR3 for beta chain variable domain of TCR clone 175943 (TRBV7-2, TRBJ2-7)
CASRSQGAAYEQYF

SEQ ID NO: 351887 - protein, 16 aa, Homo sapiens
  CDR3 for alpha chain variable domain of TCR clone 175944 (TRAV3, TRAJ37)
CAVRGKGAGNTGKLIF

SEQ ID NO: 351888 - protein, 15 aa, Homo sapiens
  CDR3 for beta chain variable domain of TCR clone 175944 (TRBV7-9, TRBJ2-2)
CASGPLDTFPGELFF

SEQ ID NO: 351889 - protein, 15 aa, Homo sapiens
  CDR3 for alpha chain variable domain of TCR clone 175945 (TRAV12-2, TRAJ53)
CAVNGGGGSNYKLTF

SEQ ID NO: 351890 - protein, 14 aa, Homo sapiens
  CDR3 for beta chain variable domain of TCR clone 175945 (TRBV18, TRBJ2-7)
CAISPRGGAYEQYF

SEQ ID NO: 351891 - protein, 14 aa, Homo sapiens
  CDR3 for alpha chain variable domain of TCR clone 175946 (TRAV8-4, TRAJ38)
CARLNAGNNPKLIW

SEQ ID NO: 351892 - protein, 12 aa, Homo sapiens
  CDR3 for beta chain variable domain of TCR clone 175946 (TRBV6-1, TRBJ2-7)
CASSEPLYEQYF

SEQ ID NO: 351893 - protein, 14 aa, Homo sapiens
  CDR3 for alpha chain variable domain of TCR clone 175947 (TRAV12-1, TRAJ12)
CVVNPMDSSYKLIF

SEQ ID NO: 351894 - protein, 13 aa, Homo sapiens
  CDR3 for beta chain variable domain of TCR clone 175947 (TRBV7-2, TRBJ2-7)
CASSSPSGSEQYF

SEQ ID NO: 351895 - protein, 10 aa, Homo sapiens
  CDR3 for alpha chain variable domain of TCR clone 175948 (TRAV12-2, TRAJ48)
CAVTGEKLTF

SEQ ID NO: 351896 - protein, 17 aa, Homo sapiens
  CDR3 for beta chain variable domain of TCR clone 175948 (TRBV11-1, TRBJ2-7)
CASSLTGSFGLDYEQYF

SEQ ID NO: 351897 - protein, 13 aa, Homo sapiens
  CDR3 for alpha chain variable domain of TCR clone 175949 (TRAV12-1, TRAJ39)
CVVPKRAGNMLTF

SEQ ID NO: 351898 - protein, 17 aa, Homo sapiens
  CDR3 for beta chain variable domain of TCR clone 175949 (TRBV4-1, TRBJ2-5)
CASSQDLTGGPIETQYF

SEQ ID NO: 351899 - protein, 13 aa, Homo sapiens
  CDR3 for alpha chain variable domain of TCR clone 175950 (TRAV23/DV6, TRAJ47)
CAESSQYGNKLVF

SEQ ID NO: 351900 - protein, 15 aa, Homo sapiens
  CDR3 for beta chain variable domain of TCR clone 175950 (TRBV7-3, TRBJ2-1)
CASSLDGNSYNEQFF

SEQ ID NO: 351901 - protein, 14 aa, Homo sapiens
  CDR3 for alpha chain variable domain of TCR clone 175951 (TRAV1-2, TRAJ16)
CAVNRFSDGRKLLF

SEQ ID NO: 351902 - protein, 14 aa, Homo sapiens
  CDR3 for beta chain variable domain of TCR clone 175951 (TRBV7-9, TRBJ2-1)
CASSPRDSLYEQFF

SEQ ID NO: 351903 - protein, 14 aa, Homo sapiens
  CDR3 for alpha chain variable domain of TCR clone 175952 (TRAV1-2, TRAJ8)
CAVREDTGFQKLVF

SEQ ID NO: 351904 - protein, 16 aa, Homo sapiens
  CDR3 for beta chain variable domain of TCR clone 175952 (TRBV7-6, TRBJ2-7)
CASSGGTGALSYEHYF

SEQ ID NO: 351905 - protein, 13 aa, Homo sapiens
  CDR3 for alpha chain variable domain of TCR clone 175953 (TRAV12-1, TRAJ11)
CVVTRGGYSTLTS

SEQ ID NO: 351906 - protein, 13 aa, Homo sapiens
  CDR3 for beta chain variable domain of TCR clone 175953 (TRBV20-1, TRBJ1-2)
CSARDQGAYGYTF

SEQ ID NO: 351907 - protein, 23 aa, Homo sapiens
  CDR3 for alpha chain variable domain of TCR clone 175954 (TRAV8-4, TRAJ38)
CARLNAGNNHIQNPDPAVYQLRD

SEQ ID NO: 351908 - protein, 12 aa, Homo sapiens
  CDR3 for beta chain variable domain of TCR clone 175954 (TRBV6-1, TRBJ2-7)
CTSSEPLYEQYF

SEQ ID NO: 351909 - protein, 15 aa, Homo sapiens
  CDR3 for alpha chain variable domain of TCR clone 175955 (TRAV26-1, TRAJ29)
CIVRVEGSGNTPLAF

SEQ ID NO: 351910 - protein, 15 aa, Homo sapiens
  CDR3 for beta chain variable domain of TCR clone 175955 (TRBV7-9, TRBJ1-5)
CASSQGHQPNQTQHF

SEQ ID NO: 351911 - protein, 15 aa, Homo sapiens
  CDR3 for alpha chain variable domain of TCR clone 175956 (TRAV14/DV4, TRAJ10)
CAMRELTGGGNKLTF

SEQ ID NO: 351912 - protein, 16 aa, Homo sapiens
  CDR3 for beta chain variable domain of TCR clone 175956 (TRBV27, TRBJ2-2)
CASSLRPGGAPGELFF

SEQ ID NO: 351913 - protein, 14 aa, Homo sapiens
  CDR3 for alpha chain variable domain of TCR clone 175957 (TRAV35, TRAJ42)
CCVPYGGSQGNLIF

SEQ ID NO: 351914 - protein, 18 aa, Homo sapiens
  CDR3 for beta chain variable domain of TCR clone 175957 (TRBV13, TRBJ2-6)
CASSPMTSGGSGANVLSF

SEQ ID NO: 351915 - protein, 15 aa, Homo sapiens
  CDR3 for alpha chain variable domain of TCR clone 175958 (TRAV3, TRAJ32)
CALSSYGGATNKLIF

SEQ ID NO: 351916 - protein, 13 aa, Homo sapiens
  CDR3 for beta chain variable domain of TCR clone 175958 (TRBV20-1, TRBJ2-7)
CSARPSTNYEQYF

SEQ ID NO: 351917 - protein, 20 aa, Homo sapiens
  CDR3 for alpha chain variable domain of TCR clone 175959 (TRAV26-1, TRAJ42)
CCVLLHRQTYYGGSQGNLIF

SEQ ID NO: 351918 - protein, 16 aa, Homo sapiens
  CDR3 for beta chain variable domain of TCR clone 175959 (TRBV12-4, TRBJ2-3)
CTSVPAVPPLGGAQYF

SEQ ID NO: 351919 - protein, 15 aa, Homo sapiens
  CDR3 for alpha chain variable domain of TCR clone 175960 (TRAV38-1, TRAJ37)
CAFIFGSGNTGKLIF

SEQ ID NO: 351920 - protein, 15 aa, Homo sapiens
  CDR3 for beta chain variable domain of TCR clone 175960 (TRBV19, TRBJ2-1)
CASNAQGLAGREQFF

SEQ ID NO: 351921 - protein, 14 aa, Homo sapiens
  CDR3 for alpha chain variable domain of TCR clone 175961 (TRAV1-2, TRAJ16)
CAVNRFSDGLKLLF

SEQ ID NO: 351922 - protein, 14 aa, Homo sapiens
  CDR3 for beta chain variable domain of TCR clone 175961 (TRBV19, TRBJ2-1)
CASSKDRGQDEQFF

SEQ ID NO: 351923 - protein, 14 aa, Homo sapiens
  CDR3 for alpha chain variable domain of TCR clone 175962 (TRAV21, TRAJ35)
CAVMPIGFGNVLHC

SEQ ID NO: 351924 - protein, 12 aa, Homo sapiens
  CDR3 for beta chain variable domain of TCR clone 175962 (TRBV28, TRBJ1-2)
CASSRPNYGYTF

SEQ ID NO: 351925 - protein, 14 aa, Homo sapiens
  CDR3 for alpha chain variable domain of TCR clone 175963 (TRAV23/DV6, TRAJ11)
CSASLDSAYSILTF

SEQ ID NO: 351926 - protein, 13 aa, Homo sapiens
  CDR3 for beta chain variable domain of TCR clone 175963 (TRBV4-1, TRBJ2-5)
CASSLTRGETQYF

SEQ ID NO: 351927 - protein, 13 aa, Homo sapiens
  CDR3 for alpha chain variable domain of TCR clone 175964 (TRAV2, TRAJ15)
CAVASQAGTALIF

SEQ ID NO: 351928 - protein, 17 aa, Homo sapiens
  CDR3 for beta chain variable domain of TCR clone 175964 (TRBV20-1, TRBJ2-2)
CSASRSGQGGLTGELFF

SEQ ID NO: 351929 - protein, 13 aa, Homo sapiens
  CDR3 for alpha chain variable domain of TCR clone 175965 (TRAV12-1, TRAJ34)
CVVTGYNTDKLIF

SEQ ID NO: 351930 - protein, 15 aa, Homo sapiens
  CDR3 for beta chain variable domain of TCR clone 175965 (TRBV5-1, TRBJ2-1)
CASSPPRAPYNEQFF

SEQ ID NO: 351931 - protein, 13 aa, Homo sapiens
  CDR3 for alpha chain variable domain of TCR clone 175966 (TRAV13-1, TRAJ39)
CSKYSNAGNVLTF

SEQ ID NO: 351932 - protein, 16 aa, Homo sapiens
  CDR3 for beta chain variable domain of TCR clone 175966 (TRBV20-1, TRBJ1-4)
CSAPGQGLLTNEKLFF

SEQ ID NO: 351933 - protein, 12 aa, Homo sapiens
  CDR3 for alpha chain variable domain of TCR clone 175967 (TRAV9-2, TRAJ48)
CALTKGNEKLTF

SEQ ID NO: 351934 - protein, 14 aa, Homo sapiens
  CDR3 for beta chain variable domain of TCR clone 175967 (TRBV5-1, TRBJ2-7)
CASSLVRGSGEQYF

SEQ ID NO: 351935 - protein, 17 aa, Homo sapiens
  CDR3 for alpha chain variable domain of TCR clone 175968 (TRAV3, TRAJ42)
CAVRDRDYGGSQGNLIF

SEQ ID NO: 351936 - protein, 14 aa, Homo sapiens
  CDR3 for beta chain variable domain of TCR clone 175968 (TRBV28, TRBJ2-1)
CASSIQGTVGEQFF

SEQ ID NO: 351937 - protein, 14 aa, Homo sapiens
  CDR3 for alpha chain variable domain of TCR clone 175969 (TRAV35, TRAJ13)
CAGSPSGGYEKVTF

SEQ ID NO: 351938 - protein, 16 aa, Homo sapiens
  CDR3 for beta chain variable domain of TCR clone 175969 (TRBV7-8, TRBJ2-4)
CASSAERTLAKNIQYF

SEQ ID NO: 351939 - protein, 16 aa, Homo sapiens
  CDR3 for alpha chain variable domain of TCR clone 175970 (TRAV27, TRAJ13)
CAGAKSDSGGDQKVTF

SEQ ID NO: 351940 - protein, 14 aa, Homo sapiens
  CDR3 for beta chain variable domain of TCR clone 175970 (TRBV25-1, TRBJ1-1)
CASTHLGGNTEAFF

SEQ ID NO: 351941 - protein, 14 aa, Homo sapiens
  CDR3 for alpha chain variable domain of TCR clone 175971 (TRAV13-1, TRAJ35)
CAASKGGFGNVMHF

SEQ ID NO: 351942 - protein, 13 aa, Homo sapiens
  CDR3 for beta chain variable domain of TCR clone 175971 (TRBV7-3, TRBJ1-1)
CASSQDWGAEAFF

SEQ ID NO: 351943 - protein, 13 aa, Homo sapiens
  CDR3 for alpha chain variable domain of TCR clone 175972 (TRAV13-1, TRAJ33)
CAASRAGNYQLIW

SEQ ID NO: 351944 - protein, 12 aa, Homo sapiens
  CDR3 for beta chain variable domain of TCR clone 175972 (TRBV5-1, TRBJ2-7)
CASSFRGYEQYF

SEQ ID NO: 351945 - protein, 14 aa, Homo sapiens
  CDR3 for alpha chain variable domain of TCR clone 175973 (TRAV12-2, TRAJ13)
CAVQKTGGYQKVTF

SEQ ID NO: 351946 - protein, 16 aa, Homo sapiens
  CDR3 for beta chain variable domain of TCR clone 175973 (TRBV2, TRBJ2-1)
CASRSPAGGKYNEQFF

SEQ ID NO: 351947 - protein, 23 aa, Homo sapiens
  CDR3 for alpha chain variable domain of TCR clone 175974 (TRAV1-1, TRAJ11)
LLQELQMKDSAPYFCAGYSTLTF

SEQ ID NO: 351948 - protein, 15 aa, Homo sapiens
  CDR3 for beta chain variable domain of TCR clone 175974 (TRBV6-5, TRBJ2-1)
CASRGDFDSYNEQFF

SEQ ID NO: 351949 - protein, 12 aa, Homo sapiens
  CDR3 for alpha chain variable domain of TCR clone 175975 (TRAV29/DV5, TRAJ34)
CAARHNTDKLIF

SEQ ID NO: 351950 - protein, 14 aa, Homo sapiens
  CDR3 for beta chain variable domain of TCR clone 175975 (TRBV7-9, TRBJ2-7)
CASSLDRPTDEQYF

SEQ ID NO: 351951 - protein, 14 aa, Homo sapiens
  CDR3 for alpha chain variable domain of TCR clone 175976 (TRAV1-2, TRAJ16)
CAGNRFSDGQKLLF

SEQ ID NO: 351952 - protein, 16 aa, Homo sapiens
  CDR3 for beta chain variable domain of TCR clone 175976 (TRBV19, TRBJ2-1)
CASSKAGPSSYNEQFF

SEQ ID NO: 351953 - protein, 12 aa, Homo sapiens
  CDR3 for alpha chain variable domain of TCR clone 175977 (TRAV25, TRAJ7)
CAGSYGNNRLAF

SEQ ID NO: 351954 - protein, 13 aa, Homo sapiens
  CDR3 for beta chain variable domain of TCR clone 175977 (TRBV19, TRBJ1-1)
CASSGQVNTEAFF

SEQ ID NO: 351955 - protein, 15 aa, Homo sapiens
  CDR3 for alpha chain variable domain of TCR clone 175978 (TRAV8-3, TRAJ45)
CASSYSVGGADGLTF

SEQ ID NO: 351956 - protein, 15 aa, Homo sapiens
  CDR3 for beta chain variable domain of TCR clone 175978 (TRBV27, TRBJ1-4)
CASSPRHATNEKLFF

SEQ ID NO: 351957 - protein, 13 aa, Homo sapiens
  CDR3 for alpha chain variable domain of TCR clone 175979 (TRAV27, TRAJ41)
CAGEGNSGYALNF

SEQ ID NO: 351958 - protein, 16 aa, Homo sapiens
  CDR3 for beta chain variable domain of TCR clone 175979 (TRBV27, TRBJ2-2)
CASSSDRGTGTGELFF

SEQ ID NO: 351959 - protein, 14 aa, Homo sapiens
  CDR3 for alpha chain variable domain of TCR clone 175980 (TRAV14/DV4, TRAJ32)
SNVLPLTPTNKLIF

SEQ ID NO: 351960 - protein, 17 aa, Homo sapiens
  CDR3 for beta chain variable domain of TCR clone 175980 (TRBV7-3, TRBJ2-5)
CASSLGSGRSGSETQYF

SEQ ID NO: 351961 - protein, 14 aa, Homo sapiens
  CDR3 for alpha chain variable domain of TCR clone 175981 (TRAV1-2, TRAJ16)
CAVNRFSDGQKLLF

SEQ ID NO: 351962 - protein, 11 aa, Homo sapiens
  CDR3 for beta chain variable domain of TCR clone 175981 (TRBV12-4, TRBJ2-3)
CASTATDRQYF

SEQ ID NO: 351963 - protein, 14 aa, Homo sapiens
  CDR3 for alpha chain variable domain of TCR clone 175982 (TRAV35, TRAJ22)
CAGHLSGSARQLTF

SEQ ID NO: 351964 - protein, 15 aa, Homo sapiens
  CDR3 for beta chain variable domain of TCR clone 175982 (TRBV7-3, TRBJ1-6)
CARSLGRGAGSPLHF

SEQ ID NO: 351965 - protein, 14 aa, Homo sapiens
  CDR3 for alpha chain variable domain of TCR clone 175983 (TRAV1-2, TRAJ16)
CAVNRFSDGQKLLF

SEQ ID NO: 351966 - protein, 13 aa, Homo sapiens
  CDR3 for beta chain variable domain of TCR clone 175983 (TRBV5-5, TRBJ1-2)
CASSCWRGEDYTF

SEQ ID NO: 351967 - protein, 15 aa, Homo sapiens
  CDR3 for alpha chain variable domain of TCR clone 175984 (TRAV4, TRAJ27)
CLVGDEGTNAGKSTF

SEQ ID NO: 351968 - protein, 17 aa, Homo sapiens
  CDR3 for beta chain variable domain of TCR clone 175984 (TRBV6-3, TRBJ2-1)
CASSYSSGTRGLDEQFF

SEQ ID NO: 351969 - protein, 13 aa, Homo sapiens
  CDR3 for alpha chain variable domain of TCR clone 175985 (TRAV13-1, TRAJ49)
CAASVLRGNQFYF

SEQ ID NO: 351970 - protein, 14 aa, Homo sapiens
  CDR3 for beta chain variable domain of TCR clone 175985 (TRBV7-2, TRBJ2-7)
CASSPKTSFYEQYF

SEQ ID NO: 351971 - protein, 16 aa, Homo sapiens
  CDR3 for alpha chain variable domain of TCR clone 175986 (TRAV27, TRAJ13)
CAGAKSDSGGYQKVTF

SEQ ID NO: 351972 - protein, 13 aa, Homo sapiens
  CDR3 for beta chain variable domain of TCR clone 175986 (TRBV7-8, TRBJ2-7)
CASSLTGGREQYF

SEQ ID NO: 351973 - protein, 12 aa, Homo sapiens
  CDR3 for alpha chain variable domain of TCR clone 175987 (TRAV17, TRAJ16)
CATVLPGQKLLF

SEQ ID NO: 351974 - protein, 16 aa, Homo sapiens
  CDR3 for beta chain variable domain of TCR clone 175987 (TRBV6-1, TRBJ2-5)
CASSETLDRGAETQYF

SEQ ID NO: 351975 - protein, 15 aa, Homo sapiens
  CDR3 for alpha chain variable domain of TCR clone 175988 (TRAV8-3, TRAJ41)
CAVGSNSNSGYALKF

SEQ ID NO: 351976 - protein, 13 aa, Homo sapiens
  CDR3 for beta chain variable domain of TCR clone 175988 (TRBV20-1, TRBJ2-3)
CSAIYPGADTQYF

SEQ ID NO: 351977 - protein, 14 aa, Homo sapiens
  CDR3 for alpha chain variable domain of TCR clone 175989 (TRAV21, TRAJ52)
CGRAGCTSYGKLTF

SEQ ID NO: 351978 - protein, 14 aa, Homo sapiens
  CDR3 for beta chain variable domain of TCR clone 175989 (TRBV19, TRBJ1-2)
CASSVLGYNYGYTF

SEQ ID NO: 351979 - protein, 16 aa, Homo sapiens
  CDR3 for alpha chain variable domain of TCR clone 175990 (TRAV14/DV4, TRAJ53)
CAMREGGGGSNYKLTF

SEQ ID NO: 351980 - protein, 15 aa, Homo sapiens
  CDR3 for beta chain variable domain of TCR clone 175990 (TRBV27, TRBJ1-6)
CASSFDRGLGSPLHF

SEQ ID NO: 351981 - protein, 15 aa, Homo sapiens
  CDR3 for alpha chain variable domain of TCR clone 175991 (TRAV12-1, TRAJ4)
CVVNPVSGGYNKLIF

SEQ ID NO: 351982 - protein, 13 aa, Homo sapiens
  CDR3 for beta chain variable domain of TCR clone 175991 (TRBV20-1, TRBJ1-2)
CSARGTADYGYTF

SEQ ID NO: 351983 - protein, 15 aa, Homo sapiens
  CDR3 for alpha chain variable domain of TCR clone 175992 (TRAV3, TRAJ5)
CAVRDLDTGRRALTF

SEQ ID NO: 351984 - protein, 15 aa, Homo sapiens
  CDR3 for beta chain variable domain of TCR clone 175992 (TRBV20-1, TRBJ2-1)
CSARSPGGPGNEKFF

SEQ ID NO: 351985 - protein, 11 aa, Homo sapiens
  CDR3 for alpha chain variable domain of TCR clone 175993 (TRAV13-1, TRAJ5)
CAPKGRRALTF

SEQ ID NO: 351986 - protein, 12 aa, Homo sapiens
  CDR3 for beta chain variable domain of TCR clone 175993 (TRBV11-2, TRBJ2-1)
CASSPGNNEQFF

SEQ ID NO: 351987 - protein, 11 aa, Homo sapiens
  CDR3 for alpha chain variable domain of TCR clone 175994 (TRAV13-1, TRAJ48)
CSKLWNEKLTF

SEQ ID NO: 351988 - protein, 16 aa, Homo sapiens
  CDR3 for beta chain variable domain of TCR clone 175994 (TRBV19, TRBJ2-2)
CASRSPGTGATGELFF

SEQ ID NO: 351989 - protein, 19 aa, Homo sapiens
  CDR3 for alpha chain variable domain of TCR clone 175995 (TRAV12-3, TRAJ40)
SPVIQPPTSVQDRTYKYIF

SEQ ID NO: 351990 - protein, 14 aa, Homo sapiens
  CDR3 for beta chain variable domain of TCR clone 175995 (TRBV7-2, TRBJ2-7)
CASRSQGAAYEQYF

SEQ ID NO: 351991 - protein, 15 aa, Homo sapiens
  CDR3 for alpha chain variable domain of TCR clone 175996 (TRAV12-3, TRAJ6)
CAMSATTGGSYIPTF

SEQ ID NO: 351992 - protein, 18 aa, Homo sapiens
  CDR3 for beta chain variable domain of TCR clone 175996 (TRBV7-9, TRBJ2-7)
CASSLTTSGSRTWYEQYF

SEQ ID NO: 351993 - protein, 14 aa, Homo sapiens
  CDR3 for alpha chain variable domain of TCR clone 175997 (TRAV23/DV6, TRAJ37)
CAASTSSNTGKLIF

SEQ ID NO: 351994 - protein, 17 aa, Homo sapiens
  CDR3 for beta chain variable domain of TCR clone 175997 (TRBV13, TRBJ2-3)
WASSLSRVAGGRNTQYF

SEQ ID NO: 351995 - protein, 10 aa, Homo sapiens
  CDR3 for alpha chain variable domain of TCR clone 175998 (TRAV30, TRAJ48)
CGMGNEKLTL

SEQ ID NO: 351996 - protein, 14 aa, Homo sapiens
  CDR3 for beta chain variable domain of TCR clone 175998 (TRBV7-6, TRBJ2-3)
CASSVAGGTDTQYF

SEQ ID NO: 351997 - protein, 11 aa, Homo sapiens
  CDR3 for alpha chain variable domain of TCR clone 175999 (TRAV21, TRAJ48)
CAVDGNEKLTF

SEQ ID NO: 351998 - protein, 16 aa, Homo sapiens
  CDR3 for beta chain variable domain of TCR clone 175999 (TRBV19, TRBJ2-1)
CASSSKGTRSYNEQFF

SEQ ID NO: 351999 - protein, 22 aa, Homo sapiens
  CDR3 for alpha chain variable domain of TCR clone 176000 (TRAV27, TRAJ38)
CAARRNAGNNPNQNPYPAAYQL

SEQ ID NO: 352000 - protein, 13 aa, Homo sapiens
  CDR3 for beta chain variable domain of TCR clone 176000 (TRBV12-5, TRBJ2-3)
CASGDRQSDTQYF

SEQ ID NO: 352001 - protein, 21 aa, Homo sapiens
  CDR3 for alpha chain variable domain of TCR clone 176001 (TRAV38-1, TRAJ28)
CDVFLCFHEAHIWAGSYKLTF

SEQ ID NO: 352002 - protein, 15 aa, Homo sapiens
  CDR3 for beta chain variable domain of TCR clone 176001 (TRBV5-1, TRBJ2-4)
CASSLGGGGSYIQYF

SEQ ID NO: 352003 - protein, 11 aa, Homo sapiens
  CDR3 for alpha chain variable domain of TCR clone 176002 (TRAV1-1, TRAJ23)
CAVRQGGKLIC

SEQ ID NO: 352004 - protein, 20 aa, Homo sapiens
  CDR3 for beta chain variable domain of TCR clone 176002 (TRBV7-8, TRBJ2-2)
CASSHLFPGPTIHITGELFL

SEQ ID NO: 352005 - protein, 14 aa, Homo sapiens
  CDR3 for alpha chain variable domain of TCR clone 176003 (TRAV12-2, TRAJ13)
CAVKKTGGYQKVPF

SEQ ID NO: 352006 - protein, 15 aa, Homo sapiens
  CDR3 for beta chain variable domain of TCR clone 176003 (TRBV27, TRBJ2-1)
CASSNGGGSANEQFF

SEQ ID NO: 352007 - protein, 17 aa, Homo sapiens
  CDR3 for alpha chain variable domain of TCR clone 176004 (TRAV3, TRAJ6)
CAVRRPQGRRKLHTYIL

SEQ ID NO: 352008 - protein, 14 aa, Homo sapiens
  CDR3 for beta chain variable domain of TCR clone 176004 (TRBV7-2, TRBJ2-7)
CASSPKTSFYEQYF

SEQ ID NO: 352009 - protein, 10 aa, Homo sapiens
  CDR3 for alpha chain variable domain of TCR clone 176005 (TRAV13-1, TRAJ41)
CAASGPRRTQ

SEQ ID NO: 352010 - protein, 21 aa, Homo sapiens
  CDR3 for beta chain variable domain of TCR clone 176005 (TRBV18, TRBJ2-3)
CASSPPAGGPRKYAVFWSRHP

SEQ ID NO: 352011 - protein, 10 aa, Homo sapiens
  CDR3 for alpha chain variable domain of TCR clone 176006 (TRAV8-4, TRAJ43)
CAVSADDMRF

SEQ ID NO: 352012 - protein, 12 aa, Homo sapiens
  CDR3 for beta chain variable domain of TCR clone 176006 (TRBV14, TRBJ2-5)
CASSQLKETQYF

SEQ ID NO: 352013 - protein, 11 aa, Homo sapiens
  CDR3 for alpha chain variable domain of TCR clone 176007 (TRAV13-1, TRAJ49)
CACVGGNQFYF

SEQ ID NO: 352014 - protein, 14 aa, Homo sapiens
  CDR3 for beta chain variable domain of TCR clone 176007 (TRBV15, TRBJ2-3)
CATRSGTSTDTQYF

SEQ ID NO: 352015 - protein, 14 aa, Homo sapiens
  CDR3 for alpha chain variable domain of TCR clone 176008 (TRAV17, TRAJ16)
CATADFSDGQKVLF

SEQ ID NO: 352016 - protein, 12 aa, Homo sapiens
  CDR3 for beta chain variable domain of TCR clone 176008 (TRBV24-1, TRBJ1-1)
CATLYPDTEAFF

SEQ ID NO: 352017 - protein, 14 aa, Homo sapiens
  CDR3 for alpha chain variable domain of TCR clone 176009 (TRAV25, TRAJ35)
CARRMEGFGNVLHC

SEQ ID NO: 352018 - protein, 15 aa, Homo sapiens
  CDR3 for beta chain variable domain of TCR clone 176009 (TRBV7-9, TRBJ1-4)
CASSRTGGFNEKLFF

SEQ ID NO: 352019 - protein, 13 aa, Homo sapiens
  CDR3 for alpha chain variable domain of TCR clone 176010 (TRAV1-2, TRAJ9)
CAALNTGGFKTIF

SEQ ID NO: 352020 - protein, 14 aa, Homo sapiens
  CDR3 for beta chain variable domain of TCR clone 176010 (TRBV13, TRBJ2-5)
CASSLERVGDTQYF

SEQ ID NO: 352021 - protein, 22 aa, Homo sapiens
  CDR3 for alpha chain variable domain of TCR clone 176011 (TRAV27, TRAJ38)
CAARRNAGNNHIQNPDPAVYQL

SEQ ID NO: 352022 - protein, 13 aa, Homo sapiens
  CDR3 for beta chain variable domain of TCR clone 176011 (TRBV12-5, TRBJ2-3)
CASGDRQSDTQYS

SEQ ID NO: 352023 - protein, 14 aa, Homo sapiens
  CDR3 for alpha chain variable domain of TCR clone 176012 (TRAV14/DV4, TRAJ26)
CAMREGTYGQNFVF

SEQ ID NO: 352024 - protein, 15 aa, Homo sapiens
  CDR3 for beta chain variable domain of TCR clone 176012 (TRBV19, TRBJ2-1)
CASSSPGVPLDEQFF

SEQ ID NO: 352025 - protein, 14 aa, Homo sapiens
  CDR3 for alpha chain variable domain of TCR clone 176013 (TRAV8-3, TRAJ4)
CAVGAAGGYNKLIF

SEQ ID NO: 352026 - protein, 23 aa, Homo sapiens
  CDR3 for beta chain variable domain of TCR clone 176013 (TRBV4-2, TRBJ2-3)
CASSQDPPRASSISGGRGDTQYF

SEQ ID NO: 352027 - protein, 14 aa, Homo sapiens
  CDR3 for alpha chain variable domain of TCR clone 176014 (TRAV12-2, TRAJ45)
CAVNNGGGADGLTF

SEQ ID NO: 352028 - protein, 13 aa, Homo sapiens
  CDR3 for beta chain variable domain of TCR clone 176014 (TRBV19, TRBJ2-2)
CASSIWSTGELFF

SEQ ID NO: 352029 - protein, 15 aa, Homo sapiens
  CDR3 for alpha chain variable domain of TCR clone 176015 (TRAV4, TRAJ10)
CLVGDGSGGGYKLTF

SEQ ID NO: 352030 - protein, 15 aa, Homo sapiens
  CDR3 for beta chain variable domain of TCR clone 176015 (TRBV27, TRBJ2-3)
CASSSLAGVIDTQYF

SEQ ID NO: 352031 - protein, 13 aa, Homo sapiens
  CDR3 for alpha chain variable domain of TCR clone 176016 (TRAV21, TRAJ23)
CAVSYNQVGKLSF

SEQ ID NO: 352032 - protein, 14 aa, Homo sapiens
  CDR3 for beta chain variable domain of TCR clone 176016 (TRBV7-2, TRBJ2-3)
CASSLTSGTDTQYF

SEQ ID NO: 352033 - protein, 13 aa, Homo sapiens
  CDR3 for alpha chain variable domain of TCR clone 176017 (TRAV16, TRAJ28)
CAPTGAGSYQLTF

SEQ ID NO: 352034 - protein, 16 aa, Homo sapiens
  CDR3 for beta chain variable domain of TCR clone 176017 (TRBV28, TRBJ1-5)
CASSLTGHGWNQPQHF

SEQ ID NO: 352035 - protein, 14 aa, Homo sapiens
  CDR3 for alpha chain variable domain of TCR clone 176018 (TRAV12-3, TRAJ29)
CAMSFYSGNTPLVF

SEQ ID NO: 352036 - protein, 14 aa, Homo sapiens
  CDR3 for beta chain variable domain of TCR clone 176018 (TRBV20-1, TRBJ1-1)
CSAQTRIGGTEAFF

SEQ ID NO: 352037 - protein, 14 aa, Homo sapiens
  CDR3 for alpha chain variable domain of TCR clone 176019 (TRAV12-3, TRAJ5)
CAMSTYPGRRALTF

SEQ ID NO: 352038 - protein, 13 aa, Homo sapiens
  CDR3 for beta chain variable domain of TCR clone 176019 (TRBV28, TRBJ2-3)
CASSTGGGDTQYF

SEQ ID NO: 352039 - protein, 15 aa, Homo sapiens
  CDR3 for alpha chain variable domain of TCR clone 176020 (TRAV2, TRAJ9)
CAMEDRGTGGFKTTF

SEQ ID NO: 352040 - protein, 12 aa, Homo sapiens
  CDR3 for beta chain variable domain of TCR clone 176020 (TRBV7-3, TRBJ2-1)
CASSSRGNEQFF

SEQ ID NO: 352041 - protein, 11 aa, Homo sapiens
  CDR3 for alpha chain variable domain of TCR clone 176021 (TRAV2, TRAJ13)
CASGGYQKVTF

SEQ ID NO: 352042 - protein, 19 aa, Homo sapiens
  CDR3 for beta chain variable domain of TCR clone 176021 (TRBV4-3, TRBJ2-7)
CASSQEFIGWQVTPYEQYF

SEQ ID NO: 352043 - protein, 13 aa, Homo sapiens
  CDR3 for alpha chain variable domain of TCR clone 176022 (TRAV26-1, TRAJ29)
CIVRRSGNTPLVF

SEQ ID NO: 352044 - protein, 14 aa, Homo sapiens
  CDR3 for beta chain variable domain of TCR clone 176022 (TRBV4-3, TRBJ1-5)
CASSQGGQGWPQHF

SEQ ID NO: 352045 - protein, 12 aa, Homo sapiens
  CDR3 for alpha chain variable domain of TCR clone 176023 (TRAV27, TRAJ34)
CAGAKNTDKLIF

SEQ ID NO: 352046 - protein, 15 aa, Homo sapiens
  CDR3 for beta chain variable domain of TCR clone 176023 (TRBV5-7, TRBJ2-1)
CASSFLAGVGNEQFF

SEQ ID NO: 352047 - protein, 11 aa, Homo sapiens
  CDR3 for alpha chain variable domain of TCR clone 176024 (TRAV35, TRAJ30)
CAGPGDDKIIF

SEQ ID NO: 352048 - protein, 16 aa, Homo sapiens
  CDR3 for beta chain variable domain of TCR clone 176024 (TRBV12-4, TRBJ2-5)
CASSFFVRGRQETQYF

SEQ ID NO: 352049 - protein, 12 aa, Homo sapiens
  CDR3 for alpha chain variable domain of TCR clone 176025 (TRAV26-1, TRAJ40)
CSTTSGTYKYIF

SEQ ID NO: 352050 - protein, 14 aa, Homo sapiens
  CDR3 for beta chain variable domain of TCR clone 176025 (TRBV24-1, TRBJ1-1)
CATRPTQGVTEAFF

SEQ ID NO: 352051 - protein, 15 aa, Homo sapiens
  CDR3 for alpha chain variable domain of TCR clone 176026 (TRAV26-1, TRAJ44)
CIVRANTGTASKLTF

SEQ ID NO: 352052 - protein, 14 aa, Homo sapiens
  CDR3 for beta chain variable domain of TCR clone 176026 (TRBV12-5, TRBJ2-5)
CASGSRTHQETQYF

SEQ ID NO: 352053 - protein, 14 aa, Homo sapiens
  CDR3 for alpha chain variable domain of TCR clone 176027 (TRAV30, TRAJ33)
CGTVAPRSNYQLIW

SEQ ID NO: 352054 - protein, 16 aa, Homo sapiens
  CDR3 for beta chain variable domain of TCR clone 176027 (TRBV3-1, TRBJ2-5)
RASSPGQFNGFGTQYF

SEQ ID NO: 352055 - protein, 16 aa, Homo sapiens
  CDR3 for alpha chain variable domain of TCR clone 176028 (TRAV30, TRAJ24)
CGTEIVDTDSWGKFQF

SEQ ID NO: 352056 - protein, 16 aa, Homo sapiens
  CDR3 for beta chain variable domain of TCR clone 176028 (TRBV7-3, TRBJ2-2)
CASSLKRGTLSGELFF

SEQ ID NO: 352057 - protein, 12 aa, Homo sapiens
  CDR3 for alpha chain variable domain of TCR clone 176029 (TRAV3, TRAJ31)
CAVRDGNARLMF

SEQ ID NO: 352058 - protein, 17 aa, Homo sapiens
  CDR3 for beta chain variable domain of TCR clone 176029 (TRBV4-1, TRBJ1-4)
CASSQEGPRGVEEKLFF

SEQ ID NO: 352059 - protein, 14 aa, Homo sapiens
  CDR3 for alpha chain variable domain of TCR clone 176030 (TRAV12-3, TRAJ13)
CAMKNTGGYQKVTF

SEQ ID NO: 352060 - protein, 13 aa, Homo sapiens
  CDR3 for beta chain variable domain of TCR clone 176030 (TRBV29-1, TRBJ2-5)
CSARDRVEETQYF

SEQ ID NO: 352061 - protein, 14 aa, Homo sapiens
  CDR3 for alpha chain variable domain of TCR clone 176031 (TRAV17, TRAJ16)
CATAAFSDGQKLLS

SEQ ID NO: 352062 - protein, 15 aa, Homo sapiens
  CDR3 for beta chain variable domain of TCR clone 176031 (TRBV18, TRBJ2-1)
CASSPPSASYNEQFF

SEQ ID NO: 352063 - protein, 13 aa, Homo sapiens
  CDR3 for alpha chain variable domain of TCR clone 176032 (TRAV8-2, TRAJ49)
CVVTPNTGNQFFF

SEQ ID NO: 352064 - protein, 15 aa, Homo sapiens
  CDR3 for beta chain variable domain of TCR clone 176032 (TRBV11-2, TRBJ2-1)
CASSLTSGGYNEQFF

SEQ ID NO: 352065 - protein, 13 aa, Homo sapiens
  CDR3 for alpha chain variable domain of TCR clone 176033 (TRAV36/DV7, TRAJ37)
CAVFSSNTGKLIF

SEQ ID NO: 352066 - protein, 12 aa, Homo sapiens
  CDR3 for beta chain variable domain of TCR clone 176033 (TRBV11-2, TRBJ2-2)
CASSLGGGELFS

SEQ ID NO: 352067 - protein, 14 aa, Homo sapiens
  CDR3 for alpha chain variable domain of TCR clone 176034 (TRAV12-3, TRAJ54)
CAMRGIQGAQKLVI

SEQ ID NO: 352068 - protein, 13 aa, Homo sapiens
  CDR3 for beta chain variable domain of TCR clone 176034 (TRBV19, TRBJ1-1)
CASSPSNGGEAFF

SEQ ID NO: 352069 - protein, 14 aa, Homo sapiens
  CDR3 for alpha chain variable domain of TCR clone 176035 (TRAV12-3, TRAJ10)
SHLPLTGGGNKLTF

SEQ ID NO: 352070 - protein, 15 aa, Homo sapiens
  CDR3 for beta chain variable domain of TCR clone 176035 (TRBV6-6, TRBJ1-5)
CASSSIQGTNQHQNF

SEQ ID NO: 352071 - protein, 14 aa, Homo sapiens
  CDR3 for alpha chain variable domain of TCR clone 176036 (TRAV13-1, TRAJ9)
CAASALTGGFKTIF

SEQ ID NO: 352072 - protein, 12 aa, Homo sapiens
  CDR3 for beta chain variable domain of TCR clone 176036 (TRBV6-3, TRBJ2-3)
CASSYSTDTQYF

SEQ ID NO: 352073 - protein, 14 aa, Homo sapiens
  CDR3 for alpha chain variable domain of TCR clone 176037 (TRAV35, TRAJ40)
CAGSTTSGTYKYIF

SEQ ID NO: 352074 - protein, 13 aa, Homo sapiens
  CDR3 for beta chain variable domain of TCR clone 176037 (TRBV20-1, TRBJ1-6)
CSAPLVVGSPLHF

SEQ ID NO: 352075 - protein, 20 aa, Homo sapiens
  CDR3 for alpha chain variable domain of TCR clone 176038 (TRAV21, TRAJ30)
CAVRRRMTRSSLEKGHDFIF

SEQ ID NO: 352076 - protein, 12 aa, Homo sapiens
  CDR3 for beta chain variable domain of TCR clone 176038 (TRBV11-2, TRBJ2-2)
CTSSLGGGELFF

SEQ ID NO: 352077 - protein, 19 aa, Homo sapiens
  CDR3 for alpha chain variable domain of TCR clone 176039 (TRAV2, TRAJ20)
ILQVREADAAVYRDCKLSF

SEQ ID NO: 352078 - protein, 12 aa, Homo sapiens
  CDR3 for beta chain variable domain of TCR clone 176039 (TRBV11-2, TRBJ2-1)
CASSPGNNEQYF

SEQ ID NO: 352079 - protein, 15 aa, Homo sapiens
  CDR3 for alpha chain variable domain of TCR clone 176040 (TRAV13-2, TRAJ10)
CAENRDTGGGNKLTF

SEQ ID NO: 352080 - protein, 14 aa, Homo sapiens
  CDR3 for beta chain variable domain of TCR clone 176040 (TRBV7-9, TRBJ2-2)
CASSLVQDTGELFF

SEQ ID NO: 352081 - protein, 16 aa, Homo sapiens
  CDR3 for alpha chain variable domain of TCR clone 176041 (TRAV30, TRAJ24)
CGTEIVDADSWGKFKF

SEQ ID NO: 352082 - protein, 15 aa, Homo sapiens
  CDR3 for beta chain variable domain of TCR clone 176041 (TRBV12-4, TRBJ2-7)
CASSQRTSGNYEQYL

SEQ ID NO: 352083 - protein, 15 aa, Homo sapiens
  CDR3 for alpha chain variable domain of TCR clone 176042 (TRAV34, TRAJ38)
CGADFTPGNIRKLIW

SEQ ID NO: 352084 - protein, 16 aa, Homo sapiens
  CDR3 for beta chain variable domain of TCR clone 176042 (TRBV12-5, TRBJ2-5)
CASGPRTSGNQETQYF

SEQ ID NO: 352085 - protein, 14 aa, Homo sapiens
  CDR3 for alpha chain variable domain of TCR clone 176043 (TRAV27, TRAJ15)
CAGFYNQAGTALIF

SEQ ID NO: 352086 - protein, 11 aa, Homo sapiens
  CDR3 for beta chain variable domain of TCR clone 176043 (TRBV29-1, TRBJ1-1)
CSVEVGTRTFF

SEQ ID NO: 352087 - protein, 14 aa, Homo sapiens
  CDR3 for alpha chain variable domain of TCR clone 176044 (TRAV26-1, TRAJ38)
CIADTAGNNRKLIW

SEQ ID NO: 352088 - protein, 14 aa, Homo sapiens
  CDR3 for beta chain variable domain of TCR clone 176044 (TRBV11-2, TRBJ2-5)
CASSRTGGIETQYF

SEQ ID NO: 352089 - protein, 14 aa, Homo sapiens
  CDR3 for alpha chain variable domain of TCR clone 176045 (TRAV17, TRAJ57)
CATDPQGGSEKLVF

SEQ ID NO: 352090 - protein, 15 aa, Homo sapiens
  CDR3 for beta chain variable domain of TCR clone 176045 (TRBV20-1, TRBJ2-1)
CSARVGGVGVLEQFF

SEQ ID NO: 352091 - protein, 15 aa, Homo sapiens
  CDR3 for alpha chain variable domain of TCR clone 176046 (TRAV8-2, TRAJ17)
CVVSPFKAAGNKLTF

SEQ ID NO: 352092 - protein, 13 aa, Homo sapiens
  CDR3 for beta chain variable domain of TCR clone 176046 (TRBV11-3, TRBJ2-3)
CASRETGRDTQYF

SEQ ID NO: 352093 - protein, 14 aa, Homo sapiens
  CDR3 for alpha chain variable domain of TCR clone 176047 (TRAV35, TRAJ33)
CAGSSQDSNYQLIW

SEQ ID NO: 352094 - protein, 15 aa, Homo sapiens
  CDR3 for beta chain variable domain of TCR clone 176047 (TRBV2, TRBJ2-1)
CASSELAGSYNEQFF

SEQ ID NO: 352095 - protein, 13 aa, Homo sapiens
  CDR3 for alpha chain variable domain of TCR clone 176048 (TRAV8-3, TRAJ36)
CAVGATGANNLFF

SEQ ID NO: 352096 - protein, 15 aa, Homo sapiens
  CDR3 for beta chain variable domain of TCR clone 176048 (TRBV7-2, TRBJ1-2)
CASSPRGGWNYGYTF

SEQ ID NO: 352097 - protein, 16 aa, Homo sapiens
  CDR3 for alpha chain variable domain of TCR clone 176049 (TRAV8-2, TRAJ48)
CVVSDVSNFGNEKLTF

SEQ ID NO: 352098 - protein, 13 aa, Homo sapiens
  CDR3 for beta chain variable domain of TCR clone 176049 (TRBV7-6, TRBJ1-2)
CASSLVADYGYTF

SEQ ID NO: 352099 - protein, 14 aa, Homo sapiens
  CDR3 for alpha chain variable domain of TCR clone 176050 (TRAV39, TRAJ42)
CAVDIARSQGNLIF

SEQ ID NO: 352100 - protein, 15 aa, Homo sapiens
  CDR3 for beta chain variable domain of TCR clone 176050 (TRBV27, TRBJ2-7)
CASSLFATGLDEQYF

SEQ ID NO: 352101 - protein, 14 aa, Homo sapiens
  CDR3 for alpha chain variable domain of TCR clone 176051 (TRAV35, TRAJ22)
CAGLRPGSARQLTY

SEQ ID NO: 352102 - protein, 14 aa, Homo sapiens
  CDR3 for beta chain variable domain of TCR clone 176051 (TRBV11-3, TRBJ2-3)
CASSSGQGPDTQYF

SEQ ID NO: 352103 - protein, 11 aa, Homo sapiens
  CDR3 for alpha chain variable domain of TCR clone 176052 (TRAV1-2, TRAJ31)
CAEKNNARLMF

SEQ ID NO: 352104 - protein, 12 aa, Homo sapiens
  CDR3 for beta chain variable domain of TCR clone 176052 (TRBV20-1, TRBJ2-5)
CSAPRSQETQYF

SEQ ID NO: 352105 - protein, 15 aa, Homo sapiens
  CDR3 for alpha chain variable domain of TCR clone 176053 (TRAV25, TRAJ41)
CAGPWNSNSGYALNF

SEQ ID NO: 352106 - protein, 13 aa, Homo sapiens
  CDR3 for beta chain variable domain of TCR clone 176053 (TRBV15, TRBJ1-1)
CATSRGIQARAVF

SEQ ID NO: 352107 - protein, 17 aa, Homo sapiens
  CDR3 for alpha chain variable domain of TCR clone 176054 (TRAV3, TRAJ42)
CAVRDRDYGGSQGNHIF

SEQ ID NO: 352108 - protein, 14 aa, Homo sapiens
  CDR3 for beta chain variable domain of TCR clone 176054 (TRBV5-4, TRBJ1-1)
CASSLDSRRDEAFF

SEQ ID NO: 352109 - protein, 13 aa, Homo sapiens
  CDR3 for alpha chain variable domain of TCR clone 176055 (TRAV8-3, TRAJ28)
CAVGAGGSYQLTF

SEQ ID NO: 352110 - protein, 14 aa, Homo sapiens
  CDR3 for beta chain variable domain of TCR clone 176055 (TRBV25-1, TRBJ1-1)
CASTHLGGNTEAFF

SEQ ID NO: 352111 - protein, 17 aa, Homo sapiens
  CDR3 for alpha chain variable domain of TCR clone 176056 (TRAV3, TRAJ42)
CAVRYRDYGGSQGNFIF

SEQ ID NO: 352112 - protein, 15 aa, Homo sapiens
  CDR3 for beta chain variable domain of TCR clone 176056 (TRBV6-6, TRBJ2-7)
CASSYSYGGSYEQYF

SEQ ID NO: 352113 - protein, 16 aa, Homo sapiens
  CDR3 for alpha chain variable domain of TCR clone 176057 (TRAV12-3, TRAJ53)
CAMSVGSGGSNYKLTF

SEQ ID NO: 352114 - protein, 12 aa, Homo sapiens
  CDR3 for beta chain variable domain of TCR clone 176057 (TRBV7-8, TRBJ2-7)
CASSLGDREQYF

SEQ ID NO: 352115 - protein, 14 aa, Homo sapiens
  CDR3 for alpha chain variable domain of TCR clone 176058 (TRAV23/DV6, TRAJ53)
CAARSGGSNYKLTF

SEQ ID NO: 352116 - protein, 16 aa, Homo sapiens
  CDR3 for beta chain variable domain of TCR clone 176058 (TRBV5-1, TRBJ2-3)
CASSLALAVVSDTQYF

SEQ ID NO: 352117 - protein, 14 aa, Homo sapiens
  CDR3 for alpha chain variable domain of TCR clone 176059 (TRAV35, TRAJ33)
CAGSSQDSNYQLIW

SEQ ID NO: 352118 - protein, 12 aa, Homo sapiens
  CDR3 for beta chain variable domain of TCR clone 176059 (TRBV7-2, TRBJ1-4)
CASSQANEKLFF

SEQ ID NO: 352119 - protein, 15 aa, Homo sapiens
  CDR3 for alpha chain variable domain of TCR clone 176060 (TRAV29/DV5, TRAJ44)
CAASAGTGTASKLTF

SEQ ID NO: 352120 - protein, 17 aa, Homo sapiens
  CDR3 for beta chain variable domain of TCR clone 176060 (TRBV20-1, TRBJ2-1)
CSARDPLAGVWDNEQFF

SEQ ID NO: 352121 - protein, 13 aa, Homo sapiens
  CDR3 for alpha chain variable domain of TCR clone 176061 (TRAV29/DV5, TRAJ31)
CAASRNHNARLMF

SEQ ID NO: 352122 - protein, 12 aa, Homo sapiens
  CDR3 for beta chain variable domain of TCR clone 176061 (TRBV14, TRBJ1-1)
CASSQLKGLAFF

SEQ ID NO: 352123 - protein, 15 aa, Homo sapiens
  CDR3 for alpha chain variable domain of TCR clone 176062 (TRAV29/DV5, TRAJ29)
CAASERSSGNTPLVF

SEQ ID NO: 352124 - protein, 15 aa, Homo sapiens
  CDR3 for beta chain variable domain of TCR clone 176062 (TRBV6-5, TRBJ2-1)
CASSYDAGAGNEQFF

SEQ ID NO: 352125 - protein, 12 aa, Homo sapiens
  CDR3 for alpha chain variable domain of TCR clone 176063 (TRAV12-1, TRAJ16)
CVVFRDGQKLLF

SEQ ID NO: 352126 - protein, 14 aa, Homo sapiens
  CDR3 for beta chain variable domain of TCR clone 176063 (TRBV20-1, TRBJ2-3)
CSARGGTSTDTQYF

SEQ ID NO: 352127 - protein, 15 aa, Homo sapiens
  CDR3 for alpha chain variable domain of TCR clone 176064 (TRAV13-1, TRAJ5)
CAVSPIDTGRRALTF

SEQ ID NO: 352128 - protein, 18 aa, Homo sapiens
  CDR3 for beta chain variable domain of TCR clone 176064 (TRBV4-1, TRBJ2-2)
CASSFRASGGEGPGELFF

SEQ ID NO: 352129 - protein, 10 aa, Homo sapiens
  CDR3 for alpha chain variable domain of TCR clone 176065 (TRAV23/DV6, TRAJ57)
CAASSTLSHG

SEQ ID NO: 352130 - protein, 13 aa, Homo sapiens
  CDR3 for beta chain variable domain of TCR clone 176065 (TRBV25-1, TRBJ1-1)
CQHPPGGNTEAFF

SEQ ID NO: 352131 - protein, 11 aa, Homo sapiens
  CDR3 for alpha chain variable domain of TCR clone 176066 (TRAV12-3, TRAJ27)
CAMANAGKSIF

SEQ ID NO: 352132 - protein, 13 aa, Homo sapiens
  CDR3 for beta chain variable domain of TCR clone 176066 (TRBV20-1, TRBJ1-1)
CSAGVGGNTEAFF

SEQ ID NO: 352133 - protein, 10 aa, Homo sapiens
  CDR3 for alpha chain variable domain of TCR clone 176067 (TRAV8-3, TRAJ33)
CAVGAIATIS

SEQ ID NO: 352134 - protein, 15 aa, Homo sapiens
  CDR3 for beta chain variable domain of TCR clone 176067 (TRBV6-3, TRBJ2-7)
CASSSPGTVFYEQYF

SEQ ID NO: 352135 - protein, 14 aa, Homo sapiens
  CDR3 for alpha chain variable domain of TCR clone 176068 (TRAV1-2, TRAJ16)
CAVNRFSGGQKLLF

SEQ ID NO: 352136 - protein, 15 aa, Homo sapiens
  CDR3 for beta chain variable domain of TCR clone 176068 (TRBV20-1, TRBJ1-5)
CSAFKNGQRNQPQHF

SEQ ID NO: 352137 - protein, 14 aa, Homo sapiens
  CDR3 for alpha chain variable domain of TCR clone 176069 (TRAV12-3, TRAJ31)
CAMRLRNNNARLMF

SEQ ID NO: 352138 - protein, 14 aa, Homo sapiens
  CDR3 for beta chain variable domain of TCR clone 176069 (TRBV4-2, TRBJ2-1)
CASGLDRAYNEQFF

SEQ ID NO: 352139 - protein, 16 aa, Homo sapiens
  CDR3 for alpha chain variable domain of TCR clone 176070 (TRAV8-4, TRAJ52)
CAVRLEGGTSYGKLTF

SEQ ID NO: 352140 - protein, 16 aa, Homo sapiens
  CDR3 for beta chain variable domain of TCR clone 176070 (TRBV15, TRBJ1-2)
CATSRGPRTGGGGYTF

SEQ ID NO: 352141 - protein, 16 aa, Homo sapiens
  CDR3 for alpha chain variable domain of TCR clone 176071 (TRAV3, TRAJ10)
CAVRDRLTGGGNKLTF

SEQ ID NO: 352142 - protein, 16 aa, Homo sapiens
  CDR3 for beta chain variable domain of TCR clone 176071 (TRBV5-1, TRBJ2-5)
CASSLRRTSGQETQYF

SEQ ID NO: 352143 - protein, 15 aa, Homo sapiens
  CDR3 for alpha chain variable domain of TCR clone 176072 (TRAV8-4, TRAJ47)
CAVSYPEEYGNKRVF

SEQ ID NO: 352144 - protein, 15 aa, Homo sapiens
  CDR3 for beta chain variable domain of TCR clone 176072 (TRBV11-2, TRBJ2-1)
CASSLGPDSYNEQFF

SEQ ID NO: 352145 - protein, 11 aa, Homo sapiens
  CDR3 for alpha chain variable domain of TCR clone 176073 (TRAV20, TRAJ23)
CACNQGGKLIF

SEQ ID NO: 352146 - protein, 15 aa, Homo sapiens
  CDR3 for beta chain variable domain of TCR clone 176073 (TRBV7-2, TRBJ2-1)
CASTHGTGIYNEQFF

SEQ ID NO: 352147 - protein, 12 aa, Homo sapiens
  CDR3 for alpha chain variable domain of TCR clone 176074 (TRAV12-2, TRAJ43)
CAVNVNNNDMRF

SEQ ID NO: 352148 - protein, 15 aa, Homo sapiens
  CDR3 for beta chain variable domain of TCR clone 176074 (TRBV20-1, TRBJ1-1)
CSASRGVTGNTGAFF

SEQ ID NO: 352149 - protein, 14 aa, Homo sapiens
  CDR3 for alpha chain variable domain of TCR clone 176075 (TRAV29/DV5, TRAJ32)
CAAAYGGATNKLIF

SEQ ID NO: 352150 - protein, 13 aa, Homo sapiens
  CDR3 for beta chain variable domain of TCR clone 176075 (TRBV19, TRBJ1-2)
CASSVPGQDGYTF

SEQ ID NO: 352151 - protein, 14 aa, Homo sapiens
  CDR3 for alpha chain variable domain of TCR clone 176076 (TRAV1-2, TRAJ8)
CAVREDTAFQKLVF

SEQ ID NO: 352152 - protein, 16 aa, Homo sapiens
  CDR3 for beta chain variable domain of TCR clone 176076 (TRBV4-3, TRBJ2-1)
CASSPALDRGVNEQFF

SEQ ID NO: 352153 - protein, 15 aa, Homo sapiens
  CDR3 for alpha chain variable domain of TCR clone 176077 (TRAV26-1, TRAJ15)
CIVRAANQAGTALIF

SEQ ID NO: 352154 - protein, 15 aa, Homo sapiens
  CDR3 for beta chain variable domain of TCR clone 176077 (TRBV20-1, TRBJ1-1)
CSARSAATSNSEAFF

SEQ ID NO: 352155 - protein, 16 aa, Homo sapiens
  CDR3 for alpha chain variable domain of TCR clone 176078 (TRAV30, TRAJ24)
CGTEIVDADSWGKFQF

SEQ ID NO: 352156 - protein, 15 aa, Homo sapiens
  CDR3 for beta chain variable domain of TCR clone 176078 (TRBV12-4, TRBJ2-2)
CASSPNGLGTGELFF

SEQ ID NO: 352157 - protein, 12 aa, Homo sapiens
  CDR3 for alpha chain variable domain of TCR clone 176079 (TRAV8-3, TRAJ4)
VFYSGGYNKLIF

SEQ ID NO: 352158 - protein, 16 aa, Homo sapiens
  CDR3 for beta chain variable domain of TCR clone 176079 (TRBV7-8, TRBJ2-3)
CASSTEGQRETDTQYF

SEQ ID NO: 352159 - protein, 14 aa, Homo sapiens
  CDR3 for alpha chain variable domain of TCR clone 176080 (TRAV26-1, TRAJ38)
CIADNAGTNRKLIL

SEQ ID NO: 352160 - protein, 13 aa, Homo sapiens
  CDR3 for beta chain variable domain of TCR clone 176080 (TRBV20-1, TRBJ1-1)
CSARGGGNTEAVF

SEQ ID NO: 352161 - protein, 17 aa, Homo sapiens
  CDR3 for alpha chain variable domain of TCR clone 176081 (TRAV14/DV4, TRAJ4)
CAMREASGRGGYNKLIF

SEQ ID NO: 352162 - protein, 14 aa, Homo sapiens
  CDR3 for beta chain variable domain of TCR clone 176081 (TRBV19, TRBJ2-7)
CASSMGQGAIEKYF

SEQ ID NO: 352163 - protein, 16 aa, Homo sapiens
  CDR3 for alpha chain variable domain of TCR clone 176082 (TRAV30, TRAJ24)
CGTEIVDVDSWGKCQF

SEQ ID NO: 352164 - protein, 14 aa, Homo sapiens
  CDR3 for beta chain variable domain of TCR clone 176082 (TRBV12-5, TRBJ2-5)
CASGSRTHQETQYF

SEQ ID NO: 352165 - protein, 15 aa, Homo sapiens
  CDR3 for alpha chain variable domain of TCR clone 176083 (TRAV10, TRAJ6)
CVVRPRTGGSYIPTF

SEQ ID NO: 352166 - protein, 14 aa, Homo sapiens
  CDR3 for beta chain variable domain of TCR clone 176083 (TRBV4-1, TRBJ2-2)
CASSQAVNTGELFF

SEQ ID NO: 352167 - protein, 13 aa, Homo sapiens
  CDR3 for alpha chain variable domain of TCR clone 176084 (TRAV8-3, TRAJ30)
CAVGGWRDDKIIF

SEQ ID NO: 352168 - protein, 14 aa, Homo sapiens
  CDR3 for beta chain variable domain of TCR clone 176084 (TRBV20-1, TRBJ1-1)
CSAPPADMNTEAFF

SEQ ID NO: 352169 - protein, 14 aa, Homo sapiens
  CDR3 for alpha chain variable domain of TCR clone 176085 (TRAV35, TRAJ40)
CAGSSTSGTYKYIF

SEQ ID NO: 352170 - protein, 13 aa, Homo sapiens
  CDR3 for beta chain variable domain of TCR clone 176085 (TRBV20-1, TRBJ1-6)
CSAPLGVGSPLHF

SEQ ID NO: 352171 - protein, 13 aa, Homo sapiens
  CDR3 for alpha chain variable domain of TCR clone 176086 (TRAV1-2, TRAJ9)
CAALNTGGFKTIF

SEQ ID NO: 352172 - protein, 16 aa, Homo sapiens
  CDR3 for beta chain variable domain of TCR clone 176086 (TRBV11-3, TRBJ2-5)
CASSSVVAGSTETQYF

SEQ ID NO: 352173 - protein, 14 aa, Homo sapiens
  CDR3 for alpha chain variable domain of TCR clone 176087 (TRAV12-2, TRAJ17)
CAVLFKAAGNKLTF

SEQ ID NO: 352174 - protein, 15 aa, Homo sapiens
  CDR3 for beta chain variable domain of TCR clone 176087 (TRBV7-8, TRBJ1-1)
CASSLGDSRNTEAFF

SEQ ID NO: 352175 - protein, 18 aa, Homo sapiens
  CDR3 for alpha chain variable domain of TCR clone 176088 (TRAV26-2, TRAJ45)
CILRVDKYSGGGADGLTF

SEQ ID NO: 352176 - protein, 13 aa, Homo sapiens
  CDR3 for beta chain variable domain of TCR clone 176088 (TRBV29-1, TRBJ2-7)
CSVGPSGGYEQYF

SEQ ID NO: 352177 - protein, 17 aa, Homo sapiens
  CDR3 for alpha chain variable domain of TCR clone 176089 (TRAV16, TRAJ42)
CALSPKLYGGSQGNLIF

SEQ ID NO: 352178 - protein, 13 aa, Homo sapiens
  CDR3 for beta chain variable domain of TCR clone 176089 (TRBV19, TRBJ1-5)
CASSTRRDQRQHF

SEQ ID NO: 352179 - protein, 11 aa, Homo sapiens
  CDR3 for alpha chain variable domain of TCR clone 176090 (TRAV13-1, TRAJ39)
CASHAGNMLTF

SEQ ID NO: 352180 - protein, 15 aa, Homo sapiens
  CDR3 for beta chain variable domain of TCR clone 176090 (TRBV27, TRBJ2-1)
CASSNGGGSSNEQFF

SEQ ID NO: 352181 - protein, 16 aa, Homo sapiens
  CDR3 for alpha chain variable domain of TCR clone 176091 (TRAV30, TRAJ24)
CGTEIVDADSWGKFQF

SEQ ID NO: 352182 - protein, 15 aa, Homo sapiens
  CDR3 for beta chain variable domain of TCR clone 176091 (TRBV20-1, TRBJ2-7)
CSTRDRVSGMDEQYF

SEQ ID NO: 352183 - protein, 15 aa, Homo sapiens
  CDR3 for alpha chain variable domain of TCR clone 176092 (TRAV27, TRAJ38)
YAARRNAGNNRKLIW

SEQ ID NO: 352184 - protein, 13 aa, Homo sapiens
  CDR3 for beta chain variable domain of TCR clone 176092 (TRBV12-5, TRBJ2-3)
CASGDRQSDTQYL

SEQ ID NO: 352185 - protein, 18 aa, Homo sapiens
  CDR3 for alpha chain variable domain of TCR clone 176093 (TRAV13-1, TRAJ52)
CAASKRSAGGTRYGKLAF

SEQ ID NO: 352186 - protein, 13 aa, Homo sapiens
  CDR3 for beta chain variable domain of TCR clone 176093 (TRBV12-4, TRBJ1-2)
CASSLRQGKGYTF

SEQ ID NO: 352187 - protein, 17 aa, Homo sapiens
  CDR3 for alpha chain variable domain of TCR clone 176094 (TRAV3, TRAJ6)
CAVRDGPRAGGRYLPTF

SEQ ID NO: 352188 - protein, 14 aa, Homo sapiens
  CDR3 for beta chain variable domain of TCR clone 176094 (TRBV7-2, TRBJ2-7)
CASSPKTSFYEQYF

SEQ ID NO: 352189 - protein, 13 aa, Homo sapiens
  CDR3 for alpha chain variable domain of TCR clone 176095 (TRAV8-2, TRAJ29)
CALPGAGNIPLVF

SEQ ID NO: 352190 - protein, 16 aa, Homo sapiens
  CDR3 for beta chain variable domain of TCR clone 176095 (TRBV5-1, TRBJ2-5)
CASSSSGLGGAETQYF

SEQ ID NO: 352191 - protein, 20 aa, Homo sapiens
  CDR3 for alpha chain variable domain of TCR clone 176096 (TRAV12-1, TRAJ42)
SSVIQPPTSVKGGSQGNLIF

SEQ ID NO: 352192 - protein, 18 aa, Homo sapiens
  CDR3 for beta chain variable domain of TCR clone 176096 (TRBV11-2, TRBJ2-3)
RASSFGGASRGAPNTQYF

SEQ ID NO: 352193 - protein, 14 aa, Homo sapiens
  CDR3 for alpha chain variable domain of TCR clone 176097 (TRAV12-2, TRAJ45)
CAVYSGGGADGLTF

SEQ ID NO: 352194 - protein, 14 aa, Homo sapiens
  CDR3 for beta chain variable domain of TCR clone 176097 (TRBV4-2, TRBJ2-3)
CASSQERGTDTQYF

SEQ ID NO: 352195 - protein, 18 aa, Homo sapiens
  CDR3 for alpha chain variable domain of TCR clone 176098 (TRAV13-1, TRAJ52)
CAASKRSAGGTSYGKLTF

SEQ ID NO: 352196 - protein, 14 aa, Homo sapiens
  CDR3 for beta chain variable domain of TCR clone 176098 (TRBV6-1, TRBJ1-3)
CASLQGGGGNTIYF

SEQ ID NO: 352197 - protein, 15 aa, Homo sapiens
  CDR3 for alpha chain variable domain of TCR clone 176099 (TRAV3, TRAJ17)
CAVRDGPAAGNKLTF

SEQ ID NO: 352198 - protein, 12 aa, Homo sapiens
  CDR3 for beta chain variable domain of TCR clone 176099 (TRBV12-4, TRBJ2-1)
CACSPGRNEQFF

SEQ ID NO: 352199 - protein, 16 aa, Homo sapiens
  CDR3 for alpha chain variable domain of TCR clone 176100 (TRAV16, TRAJ52)
CALSAAGGTSYGKLTF

SEQ ID NO: 352200 - protein, 16 aa, Homo sapiens
  CDR3 for beta chain variable domain of TCR clone 176100 (TRBV12-4, TRBJ1-5)
CASSRPAGGSNQPQHF

SEQ ID NO: 352201 - protein, 14 aa, Homo sapiens
  CDR3 for alpha chain variable domain of TCR clone 176101 (TRAV12-2, TRAJ17)
CAVLFKAAGNKLTF

SEQ ID NO: 352202 - protein, 17 aa, Homo sapiens
  CDR3 for beta chain variable domain of TCR clone 176101 (TRBV7-8, TRBJ1-2)
CASSLRPLQGHLYGYTF

SEQ ID NO: 352203 - protein, 15 aa, Homo sapiens
  CDR3 for alpha chain variable domain of TCR clone 176102 (TRAV3, TRAJ29)
CAVRAPLSGNTPLVF

SEQ ID NO: 352204 - protein, 14 aa, Homo sapiens
  CDR3 for beta chain variable domain of TCR clone 176102 (TRBV28, TRBJ1-1)
CQRNKGGLNTEAFF

SEQ ID NO: 352205 - protein, 12 aa, Homo sapiens
  CDR3 for alpha chain variable domain of TCR clone 176103 (TRAV8-3, TRAJ20)
CAVGANDYKPSF

SEQ ID NO: 352206 - protein, 15 aa, Homo sapiens
  CDR3 for beta chain variable domain of TCR clone 176103 (TRBV7-9, TRBJ2-7)
CASSLALAEAYEQYF

SEQ ID NO: 352207 - protein, 12 aa, Homo sapiens
  CDR3 for alpha chain variable domain of TCR clone 176104 (TRAV3, TRAJ20)
FAVRDPDYKLSF

SEQ ID NO: 352208 - protein, 13 aa, Homo sapiens
  CDR3 for beta chain variable domain of TCR clone 176104 (TRBV9, TRBJ2-7)
CASSVAEYYEQYF

SEQ ID NO: 352209 - protein, 15 aa, Homo sapiens
  CDR3 for alpha chain variable domain of TCR clone 176105 (TRAV2, TRAJ9)
CAVEDRGTGGFKTIF

SEQ ID NO: 352210 - protein, 13 aa, Homo sapiens
  CDR3 for beta chain variable domain of TCR clone 176105 (TRBV27, TRBJ1-4)
CASSLMGDEKLFF

SEQ ID NO: 352211 - protein, 16 aa, Homo sapiens
  CDR3 for alpha chain variable domain of TCR clone 176106 (TRAV12-1, TRAJ13)
CVVNLEVSGGYQKVTF

SEQ ID NO: 352212 - protein, 16 aa, Homo sapiens
  CDR3 for beta chain variable domain of TCR clone 176106 (TRBV24-1, TRBJ2-6)
CATSDRRASGASDLTF

SEQ ID NO: 352213 - protein, 15 aa, Homo sapiens
  CDR3 for alpha chain variable domain of TCR clone 176107 (TRAV17, TRAJ10)
CATVLLTGGGNKLTF

SEQ ID NO: 352214 - protein, 16 aa, Homo sapiens
  CDR3 for beta chain variable domain of TCR clone 176107 (TRBV7-9, TRBJ2-3)
CDSSPWREVGTDTQYF

SEQ ID NO: 352215 - protein, 12 aa, Homo sapiens
  CDR3 for alpha chain variable domain of TCR clone 176108 (TRAV3, TRAJ27)
CAVRDKAGKSTF

SEQ ID NO: 352216 - protein, 14 aa, Homo sapiens
  CDR3 for beta chain variable domain of TCR clone 176108 (TRBV12-4, TRBJ1-1)
CASSSARGYTEAFF

SEQ ID NO: 352217 - protein, 13 aa, Homo sapiens
  CDR3 for alpha chain variable domain of TCR clone 176109 (TRAV21, TRAJ57)
CAVTQGGSEKLVF

SEQ ID NO: 352218 - protein, 13 aa, Homo sapiens
  CDR3 for beta chain variable domain of TCR clone 176109 (TRBV12-4, TRBJ2-2)
CASSITGSGELFF

SEQ ID NO: 352219 - protein, 11 aa, Homo sapiens
  CDR3 for alpha chain variable domain of TCR clone 176110 (TRAV13-1, TRAJ6)
CATLGSYIPTF

SEQ ID NO: 352220 - protein, 12 aa, Homo sapiens
  CDR3 for beta chain variable domain of TCR clone 176110 (TRBV11-2, TRBJ2-1)
CASSAGNNEQFF

SEQ ID NO: 352221 - protein, 12 aa, Homo sapiens
  CDR3 for alpha chain variable domain of TCR clone 176111 (TRAV1-1, TRAJ15)
CAVGQAGTALIF

SEQ ID NO: 352222 - protein, 15 aa, Homo sapiens
  CDR3 for beta chain variable domain of TCR clone 176111 (TRBV9, TRBJ1-6)
CASSVAGTGDSPLHF

SEQ ID NO: 352223 - protein, 14 aa, Homo sapiens
  CDR3 for alpha chain variable domain of TCR clone 176112 (TRAV8-1, TRAJ24)
CAVNAADSWGKLQF

SEQ ID NO: 352224 - protein, 13 aa, Homo sapiens
  CDR3 for beta chain variable domain of TCR clone 176112 (TRBV19, TRBJ2-7)
CASSMRGSYEQYF

SEQ ID NO: 352225 - protein, 17 aa, Homo sapiens
  CDR3 for alpha chain variable domain of TCR clone 176113 (TRAV3, TRAJ6)
CSVRDGPSAGGSYIPTF

SEQ ID NO: 352226 - protein, 14 aa, Homo sapiens
  CDR3 for beta chain variable domain of TCR clone 176113 (TRBV7-2, TRBJ2-7)
CASSPKTSFYEQYV

SEQ ID NO: 352227 - protein, 13 aa, Homo sapiens
  CDR3 for alpha chain variable domain of TCR clone 176114 (TRAV27, TRAJ40)
CAGPPSGTHKYIF

SEQ ID NO: 352228 - protein, 13 aa, Homo sapiens
  CDR3 for beta chain variable domain of TCR clone 176114 (TRBV28, TRBJ1-2)
CAGRDRGNYGYTF

SEQ ID NO: 352229 - protein, 13 aa, Homo sapiens
  CDR3 for alpha chain variable domain of TCR clone 176115 (TRAV13-1, TRAJ5)
CAASDTGRRALTF

SEQ ID NO: 352230 - protein, 15 aa, Homo sapiens
  CDR3 for beta chain variable domain of TCR clone 176115 (TRBV5-1, TRBJ2-5)
CASSFKGGDQETQYF

SEQ ID NO: 352231 - protein, 16 aa, Homo sapiens
  CDR3 for alpha chain variable domain of TCR clone 176116 (TRAV30, TRAJ28)
CGPPPYSGAGSYQLTF

SEQ ID NO: 352232 - protein, 15 aa, Homo sapiens
  CDR3 for beta chain variable domain of TCR clone 176116 (TRBV18, TRBJ2-1)
CASSPPSASYNEQFF

SEQ ID NO: 352233 - protein, 13 aa, Homo sapiens
  CDR3 for alpha chain variable domain of TCR clone 176117 (TRAV27, TRAJ29)
CAGAHSGNTPLVF

SEQ ID NO: 352234 - protein, 16 aa, Homo sapiens
  CDR3 for beta chain variable domain of TCR clone 176117 (TRBV4-1, TRBJ2-3)
CASSQRAGGLTDTQYF

SEQ ID NO: 352235 - protein, 16 aa, Homo sapiens
  CDR3 for alpha chain variable domain of TCR clone 176118 (TRAV26-1, TRAJ13)
CIVSPKDCGGYQKVTF

SEQ ID NO: 352236 - protein, 16 aa, Homo sapiens
  CDR3 for beta chain variable domain of TCR clone 176118 (TRBV5-7, TRBJ2-5)
CASIRGQTGYQETQYF

SEQ ID NO: 352237 - protein, 12 aa, Homo sapiens
  CDR3 for alpha chain variable domain of TCR clone 176119 (TRAV1-1, TRAJ24)
CAVRGSWGQFQF

SEQ ID NO: 352238 - protein, 16 aa, Homo sapiens
  CDR3 for beta chain variable domain of TCR clone 176119 (TRBV27, TRBJ2-2)
CASSFRGLVRTGELFF

SEQ ID NO: 352239 - protein, 10 aa, Homo sapiens
  CDR3 for alpha chain variable domain of TCR clone 176120 (TRAV21, TRAJ49)
CAVRLVQFYF

SEQ ID NO: 352240 - protein, 15 aa, Homo sapiens
  CDR3 for beta chain variable domain of TCR clone 176120 (TRBV7-8, TRBJ2-2)
CASTDGQGAPGELFF

SEQ ID NO: 352241 - protein, 10 aa, Homo sapiens
  CDR3 for alpha chain variable domain of TCR clone 176121 (TRAV8-4, TRAJ43)
CAVSADDMRS

SEQ ID NO: 352242 - protein, 15 aa, Homo sapiens
  CDR3 for beta chain variable domain of TCR clone 176121 (TRBV5-1, TRBJ2-3)
CASSVTSGTTDTQYF

SEQ ID NO: 352243 - protein, 12 aa, Homo sapiens
  CDR3 for alpha chain variable domain of TCR clone 176122 (TRAV27, TRAJ9)
CAGESGGFKTIF

SEQ ID NO: 352244 - protein, 15 aa, Homo sapiens
  CDR3 for beta chain variable domain of TCR clone 176122 (TRBV20-1, TRBJ2-7)
CSARVPAAYFYEQYF

SEQ ID NO: 352245 - protein, 13 aa, Homo sapiens
  CDR3 for alpha chain variable domain of TCR clone 176123 (TRAV3, TRAJ30)
CAGRDRGDDKIIF

SEQ ID NO: 352246 - protein, 16 aa, Homo sapiens
  CDR3 for beta chain variable domain of TCR clone 176123 (TRBV7-3, TRBJ2-2)
CASSLKRGTLSGELFF

SEQ ID NO: 352247 - protein, 13 aa, Homo sapiens
  CDR3 for alpha chain variable domain of TCR clone 176124 (TRAV2, TRAJ40)
CAVVTSWTYKYIF

SEQ ID NO: 352248 - protein, 15 aa, Homo sapiens
  CDR3 for beta chain variable domain of TCR clone 176124 (TRBV11-3, TRBJ2-3)
CASLKDGREGDTQYF

SEQ ID NO: 352249 - protein, 13 aa, Homo sapiens
  CDR3 for alpha chain variable domain of TCR clone 176125 (TRAV12-2, TRAJ52)
FAAHGTSYGKLTF

SEQ ID NO: 352250 - protein, 15 aa, Homo sapiens
  CDR3 for beta chain variable domain of TCR clone 176125 (TRBV10-3, TRBJ2-7)
CAISTFSGVKGEQYF

SEQ ID NO: 352251 - protein, 14 aa, Homo sapiens
  CDR3 for alpha chain variable domain of TCR clone 176126 (TRAV12-2, TRAJ13)
CAVKKTGGYQKVTF

SEQ ID NO: 352252 - protein, 15 aa, Homo sapiens
  CDR3 for beta chain variable domain of TCR clone 176126 (TRBV12-4, TRBJ1-1)
CASSLAVSRGAEAFF

SEQ ID NO: 352253 - protein, 14 aa, Homo sapiens
  CDR3 for alpha chain variable domain of TCR clone 176127 (TRAV1-2, TRAJ8)
CAVREDTGFQKLVF

SEQ ID NO: 352254 - protein, 18 aa, Homo sapiens
  CDR3 for beta chain variable domain of TCR clone 176127 (TRBV7-8, TRBJ2-1)
CASSPAEGLAGGLNEQFF

SEQ ID NO: 352255 - protein, 11 aa, Homo sapiens
  CDR3 for alpha chain variable domain of TCR clone 176128 (TRAV12-3, TRAJ49)
CAANTGNQFYF

SEQ ID NO: 352256 - protein, 14 aa, Homo sapiens
  CDR3 for beta chain variable domain of TCR clone 176128 (TRBV20-1, TRBJ1-1)
CSAQTRIGGTEAFF

SEQ ID NO: 352257 - protein, 12 aa, Homo sapiens
  CDR3 for alpha chain variable domain of TCR clone 176129 (TRAV12-3, TRAJ17)
CAMTLTGNKLTF

SEQ ID NO: 352258 - protein, 15 aa, Homo sapiens
  CDR3 for beta chain variable domain of TCR clone 176129 (TRBV24-1, TRBJ1-3)
CATSDHGESGNTIYF

SEQ ID NO: 352259 - protein, 10 aa, Homo sapiens
  CDR3 for alpha chain variable domain of TCR clone 176130 (TRAV13-1, )
CAASGPRRTP

SEQ ID NO: 352260 - protein, 21 aa, Homo sapiens
  CDR3 for beta chain variable domain of TCR clone 176130 (TRBV18, TRBJ2-3)
CASSPPAGGPRKYAVLWPRHP

SEQ ID NO: 352261 - protein, 16 aa, Homo sapiens
  CDR3 for alpha chain variable domain of TCR clone 176131 (TRAV30, TRAJ24)
CGTESVDADSWGKFQF

SEQ ID NO: 352262 - protein, 15 aa, Homo sapiens
  CDR3 for beta chain variable domain of TCR clone 176131 (TRBV28, TRBJ2-1)
CASSIIAGGRSEQFF

SEQ ID NO: 352263 - protein, 13 aa, Homo sapiens
  CDR3 for alpha chain variable domain of TCR clone 176132 (TRAV1-2, TRAJ12)
CAVSMDSSYKLIF

SEQ ID NO: 352264 - protein, 11 aa, Homo sapiens
  CDR3 for beta chain variable domain of TCR clone 176132 (TRBV12-4, TRBJ2-3)
CASTATDTQYF

SEQ ID NO: 352265 - protein, 17 aa, Homo sapiens
  CDR3 for alpha chain variable domain of TCR clone 176133 (TRAV1-2, TRAJ6)
CAVRDTTRTGGSYIPTF

SEQ ID NO: 352266 - protein, 12 aa, Homo sapiens
  CDR3 for beta chain variable domain of TCR clone 176133 (TRBV24-1, TRBJ2-3)
CDTSSGGDTQYF

SEQ ID NO: 352267 - protein, 15 aa, Homo sapiens
  CDR3 for alpha chain variable domain of TCR clone 176134 (TRAV17, TRAJ56)
CATDANTGANSKLTF

SEQ ID NO: 352268 - protein, 13 aa, Homo sapiens
  CDR3 for beta chain variable domain of TCR clone 176134 (TRBV2, TRBJ1-1)
CASTLGLNTEAFF

SEQ ID NO: 352269 - protein, 17 aa, Homo sapiens
  CDR3 for alpha chain variable domain of TCR clone 176135 (TRAV3, TRAJ6)
CAVRDGPRAGGSYLPTF

SEQ ID NO: 352270 - protein, 13 aa, Homo sapiens
  CDR3 for beta chain variable domain of TCR clone 176135 (TRBV19, TRBJ1-1)
CASSITGESEAFF

SEQ ID NO: 352271 - protein, 20 aa, Homo sapiens
  CDR3 for alpha chain variable domain of TCR clone 176136 (TRAV27, TRAJ41)
CAVRTQIPDIQNPDPAVYQL

SEQ ID NO: 352272 - protein, 16 aa, Homo sapiens
  CDR3 for beta chain variable domain of TCR clone 176136 (TRBV5-1, TRBJ2-3)
CASSLGLAVYTDTLYF

SEQ ID NO: 352273 - protein, 16 aa, Homo sapiens
  CDR3 for alpha chain variable domain of TCR clone 176137 (TRAV26-1, TRAJ52)
CIVSNAGGTSYGKLTF

SEQ ID NO: 352274 - protein, 16 aa, Homo sapiens
  CDR3 for beta chain variable domain of TCR clone 176137 (TRBV5-1, TRBJ2-1)
CASSLEGRGVYNEQFF

SEQ ID NO: 352275 - protein, 13 aa, Homo sapiens
  CDR3 for alpha chain variable domain of TCR clone 176138 (TRAV8-3, TRAJ43)
SAVVPYNNNDMRF

SEQ ID NO: 352276 - protein, 16 aa, Homo sapiens
  CDR3 for beta chain variable domain of TCR clone 176138 (TRBV7-2, TRBJ2-7)
CASSPFPTGGEETQYF

SEQ ID NO: 352277 - protein, 13 aa, Homo sapiens
  CDR3 for alpha chain variable domain of TCR clone 176139 (TRAV21, TRAJ56)
CAVRTGASSNLTF

SEQ ID NO: 352278 - protein, 15 aa, Homo sapiens
  CDR3 for beta chain variable domain of TCR clone 176139 (TRBV7-9, TRBJ1-1)
CASSHRGTVNTEAFF

SEQ ID NO: 352279 - protein, 16 aa, Homo sapiens
  CDR3 for alpha chain variable domain of TCR clone 176140 (TRAV30, TRAJ24)
CGTEMVDADSWGKFEF

SEQ ID NO: 352280 - protein, 14 aa, Homo sapiens
  CDR3 for beta chain variable domain of TCR clone 176140 (TRBV12-5, TRBJ2-5)
CASGSRTHQETQYF

SEQ ID NO: 352281 - protein, 14 aa, Homo sapiens
  CDR3 for alpha chain variable domain of TCR clone 176141 (TRAV29/DV5, TRAJ36)
CAARRNTGANNLFF

SEQ ID NO: 352282 - protein, 17 aa, Homo sapiens
  CDR3 for beta chain variable domain of TCR clone 176141 (TRBV20-1, TRBJ2-2)
CSASGSGQGGLTGELFF

SEQ ID NO: 352283 - protein, 13 aa, Homo sapiens
  CDR3 for alpha chain variable domain of TCR clone 176142 (TRAV2, TRAJ40)
CAVVTSGTYKYIF

SEQ ID NO: 352284 - protein, 14 aa, Homo sapiens
  CDR3 for beta chain variable domain of TCR clone 176142 (TRBV19, TRBJ2-1)
CARLTFVLSGEQFF

SEQ ID NO: 352285 - protein, 12 aa, Homo sapiens
  CDR3 for alpha chain variable domain of TCR clone 176143 (TRAV12-3, TRAJ17)
CAMTLTGNKQTF

SEQ ID NO: 352286 - protein, 15 aa, Homo sapiens
  CDR3 for beta chain variable domain of TCR clone 176143 (TRBV12-4, TRBJ2-5)
CQQFFVRGRQETQYF

SEQ ID NO: 352287 - protein, 15 aa, Homo sapiens
  CDR3 for alpha chain variable domain of TCR clone 176144 (TRAV4, TRAJ10)
CLVGDGSGGGNKLTF

SEQ ID NO: 352288 - protein, 17 aa, Homo sapiens
  CDR3 for beta chain variable domain of TCR clone 176144 (TRBV20-1, TRBJ2-1)
CSASSSGLAGSYNEQFF

SEQ ID NO: 352289 - protein, 11 aa, Homo sapiens
  CDR3 for alpha chain variable domain of TCR clone 176145 (TRAV16, TRAJ26)
CALTRWSEFCL

SEQ ID NO: 352290 - protein, 16 aa, Homo sapiens
  CDR3 for beta chain variable domain of TCR clone 176145 (TRBV12-4, TRBJ2-5)
CASSFFVRGRQETQYF

SEQ ID NO: 352291 - protein, 12 aa, Homo sapiens
  CDR3 for alpha chain variable domain of TCR clone 176146 (TRAV2, TRAJ29)
CFPNSGNTPLVF

SEQ ID NO: 352292 - protein, 15 aa, Homo sapiens
  CDR3 for beta chain variable domain of TCR clone 176146 (TRBV5-1, TRBJ1-1)
CASSLSDLGGTEAFF

SEQ ID NO: 352293 - protein, 14 aa, Homo sapiens
  CDR3 for alpha chain variable domain of TCR clone 176147 (TRAV2, TRAJ16)
CAVDRGSDGQKLLF

SEQ ID NO: 352294 - protein, 12 aa, Homo sapiens
  CDR3 for beta chain variable domain of TCR clone 176147 (TRBV6-5, TRBJ2-7)
CASYIYGYEQYF

SEQ ID NO: 352295 - protein, 16 aa, Homo sapiens
  CDR3 for alpha chain variable domain of TCR clone 176148 (TRAV12-3, TRAJ53)
CAMSPGSGGSNYELTF

SEQ ID NO: 352296 - protein, 11 aa, Homo sapiens
  CDR3 for beta chain variable domain of TCR clone 176148 (TRBV29-1, TRBJ2-5)
RSGDRTGTQYF

SEQ ID NO: 352297 - protein, 14 aa, Homo sapiens
  CDR3 for alpha chain variable domain of TCR clone 176149 (TRAV26-1, TRAJ8)
CIVRVDTGFQKLVF

SEQ ID NO: 352298 - protein, 16 aa, Homo sapiens
  CDR3 for beta chain variable domain of TCR clone 176149 (TRBV3-1, TRBJ2-5)
CASSQDWASGQETQYF

SEQ ID NO: 352299 - protein, 15 aa, Homo sapiens
  CDR3 for alpha chain variable domain of TCR clone 176150 (TRAV2, TRAJ15)
CAVEDRGQAGTALIF

SEQ ID NO: 352300 - protein, 15 aa, Homo sapiens
  CDR3 for beta chain variable domain of TCR clone 176150 (TRBV24-1, TRBJ2-1)
CATRASGGQYNEQFF

SEQ ID NO: 352301 - protein, 12 aa, Homo sapiens
  CDR3 for alpha chain variable domain of TCR clone 176151 (TRAV12-3, TRAJ20)
CAMVRGDYKISF

SEQ ID NO: 352302 - protein, 13 aa, Homo sapiens
  CDR3 for beta chain variable domain of TCR clone 176151 (TRBV23-1, TRBJ1-4)
CASRGKFNDKLFF

SEQ ID NO: 352303 - protein, 13 aa, Homo sapiens
  CDR3 for alpha chain variable domain of TCR clone 176152 (TRAV27, TRAJ53)
CAGQGGSNYKLTF

SEQ ID NO: 352304 - protein, 13 aa, Homo sapiens
  CDR3 for beta chain variable domain of TCR clone 176152 (TRBV29-1, TRBJ1-1)
FSVESGFGTEAFF

SEQ ID NO: 352305 - protein, 13 aa, Homo sapiens
  CDR3 for alpha chain variable domain of TCR clone 176153 (TRAV12-1, TRAJ13)
CVVALLGYQKGTF

SEQ ID NO: 352306 - protein, 13 aa, Homo sapiens
  CDR3 for beta chain variable domain of TCR clone 176153 (TRBV20-1, TRBJ2-5)
CSAILTGQETQYF

SEQ ID NO: 352307 - protein, 16 aa, Homo sapiens
  CDR3 for alpha chain variable domain of TCR clone 176154 (TRAV38-1, TRAJ37)
CAFKGDGSSSTGKLIF

SEQ ID NO: 352308 - protein, 13 aa, Homo sapiens
  CDR3 for beta chain variable domain of TCR clone 176154 (TRBV12-4, TRBJ2-5)
CASSLFRRETQYF

SEQ ID NO: 352309 - protein, 14 aa, Homo sapiens
  CDR3 for alpha chain variable domain of TCR clone 176155 (TRAV13-1, TRAJ47)
CAADPGEYGNKLVF

SEQ ID NO: 352310 - protein, 12 aa, Homo sapiens
  CDR3 for beta chain variable domain of TCR clone 176155 (TRBV28, TRBJ2-6)
CAIQAGANVLTF

SEQ ID NO: 352311 - protein, 17 aa, Homo sapiens
  CDR3 for alpha chain variable domain of TCR clone 176156 (TRAV36/DV7, TRAJ52)
CAVAQRAGGTSYGKLTF

SEQ ID NO: 352312 - protein, 15 aa, Homo sapiens
  CDR3 for beta chain variable domain of TCR clone 176156 (TRBV7-8, TRBJ1-1)
CASSLGDSRNTEAFF

SEQ ID NO: 352313 - protein, 15 aa, Homo sapiens
  CDR3 for alpha chain variable domain of TCR clone 176157 (TRAV25, TRAJ53)
CPTSNSGGSNYKLTF

SEQ ID NO: 352314 - protein, 14 aa, Homo sapiens
  CDR3 for beta chain variable domain of TCR clone 176157 (TRBV11-2, TRBJ2-3)
CASSRLARTDTHYF

SEQ ID NO: 352315 - protein, 13 aa, Homo sapiens
  CDR3 for alpha chain variable domain of TCR clone 176158 (TRAV21, TRAJ36)
CAVREAGANNLFF

SEQ ID NO: 352316 - protein, 15 aa, Homo sapiens
  CDR3 for beta chain variable domain of TCR clone 176158 (TRBV7-9, TRBJ2-7)
CASSPGGGLTYEQYF

SEQ ID NO: 352317 - protein, 16 aa, Homo sapiens
  CDR3 for alpha chain variable domain of TCR clone 176159 (TRAV30, TRAJ24)
CGTEIVDADSWGKFQF

SEQ ID NO: 352318 - protein, 12 aa, Homo sapiens
  CDR3 for beta chain variable domain of TCR clone 176159 (TRBV27, TRBJ2-7)
CASFSSSYEQYF

SEQ ID NO: 352319 - protein, 16 aa, Homo sapiens
  CDR3 for alpha chain variable domain of TCR clone 176160 (TRAV30, TRAJ57)
CGTGWAPQGGSEKLVF

SEQ ID NO: 352320 - protein, 14 aa, Homo sapiens
  CDR3 for beta chain variable domain of TCR clone 176160 (TRBV18, TRBJ1-1)
CASAPGVQGVEAFF

SEQ ID NO: 352321 - protein, 11 aa, Homo sapiens
  CDR3 for alpha chain variable domain of TCR clone 176161 (TRAV27, TRAJ20)
CAGADDYKLSF

SEQ ID NO: 352322 - protein, 15 aa, Homo sapiens
  CDR3 for beta chain variable domain of TCR clone 176161 (TRBV10-2, TRBJ2-6)
CASSEQGTGANVLTF

SEQ ID NO: 352323 - protein, 12 aa, Homo sapiens
  CDR3 for alpha chain variable domain of TCR clone 176162 (TRAV4, TRAJ6)
CLTPGGSYKPTF

SEQ ID NO: 352324 - protein, 17 aa, Homo sapiens
  CDR3 for beta chain variable domain of TCR clone 176162 (TRBV20-1, TRBJ2-2)
CSASGSGQGGLTGELFF

SEQ ID NO: 352325 - protein, 12 aa, Homo sapiens
  CDR3 for alpha chain variable domain of TCR clone 176163 (TRAV25, TRAJ29)
CAGPRGNTPLVF

SEQ ID NO: 352326 - protein, 12 aa, Homo sapiens
  CDR3 for beta chain variable domain of TCR clone 176163 (TRBV14, TRBJ2-7)
CASSLYKDEQYF

SEQ ID NO: 352327 - protein, 11 aa, Homo sapiens
  CDR3 for alpha chain variable domain of TCR clone 176164 (TRAV3, TRAJ21)
RAVGNFNKFYF

SEQ ID NO: 352328 - protein, 16 aa, Homo sapiens
  CDR3 for beta chain variable domain of TCR clone 176164 (TRBV19, TRBJ2-1)
CASSKAGQSSYNEQFF

SEQ ID NO: 352329 - protein, 14 aa, Homo sapiens
  CDR3 for alpha chain variable domain of TCR clone 176165 (TRAV26-1, TRAJ38)
CIADNAGNNRKLIW

SEQ ID NO: 352330 - protein, 19 aa, Homo sapiens
  CDR3 for beta chain variable domain of TCR clone 176165 (TRBV2, TRBJ2-7)
CASSDDETSGRANDYEQYF

SEQ ID NO: 352331 - protein, 13 aa, Homo sapiens
  CDR3 for alpha chain variable domain of TCR clone 176166 (TRAV21, TRAJ20)
CAVGFFADYKLSF

SEQ ID NO: 352332 - protein, 14 aa, Homo sapiens
  CDR3 for beta chain variable domain of TCR clone 176166 (TRBV4-2, TRBJ1-4)
CASSPSSGNEKLFF

SEQ ID NO: 352333 - protein, 13 aa, Homo sapiens
  CDR3 for alpha chain variable domain of TCR clone 176167 (TRAV22, TRAJ20)
CAVRFSNDYKLSF

SEQ ID NO: 352334 - protein, 17 aa, Homo sapiens
  CDR3 for beta chain variable domain of TCR clone 176167 (TRBV13, TRBJ2-3)
CASSLSRVAGGRYTQYF

SEQ ID NO: 352335 - protein, 12 aa, Homo sapiens
  CDR3 for alpha chain variable domain of TCR clone 176168 (TRAV13-1, TRAJ15)
CAASQAGTALIS

SEQ ID NO: 352336 - protein, 13 aa, Homo sapiens
  CDR3 for beta chain variable domain of TCR clone 176168 (TRBV10-3, TRBJ1-2)
CAISERDSYGYTF

SEQ ID NO: 352337 - protein, 14 aa, Homo sapiens
  CDR3 for alpha chain variable domain of TCR clone 176169 (TRAV12-3, TRAJ10)
SHLPLTGGGNKLTF

SEQ ID NO: 352338 - protein, 13 aa, Homo sapiens
  CDR3 for beta chain variable domain of TCR clone 176169 (TRBV7-9, TRBJ1-2)
CASSLKQYYGYTF

SEQ ID NO: 352339 - protein, 14 aa, Homo sapiens
  CDR3 for alpha chain variable domain of TCR clone 176170 (TRAV12-1, TRAJ17)
CVVNYKAAGNKLTF

SEQ ID NO: 352340 - protein, 13 aa, Homo sapiens
  CDR3 for beta chain variable domain of TCR clone 176170 (TRBV20-1, TRBJ1-1)
CSAPLGGGTEAFF

SEQ ID NO: 352341 - protein, 14 aa, Homo sapiens
  CDR3 for alpha chain variable domain of TCR clone 176171 (TRAV12-1, TRAJ43)
CVVNGRSNNNDMRF

SEQ ID NO: 352342 - protein, 13 aa, Homo sapiens
  CDR3 for beta chain variable domain of TCR clone 176171 (TRBV27, TRBJ1-1)
CASSLPIGAEAFF

SEQ ID NO: 352343 - protein, 11 aa, Homo sapiens
  CDR3 for alpha chain variable domain of TCR clone 176172 (TRAV1-2, TRAJ20)
CAVSNDYKLSF

SEQ ID NO: 352344 - protein, 16 aa, Homo sapiens
  CDR3 for beta chain variable domain of TCR clone 176172 (TRBV29-1, TRBJ2-7)
CSVEVVGTSGSYEQYF

SEQ ID NO: 352345 - protein, 15 aa, Homo sapiens
  CDR3 for alpha chain variable domain of TCR clone 176173 (TRAV25, TRAJ10)
CAGPLLTGGGNKLTF

SEQ ID NO: 352346 - protein, 15 aa, Homo sapiens
  CDR3 for beta chain variable domain of TCR clone 176173 (TRBV7-9, TRBJ1-5)
CASSQGHQPNQPQHF

SEQ ID NO: 352347 - protein, 15 aa, Homo sapiens
  CDR3 for alpha chain variable domain of TCR clone 176174 (TRAV14/DV4, TRAJ33)
CAMREGRDSNYQLLW

SEQ ID NO: 352348 - protein, 15 aa, Homo sapiens
  CDR3 for beta chain variable domain of TCR clone 176174 (TRBV5-5, TRBJ1-5)
CASSSTPGSSQPQHF

SEQ ID NO: 352349 - protein, 12 aa, Homo sapiens
  CDR3 for alpha chain variable domain of TCR clone 176175 (TRAV3, TRAJ21)
CGERTGLQQILL

SEQ ID NO: 352350 - protein, 14 aa, Homo sapiens
  CDR3 for beta chain variable domain of TCR clone 176175 (TRBV4-1, TRBJ2-2)
CASSQAVNTGELFF

SEQ ID NO: 352351 - protein, 14 aa, Homo sapiens
  CDR3 for alpha chain variable domain of TCR clone 176176 (TRAV17, TRAJ23)
CATALGGQGGKLIF

SEQ ID NO: 352352 - protein, 16 aa, Homo sapiens
  CDR3 for beta chain variable domain of TCR clone 176176 (TRBV7-2, TRBJ2-7)
CASSLVMGVGSYEQYF

SEQ ID NO: 352353 - protein, 13 aa, Homo sapiens
  CDR3 for alpha chain variable domain of TCR clone 176177 (TRAV16, TRAJ48)
CSPLNFGNEKLTF

SEQ ID NO: 352354 - protein, 11 aa, Homo sapiens
  CDR3 for beta chain variable domain of TCR clone 176177 (TRBV7-9, TRBJ2-3)
CASSPTDTQYS

SEQ ID NO: 352355 - protein, 10 aa, Homo sapiens
  CDR3 for alpha chain variable domain of TCR clone 176178 (TRAV24, TRAJ20)
CAPDDYKLSF

SEQ ID NO: 352356 - protein, 13 aa, Homo sapiens
  CDR3 for beta chain variable domain of TCR clone 176178 (TRBV7-9, TRBJ1-2)
CASSLKQNYGYTF

SEQ ID NO: 352357 - protein, 12 aa, Homo sapiens
  CDR3 for alpha chain variable domain of TCR clone 176179 (TRAV12-2, TRAJ10)
WGVTGGGNKLTF

SEQ ID NO: 352358 - protein, 13 aa, Homo sapiens
  CDR3 for beta chain variable domain of TCR clone 176179 (TRBV20-1, TRBJ2-2)
CSASAAGTGELFF

SEQ ID NO: 352359 - protein, 18 aa, Homo sapiens
  CDR3 for alpha chain variable domain of TCR clone 176180 (TRAV12-3, TRAJ52)
CAKSRTNAGGTSYGKLTF

SEQ ID NO: 352360 - protein, 17 aa, Homo sapiens
  CDR3 for beta chain variable domain of TCR clone 176180 (TRBV7-3, TRBJ2-3)
CASSLMKRMRGADTQYF

SEQ ID NO: 352361 - protein, 14 aa, Homo sapiens
  CDR3 for alpha chain variable domain of TCR clone 176181 (TRAV12-2, TRAJ13)
CAVKKTGGYQKVTF

SEQ ID NO: 352362 - protein, 17 aa, Homo sapiens
  CDR3 for beta chain variable domain of TCR clone 176181 (TRBV12-4, TRBJ1-2)
CASSFIWLHLRFVDQVN

SEQ ID NO: 352363 - protein, 14 aa, Homo sapiens
  CDR3 for alpha chain variable domain of TCR clone 176182 (TRAV38-1, TRAJ39)
CAFAYNNTGNMLTF

SEQ ID NO: 352364 - protein, 15 aa, Homo sapiens
  CDR3 for beta chain variable domain of TCR clone 176182 (TRBV19, TRBJ2-6)
CASSIGPSGANVLTF

SEQ ID NO: 352365 - protein, 16 aa, Homo sapiens
  CDR3 for alpha chain variable domain of TCR clone 176183 (TRAV12-3, TRAJ53)
CAMSPGSGGRNYRLTF

SEQ ID NO: 352366 - protein, 11 aa, Homo sapiens
  CDR3 for beta chain variable domain of TCR clone 176183 (TRBV29-1, TRBJ2-5)
CSEDRTGTQYF

SEQ ID NO: 352367 - protein, 14 aa, Homo sapiens
  CDR3 for alpha chain variable domain of TCR clone 176184 (TRAV2, TRAJ9)
CAVEPTTGGFKTIF

SEQ ID NO: 352368 - protein, 14 aa, Homo sapiens
  CDR3 for beta chain variable domain of TCR clone 176184 (TRBV7-2, TRBJ2-7)
CASSPKTSFYEQYF

SEQ ID NO: 352369 - protein, 10 aa, Homo sapiens
  CDR3 for alpha chain variable domain of TCR clone 176185 (TRAV12-1, TRAJ37)
ARGNTGELIF

SEQ ID NO: 352370 - protein, 15 aa, Homo sapiens
  CDR3 for beta chain variable domain of TCR clone 176185 (TRBV9, TRBJ1-6)
CASSVAGTGDSPLHF

SEQ ID NO: 352371 - protein, 14 aa, Homo sapiens
  CDR3 for alpha chain variable domain of TCR clone 176186 (TRAV12-1, TRAJ8)
CVVNSNTGFQKLVF

SEQ ID NO: 352372 - protein, 16 aa, Homo sapiens
  CDR3 for beta chain variable domain of TCR clone 176186 (TRBV20-1, TRBJ2-2)
CSARDDRVSLTGELFF

SEQ ID NO: 352373 - protein, 17 aa, Homo sapiens
  CDR3 for alpha chain variable domain of TCR clone 176187 (TRAV8-6, TRAJ8)
CAVKEGIGNTGFQKLVF

SEQ ID NO: 352374 - protein, 12 aa, Homo sapiens
  CDR3 for beta chain variable domain of TCR clone 176187 (TRBV19, TRBJ1-4)
CASKDWPGGLFF

SEQ ID NO: 352375 - protein, 13 aa, Homo sapiens
  CDR3 for alpha chain variable domain of TCR clone 176188 (TRAV20, TRAJ3)
CASRYSSASKIIF

SEQ ID NO: 352376 - protein, 16 aa, Homo sapiens
  CDR3 for beta chain variable domain of TCR clone 176188 (TRBV6-1, TRBJ1-6)
CASSSDGAPRNSPLHF

SEQ ID NO: 352377 - protein, 11 aa, Homo sapiens
  CDR3 for alpha chain variable domain of TCR clone 176189 (TRAV23/DV6, TRAJ43)
CSASSGNDRRF

SEQ ID NO: 352378 - protein, 14 aa, Homo sapiens
  CDR3 for beta chain variable domain of TCR clone 176189 (TRBV4-1, TRBJ1-2)
CASSQDPLPYGYTF

SEQ ID NO: 352379 - protein, 14 aa, Homo sapiens
  CDR3 for alpha chain variable domain of TCR clone 176190 (TRAV1-2, TRAJ8)
CAVREDTGFQKLVF

SEQ ID NO: 352380 - protein, 16 aa, Homo sapiens
  CDR3 for beta chain variable domain of TCR clone 176190 (TRBV5-7, TRBJ2-5)
CASTLAPAGGWETQYF

SEQ ID NO: 352381 - protein, 12 aa, Homo sapiens
  CDR3 for alpha chain variable domain of TCR clone 176191 (TRAV8-3, TRAJ6)
CAVAGGSYIPTF

SEQ ID NO: 352382 - protein, 12 aa, Homo sapiens
  CDR3 for beta chain variable domain of TCR clone 176191 (TRBV12-4, TRBJ2-7)
CASSLGGYEQYF

SEQ ID NO: 352383 - protein, 17 aa, Homo sapiens
  CDR3 for alpha chain variable domain of TCR clone 176192 (TRAV8-6, TRAJ58)
CAVSSWAGETMGSRLTF

SEQ ID NO: 352384 - protein, 14 aa, Homo sapiens
  CDR3 for beta chain variable domain of TCR clone 176192 (TRBV4-2, TRBJ2-1)
CASGLDRAYNEQFF

SEQ ID NO: 352385 - protein, 15 aa, Homo sapiens
  CDR3 for alpha chain variable domain of TCR clone 176193 (TRAV8-2, TRAJ24)
CVVSDRTASWGKLQF

SEQ ID NO: 352386 - protein, 11 aa, Homo sapiens
  CDR3 for beta chain variable domain of TCR clone 176193 (TRBV20-1, TRBJ1-2)
CSVQGAGGYTF

SEQ ID NO: 352387 - protein, 14 aa, Homo sapiens
  CDR3 for alpha chain variable domain of TCR clone 176194 (TRAV26-1, TRAJ44)
CIVKSTGTASKLTF

SEQ ID NO: 352388 - protein, 15 aa, Homo sapiens
  CDR3 for beta chain variable domain of TCR clone 176194 (TRBV7-2, TRBJ2-1)
CASTHGTGIYNEQFF

SEQ ID NO: 352389 - protein, 13 aa, Homo sapiens
  CDR3 for alpha chain variable domain of TCR clone 176195 (TRAV2, TRAJ24)
CAVPTDSWGKLQF

SEQ ID NO: 352390 - protein, 14 aa, Homo sapiens
  CDR3 for beta chain variable domain of TCR clone 176195 (TRBV5-1, TRBJ1-1)
CASSSTRRSTEAFF

SEQ ID NO: 352391 - protein, 13 aa, Homo sapiens
  CDR3 for alpha chain variable domain of TCR clone 176196 (TRAV2, TRAJ29)
CAVRNSGNTPLVF

SEQ ID NO: 352392 - protein, 13 aa, Homo sapiens
  CDR3 for beta chain variable domain of TCR clone 176196 (TRBV15, TRBJ1-6)
CATSGGLNSPLHF

SEQ ID NO: 352393 - protein, 18 aa, Homo sapiens
  CDR3 for alpha chain variable domain of TCR clone 176197 (TRAV21, TRAJ52)
CAVRPSPAGGTSYGKLTL

SEQ ID NO: 352394 - protein, 17 aa, Homo sapiens
  CDR3 for beta chain variable domain of TCR clone 176197 (TRBV13, TRBJ2-3)
CASSLSRGAGGRNTQYF

SEQ ID NO: 352395 - protein, 14 aa, Homo sapiens
  CDR3 for alpha chain variable domain of TCR clone 176198 (TRAV12-2, TRAJ17)
CAVLFKAAGNKLTF

SEQ ID NO: 352396 - protein, 15 aa, Homo sapiens
  CDR3 for beta chain variable domain of TCR clone 176198 (TRBV5-1, TRBJ2-1)
CASRPPRAPYNEQFF

SEQ ID NO: 352397 - protein, 23 aa, Homo sapiens
  CDR3 for alpha chain variable domain of TCR clone 176199 (TRAV26-1, TRAJ38)
CIAENAGNNHIQNPDPALYQLRD

SEQ ID NO: 352398 - protein, 12 aa, Homo sapiens
  CDR3 for beta chain variable domain of TCR clone 176199 (TRBV11-2, TRBJ2-2)
CASSLGGGELFF

SEQ ID NO: 352399 - protein, 15 aa, Homo sapiens
  CDR3 for alpha chain variable domain of TCR clone 176200 (TRAV13-1, TRAJ45)
CAASGSGGGADGLTF

SEQ ID NO: 352400 - protein, 15 aa, Homo sapiens
  CDR3 for beta chain variable domain of TCR clone 176200 (TRBV27, TRBJ2-1)
CASSNGGGSSNEQFF

SEQ ID NO: 352401 - protein, 15 aa, Homo sapiens
  CDR3 for alpha chain variable domain of TCR clone 176201 (TRAV35, TRAJ40)
CAGQLGTSRTYKYIL

SEQ ID NO: 352402 - protein, 14 aa, Homo sapiens
  CDR3 for beta chain variable domain of TCR clone 176201 (TRBV7-3, TRBJ2-1)
CASSLAGGTNEQFF

SEQ ID NO: 352403 - protein, 14 aa, Homo sapiens
  CDR3 for alpha chain variable domain of TCR clone 176202 (TRAV1-2, TRAJ8)
CAVREDTGFQKLEF

SEQ ID NO: 352404 - protein, 14 aa, Homo sapiens
  CDR3 for beta chain variable domain of TCR clone 176202 (TRBV4-1, TRBJ2-2)
CASSQAVNTGELFF

SEQ ID NO: 352405 - protein, 15 aa, Homo sapiens
  CDR3 for alpha chain variable domain of TCR clone 176203 (TRAV23/DV6, TRAJ13)
CAAWPGGGGYQKVTF

SEQ ID NO: 352406 - protein, 15 aa, Homo sapiens
  CDR3 for beta chain variable domain of TCR clone 176203 (TRBV4-3, TRBJ2-7)
CASSQGGRGIYEQYF

SEQ ID NO: 352407 - protein, 16 aa, Homo sapiens
  CDR3 for alpha chain variable domain of TCR clone 176204 (TRAV30, TRAJ24)
CGTEIVDADSWGKFQF

SEQ ID NO: 352408 - protein, 17 aa, Homo sapiens
  CDR3 for beta chain variable domain of TCR clone 176204 (TRBV20-1, TRBJ2-1)
FSAPPRLAGTRYNEQFF

SEQ ID NO: 352409 - protein, 14 aa, Homo sapiens
  CDR3 for alpha chain variable domain of TCR clone 176205 (TRAV12-1, TRAJ3)
CVVSGYSSASKIIF

SEQ ID NO: 352410 - protein, 17 aa, Homo sapiens
  CDR3 for beta chain variable domain of TCR clone 176205 (TRBV13, TRBJ2-3)
CASSLSRVAGGRNTQYF

SEQ ID NO: 352411 - protein, 16 aa, Homo sapiens
  CDR3 for alpha chain variable domain of TCR clone 176206 (TRAV30, TRAJ44)
CGTEDKRTGTASKLTF

SEQ ID NO: 352412 - protein, 12 aa, Homo sapiens
  CDR3 for beta chain variable domain of TCR clone 176206 (TRBV12-4, TRBJ2-3)
CASSTLPDTQYF

SEQ ID NO: 352413 - protein, 17 aa, Homo sapiens
  CDR3 for alpha chain variable domain of TCR clone 176207 (TRAV3, TRAJ42)
CAVRDRGYGGSQGNLIF

SEQ ID NO: 352414 - protein, 16 aa, Homo sapiens
  CDR3 for beta chain variable domain of TCR clone 176207 (TRBV27, TRBJ2-7)
CASSSERRDSAYEQYF

SEQ ID NO: 352415 - protein, 13 aa, Homo sapiens
  CDR3 for alpha chain variable domain of TCR clone 176208 (TRAV2, TRAJ40)
CDVVNSGTYKYIF

SEQ ID NO: 352416 - protein, 14 aa, Homo sapiens
  CDR3 for beta chain variable domain of TCR clone 176208 (TRBV19, TRBJ2-1)
CASPTFVLSGEQFF

SEQ ID NO: 352417 - protein, 18 aa, Homo sapiens
  CDR3 for alpha chain variable domain of TCR clone 176209 (TRAV26-1, TRAJ52)
CIFRVAVAGGTSYGKLTF

SEQ ID NO: 352418 - protein, 13 aa, Homo sapiens
  CDR3 for beta chain variable domain of TCR clone 176209 (TRBV7-8, TRBJ1-2)
CASSAQSYYGYTF

SEQ ID NO: 352419 - protein, 12 aa, Homo sapiens
  CDR3 for alpha chain variable domain of TCR clone 176210 (TRAV23/DV6, TRAJ30)
CAASKGDDKIIF

SEQ ID NO: 352420 - protein, 16 aa, Homo sapiens
  CDR3 for beta chain variable domain of TCR clone 176210 (TRBV4-1, TRBJ2-3)
CASSQSTSGAEDTQYF

SEQ ID NO: 352421 - protein, 13 aa, Homo sapiens
  CDR3 for alpha chain variable domain of TCR clone 176211 (TRAV26-2, TRAJ54)
CIPRVGGAQKLVF

SEQ ID NO: 352422 - protein, 16 aa, Homo sapiens
  CDR3 for beta chain variable domain of TCR clone 176211 (TRBV4-1, TRBJ1-1)
CASSSMSERPNTEAFF

SEQ ID NO: 352423 - protein, 14 aa, Homo sapiens
  CDR3 for alpha chain variable domain of TCR clone 176212 (TRAV23/DV6, TRAJ6)
GAASRSGGSYIPTF

SEQ ID NO: 352424 - protein, 17 aa, Homo sapiens
  CDR3 for beta chain variable domain of TCR clone 176212 (TRBV20-1, TRBJ2-1)
CSAIASGLAGSYNEQFF

SEQ ID NO: 352425 - protein, 15 aa, Homo sapiens
  CDR3 for alpha chain variable domain of TCR clone 176213 (TRAV12-1, TRAJ52)
CVGNAGGTSYGKLTF

SEQ ID NO: 352426 - protein, 15 aa, Homo sapiens
  CDR3 for beta chain variable domain of TCR clone 176213 (TRBV7-3, TRBJ2-1)
CASSSGLAGGNEQFF

SEQ ID NO: 352427 - protein, 11 aa, Homo sapiens
  CDR3 for alpha chain variable domain of TCR clone 176214 (TRAV3, TRAJ21)
CAVGNFNKFYF

SEQ ID NO: 352428 - protein, 11 aa, Homo sapiens
  CDR3 for beta chain variable domain of TCR clone 176214 (TRBV12-4, TRBJ2-2)
CASSSAGELFF

SEQ ID NO: 352429 - protein, 15 aa, Homo sapiens
  CDR3 for alpha chain variable domain of TCR clone 176215 (TRAV26-1, TRAJ29)
CIVRVEGSGNTPLAF

SEQ ID NO: 352430 - protein, 15 aa, Homo sapiens
  CDR3 for beta chain variable domain of TCR clone 176215 (TRBV7-9, TRBJ1-5)
CASSQGHQPNQPQHV

SEQ ID NO: 352431 - protein, 13 aa, Homo sapiens
  CDR3 for alpha chain variable domain of TCR clone 176216 (TRAV17, TRAJ40)
CATAPGGTYKYIF

SEQ ID NO: 352432 - protein, 12 aa, Homo sapiens
  CDR3 for beta chain variable domain of TCR clone 176216 (TRBV2, TRBJ1-5)
CASSGNRTPQHF

SEQ ID NO: 352433 - protein, 13 aa, Homo sapiens
  CDR3 for alpha chain variable domain of TCR clone 176217 (TRAV35, TRAJ42)
CAGFPGSQGNLIF

SEQ ID NO: 352434 - protein, 15 aa, Homo sapiens
  CDR3 for beta chain variable domain of TCR clone 176217 (TRBV20-1, TRBJ2-3)
CSARPSGFYTDTQYF

SEQ ID NO: 352435 - protein, 16 aa, Homo sapiens
  CDR3 for alpha chain variable domain of TCR clone 176218 (TRAV3, TRAJ3)
CALRDRAKSSASKIIF

SEQ ID NO: 352436 - protein, 16 aa, Homo sapiens
  CDR3 for beta chain variable domain of TCR clone 176218 (TRBV20-1, TRBJ2-4)
CSATSLAELVKNIQYF

SEQ ID NO: 352437 - protein, 17 aa, Homo sapiens
  CDR3 for alpha chain variable domain of TCR clone 176219 (TRAV13-1, TRAJ52)
CAASSGAGGTSYGKLTF

SEQ ID NO: 352438 - protein, 15 aa, Homo sapiens
  CDR3 for beta chain variable domain of TCR clone 176219 (TRBV12-4, TRBJ1-5)
CANTRGSGFGQLQHF

SEQ ID NO: 352439 - protein, 13 aa, Homo sapiens
  CDR3 for alpha chain variable domain of TCR clone 176220 (TRAV2, TRAJ40)
CAVVTSGTYKYIF

SEQ ID NO: 352440 - protein, 14 aa, Homo sapiens
  CDR3 for beta chain variable domain of TCR clone 176220 (TRBV19, TRBJ2-1)
CASPTFVLGGEQFY

SEQ ID NO: 352441 - protein, 14 aa, Homo sapiens
  CDR3 for alpha chain variable domain of TCR clone 176221 (TRAV20, TRAJ36)
CAVQARTGANNLFF

SEQ ID NO: 352442 - protein, 13 aa, Homo sapiens
  CDR3 for beta chain variable domain of TCR clone 176221 (TRBV7-9, TRBJ1-2)
CASSLKQNYGYTF

SEQ ID NO: 352443 - protein, 20 aa, Homo sapiens
  CDR3 for alpha chain variable domain of TCR clone 176222 (TRAV26-1, TRAJ42)
CCVLLHRQTYYGGSQGNLIF

SEQ ID NO: 352444 - protein, 16 aa, Homo sapiens
  CDR3 for beta chain variable domain of TCR clone 176222 (TRBV7-3, TRBJ2-2)
CASTLKRGTLSGELFF

SEQ ID NO: 352445 - protein, 17 aa, Homo sapiens
  CDR3 for alpha chain variable domain of TCR clone 176223 (TRAV3, TRAJ12)
CAVRDGGRMDSSYKLIF

SEQ ID NO: 352446 - protein, 15 aa, Homo sapiens
  CDR3 for beta chain variable domain of TCR clone 176223 (TRBV4-1, TRBJ2-1)
CASSQVLAGRDEQFF

SEQ ID NO: 352447 - protein, 14 aa, Homo sapiens
  CDR3 for alpha chain variable domain of TCR clone 176224 (TRAV25, TRAJ35)
CARRMGGFGNVLHC

SEQ ID NO: 352448 - protein, 13 aa, Homo sapiens
  CDR3 for beta chain variable domain of TCR clone 176224 (TRBV7-2, TRBJ1-4)
CASSLAGLEKLFF

SEQ ID NO: 352449 - protein, 11 aa, Homo sapiens
  CDR3 for alpha chain variable domain of TCR clone 176225 (TRAV16, TRAJ49)
CALRSGNQFYV

SEQ ID NO: 352450 - protein, 16 aa, Homo sapiens
  CDR3 for beta chain variable domain of TCR clone 176225 (TRBV20-1, TRBJ1-5)
CSARDVGGGWIQPQHF

SEQ ID NO: 352451 - protein, 13 aa, Homo sapiens
  CDR3 for alpha chain variable domain of TCR clone 176226 (TRAV27, TRAJ6)
CAGGTRGSYIPTF

SEQ ID NO: 352452 - protein, 12 aa, Homo sapiens
  CDR3 for beta chain variable domain of TCR clone 176226 (TRBV6-6, TRBJ1-1)
CASSQGTVEAFF

SEQ ID NO: 352453 - protein, 13 aa, Homo sapiens
  CDR3 for alpha chain variable domain of TCR clone 176227 (TRAV21, TRAJ20)
CAVGLRVDYKLSF

SEQ ID NO: 352454 - protein, 12 aa, Homo sapiens
  CDR3 for beta chain variable domain of TCR clone 176227 (TRBV7-9, TRBJ2-7)
CASRTGFDEQYF

SEQ ID NO: 352455 - protein, 19 aa, Homo sapiens
  CDR3 for alpha chain variable domain of TCR clone 176228 (TRAV40, )
CLPIPDIQNPDPAVYQLRV

SEQ ID NO: 352456 - protein, 15 aa, Homo sapiens
  CDR3 for beta chain variable domain of TCR clone 176228 (TRBV2, TRBJ1-2)
CASSEIGGANYGYTF

SEQ ID NO: 352457 - protein, 16 aa, Homo sapiens
  CDR3 for alpha chain variable domain of TCR clone 176229 (TRAV23/DV6, TRAJ9)
CAASIGGTTGGFKTIF

SEQ ID NO: 352458 - protein, 15 aa, Homo sapiens
  CDR3 for beta chain variable domain of TCR clone 176229 (TRBV6-3, TRBJ2-7)
CASSSPGTVLYEQYF

SEQ ID NO: 352459 - protein, 15 aa, Homo sapiens
  CDR3 for alpha chain variable domain of TCR clone 176230 (TRAV38-1, TRAJ37)
CAFIFGSGNTGKLIF

SEQ ID NO: 352460 - protein, 16 aa, Homo sapiens
  CDR3 for beta chain variable domain of TCR clone 176230 (TRBV28, TRBJ1-5)
CASRTGLQGEGQPQHF

SEQ ID NO: 352461 - protein, 14 aa, Homo sapiens
  CDR3 for alpha chain variable domain of TCR clone 176231 (TRAV1-1, TRAJ27)
CAVIYNTNTVKSTF

SEQ ID NO: 352462 - protein, 15 aa, Homo sapiens
  CDR3 for beta chain variable domain of TCR clone 176231 (TRBV7-2, TRBJ2-1)
CASSSGLAGGNEQFF

SEQ ID NO: 352463 - protein, 15 aa, Homo sapiens
  CDR3 for alpha chain variable domain of TCR clone 176232 (TRAV17, TRAJ6)
CATDLPSGGSYIPTF

SEQ ID NO: 352464 - protein, 14 aa, Homo sapiens
  CDR3 for beta chain variable domain of TCR clone 176232 (TRBV12-5, TRBJ2-5)
CASGSRTHQETQYF

SEQ ID NO: 352465 - protein, 13 aa, Homo sapiens
  CDR3 for alpha chain variable domain of TCR clone 176233 (TRAV21, TRAJ20)
CAVGLRVDYKLSF

SEQ ID NO: 352466 - protein, 13 aa, Homo sapiens
  CDR3 for beta chain variable domain of TCR clone 176233 (TRBV6-1, TRBJ1-1)
SASSRQGNTEAFF

SEQ ID NO: 352467 - protein, 13 aa, Homo sapiens
  CDR3 for alpha chain variable domain of TCR clone 176234 (TRAV21, TRAJ20)
CAVGLRVDYKLSF

SEQ ID NO: 352468 - protein, 16 aa, Homo sapiens
  CDR3 for beta chain variable domain of TCR clone 176234 (TRBV19, TRBJ2-1)
CASSKAGPSSYNEQFL

SEQ ID NO: 352469 - protein, 15 aa, Homo sapiens
  CDR3 for alpha chain variable domain of TCR clone 176235 (TRAV17, TRAJ57)
CATGPSQGGSEKLVF

SEQ ID NO: 352470 - protein, 18 aa, Homo sapiens
  CDR3 for beta chain variable domain of TCR clone 176235 (TRBV7-9, TRBJ2-7)
CASSLTTSGCRTWYEQYF

SEQ ID NO: 352471 - protein, 15 aa, Homo sapiens
  CDR3 for alpha chain variable domain of TCR clone 176236 (TRAV8-3, TRAJ40)
CAAPSLGSGTYKYIF

SEQ ID NO: 352472 - protein, 14 aa, Homo sapiens
  CDR3 for beta chain variable domain of TCR clone 176236 (TRBV11-2, TRBJ2-7)
CASSLYPGRYEQYF

SEQ ID NO: 352473 - protein, 11 aa, Homo sapiens
  CDR3 for alpha chain variable domain of TCR clone 176237 (TRAV1-2, TRAJ34)
CAGYNTDKLIF

SEQ ID NO: 352474 - protein, 13 aa, Homo sapiens
  CDR3 for beta chain variable domain of TCR clone 176237 (TRBV4-1, TRBJ2-1)
CASSQAGGDEQFF

SEQ ID NO: 352475 - protein, 13 aa, Homo sapiens
  CDR3 for alpha chain variable domain of TCR clone 176238 (TRAV8-6, TRAJ49)
CAVITNTGNQFYF

SEQ ID NO: 352476 - protein, 13 aa, Homo sapiens
  CDR3 for beta chain variable domain of TCR clone 176238 (TRBV11-2, TRBJ2-5)
CASSFSSQETQYF

SEQ ID NO: 352477 - protein, 14 aa, Homo sapiens
  CDR3 for alpha chain variable domain of TCR clone 176239 (TRAV3, TRAJ27)
CAVRDDTNAGKSTF

SEQ ID NO: 352478 - protein, 12 aa, Homo sapiens
  CDR3 for beta chain variable domain of TCR clone 176239 (TRBV7-9, TRBJ1-1)
CASSLVETEAFF

SEQ ID NO: 352479 - protein, 14 aa, Homo sapiens
  CDR3 for alpha chain variable domain of TCR clone 176240 (TRAV35, TRAJ13)
CAGSPSGGYQNVTF

SEQ ID NO: 352480 - protein, 17 aa, Homo sapiens
  CDR3 for beta chain variable domain of TCR clone 176240 (TRBV18, TRBJ1-5)
CQLTTCRVRQNNQPQHF

SEQ ID NO: 352481 - protein, 17 aa, Homo sapiens
  CDR3 for alpha chain variable domain of TCR clone 176241 (TRAV3, TRAJ28)
CAVRESYSGAGSYQLTF

SEQ ID NO: 352482 - protein, 18 aa, Homo sapiens
  CDR3 for beta chain variable domain of TCR clone 176241 (TRBV27, TRBJ2-1)
CASGNRAVGVGSKNEQFF

SEQ ID NO: 352483 - protein, 16 aa, Homo sapiens
  CDR3 for alpha chain variable domain of TCR clone 176242 (TRAV22, TRAJ45)
CAVDRGKRGGADGLTF

SEQ ID NO: 352484 - protein, 17 aa, Homo sapiens
  CDR3 for beta chain variable domain of TCR clone 176242 (TRBV20-1, TRBJ1-5)
CSAREIPQGVGNQPQHF

SEQ ID NO: 352485 - protein, 13 aa, Homo sapiens
  CDR3 for alpha chain variable domain of TCR clone 176243 (TRAV2, TRAJ21)
CAVEGSNFNKFYF

SEQ ID NO: 352486 - protein, 13 aa, Homo sapiens
  CDR3 for beta chain variable domain of TCR clone 176243 (TRBV11-2, TRBJ1-1)
CASSSTRNTEAFF

SEQ ID NO: 352487 - protein, 13 aa, Homo sapiens
  CDR3 for alpha chain variable domain of TCR clone 176244 (TRAV36/DV7, TRAJ33)
CAVDMVSNYQLIW

SEQ ID NO: 352488 - protein, 16 aa, Homo sapiens
  CDR3 for beta chain variable domain of TCR clone 176244 (TRBV15, TRBJ2-3)
CAPRLSGGRAPDTRYF

SEQ ID NO: 352489 - protein, 13 aa, Homo sapiens
  CDR3 for alpha chain variable domain of TCR clone 176245 (TRAV4, TRAJ28)
CLVGDNRAEPLGL

SEQ ID NO: 352490 - protein, 13 aa, Homo sapiens
  CDR3 for beta chain variable domain of TCR clone 176245 (TRBV20-1, TRBJ2-7)
CSATHTSGYEQYF

SEQ ID NO: 352491 - protein, 15 aa, Homo sapiens
  CDR3 for alpha chain variable domain of TCR clone 176246 (TRAV26-1, TRAJ44)
CIIRANTGTASKLTF

SEQ ID NO: 352492 - protein, 13 aa, Homo sapiens
  CDR3 for beta chain variable domain of TCR clone 176246 (TRBV10-3, TRBJ2-7)
CASKLAVNYEQYF

SEQ ID NO: 352493 - protein, 13 aa, Homo sapiens
  CDR3 for alpha chain variable domain of TCR clone 176247 (TRAV12-2, TRAJ40)
CAVKRTGTYKYIF

SEQ ID NO: 352494 - protein, 14 aa, Homo sapiens
  CDR3 for beta chain variable domain of TCR clone 176247 (TRBV19, TRBJ2-1)
CARGARSFQWEQFF

SEQ ID NO: 352495 - protein, 13 aa, Homo sapiens
  CDR3 for alpha chain variable domain of TCR clone 176248 (TRAV1-1, TRAJ9)
CAAKNTGGFKTIF

SEQ ID NO: 352496 - protein, 16 aa, Homo sapiens
  CDR3 for beta chain variable domain of TCR clone 176248 (TRBV11-1, TRBJ2-2)
CASSAEGLKNTGELFF

SEQ ID NO: 352497 - protein, 13 aa, Homo sapiens
  CDR3 for alpha chain variable domain of TCR clone 176249 (TRAV13-1, TRAJ48)
FAAASFGNEKLTF

SEQ ID NO: 352498 - protein, 14 aa, Homo sapiens
  CDR3 for beta chain variable domain of TCR clone 176249 (TRBV18, TRBJ2-1)
CASSPGTSETEQFF

SEQ ID NO: 352499 - protein, 18 aa, Homo sapiens
  CDR3 for alpha chain variable domain of TCR clone 176250 (TRAV21, TRAJ52)
CAVRPSPAGGTSYGKLTF

SEQ ID NO: 352500 - protein, 12 aa, Homo sapiens
  CDR3 for beta chain variable domain of TCR clone 176250 (TRBV28, TRBJ2-5)
CASSGQTETQYF

SEQ ID NO: 352501 - protein, 14 aa, Homo sapiens
  CDR3 for alpha chain variable domain of TCR clone 176251 (TRAV1-2, TRAJ16)
CAVNRFSDGQKLLF

SEQ ID NO: 352502 - protein, 14 aa, Homo sapiens
  CDR3 for beta chain variable domain of TCR clone 176251 (TRBV13, TRBJ2-5)
CATSLGRGQETQYF

SEQ ID NO: 352503 - protein, 10 aa, Homo sapiens
  CDR3 for alpha chain variable domain of TCR clone 176252 (TRAV9-2, TRAJ43)
CALRMNDTRF

SEQ ID NO: 352504 - protein, 14 aa, Homo sapiens
  CDR3 for beta chain variable domain of TCR clone 176252 (TRBV7-8, TRBJ2-3)
CASSSRDSTDTQYF

SEQ ID NO: 352505 - protein, 11 aa, Homo sapiens
  CDR3 for alpha chain variable domain of TCR clone 176253 (TRAV21, TRAJ11)
CAVNGYSTLTF

SEQ ID NO: 352506 - protein, 13 aa, Homo sapiens
  CDR3 for beta chain variable domain of TCR clone 176253 (TRBV19, TRBJ1-1)
CASSIEVKLSLDK

SEQ ID NO: 352507 - protein, 14 aa, Homo sapiens
  CDR3 for alpha chain variable domain of TCR clone 176254 (TRAV1-2, TRAJ16)
CAVNRFSDGQKPLF

SEQ ID NO: 352508 - protein, 14 aa, Homo sapiens
  CDR3 for beta chain variable domain of TCR clone 176254 (TRBV7-9, TRBJ1-4)
CAITEGEANEKLFF

SEQ ID NO: 352509 - protein, 11 aa, Homo sapiens
  CDR3 for alpha chain variable domain of TCR clone 176255 (TRAV3, TRAJ21)
CAVGNFNKFCF

SEQ ID NO: 352510 - protein, 16 aa, Homo sapiens
  CDR3 for beta chain variable domain of TCR clone 176255 (TRBV29-1, TRBJ2-7)
CSVEDAEDGTAYEQYF

SEQ ID NO: 352511 - protein, 12 aa, Homo sapiens
  CDR3 for alpha chain variable domain of TCR clone 176256 (TRAV21, TRAJ49)
CAVTNTGNQFYF

SEQ ID NO: 352512 - protein, 13 aa, Homo sapiens
  CDR3 for beta chain variable domain of TCR clone 176256 (TRBV19, TRBJ2-1)
CASSMYRVNEQFF

SEQ ID NO: 352513 - protein, 14 aa, Homo sapiens
  CDR3 for alpha chain variable domain of TCR clone 176257 (TRAV26-1, TRAJ38)
CIADNAGNNRKLIW

SEQ ID NO: 352514 - protein, 13 aa, Homo sapiens
  CDR3 for beta chain variable domain of TCR clone 176257 (TRBV3-1, TRBJ1-1)
CASSPGVITEAFF

SEQ ID NO: 352515 - protein, 11 aa, Homo sapiens
  CDR3 for alpha chain variable domain of TCR clone 176258 (TRAV1-2, TRAJ40)
CAVPGTYNYIF

SEQ ID NO: 352516 - protein, 16 aa, Homo sapiens
  CDR3 for beta chain variable domain of TCR clone 176258 (TRBV29-1, TRBJ2-7)
CSLEVVGTSGSYEQYF

SEQ ID NO: 352517 - protein, 15 aa, Homo sapiens
  CDR3 for alpha chain variable domain of TCR clone 176259 (TRAV23/DV6, TRAJ13)
CEAWPGGGGYQKVTF

SEQ ID NO: 352518 - protein, 17 aa, Homo sapiens
  CDR3 for beta chain variable domain of TCR clone 176259 (TRBV19, TRBJ2-7)
CASSISFYDSYPYEQYF

SEQ ID NO: 352519 - protein, 15 aa, Homo sapiens
  CDR3 for alpha chain variable domain of TCR clone 176260 (TRAV12-2, TRAJ43)
CAFDMRFGAGTRLTV

SEQ ID NO: 352520 - protein, 13 aa, Homo sapiens
  CDR3 for beta chain variable domain of TCR clone 176260 (TRBV4-2, TRBJ1-1)
CARSQAGTTEAFF

SEQ ID NO: 352521 - protein, 13 aa, Homo sapiens
  CDR3 for alpha chain variable domain of TCR clone 176261 (TRAV1-2, TRAJ9)
FAVLNTGGFKTIF

SEQ ID NO: 352522 - protein, 15 aa, Homo sapiens
  CDR3 for beta chain variable domain of TCR clone 176261 (TRBV7-3, TRBJ2-1)
CASSPTGGGEVEQFF

SEQ ID NO: 352523 - protein, 10 aa, Homo sapiens
  CDR3 for alpha chain variable domain of TCR clone 176262 (TRAV1-2, TRAJ18)
CAVRGEAQPW

SEQ ID NO: 352524 - protein, 14 aa, Homo sapiens
  CDR3 for beta chain variable domain of TCR clone 176262 (TRBV5-1, TRBJ2-7)
CASSLRTNNYEQYF

SEQ ID NO: 352525 - protein, 14 aa, Homo sapiens
  CDR3 for alpha chain variable domain of TCR clone 176263 (TRAV16, TRAJ37)
CALDISGNTGKLIF

SEQ ID NO: 352526 - protein, 15 aa, Homo sapiens
  CDR3 for beta chain variable domain of TCR clone 176263 (TRBV5-7, TRBJ1-5)
CASSYGKLWDQPQHF

SEQ ID NO: 352527 - protein, 14 aa, Homo sapiens
  CDR3 for alpha chain variable domain of TCR clone 176264 (TRAV21, TRAJ38)
CAVMGAGNNRKLIW

SEQ ID NO: 352528 - protein, 13 aa, Homo sapiens
  CDR3 for beta chain variable domain of TCR clone 176264 (TRBV7-3, TRBJ2-5)
CASSIGFFETQYF

SEQ ID NO: 352529 - protein, 12 aa, Homo sapiens
  CDR3 for alpha chain variable domain of TCR clone 176265 (TRAV12-3, TRAJ40)
CAVSSGTYKYIF

SEQ ID NO: 352530 - protein, 15 aa, Homo sapiens
  CDR3 for beta chain variable domain of TCR clone 176265 (TRBV7-9, TRBJ2-7)
CASSPGGGLTYEQYF

SEQ ID NO: 352531 - protein, 13 aa, Homo sapiens
  CDR3 for alpha chain variable domain of TCR clone 176266 (TRAV12-2, TRAJ42)
CAVKRGSQGKLIF

SEQ ID NO: 352532 - protein, 13 aa, Homo sapiens
  CDR3 for beta chain variable domain of TCR clone 176266 (TRBV7-9, TRBJ2-3)
CASSPGSTDTQYF

SEQ ID NO: 352533 - protein, 13 aa, Homo sapiens
  CDR3 for alpha chain variable domain of TCR clone 176267 (TRAV38-1, TRAJ42)
CARWGGSQGNLIF

SEQ ID NO: 352534 - protein, 15 aa, Homo sapiens
  CDR3 for beta chain variable domain of TCR clone 176267 (TRBV5-5, TRBJ1-5)
CASSSTPGSNQPQHF

SEQ ID NO: 352535 - protein, 15 aa, Homo sapiens
  CDR3 for alpha chain variable domain of TCR clone 176268 (TRAV3, TRAJ36)
CAVRASQTGANNRFF

SEQ ID NO: 352536 - protein, 15 aa, Homo sapiens
  CDR3 for beta chain variable domain of TCR clone 176268 (TRBV3-1, TRBJ2-1)
CASSQDYTPRGEQFF

SEQ ID NO: 352537 - protein, 17 aa, Homo sapiens
  CDR3 for alpha chain variable domain of TCR clone 176269 (TRAV3, TRAJ12)
CAVRDGGRMDSGYKLIF

SEQ ID NO: 352538 - protein, 12 aa, Homo sapiens
  CDR3 for beta chain variable domain of TCR clone 176269 (TRBV11-2, TRBJ2-2)
CASSLGGGELFF

SEQ ID NO: 352539 - protein, 16 aa, Homo sapiens
  CDR3 for alpha chain variable domain of TCR clone 176270 (TRAV3, TRAJ37)
CAVRGKGSGDTGKLIF

SEQ ID NO: 352540 - protein, 16 aa, Homo sapiens
  CDR3 for beta chain variable domain of TCR clone 176270 (TRBV12-4, TRBJ1-5)
CASSRPVGGSNQPQHF

SEQ ID NO: 352541 - protein, 14 aa, Homo sapiens
  CDR3 for alpha chain variable domain of TCR clone 176271 (TRAV3, TRAJ44)
CACTTGGTASKLTF

SEQ ID NO: 352542 - protein, 12 aa, Homo sapiens
  CDR3 for beta chain variable domain of TCR clone 176271 (TRBV19, TRBJ1-1)
CASSIGTEEAFF

SEQ ID NO: 352543 - protein, 16 aa, Homo sapiens
  CDR3 for alpha chain variable domain of TCR clone 176272 (TRAV12-3, TRAJ53)
CAMSPGSGGSNYKLTF

SEQ ID NO: 352544 - protein, 14 aa, Homo sapiens
  CDR3 for beta chain variable domain of TCR clone 176272 (TRBV5-1, TRBJ2-3)
CASSRGQGGGTQYF

SEQ ID NO: 352545 - protein, 15 aa, Homo sapiens
  CDR3 for alpha chain variable domain of TCR clone 176273 (TRAV12-2, TRAJ50)
CAVNGLETSYDKVIF

SEQ ID NO: 352546 - protein, 16 aa, Homo sapiens
  CDR3 for beta chain variable domain of TCR clone 176273 (TRBV19, TRBJ1-1)
CASSPTRFWPGTEAFF

SEQ ID NO: 352547 - protein, 11 aa, Homo sapiens
  CDR3 for alpha chain variable domain of TCR clone 176274 (TRAV8-3, TRAJ4)
CAVGARPDFKR

SEQ ID NO: 352548 - protein, 13 aa, Homo sapiens
  CDR3 for beta chain variable domain of TCR clone 176274 (TRBV20-1, TRBJ1-2)
CSATVIQGSGYTF

SEQ ID NO: 352549 - protein, 14 aa, Homo sapiens
  CDR3 for alpha chain variable domain of TCR clone 176275 (TRAV2, TRAJ9)
CAVEDRSGGFKTIF

SEQ ID NO: 352550 - protein, 13 aa, Homo sapiens
  CDR3 for beta chain variable domain of TCR clone 176275 (TRBV19, TRBJ1-3)
CASRLSLGNTIYF

SEQ ID NO: 352551 - protein, 15 aa, Homo sapiens
  CDR3 for alpha chain variable domain of TCR clone 176276 (TRAV17, TRAJ57)
CATGPSQGGSAKLAF

SEQ ID NO: 352552 - protein, 14 aa, Homo sapiens
  CDR3 for beta chain variable domain of TCR clone 176276 (TRBV12-5, TRBJ2-5)
CASGSRTHQETQYF

SEQ ID NO: 352553 - protein, 15 aa, Homo sapiens
  CDR3 for alpha chain variable domain of TCR clone 176277 (TRAV12-1, TRAJ10)
CVVNKLTGGGNKLTF

SEQ ID NO: 352554 - protein, 17 aa, Homo sapiens
  CDR3 for beta chain variable domain of TCR clone 176277 (TRBV20-1, TRBJ2-1)
CSASSSGLAGSYNEQFF

SEQ ID NO: 352555 - protein, 14 aa, Homo sapiens
  CDR3 for alpha chain variable domain of TCR clone 176278 (TRAV12-2, TRAJ17)
CTVLFKAAGNKLTF

SEQ ID NO: 352556 - protein, 17 aa, Homo sapiens
  CDR3 for beta chain variable domain of TCR clone 176278 (TRBV20-1, TRBJ2-2)
CGASGSGQGGLTGELFF

SEQ ID NO: 352557 - protein, 14 aa, Homo sapiens
  CDR3 for alpha chain variable domain of TCR clone 176279 (TRAV12-3, TRAJ9)
CAMSPNTGGFHTIF

SEQ ID NO: 352558 - protein, 12 aa, Homo sapiens
  CDR3 for beta chain variable domain of TCR clone 176279 (TRBV11-2, TRBJ2-2)
CASSLGGGELFF

SEQ ID NO: 352559 - protein, 12 aa, Homo sapiens
  CDR3 for alpha chain variable domain of TCR clone 176280 (TRAV21, TRAJ8)
CAVNTGFQKLVF

SEQ ID NO: 352560 - protein, 13 aa, Homo sapiens
  CDR3 for beta chain variable domain of TCR clone 176280 (TRBV6-3, TRBJ2-1)
CASGYDNYNEQFF

SEQ ID NO: 352561 - protein, 12 aa, Homo sapiens
  CDR3 for alpha chain variable domain of TCR clone 176281 (TRAV3, TRAJ20)
CAVRDPDYKLSF

SEQ ID NO: 352562 - protein, 14 aa, Homo sapiens
  CDR3 for beta chain variable domain of TCR clone 176281 (TRBV19, TRBJ2-7)
CASSIEASSYEQYF

SEQ ID NO: 352563 - protein, 16 aa, Homo sapiens
  CDR3 for alpha chain variable domain of TCR clone 176282 (TRAV3, TRAJ37)
CAVRGKGSGNTGKLLF

SEQ ID NO: 352564 - protein, 16 aa, Homo sapiens
  CDR3 for beta chain variable domain of TCR clone 176282 (TRBV12-4, TRBJ1-5)
CASSRPVGGSNQPQHF

SEQ ID NO: 352565 - protein, 13 aa, Homo sapiens
  CDR3 for alpha chain variable domain of TCR clone 176283 (TRAV2, TRAJ40)
CAVVTSGTDKFIF

SEQ ID NO: 352566 - protein, 14 aa, Homo sapiens
  CDR3 for beta chain variable domain of TCR clone 176283 (TRBV19, TRBJ2-1)
CASPTFVLSGEQFF

SEQ ID NO: 352567 - protein, 15 aa, Homo sapiens
  CDR3 for alpha chain variable domain of TCR clone 176284 (TRAV12-2, TRAJ43)
CAFDMRFGAGTRLTV

SEQ ID NO: 352568 - protein, 18 aa, Homo sapiens
  CDR3 for beta chain variable domain of TCR clone 176284 (TRBV20-1, TRBJ2-3)
CSASGLAGGPATTDTQYF

SEQ ID NO: 352569 - protein, 12 aa, Homo sapiens
  CDR3 for alpha chain variable domain of TCR clone 176285 (TRAV12-1, TRAJ40)
CVVYSGTYKYIF

SEQ ID NO: 352570 - protein, 16 aa, Homo sapiens
  CDR3 for beta chain variable domain of TCR clone 176285 (TRBV18, TRBJ1-1)
CASSPGVGGRGGEAFF

SEQ ID NO: 352571 - protein, 11 aa, Homo sapiens
  CDR3 for alpha chain variable domain of TCR clone 176286 (TRAV23/DV6, TRAJ17)
CKWAAGNKLTF

SEQ ID NO: 352572 - protein, 14 aa, Homo sapiens
  CDR3 for beta chain variable domain of TCR clone 176286 (TRBV6-1, TRBJ2-7)
CAGSGGSYLYEQYF

SEQ ID NO: 352573 - protein, 14 aa, Homo sapiens
  CDR3 for alpha chain variable domain of TCR clone 176287 (TRAV1-2, TRAJ8)
CAVREDTGFQKLGF

SEQ ID NO: 352574 - protein, 12 aa, Homo sapiens
  CDR3 for beta chain variable domain of TCR clone 176287 (TRBV11-2, TRBJ2-2)
CASSLPTGELFF

SEQ ID NO: 352575 - protein, 18 aa, Homo sapiens
  CDR3 for alpha chain variable domain of TCR clone 176288 (TRAV21, TRAJ52)
CAVRHSPAGGTSDGKLTF

SEQ ID NO: 352576 - protein, 17 aa, Homo sapiens
  CDR3 for beta chain variable domain of TCR clone 176288 (TRBV13, TRBJ2-3)
CASSLSRVAGGRNTQYF

SEQ ID NO: 352577 - protein, 13 aa, Homo sapiens
  CDR3 for alpha chain variable domain of TCR clone 176289 (TRAV13-2, TRAJ48)
CAEMDFGNEKLTF

SEQ ID NO: 352578 - protein, 15 aa, Homo sapiens
  CDR3 for beta chain variable domain of TCR clone 176289 (TRBV7-3, TRBJ2-1)
CASSQRGGALISSSS

SEQ ID NO: 352579 - protein, 11 aa, Homo sapiens
  CDR3 for alpha chain variable domain of TCR clone 176290 (TRAV1-2, TRAJ40)
FAVPGTYKYIF

SEQ ID NO: 352580 - protein, 16 aa, Homo sapiens
  CDR3 for beta chain variable domain of TCR clone 176290 (TRBV7-3, TRBJ2-2)
CASSLKRGTLSGELFF

SEQ ID NO: 352581 - protein, 14 aa, Homo sapiens
  CDR3 for alpha chain variable domain of TCR clone 176291 (TRAV1-2, TRAJ8)
CAVREDTGFQQLVF

SEQ ID NO: 352582 - protein, 13 aa, Homo sapiens
  CDR3 for beta chain variable domain of TCR clone 176291 (TRBV6-4, TRBJ2-3)
CASSVSWADTQYF

SEQ ID NO: 352583 - protein, 14 aa, Homo sapiens
  CDR3 for alpha chain variable domain of TCR clone 176292 (TRAV9-2, TRAJ39)
CALYIYNAGNMLTF

SEQ ID NO: 352584 - protein, 15 aa, Homo sapiens
  CDR3 for beta chain variable domain of TCR clone 176292 (TRBV19, TRBJ1-1)
CASTSGQIQNTEAVF

SEQ ID NO: 352585 - protein, 16 aa, Homo sapiens
  CDR3 for alpha chain variable domain of TCR clone 176293 (TRAV3, TRAJ10)
CAVRDMRAGGGNKLTF

SEQ ID NO: 352586 - protein, 17 aa, Homo sapiens
  CDR3 for beta chain variable domain of TCR clone 176293 (TRBV20-1, TRBJ2-2)
CSASGAGQGGLTGELFF

SEQ ID NO: 352587 - protein, 15 aa, Homo sapiens
  CDR3 for alpha chain variable domain of TCR clone 176294 (TRAV13-1, TRAJ36)
CAASIRQTGANNLFF

SEQ ID NO: 352588 - protein, 17 aa, Homo sapiens
  CDR3 for beta chain variable domain of TCR clone 176294 (TRBV20-1, TRBJ2-2)
CSASGSGQGGLTGELFF

SEQ ID NO: 352589 - protein, 15 aa, Homo sapiens
  CDR3 for alpha chain variable domain of TCR clone 176295 (TRAV3, TRAJ22)
CDVRDRGGSGRQLTF

SEQ ID NO: 352590 - protein, 16 aa, Homo sapiens
  CDR3 for beta chain variable domain of TCR clone 176295 (TRBV5-4, TRBJ2-3)
CASQQPGAGGADTQYF

SEQ ID NO: 352591 - protein, 15 aa, Homo sapiens
  CDR3 for alpha chain variable domain of TCR clone 176296 (TRAV26-1, TRAJ40)
CIVRVTTSGTYKYIF

SEQ ID NO: 352592 - protein, 15 aa, Homo sapiens
  CDR3 for beta chain variable domain of TCR clone 176296 (TRBV7-9, TRBJ2-1)
CASSLHGGPYNEQFF

SEQ ID NO: 352593 - protein, 13 aa, Homo sapiens
  CDR3 for alpha chain variable domain of TCR clone 176297 (TRAV17, TRAJ22)
CAHHSGSARQLTF

SEQ ID NO: 352594 - protein, 16 aa, Homo sapiens
  CDR3 for beta chain variable domain of TCR clone 176297 (TRBV4-1, TRBJ1-2)
CASSQDAGQVLYGYIF

SEQ ID NO: 352595 - protein, 14 aa, Homo sapiens
  CDR3 for alpha chain variable domain of TCR clone 176298 (TRAV8-3, TRAJ39)
CAVGARVAGNMLTF

SEQ ID NO: 352596 - protein, 16 aa, Homo sapiens
  CDR3 for beta chain variable domain of TCR clone 176298 (TRBV27, TRBJ2-7)
CASSLYGGQGDGELYF

SEQ ID NO: 352597 - protein, 12 aa, Homo sapiens
  CDR3 for alpha chain variable domain of TCR clone 176299 (TRAV4, TRAJ9)
CLVPTGGFKTIF

SEQ ID NO: 352598 - protein, 13 aa, Homo sapiens
  CDR3 for beta chain variable domain of TCR clone 176299 (TRBV7-9, TRBJ2-3)
CASSPGSTDTQYF

SEQ ID NO: 352599 - protein, 19 aa, Homo sapiens
  CDR3 for alpha chain variable domain of TCR clone 176300 (TRAV3, TRAJ6)
CAVRDGPGQEEATYLHLEE

SEQ ID NO: 352600 - protein, 13 aa, Homo sapiens
  CDR3 for beta chain variable domain of TCR clone 176300 (TRBV4-1, TRBJ2-2)
CASSQENTGELFF

SEQ ID NO: 352601 - protein, 11 aa, Homo sapiens
  CDR3 for alpha chain variable domain of TCR clone 176301 (TRAV2, TRAJ23)
CAVETRGKLIF

SEQ ID NO: 352602 - protein, 14 aa, Homo sapiens
  CDR3 for beta chain variable domain of TCR clone 176301 (TRBV2, TRBJ2-3)
CASSEGRNTDTQYF

SEQ ID NO: 352603 - protein, 17 aa, Homo sapiens
  CDR3 for alpha chain variable domain of TCR clone 176302 (TRAV13-1, TRAJ31)
CAPRDRLMFGDGTQLVV

SEQ ID NO: 352604 - protein, 14 aa, Homo sapiens
  CDR3 for beta chain variable domain of TCR clone 176302 (TRBV27, TRBJ1-1)
CASSLLSGLSEAFF

SEQ ID NO: 352605 - protein, 16 aa, Homo sapiens
  CDR3 for alpha chain variable domain of TCR clone 176303 (TRAV3, TRAJ37)
CAVRVRGSGNTGKLIF

SEQ ID NO: 352606 - protein, 17 aa, Homo sapiens
  CDR3 for beta chain variable domain of TCR clone 176303 (TRBV11-2, TRBJ2-1)
CASSLYPPGVEYNGQFF

SEQ ID NO: 352607 - protein, 13 aa, Homo sapiens
  CDR3 for alpha chain variable domain of TCR clone 176304 (TRAV12-2, TRAJ6)
CAENVSRKLHTYI

SEQ ID NO: 352608 - protein, 12 aa, Homo sapiens
  CDR3 for beta chain variable domain of TCR clone 176304 (TRBV29-1, TRBJ2-3)
CSVTGGADTQYF

SEQ ID NO: 352609 - protein, 12 aa, Homo sapiens
  CDR3 for alpha chain variable domain of TCR clone 176305 (TRAV12-1, TRAJ40)
CVVYSGTYKYIF

SEQ ID NO: 352610 - protein, 18 aa, Homo sapiens
  CDR3 for beta chain variable domain of TCR clone 176305 (TRBV11-3, TRBJ2-3)
CASSLGGASRGALNTQYF

SEQ ID NO: 352611 - protein, 17 aa, Homo sapiens
  CDR3 for alpha chain variable domain of TCR clone 176306 (TRAV4, TRAJ13)
CLVGVQGSSGGYQKVTF

SEQ ID NO: 352612 - protein, 15 aa, Homo sapiens
  CDR3 for beta chain variable domain of TCR clone 176306 (TRBV7-8, TRBJ2-1)
CASSLHGGPYNEQFF

SEQ ID NO: 352613 - protein, 23 aa, Homo sapiens
  CDR3 for alpha chain variable domain of TCR clone 176307 (TRAV26-1, TRAJ38)
CIADNAGNNHIQNPDPAVYQLRD

SEQ ID NO: 352614 - protein, 13 aa, Homo sapiens
  CDR3 for beta chain variable domain of TCR clone 176307 (TRBV20-1, TRBJ1-1)
CSTRGGGNTEAFF

SEQ ID NO: 352615 - protein, 18 aa, Homo sapiens
  CDR3 for alpha chain variable domain of TCR clone 176308 (TRAV20, TRAJ4)
CAVQPYYMFSGGYNKLIF

SEQ ID NO: 352616 - protein, 13 aa, Homo sapiens
  CDR3 for beta chain variable domain of TCR clone 176308 (TRBV7-3, TRBJ1-2)
CASSLKRGYGYTF

SEQ ID NO: 352617 - protein, 12 aa, Homo sapiens
  CDR3 for alpha chain variable domain of TCR clone 176309 (TRAV35, TRAJ31)
CAAASNNARLMF

SEQ ID NO: 352618 - protein, 14 aa, Homo sapiens
  CDR3 for beta chain variable domain of TCR clone 176309 (TRBV2, TRBJ2-2)
CARSLFGGNGELFF

SEQ ID NO: 352619 - protein, 16 aa, Homo sapiens
  CDR3 for alpha chain variable domain of TCR clone 176310 (TRAV14/DV4, TRAJ53)
CAMREGGGGSNYKLTF

SEQ ID NO: 352620 - protein, 17 aa, Homo sapiens
  CDR3 for beta chain variable domain of TCR clone 176310 (TRBV13, TRBJ2-3)
CASSLSRVAGGRSTQYF

SEQ ID NO: 352621 - protein, 15 aa, Homo sapiens
  CDR3 for alpha chain variable domain of TCR clone 176311 (TRAV17, TRAJ42)
CATDHYGGSQGNLIF

SEQ ID NO: 352622 - protein, 14 aa, Homo sapiens
  CDR3 for beta chain variable domain of TCR clone 176311 (TRBV19, TRBJ2-5)
CASSIEHSQETLYF

SEQ ID NO: 352623 - protein, 13 aa, Homo sapiens
  CDR3 for alpha chain variable domain of TCR clone 176312 (TRAV20, TRAJ31)
CAVQAWNNARLMF

SEQ ID NO: 352624 - protein, 16 aa, Homo sapiens
  CDR3 for beta chain variable domain of TCR clone 176312 (TRBV6-6, TRBJ2-1)
CDSSWGGQGPYNEQFF

SEQ ID NO: 352625 - protein, 13 aa, Homo sapiens
  CDR3 for alpha chain variable domain of TCR clone 176313 (TRAV36/DV7, TRAJ37)
CAVFSSNTGKLIF

SEQ ID NO: 352626 - protein, 15 aa, Homo sapiens
  CDR3 for beta chain variable domain of TCR clone 176313 (TRBV5-1, TRBJ2-2)
CAISSQGRNTGELFF

SEQ ID NO: 352627 - protein, 15 aa, Homo sapiens
  CDR3 for alpha chain variable domain of TCR clone 176314 (TRAV21, TRAJ53)
CATLNSGGSNYKLTF

SEQ ID NO: 352628 - protein, 13 aa, Homo sapiens
  CDR3 for beta chain variable domain of TCR clone 176314 (TRBV19, TRBJ2-5)
CASRDSRRETQYF

SEQ ID NO: 352629 - protein, 10 aa, Homo sapiens
  CDR3 for alpha chain variable domain of TCR clone 176315 (TRAV12-2, TRAJ48)
CAGANEKLTF

SEQ ID NO: 352630 - protein, 20 aa, Homo sapiens
  CDR3 for beta chain variable domain of TCR clone 176315 (TRBV7-8, TRBJ2-2)
CASSHLFPGPTIHITGELFF

SEQ ID NO: 352631 - protein, 13 aa, Homo sapiens
  CDR3 for alpha chain variable domain of TCR clone 176316 (TRAV20, TRAJ40)
CAVPFSGTYKYIF

SEQ ID NO: 352632 - protein, 21 aa, Homo sapiens
  CDR3 for beta chain variable domain of TCR clone 176316 (TRBV15, TRBJ2-5)
AWGTQPCTCVPSQIGEETQYF

SEQ ID NO: 352633 - protein, 13 aa, Homo sapiens
  CDR3 for alpha chain variable domain of TCR clone 176317 (TRAV2, TRAJ16)
CCGAGSDGQKLLF

SEQ ID NO: 352634 - protein, 12 aa, Homo sapiens
  CDR3 for beta chain variable domain of TCR clone 176317 (TRBV6-5, TRBJ2-7)
CASYIYGYEQYF

SEQ ID NO: 352635 - protein, 11 aa, Homo sapiens
  CDR3 for alpha chain variable domain of TCR clone 176318 (TRAV22, TRAJ30)
CAGNRDDKIIF

SEQ ID NO: 352636 - protein, 16 aa, Homo sapiens
  CDR3 for beta chain variable domain of TCR clone 176318 (TRBV13, TRBJ2-2)
CASSPRTGEHTGELFF

SEQ ID NO: 352637 - protein, 17 aa, Homo sapiens
  CDR3 for alpha chain variable domain of TCR clone 176319 (TRAV13-1, TRAJ28)
CAASPPYSGAGSYQLTF

SEQ ID NO: 352638 - protein, 15 aa, Homo sapiens
  CDR3 for beta chain variable domain of TCR clone 176319 (TRBV6-1, TRBJ2-7)
CASSESMGDFYEQYF

SEQ ID NO: 352639 - protein, 21 aa, Homo sapiens
  CDR3 for alpha chain variable domain of TCR clone 176320 (TRAV1-2, TRAJ9)
CAALNTGGFKTILEQEQDYLL

SEQ ID NO: 352640 - protein, 14 aa, Homo sapiens
  CDR3 for beta chain variable domain of TCR clone 176320 (TRBV13, TRBJ2-3)
CASSSGSPTDTQYF

SEQ ID NO: 352641 - protein, 16 aa, Homo sapiens
  CDR3 for alpha chain variable domain of TCR clone 176321 (TRAV8-3, TRAJ44)
CTVGASNTGTASRLAF

SEQ ID NO: 352642 - protein, 15 aa, Homo sapiens
  CDR3 for beta chain variable domain of TCR clone 176321 (TRBV27, TRBJ1-5)
CASTFNRGSNQPQHF

SEQ ID NO: 352643 - protein, 13 aa, Homo sapiens
  CDR3 for alpha chain variable domain of TCR clone 176322 (TRAV13-1, TRAJ29)
CAASIGLNTPLVF

SEQ ID NO: 352644 - protein, 12 aa, Homo sapiens
  CDR3 for beta chain variable domain of TCR clone 176322 (TRBV19, TRBJ2-1)
CASSMQDTEQFF

SEQ ID NO: 352645 - protein, 14 aa, Homo sapiens
  CDR3 for alpha chain variable domain of TCR clone 176323 (TRAV1-2, TRAJ8)
CAVREDTGFQKLVS

SEQ ID NO: 352646 - protein, 15 aa, Homo sapiens
  CDR3 for beta chain variable domain of TCR clone 176323 (TRBV4-1, TRBJ2-7)
CASSQNTGRLYEQYF

SEQ ID NO: 352647 - protein, 11 aa, Homo sapiens
  CDR3 for alpha chain variable domain of TCR clone 176324 (TRAV1-1, TRAJ23)
CAVRQGGKLIF

SEQ ID NO: 352648 - protein, 11 aa, Homo sapiens
  CDR3 for beta chain variable domain of TCR clone 176324 (TRBV19, TRBJ1-2)
CASSISSGYTF

SEQ ID NO: 352649 - protein, 14 aa, Homo sapiens
  CDR3 for alpha chain variable domain of TCR clone 176325 (TRAV1-2, TRAJ16)
CAVNRFSDGQKLLF

SEQ ID NO: 352650 - protein, 14 aa, Homo sapiens
  CDR3 for beta chain variable domain of TCR clone 176325 (TRBV4-1, TRBJ2-2)
FASSQAVNTGELFF

SEQ ID NO: 352651 - protein, 15 aa, Homo sapiens
  CDR3 for alpha chain variable domain of TCR clone 176326 (TRAV8-3, TRAJ41)
CAVGSNTNSGYALNF

SEQ ID NO: 352652 - protein, 17 aa, Homo sapiens
  CDR3 for beta chain variable domain of TCR clone 176326 (TRBV25-1, TRBJ2-1)
CASSAYGRGRGVYEQFF

SEQ ID NO: 352653 - protein, 14 aa, Homo sapiens
  CDR3 for alpha chain variable domain of TCR clone 176327 (TRAV1-2, TRAJ16)
CAVNRFADGQKLLF

SEQ ID NO: 352654 - protein, 15 aa, Homo sapiens
  CDR3 for beta chain variable domain of TCR clone 176327 (TRBV3-1, TRBJ2-2)
CASSQGSGTFGELFF

SEQ ID NO: 352655 - protein, 10 aa, Homo sapiens
  CDR3 for alpha chain variable domain of TCR clone 176328 (TRAV12-1, TRAJ43)
CVVHNNDMRF

SEQ ID NO: 352656 - protein, 16 aa, Homo sapiens
  CDR3 for beta chain variable domain of TCR clone 176328 (TRBV20-1, TRBJ1-4)
CSAPGQGLLTNEKLFF

SEQ ID NO: 352657 - protein, 13 aa, Homo sapiens
  CDR3 for alpha chain variable domain of TCR clone 176329 (TRAV13-1, TRAJ9)
CAARGTGGFKTIF

SEQ ID NO: 352658 - protein, 16 aa, Homo sapiens
  CDR3 for beta chain variable domain of TCR clone 176329 (TRBV20-1, TRBJ1-2)
CSASMGQGVANYGYTF

SEQ ID NO: 352659 - protein, 13 aa, Homo sapiens
  CDR3 for alpha chain variable domain of TCR clone 176330 (TRAV27, TRAJ6)
CAGGTRGSYIPTF

SEQ ID NO: 352660 - protein, 15 aa, Homo sapiens
  CDR3 for beta chain variable domain of TCR clone 176330 (TRBV11-2, TRBJ1-3)
CASSLSPLVRGTKYF

SEQ ID NO: 352661 - protein, 14 aa, Homo sapiens
  CDR3 for alpha chain variable domain of TCR clone 176331 (TRAV26-1, TRAJ45)
CIEVTGGGADGLTF

SEQ ID NO: 352662 - protein, 14 aa, Homo sapiens
  CDR3 for beta chain variable domain of TCR clone 176331 (TRBV7-3, TRBJ2-1)
CASSLAGGTNEQFF

SEQ ID NO: 352663 - protein, 14 aa, Homo sapiens
  CDR3 for alpha chain variable domain of TCR clone 176332 (TRAV1-2, TRAJ16)
CAVNRFSDGQKLLF

SEQ ID NO: 352664 - protein, 18 aa, Homo sapiens
  CDR3 for beta chain variable domain of TCR clone 176332 (TRBV18, TRBJ1-3)
CASSPRGGAGPSGNTIYF

SEQ ID NO: 352665 - protein, 16 aa, Homo sapiens
  CDR3 for alpha chain variable domain of TCR clone 176333 (TRAV30, TRAJ24)
SGTEIVDADSWGKFQF

SEQ ID NO: 352666 - protein, 14 aa, Homo sapiens
  CDR3 for beta chain variable domain of TCR clone 176333 (TRBV12-5, TRBJ2-5)
CASGARTHQETQYF

SEQ ID NO: 352667 - protein, 12 aa, Homo sapiens
  CDR3 for alpha chain variable domain of TCR clone 176334 (TRAV2, TRAJ26)
YAGSPGRLWSEF

SEQ ID NO: 352668 - protein, 16 aa, Homo sapiens
  CDR3 for beta chain variable domain of TCR clone 176334 (TRBV13, TRBJ2-2)
CASSPRTGEHTGELFF

SEQ ID NO: 352669 - protein, 15 aa, Homo sapiens
  CDR3 for alpha chain variable domain of TCR clone 176335 (TRAV25, TRAJ53)
CPTSNSGGSNYKLTF

SEQ ID NO: 352670 - protein, 14 aa, Homo sapiens
  CDR3 for beta chain variable domain of TCR clone 176335 (TRBV11-2, TRBJ2-3)
CASSRLTRTDTQYF

SEQ ID NO: 352671 - protein, 16 aa, Homo sapiens
  CDR3 for alpha chain variable domain of TCR clone 176336 (TRAV16, TRAJ52)
CALSAAGGTSYGKLPF

SEQ ID NO: 352672 - protein, 12 aa, Homo sapiens
  CDR3 for beta chain variable domain of TCR clone 176336 (TRBV12-4, TRBJ1-3)
CASSFSGNTIYF

SEQ ID NO: 352673 - protein, 14 aa, Homo sapiens
  CDR3 for alpha chain variable domain of TCR clone 176337 (TRAV1-2, TRAJ8)
RAVREDTGFQKLVF

SEQ ID NO: 352674 - protein, 13 aa, Homo sapiens
  CDR3 for beta chain variable domain of TCR clone 176337 (TRBV12-4, TRBJ1-2)
CASSLRQGKGYTF

SEQ ID NO: 352675 - protein, 15 aa, Homo sapiens
  CDR3 for alpha chain variable domain of TCR clone 176338 (TRAV17, TRAJ23)
CATDAEDNQGGKLIF

SEQ ID NO: 352676 - protein, 12 aa, Homo sapiens
  CDR3 for beta chain variable domain of TCR clone 176338 (TRBV2, TRBJ2-1)
CAKREGYNQQFF

SEQ ID NO: 352677 - protein, 13 aa, Homo sapiens
  CDR3 for alpha chain variable domain of TCR clone 176339 (TRAV2, TRAJ40)
CAVVASGTYKYIF

SEQ ID NO: 352678 - protein, 16 aa, Homo sapiens
  CDR3 for beta chain variable domain of TCR clone 176339 (TRBV3-1, TRBJ1-6)
CASSQEFQGSYSPLHF

SEQ ID NO: 352679 - protein, 14 aa, Homo sapiens
  CDR3 for alpha chain variable domain of TCR clone 176340 (TRAV8-3, TRAJ10)
CAVGNAGGGNKLTF

SEQ ID NO: 352680 - protein, 13 aa, Homo sapiens
  CDR3 for beta chain variable domain of TCR clone 176340 (TRBV7-3, TRBJ2-1)
CASSPVAYNEQFF

SEQ ID NO: 352681 - protein, 13 aa, Homo sapiens
  CDR3 for alpha chain variable domain of TCR clone 176341 (TRAV8-3, TRAJ48)
CAVVPFGNEKLTF

SEQ ID NO: 352682 - protein, 15 aa, Homo sapiens
  CDR3 for beta chain variable domain of TCR clone 176341 (TRBV12-4, TRBJ2-5)
CASTLNSGRGETQYF

SEQ ID NO: 352683 - protein, 13 aa, Homo sapiens
  CDR3 for alpha chain variable domain of TCR clone 176342 (TRAV2, TRAJ29)
CAVEPTGNTPLVF

SEQ ID NO: 352684 - protein, 13 aa, Homo sapiens
  CDR3 for beta chain variable domain of TCR clone 176342 (TRBV7-3, TRBJ1-1)
CASSQDWGAEAFF

SEQ ID NO: 352685 - protein, 13 aa, Homo sapiens
  CDR3 for alpha chain variable domain of TCR clone 176343 (TRAV2, TRAJ24)
CAVTTDSWGKLQF

SEQ ID NO: 352686 - protein, 15 aa, Homo sapiens
  CDR3 for beta chain variable domain of TCR clone 176343 (TRBV13, TRBJ2-5)
CASSQSRGDQETQYF

SEQ ID NO: 352687 - protein, 16 aa, Homo sapiens
  CDR3 for alpha chain variable domain of TCR clone 176344 (TRAV26-1, TRAJ32)
CIIRTNYGGAINKLIF

SEQ ID NO: 352688 - protein, 14 aa, Homo sapiens
  CDR3 for beta chain variable domain of TCR clone 176344 (TRBV27, TRBJ1-1)
CASSLLSGLSEAFF

SEQ ID NO: 352689 - protein, 11 aa, Homo sapiens
  CDR3 for alpha chain variable domain of TCR clone 176345 (TRAV12-1, TRAJ30)
CVVNGQDKVIF

SEQ ID NO: 352690 - protein, 12 aa, Homo sapiens
  CDR3 for beta chain variable domain of TCR clone 176345 (TRBV27, TRBJ2-2)
CASKLYTGELFF

SEQ ID NO: 352691 - protein, 14 aa, Homo sapiens
  CDR3 for alpha chain variable domain of TCR clone 176346 (TRAV1-2, TRAJ16)
CAVNRFSDGQKLLF

SEQ ID NO: 352692 - protein, 14 aa, Homo sapiens
  CDR3 for beta chain variable domain of TCR clone 176346 (TRBV19, TRBJ1-1)
CATTAGTRGTEAFF

SEQ ID NO: 352693 - protein, 18 aa, Homo sapiens
  CDR3 for alpha chain variable domain of TCR clone 176347 (TRAV26-2, TRAJ33)
CCVLLHPEEPASNYQLIW

SEQ ID NO: 352694 - protein, 15 aa, Homo sapiens
  CDR3 for beta chain variable domain of TCR clone 176347 (TRBV5-1, TRBJ2-1)
CASSPPRAPYNEQFF

SEQ ID NO: 352695 - protein, 11 aa, Homo sapiens
  CDR3 for alpha chain variable domain of TCR clone 176348 (TRAV21, TRAJ34)
CAVTNTDKLIF

SEQ ID NO: 352696 - protein, 16 aa, Homo sapiens
  CDR3 for beta chain variable domain of TCR clone 176348 (TRBV4-3, TRBJ2-1)
CASSPALDRGVNEQFF

SEQ ID NO: 352697 - protein, 11 aa, Homo sapiens
  CDR3 for alpha chain variable domain of TCR clone 176349 (TRAV21, TRAJ11)
CAVNGYSTLTF

SEQ ID NO: 352698 - protein, 11 aa, Homo sapiens
  CDR3 for beta chain variable domain of TCR clone 176349 (TRBV11-2, TRBJ2-7)
CASSSDHEQYF

SEQ ID NO: 352699 - protein, 12 aa, Homo sapiens
  CDR3 for alpha chain variable domain of TCR clone 176350 (TRAV8-3, TRAJ26)
CAGDNYGQNFVF

SEQ ID NO: 352700 - protein, 12 aa, Homo sapiens
  CDR3 for beta chain variable domain of TCR clone 176350 (TRBV6-5, TRBJ2-2)
CASRQITGELFF

SEQ ID NO: 352701 - protein, 14 aa, Homo sapiens
  CDR3 for alpha chain variable domain of TCR clone 176351 (TRAV17, TRAJ57)
CATDPQGGSEKLVF

SEQ ID NO: 352702 - protein, 14 aa, Homo sapiens
  CDR3 for beta chain variable domain of TCR clone 176351 (TRBV13, TRBJ2-7)
CASSLKVASYEQYF

SEQ ID NO: 352703 - protein, 12 aa, Homo sapiens
  CDR3 for alpha chain variable domain of TCR clone 176352 (TRAV16, TRAJ29)
CALSLGNTPLVF

SEQ ID NO: 352704 - protein, 16 aa, Homo sapiens
  CDR3 for beta chain variable domain of TCR clone 176352 (TRBV7-3, TRBJ2-2)
CASSLKRGTLSGELFF

SEQ ID NO: 352705 - protein, 15 aa, Homo sapiens
  CDR3 for alpha chain variable domain of TCR clone 176353 (TRAV12-3, TRAJ52)
CNGGAGGTSYGKLTF

SEQ ID NO: 352706 - protein, 15 aa, Homo sapiens
  CDR3 for beta chain variable domain of TCR clone 176353 (TRBV7-9, TRBJ2-1)
CASSLGLAGGTEQFF

SEQ ID NO: 352707 - protein, 11 aa, Homo sapiens
  CDR3 for alpha chain variable domain of TCR clone 176354 (TRAV3, TRAJ21)
CAVGNFNKFYF

SEQ ID NO: 352708 - protein, 14 aa, Homo sapiens
  CDR3 for beta chain variable domain of TCR clone 176354 (TRBV29-1, TRBJ2-2)
CSGGGSGNTGELFF

SEQ ID NO: 352709 - protein, 13 aa, Homo sapiens
  CDR3 for alpha chain variable domain of TCR clone 176355 (TRAV26-1, TRAJ29)
CIVRRSGNTPLVF

SEQ ID NO: 352710 - protein, 15 aa, Homo sapiens
  CDR3 for beta chain variable domain of TCR clone 176355 (TRBV7-2, TRBJ2-1)
CASSSGLAGGNEQFF

SEQ ID NO: 352711 - protein, 14 aa, Homo sapiens
  CDR3 for alpha chain variable domain of TCR clone 176356 (TRAV25, TRAJ44)
CAVFPTSTASKLTF

SEQ ID NO: 352712 - protein, 14 aa, Homo sapiens
  CDR3 for beta chain variable domain of TCR clone 176356 (TRBV19, TRBJ1-1)
CASTGHRLNTEAFF

SEQ ID NO: 352713 - protein, 13 aa, Homo sapiens
  CDR3 for alpha chain variable domain of TCR clone 176357 (TRAV4, TRAJ22)
CLGGSGSARELTF

SEQ ID NO: 352714 - protein, 15 aa, Homo sapiens
  CDR3 for beta chain variable domain of TCR clone 176357 (TRBV7-9, TRBJ1-6)
CASSSPGRGNSPLHF

SEQ ID NO: 352715 - protein, 11 aa, Homo sapiens
  CDR3 for alpha chain variable domain of TCR clone 176358 (TRAV8-3, TRAJ49)
CAVGGGNQFYF

SEQ ID NO: 352716 - protein, 14 aa, Homo sapiens
  CDR3 for beta chain variable domain of TCR clone 176358 (TRBV7-6, TRBJ2-3)
CASSLGTVTDTQYF

SEQ ID NO: 352717 - protein, 13 aa, Homo sapiens
  CDR3 for alpha chain variable domain of TCR clone 176359 (TRAV13-1, TRAJ20)
CAARVSNDYKLSF

SEQ ID NO: 352718 - protein, 12 aa, Homo sapiens
  CDR3 for beta chain variable domain of TCR clone 176359 (TRBV7-8, TRBJ2-7)
CASSLGDREQYF

SEQ ID NO: 352719 - protein, 14 aa, Homo sapiens
  CDR3 for alpha chain variable domain of TCR clone 176360 (TRAV38-1, TRAJ40)
CALRPTSGTSKYIF

SEQ ID NO: 352720 - protein, 11 aa, Homo sapiens
  CDR3 for beta chain variable domain of TCR clone 176360 (TRBV25-1, TRBJ1-1)
PTWGGNTEAFF

SEQ ID NO: 352721 - protein, 10 aa, Homo sapiens
  CDR3 for alpha chain variable domain of TCR clone 176361 (TRAV26-1, TRAJ22)
CIVSLNFFWF

SEQ ID NO: 352722 - protein, 15 aa, Homo sapiens
  CDR3 for beta chain variable domain of TCR clone 176361 (TRBV11-2, TRBJ2-2)
CASSPSGGGTGELFF

SEQ ID NO: 352723 - protein, 14 aa, Homo sapiens
  CDR3 for alpha chain variable domain of TCR clone 176362 (TRAV12-2, TRAJ17)
CAVLFKAAGNKLTF

SEQ ID NO: 352724 - protein, 17 aa, Homo sapiens
  CDR3 for beta chain variable domain of TCR clone 176362 (TRBV20-1, TRBJ2-2)
CSASGSGQGGLTGELYF

SEQ ID NO: 352725 - protein, 14 aa, Homo sapiens
  CDR3 for alpha chain variable domain of TCR clone 176363 (TRAV6, TRAJ39)
CALPNNNAGTMLTF

SEQ ID NO: 352726 - protein, 17 aa, Homo sapiens
  CDR3 for beta chain variable domain of TCR clone 176363 (TRBV18, TRBJ2-3)
CASSSRGPASSTDTQYF

SEQ ID NO: 352727 - protein, 13 aa, Homo sapiens
  CDR3 for alpha chain variable domain of TCR clone 176364 (TRAV13-2, TRAJ48)
CAAMDFGNEKLTF

SEQ ID NO: 352728 - protein, 14 aa, Homo sapiens
  CDR3 for beta chain variable domain of TCR clone 176364 (TRBV20-1, TRBJ2-7)
CSAKRGRSSYEQYF

SEQ ID NO: 352729 - protein, 15 aa, Homo sapiens
  CDR3 for alpha chain variable domain of TCR clone 176365 (TRAV38-1, TRAJ57)
CAFMDSQGGSEKLVF

SEQ ID NO: 352730 - protein, 16 aa, Homo sapiens
  CDR3 for beta chain variable domain of TCR clone 176365 (TRBV10-3, TRBJ2-1)
CAIRGGGRGAYNEQFF

SEQ ID NO: 352731 - protein, 11 aa, Homo sapiens
  CDR3 for alpha chain variable domain of TCR clone 176366 (TRAV12-3, TRAJ43)
CAMSVSNDIRF

SEQ ID NO: 352732 - protein, 17 aa, Homo sapiens
  CDR3 for beta chain variable domain of TCR clone 176366 (TRBV20-1, TRBJ2-1)
CSASSSGLAGSYNEQFF

SEQ ID NO: 352733 - protein, 13 aa, Homo sapiens
  CDR3 for alpha chain variable domain of TCR clone 176367 (TRAV8-3, TRAJ36)
CAVGATGSNNLFF

SEQ ID NO: 352734 - protein, 14 aa, Homo sapiens
  CDR3 for beta chain variable domain of TCR clone 176367 (TRBV25-1, TRBJ1-1)
CASTHLGGNTEAFF

SEQ ID NO: 352735 - protein, 13 aa, Homo sapiens
  CDR3 for alpha chain variable domain of TCR clone 176368 (TRAV17, TRAJ9)
CATDYTGGFKTIF

SEQ ID NO: 352736 - protein, 14 aa, Homo sapiens
  CDR3 for beta chain variable domain of TCR clone 176368 (TRBV28, TRBJ2-3)
CASSWRGRADTQYF

SEQ ID NO: 352737 - protein, 14 aa, Homo sapiens
  CDR3 for alpha chain variable domain of TCR clone 176369 (TRAV3, TRAJ20)
CAVPPAPNDYKLSF

SEQ ID NO: 352738 - protein, 12 aa, Homo sapiens
  CDR3 for beta chain variable domain of TCR clone 176369 (TRBV20-1, TRBJ2-1)
CSARLGTDEQFF

SEQ ID NO: 352739 - protein, 16 aa, Homo sapiens
  CDR3 for alpha chain variable domain of TCR clone 176370 (TRAV12-3, TRAJ53)
CAMSPGSGGSNYKLTL

SEQ ID NO: 352740 - protein, 11 aa, Homo sapiens
  CDR3 for beta chain variable domain of TCR clone 176370 (TRBV29-1, TRBJ2-5)
CSGDRTGTQYF

SEQ ID NO: 352741 - protein, 14 aa, Homo sapiens
  CDR3 for alpha chain variable domain of TCR clone 176371 (TRAV13-1, TRAJ12)
RAASYMDSSYKLIF

SEQ ID NO: 352742 - protein, 13 aa, Homo sapiens
  CDR3 for beta chain variable domain of TCR clone 176371 (TRBV2, TRBJ2-5)
CASSDGIQETQYF

SEQ ID NO: 352743 - protein, 13 aa, Homo sapiens
  CDR3 for alpha chain variable domain of TCR clone 176372 (TRAV13-2, TRAJ31)
GAENLNNNARLMF

SEQ ID NO: 352744 - protein, 15 aa, Homo sapiens
  CDR3 for beta chain variable domain of TCR clone 176372 (TRBV5-4, TRBJ2-1)
CASSREGLPYNEQFF

SEQ ID NO: 352745 - protein, 16 aa, Homo sapiens
  CDR3 for alpha chain variable domain of TCR clone 176373 (TRAV12-3, TRAJ53)
CAMSVGSGGSNYKLTF

SEQ ID NO: 352746 - protein, 12 aa, Homo sapiens
  CDR3 for beta chain variable domain of TCR clone 176373 (TRBV5-1, TRBJ1-2)
CASSQDTYGYTF

SEQ ID NO: 352747 - protein, 16 aa, Homo sapiens
  CDR3 for alpha chain variable domain of TCR clone 176374 (TRAV12-2, TRAJ6)
CAAPLAGSGGSYIPTF

SEQ ID NO: 352748 - protein, 15 aa, Homo sapiens
  CDR3 for beta chain variable domain of TCR clone 176374 (TRBV6-6, TRBJ2-5)
CASSPGGGLEETQYF

SEQ ID NO: 352749 - protein, 14 aa, Homo sapiens
  CDR3 for alpha chain variable domain of TCR clone 176375 (TRAV21, TRAJ35)
CAVMPIGFGNVLHC

SEQ ID NO: 352750 - protein, 12 aa, Homo sapiens
  CDR3 for beta chain variable domain of TCR clone 176375 (TRBV20-1, TRBJ2-1)
CSARLGTDEQFF

SEQ ID NO: 352751 - protein, 13 aa, Homo sapiens
  CDR3 for alpha chain variable domain of TCR clone 176376 (TRAV12-3, TRAJ53)
CAMRGGSNYKLTF

SEQ ID NO: 352752 - protein, 15 aa, Homo sapiens
  CDR3 for beta chain variable domain of TCR clone 176376 (TRBV2, TRBJ2-1)
CATQARLVLIGEQFF

SEQ ID NO: 352753 - protein, 15 aa, Homo sapiens
  CDR3 for alpha chain variable domain of TCR clone 176377 (TRAV17, TRAJ56)
CATDANTGANSKLTF

SEQ ID NO: 352754 - protein, 14 aa, Homo sapiens
  CDR3 for beta chain variable domain of TCR clone 176377 (TRBV4-2, TRBJ2-3)
CASSQERGTDTQYF

SEQ ID NO: 352755 - protein, 14 aa, Homo sapiens
  CDR3 for alpha chain variable domain of TCR clone 176378 (TRAV23/DV6, TRAJ22)
CAASASGSARQLTF

SEQ ID NO: 352756 - protein, 16 aa, Homo sapiens
  CDR3 for beta chain variable domain of TCR clone 176378 (TRBV19, TRBJ2-2)
CASSFPGQGLAGELFF

SEQ ID NO: 352757 - protein, 14 aa, Homo sapiens
  CDR3 for alpha chain variable domain of TCR clone 176379 (TRAV8-2, TRAJ37)
CVVSISGNTGKLIF

SEQ ID NO: 352758 - protein, 19 aa, Homo sapiens
  CDR3 for beta chain variable domain of TCR clone 176379 (TRBV7-2, TRBJ2-3)
CASSFLSRNWGGGTDTQYF

SEQ ID NO: 352759 - protein, 12 aa, Homo sapiens
  CDR3 for alpha chain variable domain of TCR clone 176380 (TRAV12-3, TRAJ17)
CAMTLTGNKLTL

SEQ ID NO: 352760 - protein, 15 aa, Homo sapiens
  CDR3 for beta chain variable domain of TCR clone 176380 (TRBV20-1, TRBJ2-7)
CSARDRVSGMDEQDF

SEQ ID NO: 352761 - protein, 14 aa, Homo sapiens
  CDR3 for alpha chain variable domain of TCR clone 176381 (TRAV8-3, TRAJ39)
CAVGANNAGIMLTF

SEQ ID NO: 352762 - protein, 12 aa, Homo sapiens
  CDR3 for beta chain variable domain of TCR clone 176381 (TRBV11-3, TRBJ1-1)
CASSHRQGEAFF

SEQ ID NO: 352763 - protein, 14 aa, Homo sapiens
  CDR3 for alpha chain variable domain of TCR clone 176382 (TRAV4, TRAJ10)
CLVGDTGGGNKLTF

SEQ ID NO: 352764 - protein, 15 aa, Homo sapiens
  CDR3 for beta chain variable domain of TCR clone 176382 (TRBV20-1, TRBJ2-7)
CSARDRVSGMDEQYF

SEQ ID NO: 352765 - protein, 12 aa, Homo sapiens
  CDR3 for alpha chain variable domain of TCR clone 176383 (TRAV38-1, TRAJ20)
CAFIWNDYKLSF

SEQ ID NO: 352766 - protein, 14 aa, Homo sapiens
  CDR3 for beta chain variable domain of TCR clone 176383 (TRBV27, TRBJ1-1)
CASSPQGKTAEAFF

SEQ ID NO: 352767 - protein, 12 aa, Homo sapiens
  CDR3 for alpha chain variable domain of TCR clone 176384 (TRAV26-1, TRAJ36)
CIVRVRADNLFF

SEQ ID NO: 352768 - protein, 14 aa, Homo sapiens
  CDR3 for beta chain variable domain of TCR clone 176384 (TRBV7-8, TRBJ2-3)
CASSLEAGTDTQYF

SEQ ID NO: 352769 - protein, 13 aa, Homo sapiens
  CDR3 for alpha chain variable domain of TCR clone 176385 (TRAV21, TRAJ27)
CAARPGNAGKSTF

SEQ ID NO: 352770 - protein, 14 aa, Homo sapiens
  CDR3 for beta chain variable domain of TCR clone 176385 (TRBV11-2, TRBJ2-7)
CTSSLGAGAYEQYF

SEQ ID NO: 352771 - protein, 16 aa, Homo sapiens
  CDR3 for alpha chain variable domain of TCR clone 176386 (TRAV3, TRAJ21)
CAVRDIERGNFSKFYF

SEQ ID NO: 352772 - protein, 13 aa, Homo sapiens
  CDR3 for beta chain variable domain of TCR clone 176386 (TRBV27, TRBJ2-7)
CASSLTTGCEQYF

SEQ ID NO: 352773 - protein, 22 aa, Homo sapiens
  CDR3 for alpha chain variable domain of TCR clone 176387 (TRAV8-2, TRAJ45)
HLTKPSAHMSDAAEYSADGLTF

SEQ ID NO: 352774 - protein, 15 aa, Homo sapiens
  CDR3 for beta chain variable domain of TCR clone 176387 (TRBV7-9, TRBJ2-7)
CASSPGGGLTYEQYF

SEQ ID NO: 352775 - protein, 12 aa, Homo sapiens
  CDR3 for alpha chain variable domain of TCR clone 176388 (TRAV3, TRAJ43)
CAVRDPNNDMRF

SEQ ID NO: 352776 - protein, 13 aa, Homo sapiens
  CDR3 for beta chain variable domain of TCR clone 176388 (TRBV12-4, TRBJ2-7)
CASSPTETYEQYF

SEQ ID NO: 352777 - protein, 12 aa, Homo sapiens
  CDR3 for alpha chain variable domain of TCR clone 176389 (TRAV12-2, TRAJ7)
CAPEDGNNRLAF

SEQ ID NO: 352778 - protein, 12 aa, Homo sapiens
  CDR3 for beta chain variable domain of TCR clone 176389 (TRBV11-2, TRBJ2-2)
CASSLGGGELFF

SEQ ID NO: 352779 - protein, 15 aa, Homo sapiens
  CDR3 for alpha chain variable domain of TCR clone 176390 (TRAV12-1, TRAJ44)
CVVFVNTGTASKLTF

SEQ ID NO: 352780 - protein, 16 aa, Homo sapiens
  CDR3 for beta chain variable domain of TCR clone 176390 (TRBV5-7, TRBJ1-1)
CASSLFVGGPSTEAFF

SEQ ID NO: 352781 - protein, 13 aa, Homo sapiens
  CDR3 for alpha chain variable domain of TCR clone 176391 (TRAV27, TRAJ3)
ASLRGSSASKIIF

SEQ ID NO: 352782 - protein, 14 aa, Homo sapiens
  CDR3 for beta chain variable domain of TCR clone 176391 (TRBV7-8, TRBJ2-5)
CASSATGGQETQYF

SEQ ID NO: 352783 - protein, 14 aa, Homo sapiens
  CDR3 for alpha chain variable domain of TCR clone 176392 (TRAV38-1, TRAJ45)
CASHSGGGADGLTL

SEQ ID NO: 352784 - protein, 13 aa, Homo sapiens
  CDR3 for beta chain variable domain of TCR clone 176392 (TRBV10-3, TRBJ1-2)
CAISERDSYGHTF

SEQ ID NO: 352785 - protein, 11 aa, Homo sapiens
  CDR3 for alpha chain variable domain of TCR clone 176393 (TRAV27, TRAJ47)
CAGAYGNKLVF

SEQ ID NO: 352786 - protein, 15 aa, Homo sapiens
  CDR3 for beta chain variable domain of TCR clone 176393 (TRBV9, TRBJ2-7)
CASSPHEQGSYEQYV

SEQ ID NO: 352787 - protein, 14 aa, Homo sapiens
  CDR3 for alpha chain variable domain of TCR clone 176394 (TRAV12-2, TRAJ13)
CAVKKTGGYQKVTF

SEQ ID NO: 352788 - protein, 16 aa, Homo sapiens
  CDR3 for beta chain variable domain of TCR clone 176394 (TRBV12-5, TRBJ2-7)
CASGSQGAPTSSNSGR

SEQ ID NO: 352789 - protein, 13 aa, Homo sapiens
  CDR3 for alpha chain variable domain of TCR clone 176395 (TRAV21, TRAJ27)
CAARPGNAGKSTF

SEQ ID NO: 352790 - protein, 14 aa, Homo sapiens
  CDR3 for beta chain variable domain of TCR clone 176395 (TRBV7-9, TRBJ2-5)
CASRLDTAQETQYF

SEQ ID NO: 352791 - protein, 14 aa, Homo sapiens
  CDR3 for alpha chain variable domain of TCR clone 176396 (TRAV12-1, TRAJ3)
CGAARYSSASKIIF

SEQ ID NO: 352792 - protein, 15 aa, Homo sapiens
  CDR3 for beta chain variable domain of TCR clone 176396 (TRBV7-2, TRBJ2-6)
CASSREGSGANGLTF

SEQ ID NO: 352793 - protein, 13 aa, Homo sapiens
  CDR3 for alpha chain variable domain of TCR clone 176397 (TRAV3, TRAJ21)
CAVREPDFNKFYF

SEQ ID NO: 352794 - protein, 14 aa, Homo sapiens
  CDR3 for beta chain variable domain of TCR clone 176397 (TRBV28, TRBJ2-7)
CASRAAGLGYEQYF

SEQ ID NO: 352795 - protein, 14 aa, Homo sapiens
  CDR3 for alpha chain variable domain of TCR clone 176398 (TRAV16, TRAJ58)
CALFKETSGSRLTF

SEQ ID NO: 352796 - protein, 14 aa, Homo sapiens
  CDR3 for beta chain variable domain of TCR clone 176398 (TRBV12-5, TRBJ2-5)
CASGSRTHQETQYF

SEQ ID NO: 352797 - protein, 14 aa, Homo sapiens
  CDR3 for alpha chain variable domain of TCR clone 176399 (TRAV12-1, TRAJ23)
CVVMIYNQGGKLIF

SEQ ID NO: 352798 - protein, 23 aa, Homo sapiens
  CDR3 for beta chain variable domain of TCR clone 176399 (TRBV7-3, TRBJ1-6)
CASSLTSRDEASDQSSYNSPLHF

SEQ ID NO: 352799 - protein, 14 aa, Homo sapiens
  CDR3 for alpha chain variable domain of TCR clone 176400 (TRAV12-1, TRAJ23)
CVVIVYNQGGKLVF

SEQ ID NO: 352800 - protein, 15 aa, Homo sapiens
  CDR3 for beta chain variable domain of TCR clone 176400 (TRBV20-1, TRBJ1-5)
CSAKPPGQGPQPQHF

SEQ ID NO: 352801 - protein, 12 aa, Homo sapiens
  CDR3 for alpha chain variable domain of TCR clone 176401 (TRAV29/DV5, TRAJ49)
CAATDTGNQFYF

SEQ ID NO: 352802 - protein, 15 aa, Homo sapiens
  CDR3 for beta chain variable domain of TCR clone 176401 (TRBV11-2, TRBJ2-7)
CASSLAGGVATEQYF

SEQ ID NO: 352803 - protein, 12 aa, Homo sapiens
  CDR3 for alpha chain variable domain of TCR clone 176402 (TRAV3, TRAJ20)
CALRYHDYKLSF

SEQ ID NO: 352804 - protein, 15 aa, Homo sapiens
  CDR3 for beta chain variable domain of TCR clone 176402 (TRBV9, TRBJ1-6)
CASSVAGTGDSPLHF

SEQ ID NO: 352805 - protein, 10 aa, Homo sapiens
  CDR3 for alpha chain variable domain of TCR clone 176403 (TRAV36/DV7, TRAJ48)
CAVGNEKLTF

SEQ ID NO: 352806 - protein, 16 aa, Homo sapiens
  CDR3 for beta chain variable domain of TCR clone 176403 (TRBV18, TRBJ1-1)
CASSPGVGGRGGEAFF

SEQ ID NO: 352807 - protein, 13 aa, Homo sapiens
  CDR3 for alpha chain variable domain of TCR clone 176404 (TRAV12-3, TRAJ41)
CAIAPNSGYALNF

SEQ ID NO: 352808 - protein, 14 aa, Homo sapiens
  CDR3 for beta chain variable domain of TCR clone 176404 (TRBV7-2, TRBJ1-3)
CASSLGTAGNTIHF

SEQ ID NO: 352809 - protein, 13 aa, Homo sapiens
  CDR3 for alpha chain variable domain of TCR clone 176405 (TRAV29/DV5, TRAJ52)
CAAGFRGAGGTSY

SEQ ID NO: 352810 - protein, 13 aa, Homo sapiens
  CDR3 for beta chain variable domain of TCR clone 176405 (TRBV4-1, TRBJ2-2)
CASSQENTGELFF

SEQ ID NO: 352811 - protein, 14 aa, Homo sapiens
  CDR3 for alpha chain variable domain of TCR clone 176406 (TRAV13-2, TRAJ17)
CAENSKAAGNKLTF

SEQ ID NO: 352812 - protein, 13 aa, Homo sapiens
  CDR3 for beta chain variable domain of TCR clone 176406 (TRBV7-9, TRBJ2-1)
CASSWESYNEQFF

SEQ ID NO: 352813 - protein, 14 aa, Homo sapiens
  CDR3 for alpha chain variable domain of TCR clone 176407 (TRAV17, TRAJ54)
CATDANQGAQKLAF

SEQ ID NO: 352814 - protein, 12 aa, Homo sapiens
  CDR3 for beta chain variable domain of TCR clone 176407 (TRBV7-9, TRBJ2-7)
CASSIKREEQYF

SEQ ID NO: 352815 - protein, 14 aa, Homo sapiens
  CDR3 for alpha chain variable domain of TCR clone 176408 (TRAV12-2, TRAJ45)
CAVYSGGGADGLTF

SEQ ID NO: 352816 - protein, 14 aa, Homo sapiens
  CDR3 for beta chain variable domain of TCR clone 176408 (TRBV7-9, TRBJ2-1)
CASSPRDSLYEQFF

SEQ ID NO: 352817 - protein, 13 aa, Homo sapiens
  CDR3 for alpha chain variable domain of TCR clone 176409 (TRAV2, TRAJ13)
CAVESGGYQKVTF

SEQ ID NO: 352818 - protein, 16 aa, Homo sapiens
  CDR3 for beta chain variable domain of TCR clone 176409 (TRBV13, TRBJ2-2)
CASSPRTGEHTGELFF

SEQ ID NO: 352819 - protein, 13 aa, Homo sapiens
  CDR3 for alpha chain variable domain of TCR clone 176410 (TRAV8-3, TRAJ44)
CAVVPGTASKLTF

SEQ ID NO: 352820 - protein, 17 aa, Homo sapiens
  CDR3 for beta chain variable domain of TCR clone 176410 (TRBV20-1, TRBJ1-5)
CSASLSPGQGGNQPQHF

SEQ ID NO: 352821 - protein, 14 aa, Homo sapiens
  CDR3 for alpha chain variable domain of TCR clone 176411 (TRAV13-1, TRAJ35)
CAASKGGFGNVLHC

SEQ ID NO: 352822 - protein, 13 aa, Homo sapiens
  CDR3 for beta chain variable domain of TCR clone 176411 (TRBV7-3, TRBJ1-1)
CVSSLDWGAEAFF

SEQ ID NO: 352823 - protein, 11 aa, Homo sapiens
  CDR3 for alpha chain variable domain of TCR clone 176412 (TRAV2, TRAJ13)
CASGGYQKVTF

SEQ ID NO: 352824 - protein, 15 aa, Homo sapiens
  CDR3 for beta chain variable domain of TCR clone 176412 (TRBV11-3, TRBJ2-3)
CASSAGTVVTNTQYF

SEQ ID NO: 352825 - protein, 15 aa, Homo sapiens
  CDR3 for alpha chain variable domain of TCR clone 176413 (TRAV34, TRAJ38)
CGADFTPGNNRKLMW

SEQ ID NO: 352826 - protein, 16 aa, Homo sapiens
  CDR3 for beta chain variable domain of TCR clone 176413 (TRBV6-1, TRBJ2-3)
CASSEVIGQGTDTQYF

SEQ ID NO: 352827 - protein, 14 aa, Homo sapiens
  CDR3 for alpha chain variable domain of TCR clone 176414 (TRAV1-1, TRAJ40)
CAVPNTSGTYKYIF

SEQ ID NO: 352828 - protein, 16 aa, Homo sapiens
  CDR3 for beta chain variable domain of TCR clone 176414 (TRBV3-1, TRBJ1-4)
CASSQDLGGAGEKLFF

SEQ ID NO: 352829 - protein, 15 aa, Homo sapiens
  CDR3 for alpha chain variable domain of TCR clone 176415 (TRAV25, TRAJ52)
CAGRPGGTSYGKLTF

SEQ ID NO: 352830 - protein, 20 aa, Homo sapiens
  CDR3 for beta chain variable domain of TCR clone 176415 (TRBV11-1, TRBJ2-6)
CASSAEFQPGMSSGANVLTF

SEQ ID NO: 352831 - protein, 10 aa, Homo sapiens
  CDR3 for alpha chain variable domain of TCR clone 176416 (TRAV1-2, TRAJ31)
CAFFDARLMF

SEQ ID NO: 352832 - protein, 14 aa, Homo sapiens
  CDR3 for beta chain variable domain of TCR clone 176416 (TRBV19, TRBJ2-1)
CASPTFVSSGEQFF

SEQ ID NO: 352833 - protein, 12 aa, Homo sapiens
  CDR3 for alpha chain variable domain of TCR clone 176417 (TRAV12-2, TRAJ9)
CAVNTGGFKTIF

SEQ ID NO: 352834 - protein, 14 aa, Homo sapiens
  CDR3 for beta chain variable domain of TCR clone 176417 (TRBV7-9, TRBJ2-1)
CASSDNSGYNEQLF

SEQ ID NO: 352835 - protein, 16 aa, Homo sapiens
  CDR3 for alpha chain variable domain of TCR clone 176418 (TRAV16, TRAJ57)
CAPYLITQGGSEKLVF

SEQ ID NO: 352836 - protein, 16 aa, Homo sapiens
  CDR3 for beta chain variable domain of TCR clone 176418 (TRBV7-9, TRBJ2-7)
CASSSPSANTVNEQYF

SEQ ID NO: 352837 - protein, 14 aa, Homo sapiens
  CDR3 for alpha chain variable domain of TCR clone 176419 (TRAV13-1, TRAJ35)
FAASKGGFGNVLHF

SEQ ID NO: 352838 - protein, 13 aa, Homo sapiens
  CDR3 for beta chain variable domain of TCR clone 176419 (TRBV7-3, TRBJ1-1)
CASSQDWGAEAFF

SEQ ID NO: 352839 - protein, 17 aa, Homo sapiens
  CDR3 for alpha chain variable domain of TCR clone 176420 (TRAV12-2, TRAJ36)
CAVKDNLFFGTGTRLTV

SEQ ID NO: 352840 - protein, 11 aa, Homo sapiens
  CDR3 for beta chain variable domain of TCR clone 176420 (TRBV28, TRBJ2-2)
CASTVAGANTG

SEQ ID NO: 352841 - protein, 12 aa, Homo sapiens
  CDR3 for alpha chain variable domain of TCR clone 176421 (TRAV13-1, TRAJ21)
CAAKEGFNKFYF

SEQ ID NO: 352842 - protein, 16 aa, Homo sapiens
  CDR3 for beta chain variable domain of TCR clone 176421 (TRBV18, TRBJ2-3)
CASSPGGLASTDTQYF

SEQ ID NO: 352843 - protein, 13 aa, Homo sapiens
  CDR3 for alpha chain variable domain of TCR clone 176422 (TRAV8-3, TRAJ44)
CAVVPGTASKLTF

SEQ ID NO: 352844 - protein, 14 aa, Homo sapiens
  CDR3 for beta chain variable domain of TCR clone 176422 (TRBV7-3, TRBJ2-1)
CASSLAGGTNEQFF

SEQ ID NO: 352845 - protein, 13 aa, Homo sapiens
  CDR3 for alpha chain variable domain of TCR clone 176423 (TRAV20, TRAJ20)
CAVQAGSGYKPSF

SEQ ID NO: 352846 - protein, 12 aa, Homo sapiens
  CDR3 for beta chain variable domain of TCR clone 176423 (TRBV11-2, TRBJ2-2)
CASSLGGGELFF

SEQ ID NO: 352847 - protein, 12 aa, Homo sapiens
  CDR3 for alpha chain variable domain of TCR clone 176424 (TRAV13-1, TRAJ49)
CAASPMGNQFYF

SEQ ID NO: 352848 - protein, 14 aa, Homo sapiens
  CDR3 for beta chain variable domain of TCR clone 176424 (TRBV11-2, TRBJ2-7)
CASSLGAGAYEQYF

SEQ ID NO: 352849 - protein, 16 aa, Homo sapiens
  CDR3 for alpha chain variable domain of TCR clone 176425 (TRAV12-2, TRAJ56)
CAVRRVDTGANSNLTF

SEQ ID NO: 352850 - protein, 11 aa, Homo sapiens
  CDR3 for beta chain variable domain of TCR clone 176425 (TRBV3-1, TRBJ2-7)
CASSQVREQYF

SEQ ID NO: 352851 - protein, 11 aa, Homo sapiens
  CDR3 for alpha chain variable domain of TCR clone 176426 (TRAV1-2, TRAJ11)
CAVRGYSTLTF

SEQ ID NO: 352852 - protein, 15 aa, Homo sapiens
  CDR3 for beta chain variable domain of TCR clone 176426 (TRBV27, TRBJ1-6)
CASSFDRGLGSPLHF

SEQ ID NO: 352853 - protein, 14 aa, Homo sapiens
  CDR3 for alpha chain variable domain of TCR clone 176427 (TRAV26-1, TRAJ39)
CIVRGSRAGNMLTF

SEQ ID NO: 352854 - protein, 15 aa, Homo sapiens
  CDR3 for beta chain variable domain of TCR clone 176427 (TRBV7-9, TRBJ1-5)
CASSQGHQPNQPHHF

SEQ ID NO: 352855 - protein, 12 aa, Homo sapiens
  CDR3 for alpha chain variable domain of TCR clone 176428 (TRAV27, TRAJ58)
CAGARDTSRLTF

SEQ ID NO: 352856 - protein, 14 aa, Homo sapiens
  CDR3 for beta chain variable domain of TCR clone 176428 (TRBV7-9, TRBJ2-5)
CASSLVGGEETQYF

SEQ ID NO: 352857 - protein, 13 aa, Homo sapiens
  CDR3 for alpha chain variable domain of TCR clone 176429 (TRAV16, TRAJ10)
CAPAREEETNSTV

SEQ ID NO: 352858 - protein, 15 aa, Homo sapiens
  CDR3 for beta chain variable domain of TCR clone 176429 (TRBV6-3, TRBJ2-7)
CASSSPGTVFYEQYF

SEQ ID NO: 352859 - protein, 17 aa, Homo sapiens
  CDR3 for alpha chain variable domain of TCR clone 176430 (TRAV26-1, TRAJ37)
CIVRVITVSSNTGKLIF

SEQ ID NO: 352860 - protein, 16 aa, Homo sapiens
  CDR3 for beta chain variable domain of TCR clone 176430 (TRBV4-2, TRBJ1-1)
CASSQAGFGMNTEAFF

SEQ ID NO: 352861 - protein, 13 aa, Homo sapiens
  CDR3 for alpha chain variable domain of TCR clone 176431 (TRAV3, TRAJ21)
CAVREPNFNKFYF

SEQ ID NO: 352862 - protein, 14 aa, Homo sapiens
  CDR3 for beta chain variable domain of TCR clone 176431 (TRBV4-2, TRBJ2-1)
CASGLDRAYHEQFF

SEQ ID NO: 352863 - protein, 15 aa, Homo sapiens
  CDR3 for alpha chain variable domain of TCR clone 176432 (TRAV8-3, TRAJ11)
CAVGLLNSGYSTLTF

SEQ ID NO: 352864 - protein, 16 aa, Homo sapiens
  CDR3 for beta chain variable domain of TCR clone 176432 (TRBV7-9, TRBJ1-2)
CASSFGFSSGEDGYTF

SEQ ID NO: 352865 - protein, 13 aa, Homo sapiens
  CDR3 for alpha chain variable domain of TCR clone 176433 (TRAV2, TRAJ15)
CAVASQAGTALTF

SEQ ID NO: 352866 - protein, 16 aa, Homo sapiens
  CDR3 for beta chain variable domain of TCR clone 176433 (TRBV18, TRBJ1-5)
CASSPYRVEGNQPQHF

SEQ ID NO: 352867 - protein, 17 aa, Homo sapiens
  CDR3 for alpha chain variable domain of TCR clone 176434 (TRAV13-1, TRAJ52)
CAASSGAGGTSDGKLTF

SEQ ID NO: 352868 - protein, 15 aa, Homo sapiens
  CDR3 for beta chain variable domain of TCR clone 176434 (TRBV7-2, TRBJ2-1)
CASSSGLAGGNEQFF

SEQ ID NO: 352869 - protein, 15 aa, Homo sapiens
  CDR3 for alpha chain variable domain of TCR clone 176435 (TRAV12-1, TRAJ42)
CVVTRDGGSQGNLIF

SEQ ID NO: 352870 - protein, 13 aa, Homo sapiens
  CDR3 for beta chain variable domain of TCR clone 176435 (TRBV2, TRBJ2-7)
CASSVGGSGEQYF

SEQ ID NO: 352871 - protein, 14 aa, Homo sapiens
  CDR3 for alpha chain variable domain of TCR clone 176436 (TRAV16, TRAJ15)
CALSFNQAGTALIF

SEQ ID NO: 352872 - protein, 16 aa, Homo sapiens
  CDR3 for beta chain variable domain of TCR clone 176436 (TRBV9, TRBJ2-7)
CASSGGPDRSPYEQYF

SEQ ID NO: 352873 - protein, 12 aa, Homo sapiens
  CDR3 for alpha chain variable domain of TCR clone 176437 (TRAV13-2, TRAJ23)
CAERHRVGKLIF

SEQ ID NO: 352874 - protein, 15 aa, Homo sapiens
  CDR3 for beta chain variable domain of TCR clone 176437 (TRBV7-9, TRBJ1-6)
CASSSPGRGNSPLHF

SEQ ID NO: 352875 - protein, 11 aa, Homo sapiens
  CDR3 for alpha chain variable domain of TCR clone 176438 (TRAV17, TRAJ43)
CATDNNNNMRF

SEQ ID NO: 352876 - protein, 15 aa, Homo sapiens
  CDR3 for beta chain variable domain of TCR clone 176438 (TRBV20-1, TRBJ1-2)
CSAIRTGAFNYGYTF

SEQ ID NO: 352877 - protein, 15 aa, Homo sapiens
  CDR3 for alpha chain variable domain of TCR clone 176439 (TRAV13-1, TRAJ11)
CAASNRNSGYSTLTF

SEQ ID NO: 352878 - protein, 14 aa, Homo sapiens
  CDR3 for beta chain variable domain of TCR clone 176439 (TRBV7-2, TRBJ2-7)
CASRSQGAAYEQYF

SEQ ID NO: 352879 - protein, 15 aa, Homo sapiens
  CDR3 for alpha chain variable domain of TCR clone 176440 (TRAV29/DV5, TRAJ29)
CAASERSSGNTPLVF

SEQ ID NO: 352880 - protein, 17 aa, Homo sapiens
  CDR3 for beta chain variable domain of TCR clone 176440 (TRBV4-1, IGHJ2)
CASSQEGPRGVEEKLFF

SEQ ID NO: 352881 - protein, 14 aa, Homo sapiens
  CDR3 for alpha chain variable domain of TCR clone 176441 (TRAV1-1, TRAJ30)
SALSESRIDDKIIF

SEQ ID NO: 352882 - protein, 16 aa, Homo sapiens
  CDR3 for beta chain variable domain of TCR clone 176441 (TRBV7-2, TRBJ1-4)
CASSPVGRFDREKLFF

SEQ ID NO: 352883 - protein, 14 aa, Homo sapiens
  CDR3 for alpha chain variable domain of TCR clone 176442 (TRAV1-2, TRAJ16)
CAVNRFSDGQKLLF

SEQ ID NO: 352884 - protein, 14 aa, Homo sapiens
  CDR3 for beta chain variable domain of TCR clone 176442 (TRBV4-2, TRBJ2-1)
CACGLDRAYNEQFF

SEQ ID NO: 352885 - protein, 15 aa, Homo sapiens
  CDR3 for alpha chain variable domain of TCR clone 176443 (TRAV17, TRAJ52)
CAMEAGGTSYGKLTF

SEQ ID NO: 352886 - protein, 14 aa, Homo sapiens
  CDR3 for beta chain variable domain of TCR clone 176443 (TRBV28, TRBJ1-5)
CASSLGVLVKPQHF

SEQ ID NO: 352887 - protein, 15 aa, Homo sapiens
  CDR3 for alpha chain variable domain of TCR clone 176444 (TRAV8-4, TRAJ7)
CAVSGGNYGNNRLAF

SEQ ID NO: 352888 - protein, 13 aa, Homo sapiens
  CDR3 for beta chain variable domain of TCR clone 176444 (TRBV10-3, TRBJ2-7)
CASKLAVNYEQYF

SEQ ID NO: 352889 - protein, 16 aa, Homo sapiens
  CDR3 for alpha chain variable domain of TCR clone 176445 (TRAV3, TRAJ10)
CAVRDLNAGGGNKLTF

SEQ ID NO: 352890 - protein, 16 aa, Homo sapiens
  CDR3 for beta chain variable domain of TCR clone 176445 (TRBV6-3, TRBJ1-2)
CASSYSRRASNYGYTF

SEQ ID NO: 352891 - protein, 11 aa, Homo sapiens
  CDR3 for alpha chain variable domain of TCR clone 176446 (TRAV3, TRAJ21)
CAVGNFNKFSF

SEQ ID NO: 352892 - protein, 16 aa, Homo sapiens
  CDR3 for beta chain variable domain of TCR clone 176446 (TRBV19, TRBJ2-1)
CASSKAGPSSYNEQVF

SEQ ID NO: 352893 - protein, 15 aa, Homo sapiens
  CDR3 for alpha chain variable domain of TCR clone 176447 (TRAV3, TRAJ20)
CAVRDSRSNDYKVSF

SEQ ID NO: 352894 - protein, 14 aa, Homo sapiens
  CDR3 for beta chain variable domain of TCR clone 176447 (TRBV20-1, TRBJ2-7)
CSARRGNGIYEQYF

SEQ ID NO: 352895 - protein, 23 aa, Homo sapiens
  CDR3 for alpha chain variable domain of TCR clone 176448 (TRAV8-4, TRAJ32)
CAAYMVVLQTSSSLELALCFLSS

SEQ ID NO: 352896 - protein, 16 aa, Homo sapiens
  CDR3 for beta chain variable domain of TCR clone 176448 (TRBV27, TRBJ2-2)
CASSPLAAANTGELFF

SEQ ID NO: 352897 - protein, 13 aa, Homo sapiens
  CDR3 for alpha chain variable domain of TCR clone 176449 (TRAV12-1, TRAJ13)
CVVALLGCQKVTF

SEQ ID NO: 352898 - protein, 13 aa, Homo sapiens
  CDR3 for beta chain variable domain of TCR clone 176449 (TRBV20-1, TRBJ2-5)
CSAILTGQETQYF

SEQ ID NO: 352899 - protein, 15 aa, Homo sapiens
  CDR3 for alpha chain variable domain of TCR clone 176450 (TRAV12-3, TRAJ6)
CAMSATTGGSDIPTF

SEQ ID NO: 352900 - protein, 13 aa, Homo sapiens
  CDR3 for beta chain variable domain of TCR clone 176450 (TRBV27, TRBJ2-1)
CASRTLGVGEQFF

SEQ ID NO: 352901 - protein, 14 aa, Homo sapiens
  CDR3 for alpha chain variable domain of TCR clone 176451 (TRAV9-2, TRAJ39)
CALYIYNAGNMLTF

SEQ ID NO: 352902 - protein, 19 aa, Homo sapiens
  CDR3 for beta chain variable domain of TCR clone 176451 (TRBV11-3, TRBJ2-2)
CASSTRPGAKTTNTGELFF

SEQ ID NO: 352903 - protein, 12 aa, Homo sapiens
  CDR3 for alpha chain variable domain of TCR clone 176452 (TRAV13-1, TRAJ45)
CAATRGADGLTF

SEQ ID NO: 352904 - protein, 14 aa, Homo sapiens
  CDR3 for beta chain variable domain of TCR clone 176452 (TRBV19, TRBJ2-2)
CDSSTLHRSGELFF

SEQ ID NO: 352905 - protein, 14 aa, Homo sapiens
  CDR3 for alpha chain variable domain of TCR clone 176453 (TRAV26-1, TRAJ38)
CIADNAGNNHKLIW

SEQ ID NO: 352906 - protein, 15 aa, Homo sapiens
  CDR3 for beta chain variable domain of TCR clone 176453 (TRBV4-1, TRBJ1-1)
CASSQEWGHYTEAFF

SEQ ID NO: 352907 - protein, 11 aa, Homo sapiens
  CDR3 for alpha chain variable domain of TCR clone 176454 (TRAV35, TRAJ42)
CKGGSQGNLIF

SEQ ID NO: 352908 - protein, 13 aa, Homo sapiens
  CDR3 for beta chain variable domain of TCR clone 176454 (TRBV24-1, TRBJ2-2)
CATSDWSTGELFF

SEQ ID NO: 352909 - protein, 14 aa, Homo sapiens
  CDR3 for alpha chain variable domain of TCR clone 176455 (TRAV26-1, TRAJ38)
CIADNAGNNRKLIW

SEQ ID NO: 352910 - protein, 13 aa, Homo sapiens
  CDR3 for beta chain variable domain of TCR clone 176455 (TRBV11-3, TRBJ1-1)
CATEEGLNTEAFF

SEQ ID NO: 352911 - protein, 17 aa, Homo sapiens
  CDR3 for alpha chain variable domain of TCR clone 176456 (TRAV26-1, TRAJ11)
CIVRVGQSNSGYITLTL

SEQ ID NO: 352912 - protein, 13 aa, Homo sapiens
  CDR3 for beta chain variable domain of TCR clone 176456 (TRBV7-3, TRBJ1-1)
CASSQDWGAEAFF

SEQ ID NO: 352913 - protein, 11 aa, Homo sapiens
  CDR3 for alpha chain variable domain of TCR clone 176457 (TRAV1-2, TRAJ31)
CAVNNNARLMF

SEQ ID NO: 352914 - protein, 14 aa, Homo sapiens
  CDR3 for beta chain variable domain of TCR clone 176457 (TRBV19, TRBJ2-1)
CASPTFVLSGEQFF

SEQ ID NO: 352915 - protein, 17 aa, Homo sapiens
  CDR3 for alpha chain variable domain of TCR clone 176458 (TRAV3, TRAJ12)
CAVRDGGRMDGSDKLIF

SEQ ID NO: 352916 - protein, 14 aa, Homo sapiens
  CDR3 for beta chain variable domain of TCR clone 176458 (TRBV7-9, TRBJ1-2)
CASSRQGANYGYTF

SEQ ID NO: 352917 - protein, 13 aa, Homo sapiens
  CDR3 for alpha chain variable domain of TCR clone 176459 (TRAV27, TRAJ56)
CAGKPGANSKLTC

SEQ ID NO: 352918 - protein, 18 aa, Homo sapiens
  CDR3 for beta chain variable domain of TCR clone 176459 (TRBV11-2, TRBJ2-3)
CASSLGGASRGAPNTQYF

SEQ ID NO: 352919 - protein, 15 aa, Homo sapiens
  CDR3 for alpha chain variable domain of TCR clone 176460 (TRAV16, TRAJ23)
CALSGGQGGSEKLVF

SEQ ID NO: 352920 - protein, 16 aa, Homo sapiens
  CDR3 for beta chain variable domain of TCR clone 176460 (TRBV20-1, TRBJ1-4)
CSAPGQGLLTNEKLFF

SEQ ID NO: 352921 - protein, 12 aa, Homo sapiens
  CDR3 for alpha chain variable domain of TCR clone 176461 (TRAV2, TRAJ8)
CAVGQGFQKLVF

SEQ ID NO: 352922 - protein, 12 aa, Homo sapiens
  CDR3 for beta chain variable domain of TCR clone 176461 (TRBV12-4, TRBJ2-1)
CASSPGRNEQFF

SEQ ID NO: 352923 - protein, 15 aa, Homo sapiens
  CDR3 for alpha chain variable domain of TCR clone 176462 (TRAV12-2, TRAJ43)
CAFDMRFGAGTRLTV

SEQ ID NO: 352924 - protein, 16 aa, Homo sapiens
  CDR3 for beta chain variable domain of TCR clone 176462 (TRBV19, TRBJ2-1)
CASSIQAGGSYNEQFF

SEQ ID NO: 352925 - protein, 11 aa, Homo sapiens
  CDR3 for alpha chain variable domain of TCR clone 176463 (TRAV20, TRAJ23)
CACNQGGKLIF

SEQ ID NO: 352926 - protein, 16 aa, Homo sapiens
  CDR3 for beta chain variable domain of TCR clone 176463 (TRBV7-8, TRBJ2-5)
CASSFGVQPAQETQYF

SEQ ID NO: 352927 - protein, 14 aa, Homo sapiens
  CDR3 for alpha chain variable domain of TCR clone 176464 (TRAV35, TRAJ33)
CAGSSQDSNYQLIW

SEQ ID NO: 352928 - protein, 16 aa, Homo sapiens
  CDR3 for beta chain variable domain of TCR clone 176464 (TRBV28, TRBJ2-7)
CASSPWVATGDLSQYF

SEQ ID NO: 352929 - protein, 12 aa, Homo sapiens
  CDR3 for alpha chain variable domain of TCR clone 176465 (TRAV8-6, TRAJ4)
CAVSDLPNKLIF

SEQ ID NO: 352930 - protein, 14 aa, Homo sapiens
  CDR3 for beta chain variable domain of TCR clone 176465 (TRBV6-6, TRBJ1-5)
CASVDSGFNQPQHF

SEQ ID NO: 352931 - protein, 13 aa, Homo sapiens
  CDR3 for alpha chain variable domain of TCR clone 176466 (TRAV20, TRAJ20)
CAVRWVRDYKLSF

SEQ ID NO: 352932 - protein, 15 aa, Homo sapiens
  CDR3 for beta chain variable domain of TCR clone 176466 (TRBV10-2, TRBJ2-6)
CASSEQGTGANGLTF

SEQ ID NO: 352933 - protein, 19 aa, Homo sapiens
  CDR3 for alpha chain variable domain of TCR clone 176467 (TRAV25, TRAJ20)
TATQTTDVGILPHAYKLSF

SEQ ID NO: 352934 - protein, 16 aa, Homo sapiens
  CDR3 for beta chain variable domain of TCR clone 176467 (TRBV19, TRBJ2-2)
CASRSPGTGATGELFF

SEQ ID NO: 352935 - protein, 23 aa, Homo sapiens
  CDR3 for alpha chain variable domain of TCR clone 176468 (TRAV1-1, TRAJ29)
LLQELQMKDSASYLLGGNTPLVF

SEQ ID NO: 352936 - protein, 12 aa, Homo sapiens
  CDR3 for beta chain variable domain of TCR clone 176468 (TRBV11-2, TRBJ2-2)
CASSLGGGELFF

SEQ ID NO: 352937 - protein, 14 aa, Homo sapiens
  CDR3 for alpha chain variable domain of TCR clone 176469 (TRAV12-3, TRAJ13)
CAMKNSGGYQKVTF

SEQ ID NO: 352938 - protein, 13 aa, Homo sapiens
  CDR3 for beta chain variable domain of TCR clone 176469 (TRBV29-1, TRBJ2-5)
RSARDRVEETQYF

SEQ ID NO: 352939 - protein, 13 aa, Homo sapiens
  CDR3 for alpha chain variable domain of TCR clone 176470 (TRAV21, TRAJ20)
CAVGLRVDYKLSF

SEQ ID NO: 352940 - protein, 15 aa, Homo sapiens
  CDR3 for beta chain variable domain of TCR clone 176470 (TRBV4-1, TRBJ2-5)
CASSQVLAGQETQYF

SEQ ID NO: 352941 - protein, 16 aa, Homo sapiens
  CDR3 for alpha chain variable domain of TCR clone 176471 (TRAV17, TRAJ45)
CATDASSGGGADGLTF

SEQ ID NO: 352942 - protein, 14 aa, Homo sapiens
  CDR3 for beta chain variable domain of TCR clone 176471 (TRBV19, TRBJ2-1)
CASPTFVLSGEQFF

SEQ ID NO: 352943 - protein, 13 aa, Homo sapiens
  CDR3 for alpha chain variable domain of TCR clone 176472 (TRAV12-3, TRAJ43)
CAMIRPNKNEMRF

SEQ ID NO: 352944 - protein, 14 aa, Homo sapiens
  CDR3 for beta chain variable domain of TCR clone 176472 (TRBV12-4, TRBJ2-1)
CASSLGQGASEQFF

SEQ ID NO: 352945 - protein, 18 aa, Homo sapiens
  CDR3 for alpha chain variable domain of TCR clone 176473 (TRAV1-2, TRAJ18)
CAVRDMGDRGSTLGRLYF

SEQ ID NO: 352946 - protein, 16 aa, Homo sapiens
  CDR3 for beta chain variable domain of TCR clone 176473 (TRBV29-1, TRBJ1-2)
CIVEANRDIANYGYTF

SEQ ID NO: 352947 - protein, 18 aa, Homo sapiens
  CDR3 for alpha chain variable domain of TCR clone 176474 (TRAV12-3, TRAJ52)
CAMSRTNAGGTSYGKLTF

SEQ ID NO: 352948 - protein, 15 aa, Homo sapiens
  CDR3 for beta chain variable domain of TCR clone 176474 (TRBV20-1, TRBJ2-7)
CSARDRVSGMDEQCF

SEQ ID NO: 352949 - protein, 17 aa, Homo sapiens
  CDR3 for alpha chain variable domain of TCR clone 176475 (TRAV26-1, TRAJ37)
CIVRVITVSSNTGKLIF

SEQ ID NO: 352950 - protein, 15 aa, Homo sapiens
  CDR3 for beta chain variable domain of TCR clone 176475 (TRBV7-9, TRBJ2-7)
CASSLALAEAYEQYF

SEQ ID NO: 352951 - protein, 18 aa, Homo sapiens
  CDR3 for alpha chain variable domain of TCR clone 176476 (TRAV1-2, TRAJ18)
CAVRDMGDRGSTLGRLYF

SEQ ID NO: 352952 - protein, 16 aa, Homo sapiens
  CDR3 for beta chain variable domain of TCR clone 176476 (TRBV29-1, TRBJ1-2)
CSVEANRNIANYGDTF

SEQ ID NO: 352953 - protein, 15 aa, Homo sapiens
  CDR3 for alpha chain variable domain of TCR clone 176477 (TRAV25, TRAJ32)
CAGLHYGSATNKLIF

SEQ ID NO: 352954 - protein, 14 aa, Homo sapiens
  CDR3 for beta chain variable domain of TCR clone 176477 (TRBV4-2, TRBJ1-5)
CASSQDSINQPQHF

SEQ ID NO: 352955 - protein, 14 aa, Homo sapiens
  CDR3 for alpha chain variable domain of TCR clone 176478 (TRAV1-2, TRAJ16)
CAVNRLSDGQKLLF

SEQ ID NO: 352956 - protein, 14 aa, Homo sapiens
  CDR3 for beta chain variable domain of TCR clone 176478 (TRBV13, TRBJ2-5)
CASSLGWGQETQYF

SEQ ID NO: 352957 - protein, 14 aa, Homo sapiens
  CDR3 for alpha chain variable domain of TCR clone 176479 (TRAV13-2, TRAJ17)
CAENSKAAGNRLTF

SEQ ID NO: 352958 - protein, 14 aa, Homo sapiens
  CDR3 for beta chain variable domain of TCR clone 176479 (TRBV19, TRBJ2-1)
CASPTFVLSGEQFF

SEQ ID NO: 352959 - protein, 18 aa, Homo sapiens
  CDR3 for alpha chain variable domain of TCR clone 176480 (TRAV21, TRAJ52)
CAVRPSPAGGTSYGKLTF

SEQ ID NO: 352960 - protein, 15 aa, Homo sapiens
  CDR3 for beta chain variable domain of TCR clone 176480 (TRBV11-1, TRBJ2-7)
CASSRGRFKTYEQYF

SEQ ID NO: 352961 - protein, 14 aa, Homo sapiens
  CDR3 for alpha chain variable domain of TCR clone 176481 (TRAV1-2, TRAJ8)
CAVREDTGFQKLVF

SEQ ID NO: 352962 - protein, 18 aa, Homo sapiens
  CDR3 for beta chain variable domain of TCR clone 176481 (TRBV11-2, TRBJ2-3)
RASSLGGASRGAPNTQYF

SEQ ID NO: 352963 - protein, 11 aa, Homo sapiens
  CDR3 for alpha chain variable domain of TCR clone 176482 (TRAV25, TRAJ47)
CAVEYGNKLVF

SEQ ID NO: 352964 - protein, 17 aa, Homo sapiens
  CDR3 for beta chain variable domain of TCR clone 176482 (TRBV7-3, TRBJ2-5)
CASSLGSGRSGSETQYF

SEQ ID NO: 352965 - protein, 12 aa, Homo sapiens
  CDR3 for alpha chain variable domain of TCR clone 176483 (TRAV3, TRAJ20)
CAVRDPDYKLSF

SEQ ID NO: 352966 - protein, 12 aa, Homo sapiens
  CDR3 for beta chain variable domain of TCR clone 176483 (TRBV24-1, TRBJ1-4)
CATSDPNEKLFF

SEQ ID NO: 352967 - protein, 13 aa, Homo sapiens
  CDR3 for alpha chain variable domain of TCR clone 176484 (TRAV12-2, TRAJ3)
CAFQYSSASKIIF

SEQ ID NO: 352968 - protein, 11 aa, Homo sapiens
  CDR3 for beta chain variable domain of TCR clone 176484 (TRBV20-1, TRBJ2-3)
CSGTSSNTQYF

SEQ ID NO: 352969 - protein, 14 aa, Homo sapiens
  CDR3 for alpha chain variable domain of TCR clone 176485 (TRAV26-1, TRAJ34)
CIIRVAYNTDNLIF

SEQ ID NO: 352970 - protein, 15 aa, Homo sapiens
  CDR3 for beta chain variable domain of TCR clone 176485 (TRBV20-1, TRBJ2-7)
CSARVPAAYFYEQYL

SEQ ID NO: 352971 - protein, 13 aa, Homo sapiens
  CDR3 for alpha chain variable domain of TCR clone 176486 (TRAV8-4, TRAJ10)
CAAFTGGGNKLTF

SEQ ID NO: 352972 - protein, 15 aa, Homo sapiens
  CDR3 for beta chain variable domain of TCR clone 176486 (TRBV6-3, TRBJ2-7)
CASSSPGTVFYEQYF

SEQ ID NO: 352973 - protein, 16 aa, Homo sapiens
  CDR3 for alpha chain variable domain of TCR clone 176487 (TRAV30, TRAJ24)
CGTEIVDADSWGKFQF

SEQ ID NO: 352974 - protein, 15 aa, Homo sapiens
  CDR3 for beta chain variable domain of TCR clone 176487 (TRBV5-4, TRBJ1-3)
CASSSGGRSGNTIYF

SEQ ID NO: 352975 - protein, 11 aa, Homo sapiens
  CDR3 for alpha chain variable domain of TCR clone 176488 (TRAV21, TRAJ11)
FAVNGYSTLTL

SEQ ID NO: 352976 - protein, 16 aa, Homo sapiens
  CDR3 for beta chain variable domain of TCR clone 176488 (TRBV4-3, TRBJ2-2)
CASSHLQGSGTGELFF

SEQ ID NO: 352977 - protein, 14 aa, Homo sapiens
  CDR3 for alpha chain variable domain of TCR clone 176489 (TRAV2, TRAJ37)
CAVDFTSNTGKLFF

SEQ ID NO: 352978 - protein, 13 aa, Homo sapiens
  CDR3 for beta chain variable domain of TCR clone 176489 (TRBV20-1, TRBJ1-1)
CSAPLGGGTEAFF

SEQ ID NO: 352979 - protein, 14 aa, Homo sapiens
  CDR3 for alpha chain variable domain of TCR clone 176490 (TRAV12-1, TRAJ8)
CVVNSNTGFQKLVF

SEQ ID NO: 352980 - protein, 17 aa, Homo sapiens
  CDR3 for beta chain variable domain of TCR clone 176490 (TRBV7-8, TRBJ2-6)
CASSAATGGAGANVLTF

SEQ ID NO: 352981 - protein, 17 aa, Homo sapiens
  CDR3 for alpha chain variable domain of TCR clone 176491 (TRAV4, TRAJ20)
CTTASWVKGNNDYKLSF

SEQ ID NO: 352982 - protein, 17 aa, Homo sapiens
  CDR3 for beta chain variable domain of TCR clone 176491 (TRBV11-2, TRBJ2-1)
CASSLYPSGVEYNEQFF

SEQ ID NO: 352983 - protein, 14 aa, Homo sapiens
  CDR3 for alpha chain variable domain of TCR clone 176492 (TRAV4, TRAJ17)
CLVGDPLVGNKLTV

SEQ ID NO: 352984 - protein, 20 aa, Homo sapiens
  CDR3 for beta chain variable domain of TCR clone 176492 (TRBV20-1, TRBJ2-1)
CSARPYSVAGGPSYYNEQFF

SEQ ID NO: 352985 - protein, 16 aa, Homo sapiens
  CDR3 for alpha chain variable domain of TCR clone 176493 (TRAV4, TRAJ9)
CLVGEPNRPGGFKTIF

SEQ ID NO: 352986 - protein, 16 aa, Homo sapiens
  CDR3 for beta chain variable domain of TCR clone 176493 (TRBV28, TRBJ1-4)
CASSPPYRGRSEKLFF

SEQ ID NO: 352987 - protein, 16 aa, Homo sapiens
  CDR3 for alpha chain variable domain of TCR clone 176494 (TRAV1-2, TRAJ10)
CAVRGVLTGGGNKLTF

SEQ ID NO: 352988 - protein, 15 aa, Homo sapiens
  CDR3 for beta chain variable domain of TCR clone 176494 (TRBV7-2, TRBJ2-3)
CASSSTGLETDTQYF

SEQ ID NO: 352989 - protein, 16 aa, Homo sapiens
  CDR3 for alpha chain variable domain of TCR clone 176495 (TRAV26-1, TRAJ52)
CIVSNAGGTSYGKLTF

SEQ ID NO: 352990 - protein, 16 aa, Homo sapiens
  CDR3 for beta chain variable domain of TCR clone 176495 (TRBV27, TRBJ2-2)
CASSLSGFWVTGELFF

SEQ ID NO: 352991 - protein, 14 aa, Homo sapiens
  CDR3 for alpha chain variable domain of TCR clone 176496 (TRAV1-2, TRAJ16)
CAVNRFSDGQKLLF

SEQ ID NO: 352992 - protein, 13 aa, Homo sapiens
  CDR3 for beta chain variable domain of TCR clone 176496 (TRBV10-3, TRBJ2-7)
CAIRAGGPHEQYF

SEQ ID NO: 352993 - protein, 13 aa, Homo sapiens
  CDR3 for alpha chain variable domain of TCR clone 176497 (TRAV8-3, TRAJ28)
CAVGAVGGYQLTF

SEQ ID NO: 352994 - protein, 12 aa, Homo sapiens
  CDR3 for beta chain variable domain of TCR clone 176497 (TRBV11-2, TRBJ2-1)
CASSPGNNEQFF

SEQ ID NO: 352995 - protein, 18 aa, Homo sapiens
  CDR3 for alpha chain variable domain of TCR clone 176498 (TRAV29/DV5, TRAJ52)
CEAGFRGAGGTSYGKLTF

SEQ ID NO: 352996 - protein, 16 aa, Homo sapiens
  CDR3 for beta chain variable domain of TCR clone 176498 (TRBV7-3, TRBJ2-2)
CASSLKRGTLSGELFF

SEQ ID NO: 352997 - protein, 17 aa, Homo sapiens
  CDR3 for alpha chain variable domain of TCR clone 176499 (TRAV3, TRAJ6)
CAVRDGPRAGGSYIPTF

SEQ ID NO: 352998 - protein, 13 aa, Homo sapiens
  CDR3 for beta chain variable domain of TCR clone 176499 (TRBV27, TRBJ2-3)
CASSWGRTDTQYF

SEQ ID NO: 352999 - protein, 16 aa, Homo sapiens
  CDR3 for alpha chain variable domain of TCR clone 176500 (TRAV13-1, TRAJ48)
FAASIFGNFGNEKLTF

SEQ ID NO: 353000 - protein, 14 aa, Homo sapiens
  CDR3 for beta chain variable domain of TCR clone 176500 (TRBV7-3, TRBJ1-1)
CASSLKGGNTEAFF

SEQ ID NO: 353001 - protein, 14 aa, Homo sapiens
  CDR3 for alpha chain variable domain of TCR clone 176501 (TRAV17, TRAJ32)
CATDPGGAANKLIF

SEQ ID NO: 353002 - protein, 14 aa, Homo sapiens
  CDR3 for beta chain variable domain of TCR clone 176501 (TRBV2, TRBJ1-5)
CASSENRGGQPQLF

SEQ ID NO: 353003 - protein, 12 aa, Homo sapiens
  CDR3 for alpha chain variable domain of TCR clone 176502 (TRAV12-2, TRAJ21)
CAPSANFNKFYF

SEQ ID NO: 353004 - protein, 14 aa, Homo sapiens
  CDR3 for beta chain variable domain of TCR clone 176502 (TRBV12-4, TRBJ1-1)
CASSLRSSGTEAFF

SEQ ID NO: 353005 - protein, 13 aa, Homo sapiens
  CDR3 for alpha chain variable domain of TCR clone 176503 (TRAV27, TRAJ41)
CAGEGNSGYALSF

SEQ ID NO: 353006 - protein, 13 aa, Homo sapiens
  CDR3 for beta chain variable domain of TCR clone 176503 (TRBV19, TRBJ1-2)
CASSVPGQDGYTF

SEQ ID NO: 353007 - protein, 12 aa, Homo sapiens
  CDR3 for alpha chain variable domain of TCR clone 176504 (TRAV8-3, TRAJ20)
CAVAFNDYKLSF

SEQ ID NO: 353008 - protein, 13 aa, Homo sapiens
  CDR3 for beta chain variable domain of TCR clone 176504 (TRBV5-7, TRBJ2-3)
CASSLGRTDTQYF

SEQ ID NO: 353009 - protein, 12 aa, Homo sapiens
  CDR3 for alpha chain variable domain of TCR clone 176505 (TRAV16, TRAJ10)
CSRTGGGNKLTF

SEQ ID NO: 353010 - protein, 13 aa, Homo sapiens
  CDR3 for beta chain variable domain of TCR clone 176505 (TRBV6-5, TRBJ2-5)
CASSPQGGETQYF

SEQ ID NO: 353011 - protein, 14 aa, Homo sapiens
  CDR3 for alpha chain variable domain of TCR clone 176506 (TRAV12-3, TRAJ22)
CAMSLFGSARQLTF

SEQ ID NO: 353012 - protein, 11 aa, Homo sapiens
  CDR3 for beta chain variable domain of TCR clone 176506 (TRBV12-4, TRBJ2-2)
WASSSAGKLFF

SEQ ID NO: 353013 - protein, 14 aa, Homo sapiens
  CDR3 for alpha chain variable domain of TCR clone 176507 (TRAV13-2, TRAJ32)
CAENYGGATNKLIF

SEQ ID NO: 353014 - protein, 17 aa, Homo sapiens
  CDR3 for beta chain variable domain of TCR clone 176507 (TRBV9, TRBJ2-2)
CASSVGGQGTDAGELFF

SEQ ID NO: 353015 - protein, 13 aa, Homo sapiens
  CDR3 for alpha chain variable domain of TCR clone 176508 (TRAV2, TRAJ24)
CAVTTDSWGKLKF

SEQ ID NO: 353016 - protein, 14 aa, Homo sapiens
  CDR3 for beta chain variable domain of TCR clone 176508 (TRBV13, TRBJ2-5)
CASSLGRGQETQYF

SEQ ID NO: 353017 - protein, 14 aa, Homo sapiens
  CDR3 for alpha chain variable domain of TCR clone 176509 (TRAV38-1, TRAJ40)
CALRPTSGTYKYIF

SEQ ID NO: 353018 - protein, 14 aa, Homo sapiens
  CDR3 for beta chain variable domain of TCR clone 176509 (TRBV6-1, TRBJ1-3)
CASVQGGGWKHHIF

SEQ ID NO: 353019 - protein, 18 aa, Homo sapiens
  CDR3 for alpha chain variable domain of TCR clone 176510 (TRAV21, TRAJ52)
CAVRPSPAGGTSYGKLTF

SEQ ID NO: 353020 - protein, 13 aa, Homo sapiens
  CDR3 for beta chain variable domain of TCR clone 176510 (TRBV24-1, TRBJ2-2)
CATSETNTGELFF

SEQ ID NO: 353021 - protein, 13 aa, Homo sapiens
  CDR3 for alpha chain variable domain of TCR clone 176511 (TRAV23/DV6, TRAJ22)
CAPYSGSARQLTI

SEQ ID NO: 353022 - protein, 15 aa, Homo sapiens
  CDR3 for beta chain variable domain of TCR clone 176511 (TRBV11-2, TRBJ1-6)
CASSLDPWAVSPLLF

SEQ ID NO: 353023 - protein, 17 aa, Homo sapiens
  CDR3 for alpha chain variable domain of TCR clone 176512 (TRAV13-1, TRAJ52)
CAAISGAGGTSYGKLTF

SEQ ID NO: 353024 - protein, 17 aa, Homo sapiens
  CDR3 for beta chain variable domain of TCR clone 176512 (TRBV11-2, TRBJ2-1)
CASSLYPPGVEYNEQFF

SEQ ID NO: 353025 - protein, 14 aa, Homo sapiens
  CDR3 for alpha chain variable domain of TCR clone 176513 (TRAV12-1, TRAJ24)
CVVRSTDSWGKFQF

SEQ ID NO: 353026 - protein, 15 aa, Homo sapiens
  CDR3 for beta chain variable domain of TCR clone 176513 (TRBV11-3, TRBJ2-3)
CASLKDGREGDTQYF

SEQ ID NO: 353027 - protein, 12 aa, Homo sapiens
  CDR3 for alpha chain variable domain of TCR clone 176514 (TRAV12-3, TRAJ20)
CAMVRGDYKLSF

SEQ ID NO: 353028 - protein, 12 aa, Homo sapiens
  CDR3 for beta chain variable domain of TCR clone 176514 (TRBV6-1, TRBJ2-7)
CASSDYAYEQYF

SEQ ID NO: 353029 - protein, 14 aa, Homo sapiens
  CDR3 for alpha chain variable domain of TCR clone 176515 (TRAV27, TRAJ22)
CAGLPSGSARQLTF

SEQ ID NO: 353030 - protein, 16 aa, Homo sapiens
  CDR3 for beta chain variable domain of TCR clone 176515 (TRBV7-3, TRBJ2-2)
CASSLTRGTLSGELFF

SEQ ID NO: 353031 - protein, 16 aa, Homo sapiens
  CDR3 for alpha chain variable domain of TCR clone 176516 (TRAV30, TRAJ24)
CGMEIVDADSWGKFQF

SEQ ID NO: 353032 - protein, 12 aa, Homo sapiens
  CDR3 for beta chain variable domain of TCR clone 176516 (TRBV11-2, TRBJ2-1)
CASSPGNNEQFF

SEQ ID NO: 353033 - protein, 15 aa, Homo sapiens
  CDR3 for alpha chain variable domain of TCR clone 176517 (TRAV3, TRAJ32)
CAVSSYGGATNKLIF

SEQ ID NO: 353034 - protein, 15 aa, Homo sapiens
  CDR3 for beta chain variable domain of TCR clone 176517 (TRBV6-1, TRBJ2-1)
CASSELRGQYNEQFF

SEQ ID NO: 353035 - protein, 14 aa, Homo sapiens
  CDR3 for alpha chain variable domain of TCR clone 176518 (TRAV8-1, TRAJ5)
CAVRIDTGRRALTF

SEQ ID NO: 353036 - protein, 16 aa, Homo sapiens
  CDR3 for beta chain variable domain of TCR clone 176518 (TRBV12-5, TRBJ2-5)
CASGPRTSGNQETQYF

SEQ ID NO: 353037 - protein, 16 aa, Homo sapiens
  CDR3 for alpha chain variable domain of TCR clone 176519 (TRAV12-3, TRAJ53)
CAMSPGSGGSNYKLTF

SEQ ID NO: 353038 - protein, 16 aa, Homo sapiens
  CDR3 for beta chain variable domain of TCR clone 176519 (TRBV7-8, TRBJ2-4)
CASSAERTLAKNIQYF

SEQ ID NO: 353039 - protein, 14 aa, Homo sapiens
  CDR3 for alpha chain variable domain of TCR clone 176520 (TRAV12-2, TRAJ13)
CAVKKTGGYQKVTF

SEQ ID NO: 353040 - protein, 15 aa, Homo sapiens
  CDR3 for beta chain variable domain of TCR clone 176520 (TRBV7-2, TRBJ2-1)
CASSLASGRVNEQFV

SEQ ID NO: 353041 - protein, 12 aa, Homo sapiens
  CDR3 for alpha chain variable domain of TCR clone 176521 (TRAV12-2, TRAJ53)
TGGGGSNYKLTF

SEQ ID NO: 353042 - protein, 14 aa, Homo sapiens
  CDR3 for beta chain variable domain of TCR clone 176521 (TRBV4-2, TRBJ2-1)
CASGLDRAYNEQFF

SEQ ID NO: 353043 - protein, 13 aa, Homo sapiens
  CDR3 for alpha chain variable domain of TCR clone 176522 (TRAV12-3, TRAJ33)
CAMSVNSNYQLIW

SEQ ID NO: 353044 - protein, 13 aa, Homo sapiens
  CDR3 for beta chain variable domain of TCR clone 176522 (TRBV24-1, TRBJ2-2)
CATSDWSTGELFF

SEQ ID NO: 353045 - protein, 13 aa, Homo sapiens
  CDR3 for alpha chain variable domain of TCR clone 176523 (TRAV21, TRAJ57)
CALAQGGSEKLVF

SEQ ID NO: 353046 - protein, 16 aa, Homo sapiens
  CDR3 for beta chain variable domain of TCR clone 176523 (TRBV29-1, TRBJ2-7)
CSVEDAEDGTAYEQYF

SEQ ID NO: 353047 - protein, 16 aa, Homo sapiens
  CDR3 for alpha chain variable domain of TCR clone 176524 (TRAV3, TRAJ5)
CAVINLMDTGRRALTF

SEQ ID NO: 353048 - protein, 16 aa, Homo sapiens
  CDR3 for beta chain variable domain of TCR clone 176524 (TRBV4-2, TRBJ2-7)
CASSQEGLANSYEQYF

SEQ ID NO: 353049 - protein, 17 aa, Homo sapiens
  CDR3 for alpha chain variable domain of TCR clone 176525 (TRAV36/DV7, TRAJ52)
CAVAQRAGGTSYGKLTF

SEQ ID NO: 353050 - protein, 15 aa, Homo sapiens
  CDR3 for beta chain variable domain of TCR clone 176525 (TRBV6-5, TRBJ1-2)
CASSYSQAFNYCYTF

SEQ ID NO: 353051 - protein, 12 aa, Homo sapiens
  CDR3 for alpha chain variable domain of TCR clone 176526 (TRAV8-3, TRAJ20)
CAVGAYDYKLSF

SEQ ID NO: 353052 - protein, 16 aa, Homo sapiens
  CDR3 for beta chain variable domain of TCR clone 176526 (TRBV19, TRBJ2-2)
CASRSPGTGAPGELFF

SEQ ID NO: 353053 - protein, 17 aa, Homo sapiens
  CDR3 for alpha chain variable domain of TCR clone 176527 (TRAV3, TRAJ38)
CAVRGCLNAGNNRTLVW

SEQ ID NO: 353054 - protein, 16 aa, Homo sapiens
  CDR3 for beta chain variable domain of TCR clone 176527 (TRBV20-1, TRBJ1-4)
CSAPGQGLLTNEKLFF

SEQ ID NO: 353055 - protein, 14 aa, Homo sapiens
  CDR3 for alpha chain variable domain of TCR clone 176528 (TRAV1-2, TRAJ16)
CAVNRFSDGQKLLF

SEQ ID NO: 353056 - protein, 16 aa, Homo sapiens
  CDR3 for beta chain variable domain of TCR clone 176528 (TRBV7-2, TRBJ2-5)
CQQPRQGRKSRETQYF

SEQ ID NO: 353057 - protein, 14 aa, Homo sapiens
  CDR3 for alpha chain variable domain of TCR clone 176529 (TRAV20, TRAJ10)
CAVRVEGGGNKLTF

SEQ ID NO: 353058 - protein, 14 aa, Homo sapiens
  CDR3 for beta chain variable domain of TCR clone 176529 (TRBV19, TRBJ1-5)
CASSKMTGPQPQHF

SEQ ID NO: 353059 - protein, 23 aa, Homo sapiens
  CDR3 for alpha chain variable domain of TCR clone 176530 (TRAV26-1, TRAJ38)
CIADNAGNNHIQNPNPAGYQLRD

SEQ ID NO: 353060 - protein, 13 aa, Homo sapiens
  CDR3 for beta chain variable domain of TCR clone 176530 (TRBV20-1, TRBJ1-1)
CSARGGGNTEAFF

SEQ ID NO: 353061 - protein, 12 aa, Homo sapiens
  CDR3 for alpha chain variable domain of TCR clone 176531 (TRAV21, TRAJ39)
RAADNAGNMFTF

SEQ ID NO: 353062 - protein, 13 aa, Homo sapiens
  CDR3 for beta chain variable domain of TCR clone 176531 (TRBV12-4, TRBJ1-2)
CASSSGLTVISTF

SEQ ID NO: 353063 - protein, 17 aa, Homo sapiens
  CDR3 for alpha chain variable domain of TCR clone 176532 (TRAV12-2, TRAJ36)
CAVKDNLFFGTGTRLTV

SEQ ID NO: 353064 - protein, 15 aa, Homo sapiens
  CDR3 for beta chain variable domain of TCR clone 176532 (TRBV28, TRBJ2-2)
CASTVAGANTGELLF

SEQ ID NO: 353065 - protein, 11 aa, Homo sapiens
  CDR3 for alpha chain variable domain of TCR clone 176533 (TRAV2, TRAJ33)
CAVESNYQLIW

SEQ ID NO: 353066 - protein, 12 aa, Homo sapiens
  CDR3 for beta chain variable domain of TCR clone 176533 (TRBV28, TRBJ2-7)
CASSTPGGEQYF

SEQ ID NO: 353067 - protein, 13 aa, Homo sapiens
  CDR3 for alpha chain variable domain of TCR clone 176534 (TRAV27, TRAJ54)
CAGALREAQKLVF

SEQ ID NO: 353068 - protein, 16 aa, Homo sapiens
  CDR3 for beta chain variable domain of TCR clone 176534 (TRBV19, TRBJ2-1)
CASSKAGPSSYNEQFF

SEQ ID NO: 353069 - protein, 16 aa, Homo sapiens
  CDR3 for alpha chain variable domain of TCR clone 176535 (TRAV3, TRAJ37)
CAVRPHGSGNTGKLIF

SEQ ID NO: 353070 - protein, 14 aa, Homo sapiens
  CDR3 for beta chain variable domain of TCR clone 176535 (TRBV25-1, TRBJ1-1)
CSSTHLGGNTEAFF

SEQ ID NO: 353071 - protein, 17 aa, Homo sapiens
  CDR3 for alpha chain variable domain of TCR clone 176536 (TRAV26-2, TRAJ42)
CILRDVGYGGSQGNLIF

SEQ ID NO: 353072 - protein, 15 aa, Homo sapiens
  CDR3 for beta chain variable domain of TCR clone 176536 (TRBV12-4, TRBJ2-7)
ASSLIGGTGTYEQYF

SEQ ID NO: 353073 - protein, 16 aa, Homo sapiens
  CDR3 for alpha chain variable domain of TCR clone 176537 (TRAV8-2, TRAJ48)
CVVSDVSNFGNEKLTF

SEQ ID NO: 353074 - protein, 13 aa, Homo sapiens
  CDR3 for beta chain variable domain of TCR clone 176537 (TRBV12-4, TRBJ2-5)
CASRLAVQETQYF

SEQ ID NO: 353075 - protein, 16 aa, Homo sapiens
  CDR3 for alpha chain variable domain of TCR clone 176538 (TRAV3, TRAJ37)
CAVRGKGSGNTGKLIF

SEQ ID NO: 353076 - protein, 16 aa, Homo sapiens
  CDR3 for beta chain variable domain of TCR clone 176538 (TRBV28, TRBJ1-5)
CASSFRGGWSNQPQHF

SEQ ID NO: 353077 - protein, 17 aa, Homo sapiens
  CDR3 for alpha chain variable domain of TCR clone 176539 (TRAV8-2, )
CVVNIQNPDPAVYQLRD

SEQ ID NO: 353078 - protein, 14 aa, Homo sapiens
  CDR3 for beta chain variable domain of TCR clone 176539 (TRBV7-9, TRBJ2-5)
CARSLVGGEETQYF

SEQ ID NO: 353079 - protein, 15 aa, Homo sapiens
  CDR3 for alpha chain variable domain of TCR clone 176540 (TRAV27, TRAJ38)
CAARRNAGNNRKLNW

SEQ ID NO: 353080 - protein, 16 aa, Homo sapiens
  CDR3 for beta chain variable domain of TCR clone 176540 (TRBV7-2, TRBJ2-1)
CASSPRLAGSNNEQFF

SEQ ID NO: 353081 - protein, 14 aa, Homo sapiens
  CDR3 for alpha chain variable domain of TCR clone 176541 (TRAV1-2, TRAJ16)
CAVNRFSDVQKLLF

SEQ ID NO: 353082 - protein, 18 aa, Homo sapiens
  CDR3 for beta chain variable domain of TCR clone 176541 (TRBV20-1, TRBJ2-3)
CSASGLAGGPGTTDTQYF

SEQ ID NO: 353083 - protein, 13 aa, Homo sapiens
  CDR3 for alpha chain variable domain of TCR clone 176542 (TRAV20, TRAJ31)
CAVQAIGGARLMF

SEQ ID NO: 353084 - protein, 16 aa, Homo sapiens
  CDR3 for beta chain variable domain of TCR clone 176542 (TRBV28, TRBJ1-5)
CASSFRGGYSNQPQHF

SEQ ID NO: 353085 - protein, 11 aa, Homo sapiens
  CDR3 for alpha chain variable domain of TCR clone 176543 (TRAV3, TRAJ21)
CAVGNFNKFYF

SEQ ID NO: 353086 - protein, 15 aa, Homo sapiens
  CDR3 for beta chain variable domain of TCR clone 176543 (TRBV11-3, TRBJ2-2)
CASSYFSTGTGELFF

SEQ ID NO: 353087 - protein, 13 aa, Homo sapiens
  CDR3 for alpha chain variable domain of TCR clone 176544 (TRAV17, TRAJ21)
CATDGGNLNKFYF

SEQ ID NO: 353088 - protein, 13 aa, Homo sapiens
  CDR3 for beta chain variable domain of TCR clone 176544 (TRBV11-3, TRBJ1-1)
CASTGSLNTEAFF

SEQ ID NO: 353089 - protein, 12 aa, Homo sapiens
  CDR3 for alpha chain variable domain of TCR clone 176545 (TRAV27, TRAJ35)
CAGADFGNVLHC

SEQ ID NO: 353090 - protein, 17 aa, Homo sapiens
  CDR3 for beta chain variable domain of TCR clone 176545 (TRBV15, TRBJ1-2)
CATSGREIDVVNYGYTF

SEQ ID NO: 353091 - protein, 11 aa, Homo sapiens
  CDR3 for alpha chain variable domain of TCR clone 176546 (TRAV26-1, TRAJ37)
CIVRVGRKLIF

SEQ ID NO: 353092 - protein, 16 aa, Homo sapiens
  CDR3 for beta chain variable domain of TCR clone 176546 (TRBV12-4, TRBJ1-5)
CASSRPVGGSNQPQHF

SEQ ID NO: 353093 - protein, 14 aa, Homo sapiens
  CDR3 for alpha chain variable domain of TCR clone 176547 (TRAV12-3, TRAJ22)
CAMSLYGSARQLTF

SEQ ID NO: 353094 - protein, 11 aa, Homo sapiens
  CDR3 for beta chain variable domain of TCR clone 176547 (TRBV12-4, TRBJ2-2)
CASSSAGELFF

SEQ ID NO: 353095 - protein, 16 aa, Homo sapiens
  CDR3 for alpha chain variable domain of TCR clone 176548 (TRAV30, TRAJ24)
CGTEIVDAYSWGKFQV

SEQ ID NO: 353096 - protein, 14 aa, Homo sapiens
  CDR3 for beta chain variable domain of TCR clone 176548 (TRBV12-5, TRBJ2-5)
CASGSRTHQETQYF

SEQ ID NO: 353097 - protein, 12 aa, Homo sapiens
  CDR3 for alpha chain variable domain of TCR clone 176549 (TRAV13-2, TRAJ8)
CAPGLGFQKLLF

SEQ ID NO: 353098 - protein, 18 aa, Homo sapiens
  CDR3 for beta chain variable domain of TCR clone 176549 (TRBV11-2, TRBJ2-3)
CASSLGGASRGAPNTQYF

SEQ ID NO: 353099 - protein, 13 aa, Homo sapiens
  CDR3 for alpha chain variable domain of TCR clone 176550 (TRAV27, TRAJ18)
CAGRGSTLGRLYF

SEQ ID NO: 353100 - protein, 15 aa, Homo sapiens
  CDR3 for beta chain variable domain of TCR clone 176550 (TRBV7-9, TRBJ1-4)
CASSARTGGNEKLFF

SEQ ID NO: 353101 - protein, 14 aa, Homo sapiens
  CDR3 for alpha chain variable domain of TCR clone 176551 (TRAV21, TRAJ35)
CAVMLIGFGNVLHC

SEQ ID NO: 353102 - protein, 12 aa, Homo sapiens
  CDR3 for beta chain variable domain of TCR clone 176551 (TRBV7-9, TRBJ2-7)
CAGSIKREEQYF

SEQ ID NO: 353103 - protein, 17 aa, Homo sapiens
  CDR3 for alpha chain variable domain of TCR clone 176552 (TRAV23/DV6, TRAJ58)
CAARLLRGETSGSRLTF

SEQ ID NO: 353104 - protein, 12 aa, Homo sapiens
  CDR3 for beta chain variable domain of TCR clone 176552 (TRBV6-3, TRBJ2-5)
CASTNPTETQYF

SEQ ID NO: 353105 - protein, 13 aa, Homo sapiens
  CDR3 for alpha chain variable domain of TCR clone 176553 (TRAV35, TRAJ43)
CAGYPYNNNDMRF

SEQ ID NO: 353106 - protein, 15 aa, Homo sapiens
  CDR3 for beta chain variable domain of TCR clone 176553 (TRBV25-1, TRBJ1-4)
CASSKRIATNEQLFF

SEQ ID NO: 353107 - protein, 11 aa, Homo sapiens
  CDR3 for alpha chain variable domain of TCR clone 176554 (TRAV3, TRAJ21)
CAVDNFNKFYS

SEQ ID NO: 353108 - protein, 16 aa, Homo sapiens
  CDR3 for beta chain variable domain of TCR clone 176554 (TRBV19, TRBJ2-1)
CASSKAGPSSYNEQFF

SEQ ID NO: 353109 - protein, 14 aa, Homo sapiens
  CDR3 for alpha chain variable domain of TCR clone 176555 (TRAV38-1, TRAJ45)
CASHSGGDADGLTF

SEQ ID NO: 353110 - protein, 13 aa, Homo sapiens
  CDR3 for beta chain variable domain of TCR clone 176555 (TRBV10-3, TRBJ1-2)
CAISERDSYGYTF

SEQ ID NO: 353111 - protein, 15 aa, Homo sapiens
  CDR3 for alpha chain variable domain of TCR clone 176556 (TRAV8-4, TRAJ48)
YAVSAAYFGNEKLTF

SEQ ID NO: 353112 - protein, 12 aa, Homo sapiens
  CDR3 for beta chain variable domain of TCR clone 176556 (TRBV3-1, TRBJ2-5)
CASSQRGETQYF

SEQ ID NO: 353113 - protein, 16 aa, Homo sapiens
  CDR3 for alpha chain variable domain of TCR clone 176557 (TRAV30, TRAJ24)
CGTEIVDADSWGKCQF

SEQ ID NO: 353114 - protein, 12 aa, Homo sapiens
  CDR3 for beta chain variable domain of TCR clone 176557 (TRBV11-2, TRBJ2-2)
CASSLPTGELFF

SEQ ID NO: 353115 - protein, 16 aa, Homo sapiens
  CDR3 for alpha chain variable domain of TCR clone 176558 (TRAV3, TRAJ18)
CAVRDGRGSTLGRLYF

SEQ ID NO: 353116 - protein, 17 aa, Homo sapiens
  CDR3 for beta chain variable domain of TCR clone 176558 (TRBV11-3, TRBJ2-1)
CASSLYPPGVEYNEQFF

SEQ ID NO: 353117 - protein, 15 aa, Homo sapiens
  CDR3 for alpha chain variable domain of TCR clone 176559 (TRAV38-1, TRAJ37)
CAFIFGSGNTGKLIF

SEQ ID NO: 353118 - protein, 22 aa, Homo sapiens
  CDR3 for beta chain variable domain of TCR clone 176559 (TRBV11-2, TRBJ1-4)
CASSLDITRRGIPRKDNEKLFF

SEQ ID NO: 353119 - protein, 15 aa, Homo sapiens
  CDR3 for alpha chain variable domain of TCR clone 176560 (TRAV27, TRAJ38)
CAARRNAGHNRKLIW

SEQ ID NO: 353120 - protein, 14 aa, Homo sapiens
  CDR3 for beta chain variable domain of TCR clone 176560 (TRBV2, TRBJ2-1)
CASSDRAYYNEQFF

SEQ ID NO: 353121 - protein, 11 aa, Homo sapiens
  CDR3 for alpha chain variable domain of TCR clone 176561 (TRAV12-1, TRAJ3)
CVVSSASKIIF

SEQ ID NO: 353122 - protein, 17 aa, Homo sapiens
  CDR3 for beta chain variable domain of TCR clone 176561 (TRBV13, TRBJ2-3)
CASSLSRVAGGRNTQYF

SEQ ID NO: 353123 - protein, 14 aa, Homo sapiens
  CDR3 for alpha chain variable domain of TCR clone 176562 (TRAV12-2, TRAJ13)
CAVKKTGGYQKVTF

SEQ ID NO: 353124 - protein, 13 aa, Homo sapiens
  CDR3 for beta chain variable domain of TCR clone 176562 (TRBV20-1, TRBJ2-7)
CSARAGSPYEQYF

SEQ ID NO: 353125 - protein, 14 aa, Homo sapiens
  CDR3 for alpha chain variable domain of TCR clone 176563 (TRAV13-1, TRAJ35)
CAASKGGFGNVLHC

SEQ ID NO: 353126 - protein, 15 aa, Homo sapiens
  CDR3 for beta chain variable domain of TCR clone 176563 (TRBV11-2, TRBJ2-1)
CASSLTGGGYNEQFF

SEQ ID NO: 353127 - protein, 14 aa, Homo sapiens
  CDR3 for alpha chain variable domain of TCR clone 176564 (TRAV12-3, TRAJ57)
CAMSAWGGSEKLVF

SEQ ID NO: 353128 - protein, 14 aa, Homo sapiens
  CDR3 for beta chain variable domain of TCR clone 176564 (TRBV18, TRBJ2-5)
CASAPGVSQETQYF

SEQ ID NO: 353129 - protein, 12 aa, Homo sapiens
  CDR3 for alpha chain variable domain of TCR clone 176565 (TRAV26-1, TRAJ26)
CIVYNYGQNFVF

SEQ ID NO: 353130 - protein, 15 aa, Homo sapiens
  CDR3 for beta chain variable domain of TCR clone 176565 (TRBV7-2, TRBJ2-3)
CASSSRGVSTDTQYF

SEQ ID NO: 353131 - protein, 15 aa, Homo sapiens
  CDR3 for alpha chain variable domain of TCR clone 176566 (TRAV2, TRAJ24)
CAVAVLTDSWGKFQF

SEQ ID NO: 353132 - protein, 14 aa, Homo sapiens
  CDR3 for beta chain variable domain of TCR clone 176566 (TRBV19, TRBJ2-1)
CASSMGSGRRSSSS

SEQ ID NO: 353133 - protein, 14 aa, Homo sapiens
  CDR3 for alpha chain variable domain of TCR clone 176567 (TRAV12-2, TRAJ44)
CAVNKAGTASKLTF

SEQ ID NO: 353134 - protein, 12 aa, Homo sapiens
  CDR3 for beta chain variable domain of TCR clone 176567 (TRBV19, TRBJ1-4)
CARKDWPGGLFF

SEQ ID NO: 353135 - protein, 13 aa, Homo sapiens
  CDR3 for alpha chain variable domain of TCR clone 176568 (TRAV16, TRAJ9)
CALRATRGFKTIF

SEQ ID NO: 353136 - protein, 16 aa, Homo sapiens
  CDR3 for beta chain variable domain of TCR clone 176568 (TRBV5-1, TRBJ1-3)
CASSRSGEDSGNTIYF

SEQ ID NO: 353137 - protein, 15 aa, Homo sapiens
  CDR3 for alpha chain variable domain of TCR clone 176569 (TRAV25, TRAJ52)
CAGTSGGTSYGKLTF

SEQ ID NO: 353138 - protein, 15 aa, Homo sapiens
  CDR3 for beta chain variable domain of TCR clone 176569 (TRBV11-3, TRBJ2-3)
CASLKDGREGDTQYF

SEQ ID NO: 353139 - protein, 14 aa, Homo sapiens
  CDR3 for alpha chain variable domain of TCR clone 176570 (TRAV12-2, TRAJ13)
CAVKKTGGYQKATF

SEQ ID NO: 353140 - protein, 18 aa, Homo sapiens
  CDR3 for beta chain variable domain of TCR clone 176570 (TRBV7-3, TRBJ2-3)
CASSSTGTYPGSTDTQYF

SEQ ID NO: 353141 - protein, 18 aa, Homo sapiens
  CDR3 for alpha chain variable domain of TCR clone 176571 (TRAV13-1, TRAJ52)
CAAKSPNAGGTSYGKLTL

SEQ ID NO: 353142 - protein, 11 aa, Homo sapiens
  CDR3 for beta chain variable domain of TCR clone 176571 (TRBV29-1, TRBJ2-5)
CSEDRTGTQYF

SEQ ID NO: 353143 - protein, 13 aa, Homo sapiens
  CDR3 for alpha chain variable domain of TCR clone 176572 (TRAV1-2, TRAJ9)
CAALNTGGFKTIF

SEQ ID NO: 353144 - protein, 14 aa, Homo sapiens
  CDR3 for beta chain variable domain of TCR clone 176572 (TRBV20-1, TRBJ2-5)
CSARDGRAGETQYF

SEQ ID NO: 353145 - protein, 17 aa, Homo sapiens
  CDR3 for alpha chain variable domain of TCR clone 176573 (TRAV3, TRAJ42)
CAVRDRDYEGSQGNLIF

SEQ ID NO: 353146 - protein, 15 aa, Homo sapiens
  CDR3 for beta chain variable domain of TCR clone 176573 (TRBV6-6, TRBJ2-7)
CASRYSYGGSYEQYF

SEQ ID NO: 353147 - protein, 14 aa, Homo sapiens
  CDR3 for alpha chain variable domain of TCR clone 176574 (TRAV8-4, TRAJ3)
CAVIEYSSASKIIF

SEQ ID NO: 353148 - protein, 15 aa, Homo sapiens
  CDR3 for beta chain variable domain of TCR clone 176574 (TRBV5-4, TRBJ2-7)
CASSPSGSASYEQYF

SEQ ID NO: 353149 - protein, 14 aa, Homo sapiens
  CDR3 for alpha chain variable domain of TCR clone 176575 (TRAV3, TRAJ33)
CAVRDMGRNYQLIW

SEQ ID NO: 353150 - protein, 17 aa, Homo sapiens
  CDR3 for beta chain variable domain of TCR clone 176575 (TRBV19, TRBJ2-1)
CASSIWSAQPTHNEQFF

SEQ ID NO: 353151 - protein, 16 aa, Homo sapiens
  CDR3 for alpha chain variable domain of TCR clone 176576 (TRAV8-1, TRAJ39)
CAVNVRLYNAGNMLTF

SEQ ID NO: 353152 - protein, 15 aa, Homo sapiens
  CDR3 for beta chain variable domain of TCR clone 176576 (TRBV4-1, TRBJ2-3)
CASRSTRAGTGKQYF

SEQ ID NO: 353153 - protein, 14 aa, Homo sapiens
  CDR3 for alpha chain variable domain of TCR clone 176577 (TRAV20, TRAJ43)
CCAGGKSSNNDMRF

SEQ ID NO: 353154 - protein, 13 aa, Homo sapiens
  CDR3 for beta chain variable domain of TCR clone 176577 (TRBV27, TRBJ1-1)
CASSLSIGAEAFF

SEQ ID NO: 353155 - protein, 14 aa, Homo sapiens
  CDR3 for alpha chain variable domain of TCR clone 176578 (TRAV12-2, TRAJ13)
CAVKKTGGYQKVHF

SEQ ID NO: 353156 - protein, 15 aa, Homo sapiens
  CDR3 for beta chain variable domain of TCR clone 176578 (TRBV27, TRBJ2-1)
CASSNGGGSSNEQFF

SEQ ID NO: 353157 - protein, 12 aa, Homo sapiens
  CDR3 for alpha chain variable domain of TCR clone 176579 (TRAV1-1, TRAJ8)
CPGGTGFQKLVF

SEQ ID NO: 353158 - protein, 15 aa, Homo sapiens
  CDR3 for beta chain variable domain of TCR clone 176579 (TRBV7-9, TRBJ1-4)
CASSRTGGFNEKLFF

SEQ ID NO: 353159 - protein, 10 aa, Homo sapiens
  CDR3 for alpha chain variable domain of TCR clone 176580 (TRAV23/DV6, TRAJ57)
CAASSTLSQG

SEQ ID NO: 353160 - protein, 14 aa, Homo sapiens
  CDR3 for beta chain variable domain of TCR clone 176580 (TRBV5-1, TRBJ2-7)
CASGRGESLYEQYF

SEQ ID NO: 353161 - protein, 18 aa, Homo sapiens
  CDR3 for alpha chain variable domain of TCR clone 176581 (TRAV12-3, TRAJ52)
CAMSVGGAGGTSYGNLTF

SEQ ID NO: 353162 - protein, 17 aa, Homo sapiens
  CDR3 for beta chain variable domain of TCR clone 176581 (TRBV13, TRBJ2-3)
CASSLSRVAGGRNTQYF

SEQ ID NO: 353163 - protein, 13 aa, Homo sapiens
  CDR3 for alpha chain variable domain of TCR clone 176582 (TRAV26-2, TRAJ43)
CILRAANNNDMRF

SEQ ID NO: 353164 - protein, 11 aa, Homo sapiens
  CDR3 for beta chain variable domain of TCR clone 176582 (TRBV29-1, TRBJ2-5)
CSEDRTGTQYF

SEQ ID NO: 353165 - protein, 14 aa, Homo sapiens
  CDR3 for alpha chain variable domain of TCR clone 176583 (TRAV1-2, TRAJ27)
CAVIYNTNAGKSTF

SEQ ID NO: 353166 - protein, 14 aa, Homo sapiens
  CDR3 for beta chain variable domain of TCR clone 176583 (TRBV25-1, TRBJ1-1)
CASTHLGGNTEAFF

SEQ ID NO: 353167 - protein, 12 aa, Homo sapiens
  CDR3 for alpha chain variable domain of TCR clone 176584 (TRAV12-3, TRAJ17)
CAMTLPGNKLTF

SEQ ID NO: 353168 - protein, 13 aa, Homo sapiens
  CDR3 for beta chain variable domain of TCR clone 176584 (TRBV5-1, TRBJ1-1)
CASSADWDTEAFF

SEQ ID NO: 353169 - protein, 13 aa, Homo sapiens
  CDR3 for alpha chain variable domain of TCR clone 176585 (TRAV3, TRAJ36)
CAVRDAGANNLFF

SEQ ID NO: 353170 - protein, 15 aa, Homo sapiens
  CDR3 for beta chain variable domain of TCR clone 176585 (TRBV6-1, TRBJ2-3)
CASSERGGITDTQYF

SEQ ID NO: 353171 - protein, 14 aa, Homo sapiens
  CDR3 for alpha chain variable domain of TCR clone 176586 (TRAV13-1, TRAJ20)
CAARPGSNDSKLSF

SEQ ID NO: 353172 - protein, 13 aa, Homo sapiens
  CDR3 for beta chain variable domain of TCR clone 176586 (TRBV20-1, TRBJ1-1)
CSAPPGGHTEAFF

SEQ ID NO: 353173 - protein, 14 aa, Homo sapiens
  CDR3 for alpha chain variable domain of TCR clone 176587 (TRAV13-1, TRAJ9)
CAASALTGGFKTIF

SEQ ID NO: 353174 - protein, 20 aa, Homo sapiens
  CDR3 for beta chain variable domain of TCR clone 176587 (TRBV5-7, TRBJ1-1)
CASSLEENRRLQGPGREAFF

SEQ ID NO: 353175 - protein, 14 aa, Homo sapiens
  CDR3 for alpha chain variable domain of TCR clone 176588 (TRAV14/DV4, TRAJ42)
CPRGSLRSQGNLIF

SEQ ID NO: 353176 - protein, 16 aa, Homo sapiens
  CDR3 for beta chain variable domain of TCR clone 176588 (TRBV27, TRBJ2-2)
CASSFRGLVRTGELFF

SEQ ID NO: 353177 - protein, 23 aa, Homo sapiens
  CDR3 for alpha chain variable domain of TCR clone 176589 (TRAV26-1, )
CIADSAGNNHIQNPDPAVYQLRD

SEQ ID NO: 353178 - protein, 13 aa, Homo sapiens
  CDR3 for beta chain variable domain of TCR clone 176589 (TRBV20-1, TRBJ2-1)
CSARSSHRDEQFF

SEQ ID NO: 353179 - protein, 11 aa, Homo sapiens
  CDR3 for alpha chain variable domain of TCR clone 176590 (TRAV1-2, TRAJ20)
CAVSNDYKLSF

SEQ ID NO: 353180 - protein, 15 aa, Homo sapiens
  CDR3 for beta chain variable domain of TCR clone 176590 (TRBV4-1, TRBJ2-5)
CASSQASGEYETQYF

SEQ ID NO: 353181 - protein, 13 aa, Homo sapiens
  CDR3 for alpha chain variable domain of TCR clone 176591 (TRAV21, TRAJ44)
CAAHTGTASKLTF

SEQ ID NO: 353182 - protein, 14 aa, Homo sapiens
  CDR3 for beta chain variable domain of TCR clone 176591 (TRBV12-5, TRBJ2-5)
CASGSRTHQETQYF

SEQ ID NO: 353183 - protein, 16 aa, Homo sapiens
  CDR3 for alpha chain variable domain of TCR clone 176592 (TRAV21, TRAJ52)
CAVTNAGGTSYGKLTF

SEQ ID NO: 353184 - protein, 14 aa, Homo sapiens
  CDR3 for beta chain variable domain of TCR clone 176592 (TRBV7-2, TRBJ1-1)
CASSFLTGTTEAFF

SEQ ID NO: 353185 - protein, 15 aa, Homo sapiens
  CDR3 for alpha chain variable domain of TCR clone 176593 (TRAV13-1, TRAJ17)
CAASIERAAGNKLTF

SEQ ID NO: 353186 - protein, 14 aa, Homo sapiens
  CDR3 for beta chain variable domain of TCR clone 176593 (TRBV4-1, TRBJ2-2)
CASSQAVNTGELYF

SEQ ID NO: 353187 - protein, 14 aa, Homo sapiens
  CDR3 for alpha chain variable domain of TCR clone 176594 (TRAV29/DV5, TRAJ20)
CAATIRSNDYKLSF

SEQ ID NO: 353188 - protein, 13 aa, Homo sapiens
  CDR3 for beta chain variable domain of TCR clone 176594 (TRBV7-3, TRBJ1-1)
CASSQDWGAEAFF

SEQ ID NO: 353189 - protein, 17 aa, Homo sapiens
  CDR3 for alpha chain variable domain of TCR clone 176595 (TRAV3, TRAJ6)
CAVRDGPRAGGSYIPTF

SEQ ID NO: 353190 - protein, 14 aa, Homo sapiens
  CDR3 for beta chain variable domain of TCR clone 176595 (TRBV7-2, TRBJ1-1)
CASSLKGGNTEAFF

SEQ ID NO: 353191 - protein, 12 aa, Homo sapiens
  CDR3 for alpha chain variable domain of TCR clone 176596 (TRAV26-1, TRAJ13)
YIVSRGYQKVTF

SEQ ID NO: 353192 - protein, 16 aa, Homo sapiens
  CDR3 for beta chain variable domain of TCR clone 176596 (TRBV27, TRBJ2-1)
CASSLSKGSGLDEQFF

SEQ ID NO: 353193 - protein, 15 aa, Homo sapiens
  CDR3 for alpha chain variable domain of TCR clone 176597 (TRAV2, TRAJ41)
CAVGLGSNSGYALNF

SEQ ID NO: 353194 - protein, 14 aa, Homo sapiens
  CDR3 for beta chain variable domain of TCR clone 176597 (TRBV7-2, TRBJ2-7)
CASSPKTSFYEQYF

SEQ ID NO: 353195 - protein, 14 aa, Homo sapiens
  CDR3 for alpha chain variable domain of TCR clone 176598 (TRAV13-1, TRAJ9)
CAASALTGGFKTVF

SEQ ID NO: 353196 - protein, 16 aa, Homo sapiens
  CDR3 for beta chain variable domain of TCR clone 176598 (TRBV7-8, TRBJ2-4)
CASSAERTLAKNMQYF

SEQ ID NO: 353197 - protein, 11 aa, Homo sapiens
  CDR3 for alpha chain variable domain of TCR clone 176599 (TRAV21, TRAJ39)
LVVNAGNMLTF

SEQ ID NO: 353198 - protein, 17 aa, Homo sapiens
  CDR3 for beta chain variable domain of TCR clone 176599 (TRBV7-8, TRBJ2-6)
CASSAGTGGAGANVLTF

SEQ ID NO: 353199 - protein, 13 aa, Homo sapiens
  CDR3 for alpha chain variable domain of TCR clone 176600 (TRAV8-6, TRAJ49)
CAVITNTGNRFYF

SEQ ID NO: 353200 - protein, 20 aa, Homo sapiens
  CDR3 for beta chain variable domain of TCR clone 176600 (TRBV7-8, TRBJ2-2)
CASSHLFPGPTIHITGELFF

SEQ ID NO: 353201 - protein, 13 aa, Homo sapiens
  CDR3 for alpha chain variable domain of TCR clone 176601 (TRAV12-2, TRAJ4)
CAVRSGGYNKLIF

SEQ ID NO: 353202 - protein, 12 aa, Homo sapiens
  CDR3 for beta chain variable domain of TCR clone 176601 (TRBV11-2, TRBJ2-2)
CASSLGGGELFF

SEQ ID NO: 353203 - protein, 14 aa, Homo sapiens
  CDR3 for alpha chain variable domain of TCR clone 176602 (TRAV12-1, TRAJ33)
CVVNPDDSNYQLIW

SEQ ID NO: 353204 - protein, 11 aa, Homo sapiens
  CDR3 for beta chain variable domain of TCR clone 176602 (TRBV7-6, TRBJ2-1)
CASSNYGEQFF

SEQ ID NO: 353205 - protein, 13 aa, Homo sapiens
  CDR3 for alpha chain variable domain of TCR clone 176603 (TRAV21, TRAJ20)
CAVGLRVDYKLSF

SEQ ID NO: 353206 - protein, 14 aa, Homo sapiens
  CDR3 for beta chain variable domain of TCR clone 176603 (TRBV5-1, TRBJ2-7)
CASSRGESLYEQYF

SEQ ID NO: 353207 - protein, 14 aa, Homo sapiens
  CDR3 for alpha chain variable domain of TCR clone 176604 (TRAV12-2, TRAJ11)
CAVNRESGYSTRTC

SEQ ID NO: 353208 - protein, 10 aa, Homo sapiens
  CDR3 for beta chain variable domain of TCR clone 176604 (TRBV20-1, TRBJ2-5)
CSARFETQYF

SEQ ID NO: 353209 - protein, 14 aa, Homo sapiens
  CDR3 for alpha chain variable domain of TCR clone 176605 (TRAV8-3, TRAJ4)
CAVGASGGYNKLIF

SEQ ID NO: 353210 - protein, 13 aa, Homo sapiens
  CDR3 for beta chain variable domain of TCR clone 176605 (TRBV27, TRBJ2-7)
CASGRGGAYEQHF

SEQ ID NO: 353211 - protein, 11 aa, Homo sapiens
  CDR3 for alpha chain variable domain of TCR clone 176606 (TRAV2, TRAJ13)
CASGGYQKVTF

SEQ ID NO: 353212 - protein, 16 aa, Homo sapiens
  CDR3 for beta chain variable domain of TCR clone 176606 (TRBV6-1, TRBJ2-5)
CASSETLDRAAETQYF

SEQ ID NO: 353213 - protein, 15 aa, Homo sapiens
  CDR3 for alpha chain variable domain of TCR clone 176607 (TRAV13-1, TRAJ32)
CAASNGWWCYKKAHL

SEQ ID NO: 353214 - protein, 15 aa, Homo sapiens
  CDR3 for beta chain variable domain of TCR clone 176607 (TRBV20-1, TRBJ1-2)
CSAIRTGAFNYGYTF

SEQ ID NO: 353215 - protein, 13 aa, Homo sapiens
  CDR3 for alpha chain variable domain of TCR clone 176608 (TRAV16, TRAJ11)
CALTQSGYSTLTF

SEQ ID NO: 353216 - protein, 14 aa, Homo sapiens
  CDR3 for beta chain variable domain of TCR clone 176608 (TRBV19, TRBJ2-7)
CASSTTRSSYEHYF

SEQ ID NO: 353217 - protein, 12 aa, Homo sapiens
  CDR3 for alpha chain variable domain of TCR clone 176609 (TRAV23/DV6, TRAJ53)
CAASKLGSGGSN

SEQ ID NO: 353218 - protein, 18 aa, Homo sapiens
  CDR3 for beta chain variable domain of TCR clone 176609 (TRBV11-2, TRBJ2-3)
CASSLGGASRGAPNTQYL

SEQ ID NO: 353219 - protein, 14 aa, Homo sapiens
  CDR3 for alpha chain variable domain of TCR clone 176610 (TRAV13-2, TRAJ11)
CAGTGNSGCSTLTF

SEQ ID NO: 353220 - protein, 11 aa, Homo sapiens
  CDR3 for beta chain variable domain of TCR clone 176610 (TRBV10-3, TRBJ2-7)
CAISEGLEQYF

SEQ ID NO: 353221 - protein, 12 aa, Homo sapiens
  CDR3 for alpha chain variable domain of TCR clone 176611 (TRAV38-1, TRAJ20)
CAFIWNDYKLSF

SEQ ID NO: 353222 - protein, 13 aa, Homo sapiens
  CDR3 for beta chain variable domain of TCR clone 176611 (TRBV6-6, TRBJ1-5)
CASSRGSNQPQHF

SEQ ID NO: 353223 - protein, 14 aa, Homo sapiens
  CDR3 for alpha chain variable domain of TCR clone 176612 (TRAV34, TRAJ44)
CGADGTSTASKLTF

SEQ ID NO: 353224 - protein, 15 aa, Homo sapiens
  CDR3 for beta chain variable domain of TCR clone 176612 (TRBV5-1, TRBJ2-1)
CASSPPRAPYNEQFF

SEQ ID NO: 353225 - protein, 16 aa, Homo sapiens
  CDR3 for alpha chain variable domain of TCR clone 176613 (TRAV23/DV6, TRAJ53)
CSKQTGSGGSNYKLTF

SEQ ID NO: 353226 - protein, 14 aa, Homo sapiens
  CDR3 for beta chain variable domain of TCR clone 176613 (TRBV7-9, TRBJ2-3)
CASSLEQGTNTQYF

SEQ ID NO: 353227 - protein, 14 aa, Homo sapiens
  CDR3 for alpha chain variable domain of TCR clone 176614 (TRAV16, TRAJ33)
CALSAMDSNYKLIW

SEQ ID NO: 353228 - protein, 13 aa, Homo sapiens
  CDR3 for beta chain variable domain of TCR clone 176614 (TRBV4-2, TRBJ1-1)
CASSQAGNTEAFF

SEQ ID NO: 353229 - protein, 12 aa, Homo sapiens
  CDR3 for alpha chain variable domain of TCR clone 176615 (TRAV13-1, TRAJ21)
CAAKEGFNKFYF

SEQ ID NO: 353230 - protein, 13 aa, Homo sapiens
  CDR3 for beta chain variable domain of TCR clone 176615 (TRBV10-1, TRBJ2-1)
CASSAGPDNEQFF

SEQ ID NO: 353231 - protein, 14 aa, Homo sapiens
  CDR3 for alpha chain variable domain of TCR clone 176616 (TRAV12-2, TRAJ24)
CAVTPADSWGKLQF

SEQ ID NO: 353232 - protein, 14 aa, Homo sapiens
  CDR3 for beta chain variable domain of TCR clone 176616 (TRBV7-3, TRBJ2-1)
CASSLTGGANEQFF

SEQ ID NO: 353233 - protein, 17 aa, Homo sapiens
  CDR3 for alpha chain variable domain of TCR clone 176617 (TRAV16, TRAJ42)
CALSPKLYGGSQGNLIF

SEQ ID NO: 353234 - protein, 13 aa, Homo sapiens
  CDR3 for beta chain variable domain of TCR clone 176617 (TRBV19, TRBJ1-5)
CASSTRRGQPQHF

SEQ ID NO: 353235 - protein, 12 aa, Homo sapiens
  CDR3 for alpha chain variable domain of TCR clone 176618 (TRAV4, TRAJ26)
CLVGAYGQNFVF

SEQ ID NO: 353236 - protein, 12 aa, Homo sapiens
  CDR3 for beta chain variable domain of TCR clone 176618 (TRBV11-2, TRBJ2-2)
CASSLGGGELFF

SEQ ID NO: 353237 - protein, 16 aa, Homo sapiens
  CDR3 for alpha chain variable domain of TCR clone 176619 (TRAV1-2, TRAJ10)
CAVRGVLTGGGNKLTF

SEQ ID NO: 353238 - protein, 13 aa, Homo sapiens
  CDR3 for beta chain variable domain of TCR clone 176619 (TRBV28, TRBJ2-4)
CASSQSSKNIQYF

SEQ ID NO: 353239 - protein, 13 aa, Homo sapiens
  CDR3 for alpha chain variable domain of TCR clone 176620 (TRAV27, TRAJ49)
CAPRPYTGNPFYF

SEQ ID NO: 353240 - protein, 16 aa, Homo sapiens
  CDR3 for beta chain variable domain of TCR clone 176620 (TRBV4-1, TRBJ1-2)
CASSQDAGQVLYGYTF

SEQ ID NO: 353241 - protein, 14 aa, Homo sapiens
  CDR3 for alpha chain variable domain of TCR clone 176621 (TRAV1-2, TRAJ16)
CAVNRFSDGQKLLF

SEQ ID NO: 353242 - protein, 14 aa, Homo sapiens
  CDR3 for beta chain variable domain of TCR clone 176621 (TRBV6-3, TRBJ1-1)
CASSYQRRDTEAFF

SEQ ID NO: 353243 - protein, 13 aa, Homo sapiens
  CDR3 for alpha chain variable domain of TCR clone 176622 (TRAV12-1, TRAJ26)
CVVRRNYGQNFVF

SEQ ID NO: 353244 - protein, 13 aa, Homo sapiens
  CDR3 for beta chain variable domain of TCR clone 176622 (TRBV29-1, TRBJ1-1)
CSVGDSRNTEAFF

SEQ ID NO: 353245 - protein, 15 aa, Homo sapiens
  CDR3 for alpha chain variable domain of TCR clone 176623 (TRAV4, TRAJ23)
CCVLLPRGPGGKLIF

SEQ ID NO: 353246 - protein, 13 aa, Homo sapiens
  CDR3 for beta chain variable domain of TCR clone 176623 (TRBV7-9, TRBJ1-2)
CASSLKQNYGYTF

SEQ ID NO: 353247 - protein, 14 aa, Homo sapiens
  CDR3 for alpha chain variable domain of TCR clone 176624 (TRAV1-2, TRAJ16)
CAVNRFSDGQKLHF

SEQ ID NO: 353248 - protein, 13 aa, Homo sapiens
  CDR3 for beta chain variable domain of TCR clone 176624 (TRBV10-2, TRBJ2-7)
CASGASGGYEQYF

SEQ ID NO: 353249 - protein, 14 aa, Homo sapiens
  CDR3 for alpha chain variable domain of TCR clone 176625 (TRAV12-2, TRAJ13)
CAVKKTGGYQKVTF

SEQ ID NO: 353250 - protein, 16 aa, Homo sapiens
  CDR3 for beta chain variable domain of TCR clone 176625 (TRBV12-5, TRBJ2-7)
CASCSQGAPTSSTSGR

SEQ ID NO: 353251 - protein, 11 aa, Homo sapiens
  CDR3 for alpha chain variable domain of TCR clone 176626 (TRAV29/DV5, TRAJ37)
CTTSNTGKLIF

SEQ ID NO: 353252 - protein, 12 aa, Homo sapiens
  CDR3 for beta chain variable domain of TCR clone 176626 (TRBV29-1, TRBJ2-3)
CSVTGGADTQYF

SEQ ID NO: 353253 - protein, 12 aa, Homo sapiens
  CDR3 for alpha chain variable domain of TCR clone 176627 (TRAV12-1, TRAJ32)
CVVKGATNKLIF

SEQ ID NO: 353254 - protein, 12 aa, Homo sapiens
  CDR3 for beta chain variable domain of TCR clone 176627 (TRBV3-1, TRBJ2-2)
CASSLVPGELFF

SEQ ID NO: 353255 - protein, 14 aa, Homo sapiens
  CDR3 for alpha chain variable domain of TCR clone 176628 (TRAV2, TRAJ9)
CAVEDRSGGFKTIL

SEQ ID NO: 353256 - protein, 17 aa, Homo sapiens
  CDR3 for beta chain variable domain of TCR clone 176628 (TRBV7-3, TRBJ2-3)
CASSLMKRMRGADTQYF

SEQ ID NO: 353257 - protein, 16 aa, Homo sapiens
  CDR3 for alpha chain variable domain of TCR clone 176629 (TRAV1-2, TRAJ16)
CAPPGFQMARSCSLQG

SEQ ID NO: 353258 - protein, 14 aa, Homo sapiens
  CDR3 for beta chain variable domain of TCR clone 176629 (TRBV5-4, TRBJ1-1)
CASSLDSRRDEAFF

SEQ ID NO: 353259 - protein, 16 aa, Homo sapiens
  CDR3 for alpha chain variable domain of TCR clone 176630 (TRAV3, TRAJ28)
CAVLPRSGAGSYKLTF

SEQ ID NO: 353260 - protein, 14 aa, Homo sapiens
  CDR3 for beta chain variable domain of TCR clone 176630 (TRBV19, TRBJ2-1)
CASPTFVLSGEQFF

SEQ ID NO: 353261 - protein, 14 aa, Homo sapiens
  CDR3 for alpha chain variable domain of TCR clone 176631 (TRAV23/DV6, TRAJ13)
CAASETGGYQKVTF

SEQ ID NO: 353262 - protein, 18 aa, Homo sapiens
  CDR3 for beta chain variable domain of TCR clone 176631 (TRBV5-1, TRBJ1-3)
CASSPWAPSSGNPYILER

SEQ ID NO: 353263 - protein, 16 aa, Homo sapiens
  CDR3 for alpha chain variable domain of TCR clone 176632 (TRAV14/DV4, TRAJ54)
CAMRGGRIQGAQKLVF

SEQ ID NO: 353264 - protein, 15 aa, Homo sapiens
  CDR3 for beta chain variable domain of TCR clone 176632 (TRBV12-4, TRBJ2-1)
CASSLLATGNNEQFF

SEQ ID NO: 353265 - protein, 16 aa, Homo sapiens
  CDR3 for alpha chain variable domain of TCR clone 176633 (TRAV21, TRAJ17)
CAVGPGEEAAGNKLTF

SEQ ID NO: 353266 - protein, 16 aa, Homo sapiens
  CDR3 for beta chain variable domain of TCR clone 176633 (TRBV2, TRBJ2-7)
CASSEPWTGPSYEQYF

SEQ ID NO: 353267 - protein, 14 aa, Homo sapiens
  CDR3 for alpha chain variable domain of TCR clone 176634 (TRAV8-1, TRAJ24)
CAVNAADSWGKLQF

SEQ ID NO: 353268 - protein, 16 aa, Homo sapiens
  CDR3 for beta chain variable domain of TCR clone 176634 (TRBV4-3, TRBJ2-1)
CASRPALDRGVNEQLF

SEQ ID NO: 353269 - protein, 13 aa, Homo sapiens
  CDR3 for alpha chain variable domain of TCR clone 176635 (TRAV1-2, TRAJ11)
CAVRDSGYSTLTF

SEQ ID NO: 353270 - protein, 12 aa, Homo sapiens
  CDR3 for beta chain variable domain of TCR clone 176635 (TRBV11-2, TRBJ2-1)
CASSPGNNEQFF

SEQ ID NO: 353271 - protein, 12 aa, Homo sapiens
  CDR3 for alpha chain variable domain of TCR clone 176636 (TRAV13-1, TRAJ42)
VNYGGSQGNLIF

SEQ ID NO: 353272 - protein, 12 aa, Homo sapiens
  CDR3 for beta chain variable domain of TCR clone 176636 (TRBV7-9, TRBJ2-7)
CASSLGGYEQYF

SEQ ID NO: 353273 - protein, 15 aa, Homo sapiens
  CDR3 for alpha chain variable domain of TCR clone 176637 (TRAV3, TRAJ42)
CAVRGGTGSQGNLIF

SEQ ID NO: 353274 - protein, 18 aa, Homo sapiens
  CDR3 for beta chain variable domain of TCR clone 176637 (TRBV18, TRBJ2-7)
CASSPRGGLRAVLRAGHQ

SEQ ID NO: 353275 - protein, 12 aa, Homo sapiens
  CDR3 for alpha chain variable domain of TCR clone 176638 (TRAV30, TRAJ43)
CGTEERGNYMNF

SEQ ID NO: 353276 - protein, 13 aa, Homo sapiens
  CDR3 for beta chain variable domain of TCR clone 176638 (TRBV27, TRBJ2-7)
CASSVSQGYEQYF

SEQ ID NO: 353277 - protein, 21 aa, Homo sapiens
  CDR3 for alpha chain variable domain of TCR clone 176639 (TRAV27, TRAJ24)
ASTSVRNDIPTTTDSWGKLQF

SEQ ID NO: 353278 - protein, 13 aa, Homo sapiens
  CDR3 for beta chain variable domain of TCR clone 176639 (TRBV7-9, TRBJ1-2)
CASSLKQNYGYTF

SEQ ID NO: 353279 - protein, 14 aa, Homo sapiens
  CDR3 for alpha chain variable domain of TCR clone 176640 (TRAV2, TRAJ37)
CAVEDQGNTGKLIF

SEQ ID NO: 353280 - protein, 14 aa, Homo sapiens
  CDR3 for beta chain variable domain of TCR clone 176640 (TRBV18, TRBJ2-1)
CASSPQGRFNEQFC

SEQ ID NO: 353281 - protein, 14 aa, Homo sapiens
  CDR3 for alpha chain variable domain of TCR clone 176641 (TRAV26-1, TRAJ38)
CIADNAGNNRKLIW

SEQ ID NO: 353282 - protein, 12 aa, Homo sapiens
  CDR3 for beta chain variable domain of TCR clone 176641 (TRBV29-1, TRBJ2-3)
CSVTGGADTQCF

SEQ ID NO: 353283 - protein, 12 aa, Homo sapiens
  CDR3 for alpha chain variable domain of TCR clone 176642 (TRAV29/DV5, TRAJ15)
CAASGEGTALIF

SEQ ID NO: 353284 - protein, 15 aa, Homo sapiens
  CDR3 for beta chain variable domain of TCR clone 176642 (TRBV4-3, TRBJ1-5)
CASSHDSGGGQPQHS

SEQ ID NO: 353285 - protein, 12 aa, Homo sapiens
  CDR3 for alpha chain variable domain of TCR clone 176643 (TRAV21, TRAJ5)
CCEDTGRRALTF

SEQ ID NO: 353286 - protein, 18 aa, Homo sapiens
  CDR3 for beta chain variable domain of TCR clone 176643 (TRBV25-1, TRBJ1-2)
CASSGLQNGQGLIFGYTF

SEQ ID NO: 353287 - protein, 15 aa, Homo sapiens
  CDR3 for alpha chain variable domain of TCR clone 176644 (TRAV3, TRAJ4)
CAVRDGTGGYNKLIF

SEQ ID NO: 353288 - protein, 13 aa, Homo sapiens
  CDR3 for beta chain variable domain of TCR clone 176644 (TRBV15, TRBJ1-1)
CATSRIRNTEAFF

SEQ ID NO: 353289 - protein, 14 aa, Homo sapiens
  CDR3 for alpha chain variable domain of TCR clone 176645 (TRAV13-1, TRAJ35)
RAASKGGFGNVLHC

SEQ ID NO: 353290 - protein, 13 aa, Homo sapiens
  CDR3 for beta chain variable domain of TCR clone 176645 (TRBV7-3, TRBJ1-1)
CASTQDWGAEAFF

SEQ ID NO: 353291 - protein, 12 aa, Homo sapiens
  CDR3 for alpha chain variable domain of TCR clone 176646 (TRAV13-1, TRAJ21)
CAAKEGFNSFYF

SEQ ID NO: 353292 - protein, 15 aa, Homo sapiens
  CDR3 for beta chain variable domain of TCR clone 176646 (TRBV25-1, TRBJ1-4)
CASSPGDSTNEKLFF

SEQ ID NO: 353293 - protein, 11 aa, Homo sapiens
  CDR3 for alpha chain variable domain of TCR clone 176647 (TRAV3, TRAJ21)
CAVGNFYKFYF

SEQ ID NO: 353294 - protein, 17 aa, Homo sapiens
  CDR3 for beta chain variable domain of TCR clone 176647 (TRBV24-1, TRBJ2-1)
CATSDVSTSGTYNEQFF

SEQ ID NO: 353295 - protein, 14 aa, Homo sapiens
  CDR3 for alpha chain variable domain of TCR clone 176648 (TRAV2, TRAJ9)
CAVEDRSGGFKTNF

SEQ ID NO: 353296 - protein, 13 aa, Homo sapiens
  CDR3 for beta chain variable domain of TCR clone 176648 (TRBV7-3, TRBJ1-1)
CASSQDWGAEAFF

SEQ ID NO: 353297 - protein, 14 aa, Homo sapiens
  CDR3 for alpha chain variable domain of TCR clone 176649 (TRAV38-1, TRAJ45)
CAYNSGGGADGLTF

SEQ ID NO: 353298 - protein, 17 aa, Homo sapiens
  CDR3 for beta chain variable domain of TCR clone 176649 (TRBV7-9, TRBJ1-2)
CASSQSPPFPGSGGYTF

SEQ ID NO: 353299 - protein, 13 aa, Homo sapiens
  CDR3 for alpha chain variable domain of TCR clone 176650 (TRAV12-1, TRAJ34)
CVVTGYNTDKLIF

SEQ ID NO: 353300 - protein, 14 aa, Homo sapiens
  CDR3 for beta chain variable domain of TCR clone 176650 (TRBV28, TRBJ2-7)
CASKAGGVYEQYFG

SEQ ID NO: 353301 - protein, 14 aa, Homo sapiens
  CDR3 for alpha chain variable domain of TCR clone 176651 (TRAV3, TRAJ22)
CAVRDYGSARQLTF

SEQ ID NO: 353302 - protein, 14 aa, Homo sapiens
  CDR3 for beta chain variable domain of TCR clone 176651 (TRBV12-5, TRBJ2-5)
CASGSRTHQETQYF

SEQ ID NO: 353303 - protein, 12 aa, Homo sapiens
  CDR3 for alpha chain variable domain of TCR clone 176652 (TRAV3, TRAJ13)
CAVSGGYQKVTF

SEQ ID NO: 353304 - protein, 14 aa, Homo sapiens
  CDR3 for beta chain variable domain of TCR clone 176652 (TRBV11-2, TRBJ1-3)
CASSLAVPGNTIYF

SEQ ID NO: 353305 - protein, 13 aa, Homo sapiens
  CDR3 for alpha chain variable domain of TCR clone 176653 (TRAV2, TRAJ40)
CAVVTSGTYKYIF

SEQ ID NO: 353306 - protein, 15 aa, Homo sapiens
  CDR3 for beta chain variable domain of TCR clone 176653 (TRBV18, TRBJ2-1)
CASSPPSASYNEHLF

SEQ ID NO: 353307 - protein, 16 aa, Homo sapiens
  CDR3 for alpha chain variable domain of TCR clone 176654 (TRAV3, TRAJ21)
CAVRDIEGGNFNKFYF

SEQ ID NO: 353308 - protein, 13 aa, Homo sapiens
  CDR3 for beta chain variable domain of TCR clone 176654 (TRBV27, TRBJ2-7)
CASSLTTGYEQYL

SEQ ID NO: 353309 - protein, 16 aa, Homo sapiens
  CDR3 for alpha chain variable domain of TCR clone 176655 (TRAV1-2, TRAJ10)
CAVRGVLTGGGNKLTF

SEQ ID NO: 353310 - protein, 12 aa, Homo sapiens
  CDR3 for beta chain variable domain of TCR clone 176655 (TRBV7-8, TRBJ2-7)
CASSLGDREQNF

SEQ ID NO: 353311 - protein, 13 aa, Homo sapiens
  CDR3 for alpha chain variable domain of TCR clone 176656 (TRAV20, TRAJ42)
CAVQGGRQGNLIF

SEQ ID NO: 353312 - protein, 15 aa, Homo sapiens
  CDR3 for beta chain variable domain of TCR clone 176656 (TRBV10-1, TRBJ2-1)
CASSEWRGTYNEQFF

SEQ ID NO: 353313 - protein, 19 aa, Homo sapiens
  CDR3 for alpha chain variable domain of TCR clone 176657 (TRAV2, TRAJ20)
ILQVREADAAVYRDCKPSF

SEQ ID NO: 353314 - protein, 12 aa, Homo sapiens
  CDR3 for beta chain variable domain of TCR clone 176657 (TRBV11-2, TRBJ2-1)
CASSPGNNEQFF

SEQ ID NO: 353315 - protein, 16 aa, Homo sapiens
  CDR3 for alpha chain variable domain of TCR clone 176658 (TRAV12-2, TRAJ6)
CAAPLAGSGGSNIPTF

SEQ ID NO: 353316 - protein, 10 aa, Homo sapiens
  CDR3 for beta chain variable domain of TCR clone 176658 (TRBV28, TRBJ1-2)
CASSSDRAVF

SEQ ID NO: 353317 - protein, 14 aa, Homo sapiens
  CDR3 for alpha chain variable domain of TCR clone 176659 (TRAV1-2, TRAJ8)
FAVREDTGFQKLVF

SEQ ID NO: 353318 - protein, 15 aa, Homo sapiens
  CDR3 for beta chain variable domain of TCR clone 176659 (TRBV28, TRBJ2-4)
CAAGSGTLLMGIQYF

SEQ ID NO: 353319 - protein, 15 aa, Homo sapiens
  CDR3 for alpha chain variable domain of TCR clone 176660 (TRAV30, TRAJ32)
CGTEILGGATNKRIF

SEQ ID NO: 353320 - protein, 16 aa, Homo sapiens
  CDR3 for beta chain variable domain of TCR clone 176660 (TRBV7-7, TRBJ2-1)
CASSLASGTSYNEQFF

SEQ ID NO: 353321 - protein, 14 aa, Homo sapiens
  CDR3 for alpha chain variable domain of TCR clone 176661 (TRAV1-2, TRAJ16)
CAVNRFSDGQKLLS

SEQ ID NO: 353322 - protein, 17 aa, Homo sapiens
  CDR3 for beta chain variable domain of TCR clone 176661 (TRBV20-1, TRBJ2-2)
CSASGSGQGGLTGELFF

SEQ ID NO: 353323 - protein, 14 aa, Homo sapiens
  CDR3 for alpha chain variable domain of TCR clone 176662 (TRAV1-2, TRAJ16)
CAVNRFSAGQKLLF

SEQ ID NO: 353324 - protein, 12 aa, Homo sapiens
  CDR3 for beta chain variable domain of TCR clone 176662 (TRBV20-1, TRBJ1-5)
CSAAGWDQPQHF

SEQ ID NO: 353325 - protein, 11 aa, Homo sapiens
  CDR3 for alpha chain variable domain of TCR clone 176663 (TRAV12-3, TRAJ43)
CAMSVSNDILF

SEQ ID NO: 353326 - protein, 14 aa, Homo sapiens
  CDR3 for beta chain variable domain of TCR clone 176663 (TRBV7-8, TRBJ2-3)
CASSLEAGTDTQYF

SEQ ID NO: 353327 - protein, 17 aa, Homo sapiens
  CDR3 for alpha chain variable domain of TCR clone 176664 (TRAV23/DV6, TRAJ57)
CAASSTISPVGSEKLVF

SEQ ID NO: 353328 - protein, 14 aa, Homo sapiens
  CDR3 for beta chain variable domain of TCR clone 176664 (TRBV25-1, TRBJ1-1)
CASTHLGGNTEAFF

SEQ ID NO: 353329 - protein, 13 aa, Homo sapiens
  CDR3 for alpha chain variable domain of TCR clone 176665 (TRAV27, TRAJ39)
CAGATPAGNMLTF

SEQ ID NO: 353330 - protein, 13 aa, Homo sapiens
  CDR3 for beta chain variable domain of TCR clone 176665 (TRBV4-1, TRBJ2-4)
CASSQVGIDMQYF

SEQ ID NO: 353331 - protein, 15 aa, Homo sapiens
  CDR3 for alpha chain variable domain of TCR clone 176666 (TRAV26-2, TRAJ28)
RILVESGAGSYQLTF

SEQ ID NO: 353332 - protein, 11 aa, Homo sapiens
  CDR3 for beta chain variable domain of TCR clone 176666 (TRBV25-1, TRBJ2-7)
CASSTSYEQYF

SEQ ID NO: 353333 - protein, 12 aa, Homo sapiens
  CDR3 for alpha chain variable domain of TCR clone 176667 (TRAV9-2, TRAJ57)
CALRSGSEKLAF

SEQ ID NO: 353334 - protein, 15 aa, Homo sapiens
  CDR3 for beta chain variable domain of TCR clone 176667 (TRBV20-1, TRBJ2-7)
CSARDRVSGMDEQYF

SEQ ID NO: 353335 - protein, 15 aa, Homo sapiens
  CDR3 for alpha chain variable domain of TCR clone 176668 (TRAV17, TRAJ56)
CATEPFTGANSKLTF

SEQ ID NO: 353336 - protein, 14 aa, Homo sapiens
  CDR3 for beta chain variable domain of TCR clone 176668 (TRBV19, TRBJ2-1)
CASTTFVLSGEQFF

SEQ ID NO: 353337 - protein, 15 aa, Homo sapiens
  CDR3 for alpha chain variable domain of TCR clone 176669 (TRAV12-3, TRAJ27)
CAMRAYNTNAGKSTF

SEQ ID NO: 353338 - protein, 16 aa, Homo sapiens
  CDR3 for beta chain variable domain of TCR clone 176669 (TRBV7-8, TRBJ2-6)
CASPGRVVAGANVLTF

SEQ ID NO: 353339 - protein, 17 aa, Homo sapiens
  CDR3 for alpha chain variable domain of TCR clone 176670 (TRAV8-3, TRAJ11)
CAVSDRGENSGYSTLTF

SEQ ID NO: 353340 - protein, 14 aa, Homo sapiens
  CDR3 for beta chain variable domain of TCR clone 176670 (TRBV20-1, TRBJ2-1)
CSPNDEASYNEQFF

SEQ ID NO: 353341 - protein, 15 aa, Homo sapiens
  CDR3 for alpha chain variable domain of TCR clone 176671 (TRAV21, TRAJ52)
CAVRGGGTSYGKLTF

SEQ ID NO: 353342 - protein, 14 aa, Homo sapiens
  CDR3 for beta chain variable domain of TCR clone 176671 (TRBV4-1, TRBJ2-5)
CASSQYRDQETQYF

SEQ ID NO: 353343 - protein, 13 aa, Homo sapiens
  CDR3 for alpha chain variable domain of TCR clone 176672 (TRAV2, TRAJ40)
CAVVTSGTYKYIF

SEQ ID NO: 353344 - protein, 15 aa, Homo sapiens
  CDR3 for beta chain variable domain of TCR clone 176672 (TRBV11-3, TRBJ2-3)
CASLKDAREGDTQYF

SEQ ID NO: 353345 - protein, 15 aa, Homo sapiens
  CDR3 for alpha chain variable domain of TCR clone 176673 (TRAV10, TRAJ3)
CVVSVRYSSASKIIF

SEQ ID NO: 353346 - protein, 14 aa, Homo sapiens
  CDR3 for beta chain variable domain of TCR clone 176673 (TRBV11-1, TRBJ2-7)
CASSFRQGSYEQYL

SEQ ID NO: 353347 - protein, 17 aa, Homo sapiens
  CDR3 for alpha chain variable domain of TCR clone 176674 (TRAV17, TRAJ52)
CATVPIGGGTSYGKLTF

SEQ ID NO: 353348 - protein, 16 aa, Homo sapiens
  CDR3 for beta chain variable domain of TCR clone 176674 (TRBV9, TRBJ2-1)
CASSVGGGGNYDEQFF

SEQ ID NO: 353349 - protein, 11 aa, Homo sapiens
  CDR3 for alpha chain variable domain of TCR clone 176675 (TRAV12-3, TRAJ43)
CAMSVSNDMRF

SEQ ID NO: 353350 - protein, 15 aa, Homo sapiens
  CDR3 for beta chain variable domain of TCR clone 176675 (TRBV20-1, TRBJ2-7)
CSAESGTSGAYEQYF

SEQ ID NO: 353351 - protein, 18 aa, Homo sapiens
  CDR3 for alpha chain variable domain of TCR clone 176676 (TRAV21, TRAJ52)
CAVRPSPAGGTSDGKLTF

SEQ ID NO: 353352 - protein, 16 aa, Homo sapiens
  CDR3 for beta chain variable domain of TCR clone 176676 (TRBV19, TRBJ2-1)
CASSKAGPSSYNEQFF

SEQ ID NO: 353353 - protein, 14 aa, Homo sapiens
  CDR3 for alpha chain variable domain of TCR clone 176677 (TRAV12-3, TRAJ9)
CAMSVKTGGFKTIF

SEQ ID NO: 353354 - protein, 14 aa, Homo sapiens
  CDR3 for beta chain variable domain of TCR clone 176677 (TRBV7-2, TRBJ2-7)
CASRSQGAAYGQYF

SEQ ID NO: 353355 - protein, 13 aa, Homo sapiens
  CDR3 for alpha chain variable domain of TCR clone 176678 (TRAV13-2, TRAJ13)
RAERPGGYQKVTF

SEQ ID NO: 353356 - protein, 18 aa, Homo sapiens
  CDR3 for beta chain variable domain of TCR clone 176678 (TRBV7-6, TRBJ2-1)
CASSPRTSGMSSYNEQFF

SEQ ID NO: 353357 - protein, 10 aa, Homo sapiens
  CDR3 for alpha chain variable domain of TCR clone 176679 (TRAV16, TRAJ22)
SAMYLRQLTF

SEQ ID NO: 353358 - protein, 15 aa, Homo sapiens
  CDR3 for beta chain variable domain of TCR clone 176679 (TRBV7-2, TRBJ2-1)
CASSSGLAGGNEQFF

SEQ ID NO: 353359 - protein, 15 aa, Homo sapiens
  CDR3 for alpha chain variable domain of TCR clone 176680 (TRAV23/DV6, TRAJ28)
CAALRAYSGAGSYQL

SEQ ID NO: 353360 - protein, 13 aa, Homo sapiens
  CDR3 for beta chain variable domain of TCR clone 176680 (TRBV4-2, TRBJ2-3)
CASSQGNTDTQYF

SEQ ID NO: 353361 - protein, 15 aa, Homo sapiens
  CDR3 for alpha chain variable domain of TCR clone 176681 (TRAV3, TRAJ42)
CAVRGGTGSQGNLIF

SEQ ID NO: 353362 - protein, 11 aa, Homo sapiens
  CDR3 for beta chain variable domain of TCR clone 176681 (TRBV11-2, TRBJ2-2)
CASSLPGELFF

SEQ ID NO: 353363 - protein, 13 aa, Homo sapiens
  CDR3 for alpha chain variable domain of TCR clone 176682 (TRAV17, TRAJ9)
CATGSTGGFKTIF

SEQ ID NO: 353364 - protein, 14 aa, Homo sapiens
  CDR3 for beta chain variable domain of TCR clone 176682 (TRBV7-8, TRBJ2-7)
CASTFRGGPNAQYF

SEQ ID NO: 353365 - protein, 18 aa, Homo sapiens
  CDR3 for alpha chain variable domain of TCR clone 176683 (TRAV21, TRAJ52)
CDVRPSPAGGTSYGKLTF

SEQ ID NO: 353366 - protein, 17 aa, Homo sapiens
  CDR3 for beta chain variable domain of TCR clone 176683 (TRBV13, TRBJ2-3)
CASSLSRVALGRNTHYF

SEQ ID NO: 353367 - protein, 15 aa, Homo sapiens
  CDR3 for alpha chain variable domain of TCR clone 176684 (TRAV29/DV5, TRAJ42)
CAAKTDGGSQGNLII

SEQ ID NO: 353368 - protein, 12 aa, Homo sapiens
  CDR3 for beta chain variable domain of TCR clone 176684 (TRBV11-2, TRBJ2-1)
CASSPGNNEQFF

SEQ ID NO: 353369 - protein, 16 aa, Homo sapiens
  CDR3 for alpha chain variable domain of TCR clone 176685 (TRAV1-2, TRAJ10)
CAVRGVLTGGGNKLAF

SEQ ID NO: 353370 - protein, 16 aa, Homo sapiens
  CDR3 for beta chain variable domain of TCR clone 176685 (TRBV12-5, TRBJ2-5)
CASGPRTSGNQETQYF

SEQ ID NO: 353371 - protein, 12 aa, Homo sapiens
  CDR3 for alpha chain variable domain of TCR clone 176686 (TRAV35, TRAJ54)
CADLQGAQKLVF

SEQ ID NO: 353372 - protein, 14 aa, Homo sapiens
  CDR3 for beta chain variable domain of TCR clone 176686 (TRBV18, TRBJ2-7)
CASSPRGGSYEQYF

SEQ ID NO: 353373 - protein, 13 aa, Homo sapiens
  CDR3 for alpha chain variable domain of TCR clone 176687 (TRAV8-6, TRAJ5)
CAVLATGRRALTF

SEQ ID NO: 353374 - protein, 12 aa, Homo sapiens
  CDR3 for beta chain variable domain of TCR clone 176687 (TRBV7-9, TRBJ1-6)
CASSASESPLHF

SEQ ID NO: 353375 - protein, 12 aa, Homo sapiens
  CDR3 for alpha chain variable domain of TCR clone 176688 (TRAV38-1, TRAJ47)
CAFETYGNKLVF

SEQ ID NO: 353376 - protein, 14 aa, Homo sapiens
  CDR3 for beta chain variable domain of TCR clone 176688 (TRBV4-1, TRBJ2-2)
CASSQAVNTGELFF

SEQ ID NO: 353377 - protein, 13 aa, Homo sapiens
  CDR3 for alpha chain variable domain of TCR clone 176689 (TRAV17, TRAJ40)
CATAFSGTYKYIF

SEQ ID NO: 353378 - protein, 15 aa, Homo sapiens
  CDR3 for beta chain variable domain of TCR clone 176689 (TRBV7-2, TRBJ2-7)
CASSTPGLTRGEQYF

SEQ ID NO: 353379 - protein, 11 aa, Homo sapiens
  CDR3 for alpha chain variable domain of TCR clone 176690 (TRAV4, TRAJ23)
CLVAPGGKLIF

SEQ ID NO: 353380 - protein, 17 aa, Homo sapiens
  CDR3 for beta chain variable domain of TCR clone 176690 (TRBV7-4, TRBJ2-3)
CASSFAKREVRTDTQYF

SEQ ID NO: 353381 - protein, 11 aa, Homo sapiens
  CDR3 for alpha chain variable domain of TCR clone 176691 (TRAV3, TRAJ21)
CAVGNFNKFYF

SEQ ID NO: 353382 - protein, 14 aa, Homo sapiens
  CDR3 for beta chain variable domain of TCR clone 176691 (TRBV11-2, TRBJ2-7)
RASSSTGEGYEQYF

SEQ ID NO: 353383 - protein, 15 aa, Homo sapiens
  CDR3 for alpha chain variable domain of TCR clone 176692 (TRAV12-3, TRAJ6)
CAMSATTGGSYIPTF

SEQ ID NO: 353384 - protein, 13 aa, Homo sapiens
  CDR3 for beta chain variable domain of TCR clone 176692 (TRBV20-1, TRBJ2-3)
CSASRQAADTQYF

SEQ ID NO: 353385 - protein, 15 aa, Homo sapiens
  CDR3 for alpha chain variable domain of TCR clone 176693 (TRAV35, TRAJ53)
CAGLTQAGSNYKLTF

SEQ ID NO: 353386 - protein, 17 aa, Homo sapiens
  CDR3 for beta chain variable domain of TCR clone 176693 (TRBV24-1, TRBJ2-1)
CATSTGTSGSINNEQFF

SEQ ID NO: 353387 - protein, 14 aa, Homo sapiens
  CDR3 for alpha chain variable domain of TCR clone 176694 (TRAV1-2, TRAJ15)
CAVRDRQAGTALIF

SEQ ID NO: 353388 - protein, 16 aa, Homo sapiens
  CDR3 for beta chain variable domain of TCR clone 176694 (TRBV7-3, TRBJ2-1)
CASSLEGYRSYNEQFF

SEQ ID NO: 353389 - protein, 15 aa, Homo sapiens
  CDR3 for alpha chain variable domain of TCR clone 176695 (TRAV8-3, TRAJ15)
CAVGAPNQAGTALIL

SEQ ID NO: 353390 - protein, 14 aa, Homo sapiens
  CDR3 for beta chain variable domain of TCR clone 176695 (TRBV20-1, TRBJ2-1)
CSTNDEASYNEQFF

SEQ ID NO: 353391 - protein, 12 aa, Homo sapiens
  CDR3 for alpha chain variable domain of TCR clone 176696 (TRAV20, TRAJ37)
CALPSNTGKLIF

SEQ ID NO: 353392 - protein, 16 aa, Homo sapiens
  CDR3 for beta chain variable domain of TCR clone 176696 (TRBV28, TRBJ1-2)
CASSHGQGVYKDGYTC

SEQ ID NO: 353393 - protein, 14 aa, Homo sapiens
  CDR3 for alpha chain variable domain of TCR clone 176697 (TRAV26-2, TRAJ45)
CIPRLNSGDSTLTF

SEQ ID NO: 353394 - protein, 13 aa, Homo sapiens
  CDR3 for beta chain variable domain of TCR clone 176697 (TRBV7-3, TRBJ2-1)
CASSPVAYNEQFF

SEQ ID NO: 353395 - protein, 12 aa, Homo sapiens
  CDR3 for alpha chain variable domain of TCR clone 176698 (TRAV21, TRAJ31)
CVLAGNNARLMF

SEQ ID NO: 353396 - protein, 21 aa, Homo sapiens
  CDR3 for beta chain variable domain of TCR clone 176698 (TRBV11-1, TRBJ2-1)
CASSARERLRPEGPSYNEQFF

SEQ ID NO: 353397 - protein, 18 aa, Homo sapiens
  CDR3 for alpha chain variable domain of TCR clone 176699 (TRAV12-3, TRAJ52)
CAMSRTNAGGTSYGKLTF

SEQ ID NO: 353398 - protein, 14 aa, Homo sapiens
  CDR3 for beta chain variable domain of TCR clone 176699 (TRBV11-3, TRBJ2-1)
CASSATTSGSIQFF

SEQ ID NO: 353399 - protein, 10 aa, Homo sapiens
  CDR3 for alpha chain variable domain of TCR clone 176700 (TRAV12-1, TRAJ41)
MTGSGYALNF

SEQ ID NO: 353400 - protein, 13 aa, Homo sapiens
  CDR3 for beta chain variable domain of TCR clone 176700 (TRBV20-1, TRBJ1-1)
CSARVGGNTEAFF

SEQ ID NO: 353401 - protein, 12 aa, Homo sapiens
  CDR3 for alpha chain variable domain of TCR clone 176701 (TRAV2, TRAJ33)
CAVPDSNYLLIW

SEQ ID NO: 353402 - protein, 15 aa, Homo sapiens
  CDR3 for beta chain variable domain of TCR clone 176701 (TRBV10-2, TRBJ2-6)
CASSEQGTGANVLTF

SEQ ID NO: 353403 - protein, 16 aa, Homo sapiens
  CDR3 for alpha chain variable domain of TCR clone 176702 (TRAV3, TRAJ28)
CAVLPRSGDGSYQLTF

SEQ ID NO: 353404 - protein, 13 aa, Homo sapiens
  CDR3 for beta chain variable domain of TCR clone 176702 (TRBV12-4, TRBJ2-5)
CASRLAVQETQYF

SEQ ID NO: 353405 - protein, 13 aa, Homo sapiens
  CDR3 for alpha chain variable domain of TCR clone 176703 (TRAV12-2, TRAJ37)
CAGGYGNTGKLIF

SEQ ID NO: 353406 - protein, 17 aa, Homo sapiens
  CDR3 for beta chain variable domain of TCR clone 176703 (TRBV11-2, TRBJ2-1)
CDSSLYPPGVEYNEQFF

SEQ ID NO: 353407 - protein, 14 aa, Homo sapiens
  CDR3 for alpha chain variable domain of TCR clone 176704 (TRAV17, TRAJ16)
CATADFSDGQKLLF

SEQ ID NO: 353408 - protein, 15 aa, Homo sapiens
  CDR3 for beta chain variable domain of TCR clone 176704 (TRBV18, TRBJ2-1)
CASSPPSASYNGQFL

SEQ ID NO: 353409 - protein, 14 aa, Homo sapiens
  CDR3 for alpha chain variable domain of TCR clone 176705 (TRAV17, TRAJ33)
CATDARRINYQLIW

SEQ ID NO: 353410 - protein, 14 aa, Homo sapiens
  CDR3 for beta chain variable domain of TCR clone 176705 (TRBV25-1, TRBJ1-4)
CASSGGGQPEKLFF

SEQ ID NO: 353411 - protein, 13 aa, Homo sapiens
  CDR3 for alpha chain variable domain of TCR clone 176706 (TRAV13-2, TRAJ40)
CAEFTSGTFKYIF

SEQ ID NO: 353412 - protein, 12 aa, Homo sapiens
  CDR3 for beta chain variable domain of TCR clone 176706 (TRBV11-2, TRBJ2-2)
CASSLGGGELFF

SEQ ID NO: 353413 - protein, 19 aa, Homo sapiens
  CDR3 for alpha chain variable domain of TCR clone 176707 (TRAV2, TRAJ20)
ILQVRGADAAVYRDCKLSF

SEQ ID NO: 353414 - protein, 16 aa, Homo sapiens
  CDR3 for beta chain variable domain of TCR clone 176707 (TRBV5-1, TRBJ2-5)
CASSLALLRAGETQYF

SEQ ID NO: 353415 - protein, 20 aa, Homo sapiens
  CDR3 for alpha chain variable domain of TCR clone 176708 (TRAV25, TRAJ21)
TATQTTDVGTYPLSFDKFYF

SEQ ID NO: 353416 - protein, 14 aa, Homo sapiens
  CDR3 for beta chain variable domain of TCR clone 176708 (TRBV6-1, TRBJ2-1)
CASAKDGFYNEQFF

SEQ ID NO: 353417 - protein, 11 aa, Homo sapiens
  CDR3 for alpha chain variable domain of TCR clone 176709 (TRAV12-3, TRAJ43)
CAMSVSNDMRF

SEQ ID NO: 353418 - protein, 13 aa, Homo sapiens
  CDR3 for beta chain variable domain of TCR clone 176709 (TRBV20-1, TRBJ1-1)
CSAPLGGGSEAFF

SEQ ID NO: 353419 - protein, 15 aa, Homo sapiens
  CDR3 for alpha chain variable domain of TCR clone 176710 (TRAV12-3, TRAJ6)
CTMSATTGGSYIPTF

SEQ ID NO: 353420 - protein, 13 aa, Homo sapiens
  CDR3 for beta chain variable domain of TCR clone 176710 (TRBV20-1, TRBJ1-1)
CSARGGGNTEAFF

SEQ ID NO: 353421 - protein, 14 aa, Homo sapiens
  CDR3 for alpha chain variable domain of TCR clone 176711 (TRAV16, TRAJ37)
CALDIPGNTGKLIF

SEQ ID NO: 353422 - protein, 11 aa, Homo sapiens
  CDR3 for beta chain variable domain of TCR clone 176711 (TRBV6-1, TRBJ2-1)
CASISSNEQFF

SEQ ID NO: 353423 - protein, 12 aa, Homo sapiens
  CDR3 for alpha chain variable domain of TCR clone 176712 (TRAV2, TRAJ31)
CAVEDNNARLMF

SEQ ID NO: 353424 - protein, 14 aa, Homo sapiens
  CDR3 for beta chain variable domain of TCR clone 176712 (TRBV7-9, TRBJ2-1)
CASSSDRGLDEQFF

SEQ ID NO: 353425 - protein, 16 aa, Homo sapiens
  CDR3 for alpha chain variable domain of TCR clone 176713 (TRAV26-1, TRAJ48)
IASSDLSNFGNEKLTF

SEQ ID NO: 353426 - protein, 14 aa, Homo sapiens
  CDR3 for beta chain variable domain of TCR clone 176713 (TRBV13, TRBJ2-7)
CASSLKGASYEQHF

SEQ ID NO: 353427 - protein, 13 aa, Homo sapiens
  CDR3 for alpha chain variable domain of TCR clone 176714 (TRAV29/DV5, TRAJ31)
CAASRNNNARLMF

SEQ ID NO: 353428 - protein, 14 aa, Homo sapiens
  CDR3 for beta chain variable domain of TCR clone 176714 (TRBV4-1, TRBJ2-2)
CASSQAVKTGELFF

SEQ ID NO: 353429 - protein, 11 aa, Homo sapiens
  CDR3 for alpha chain variable domain of TCR clone 176715 (TRAV12-2, TRAJ26)
CAVEGGQNFFF

SEQ ID NO: 353430 - protein, 17 aa, Homo sapiens
  CDR3 for beta chain variable domain of TCR clone 176715 (TRBV20-1, TRBJ2-1)
CSASGGKNTGAYNEQFF

SEQ ID NO: 353431 - protein, 12 aa, Homo sapiens
  CDR3 for alpha chain variable domain of TCR clone 176716 (TRAV2, TRAJ10)
CASTGGGNKLTF

SEQ ID NO: 353432 - protein, 14 aa, Homo sapiens
  CDR3 for beta chain variable domain of TCR clone 176716 (TRBV7-2, TRBJ2-2)
CASRGQGAAGELFL

SEQ ID NO: 353433 - protein, 14 aa, Homo sapiens
  CDR3 for alpha chain variable domain of TCR clone 176717 (TRAV30, TRAJ33)
CGTERRFSNYQLIW

SEQ ID NO: 353434 - protein, 14 aa, Homo sapiens
  CDR3 for beta chain variable domain of TCR clone 176717 (TRBV19, TRBJ2-1)
CASPTFVLSGEQFF

SEQ ID NO: 353435 - protein, 15 aa, Homo sapiens
  CDR3 for alpha chain variable domain of TCR clone 176718 (TRAV26-1, TRAJ29)
CIGRVEGSGNTPLVF

SEQ ID NO: 353436 - protein, 14 aa, Homo sapiens
  CDR3 for beta chain variable domain of TCR clone 176718 (TRBV25-1, TRBJ1-1)
CASTHLGGNTEAFF

SEQ ID NO: 353437 - protein, 16 aa, Homo sapiens
  CDR3 for alpha chain variable domain of TCR clone 176719 (TRAV12-2, TRAJ39)
CAVNRGPNNTGNMLTF

SEQ ID NO: 353438 - protein, 10 aa, Homo sapiens
  CDR3 for beta chain variable domain of TCR clone 176719 (TRBV2, TRBJ2-4)
CASRGSMQYF

SEQ ID NO: 353439 - protein, 15 aa, Homo sapiens
  CDR3 for alpha chain variable domain of TCR clone 176720 (TRAV8-4, TRAJ47)
CAVSDPEEYGNKLVF

SEQ ID NO: 353440 - protein, 15 aa, Homo sapiens
  CDR3 for beta chain variable domain of TCR clone 176720 (TRBV11-2, TRBJ2-1)
CASSFGPDSYNEQFF

SEQ ID NO: 353441 - protein, 18 aa, Homo sapiens
  CDR3 for alpha chain variable domain of TCR clone 176721 (TRAV12-3, TRAJ52)
CAMSRTNAGGTSYGKLTF

SEQ ID NO: 353442 - protein, 16 aa, Homo sapiens
  CDR3 for beta chain variable domain of TCR clone 176721 (TRBV5-1, TRBJ2-5)
CASSLRRTSGQETQYF

SEQ ID NO: 353443 - protein, 16 aa, Homo sapiens
  CDR3 for alpha chain variable domain of TCR clone 176722 (TRAV1-1, TRAJ28)
CAVRDDSGAGSYQLTF

SEQ ID NO: 353444 - protein, 12 aa, Homo sapiens
  CDR3 for beta chain variable domain of TCR clone 176722 (TRBV11-2, TRBJ2-5)
CASSLDTQIQYF

SEQ ID NO: 353445 - protein, 18 aa, Homo sapiens
  CDR3 for alpha chain variable domain of TCR clone 176723 (TRAV26-1, TRAJ5)
CIVRVVPPRDTGRRALTF

SEQ ID NO: 353446 - protein, 15 aa, Homo sapiens
  CDR3 for beta chain variable domain of TCR clone 176723 (TRBV7-9, TRBJ2-7)
CASSLPMGQADEQYF

SEQ ID NO: 353447 - protein, 13 aa, Homo sapiens
  CDR3 for alpha chain variable domain of TCR clone 176724 (TRAV8-6, TRAJ49)
CAVITNTGNQFYF

SEQ ID NO: 353448 - protein, 15 aa, Homo sapiens
  CDR3 for beta chain variable domain of TCR clone 176724 (TRBV7-9, TRBJ1-4)
CASSARTGGNETLFF

SEQ ID NO: 353449 - protein, 13 aa, Homo sapiens
  CDR3 for alpha chain variable domain of TCR clone 176725 (TRAV21, TRAJ20)
CAVGLRVDYKLSF

SEQ ID NO: 353450 - protein, 16 aa, Homo sapiens
  CDR3 for beta chain variable domain of TCR clone 176725 (TRBV19, TRBJ2-2)
CASSPSGGLNTGELFF

SEQ ID NO: 353451 - protein, 11 aa, Homo sapiens
  CDR3 for alpha chain variable domain of TCR clone 176726 (TRAV3, TRAJ21)
CAVGNFNKFCF

SEQ ID NO: 353452 - protein, 16 aa, Homo sapiens
  CDR3 for beta chain variable domain of TCR clone 176726 (TRBV19, TRBJ2-2)
CASSTARASNTGELFF

SEQ ID NO: 353453 - protein, 11 aa, Homo sapiens
  CDR3 for alpha chain variable domain of TCR clone 176727 (TRAV3, TRAJ31)
CAVRPDARLMF

SEQ ID NO: 353454 - protein, 14 aa, Homo sapiens
  CDR3 for beta chain variable domain of TCR clone 176727 (TRBV28, TRBJ2-7)
CASSLRARGNEQYF

SEQ ID NO: 353455 - protein, 13 aa, Homo sapiens
  CDR3 for alpha chain variable domain of TCR clone 176728 (TRAV3, TRAJ15)
CAVRDQAGTALIF

SEQ ID NO: 353456 - protein, 13 aa, Homo sapiens
  CDR3 for beta chain variable domain of TCR clone 176728 (TRBV9, TRBJ2-1)
CASSVGQGGEQFF

SEQ ID NO: 353457 - protein, 12 aa, Homo sapiens
  CDR3 for alpha chain variable domain of TCR clone 176729 (TRAV13-2, TRAJ39)
CAENTAGNMLTF

SEQ ID NO: 353458 - protein, 12 aa, Homo sapiens
  CDR3 for beta chain variable domain of TCR clone 176729 (TRBV11-2, TRBJ2-2)
CASSLGGGELFF

SEQ ID NO: 353459 - protein, 13 aa, Homo sapiens
  CDR3 for alpha chain variable domain of TCR clone 176730 (TRAV13-1, TRAJ33)
CAARMNSNYQLIW

SEQ ID NO: 353460 - protein, 14 aa, Homo sapiens
  CDR3 for beta chain variable domain of TCR clone 176730 (TRBV12-5, TRBJ2-5)
CASGSRTHQETQYF

SEQ ID NO: 353461 - protein, 20 aa, Homo sapiens
  CDR3 for alpha chain variable domain of TCR clone 176731 (TRAV12-1, TRAJ42)
SSVIQPPTSVKGGSQGNLIF

SEQ ID NO: 353462 - protein, 18 aa, Homo sapiens
  CDR3 for beta chain variable domain of TCR clone 176731 (TRBV11-2, TRBJ2-3)
CASSLGGASRGALNTQYF

SEQ ID NO: 353463 - protein, 11 aa, Homo sapiens
  CDR3 for alpha chain variable domain of TCR clone 176732 (TRAV21, TRAJ31)
CAVRNNARLMF

SEQ ID NO: 353464 - protein, 18 aa, Homo sapiens
  CDR3 for beta chain variable domain of TCR clone 176732 (TRBV11-2, TRBJ2-3)
CASSLGGASRGAPNTQYF

SEQ ID NO: 353465 - protein, 17 aa, Homo sapiens
  CDR3 for alpha chain variable domain of TCR clone 176733 (TRAV2, TRAJ36)
CAVEDRGNWGKQPFLWD

SEQ ID NO: 353466 - protein, 14 aa, Homo sapiens
  CDR3 for beta chain variable domain of TCR clone 176733 (TRBV7-9, TRBJ2-5)
CASSLDTAQETQYF

SEQ ID NO: 353467 - protein, 15 aa, Homo sapiens
  CDR3 for alpha chain variable domain of TCR clone 176734 (TRAV27, TRAJ38)
CAARRNAGNNRKLIW

SEQ ID NO: 353468 - protein, 15 aa, Homo sapiens
  CDR3 for beta chain variable domain of TCR clone 176734 (TRBV5-1, TRBJ2-3)
CASSVTSGSTDTQYF

SEQ ID NO: 353469 - protein, 16 aa, Homo sapiens
  CDR3 for alpha chain variable domain of TCR clone 176735 (TRAV30, TRAJ24)
CGTEIVAADSWGKFQF

SEQ ID NO: 353470 - protein, 14 aa, Homo sapiens
  CDR3 for beta chain variable domain of TCR clone 176735 (TRBV12-5, TRBJ2-5)
CASGSRTQQETQFF

SEQ ID NO: 353471 - protein, 17 aa, Homo sapiens
  CDR3 for alpha chain variable domain of TCR clone 176736 (TRAV3, TRAJ6)
RAVRDCPRAGGSYIPTF

SEQ ID NO: 353472 - protein, 15 aa, Homo sapiens
  CDR3 for beta chain variable domain of TCR clone 176736 (TRBV5-8, TRBJ2-2)
CASSLDRGATGELFF

SEQ ID NO: 353473 - protein, 13 aa, Homo sapiens
  CDR3 for alpha chain variable domain of TCR clone 176737 (TRAV3, TRAJ15)
CAVRDQAGTALIF

SEQ ID NO: 353474 - protein, 14 aa, Homo sapiens
  CDR3 for beta chain variable domain of TCR clone 176737 (TRBV4-2, TRBJ2-3)
CASSQERGTDTQYF

SEQ ID NO: 353475 - protein, 15 aa, Homo sapiens
  CDR3 for alpha chain variable domain of TCR clone 176738 (TRAV13-1, TRAJ32)
CAASIYGGATNKLIF

SEQ ID NO: 353476 - protein, 16 aa, Homo sapiens
  CDR3 for beta chain variable domain of TCR clone 176738 (TRBV12-4, TRBJ2-3)
CASSLRLAETTDTQYF

SEQ ID NO: 353477 - protein, 11 aa, Homo sapiens
  CDR3 for alpha chain variable domain of TCR clone 176739 (TRAV12-3, TRAJ43)
CAMSVSNDMRC

SEQ ID NO: 353478 - protein, 13 aa, Homo sapiens
  CDR3 for beta chain variable domain of TCR clone 176739 (TRBV20-1, TRBJ1-1)
CSAPLGGGAEAFF

SEQ ID NO: 353479 - protein, 10 aa, Homo sapiens
  CDR3 for alpha chain variable domain of TCR clone 176740 (TRAV13-1, TRAJ47)
CAASRIWKQT

SEQ ID NO: 353480 - protein, 13 aa, Homo sapiens
  CDR3 for beta chain variable domain of TCR clone 176740 (TRBV6-1, TRBJ1-1)
CASSRQGNTEAFF

SEQ ID NO: 353481 - protein, 14 aa, Homo sapiens
  CDR3 for alpha chain variable domain of TCR clone 176741 (TRAV1-2, TRAJ27)
CAVRSGTNAGKSTF

SEQ ID NO: 353482 - protein, 17 aa, Homo sapiens
  CDR3 for beta chain variable domain of TCR clone 176741 (TRBV4-1, TRBJ2-5)
CASSQDLTGGPIETQYF

SEQ ID NO: 353483 - protein, 16 aa, Homo sapiens
  CDR3 for alpha chain variable domain of TCR clone 176742 (TRAV38-1, TRAJ37)
CAFKGNGSSNTGKLIF

SEQ ID NO: 353484 - protein, 13 aa, Homo sapiens
  CDR3 for beta chain variable domain of TCR clone 176742 (TRBV12-4, TRBJ2-5)
CASSLFRRETQYF

SEQ ID NO: 353485 - protein, 10 aa, Homo sapiens
  CDR3 for alpha chain variable domain of TCR clone 176743 (TRAV5, TRAJ34)
CAEDTDKLIY

SEQ ID NO: 353486 - protein, 12 aa, Homo sapiens
  CDR3 for beta chain variable domain of TCR clone 176743 (TRBV11-2, TRBJ2-2)
CASSLGGGELFF

SEQ ID NO: 353487 - protein, 13 aa, Homo sapiens
  CDR3 for alpha chain variable domain of TCR clone 176744 (TRAV1-2, TRAJ9)
CAALNTGGFKTIF

SEQ ID NO: 353488 - protein, 13 aa, Homo sapiens
  CDR3 for beta chain variable domain of TCR clone 176744 (TRBV11-2, TRBJ2-1)
CASSLGLAGGRFF

SEQ ID NO: 353489 - protein, 14 aa, Homo sapiens
  CDR3 for alpha chain variable domain of TCR clone 176745 (TRAV3, TRAJ21)
CALGRGSTTFTLDL

SEQ ID NO: 353490 - protein, 14 aa, Homo sapiens
  CDR3 for beta chain variable domain of TCR clone 176745 (TRBV7-9, TRBJ2-4)
CASSLAMGGNIQYF

SEQ ID NO: 353491 - protein, 17 aa, Homo sapiens
  CDR3 for alpha chain variable domain of TCR clone 176746 (TRAV20, TRAJ45)
CAVQGMYSGGGADGLTF

SEQ ID NO: 353492 - protein, 14 aa, Homo sapiens
  CDR3 for beta chain variable domain of TCR clone 176746 (TRBV7-2, TRBJ2-7)
CASRSQGAAYEQYF

SEQ ID NO: 353493 - protein, 16 aa, Homo sapiens
  CDR3 for alpha chain variable domain of TCR clone 176747 (TRAV20, TRAJ57)
CCAGNRGAGGSEKLVF

SEQ ID NO: 353494 - protein, 13 aa, Homo sapiens
  CDR3 for beta chain variable domain of TCR clone 176747 (TRBV20-1, TRBJ2-5)
CSAFVGGGETQYF

SEQ ID NO: 353495 - protein, 14 aa, Homo sapiens
  CDR3 for alpha chain variable domain of TCR clone 176748 (TRAV29/DV5, TRAJ57)
CAASEMGGSEKLVF

SEQ ID NO: 353496 - protein, 17 aa, Homo sapiens
  CDR3 for beta chain variable domain of TCR clone 176748 (TRBV7-8, TRBJ2-6)
CASSAGTGGAGANVLTF

SEQ ID NO: 353497 - protein, 16 aa, Homo sapiens
  CDR3 for alpha chain variable domain of TCR clone 176749 (TRAV3, TRAJ18)
CAVRDGRGSTLGRLYF

SEQ ID NO: 353498 - protein, 16 aa, Homo sapiens
  CDR3 for beta chain variable domain of TCR clone 176749 (TRBV7-9, TRBJ2-1)
CASSLVSGPSYNEQFF

SEQ ID NO: 353499 - protein, 13 aa, Homo sapiens
  CDR3 for alpha chain variable domain of TCR clone 176750 (TRAV1-1, TRAJ29)
CAATLSGNTSLVF

SEQ ID NO: 353500 - protein, 14 aa, Homo sapiens
  CDR3 for beta chain variable domain of TCR clone 176750 (TRBV12-5, TRBJ2-5)
CASGSRTHQETQYF

SEQ ID NO: 353501 - protein, 14 aa, Homo sapiens
  CDR3 for alpha chain variable domain of TCR clone 176751 (TRAV12-3, TRAJ10)
SHLPLTGGGNKLTF

SEQ ID NO: 353502 - protein, 16 aa, Homo sapiens
  CDR3 for beta chain variable domain of TCR clone 176751 (TRBV19, TRBJ2-1)
CASSMGGGSSYNEQFF

SEQ ID NO: 353503 - protein, 17 aa, Homo sapiens
  CDR3 for alpha chain variable domain of TCR clone 176752 (TRAV38-2/DV8, TRAJ23)
CALSRKLIFGQGTELSV

SEQ ID NO: 353504 - protein, 13 aa, Homo sapiens
  CDR3 for beta chain variable domain of TCR clone 176752 (TRBV7-3, TRBJ1-1)
CASSQDWGAEAFF

SEQ ID NO: 353505 - protein, 14 aa, Homo sapiens
  CDR3 for alpha chain variable domain of TCR clone 176753 (TRAV1-2, TRAJ16)
CAVNRFSDGQKLLF

SEQ ID NO: 353506 - protein, 14 aa, Homo sapiens
  CDR3 for beta chain variable domain of TCR clone 176753 (TRBV5-1, TRBJ2-7)
CASSMGESLYEQYF

SEQ ID NO: 353507 - protein, 12 aa, Homo sapiens
  CDR3 for alpha chain variable domain of TCR clone 176754 (TRAV13-1, TRAJ21)
CAAKEGFNKFDF

SEQ ID NO: 353508 - protein, 13 aa, Homo sapiens
  CDR3 for beta chain variable domain of TCR clone 176754 (TRBV19, TRBJ2-7)
CASSPRQSYEQYF

SEQ ID NO: 353509 - protein, 15 aa, Homo sapiens
  CDR3 for alpha chain variable domain of TCR clone 176755 (TRAV14/DV4, TRAJ33)
CAMREGRGSNYQLIW

SEQ ID NO: 353510 - protein, 16 aa, Homo sapiens
  CDR3 for beta chain variable domain of TCR clone 176755 (TRBV12-5, TRBJ2-5)
CASGPRTSGNQETQYF

SEQ ID NO: 353511 - protein, 12 aa, Homo sapiens
  CDR3 for alpha chain variable domain of TCR clone 176756 (TRAV8-4, TRAJ37)
CAKSSNTGKLIF

SEQ ID NO: 353512 - protein, 14 aa, Homo sapiens
  CDR3 for beta chain variable domain of TCR clone 176756 (TRBV11-2, TRBJ2-3)
CASSRLARTDTQYF

SEQ ID NO: 353513 - protein, 11 aa, Homo sapiens
  CDR3 for alpha chain variable domain of TCR clone 176757 (TRAV3, TRAJ13)
CAVTSYQKVTF

SEQ ID NO: 353514 - protein, 14 aa, Homo sapiens
  CDR3 for beta chain variable domain of TCR clone 176757 (TRBV12-5, TRBJ2-5)
CASGSRTHQETQYF

SEQ ID NO: 353515 - protein, 16 aa, Homo sapiens
  CDR3 for alpha chain variable domain of TCR clone 176758 (TRAV3, TRAJ10)
CAVRDMRAGGGNKLTF

SEQ ID NO: 353516 - protein, 15 aa, Homo sapiens
  CDR3 for beta chain variable domain of TCR clone 176758 (TRBV9, TRBJ1-6)
CASSVAGTGDPPLHF

SEQ ID NO: 353517 - protein, 14 aa, Homo sapiens
  CDR3 for alpha chain variable domain of TCR clone 176759 (TRAV1-2, TRAJ8)
CAVREDTSFQKLVF

SEQ ID NO: 353518 - protein, 12 aa, Homo sapiens
  CDR3 for beta chain variable domain of TCR clone 176759 (TRBV11-2, TRBJ2-2)
CASSLPTGELFF

SEQ ID NO: 353519 - protein, 14 aa, Homo sapiens
  CDR3 for alpha chain variable domain of TCR clone 176760 (TRAV12-1, TRAJ29)
CVVNEGSGNIPLVF

SEQ ID NO: 353520 - protein, 13 aa, Homo sapiens
  CDR3 for beta chain variable domain of TCR clone 176760 (TRBV7-9, TRBJ2-3)
CASSPGSTDTQYF

SEQ ID NO: 353521 - protein, 14 aa, Homo sapiens
  CDR3 for alpha chain variable domain of TCR clone 176761 (TRAV26-1, TRAJ38)
CIADNAGTNRKLIW

SEQ ID NO: 353522 - protein, 13 aa, Homo sapiens
  CDR3 for beta chain variable domain of TCR clone 176761 (TRBV2, TRBJ1-5)
CATAGPGNQPQHF

SEQ ID NO: 353523 - protein, 11 aa, Homo sapiens
  CDR3 for alpha chain variable domain of TCR clone 176762 (TRAV12-1, TRAJ8)
CLVTGFQKLVF

SEQ ID NO: 353524 - protein, 14 aa, Homo sapiens
  CDR3 for beta chain variable domain of TCR clone 176762 (TRBV19, TRBJ2-1)
CASGKSTQYNEQFF

SEQ ID NO: 353525 - protein, 12 aa, Homo sapiens
  CDR3 for alpha chain variable domain of TCR clone 176763 (TRAV13-1, TRAJ9)
CASHTGGFKTIF

SEQ ID NO: 353526 - protein, 14 aa, Homo sapiens
  CDR3 for beta chain variable domain of TCR clone 176763 (TRBV5-5, TRBJ1-5)
CASSGQGVDQPQHF

SEQ ID NO: 353527 - protein, 14 aa, Homo sapiens
  CDR3 for alpha chain variable domain of TCR clone 176764 (TRAV17, TRAJ56)
CAAVPAGANSKLTF

SEQ ID NO: 353528 - protein, 16 aa, Homo sapiens
  CDR3 for beta chain variable domain of TCR clone 176764 (TRBV12-5, TRBJ2-5)
CASGPRTSGNQETQYF

SEQ ID NO: 353529 - protein, 16 aa, Homo sapiens
  CDR3 for alpha chain variable domain of TCR clone 176765 (TRAV23/DV6, TRAJ9)
CAASIGGNTGGFKTIF

SEQ ID NO: 353530 - protein, 14 aa, Homo sapiens
  CDR3 for beta chain variable domain of TCR clone 176765 (TRBV19, TRBJ2-1)
CARGARSFQWEQFF

SEQ ID NO: 353531 - protein, 13 aa, Homo sapiens
  CDR3 for alpha chain variable domain of TCR clone 176766 (TRAV13-2, TRAJ53)
CAENMGSNYKLTF

SEQ ID NO: 353532 - protein, 14 aa, Homo sapiens
  CDR3 for beta chain variable domain of TCR clone 176766 (TRBV7-9, TRBJ2-1)
CASSLVVGADEQFF

SEQ ID NO: 353533 - protein, 12 aa, Homo sapiens
  CDR3 for alpha chain variable domain of TCR clone 176767 (TRAV13-1, TRAJ23)
CAASKKGGKLTF

SEQ ID NO: 353534 - protein, 14 aa, Homo sapiens
  CDR3 for beta chain variable domain of TCR clone 176767 (TRBV25-1, TRBJ1-1)
CASTHLGGNTEAFF

SEQ ID NO: 353535 - protein, 16 aa, Homo sapiens
  CDR3 for alpha chain variable domain of TCR clone 176768 (TRAV30, TRAJ24)
CGTEIVDADSWGKFQF

SEQ ID NO: 353536 - protein, 15 aa, Homo sapiens
  CDR3 for beta chain variable domain of TCR clone 176768 (TRBV3-1, TRBJ2-7)
CASSQEWTGSYEQYF

SEQ ID NO: 353537 - protein, 14 aa, Homo sapiens
  CDR3 for alpha chain variable domain of TCR clone 176769 (TRAV13-2, TRAJ32)
CAENYCGATNKLIF

SEQ ID NO: 353538 - protein, 15 aa, Homo sapiens
  CDR3 for beta chain variable domain of TCR clone 176769 (TRBV12-4, TRBJ2-5)
CASTLNSGRGETQYF

SEQ ID NO: 353539 - protein, 12 aa, Homo sapiens
  CDR3 for alpha chain variable domain of TCR clone 176770 (TRAV29/DV5, TRAJ49)
CGATDTGNQFYF

SEQ ID NO: 353540 - protein, 19 aa, Homo sapiens
  CDR3 for beta chain variable domain of TCR clone 176770 (TRBV25-1, TRBJ2-2)
CAILVYRVDRGRKTGELFF

SEQ ID NO: 353541 - protein, 14 aa, Homo sapiens
  CDR3 for alpha chain variable domain of TCR clone 176771 (TRAV1-1, TRAJ28)
CAAPSGAGSYQLTF

SEQ ID NO: 353542 - protein, 14 aa, Homo sapiens
  CDR3 for beta chain variable domain of TCR clone 176771 (TRBV7-3, TRBJ2-1)
CASSLAGGTNEQFF

SEQ ID NO: 353543 - protein, 14 aa, Homo sapiens
  CDR3 for alpha chain variable domain of TCR clone 176772 (TRAV1-2, TRAJ8)
CAVREDTGFQKLVF

SEQ ID NO: 353544 - protein, 15 aa, Homo sapiens
  CDR3 for beta chain variable domain of TCR clone 176772 (TRBV6-3, TRBJ2-7)
CASSPPGTVFYEQFF

SEQ ID NO: 353545 - protein, 16 aa, Homo sapiens
  CDR3 for alpha chain variable domain of TCR clone 176773 (TRAV21, TRAJ45)
CAVSWGSGGGADGLTF

SEQ ID NO: 353546 - protein, 11 aa, Homo sapiens
  CDR3 for beta chain variable domain of TCR clone 176773 (TRBV4-2, TRBJ1-2)
CASSPGDLTMA

SEQ ID NO: 353547 - protein, 18 aa, Homo sapiens
  CDR3 for alpha chain variable domain of TCR clone 176774 (TRAV8-6, TRAJ52)
CAVSRVGAGGTSYGKLTF

SEQ ID NO: 353548 - protein, 16 aa, Homo sapiens
  CDR3 for beta chain variable domain of TCR clone 176774 (TRBV7-8, TRBJ2-1)
CASSLAGTGRYSEQFF

SEQ ID NO: 353549 - protein, 17 aa, Homo sapiens
  CDR3 for alpha chain variable domain of TCR clone 176775 (TRAV3, TRAJ6)
CAVRDGPRPGGSYTPTF

SEQ ID NO: 353550 - protein, 14 aa, Homo sapiens
  CDR3 for beta chain variable domain of TCR clone 176775 (TRBV7-2, TRBJ2-7)
CASSPKTSFYEQYF

SEQ ID NO: 353551 - protein, 14 aa, Homo sapiens
  CDR3 for alpha chain variable domain of TCR clone 176776 (TRAV1-2, TRAJ16)
CAVNRFSDGQKLPF

SEQ ID NO: 353552 - protein, 13 aa, Homo sapiens
  CDR3 for beta chain variable domain of TCR clone 176776 (TRBV6-5, TRBJ1-1)
QTSVYFCALRAFF

SEQ ID NO: 353553 - protein, 16 aa, Homo sapiens
  CDR3 for alpha chain variable domain of TCR clone 176777 (TRAV30, TRAJ49)
SAAQRVGPNTGNQFYF

SEQ ID NO: 353554 - protein, 15 aa, Homo sapiens
  CDR3 for beta chain variable domain of TCR clone 176777 (TRBV2, TRBJ2-1)
CASSQLAGSYNEQFF

SEQ ID NO: 353555 - protein, 10 aa, Homo sapiens
  CDR3 for alpha chain variable domain of TCR clone 176778 (TRAV38-1, TRAJ53)
CAFMKHGLEC

SEQ ID NO: 353556 - protein, 13 aa, Homo sapiens
  CDR3 for beta chain variable domain of TCR clone 176778 (TRBV19, TRBJ2-7)
CASSPRQSYEQYF

SEQ ID NO: 353557 - protein, 15 aa, Homo sapiens
  CDR3 for alpha chain variable domain of TCR clone 176779 (TRAV17, TRAJ57)
CATGPSQGGSEKLVF

SEQ ID NO: 353558 - protein, 19 aa, Homo sapiens
  CDR3 for beta chain variable domain of TCR clone 176779 (TRBV6-3, TRBJ1-2)
CASSYSKGRTGPPNYGYTF

SEQ ID NO: 353559 - protein, 14 aa, Homo sapiens
  CDR3 for alpha chain variable domain of TCR clone 176780 (TRAV16, TRAJ39)
CALSKNNAGNMLTF

SEQ ID NO: 353560 - protein, 12 aa, Homo sapiens
  CDR3 for beta chain variable domain of TCR clone 176780 (TRBV5-5, TRBJ2-5)
CASSYFGETQYF

SEQ ID NO: 353561 - protein, 16 aa, Homo sapiens
  CDR3 for alpha chain variable domain of TCR clone 176781 (TRAV30, TRAJ24)
CGTEIVDADSVGKFQF

SEQ ID NO: 353562 - protein, 14 aa, Homo sapiens
  CDR3 for beta chain variable domain of TCR clone 176781 (TRBV12-5, TRBJ2-5)
CASGSRTHQETQYF

SEQ ID NO: 353563 - protein, 18 aa, Homo sapiens
  CDR3 for alpha chain variable domain of TCR clone 176782 (TRAV26-1, TRAJ27)
CIVRPSFNYNTNAGKSTF

SEQ ID NO: 353564 - protein, 14 aa, Homo sapiens
  CDR3 for beta chain variable domain of TCR clone 176782 (TRBV7-2, TRBJ2-7)
CASSPKTSFYEQYF

SEQ ID NO: 353565 - protein, 13 aa, Homo sapiens
  CDR3 for alpha chain variable domain of TCR clone 176783 (TRAV4, TRAJ20)
CLVGNPNDYKLSF

SEQ ID NO: 353566 - protein, 13 aa, Homo sapiens
  CDR3 for beta chain variable domain of TCR clone 176783 (TRBV2, TRBJ1-4)
CASSERAGEKLFF

SEQ ID NO: 353567 - protein, 12 aa, Homo sapiens
  CDR3 for alpha chain variable domain of TCR clone 176784 (TRAV12-2, TRAJ10)
WGVTGGGNKLTF

SEQ ID NO: 353568 - protein, 14 aa, Homo sapiens
  CDR3 for beta chain variable domain of TCR clone 176784 (TRBV19, TRBJ2-3)
CASSATRGTDTQYF

SEQ ID NO: 353569 - protein, 12 aa, Homo sapiens
  CDR3 for alpha chain variable domain of TCR clone 176785 (TRAV12-2, TRAJ4)
GWPEGGYTKLIF

SEQ ID NO: 353570 - protein, 16 aa, Homo sapiens
  CDR3 for beta chain variable domain of TCR clone 176785 (TRBV7-3, TRBJ1-2)
CASSLGAPVPNYGYTF

SEQ ID NO: 353571 - protein, 14 aa, Homo sapiens
  CDR3 for alpha chain variable domain of TCR clone 176786 (TRAV17, TRAJ11)
CATDTSRGSSTLTF

SEQ ID NO: 353572 - protein, 13 aa, Homo sapiens
  CDR3 for beta chain variable domain of TCR clone 176786 (TRBV19, TRBJ2-5)
CASRDSRRETQYF

SEQ ID NO: 353573 - protein, 13 aa, Homo sapiens
  CDR3 for alpha chain variable domain of TCR clone 176787 (TRAV13-1, TRAJ27)
CAASINQCRQINL

SEQ ID NO: 353574 - protein, 14 aa, Homo sapiens
  CDR3 for beta chain variable domain of TCR clone 176787 (TRBV28, TRBJ2-5)
CASSRLAGGETQYF

SEQ ID NO: 353575 - protein, 12 aa, Homo sapiens
  CDR3 for alpha chain variable domain of TCR clone 176788 (TRAV21, TRAJ49)
CAVNDGGNQFYF

SEQ ID NO: 353576 - protein, 14 aa, Homo sapiens
  CDR3 for beta chain variable domain of TCR clone 176788 (TRBV7-3, TRBJ1-1)
CASSLKGGNTEAFF

SEQ ID NO: 353577 - protein, 15 aa, Homo sapiens
  CDR3 for alpha chain variable domain of TCR clone 176789 (TRAV13-1, TRAJ57)
CAASNTQGGSEKMVF

SEQ ID NO: 353578 - protein, 16 aa, Homo sapiens
  CDR3 for beta chain variable domain of TCR clone 176789 (TRBV19, TRBJ2-1)
CASSKAGPSSYNEQFF

SEQ ID NO: 353579 - protein, 13 aa, Homo sapiens
  CDR3 for alpha chain variable domain of TCR clone 176790 (TRAV17, TRAJ5)
WALRGTGRRALTF

SEQ ID NO: 353580 - protein, 15 aa, Homo sapiens
  CDR3 for beta chain variable domain of TCR clone 176790 (TRBV19, TRBJ1-5)
CASSIVWADNQPQHF

SEQ ID NO: 353581 - protein, 16 aa, Homo sapiens
  CDR3 for alpha chain variable domain of TCR clone 176791 (TRAV30, TRAJ24)
CGTEIVDADSWGKFQF

SEQ ID NO: 353582 - protein, 16 aa, Homo sapiens
  CDR3 for beta chain variable domain of TCR clone 176791 (TRBV2, TRBJ1-3)
CASSGGAGRSGNTLYF

SEQ ID NO: 353583 - protein, 11 aa, Homo sapiens
  CDR3 for alpha chain variable domain of TCR clone 176792 (TRAV21, TRAJ34)
CAVTNTDKLIF

SEQ ID NO: 353584 - protein, 15 aa, Homo sapiens
  CDR3 for beta chain variable domain of TCR clone 176792 (TRBV27, TRBJ2-5)
CASSLYPRGGETQYF

SEQ ID NO: 353585 - protein, 16 aa, Homo sapiens
  CDR3 for alpha chain variable domain of TCR clone 176793 (TRAV16, TRAJ4)
CALSRMFSGGYNKLIF

SEQ ID NO: 353586 - protein, 12 aa, Homo sapiens
  CDR3 for beta chain variable domain of TCR clone 176793 (TRBV24-1, TRBJ2-7)
CATSDPGYEQYF

SEQ ID NO: 353587 - protein, 16 aa, Homo sapiens
  CDR3 for alpha chain variable domain of TCR clone 176794 (TRAV30, TRAJ24)
CGPEIVDDDSWGKFQF

SEQ ID NO: 353588 - protein, 14 aa, Homo sapiens
  CDR3 for beta chain variable domain of TCR clone 176794 (TRBV12-5, TRBJ2-5)
CASGSRTHQETQYF

SEQ ID NO: 353589 - protein, 14 aa, Homo sapiens
  CDR3 for alpha chain variable domain of TCR clone 176795 (TRAV35, TRAJ22)
CAGLRPGFARQLTF

SEQ ID NO: 353590 - protein, 17 aa, Homo sapiens
  CDR3 for beta chain variable domain of TCR clone 176795 (TRBV15, TRBJ1-4)
CATSRYGTGDPNDKLFF

SEQ ID NO: 353591 - protein, 13 aa, Homo sapiens
  CDR3 for alpha chain variable domain of TCR clone 176796 (TRAV3, TRAJ21)
CAVREPDFNKFYF

SEQ ID NO: 353592 - protein, 17 aa, Homo sapiens
  CDR3 for beta chain variable domain of TCR clone 176796 (TRBV6-1, TRBJ2-1)
CASSEGGSGRGRNEQFF

SEQ ID NO: 353593 - protein, 16 aa, Homo sapiens
  CDR3 for alpha chain variable domain of TCR clone 176797 (TRAV26-2, TRAJ45)
CTTASPIGGGADGLTF

SEQ ID NO: 353594 - protein, 15 aa, Homo sapiens
  CDR3 for beta chain variable domain of TCR clone 176797 (TRBV12-4, TRBJ2-5)
CASSPPTGLQETQYF

SEQ ID NO: 353595 - protein, 15 aa, Homo sapiens
  CDR3 for alpha chain variable domain of TCR clone 176798 (TRAV8-3, TRAJ45)
CASSYSGGGADGLTF

SEQ ID NO: 353596 - protein, 15 aa, Homo sapiens
  CDR3 for beta chain variable domain of TCR clone 176798 (TRBV15, TRBJ2-2)
CATSRGLADTGELFF

SEQ ID NO: 353597 - protein, 14 aa, Homo sapiens
  CDR3 for alpha chain variable domain of TCR clone 176799 (TRAV12-3, TRAJ9)
CSMSQNTGGFKTIF

SEQ ID NO: 353598 - protein, 12 aa, Homo sapiens
  CDR3 for beta chain variable domain of TCR clone 176799 (TRBV19, TRBJ1-5)
CASSIAQQPQHF

SEQ ID NO: 353599 - protein, 15 aa, Homo sapiens
  CDR3 for alpha chain variable domain of TCR clone 176800 (TRAV12-3, TRAJ6)
CAMSATTGGSYIPTF

SEQ ID NO: 353600 - protein, 15 aa, Homo sapiens
  CDR3 for beta chain variable domain of TCR clone 176800 (TRBV20-1, TRBJ2-7)
CSARDRASGMDEQYF

SEQ ID NO: 353601 - protein, 13 aa, Homo sapiens
  CDR3 for alpha chain variable domain of TCR clone 176801 (TRAV8-4, TRAJ3)
CAVRDSGASKIIF

SEQ ID NO: 353602 - protein, 16 aa, Homo sapiens
  CDR3 for beta chain variable domain of TCR clone 176801 (TRBV7-9, TRBJ2-7)
CASSNHGGQEKYEQYF

SEQ ID NO: 353603 - protein, 14 aa, Homo sapiens
  CDR3 for alpha chain variable domain of TCR clone 176802 (TRAV12-1, TRAJ43)
CVVNGRSNSNDMRF

SEQ ID NO: 353604 - protein, 13 aa, Homo sapiens
  CDR3 for beta chain variable domain of TCR clone 176802 (TRBV27, TRBJ1-1)
CASSLSIGAEAFF

SEQ ID NO: 353605 - protein, 18 aa, Homo sapiens
  CDR3 for alpha chain variable domain of TCR clone 176803 (TRAV29/DV5, TRAJ52)
CAAGFRGASGTSYGKLTF

SEQ ID NO: 353606 - protein, 13 aa, Homo sapiens
  CDR3 for beta chain variable domain of TCR clone 176803 (TRBV2, TRBJ2-7)
CASSVGGSGEQYF

SEQ ID NO: 353607 - protein, 10 aa, Homo sapiens
  CDR3 for alpha chain variable domain of TCR clone 176804 (TRAV1-2, TRAJ23)
CAGTGGKLIF

SEQ ID NO: 353608 - protein, 16 aa, Homo sapiens
  CDR3 for beta chain variable domain of TCR clone 176804 (TRBV11-2, TRBJ1-1)
CASSLRQGGEHSKAFF

SEQ ID NO: 353609 - protein, 13 aa, Homo sapiens
  CDR3 for alpha chain variable domain of TCR clone 176805 (TRAV2, TRAJ40)
CAVVTSGTYKYIF

SEQ ID NO: 353610 - protein, 16 aa, Homo sapiens
  CDR3 for beta chain variable domain of TCR clone 176805 (TRBV2, TRBJ2-1)
CASSGGGSLSYNEQFF

SEQ ID NO: 353611 - protein, 14 aa, Homo sapiens
  CDR3 for alpha chain variable domain of TCR clone 176806 (TRAV12-1, TRAJ45)
CVVMRSGGADGLTF

SEQ ID NO: 353612 - protein, 14 aa, Homo sapiens
  CDR3 for beta chain variable domain of TCR clone 176806 (TRBV4-1, TRBJ2-2)
CASSQAVNTGELFF

SEQ ID NO: 353613 - protein, 14 aa, Homo sapiens
  CDR3 for alpha chain variable domain of TCR clone 176807 (TRAV1-2, TRAJ8)
CAVREDTGFQKLVF

SEQ ID NO: 353614 - protein, 17 aa, Homo sapiens
  CDR3 for beta chain variable domain of TCR clone 176807 (TRBV7-6, TRBJ2-7)
CASSAIKTSGGRYEQYF

SEQ ID NO: 353615 - protein, 12 aa, Homo sapiens
  CDR3 for alpha chain variable domain of TCR clone 176808 (TRAV21, TRAJ47)
CAAMEYGNKLVF

SEQ ID NO: 353616 - protein, 16 aa, Homo sapiens
  CDR3 for beta chain variable domain of TCR clone 176808 (TRBV6-5, TRBJ2-2)
CASSYGRVPDTGELFF

SEQ ID NO: 353617 - protein, 13 aa, Homo sapiens
  CDR3 for alpha chain variable domain of TCR clone 176809 (TRAV8-3, TRAJ43)
CDVGPDNNNDMRF

SEQ ID NO: 353618 - protein, 14 aa, Homo sapiens
  CDR3 for beta chain variable domain of TCR clone 176809 (TRBV19, TRBJ2-1)
CASPTFVLSGEQFF

SEQ ID NO: 353619 - protein, 16 aa, Homo sapiens
  CDR3 for alpha chain variable domain of TCR clone 176810 (TRAV4, TRAJ22)
CLVGDLYSGSARQLTF

SEQ ID NO: 353620 - protein, 16 aa, Homo sapiens
  CDR3 for beta chain variable domain of TCR clone 176810 (TRBV7-9, TRBJ2-1)
CASSDVAGGACNEQFF

SEQ ID NO: 353621 - protein, 13 aa, Homo sapiens
  CDR3 for alpha chain variable domain of TCR clone 176811 (TRAV8-4, TRAJ29)
CAVSATGNTPLVF

SEQ ID NO: 353622 - protein, 12 aa, Homo sapiens
  CDR3 for beta chain variable domain of TCR clone 176811 (TRBV11-3, TRBJ1-1)
CASSHRQGEAFF

SEQ ID NO: 353623 - protein, 14 aa, Homo sapiens
  CDR3 for alpha chain variable domain of TCR clone 176812 (TRAV21, TRAJ32)
CCGDYGAATNKLIF

SEQ ID NO: 353624 - protein, 13 aa, Homo sapiens
  CDR3 for beta chain variable domain of TCR clone 176812 (TRBV2, TRBJ1-6)
CASGRGGISPLHF

SEQ ID NO: 353625 - protein, 14 aa, Homo sapiens
  CDR3 for alpha chain variable domain of TCR clone 176813 (TRAV1-2, TRAJ16)
CAVNRFSAGQKLLF

SEQ ID NO: 353626 - protein, 12 aa, Homo sapiens
  CDR3 for beta chain variable domain of TCR clone 176813 (TRBV7-6, TRBJ2-7)
CASSLADSEQYF

SEQ ID NO: 353627 - protein, 15 aa, Homo sapiens
  CDR3 for alpha chain variable domain of TCR clone 176814 (TRAV3, TRAJ37)
CCETTWLWNTGKLIF

SEQ ID NO: 353628 - protein, 14 aa, Homo sapiens
  CDR3 for beta chain variable domain of TCR clone 176814 (TRBV25-1, TRBJ1-1)
CASTHLGGNTEAFF

SEQ ID NO: 353629 - protein, 15 aa, Homo sapiens
  CDR3 for alpha chain variable domain of TCR clone 176815 (TRAV2, TRAJ11)
CAAGGRNSGYSTLTF

SEQ ID NO: 353630 - protein, 12 aa, Homo sapiens
  CDR3 for beta chain variable domain of TCR clone 176815 (TRBV5-4, TRBJ2-7)
CASSLEAYEQYF

SEQ ID NO: 353631 - protein, 13 aa, Homo sapiens
  CDR3 for alpha chain variable domain of TCR clone 176816 (TRAV21, TRAJ20)
CAVGLRVDYKLSF

SEQ ID NO: 353632 - protein, 18 aa, Homo sapiens
  CDR3 for beta chain variable domain of TCR clone 176816 (TRBV7-6, TRBJ2-1)
CASSPRTSGMRSYNEQFF

SEQ ID NO: 353633 - protein, 13 aa, Homo sapiens
  CDR3 for alpha chain variable domain of TCR clone 176817 (TRAV3, TRAJ29)
CAVRDWGNKPLVF

SEQ ID NO: 353634 - protein, 15 aa, Homo sapiens
  CDR3 for beta chain variable domain of TCR clone 176817 (TRBV12-4, TRBJ2-5)
CASISRTGEGETQYF

SEQ ID NO: 353635 - protein, 12 aa, Homo sapiens
  CDR3 for alpha chain variable domain of TCR clone 176818 (TRAV23/DV6, TRAJ16)
CAATGTGQKLPF

SEQ ID NO: 353636 - protein, 15 aa, Homo sapiens
  CDR3 for beta chain variable domain of TCR clone 176818 (TRBV5-1, TRBJ2-3)
CASSLETASTDTQYF

SEQ ID NO: 353637 - protein, 10 aa, Homo sapiens
  CDR3 for alpha chain variable domain of TCR clone 176819 (TRAV5, TRAJ34)
CAEDTDKLVF

SEQ ID NO: 353638 - protein, 16 aa, Homo sapiens
  CDR3 for beta chain variable domain of TCR clone 176819 (TRBV7-3, TRBJ2-2)
CASSLKRGTLSGELFF

SEQ ID NO: 353639 - protein, 15 aa, Homo sapiens
  CDR3 for alpha chain variable domain of TCR clone 176820 (TRAV17, TRAJ57)
CATGPSQVGSEKLVF

SEQ ID NO: 353640 - protein, 17 aa, Homo sapiens
  CDR3 for beta chain variable domain of TCR clone 176820 (TRBV13, TRBJ2-3)
CASSLSRVAGGRNTQYF

SEQ ID NO: 353641 - protein, 17 aa, Homo sapiens
  CDR3 for alpha chain variable domain of TCR clone 176821 (TRAV3, TRAJ6)
CAVRDGPRAGGSYIPTF

SEQ ID NO: 353642 - protein, 14 aa, Homo sapiens
  CDR3 for beta chain variable domain of TCR clone 176821 (TRBV23-1, TRBJ2-5)
CASSFLRSQETQYF

SEQ ID NO: 353643 - protein, 15 aa, Homo sapiens
  CDR3 for alpha chain variable domain of TCR clone 176822 (TRAV8-2, TRAJ40)
CVVLGTTPGTYKYIF

SEQ ID NO: 353644 - protein, 20 aa, Homo sapiens
  CDR3 for beta chain variable domain of TCR clone 176822 (TRBV28, TRBJ2-1)
CASTPIGRSPGLAGGNEQFF

SEQ ID NO: 353645 - protein, 13 aa, Homo sapiens
  CDR3 for alpha chain variable domain of TCR clone 176823 (TRAV2, TRAJ15)
CAVASQAGTALTF

SEQ ID NO: 353646 - protein, 14 aa, Homo sapiens
  CDR3 for beta chain variable domain of TCR clone 176823 (TRBV5-1, TRBJ2-7)
CASSRGEALYEQYF

SEQ ID NO: 353647 - protein, 14 aa, Homo sapiens
  CDR3 for alpha chain variable domain of TCR clone 176824 (TRAV13-1, )
CAANIQNPDPALYQ

SEQ ID NO: 353648 - protein, 14 aa, Homo sapiens
  CDR3 for beta chain variable domain of TCR clone 176824 (TRBV19, TRBJ2-7)
CASSIGPNSYEQYF

SEQ ID NO: 353649 - protein, 14 aa, Homo sapiens
  CDR3 for alpha chain variable domain of TCR clone 176825 (TRAV3, TRAJ17)
CAVRDAAAGNKLAF

SEQ ID NO: 353650 - protein, 13 aa, Homo sapiens
  CDR3 for beta chain variable domain of TCR clone 176825 (TRBV2, TRBJ1-1)
CASSVSGYTEAFF

SEQ ID NO: 353651 - protein, 13 aa, Homo sapiens
  CDR3 for alpha chain variable domain of TCR clone 176826 (TRAV29/DV5, TRAJ31)
CAASRNNNARLLF

SEQ ID NO: 353652 - protein, 12 aa, Homo sapiens
  CDR3 for beta chain variable domain of TCR clone 176826 (TRBV14, TRBJ2-4)
CASSNLKSIQYF

SEQ ID NO: 353653 - protein, 12 aa, Homo sapiens
  CDR3 for alpha chain variable domain of TCR clone 176827 (TRAV12-2, TRAJ31)
CAVNTPDARLMF

SEQ ID NO: 353654 - protein, 12 aa, Homo sapiens
  CDR3 for beta chain variable domain of TCR clone 176827 (TRBV12-4, TRBJ2-7)
CASILGGYEQYF

SEQ ID NO: 353655 - protein, 22 aa, Homo sapiens
  CDR3 for alpha chain variable domain of TCR clone 176828 (TRAV26-1, TRAJ30)
CIVRVRTEMTRSSLEKGHDFIF

SEQ ID NO: 353656 - protein, 13 aa, Homo sapiens
  CDR3 for beta chain variable domain of TCR clone 176828 (TRBV25-1, TRBJ2-5)
CASSESGRETQYF

SEQ ID NO: 353657 - protein, 18 aa, Homo sapiens
  CDR3 for alpha chain variable domain of TCR clone 176829 (TRAV21, TRAJ52)
CAVRPSPAGGTSYGKLTF

SEQ ID NO: 353658 - protein, 14 aa, Homo sapiens
  CDR3 for beta chain variable domain of TCR clone 176829 (TRBV5-1, TRBJ2-5)
CASSLAGKQETQYF

SEQ ID NO: 353659 - protein, 12 aa, Homo sapiens
  CDR3 for alpha chain variable domain of TCR clone 176830 (TRAV35, TRAJ30)
CAGVNRDDKIIF

SEQ ID NO: 353660 - protein, 15 aa, Homo sapiens
  CDR3 for beta chain variable domain of TCR clone 176830 (TRBV9, TRBJ1-6)
CASSVAGTGDSPLHF

SEQ ID NO: 353661 - protein, 12 aa, Homo sapiens
  CDR3 for alpha chain variable domain of TCR clone 176831 (TRAV13-1, TRAJ15)
CAASQAGTALIF

SEQ ID NO: 353662 - protein, 13 aa, Homo sapiens
  CDR3 for beta chain variable domain of TCR clone 176831 (TRBV7-2, TRBJ2-5)
CASSQTSVETQYF

SEQ ID NO: 353663 - protein, 17 aa, Homo sapiens
  CDR3 for alpha chain variable domain of TCR clone 176832 (TRAV4, TRAJ18)
CLVVAAGRGSTLGRLYF

SEQ ID NO: 353664 - protein, 17 aa, Homo sapiens
  CDR3 for beta chain variable domain of TCR clone 176832 (TRBV28, TRBJ2-6)
CASSLATGMGDAGELFF

SEQ ID NO: 353665 - protein, 19 aa, Homo sapiens
  CDR3 for alpha chain variable domain of TCR clone 176833 (TRAV26-1, TRAJ52)
CIVRAHRNAGGTSYGKLTF

SEQ ID NO: 353666 - protein, 15 aa, Homo sapiens
  CDR3 for beta chain variable domain of TCR clone 176833 (TRBV6-3, TRBJ2-7)
CASSSPGTVFYEQYF

SEQ ID NO: 353667 - protein, 18 aa, Homo sapiens
  CDR3 for alpha chain variable domain of TCR clone 176834 (TRAV12-1, TRAJ52)
CVLKLINAGGTSYGKLTF

SEQ ID NO: 353668 - protein, 16 aa, Homo sapiens
  CDR3 for beta chain variable domain of TCR clone 176834 (TRBV18, TRBJ2-7)
CASSPRSQGISYEQYF

SEQ ID NO: 353669 - protein, 12 aa, Homo sapiens
  CDR3 for alpha chain variable domain of TCR clone 176835 (TRAV12-2, TRAJ40)
CAGASGTYKYIF

SEQ ID NO: 353670 - protein, 14 aa, Homo sapiens
  CDR3 for beta chain variable domain of TCR clone 176835 (TRBV6-6, TRBJ2-7)
CASQGQGVAVEQYF

SEQ ID NO: 353671 - protein, 12 aa, Homo sapiens
  CDR3 for alpha chain variable domain of TCR clone 176836 (TRAV12-2, TRAJ44)
CADTGTASKLTF

SEQ ID NO: 353672 - protein, 16 aa, Homo sapiens
  CDR3 for beta chain variable domain of TCR clone 176836 (TRBV20-1, TRBJ1-1)
QCWGTGGSYGNTGAFF

SEQ ID NO: 353673 - protein, 14 aa, Homo sapiens
  CDR3 for alpha chain variable domain of TCR clone 176837 (TRAV1-2, TRAJ8)
CAVREDTGFQKLVF

SEQ ID NO: 353674 - protein, 14 aa, Homo sapiens
  CDR3 for beta chain variable domain of TCR clone 176837 (TRBV20-1, TRBJ2-7)
CSAISREASYEQYF

SEQ ID NO: 353675 - protein, 13 aa, Homo sapiens
  CDR3 for alpha chain variable domain of TCR clone 176838 (TRAV1-2, TRAJ9)
FAALNTGGFKTIF

SEQ ID NO: 353676 - protein, 12 aa, Homo sapiens
  CDR3 for beta chain variable domain of TCR clone 176838 (TRBV11-3, TRBJ1-1)
CASSHRQGEAFF

SEQ ID NO: 353677 - protein, 16 aa, Homo sapiens
  CDR3 for alpha chain variable domain of TCR clone 176839 (TRAV12-2, TRAJ10)
CAVNRVLTGGGNKLNF

SEQ ID NO: 353678 - protein, 12 aa, Homo sapiens
  CDR3 for beta chain variable domain of TCR clone 176839 (TRBV28, TRBJ2-7)
CASSVSSYEQYF

SEQ ID NO: 353679 - protein, 14 aa, Homo sapiens
  CDR3 for alpha chain variable domain of TCR clone 176840 (TRAV17, TRAJ34)
CATDRLEGPDKLIF

SEQ ID NO: 353680 - protein, 13 aa, Homo sapiens
  CDR3 for beta chain variable domain of TCR clone 176840 (TRBV11-2, TRBJ2-7)
CASSGTRPYEQYF

SEQ ID NO: 353681 - protein, 16 aa, Homo sapiens
  CDR3 for alpha chain variable domain of TCR clone 176841 (TRAV3, TRAJ37)
CAVRPYGSGNTGKLIF

SEQ ID NO: 353682 - protein, 12 aa, Homo sapiens
  CDR3 for beta chain variable domain of TCR clone 176841 (TRBV7-6, TRBJ2-5)
CASSLSQETQYF

SEQ ID NO: 353683 - protein, 16 aa, Homo sapiens
  CDR3 for alpha chain variable domain of TCR clone 176842 (TRAV26-1, TRAJ32)
CIVRTNYGGAPNKLIF

SEQ ID NO: 353684 - protein, 14 aa, Homo sapiens
  CDR3 for beta chain variable domain of TCR clone 176842 (TRBV27, TRBJ1-1)
CASSLLSGLSEAFF

SEQ ID NO: 353685 - protein, 14 aa, Homo sapiens
  CDR3 for alpha chain variable domain of TCR clone 176843 (TRAV13-1, TRAJ12)
CSNYPMDSSYQLIF

SEQ ID NO: 353686 - protein, 11 aa, Homo sapiens
  CDR3 for beta chain variable domain of TCR clone 176843 (TRBV20-1, TRBJ2-1)
GSLSSGSEQFF

SEQ ID NO: 353687 - protein, 15 aa, Homo sapiens
  CDR3 for alpha chain variable domain of TCR clone 176844 (TRAV17, TRAJ6)
CATDLPSGGSYILTF

SEQ ID NO: 353688 - protein, 16 aa, Homo sapiens
  CDR3 for beta chain variable domain of TCR clone 176844 (TRBV4-1, TRBJ2-7)
CASSQDPTGYSYEQYF

SEQ ID NO: 353689 - protein, 14 aa, Homo sapiens
  CDR3 for alpha chain variable domain of TCR clone 176845 (TRAV27, TRAJ22)
CAGLPSGSVRQLTF

SEQ ID NO: 353690 - protein, 16 aa, Homo sapiens
  CDR3 for beta chain variable domain of TCR clone 176845 (TRBV7-3, TRBJ2-2)
CASSLKRGTLSGELFF

SEQ ID NO: 353691 - protein, 14 aa, Homo sapiens
  CDR3 for alpha chain variable domain of TCR clone 176846 (TRAV2, TRAJ9)
CAVEDRSGGFKAIF

SEQ ID NO: 353692 - protein, 16 aa, Homo sapiens
  CDR3 for beta chain variable domain of TCR clone 176846 (TRBV7-3, TRBJ2-2)
CASSLKRGTLSGELFF

SEQ ID NO: 353693 - protein, 14 aa, Homo sapiens
  CDR3 for alpha chain variable domain of TCR clone 176847 (TRAV1-2, TRAJ16)
CAVNRFSDGQKLPF

SEQ ID NO: 353694 - protein, 13 aa, Homo sapiens
  CDR3 for beta chain variable domain of TCR clone 176847 (TRBV10-3, TRBJ2-7)
CASRLAVNYEQYL

SEQ ID NO: 353695 - protein, 15 aa, Homo sapiens
  CDR3 for alpha chain variable domain of TCR clone 176848 (TRAV8-3, TRAJ6)
CAVGPLGGGSYIPTV

SEQ ID NO: 353696 - protein, 14 aa, Homo sapiens
  CDR3 for beta chain variable domain of TCR clone 176848 (TRBV19, TRBJ2-2)
CASSTGQGAGELFF

SEQ ID NO: 353697 - protein, 14 aa, Homo sapiens
  CDR3 for alpha chain variable domain of TCR clone 176849 (TRAV38-1, TRAJ40)
WTLRPPSGTYKYIF

SEQ ID NO: 353698 - protein, 14 aa, Homo sapiens
  CDR3 for beta chain variable domain of TCR clone 176849 (TRBV25-1, TRBJ1-1)
CASTHLGGNTEAFF

SEQ ID NO: 353699 - protein, 12 aa, Homo sapiens
  CDR3 for alpha chain variable domain of TCR clone 176850 (TRAV8-4, TRAJ37)
CAKSSNTGKLIC

SEQ ID NO: 353700 - protein, 15 aa, Homo sapiens
  CDR3 for beta chain variable domain of TCR clone 176850 (TRBV7-9, TRBJ2-7)
CASSSSGLAVYEQYF

SEQ ID NO: 353701 - protein, 15 aa, Homo sapiens
  CDR3 for alpha chain variable domain of TCR clone 176851 (TRAV27, TRAJ53)
CRAINSGGSNYQLTF

SEQ ID NO: 353702 - protein, 14 aa, Homo sapiens
  CDR3 for beta chain variable domain of TCR clone 176851 (TRBV7-3, TRBJ2-1)
CASSLAGGTNEQFF

SEQ ID NO: 353703 - protein, 15 aa, Homo sapiens
  CDR3 for alpha chain variable domain of TCR clone 176852 (TRAV2, TRAJ32)
CAVANYGGATNKLIF

SEQ ID NO: 353704 - protein, 15 aa, Homo sapiens
  CDR3 for beta chain variable domain of TCR clone 176852 (TRBV7-7, TRBJ2-5)
CASSQLERVEETQYF

SEQ ID NO: 353705 - protein, 14 aa, Homo sapiens
  CDR3 for alpha chain variable domain of TCR clone 176853 (TRAV12-1, TRAJ27)
CGEHIRTNAGKSTF

SEQ ID NO: 353706 - protein, 15 aa, Homo sapiens
  CDR3 for beta chain variable domain of TCR clone 176853 (TRBV19, TRBJ1-1)
SASTSGQIQNTEAFF

SEQ ID NO: 353707 - protein, 15 aa, Homo sapiens
  CDR3 for alpha chain variable domain of TCR clone 176854 (TRAV13-1, TRAJ57)
CAASNTQGGSEKLVF

SEQ ID NO: 353708 - protein, 14 aa, Homo sapiens
  CDR3 for beta chain variable domain of TCR clone 176854 (TRBV19, TRBJ1-2)
CASSIGAGSYGYTF

SEQ ID NO: 353709 - protein, 15 aa, Homo sapiens
  CDR3 for alpha chain variable domain of TCR clone 176855 (TRAV13-1, TRAJ57)
QVPPLSQGGSEKLVF

SEQ ID NO: 353710 - protein, 15 aa, Homo sapiens
  CDR3 for beta chain variable domain of TCR clone 176855 (TRBV19, TRBJ2-7)
CASSFNSGGVWEQYF

SEQ ID NO: 353711 - protein, 14 aa, Homo sapiens
  CDR3 for alpha chain variable domain of TCR clone 176856 (TRAV26-1, TRAJ49)
CIVRLTNTGNQFYV

SEQ ID NO: 353712 - protein, 13 aa, Homo sapiens
  CDR3 for beta chain variable domain of TCR clone 176856 (TRBV10-1, TRBJ1-1)
CASQGQTNTEAFF

SEQ ID NO: 353713 - protein, 13 aa, Homo sapiens
  CDR3 for alpha chain variable domain of TCR clone 176857 (TRAV27, TRAJ45)
CRSPGGGAAGLTF

SEQ ID NO: 353714 - protein, 17 aa, Homo sapiens
  CDR3 for beta chain variable domain of TCR clone 176857 (TRBV11-2, TRBJ2-1)
CASSLYPPGVEYNEQFF

SEQ ID NO: 353715 - protein, 12 aa, Homo sapiens
  CDR3 for alpha chain variable domain of TCR clone 176858 (TRAV13-1, TRAJ21)
CAAKEGFNKFYF

SEQ ID NO: 353716 - protein, 15 aa, Homo sapiens
  CDR3 for beta chain variable domain of TCR clone 176858 (TRBV10-3, TRBJ2-6)
CATPAAASGANVLTF

SEQ ID NO: 353717 - protein, 13 aa, Homo sapiens
  CDR3 for alpha chain variable domain of TCR clone 176859 (TRAV2, TRAJ40)
CAVVTSGTYQYIF

SEQ ID NO: 353718 - protein, 14 aa, Homo sapiens
  CDR3 for beta chain variable domain of TCR clone 176859 (TRBV19, TRBJ2-1)
CASPTFVVSGEQFF

SEQ ID NO: 353719 - protein, 17 aa, Homo sapiens
  CDR3 for alpha chain variable domain of TCR clone 176860 (TRAV8-3, TRAJ34)
CAIPGKLIFGTGPRLQV

SEQ ID NO: 353720 - protein, 13 aa, Homo sapiens
  CDR3 for beta chain variable domain of TCR clone 176860 (TRBV10-3, TRBJ2-7)
CASKLAVNYEQYF

SEQ ID NO: 353721 - protein, 14 aa, Homo sapiens
  CDR3 for alpha chain variable domain of TCR clone 176861 (TRAV1-2, TRAJ8)
CAVREDTGFQKLVF

SEQ ID NO: 353722 - protein, 12 aa, Homo sapiens
  CDR3 for beta chain variable domain of TCR clone 176861 (TRBV12-4, TRBJ1-5)
CASSLGRQPQHF

SEQ ID NO: 353723 - protein, 11 aa, Homo sapiens
  CDR3 for alpha chain variable domain of TCR clone 176862 (TRAV2, TRAJ13)
CASVGYQNVTF

SEQ ID NO: 353724 - protein, 16 aa, Homo sapiens
  CDR3 for beta chain variable domain of TCR clone 176862 (TRBV19, TRBJ2-1)
CASSKAGPSSYNEQFF

SEQ ID NO: 353725 - protein, 14 aa, Homo sapiens
  CDR3 for alpha chain variable domain of TCR clone 176863 (TRAV26-1, TRAJ45)
CIAVTVGGADGLTF

SEQ ID NO: 353726 - protein, 13 aa, Homo sapiens
  CDR3 for beta chain variable domain of TCR clone 176863 (TRBV7-6, TRBJ1-2)
CASSLVADYGYTF

SEQ ID NO: 353727 - protein, 11 aa, Homo sapiens
  CDR3 for alpha chain variable domain of TCR clone 176864 (TRAV35, TRAJ30)
CAGPGDDKIIF

SEQ ID NO: 353728 - protein, 16 aa, Homo sapiens
  CDR3 for beta chain variable domain of TCR clone 176864 (TRBV11-2, TRBJ2-7)
CASSPLAGGPRYEQYF

SEQ ID NO: 353729 - protein, 12 aa, Homo sapiens
  CDR3 for alpha chain variable domain of TCR clone 176865 (TRAV23/DV6, TRAJ30)
CAASKGDDKIIF

SEQ ID NO: 353730 - protein, 13 aa, Homo sapiens
  CDR3 for beta chain variable domain of TCR clone 176865 (TRBV19, TRBJ1-2)
CAGSVPGQDGYTF

SEQ ID NO: 353731 - protein, 13 aa, Homo sapiens
  CDR3 for alpha chain variable domain of TCR clone 176866 (TRAV27, TRAJ37)
CAGGPSNTGKLIF

SEQ ID NO: 353732 - protein, 20 aa, Homo sapiens
  CDR3 for beta chain variable domain of TCR clone 176866 (TRBV28, TRBJ2-1)
CASTPIGRSPGLAGGNEQFF

SEQ ID NO: 353733 - protein, 14 aa, Homo sapiens
  CDR3 for alpha chain variable domain of TCR clone 176867 (TRAV12-3, TRAJ58)
CAMSTETSGSRLTL

SEQ ID NO: 353734 - protein, 15 aa, Homo sapiens
  CDR3 for beta chain variable domain of TCR clone 176867 (TRBV11-3, TRBJ1-1)
CASSLGGPGDTEAFF

SEQ ID NO: 353735 - protein, 14 aa, Homo sapiens
  CDR3 for alpha chain variable domain of TCR clone 176868 (TRAV21, TRAJ37)
CAVKGASNTGKLIF

SEQ ID NO: 353736 - protein, 13 aa, Homo sapiens
  CDR3 for beta chain variable domain of TCR clone 176868 (TRBV7-2, TRBJ2-5)
CASSQTSVETQYF

SEQ ID NO: 353737 - protein, 14 aa, Homo sapiens
  CDR3 for alpha chain variable domain of TCR clone 176869 (TRAV9-2, TRAJ39)
CALYIYNAGNMLTF

SEQ ID NO: 353738 - protein, 16 aa, Homo sapiens
  CDR3 for beta chain variable domain of TCR clone 176869 (TRBV7-9, TRBJ1-3)
CASSQTSGLRMGTIYF

SEQ ID NO: 353739 - protein, 13 aa, Homo sapiens
  CDR3 for alpha chain variable domain of TCR clone 176870 (TRAV23/DV6, TRAJ12)
CAPRVASSYKLIF

SEQ ID NO: 353740 - protein, 12 aa, Homo sapiens
  CDR3 for beta chain variable domain of TCR clone 176870 (TRBV7-6, TRBJ2-5)
CASSLSQETQYF

SEQ ID NO: 353741 - protein, 15 aa, Homo sapiens
  CDR3 for alpha chain variable domain of TCR clone 176871 (TRAV21, TRAJ53)
CATLNSGGSNYKPTF

SEQ ID NO: 353742 - protein, 14 aa, Homo sapiens
  CDR3 for beta chain variable domain of TCR clone 176871 (TRBV7-2, TRBJ2-7)
CASSLPPGQGTQYF

SEQ ID NO: 353743 - protein, 13 aa, Homo sapiens
  CDR3 for alpha chain variable domain of TCR clone 176872 (TRAV3, TRAJ20)
CCEAFCNDYKLSF

SEQ ID NO: 353744 - protein, 15 aa, Homo sapiens
  CDR3 for beta chain variable domain of TCR clone 176872 (TRBV19, TRBJ2-6)
CASVRRDYGANVLTF

SEQ ID NO: 353745 - protein, 17 aa, Homo sapiens
  CDR3 for alpha chain variable domain of TCR clone 176873 (TRAV26-1, TRAJ53)
CIVRVDDSGGSNYKLTF

SEQ ID NO: 353746 - protein, 20 aa, Homo sapiens
  CDR3 for beta chain variable domain of TCR clone 176873 (TRBV7-3, TRBJ2-2)
CASSLNSGGLAGRGTGELFF

SEQ ID NO: 353747 - protein, 12 aa, Homo sapiens
  CDR3 for alpha chain variable domain of TCR clone 176874 (TRAV13-1, TRAJ21)
CAAKEGLNKFYF

SEQ ID NO: 353748 - protein, 14 aa, Homo sapiens
  CDR3 for beta chain variable domain of TCR clone 176874 (TRBV5-4, TRBJ1-1)
CASSLESRRDEAFF

SEQ ID NO: 353749 - protein, 17 aa, Homo sapiens
  CDR3 for alpha chain variable domain of TCR clone 176875 (TRAV8-4, TRAJ11)
CAVSDRGENSGYSTLPF

SEQ ID NO: 353750 - protein, 14 aa, Homo sapiens
  CDR3 for beta chain variable domain of TCR clone 176875 (TRBV20-1, TRBJ2-1)
CSPNDEASYNEQFF

SEQ ID NO: 353751 - protein, 12 aa, Homo sapiens
  CDR3 for alpha chain variable domain of TCR clone 176876 (TRAV13-1, TRAJ16)
CAASNGGQKLLF

SEQ ID NO: 353752 - protein, 13 aa, Homo sapiens
  CDR3 for beta chain variable domain of TCR clone 176876 (TRBV7-9, TRBJ1-2)
CASSLKQNYGYTF

SEQ ID NO: 353753 - protein, 16 aa, Homo sapiens
  CDR3 for alpha chain variable domain of TCR clone 176877 (TRAV12-2, TRAJ28)
CAVITDSGAGSYQLTF

SEQ ID NO: 353754 - protein, 16 aa, Homo sapiens
  CDR3 for beta chain variable domain of TCR clone 176877 (TRBV20-1, TRBJ2-6)
CSASSQGYDGANVLTF

SEQ ID NO: 353755 - protein, 10 aa, Homo sapiens
  CDR3 for alpha chain variable domain of TCR clone 176878 (TRAV36/DV7, TRAJ48)
CAVGNEKLTF

SEQ ID NO: 353756 - protein, 16 aa, Homo sapiens
  CDR3 for beta chain variable domain of TCR clone 176878 (TRBV15, TRBJ2-3)
CATRLSGGRAPDTHYF

SEQ ID NO: 353757 - protein, 13 aa, Homo sapiens
  CDR3 for alpha chain variable domain of TCR clone 176879 (TRAV21, TRAJ20)
CAVGLRFDYNLSF

SEQ ID NO: 353758 - protein, 13 aa, Homo sapiens
  CDR3 for beta chain variable domain of TCR clone 176879 (TRBV6-1, TRBJ1-1)
CASSRQGNTEAFF

SEQ ID NO: 353759 - protein, 10 aa, Homo sapiens
  CDR3 for alpha chain variable domain of TCR clone 176880 (TRAV12-3, TRAJ49)
CAMNDDQFYF

SEQ ID NO: 353760 - protein, 13 aa, Homo sapiens
  CDR3 for beta chain variable domain of TCR clone 176880 (TRBV10-2, TRBJ2-7)
CASGASGGYEQYF

SEQ ID NO: 353761 - protein, 14 aa, Homo sapiens
  CDR3 for alpha chain variable domain of TCR clone 176881 (TRAV20, TRAJ49)
CAVQAVVAGNQFYF

SEQ ID NO: 353762 - protein, 15 aa, Homo sapiens
  CDR3 for beta chain variable domain of TCR clone 176881 (TRBV20-1, TRBJ2-7)
CSARDRVSGMDEQYF

SEQ ID NO: 353763 - protein, 13 aa, Homo sapiens
  CDR3 for alpha chain variable domain of TCR clone 176882 (TRAV8-4, TRAJ48)
CAVSLFGNEKLTF

SEQ ID NO: 353764 - protein, 12 aa, Homo sapiens
  CDR3 for beta chain variable domain of TCR clone 176882 (TRBV6-3, TRBJ2-7)
CASSERGFEQYF

SEQ ID NO: 353765 - protein, 14 aa, Homo sapiens
  CDR3 for alpha chain variable domain of TCR clone 176883 (TRAV38-1, TRAJ35)
CAFLTIGFGNVLHC

SEQ ID NO: 353766 - protein, 17 aa, Homo sapiens
  CDR3 for beta chain variable domain of TCR clone 176883 (TRBV28, TRBJ1-1)
CASSGDLRTESNTEAVF

SEQ ID NO: 353767 - protein, 15 aa, Homo sapiens
  CDR3 for alpha chain variable domain of TCR clone 176884 (TRAV13-1, TRAJ43)
CAATPALGGNNDMRF

SEQ ID NO: 353768 - protein, 15 aa, Homo sapiens
  CDR3 for beta chain variable domain of TCR clone 176884 (TRBV10-2, TRBJ2-6)
CASSEQGTGANVLTF

SEQ ID NO: 353769 - protein, 14 aa, Homo sapiens
  CDR3 for alpha chain variable domain of TCR clone 176885 (TRAV3, TRAJ9)
CAVRLNTGGFKTIF

SEQ ID NO: 353770 - protein, 15 aa, Homo sapiens
  CDR3 for beta chain variable domain of TCR clone 176885 (TRBV19, TRBJ2-4)
CASRGPRRGENIQYF

SEQ ID NO: 353771 - protein, 12 aa, Homo sapiens
  CDR3 for alpha chain variable domain of TCR clone 176886 (TRAV35, TRAJ28)
GVEGAGSYQLTF

SEQ ID NO: 353772 - protein, 15 aa, Homo sapiens
  CDR3 for beta chain variable domain of TCR clone 176886 (TRBV2, TRBJ2-2)
CASSRETVGTGELFF

SEQ ID NO: 353773 - protein, 17 aa, Homo sapiens
  CDR3 for alpha chain variable domain of TCR clone 176887 (TRAV3, TRAJ42)
CAVRDRDYGGSQGNLIF

SEQ ID NO: 353774 - protein, 15 aa, Homo sapiens
  CDR3 for beta chain variable domain of TCR clone 176887 (TRBV11-2, TRBJ1-6)
CASSLDPWAVSPLHF

SEQ ID NO: 353775 - protein, 15 aa, Homo sapiens
  CDR3 for alpha chain variable domain of TCR clone 176888 (TRAV8-3, TRAJ45)
RASSYSGGGADGLTF

SEQ ID NO: 353776 - protein, 14 aa, Homo sapiens
  CDR3 for beta chain variable domain of TCR clone 176888 (TRBV5-1, TRBJ1-2)
CASSLEPVNYGYTF

SEQ ID NO: 353777 - protein, 18 aa, Homo sapiens
  CDR3 for alpha chain variable domain of TCR clone 176889 (TRAV29/DV5, TRAJ26)
CSVLLCSKRKPEGQNFVF

SEQ ID NO: 353778 - protein, 17 aa, Homo sapiens
  CDR3 for beta chain variable domain of TCR clone 176889 (TRBV7-8, TRBJ2-6)
CASSAGTGGAGANVLTF

SEQ ID NO: 353779 - protein, 16 aa, Homo sapiens
  CDR3 for alpha chain variable domain of TCR clone 176890 (TRAV14/DV4, TRAJ21)
CAMREGPENNFNKFYF

SEQ ID NO: 353780 - protein, 12 aa, Homo sapiens
  CDR3 for beta chain variable domain of TCR clone 176890 (TRBV29-1, TRBJ2-2)
RSVDKYTGELFF

SEQ ID NO: 353781 - protein, 13 aa, Homo sapiens
  CDR3 for alpha chain variable domain of TCR clone 176891 (TRAV12-2, TRAJ52)
CAVSGTSYGKLTF

SEQ ID NO: 353782 - protein, 13 aa, Homo sapiens
  CDR3 for beta chain variable domain of TCR clone 176891 (TRBV7-9, TRBJ1-2)
CASSLKQNYGYTF

SEQ ID NO: 353783 - protein, 12 aa, Homo sapiens
  CDR3 for alpha chain variable domain of TCR clone 176892 (TRAV8-4, TRAJ43)
CAVSANNNDMRF

SEQ ID NO: 353784 - protein, 15 aa, Homo sapiens
  CDR3 for beta chain variable domain of TCR clone 176892 (TRBV20-1, TRBJ2-7)
CSARDPVKGEGEQYF

SEQ ID NO: 353785 - protein, 18 aa, Homo sapiens
  CDR3 for alpha chain variable domain of TCR clone 176893 (TRAV21, TRAJ52)
CAVRPSPAGGTSYGKLTF

SEQ ID NO: 353786 - protein, 15 aa, Homo sapiens
  CDR3 for beta chain variable domain of TCR clone 176893 (TRBV25-1, TRBJ1-4)
CASSPGDSTNEKLFF

SEQ ID NO: 353787 - protein, 15 aa, Homo sapiens
  CDR3 for alpha chain variable domain of TCR clone 176894 (TRAV23/DV6, TRAJ28)
CAALLAYSGAGSYQL

SEQ ID NO: 353788 - protein, 13 aa, Homo sapiens
  CDR3 for beta chain variable domain of TCR clone 176894 (TRBV4-2, TRBJ2-3)
CASSQRNTDTQYF

SEQ ID NO: 353789 - protein, 15 aa, Homo sapiens
  CDR3 for alpha chain variable domain of TCR clone 176895 (TRAV12-1, TRAJ42)
CAVTRDGGSQGNRIF

SEQ ID NO: 353790 - protein, 14 aa, Homo sapiens
  CDR3 for beta chain variable domain of TCR clone 176895 (TRBV11-2, TRBJ2-3)
CASSLGGGANTQYF

SEQ ID NO: 353791 - protein, 15 aa, Homo sapiens
  CDR3 for alpha chain variable domain of TCR clone 176896 (TRAV3, TRAJ23)
CAVRVRGNQGGKLIF

SEQ ID NO: 353792 - protein, 15 aa, Homo sapiens
  CDR3 for beta chain variable domain of TCR clone 176896 (TRBV7-3, TRBJ2-1)
CQQLAPSGSYNEQFF

SEQ ID NO: 353793 - protein, 14 aa, Homo sapiens
  CDR3 for alpha chain variable domain of TCR clone 176897 (TRAV8-3, TRAJ4)
CAVGAAAGYNKLIF

SEQ ID NO: 353794 - protein, 15 aa, Homo sapiens
  CDR3 for beta chain variable domain of TCR clone 176897 (TRBV6-5, TRBJ2-1)
CASSYDAGAGNEQFF

SEQ ID NO: 353795 - protein, 12 aa, Homo sapiens
  CDR3 for alpha chain variable domain of TCR clone 176898 (TRAV35, TRAJ49)
CAGWNTGNQFYF

SEQ ID NO: 353796 - protein, 16 aa, Homo sapiens
  CDR3 for beta chain variable domain of TCR clone 176898 (TRBV5-1, TRBJ2-2)
CASSLWDTTNTGKLFF

SEQ ID NO: 353797 - protein, 14 aa, Homo sapiens
  CDR3 for alpha chain variable domain of TCR clone 176899 (TRAV16, TRAJ33)
CALSAMDSNYQLIW

SEQ ID NO: 353798 - protein, 12 aa, Homo sapiens
  CDR3 for beta chain variable domain of TCR clone 176899 (TRBV7-8, TRBJ2-7)
CDSSLGDREQYF

SEQ ID NO: 353799 - protein, 14 aa, Homo sapiens
  CDR3 for alpha chain variable domain of TCR clone 176900 (TRAV1-1, TRAJ27)
CAVIYNTNAGKSTF

SEQ ID NO: 353800 - protein, 22 aa, Homo sapiens
  CDR3 for beta chain variable domain of TCR clone 176900 (TRBV6-1, TRBJ1-3)
CASVQGGGWKHHIFWRGKLAHC

SEQ ID NO: 353801 - protein, 13 aa, Homo sapiens
  CDR3 for alpha chain variable domain of TCR clone 176901 (TRAV20, TRAJ20)
CAVQALNDYKLSF

SEQ ID NO: 353802 - protein, 13 aa, Homo sapiens
  CDR3 for beta chain variable domain of TCR clone 176901 (TRBV7-9)
CASSLPGIEKLFF

SEQ ID NO: 353803 - protein, 12 aa, Homo sapiens
  CDR3 for alpha chain variable domain of TCR clone 176902 (TRAV1-1, TRAJ39)
CAVPVVGNMLTF

SEQ ID NO: 353804 - protein, 11 aa, Homo sapiens
  CDR3 for beta chain variable domain of TCR clone 176902 (TRBV11-2, TRBJ1-1)
CASSINTEAFF

SEQ ID NO: 353805 - protein, 11 aa, Homo sapiens
  CDR3 for alpha chain variable domain of TCR clone 176903 (TRAV21, TRAJ41)
CAVRSGYALNF

SEQ ID NO: 353806 - protein, 13 aa, Homo sapiens
  CDR3 for beta chain variable domain of TCR clone 176903 (TRBV7-2, TRBJ2-5)
CASSQTSVETQYL

SEQ ID NO: 353807 - protein, 11 aa, Homo sapiens
  CDR3 for alpha chain variable domain of TCR clone 176904 (TRAV1-1, TRAJ23)
CAVRQGGKLIF

SEQ ID NO: 353808 - protein, 15 aa, Homo sapiens
  CDR3 for beta chain variable domain of TCR clone 176904 (TRBV7-8, TRBJ2-2)
CAQPFISRADYPYHR

SEQ ID NO: 353809 - protein, 13 aa, Homo sapiens
  CDR3 for alpha chain variable domain of TCR clone 176905 (TRAV22, TRAJ44)
CALNPGTASKLTF

SEQ ID NO: 353810 - protein, 13 aa, Homo sapiens
  CDR3 for beta chain variable domain of TCR clone 176905 (TRBV19, TRBJ1-2)
CASSVPGQDGYTF

SEQ ID NO: 353811 - protein, 11 aa, Homo sapiens
  CDR3 for alpha chain variable domain of TCR clone 176906 (TRAV12-1, TRAJ8)
CVVTGFQKLVF

SEQ ID NO: 353812 - protein, 13 aa, Homo sapiens
  CDR3 for beta chain variable domain of TCR clone 176906 (TRBV9, TRBJ2-1)
CASSPSGGSGQFF

SEQ ID NO: 353813 - protein, 19 aa, Homo sapiens
  CDR3 for alpha chain variable domain of TCR clone 176907 (TRAV8-4, TRAJ3)
CAVTGENLVQQCFQDNLCI

SEQ ID NO: 353814 - protein, 15 aa, Homo sapiens
  CDR3 for beta chain variable domain of TCR clone 176907 (TRBV6-3, TRBJ2-7)
CASSSPGTVFYEQYF

SEQ ID NO: 353815 - protein, 16 aa, Homo sapiens
  CDR3 for alpha chain variable domain of TCR clone 176908 (TRAV3, TRAJ10)
CAVRDMRAGGGNKLTL

SEQ ID NO: 353816 - protein, 14 aa, Homo sapiens
  CDR3 for beta chain variable domain of TCR clone 176908 (TRBV27, TRBJ2-5)
CASSSLKGWETQYF

SEQ ID NO: 353817 - protein, 15 aa, Homo sapiens
  CDR3 for alpha chain variable domain of TCR clone 176909 (TRAV16, TRAJ20)
CALKGGPSADYKLSF

SEQ ID NO: 353818 - protein, 16 aa, Homo sapiens
  CDR3 for beta chain variable domain of TCR clone 176909 (TRBV11-3, TRBJ2-2)
CASSSRTSPGTGELFF

SEQ ID NO: 353819 - protein, 13 aa, Homo sapiens
  CDR3 for alpha chain variable domain of TCR clone 176910 (TRAV3, TRAJ20)
CAVRSLNDYKLSF

SEQ ID NO: 353820 - protein, 13 aa, Homo sapiens
  CDR3 for beta chain variable domain of TCR clone 176910 (TRBV6-1, TRBJ2-1)
CAGMDPSNNEQFF

SEQ ID NO: 353821 - protein, 15 aa, Homo sapiens
  CDR3 for alpha chain variable domain of TCR clone 176911 (TRAV17, TRAJ57)
CATGPSQGGSEKLVF

SEQ ID NO: 353822 - protein, 14 aa, Homo sapiens
  CDR3 for beta chain variable domain of TCR clone 176911 (TRBV7-8, TRBJ2-3)
CASSLEAGTDTQYF

SEQ ID NO: 353823 - protein, 16 aa, Homo sapiens
  CDR3 for alpha chain variable domain of TCR clone 176912 (TRAV3, TRAJ3)
CAVRDRAKSSASKIVF

SEQ ID NO: 353824 - protein, 13 aa, Homo sapiens
  CDR3 for beta chain variable domain of TCR clone 176912 (TRBV10-3, TRBJ2-7)
CASKLAVNYEQYF

SEQ ID NO: 353825 - protein, 12 aa, Homo sapiens
  CDR3 for alpha chain variable domain of TCR clone 176913 (TRAV3, TRAJ20)
CVVRDGDYKLSF

SEQ ID NO: 353826 - protein, 12 aa, Homo sapiens
  CDR3 for beta chain variable domain of TCR clone 176913 (TRBV28, TRBJ2-3)
CASSLYRDTQYF

SEQ ID NO: 353827 - protein, 14 aa, Homo sapiens
  CDR3 for alpha chain variable domain of TCR clone 176914 (TRAV12-3, TRAJ35)
CAMSLIGFGNVLHW

SEQ ID NO: 353828 - protein, 12 aa, Homo sapiens
  CDR3 for beta chain variable domain of TCR clone 176914 (TRBV12-4, TRBJ1-1)
CASSLAGLEAFF

SEQ ID NO: 353829 - protein, 14 aa, Homo sapiens
  CDR3 for alpha chain variable domain of TCR clone 176915 (TRAV12-2, TRAJ40)
CAVEIPSGTYKYIF

SEQ ID NO: 353830 - protein, 14 aa, Homo sapiens
  CDR3 for beta chain variable domain of TCR clone 176915 (TRBV19, TRBJ2-7)
CASSMGQGAIEQYF

SEQ ID NO: 353831 - protein, 12 aa, Homo sapiens
  CDR3 for alpha chain variable domain of TCR clone 176916 (TRAV2, TRAJ9)
CAVGAGGFKTIF

SEQ ID NO: 353832 - protein, 16 aa, Homo sapiens
  CDR3 for beta chain variable domain of TCR clone 176916 (TRBV13, TRBJ2-2)
CASSPRTGAHTGELFF

SEQ ID NO: 353833 - protein, 11 aa, Homo sapiens
  CDR3 for alpha chain variable domain of TCR clone 176917 (TRAV3, TRAJ21)
CAVGNFNKFYF

SEQ ID NO: 353834 - protein, 13 aa, Homo sapiens
  CDR3 for beta chain variable domain of TCR clone 176917 (TRBV20-1, TRBJ1-1)
CSPRGGGNTEAFF

SEQ ID NO: 353835 - protein, 18 aa, Homo sapiens
  CDR3 for alpha chain variable domain of TCR clone 176918 (TRAV21, TRAJ52)
CAVRPSPVGGTSYGKLTF

SEQ ID NO: 353836 - protein, 15 aa, Homo sapiens
  CDR3 for beta chain variable domain of TCR clone 176918 (TRBV20-1, TRBJ1-5)
CSAFKNGQRNQPQHF

SEQ ID NO: 353837 - protein, 14 aa, Homo sapiens
  CDR3 for alpha chain variable domain of TCR clone 176919 (TRAV10, TRAJ34)
CVVSGKHRQAHLWD

SEQ ID NO: 353838 - protein, 14 aa, Homo sapiens
  CDR3 for beta chain variable domain of TCR clone 176919 (TRBV19, TRBJ2-1)
CASPTFVSSGEQFF

SEQ ID NO: 353839 - protein, 11 aa, Homo sapiens
  CDR3 for alpha chain variable domain of TCR clone 176920 (TRAV21, TRAJ9)
CSVPGGFKTIF

SEQ ID NO: 353840 - protein, 17 aa, Homo sapiens
  CDR3 for beta chain variable domain of TCR clone 176920 (TRBV7-9, TRBJ2-5)
CATSGGARDPVLRARHA

SEQ ID NO: 353841 - protein, 11 aa, Homo sapiens
  CDR3 for alpha chain variable domain of TCR clone 176921 (TRAV3, TRAJ21)
CAVGNFNRFYF

SEQ ID NO: 353842 - protein, 16 aa, Homo sapiens
  CDR3 for beta chain variable domain of TCR clone 176921 (TRBV7-6, TRBJ2-1)
CASSAPGPSSYNEQFF

SEQ ID NO: 353843 - protein, 15 aa, Homo sapiens
  CDR3 for alpha chain variable domain of TCR clone 176922 (TRAV27, TRAJ38)
CAARRNAGNNRNLIW

SEQ ID NO: 353844 - protein, 13 aa, Homo sapiens
  CDR3 for beta chain variable domain of TCR clone 176922 (TRBV7-3, TRBJ2-1)
CASSLDSYNEQFF

SEQ ID NO: 353845 - protein, 14 aa, Homo sapiens
  CDR3 for alpha chain variable domain of TCR clone 176923 (TRAV12-3, TRAJ10)
SHLPLTGGGNKLTF

SEQ ID NO: 353846 - protein, 15 aa, Homo sapiens
  CDR3 for beta chain variable domain of TCR clone 176923 (TRBV29-1, TRBJ2-6)
CIVGDRGSGANVLTF

SEQ ID NO: 353847 - protein, 16 aa, Homo sapiens
  CDR3 for alpha chain variable domain of TCR clone 176924 (TRAV16, TRAJ57)
CAPYLITQGGSEKLVF

SEQ ID NO: 353848 - protein, 17 aa, Homo sapiens
  CDR3 for beta chain variable domain of TCR clone 176924 (TRBV24-1, TRBJ2-4)
CATSDAGARGVRNIQYF

SEQ ID NO: 353849 - protein, 13 aa, Homo sapiens
  CDR3 for alpha chain variable domain of TCR clone 176925 (TRAV12-3, TRAJ54)
CALVPQGAQKVAF

SEQ ID NO: 353850 - protein, 15 aa, Homo sapiens
  CDR3 for beta chain variable domain of TCR clone 176925 (TRBV4-1, TRBJ2-2)
CASSQDSRGTGELFF

SEQ ID NO: 353851 - protein, 15 aa, Homo sapiens
  CDR3 for alpha chain variable domain of TCR clone 176926 (TRAV17, TRAJ22)
CATVAPSGSARPLTF

SEQ ID NO: 353852 - protein, 15 aa, Homo sapiens
  CDR3 for beta chain variable domain of TCR clone 176926 (TRBV27, TRBJ1-6)
CASSFDRGLGSPLHF

SEQ ID NO: 353853 - protein, 15 aa, Homo sapiens
  CDR3 for alpha chain variable domain of TCR clone 176927 (TRAV21, TRAJ53)
CATLNSGGSNYQLTF

SEQ ID NO: 353854 - protein, 12 aa, Homo sapiens
  CDR3 for beta chain variable domain of TCR clone 176927 (TRBV5-4, TRBJ2-7)
CASSLEAYEQYF

SEQ ID NO: 353855 - protein, 13 aa, Homo sapiens
  CDR3 for alpha chain variable domain of TCR clone 176928 (TRAV23/DV6, TRAJ9)
CAASTTGGFKTIF

SEQ ID NO: 353856 - protein, 14 aa, Homo sapiens
  CDR3 for beta chain variable domain of TCR clone 176928 (TRBV6-1, TRBJ1-3)
CASVQGGGGNTIYF

SEQ ID NO: 353857 - protein, 14 aa, Homo sapiens
  CDR3 for alpha chain variable domain of TCR clone 176929 (TRAV1-1, TRAJ27)
CAVIYNTNAGKSPF

SEQ ID NO: 353858 - protein, 15 aa, Homo sapiens
  CDR3 for beta chain variable domain of TCR clone 176929 (TRBV7-2, TRBJ2-1)
CASSSGLAGGNEQFF

SEQ ID NO: 353859 - protein, 13 aa, Homo sapiens
  CDR3 for alpha chain variable domain of TCR clone 176930 (TRAV25, TRAJ30)
CAGRVDRDDKIIF

SEQ ID NO: 353860 - protein, 17 aa, Homo sapiens
  CDR3 for beta chain variable domain of TCR clone 176930 (TRBV7-9, TRBJ2-6)
CASSFGAGYSGANALTF

SEQ ID NO: 353861 - protein, 15 aa, Homo sapiens
  CDR3 for alpha chain variable domain of TCR clone 176931 (TRAV21, TRAJ53)
CATLTSGGSNYKLTF

SEQ ID NO: 353862 - protein, 16 aa, Homo sapiens
  CDR3 for beta chain variable domain of TCR clone 176931 (TRBV12-4, TRBJ1-5)
CASSRPVGGSNQPQHF

SEQ ID NO: 353863 - protein, 12 aa, Homo sapiens
  CDR3 for alpha chain variable domain of TCR clone 176932 (TRAV35, TRAJ30)
CTGLNRDDKIIF

SEQ ID NO: 353864 - protein, 15 aa, Homo sapiens
  CDR3 for beta chain variable domain of TCR clone 176932 (TRBV18, TRBJ2-3)
CASSPLAGETDTQYF

SEQ ID NO: 353865 - protein, 15 aa, Homo sapiens
  CDR3 for alpha chain variable domain of TCR clone 176933 (TRAV3, TRAJ5)
CAVRDLDTGRRALTF

SEQ ID NO: 353866 - protein, 14 aa, Homo sapiens
  CDR3 for beta chain variable domain of TCR clone 176933 (TRBV9, TRBJ1-1)
CASSVEGGGTEAFF

SEQ ID NO: 353867 - protein, 13 aa, Homo sapiens
  CDR3 for alpha chain variable domain of TCR clone 176934 (TRAV8-3, TRAJ48)
CAVVRFGNEKLTF

SEQ ID NO: 353868 - protein, 16 aa, Homo sapiens
  CDR3 for beta chain variable domain of TCR clone 176934 (TRBV18, TRBJ1-5)
CASSPRTGGGNQPQHF

SEQ ID NO: 353869 - protein, 17 aa, Homo sapiens
  CDR3 for alpha chain variable domain of TCR clone 176935 (TRAV3, TRAJ42)
CAVRDRDYGGSQGNLIF

SEQ ID NO: 353870 - protein, 15 aa, Homo sapiens
  CDR3 for beta chain variable domain of TCR clone 176935 (TRBV3-1, TRBJ2-1)
CASSQVVEDGEEQFF

SEQ ID NO: 353871 - protein, 14 aa, Homo sapiens
  CDR3 for alpha chain variable domain of TCR clone 176936 (TRAV1-1, TRAJ27)
CAVIYNTNVGKSTF

SEQ ID NO: 353872 - protein, 13 aa, Homo sapiens
  CDR3 for beta chain variable domain of TCR clone 176936 (TRBV12-5, TRBJ1-2)
CASGVRTGNGYTF

SEQ ID NO: 353873 - protein, 17 aa, Homo sapiens
  CDR3 for alpha chain variable domain of TCR clone 176937 (TRAV3, TRAJ6)
CAVRDGPRSGGSYIPTF

SEQ ID NO: 353874 - protein, 14 aa, Homo sapiens
  CDR3 for beta chain variable domain of TCR clone 176937 (TRBV7-2, TRBJ2-7)
CASSPKNSFYEQYF

SEQ ID NO: 353875 - protein, 13 aa, Homo sapiens
  CDR3 for alpha chain variable domain of TCR clone 176938 (TRAV2, TRAJ15)
CAVASQAGTALIV

SEQ ID NO: 353876 - protein, 16 aa, Homo sapiens
  CDR3 for beta chain variable domain of TCR clone 176938 (TRBV18, TRBJ1-5)
CASSPYRVEGNQPQHF

SEQ ID NO: 353877 - protein, 14 aa, Homo sapiens
  CDR3 for alpha chain variable domain of TCR clone 176939 (TRAV13-1, TRAJ44)
CAAKATGTASKLTF

SEQ ID NO: 353878 - protein, 15 aa, Homo sapiens
  CDR3 for beta chain variable domain of TCR clone 176939 (TRBV7-3, TRBJ2-1)
CASSLTSGSFDEQFF

SEQ ID NO: 353879 - protein, 14 aa, Homo sapiens
  CDR3 for alpha chain variable domain of TCR clone 176940 (TRAV1-2, TRAJ16)
CSVNRFSDGQKLLF

SEQ ID NO: 353880 - protein, 13 aa, Homo sapiens
  CDR3 for beta chain variable domain of TCR clone 176940 (TRBV2, TRBJ2-5)
CASSGLVEETQYF

SEQ ID NO: 353881 - protein, 17 aa, Homo sapiens
  CDR3 for alpha chain variable domain of TCR clone 176941 (TRAV3, TRAJ6)
CAVRDGPRAGGSYIPTS

SEQ ID NO: 353882 - protein, 13 aa, Homo sapiens
  CDR3 for beta chain variable domain of TCR clone 176941 (TRBV10-3, TRBJ2-7)
CASKLAVNYEQYF

SEQ ID NO: 353883 - protein, 12 aa, Homo sapiens
  CDR3 for alpha chain variable domain of TCR clone 176942 (TRAV13-2, TRAJ8)
CAPWLGFQKLVF

SEQ ID NO: 353884 - protein, 15 aa, Homo sapiens
  CDR3 for beta chain variable domain of TCR clone 176942 (TRBV6-1, TRBJ2-3)
CASSEIAHSTDTQYF

SEQ ID NO: 353885 - protein, 13 aa, Homo sapiens
  CDR3 for alpha chain variable domain of TCR clone 176943 (TRAV13-1, TRAJ10)
CAALEGGGDKLTF

SEQ ID NO: 353886 - protein, 15 aa, Homo sapiens
  CDR3 for beta chain variable domain of TCR clone 176943 (TRBV20-1, TRBJ2-7)
CSARDRVSGMDEQYF

SEQ ID NO: 353887 - protein, 15 aa, Homo sapiens
  CDR3 for alpha chain variable domain of TCR clone 176944 (TRAV17, TRAJ57)
CATGPSQGGSEKLVF

SEQ ID NO: 353888 - protein, 14 aa, Homo sapiens
  CDR3 for beta chain variable domain of TCR clone 176944 (TRBV2, TRBJ2-1)
CASRTGSSYNEQFF

SEQ ID NO: 353889 - protein, 17 aa, Homo sapiens
  CDR3 for alpha chain variable domain of TCR clone 176945 (TRAV1-1, TRAJ9)
CLLLLRCQNTGGFKTNF

SEQ ID NO: 353890 - protein, 14 aa, Homo sapiens
  CDR3 for beta chain variable domain of TCR clone 176945 (TRBV20-1, TRBJ2-1)
CSAQIGGSANEQFF

SEQ ID NO: 353891 - protein, 13 aa, Homo sapiens
  CDR3 for alpha chain variable domain of TCR clone 176946 (TRAV22, TRAJ49)
CAVGMYTGNQFYF

SEQ ID NO: 353892 - protein, 13 aa, Homo sapiens
  CDR3 for beta chain variable domain of TCR clone 176946 (TRBV7-2, TRBJ2-2)
CASSLAVTGELFF

SEQ ID NO: 353893 - protein, 14 aa, Homo sapiens
  CDR3 for alpha chain variable domain of TCR clone 176947 (TRAV27, TRAJ22)
CAGLPSGSARQLTF

SEQ ID NO: 353894 - protein, 14 aa, Homo sapiens
  CDR3 for beta chain variable domain of TCR clone 176947 (TRBV4-1, TRBJ2-2)
CASSQAVNTGELFF

SEQ ID NO: 353895 - protein, 15 aa, Homo sapiens
  CDR3 for alpha chain variable domain of TCR clone 176948 (TRAV3, TRAJ17)
CAVRDTGAAGNKLTF

SEQ ID NO: 353896 - protein, 16 aa, Homo sapiens
  CDR3 for beta chain variable domain of TCR clone 176948 (TRBV20-1, TRBJ2-1)
CSALTWTSGSYNEQFF

SEQ ID NO: 353897 - protein, 19 aa, Homo sapiens
  CDR3 for alpha chain variable domain of TCR clone 176949 (TRAV40, )
CLPIPYIQNPDPAVYQLRD

SEQ ID NO: 353898 - protein, 15 aa, Homo sapiens
  CDR3 for beta chain variable domain of TCR clone 176949 (TRBV2, TRBJ1-2)
CASSEIGGANYGYTF

SEQ ID NO: 353899 - protein, 15 aa, Homo sapiens
  CDR3 for alpha chain variable domain of TCR clone 176950 (TRAV2, TRAJ9)
CAVEDRGTGGFKTIL

SEQ ID NO: 353900 - protein, 15 aa, Homo sapiens
  CDR3 for beta chain variable domain of TCR clone 176950 (TRBV7-3, TRBJ2-1)
CASSPTGGGEVEQFF

SEQ ID NO: 353901 - protein, 13 aa, Homo sapiens
  CDR3 for alpha chain variable domain of TCR clone 176951 (TRAV12-3, TRAJ13)
GAMSSGGYQKVTL

SEQ ID NO: 353902 - protein, 13 aa, Homo sapiens
  CDR3 for beta chain variable domain of TCR clone 176951 (TRBV20-1, TRBJ1-1)
CSAPPGGHTEAFF

SEQ ID NO: 353903 - protein, 15 aa, Homo sapiens
  CDR3 for alpha chain variable domain of TCR clone 176952 (TRAV36/DV7, TRAJ53)
CAVEGSGGSNYKLTF

SEQ ID NO: 353904 - protein, 16 aa, Homo sapiens
  CDR3 for beta chain variable domain of TCR clone 176952 (TRBV27, TRBJ2-2)
CASSLSGFWVIGELFF

SEQ ID NO: 353905 - protein, 13 aa, Homo sapiens
  CDR3 for alpha chain variable domain of TCR clone 176953 (TRAV35, TRAJ42)
CAGFPGSQGNLIF

SEQ ID NO: 353906 - protein, 14 aa, Homo sapiens
  CDR3 for beta chain variable domain of TCR clone 176953 (TRBV7-9, TRBJ1-1)
CASTPLQSYTEAFF

SEQ ID NO: 353907 - protein, 15 aa, Homo sapiens
  CDR3 for alpha chain variable domain of TCR clone 176954 (TRAV8-4, TRAJ6)
CAVSAPSGGSYIPTF

SEQ ID NO: 353908 - protein, 14 aa, Homo sapiens
  CDR3 for beta chain variable domain of TCR clone 176954 (TRBV7-6, TRBJ2-3)
CASSLGTVTDTQYF

SEQ ID NO: 353909 - protein, 12 aa, Homo sapiens
  CDR3 for alpha chain variable domain of TCR clone 176955 (TRAV2, TRAJ33)
CAFMDRNYLLIW

SEQ ID NO: 353910 - protein, 16 aa, Homo sapiens
  CDR3 for beta chain variable domain of TCR clone 176955 (TRBV2, TRBJ2-7)
CASSEPWTGPSYEQYF

SEQ ID NO: 353911 - protein, 14 aa, Homo sapiens
  CDR3 for alpha chain variable domain of TCR clone 176956 (TRAV1-2, TRAJ8)
CAVREDTGFQKIVF

SEQ ID NO: 353912 - protein, 12 aa, Homo sapiens
  CDR3 for beta chain variable domain of TCR clone 176956 (TRBV14, TRBJ2-7)
CASSRLKGEQYF

SEQ ID NO: 353913 - protein, 12 aa, Homo sapiens
  CDR3 for alpha chain variable domain of TCR clone 176957 (TRAV8-3, TRAJ20)
CAADFNDYKLSF

SEQ ID NO: 353914 - protein, 13 aa, Homo sapiens
  CDR3 for beta chain variable domain of TCR clone 176957 (TRBV5-7, TRBJ2-3)
CASSLGRTDTQYF

SEQ ID NO: 353915 - protein, 14 aa, Homo sapiens
  CDR3 for alpha chain variable domain of TCR clone 176958 (TRAV3, TRAJ6)
CALRDSRRKLHTYI

SEQ ID NO: 353916 - protein, 15 aa, Homo sapiens
  CDR3 for beta chain variable domain of TCR clone 176958 (TRBV18, TRBJ2-7)
CASSPLQGRTYEQYF

SEQ ID NO: 353917 - protein, 18 aa, Homo sapiens
  CDR3 for alpha chain variable domain of TCR clone 176959 (TRAV12-3, TRAJ52)
CAMSRTNAGGTSYGKLTF

SEQ ID NO: 353918 - protein, 13 aa, Homo sapiens
  CDR3 for beta chain variable domain of TCR clone 176959 (TRBV7-2, TRBJ2-7)
CASSSPSGSEQYF

SEQ ID NO: 353919 - protein, 14 aa, Homo sapiens
  CDR3 for alpha chain variable domain of TCR clone 176960 (TRAV12-1, TRAJ30)
CVVNIGGRDDKIIF

SEQ ID NO: 353920 - protein, 14 aa, Homo sapiens
  CDR3 for beta chain variable domain of TCR clone 176960 (TRBV12-5, TRBJ2-5)
CASGSRTHQETQYF

SEQ ID NO: 353921 - protein, 12 aa, Homo sapiens
  CDR3 for alpha chain variable domain of TCR clone 176961 (TRAV13-1, TRAJ53)
AASGGSNYKLTF

SEQ ID NO: 353922 - protein, 12 aa, Homo sapiens
  CDR3 for beta chain variable domain of TCR clone 176961 (TRBV18, TRBJ1-4)
CASSPSREELFF

SEQ ID NO: 353923 - protein, 13 aa, Homo sapiens
  CDR3 for alpha chain variable domain of TCR clone 176962 (TRAV1-1, TRAJ31)
CASYLNNNARLMF

SEQ ID NO: 353924 - protein, 14 aa, Homo sapiens
  CDR3 for beta chain variable domain of TCR clone 176962 (TRBV4-1, TRBJ2-5)
CASSRGGSGETQYF

SEQ ID NO: 353925 - protein, 13 aa, Homo sapiens
  CDR3 for alpha chain variable domain of TCR clone 176963 (TRAV13-2, TRAJ48)
CAEMDFGNEKLTF

SEQ ID NO: 353926 - protein, 18 aa, Homo sapiens
  CDR3 for beta chain variable domain of TCR clone 176963 (TRBV20-1, TRBJ2-6)
CSAETTPTHGSGANDLTF

SEQ ID NO: 353927 - protein, 12 aa, Homo sapiens
  CDR3 for alpha chain variable domain of TCR clone 176964 (TRAV8-6, TRAJ57)
YAVQGGSEKLVF

SEQ ID NO: 353928 - protein, 11 aa, Homo sapiens
  CDR3 for beta chain variable domain of TCR clone 176964 (TRBV19, TRBJ1-1)
CASSIGSEAFF

SEQ ID NO: 353929 - protein, 19 aa, Homo sapiens
  CDR3 for alpha chain variable domain of TCR clone 176965 (TRAV17, TRAJ54)
CFLLLCYGRGGQGAQKLVF

SEQ ID NO: 353930 - protein, 14 aa, Homo sapiens
  CDR3 for beta chain variable domain of TCR clone 176965 (TRBV4-1, TRBJ2-5)
CASSRSGSGETQYF

SEQ ID NO: 353931 - protein, 13 aa, Homo sapiens
  CDR3 for alpha chain variable domain of TCR clone 176966 (TRAV23/DV6, TRAJ58)
CAASEIGGSRLTF

SEQ ID NO: 353932 - protein, 15 aa, Homo sapiens
  CDR3 for beta chain variable domain of TCR clone 176966 (TRBV9, TRBJ1-6)
CASSVAGTGDSPLHF

SEQ ID NO: 353933 - protein, 13 aa, Homo sapiens
  CDR3 for alpha chain variable domain of TCR clone 176967 (TRAV3, TRAJ21)
CAVREPDFNKFYF

SEQ ID NO: 353934 - protein, 14 aa, Homo sapiens
  CDR3 for beta chain variable domain of TCR clone 176967 (TRBV4-1, TRBJ2-2)
CAISQAVNTGELFF

SEQ ID NO: 353935 - protein, 14 aa, Homo sapiens
  CDR3 for alpha chain variable domain of TCR clone 176968 (TRAV9-2, TRAJ39)
CALYIYNAGNMLTF

SEQ ID NO: 353936 - protein, 15 aa, Homo sapiens
  CDR3 for beta chain variable domain of TCR clone 176968 (TRBV7-2, TRBJ1-5)
CASSSGQGHAQPQHF

SEQ ID NO: 353937 - protein, 13 aa, Homo sapiens
  CDR3 for alpha chain variable domain of TCR clone 176969 (TRAV3, TRAJ5)
CAVREAGRRELTF

SEQ ID NO: 353938 - protein, 15 aa, Homo sapiens
  CDR3 for beta chain variable domain of TCR clone 176969 (TRBV9, TRBJ2-1)
CASSLAGSSYNEQFF

SEQ ID NO: 353939 - protein, 14 aa, Homo sapiens
  CDR3 for alpha chain variable domain of TCR clone 176970 (TRAV1-2, TRAJ33)
CAVRSSSSNYQLIW

SEQ ID NO: 353940 - protein, 14 aa, Homo sapiens
  CDR3 for beta chain variable domain of TCR clone 176970 (TRBV18, TRBJ2-5)
CASSPGVSQETQYF

SEQ ID NO: 353941 - protein, 14 aa, Homo sapiens
  CDR3 for alpha chain variable domain of TCR clone 176971 (TRAV16, TRAJ33)
CALSAMDSNYQLIW

SEQ ID NO: 353942 - protein, 14 aa, Homo sapiens
  CDR3 for beta chain variable domain of TCR clone 176971 (TRBV20-1, TRBJ1-1)
CSAQTRIGGTEAFF

SEQ ID NO: 353943 - protein, 14 aa, Homo sapiens
  CDR3 for alpha chain variable domain of TCR clone 176972 (TRAV20, TRAJ56)
CAVRFGGANSKLTF

SEQ ID NO: 353944 - protein, 14 aa, Homo sapiens
  CDR3 for beta chain variable domain of TCR clone 176972 (TRBV20-1, TRBJ2-7)
CSARRGRSSYEQYF

SEQ ID NO: 353945 - protein, 15 aa, Homo sapiens
  CDR3 for alpha chain variable domain of TCR clone 176973 (TRAV13-2, TRAJ40)
CAEHRSRQGTYKYIF

SEQ ID NO: 353946 - protein, 16 aa, Homo sapiens
  CDR3 for beta chain variable domain of TCR clone 176973 (TRBV7-2, TRBJ2-1)
CASSLGRTSGDNEQFF

SEQ ID NO: 353947 - protein, 11 aa, Homo sapiens
  CDR3 for alpha chain variable domain of TCR clone 176974 (TRAV12-3, TRAJ27)
CAMANAGKSTF

SEQ ID NO: 353948 - protein, 20 aa, Homo sapiens
  CDR3 for beta chain variable domain of TCR clone 176974 (TRBV28, TRBJ2-1)
CASTPIGRSPGLAGGNEQFF

SEQ ID NO: 353949 - protein, 14 aa, Homo sapiens
  CDR3 for alpha chain variable domain of TCR clone 176975 (TRAV3, TRAJ22)
CAVRDYGFVWQLTF

SEQ ID NO: 353950 - protein, 13 aa, Homo sapiens
  CDR3 for beta chain variable domain of TCR clone 176975 (TRBV11-2, TRBJ2-5)
CASGHGAKETQYF

SEQ ID NO: 353951 - protein, 18 aa, Homo sapiens
  CDR3 for alpha chain variable domain of TCR clone 176976 (TRAV13-1, TRAJ52)
CAAKNPNAGGTSYGKLTL

SEQ ID NO: 353952 - protein, 15 aa, Homo sapiens
  CDR3 for beta chain variable domain of TCR clone 176976 (TRBV6-1, TRBJ2-3)
CGSSERGGITDTQYF

SEQ ID NO: 353953 - protein, 13 aa, Homo sapiens
  CDR3 for alpha chain variable domain of TCR clone 176977 (TRAV36/DV7, TRAJ49)
CAVEANTGNQFYF

SEQ ID NO: 353954 - protein, 13 aa, Homo sapiens
  CDR3 for beta chain variable domain of TCR clone 176977 (TRBV10-3, TRBJ2-7)
CASKLAVNYDQYF

SEQ ID NO: 353955 - protein, 13 aa, Homo sapiens
  CDR3 for alpha chain variable domain of TCR clone 176978 (TRAV35, TRAJ43)
CAGYPYNNNDMRF

SEQ ID NO: 353956 - protein, 13 aa, Homo sapiens
  CDR3 for beta chain variable domain of TCR clone 176978 (TRBV4-1, TRBJ2-1)
CASSQEVQYEQFF

SEQ ID NO: 353957 - protein, 12 aa, Homo sapiens
  CDR3 for alpha chain variable domain of TCR clone 176979 (TRAV2, TRAJ9)
CAVGAGGFKTIF

SEQ ID NO: 353958 - protein, 16 aa, Homo sapiens
  CDR3 for beta chain variable domain of TCR clone 176979 (TRBV6-1, TRBJ1-3)
CASVQRGVETPYILER

SEQ ID NO: 353959 - protein, 15 aa, Homo sapiens
  CDR3 for alpha chain variable domain of TCR clone 176980 (TRAV25, TRAJ52)
GAGTSGGTSYGKLTF

SEQ ID NO: 353960 - protein, 13 aa, Homo sapiens
  CDR3 for beta chain variable domain of TCR clone 176980 (TRBV6-5, TRBJ2-5)
CASSPQGGETQYF

SEQ ID NO: 353961 - protein, 13 aa, Homo sapiens
  CDR3 for alpha chain variable domain of TCR clone 176981 (TRAV13-2, TRAJ48)
CAEMDFGNEKLTF

SEQ ID NO: 353962 - protein, 19 aa, Homo sapiens
  CDR3 for beta chain variable domain of TCR clone 176981 (TRBV19, TRBJ2-5)
CASSIGQVTDFFLGETQYF

SEQ ID NO: 353963 - protein, 10 aa, Homo sapiens
  CDR3 for alpha chain variable domain of TCR clone 176982 (TRAV23/DV6, TRAJ57)
CAASSTLSQG

SEQ ID NO: 353964 - protein, 17 aa, Homo sapiens
  CDR3 for beta chain variable domain of TCR clone 176982 (TRBV20-1, TRBJ2-1)
CSASSSGLAGSYNEQFF

SEQ ID NO: 353965 - protein, 17 aa, Homo sapiens
  CDR3 for alpha chain variable domain of TCR clone 176983 (TRAV3, TRAJ42)
CAVRDRDSGGSQGNLIF

SEQ ID NO: 353966 - protein, 15 aa, Homo sapiens
  CDR3 for beta chain variable domain of TCR clone 176983 (TRBV15, TRBJ1-1)
CATSLQGGRNTEAFF

SEQ ID NO: 353967 - protein, 17 aa, Homo sapiens
  CDR3 for alpha chain variable domain of TCR clone 176984 (TRAV26-1, TRAJ22)
CIVRVSFWFCKATDLWF

SEQ ID NO: 353968 - protein, 13 aa, Homo sapiens
  CDR3 for beta chain variable domain of TCR clone 176984 (TRBV7-9, TRBJ1-2)
CASSLKQNYGYTF

SEQ ID NO: 353969 - protein, 14 aa, Homo sapiens
  CDR3 for alpha chain variable domain of TCR clone 176985 (TRAV17, TRAJ24)
CATLTTHSWGKFQF

SEQ ID NO: 353970 - protein, 16 aa, Homo sapiens
  CDR3 for beta chain variable domain of TCR clone 176985 (TRBV4-2, TRBJ2-7)
CASSQDGGSLRGEQYF

SEQ ID NO: 353971 - protein, 14 aa, Homo sapiens
  CDR3 for alpha chain variable domain of TCR clone 176986 (TRAV1-2, TRAJ16)
CAVNRFSDGQKLLF

SEQ ID NO: 353972 - protein, 14 aa, Homo sapiens
  CDR3 for beta chain variable domain of TCR clone 176986 (TRBV5-1, TRBJ1-4)
CASSLDRTHEKLFF

SEQ ID NO: 353973 - protein, 13 aa, Homo sapiens
  CDR3 for alpha chain variable domain of TCR clone 176987 (TRAV22, TRAJ29)
CAVGGSGNTPLFF

SEQ ID NO: 353974 - protein, 15 aa, Homo sapiens
  CDR3 for beta chain variable domain of TCR clone 176987 (TRBV4-2, TRBJ2-1)
CASSQDVGLAGEQFF

SEQ ID NO: 353975 - protein, 11 aa, Homo sapiens
  CDR3 for alpha chain variable domain of TCR clone 176988 (TRAV12-3, TRAJ49)
CAANTGNQFYV

SEQ ID NO: 353976 - protein, 16 aa, Homo sapiens
  CDR3 for beta chain variable domain of TCR clone 176988 (TRBV7-9, TRBJ2-1)
CASSDVAGGSYNEQFF

SEQ ID NO: 353977 - protein, 14 aa, Homo sapiens
  CDR3 for alpha chain variable domain of TCR clone 176989 (TRAV26-1, TRAJ38)
CIADNAGNSRKLMW

SEQ ID NO: 353978 - protein, 13 aa, Homo sapiens
  CDR3 for beta chain variable domain of TCR clone 176989 (TRBV20-1, TRBJ1-1)
CSARGGGNTEAFF

SEQ ID NO: 353979 - protein, 13 aa, Homo sapiens
  CDR3 for alpha chain variable domain of TCR clone 176990 (TRAV3, TRAJ27)
CAMRPLGAGKSTF

SEQ ID NO: 353980 - protein, 14 aa, Homo sapiens
  CDR3 for beta chain variable domain of TCR clone 176990 (TRBV7-2, TRBJ1-6)
CASSLQGANSPLHF

SEQ ID NO: 353981 - protein, 12 aa, Homo sapiens
  CDR3 for alpha chain variable domain of TCR clone 176991 (TRAV12-3, TRAJ34)
CAMGYNTDELIF

SEQ ID NO: 353982 - protein, 15 aa, Homo sapiens
  CDR3 for beta chain variable domain of TCR clone 176991 (TRBV28, TRBJ2-1)
CASSIIAGGRSEQFF

SEQ ID NO: 353983 - protein, 16 aa, Homo sapiens
  CDR3 for alpha chain variable domain of TCR clone 176992 (TRAV1-2, TRAJ10)
CALIGVLTGGGNKLTF

SEQ ID NO: 353984 - protein, 12 aa, Homo sapiens
  CDR3 for beta chain variable domain of TCR clone 176992 (TRBV7-8, TRBJ2-7)
CASSLGDREQYF

SEQ ID NO: 353985 - protein, 12 aa, Homo sapiens
  CDR3 for alpha chain variable domain of TCR clone 176993 (TRAV12-3, TRAJ17)
CAMTLTGNKITF

SEQ ID NO: 353986 - protein, 17 aa, Homo sapiens
  CDR3 for beta chain variable domain of TCR clone 176993 (TRBV20-1, TRBJ1-1)
CSARGTGGSYGNTGAFF

SEQ ID NO: 353987 - protein, 12 aa, Homo sapiens
  CDR3 for alpha chain variable domain of TCR clone 176994 (TRAV21, TRAJ33)
CAKMDSYYQLIW

SEQ ID NO: 353988 - protein, 14 aa, Homo sapiens
  CDR3 for beta chain variable domain of TCR clone 176994 (TRBV2, TRBJ2-7)
CASSLTSGGYEQYF

SEQ ID NO: 353989 - protein, 14 aa, Homo sapiens
  CDR3 for alpha chain variable domain of TCR clone 176995 (TRAV12-2, TRAJ40)
FAGKIPSGTYKYIF

SEQ ID NO: 353990 - protein, 14 aa, Homo sapiens
  CDR3 for beta chain variable domain of TCR clone 176995 (TRBV7-9, TRBJ1-2)
CASSRQGANYGYTF

SEQ ID NO: 353991 - protein, 18 aa, Homo sapiens
  CDR3 for alpha chain variable domain of TCR clone 176996 (TRAV26-2, TRAJ54)
CILRDVEVGIQGAQKLVF

SEQ ID NO: 353992 - protein, 13 aa, Homo sapiens
  CDR3 for beta chain variable domain of TCR clone 176996 (TRBV4-1, TRBJ2-2)
CASSQENTGELFF

SEQ ID NO: 353993 - protein, 15 aa, Homo sapiens
  CDR3 for alpha chain variable domain of TCR clone 176997 (TRAV3, TRAJ17)
CAVSPKEAAGNKLTF

SEQ ID NO: 353994 - protein, 13 aa, Homo sapiens
  CDR3 for beta chain variable domain of TCR clone 176997 (TRBV6-1, TRBJ1-1)
CASSRQGNTEAFF

SEQ ID NO: 353995 - protein, 14 aa, Homo sapiens
  CDR3 for alpha chain variable domain of TCR clone 176998 (TRAV12-1, TRAJ23)
CLVMIYNQGGKLIF

SEQ ID NO: 353996 - protein, 23 aa, Homo sapiens
  CDR3 for beta chain variable domain of TCR clone 176998 (TRBV7-3, TRBJ1-6)
CASSLTSRDEASDPSSYNSPLHF

SEQ ID NO: 353997 - protein, 12 aa, Homo sapiens
  CDR3 for alpha chain variable domain of TCR clone 176999 (TRAV12-3, TRAJ40)
CAMSSVTYNYIF

SEQ ID NO: 353998 - protein, 20 aa, Homo sapiens
  CDR3 for beta chain variable domain of TCR clone 176999 (TRBV7-8, TRBJ2-2)
CASSHLFPGPTIHITGELFF

SEQ ID NO: 353999 - protein, 13 aa, Homo sapiens
  CDR3 for alpha chain variable domain of TCR clone 177000 (TRAV17, TRAJ7)
CATDNYGKNRLAF

SEQ ID NO: 354000 - protein, 16 aa, Homo sapiens
  CDR3 for beta chain variable domain of TCR clone 177000 (TRBV4-1, TRBJ2-5)
CASSQALAASSATQYF

SEQ ID NO: 354001 - protein, 16 aa, Homo sapiens
  CDR3 for alpha chain variable domain of TCR clone 177001 (TRAV1-2, TRAJ10)
CAVRGVLTGGGNKLTV

SEQ ID NO: 354002 - protein, 14 aa, Homo sapiens
  CDR3 for beta chain variable domain of TCR clone 177001 (TRBV4-1, TRBJ2-2)
CASSQAVNTGELFF

SEQ ID NO: 354003 - protein, 16 aa, Homo sapiens
  CDR3 for alpha chain variable domain of TCR clone 177002 (TRAV12-3, TRAJ53)
CAMSPGSGGSNYKLTF

SEQ ID NO: 354004 - protein, 14 aa, Homo sapiens
  CDR3 for beta chain variable domain of TCR clone 177002 (TRBV7-2, TRBJ2-5)
CASSFTQGQETQYF

SEQ ID NO: 354005 - protein, 13 aa, Homo sapiens
  CDR3 for alpha chain variable domain of TCR clone 177003 (TRAV35, TRAJ37)
CAGSSGNTGKLIF

SEQ ID NO: 354006 - protein, 15 aa, Homo sapiens
  CDR3 for beta chain variable domain of TCR clone 177003 (TRBV5-1, TRBJ2-5)
CASSFAGVGEETQYF

SEQ ID NO: 354007 - protein, 13 aa, Homo sapiens
  CDR3 for alpha chain variable domain of TCR clone 177004 (TRAV13-2, TRAJ48)
CAEMDFGNEKLTL

SEQ ID NO: 354008 - protein, 15 aa, Homo sapiens
  CDR3 for beta chain variable domain of TCR clone 177004 (TRBV7-9, TRBJ1-6)
CASSCPGRGNSPLHF

SEQ ID NO: 354009 - protein, 12 aa, Homo sapiens
  CDR3 for alpha chain variable domain of TCR clone 177005 (TRAV16, TRAJ12)
CAHGDSSYKLIF

SEQ ID NO: 354010 - protein, 13 aa, Homo sapiens
  CDR3 for beta chain variable domain of TCR clone 177005 (TRBV7-3, TRBJ1-1)
RASSQDWGAEAFF

SEQ ID NO: 354011 - protein, 12 aa, Homo sapiens
  CDR3 for alpha chain variable domain of TCR clone 177006 (TRAV23/DV6, TRAJ33)
CAAEDSNYQLIW

SEQ ID NO: 354012 - protein, 12 aa, Homo sapiens
  CDR3 for beta chain variable domain of TCR clone 177006 (TRBV7-9, TRBJ1-4)
CASSTGREKLFF

SEQ ID NO: 354013 - protein, 12 aa, Homo sapiens
  CDR3 for alpha chain variable domain of TCR clone 177007 (TRAV13-1, TRAJ49)
CAASPMGNQFYF

SEQ ID NO: 354014 - protein, 16 aa, Homo sapiens
  CDR3 for beta chain variable domain of TCR clone 177007 (TRBV7-3, TRBJ2-1)
CASSKPLAGGYNEQFF

SEQ ID NO: 354015 - protein, 15 aa, Homo sapiens
  CDR3 for alpha chain variable domain of TCR clone 177008 (TRAV35, TRAJ58)
CAGRRQETSGSRLTF

SEQ ID NO: 354016 - protein, 16 aa, Homo sapiens
  CDR3 for beta chain variable domain of TCR clone 177008 (TRBV2, TRBJ2-1)
CASNVGGSLSYNEQFF

SEQ ID NO: 354017 - protein, 13 aa, Homo sapiens
  CDR3 for alpha chain variable domain of TCR clone 177009 (TRAV12-3, TRAJ7)
CAMTPYGNNRLAF

SEQ ID NO: 354018 - protein, 15 aa, Homo sapiens
  CDR3 for beta chain variable domain of TCR clone 177009 (TRBV2, TRBJ2-7)
CASSEGLARSYEQYF

SEQ ID NO: 354019 - protein, 17 aa, Homo sapiens
  CDR3 for alpha chain variable domain of TCR clone 177010 (TRAV13-1, TRAJ10)
CAASIWRGTGGGNKLTF

SEQ ID NO: 354020 - protein, 13 aa, Homo sapiens
  CDR3 for beta chain variable domain of TCR clone 177010 (TRBV20-1, TRBJ1-1)
CSARRGGNTEAFF

SEQ ID NO: 354021 - protein, 15 aa, Homo sapiens
  CDR3 for alpha chain variable domain of TCR clone 177011 (TRAV8-2, TRAJ24)
CGVSDRTDSWGKLQF

SEQ ID NO: 354022 - protein, 13 aa, Homo sapiens
  CDR3 for beta chain variable domain of TCR clone 177011 (TRBV7-9, TRBJ1-2)
CASSLKQNYGYTF

SEQ ID NO: 354023 - protein, 14 aa, Homo sapiens
  CDR3 for alpha chain variable domain of TCR clone 177012 (TRAV14/DV4, TRAJ47)
CAMREGRGGNKLVF

SEQ ID NO: 354024 - protein, 13 aa, Homo sapiens
  CDR3 for beta chain variable domain of TCR clone 177012 (TRBV18, TRBJ1-1)
CASSGGRNTEAFF

SEQ ID NO: 354025 - protein, 13 aa, Homo sapiens
  CDR3 for alpha chain variable domain of TCR clone 177013 (TRAV8-3, TRAJ43)
CAVVPYHNNDIRF

SEQ ID NO: 354026 - protein, 16 aa, Homo sapiens
  CDR3 for beta chain variable domain of TCR clone 177013 (TRBV7-2, TRBJ2-5)
CASSPFPTGGEETQYF

SEQ ID NO: 354027 - protein, 18 aa, Homo sapiens
  CDR3 for alpha chain variable domain of TCR clone 177014 (TRAV26-1, TRAJ37)
CIVRVDMHGSSNTGKLIF

SEQ ID NO: 354028 - protein, 15 aa, Homo sapiens
  CDR3 for beta chain variable domain of TCR clone 177014 (TRBV20-1, TRBJ2-7)
CSARVLASPLYEQYV

SEQ ID NO: 354029 - protein, 14 aa, Homo sapiens
  CDR3 for alpha chain variable domain of TCR clone 177015 (TRAV3, TRAJ36)
CAVRDRTGANNLFF

SEQ ID NO: 354030 - protein, 18 aa, Homo sapiens
  CDR3 for beta chain variable domain of TCR clone 177015 (TRBV12-4, TRBJ2-2)
CASSLVAGTRGRTGELFF

SEQ ID NO: 354031 - protein, 14 aa, Homo sapiens
  CDR3 for alpha chain variable domain of TCR clone 177016 (TRAV23/DV6, TRAJ11)
CAALIGGGYSTLTV

SEQ ID NO: 354032 - protein, 13 aa, Homo sapiens
  CDR3 for beta chain variable domain of TCR clone 177016 (TRBV11-3, TRBJ1-1)
CASSLGGNTEAFF

SEQ ID NO: 354033 - protein, 15 aa, Homo sapiens
  CDR3 for alpha chain variable domain of TCR clone 177017 (TRAV12-1, TRAJ44)
CVVDEYTGTASKLTF

SEQ ID NO: 354034 - protein, 12 aa, Homo sapiens
  CDR3 for beta chain variable domain of TCR clone 177017 (TRBV12-4, TRBJ2-1)
CASTYVLNEQFF

SEQ ID NO: 354035 - protein, 12 aa, Homo sapiens
  CDR3 for alpha chain variable domain of TCR clone 177018 (TRAV16, TRAJ10)
CSRTGGGNKLTF

SEQ ID NO: 354036 - protein, 15 aa, Homo sapiens
  CDR3 for beta chain variable domain of TCR clone 177018 (TRBV4-1, TRBJ1-4)
CASSDTGGTNEKLFF

SEQ ID NO: 354037 - protein, 16 aa, Homo sapiens
  CDR3 for alpha chain variable domain of TCR clone 177019 (TRAV12-2, TRAJ18)
CAVTTDRGSTLGRPYF

SEQ ID NO: 354038 - protein, 15 aa, Homo sapiens
  CDR3 for beta chain variable domain of TCR clone 177019 (TRBV9, TRBJ1-6)
CASSVAGTGDSPLHF

SEQ ID NO: 354039 - protein, 10 aa, Homo sapiens
  CDR3 for alpha chain variable domain of TCR clone 177020 (TRAV13-1, TRAJ52)
CAAKTPMLVV

SEQ ID NO: 354040 - protein, 15 aa, Homo sapiens
  CDR3 for beta chain variable domain of TCR clone 177020 (TRBV11-2, TRBJ2-2)
CASSSDRVNAGELFF

SEQ ID NO: 354041 - protein, 12 aa, Homo sapiens
  CDR3 for alpha chain variable domain of TCR clone 177021 (TRAV8-3, TRAJ27)
WAVGAEAGKSTF

SEQ ID NO: 354042 - protein, 14 aa, Homo sapiens
  CDR3 for beta chain variable domain of TCR clone 177021 (TRBV2, TRBJ2-1)
CASRLIVGHDEQFS

SEQ ID NO: 354043 - protein, 13 aa, Homo sapiens
  CDR3 for alpha chain variable domain of TCR clone 177022 (TRAV12-1, TRAJ33)
CGDAPNSNYQLIW

SEQ ID NO: 354044 - protein, 15 aa, Homo sapiens
  CDR3 for beta chain variable domain of TCR clone 177022 (TRBV7-2, TRBJ2-2)
CASRRPGQNTGELFF

SEQ ID NO: 354045 - protein, 13 aa, Homo sapiens
  CDR3 for alpha chain variable domain of TCR clone 177023 (TRAV3, TRAJ21)
CAVREPDFNTFYF

SEQ ID NO: 354046 - protein, 14 aa, Homo sapiens
  CDR3 for beta chain variable domain of TCR clone 177023 (TRBV4-2, TRBJ2-1)
CASGLDRAYNEQFF

SEQ ID NO: 354047 - protein, 13 aa, Homo sapiens
  CDR3 for alpha chain variable domain of TCR clone 177024 (TRAV3, TRAJ30)
CAVRDIPDDKIIF

SEQ ID NO: 354048 - protein, 15 aa, Homo sapiens
  CDR3 for beta chain variable domain of TCR clone 177024 (TRBV19, TRBJ2-1)
CASSINREPSHEQFF

SEQ ID NO: 354049 - protein, 11 aa, Homo sapiens
  CDR3 for alpha chain variable domain of TCR clone 177025 (TRAV3, TRAJ21)
CAVGNFNKFYF

SEQ ID NO: 354050 - protein, 16 aa, Homo sapiens
  CDR3 for beta chain variable domain of TCR clone 177025 (TRBV19, TRBJ2-1)
CASGKAGPSSYNEPFF

SEQ ID NO: 354051 - protein, 12 aa, Homo sapiens
  CDR3 for alpha chain variable domain of TCR clone 177026 (TRAV12-3, TRAJ17)
CAMTLTGNKLTV

SEQ ID NO: 354052 - protein, 14 aa, Homo sapiens
  CDR3 for beta chain variable domain of TCR clone 177026 (TRBV7-2, TRBJ2-7)
CASSPKTSFYEQYF

SEQ ID NO: 354053 - protein, 15 aa, Homo sapiens
  CDR3 for alpha chain variable domain of TCR clone 177027 (TRAV27, TRAJ38)
CAARRNAGNNRKLIW

SEQ ID NO: 354054 - protein, 13 aa, Homo sapiens
  CDR3 for beta chain variable domain of TCR clone 177027 (TRBV12-5, TRBJ2-3)
CASGDRQSETQYC

SEQ ID NO: 354055 - protein, 12 aa, Homo sapiens
  CDR3 for alpha chain variable domain of TCR clone 177028 (TRAV13-2, TRAJ23)
CAERHRGGKLIF

SEQ ID NO: 354056 - protein, 19 aa, Homo sapiens
  CDR3 for beta chain variable domain of TCR clone 177028 (TRBV19, TRBJ2-5)
CASSIGPVTDFFLGETQYF

SEQ ID NO: 354057 - protein, 12 aa, Homo sapiens
  CDR3 for alpha chain variable domain of TCR clone 177029 (TRAV12-1, TRAJ31)
CVVNLNNARLMF

SEQ ID NO: 354058 - protein, 16 aa, Homo sapiens
  CDR3 for beta chain variable domain of TCR clone 177029 (TRBV19, TRBJ2-2)
CASRSPGTGATGELFF

SEQ ID NO: 354059 - protein, 16 aa, Homo sapiens
  CDR3 for alpha chain variable domain of TCR clone 177030 (TRAV4, TRAJ9)
CLVGDPNRPGGFKTIF

SEQ ID NO: 354060 - protein, 14 aa, Homo sapiens
  CDR3 for beta chain variable domain of TCR clone 177030 (TRBV9, TRBJ2-4)
CASSPSGTSGFQYF

SEQ ID NO: 354061 - protein, 15 aa, Homo sapiens
  CDR3 for alpha chain variable domain of TCR clone 177031 (TRAV30, TRAJ57)
CGTAIPQCGSEKLVF

SEQ ID NO: 354062 - protein, 13 aa, Homo sapiens
  CDR3 for beta chain variable domain of TCR clone 177031 (TRBV7-9, TRBJ1-2)
CASSPSNFWGYTF

SEQ ID NO: 354063 - protein, 12 aa, Homo sapiens
  CDR3 for alpha chain variable domain of TCR clone 177032 (TRAV13-1, TRAJ21)
CAAKEGFNKFYF

SEQ ID NO: 354064 - protein, 16 aa, Homo sapiens
  CDR3 for beta chain variable domain of TCR clone 177032 (TRBV25-1, TRBJ1-1)
CASSGDRDRGRIEAFF

SEQ ID NO: 354065 - protein, 15 aa, Homo sapiens
  CDR3 for alpha chain variable domain of TCR clone 177033 (TRAV26-1, TRAJ15)
CIVRAANQAGTALIF

SEQ ID NO: 354066 - protein, 15 aa, Homo sapiens
  CDR3 for beta chain variable domain of TCR clone 177033 (TRBV20-1, TRBJ1-1)
CSARSAATSNTEDFF

SEQ ID NO: 354067 - protein, 12 aa, Homo sapiens
  CDR3 for alpha chain variable domain of TCR clone 177034 (TRAV12-1, TRAJ6)
CVVGERSYIPTF

SEQ ID NO: 354068 - protein, 13 aa, Homo sapiens
  CDR3 for beta chain variable domain of TCR clone 177034 (TRBV14, TRBJ1-2)
CASSQQGYYGYTF

SEQ ID NO: 354069 - protein, 11 aa, Homo sapiens
  CDR3 for alpha chain variable domain of TCR clone 177035 (TRAV26-1, TRAJ37)
CIVRVGRKLIF

SEQ ID NO: 354070 - protein, 13 aa, Homo sapiens
  CDR3 for beta chain variable domain of TCR clone 177035 (TRBV7-9, TRBJ2-1)
CASSLDVGNEQFF

SEQ ID NO: 354071 - protein, 13 aa, Homo sapiens
  CDR3 for alpha chain variable domain of TCR clone 177036 (TRAV9-2, TRAJ49)
CALIQIGGNQFYF

SEQ ID NO: 354072 - protein, 13 aa, Homo sapiens
  CDR3 for beta chain variable domain of TCR clone 177036 (TRBV5-5, TRBJ1-2)
CASSVWRGEDYTF

SEQ ID NO: 354073 - protein, 15 aa, Homo sapiens
  CDR3 for alpha chain variable domain of TCR clone 177037 (TRAV12-1, TRAJ4)
CVVNPFSGVSNKLIF

SEQ ID NO: 354074 - protein, 13 aa, Homo sapiens
  CDR3 for beta chain variable domain of TCR clone 177037 (TRBV20-1, TRBJ1-2)
CSARGTADYGYTF

SEQ ID NO: 354075 - protein, 12 aa, Homo sapiens
  CDR3 for alpha chain variable domain of TCR clone 177038 (TRAV8-3, TRAJ41)
CAVGALGYALNF

SEQ ID NO: 354076 - protein, 16 aa, Homo sapiens
  CDR3 for beta chain variable domain of TCR clone 177038 (TRBV7-6, TRBJ2-3)
CASSDSRGESTDTQYF

SEQ ID NO: 354077 - protein, 11 aa, Homo sapiens
  CDR3 for alpha chain variable domain of TCR clone 177039 (TRAV3, TRAJ21)
CTVGNFNKFYF

SEQ ID NO: 354078 - protein, 13 aa, Homo sapiens
  CDR3 for beta chain variable domain of TCR clone 177039 (TRBV12-5, TRBJ2-3)
CASGDRQSDTQYF

SEQ ID NO: 354079 - protein, 15 aa, Homo sapiens
  CDR3 for alpha chain variable domain of TCR clone 177040 (TRAV17, TRAJ40)
CATVSSTSGTYKYIF

SEQ ID NO: 354080 - protein, 13 aa, Homo sapiens
  CDR3 for beta chain variable domain of TCR clone 177040 (TRBV13, TRBJ2-5)
CANSPEVGETQYF

SEQ ID NO: 354081 - protein, 14 aa, Homo sapiens
  CDR3 for alpha chain variable domain of TCR clone 177041 (TRAV12-2, TRAJ13)
CAVKKTGGYQKVTF

SEQ ID NO: 354082 - protein, 14 aa, Homo sapiens
  CDR3 for beta chain variable domain of TCR clone 177041 (TRBV7-6, TRBJ2-1)
CASSLGGGADEQFF

SEQ ID NO: 354083 - protein, 14 aa, Homo sapiens
  CDR3 for alpha chain variable domain of TCR clone 177042 (TRAV23/DV6, TRAJ17)
CAARGRAAGNKLTF

SEQ ID NO: 354084 - protein, 14 aa, Homo sapiens
  CDR3 for beta chain variable domain of TCR clone 177042 (TRBV7-2, TRBJ2-7)
CASSPKTSFYEQYF

SEQ ID NO: 354085 - protein, 13 aa, Homo sapiens
  CDR3 for alpha chain variable domain of TCR clone 177043 (TRAV8-3, TRAJ43)
CAVGPDNNNDMRF

SEQ ID NO: 354086 - protein, 17 aa, Homo sapiens
  CDR3 for beta chain variable domain of TCR clone 177043 (TRBV4-1, TRBJ1-4)
CASSQEGPRGVEEKLFF

SEQ ID NO: 354087 - protein, 17 aa, Homo sapiens
  CDR3 for alpha chain variable domain of TCR clone 177044 (TRAV3, TRAJ6)
CAVRDGPWAGGSYIPTL

SEQ ID NO: 354088 - protein, 13 aa, Homo sapiens
  CDR3 for beta chain variable domain of TCR clone 177044 (TRBV20-1, TRBJ1-6)
CSAPLGVGSPLHF

SEQ ID NO: 354089 - protein, 15 aa, Homo sapiens
  CDR3 for alpha chain variable domain of TCR clone 177045 (TRAV17, TRAJ9)
CFLLLGFTGGFKTIF

SEQ ID NO: 354090 - protein, 14 aa, Homo sapiens
  CDR3 for beta chain variable domain of TCR clone 177045 (TRBV7-9, TRBJ2-2)
CASSLVQDTGELFF

SEQ ID NO: 354091 - protein, 18 aa, Homo sapiens
  CDR3 for alpha chain variable domain of TCR clone 177046 (TRAV12-3, TRAJ52)
CAMSVGGAGGTSYGKLTF

SEQ ID NO: 354092 - protein, 16 aa, Homo sapiens
  CDR3 for beta chain variable domain of TCR clone 177046 (TRBV5-1, TRBJ2-7)
CASSYASTSSGGEQYF

SEQ ID NO: 354093 - protein, 16 aa, Homo sapiens
  CDR3 for alpha chain variable domain of TCR clone 177047 (TRAV3, TRAJ10)
CAVRDMRAGGGKKLTF

SEQ ID NO: 354094 - protein, 16 aa, Homo sapiens
  CDR3 for beta chain variable domain of TCR clone 177047 (TRBV19, TRBJ2-2)
CASSFPGQGLAGELFF

SEQ ID NO: 354095 - protein, 12 aa, Homo sapiens
  CDR3 for alpha chain variable domain of TCR clone 177048 (TRAV13-1, TRAJ16)
CAARYQMAEAAL

SEQ ID NO: 354096 - protein, 13 aa, Homo sapiens
  CDR3 for beta chain variable domain of TCR clone 177048 (TRBV4-1, TRBJ2-1)
CASSQAGGDEQFF

SEQ ID NO: 354097 - protein, 13 aa, Homo sapiens
  CDR3 for alpha chain variable domain of TCR clone 177049 (TRAV12-2, TRAJ20)
CAVYPSNDYKLSF

SEQ ID NO: 354098 - protein, 12 aa, Homo sapiens
  CDR3 for beta chain variable domain of TCR clone 177049 (TRBV6-6, TRBJ2-5)
CASNRQSGTQYF

SEQ ID NO: 354099 - protein, 16 aa, Homo sapiens
  CDR3 for alpha chain variable domain of TCR clone 177050 (TRAV30, TRAJ24)
CGTEIVDADRWGKFQL

SEQ ID NO: 354100 - protein, 14 aa, Homo sapiens
  CDR3 for beta chain variable domain of TCR clone 177050 (TRBV12-5, TRBJ2-5)
CASGSRTHQETQYF

SEQ ID NO: 354101 - protein, 13 aa, Homo sapiens
  CDR3 for alpha chain variable domain of TCR clone 177051 (TRAV29/DV5, TRAJ31)
CAASRNNNARRMF

SEQ ID NO: 354102 - protein, 12 aa, Homo sapiens
  CDR3 for beta chain variable domain of TCR clone 177051 (TRBV14, TRBJ2-7)
CASSLYKDAQYF

SEQ ID NO: 354103 - protein, 16 aa, Homo sapiens
  CDR3 for alpha chain variable domain of TCR clone 177052 (TRAV2, TRAJ26)
TTVLGPPGDYGQNFVF

SEQ ID NO: 354104 - protein, 17 aa, Homo sapiens
  CDR3 for beta chain variable domain of TCR clone 177052 (TRBV11-2, TRBJ2-1)
CASSLYPPGVEYNEQFF

SEQ ID NO: 354105 - protein, 13 aa, Homo sapiens
  CDR3 for alpha chain variable domain of TCR clone 177053 (TRAV12-1, TRAJ3)
CVVNPRGASKIIF

SEQ ID NO: 354106 - protein, 15 aa, Homo sapiens
  CDR3 for beta chain variable domain of TCR clone 177053 (TRBV2, TRBJ2-3)
CASSDFEKATDTQYF

SEQ ID NO: 354107 - protein, 11 aa, Homo sapiens
  CDR3 for alpha chain variable domain of TCR clone 177054 (TRAV2, TRAJ20)
CAVSDDYKLSF

SEQ ID NO: 354108 - protein, 12 aa, Homo sapiens
  CDR3 for beta chain variable domain of TCR clone 177054 (TRBV5-1, TRBJ1-2)
CASSQDTYGYTF

SEQ ID NO: 354109 - protein, 16 aa, Homo sapiens
  CDR3 for alpha chain variable domain of TCR clone 177055 (TRAV12-2, TRAJ50)
CAVGTATKTSYDKLIF

SEQ ID NO: 354110 - protein, 12 aa, Homo sapiens
  CDR3 for beta chain variable domain of TCR clone 177055 (TRBV12-4, TRBJ1-5)
CASSLGRQPHHF

SEQ ID NO: 354111 - protein, 15 aa, Homo sapiens
  CDR3 for alpha chain variable domain of TCR clone 177056 (TRAV12-1, TRAJ4)
CVVNPFSGGYNKLIF

SEQ ID NO: 354112 - protein, 15 aa, Homo sapiens
  CDR3 for beta chain variable domain of TCR clone 177056 (TRBV7-9, TRBJ2-7)
CASSLALAEAYEQYF

SEQ ID NO: 354113 - protein, 16 aa, Homo sapiens
  CDR3 for alpha chain variable domain of TCR clone 177057 (TRAV17, TRAJ52)
CATSNAGGTSYGKLTF

SEQ ID NO: 354114 - protein, 15 aa, Homo sapiens
  CDR3 for beta chain variable domain of TCR clone 177057 (TRBV2, TRBJ2-1)
CATLPSGLPYNEQFF

SEQ ID NO: 354115 - protein, 17 aa, Homo sapiens
  CDR3 for alpha chain variable domain of TCR clone 177058 (TRAV38-2/DV8, TRAJ45)
CAYRSRYSGGGADGLTF

SEQ ID NO: 354116 - protein, 17 aa, Homo sapiens
  CDR3 for beta chain variable domain of TCR clone 177058 (TRBV11-2, TRBJ2-1)
CASSLYPPGVEYNEQFF

SEQ ID NO: 354117 - protein, 11 aa, Homo sapiens
  CDR3 for alpha chain variable domain of TCR clone 177059 (TRAV3, TRAJ21)
RAVGNFNKFYF

SEQ ID NO: 354118 - protein, 16 aa, Homo sapiens
  CDR3 for beta chain variable domain of TCR clone 177059 (TRBV19, TRBJ2-1)
YASSKAGPSSYNEQFF

SEQ ID NO: 354119 - protein, 16 aa, Homo sapiens
  CDR3 for alpha chain variable domain of TCR clone 177060 (TRAV3, TRAJ28)
CAVLPRSGAGSYQLTC

SEQ ID NO: 354120 - protein, 13 aa, Homo sapiens
  CDR3 for beta chain variable domain of TCR clone 177060 (TRBV12-4, TRBJ2-5)
CASRLAVQETQYF

SEQ ID NO: 354121 - protein, 13 aa, Homo sapiens
  CDR3 for alpha chain variable domain of TCR clone 177061 (TRAV13-2, TRAJ8)
CAFMNTGFQKLVF

SEQ ID NO: 354122 - protein, 17 aa, Homo sapiens
  CDR3 for beta chain variable domain of TCR clone 177061 (TRBV28, TRBJ2-1)
CARSSARQALTYNEQFF

SEQ ID NO: 354123 - protein, 14 aa, Homo sapiens
  CDR3 for alpha chain variable domain of TCR clone 177062 (TRAV12-2, TRAJ13)
CAVKRTGGYQKVTF

SEQ ID NO: 354124 - protein, 15 aa, Homo sapiens
  CDR3 for beta chain variable domain of TCR clone 177062 (TRBV27, TRBJ2-1)
CSTSNGGGSSNEQFF

SEQ ID NO: 354125 - protein, 10 aa, Homo sapiens
  CDR3 for alpha chain variable domain of TCR clone 177063 (TRAV5, TRAJ34)
CAEDTDKLIF

SEQ ID NO: 354126 - protein, 12 aa, Homo sapiens
  CDR3 for beta chain variable domain of TCR clone 177063 (TRBV11-2, TRBJ2-2)
RASSLGGGELFF

SEQ ID NO: 354127 - protein, 14 aa, Homo sapiens
  CDR3 for alpha chain variable domain of TCR clone 177064 (TRAV12-1, TRAJ9)
CVVTGYTGGFKTIF

SEQ ID NO: 354128 - protein, 13 aa, Homo sapiens
  CDR3 for beta chain variable domain of TCR clone 177064 (TRBV19, TRBJ1-2)
CASSVPGQDGYTF

SEQ ID NO: 354129 - protein, 22 aa, Homo sapiens
  CDR3 for alpha chain variable domain of TCR clone 177065 (TRAV36/DV7, TRAJ50)
CAVEPENLLRQGDIWARDKLIS

SEQ ID NO: 354130 - protein, 15 aa, Homo sapiens
  CDR3 for beta chain variable domain of TCR clone 177065 (TRBV15, TRBJ1-3)
CATSRDRGPGNTIYF

SEQ ID NO: 354131 - protein, 21 aa, Homo sapiens
  CDR3 for alpha chain variable domain of TCR clone 177066 (TRAV8-4, TRAJ47)
HLTKPSAHMSDAADRGNKLVF

SEQ ID NO: 354132 - protein, 14 aa, Homo sapiens
  CDR3 for beta chain variable domain of TCR clone 177066 (TRBV12-4, TRBJ2-5)
CASSLWQKQETQYF

SEQ ID NO: 354133 - protein, 12 aa, Homo sapiens
  CDR3 for alpha chain variable domain of TCR clone 177067 (TRAV29/DV5, TRAJ49)
FAATDTGNQFYF

SEQ ID NO: 354134 - protein, 19 aa, Homo sapiens
  CDR3 for beta chain variable domain of TCR clone 177067 (TRBV25-1, TRBJ2-2)
CAILVYRVDRGRKTGQLFF

SEQ ID NO: 354135 - protein, 13 aa, Homo sapiens
  CDR3 for alpha chain variable domain of TCR clone 177068 (TRAV1-1, TRAJ15)
CAVVDQAGTALIF

SEQ ID NO: 354136 - protein, 14 aa, Homo sapiens
  CDR3 for beta chain variable domain of TCR clone 177068 (TRBV25-1, TRBJ1-1)
CASTHLGGNTEAFF

SEQ ID NO: 354137 - protein, 12 aa, Homo sapiens
  CDR3 for alpha chain variable domain of TCR clone 177069 (TRAV21, TRAJ33)
CAKMDSNYQLIW

SEQ ID NO: 354138 - protein, 16 aa, Homo sapiens
  CDR3 for beta chain variable domain of TCR clone 177069 (TRBV4-2, TRBJ1-1)
CASSQAGFGMNTEAFF

SEQ ID NO: 354139 - protein, 15 aa, Homo sapiens
  CDR3 for alpha chain variable domain of TCR clone 177070 (TRAV8-3, TRAJ27)
CAVGPSKTNAGKSTF

SEQ ID NO: 354140 - protein, 15 aa, Homo sapiens
  CDR3 for beta chain variable domain of TCR clone 177070 (TRBV7-2, TRBJ2-1)
CASSPTGGGEVEQFF

SEQ ID NO: 354141 - protein, 11 aa, Homo sapiens
  CDR3 for alpha chain variable domain of TCR clone 177071 (TRAV27, TRAJ47)
SIVAYGNKLVF

SEQ ID NO: 354142 - protein, 18 aa, Homo sapiens
  CDR3 for beta chain variable domain of TCR clone 177071 (TRBV2, TRBJ2-1)
CASRGLAGGPRTYNEQFF

SEQ ID NO: 354143 - protein, 12 aa, Homo sapiens
  CDR3 for alpha chain variable domain of TCR clone 177072 (TRAV1-1, TRAJ15)
CAVGQAGTALIF

SEQ ID NO: 354144 - protein, 18 aa, Homo sapiens
  CDR3 for beta chain variable domain of TCR clone 177072 (TRBV28, TRBJ2-1)
CASSSPSGLAGAIYEQFF

SEQ ID NO: 354145 - protein, 15 aa, Homo sapiens
  CDR3 for alpha chain variable domain of TCR clone 177073 (TRAV12-2, TRAJ22)
CAVNGASGSARKLTF

SEQ ID NO: 354146 - protein, 15 aa, Homo sapiens
  CDR3 for beta chain variable domain of TCR clone 177073 (TRBV18, TRBJ2-2)
CASSPPVGFTGELFF

SEQ ID NO: 354147 - protein, 17 aa, Homo sapiens
  CDR3 for alpha chain variable domain of TCR clone 177074 (TRAV26-1, TRAJ37)
CIVRVITVSNNTGKLIF

SEQ ID NO: 354148 - protein, 15 aa, Homo sapiens
  CDR3 for beta chain variable domain of TCR clone 177074 (TRBV6-3, TRBJ2-7)
CASSSPGTVFYEQYF

SEQ ID NO: 354149 - protein, 17 aa, Homo sapiens
  CDR3 for alpha chain variable domain of TCR clone 177075 (TRAV3, TRAJ12)
CAVRDGGRVDSSYKLIF

SEQ ID NO: 354150 - protein, 16 aa, Homo sapiens
  CDR3 for beta chain variable domain of TCR clone 177075 (TRBV9, TRBJ2-2)
CASSAMGKGNTGELFF

SEQ ID NO: 354151 - protein, 13 aa, Homo sapiens
  CDR3 for alpha chain variable domain of TCR clone 177076 (TRAV8-6, TRAJ49)
CAVIMNTGNQFYF

SEQ ID NO: 354152 - protein, 15 aa, Homo sapiens
  CDR3 for beta chain variable domain of TCR clone 177076 (TRBV6-3, TRBJ2-7)
CASSSPGTVFYEQYF

SEQ ID NO: 354153 - protein, 13 aa, Homo sapiens
  CDR3 for alpha chain variable domain of TCR clone 177077 (TRAV13-1, TRAJ21)
CAARIYNFNKFYF

SEQ ID NO: 354154 - protein, 14 aa, Homo sapiens
  CDR3 for beta chain variable domain of TCR clone 177077 (TRBV7-6, TRBJ2-3)
CASSLGTVTDTQYF

SEQ ID NO: 354155 - protein, 15 aa, Homo sapiens
  CDR3 for alpha chain variable domain of TCR clone 177078 (TRAV34, TRAJ38)
CGADFTPGNNRKLIW

SEQ ID NO: 354156 - protein, 17 aa, Homo sapiens
  CDR3 for beta chain variable domain of TCR clone 177078 (TRBV18, TRBJ2-1)
CASSPRVAGGSYNEQFF

SEQ ID NO: 354157 - protein, 15 aa, Homo sapiens
  CDR3 for alpha chain variable domain of TCR clone 177079 (TRAV3, TRAJ47)
CAVRDIGEYGNKQVF

SEQ ID NO: 354158 - protein, 14 aa, Homo sapiens
  CDR3 for beta chain variable domain of TCR clone 177079 (TRBV13, TRBJ2-5)
CASSLERVGETQYF

SEQ ID NO: 354159 - protein, 16 aa, Homo sapiens
  CDR3 for alpha chain variable domain of TCR clone 177080 (TRAV23/DV6, )
CADIQNPDPAVYQLRN

SEQ ID NO: 354160 - protein, 13 aa, Homo sapiens
  CDR3 for beta chain variable domain of TCR clone 177080 (TRBV28, TRBJ2-7)
CASRSSGVYEQYF

SEQ ID NO: 354161 - protein, 14 aa, Homo sapiens
  CDR3 for alpha chain variable domain of TCR clone 177081 (TRAV1-2, TRAJ16)
CAVNRFSDGQKLPF

SEQ ID NO: 354162 - protein, 13 aa, Homo sapiens
  CDR3 for beta chain variable domain of TCR clone 177081 (TRBV7-9, TRBJ1-2)
CASSLRQNYGYTF

SEQ ID NO: 354163 - protein, 19 aa, Homo sapiens
  CDR3 for alpha chain variable domain of TCR clone 177082 (TRAV26-1, TRAJ28)
CIVRVAHASSGAGSYQLTF

SEQ ID NO: 354164 - protein, 17 aa, Homo sapiens
  CDR3 for beta chain variable domain of TCR clone 177082 (TRBV9, TRBJ2-2)
CASSVGGQGTDTGELFF

SEQ ID NO: 354165 - protein, 14 aa, Homo sapiens
  CDR3 for alpha chain variable domain of TCR clone 177083 (TRAV2, TRAJ26)
CAVERDNYGQNFVF

SEQ ID NO: 354166 - protein, 15 aa, Homo sapiens
  CDR3 for beta chain variable domain of TCR clone 177083 (TRBV28, TRBJ2-4)
CASSAPLLAKNMQYF

SEQ ID NO: 354167 - protein, 13 aa, Homo sapiens
  CDR3 for alpha chain variable domain of TCR clone 177084 (TRAV27, TRAJ57)
CAGFQGGSETLVF

SEQ ID NO: 354168 - protein, 14 aa, Homo sapiens
  CDR3 for beta chain variable domain of TCR clone 177084 (TRBV20-1, TRBJ1-2)
CSGRKDGRAYGYTF

SEQ ID NO: 354169 - protein, 14 aa, Homo sapiens
  CDR3 for alpha chain variable domain of TCR clone 177085 (TRAV1-2, TRAJ8)
CAVREYTGFQKLVF

SEQ ID NO: 354170 - protein, 13 aa, Homo sapiens
  CDR3 for beta chain variable domain of TCR clone 177085 (TRBV10-3, TRBJ2-7)
CASKLAVNYEQYF

SEQ ID NO: 354171 - protein, 12 aa, Homo sapiens
  CDR3 for alpha chain variable domain of TCR clone 177086 (TRAV12-3, TRAJ17)
CAMTLTGNKLTF

SEQ ID NO: 354172 - protein, 15 aa, Homo sapiens
  CDR3 for beta chain variable domain of TCR clone 177086 (TRBV5-7, TRBJ1-2)
CAGSSPGQGNYGYTF

SEQ ID NO: 354173 - protein, 14 aa, Homo sapiens
  CDR3 for alpha chain variable domain of TCR clone 177087 (TRAV30, TRAJ33)
CGTERRFSNYQLIW

SEQ ID NO: 354174 - protein, 16 aa, Homo sapiens
  CDR3 for beta chain variable domain of TCR clone 177087 (TRBV7-3, TRBJ2-2)
CASSLKRGTLPGELFF

SEQ ID NO: 354175 - protein, 12 aa, Homo sapiens
  CDR3 for alpha chain variable domain of TCR clone 177088 (TRAV30, TRAJ43)
CGTEERGNDMRF

SEQ ID NO: 354176 - protein, 14 aa, Homo sapiens
  CDR3 for beta chain variable domain of TCR clone 177088 (TRBV7-2, TRBJ2-7)
CASSPRTSFYEQYF

SEQ ID NO: 354177 - protein, 13 aa, Homo sapiens
  CDR3 for alpha chain variable domain of TCR clone 177089 (TRAV27, TRAJ42)
CAGARGGQGNLIF

SEQ ID NO: 354178 - protein, 15 aa, Homo sapiens
  CDR3 for beta chain variable domain of TCR clone 177089 (TRBV10-3, TRBJ2-2)
CAIRTDGEDTGELFF

SEQ ID NO: 354179 - protein, 15 aa, Homo sapiens
  CDR3 for alpha chain variable domain of TCR clone 177090 (TRAV8-3, TRAJ45)
CTSSYSGGGADRLTF

SEQ ID NO: 354180 - protein, 13 aa, Homo sapiens
  CDR3 for beta chain variable domain of TCR clone 177090 (TRBV10-3, TRBJ2-7)
CASKLAVNYEQYF

SEQ ID NO: 354181 - protein, 15 aa, Homo sapiens
  CDR3 for alpha chain variable domain of TCR clone 177091 (TRAV3, TRAJ22)
CAVRDRGGSARQLTF

SEQ ID NO: 354182 - protein, 12 aa, Homo sapiens
  CDR3 for beta chain variable domain of TCR clone 177091 (TRBV29-1, TRBJ2-3)
CSVTGGADTHYF

SEQ ID NO: 354183 - protein, 14 aa, Homo sapiens
  CDR3 for alpha chain variable domain of TCR clone 177092 (TRAV12-2, TRAJ44)
CAVNKAGTARKLTF

SEQ ID NO: 354184 - protein, 12 aa, Homo sapiens
  CDR3 for beta chain variable domain of TCR clone 177092 (TRBV19, TRBJ1-4)
CASKDWPGGLFF

SEQ ID NO: 354185 - protein, 22 aa, Homo sapiens
  CDR3 for alpha chain variable domain of TCR clone 177093 (TRAV3, )
CAVRDCLNAGNNNIQNPDPSVY

SEQ ID NO: 354186 - protein, 19 aa, Homo sapiens
  CDR3 for beta chain variable domain of TCR clone 177093 (TRBV7-2, TRBJ2-3)
CASSFLSRNWGGGTDTQYF

SEQ ID NO: 354187 - protein, 12 aa, Homo sapiens
  CDR3 for alpha chain variable domain of TCR clone 177094 (TRAV35, TRAJ49)
CAGWNTGNQFYF

SEQ ID NO: 354188 - protein, 14 aa, Homo sapiens
  CDR3 for beta chain variable domain of TCR clone 177094 (TRBV7-3, TRBJ1-1)
CASSLKGGNTEAFF

SEQ ID NO: 354189 - protein, 13 aa, Homo sapiens
  CDR3 for alpha chain variable domain of TCR clone 177095 (TRAV13-2, TRAJ13)
CADLSGGYQKVAF

SEQ ID NO: 354190 - protein, 15 aa, Homo sapiens
  CDR3 for beta chain variable domain of TCR clone 177095 (TRBV19, TRBJ1-1)
CASSIGGGRNTEAFF

SEQ ID NO: 354191 - protein, 14 aa, Homo sapiens
  CDR3 for alpha chain variable domain of TCR clone 177096 (TRAV12-3, TRAJ10)
SHLPLTGGGNKLTF

SEQ ID NO: 354192 - protein, 16 aa, Homo sapiens
  CDR3 for beta chain variable domain of TCR clone 177096 (TRBV4-1, TRBJ1-4)
CASSRDLRRGGEKLFF

SEQ ID NO: 354193 - protein, 13 aa, Homo sapiens
  CDR3 for alpha chain variable domain of TCR clone 177097 (TRAV8-3, TRAJ43)
CAGGPDNNNDMRF

SEQ ID NO: 354194 - protein, 14 aa, Homo sapiens
  CDR3 for beta chain variable domain of TCR clone 177097 (TRBV19, TRBJ2-1)
CASPTFVLSGEQFF

SEQ ID NO: 354195 - protein, 13 aa, Homo sapiens
  CDR3 for alpha chain variable domain of TCR clone 177098 (TRAV8-6, TRAJ8)
CAVSNTGFQKLVF

SEQ ID NO: 354196 - protein, 15 aa, Homo sapiens
  CDR3 for beta chain variable domain of TCR clone 177098 (TRBV28, TRBJ2-5)
CASSSARTIQETQYF

SEQ ID NO: 354197 - protein, 13 aa, Homo sapiens
  CDR3 for alpha chain variable domain of TCR clone 177099 (TRAV36/DV7, TRAJ49)
CAVEANTGNQFYF

SEQ ID NO: 354198 - protein, 13 aa, Homo sapiens
  CDR3 for beta chain variable domain of TCR clone 177099 (TRBV10-3, TRBJ2-7)
RASKLAVNYEQYF

SEQ ID NO: 354199 - protein, 18 aa, Homo sapiens
  CDR3 for alpha chain variable domain of TCR clone 177100 (TRAV13-1, TRAJ52)
CAASKRSAGGISYGKLTF

SEQ ID NO: 354200 - protein, 13 aa, Homo sapiens
  CDR3 for beta chain variable domain of TCR clone 177100 (TRBV12-4, TRBJ1-2)
CASSLRQGKGYTF

SEQ ID NO: 354201 - protein, 12 aa, Homo sapiens
  CDR3 for alpha chain variable domain of TCR clone 177101 (TRAV36/DV7, TRAJ37)
CSCYGNTGKLIF

SEQ ID NO: 354202 - protein, 14 aa, Homo sapiens
  CDR3 for beta chain variable domain of TCR clone 177101 (TRBV6-3, TRBJ1-4)
CASSGQNLNEKLFF

SEQ ID NO: 354203 - protein, 15 aa, Homo sapiens
  CDR3 for alpha chain variable domain of TCR clone 177102 (TRAV12-3, TRAJ6)
CAMSSTTGGSYIPTF

SEQ ID NO: 354204 - protein, 15 aa, Homo sapiens
  CDR3 for beta chain variable domain of TCR clone 177102 (TRBV28, TRBJ2-1)
CASSIIAGGRSEQFF

SEQ ID NO: 354205 - protein, 13 aa, Homo sapiens
  CDR3 for alpha chain variable domain of TCR clone 177103 (TRAV25, TRAJ30)
CAGRVDRDDKIIF

SEQ ID NO: 354206 - protein, 17 aa, Homo sapiens
  CDR3 for beta chain variable domain of TCR clone 177103 (TRBV7-9, TRBJ2-6)
CASSLGAGYSGANVLTF

SEQ ID NO: 354207 - protein, 14 aa, Homo sapiens
  CDR3 for alpha chain variable domain of TCR clone 177104 (TRAV12-1, TRAJ17)
CVVNYKAAGNKLTF

SEQ ID NO: 354208 - protein, 14 aa, Homo sapiens
  CDR3 for beta chain variable domain of TCR clone 177104 (TRBV5-1, TRBJ2-7)
CASSRGESLYEQYF

SEQ ID NO: 354209 - protein, 15 aa, Homo sapiens
  CDR3 for alpha chain variable domain of TCR clone 177105 (TRAV8-3, TRAJ45)
CASSYSGGGADGLTV

SEQ ID NO: 354210 - protein, 16 aa, Homo sapiens
  CDR3 for beta chain variable domain of TCR clone 177105 (TRBV27, TRBJ2-2)
CASSFRGLVRTGELFF

SEQ ID NO: 354211 - protein, 14 aa, Homo sapiens
  CDR3 for alpha chain variable domain of TCR clone 177106 (TRAV1-2, TRAJ8)
CAVRGDTGFQKLVF

SEQ ID NO: 354212 - protein, 14 aa, Homo sapiens
  CDR3 for beta chain variable domain of TCR clone 177106 (TRBV11-2, TRBJ2-5)
CASSRTGGIETQYF

SEQ ID NO: 354213 - protein, 13 aa, Homo sapiens
  CDR3 for alpha chain variable domain of TCR clone 177107 (TRAV3, TRAJ29)
CAVRDWGNTPLVV

SEQ ID NO: 354214 - protein, 15 aa, Homo sapiens
  CDR3 for beta chain variable domain of TCR clone 177107 (TRBV12-4, TRBJ2-5)
CASIGRTGEGETQYF

SEQ ID NO: 354215 - protein, 15 aa, Homo sapiens
  CDR3 for alpha chain variable domain of TCR clone 177108 (TRAV8-4, TRAJ37)
CAVTYGSSNTGKLIF

SEQ ID NO: 354216 - protein, 13 aa, Homo sapiens
  CDR3 for beta chain variable domain of TCR clone 177108 (TRBV12-4, TRBJ2-5)
CASSLGGSWTQYF

SEQ ID NO: 354217 - protein, 13 aa, Homo sapiens
  CDR3 for alpha chain variable domain of TCR clone 177109 (TRAV12-2, TRAJ34)
CAVRGYNTDKLIF

SEQ ID NO: 354218 - protein, 18 aa, Homo sapiens
  CDR3 for beta chain variable domain of TCR clone 177109 (TRBV11-2, TRBJ2-3)
CASSLGGDSRGAPNTQYF

SEQ ID NO: 354219 - protein, 12 aa, Homo sapiens
  CDR3 for alpha chain variable domain of TCR clone 177110 (TRAV8-4, TRAJ37)
CAKSSNTGKLIF

SEQ ID NO: 354220 - protein, 12 aa, Homo sapiens
  CDR3 for beta chain variable domain of TCR clone 177110 (TRBV11-2, TRBJ2-1)
CASSPGNNEQFF

SEQ ID NO: 354221 - protein, 15 aa, Homo sapiens
  CDR3 for alpha chain variable domain of TCR clone 177111 (TRAV26-1, TRAJ22)
CIVRVSFWFSKATDL

SEQ ID NO: 354222 - protein, 15 aa, Homo sapiens
  CDR3 for beta chain variable domain of TCR clone 177111 (TRBV20-1, TRBJ2-7)
CSARDRVSGMDEQYF

SEQ ID NO: 354223 - protein, 14 aa, Homo sapiens
  CDR3 for alpha chain variable domain of TCR clone 177112 (TRAV9-2, TRAJ39)
CALYIYNAGNMLTF

SEQ ID NO: 354224 - protein, 15 aa, Homo sapiens
  CDR3 for beta chain variable domain of TCR clone 177112 (TRBV28, TRBJ2-5)
CASSQTSGSLETQYF

SEQ ID NO: 354225 - protein, 14 aa, Homo sapiens
  CDR3 for alpha chain variable domain of TCR clone 177113 (TRAV4, TRAJ5)
CLVVPDTGRRALTF

SEQ ID NO: 354226 - protein, 16 aa, Homo sapiens
  CDR3 for beta chain variable domain of TCR clone 177113 (TRBV27, TRBJ2-2)
CASSSTGGGDTGELFF

SEQ ID NO: 354227 - protein, 12 aa, Homo sapiens
  CDR3 for alpha chain variable domain of TCR clone 177114 (TRAV12-3, TRAJ17)
CAMTLTGIKLTF

SEQ ID NO: 354228 - protein, 14 aa, Homo sapiens
  CDR3 for beta chain variable domain of TCR clone 177114 (TRBV4-1, TRBJ2-7)
CASSQDREHVEQYF

SEQ ID NO: 354229 - protein, 13 aa, Homo sapiens
  CDR3 for alpha chain variable domain of TCR clone 177115 (TRAV26-1, TRAJ54)
CIVRVKGAQKLVF

SEQ ID NO: 354230 - protein, 15 aa, Homo sapiens
  CDR3 for beta chain variable domain of TCR clone 177115 (TRBV20-1, TRBJ2-1)
CSAQPGGGPYSEQFF

SEQ ID NO: 354231 - protein, 14 aa, Homo sapiens
  CDR3 for alpha chain variable domain of TCR clone 177116 (TRAV13-2, TRAJ32)
CAERLGGATNKLIF

SEQ ID NO: 354232 - protein, 15 aa, Homo sapiens
  CDR3 for beta chain variable domain of TCR clone 177116 (TRBV20-1, TRBJ1-2)
CSARDSRGRNYGYTF

SEQ ID NO: 354233 - protein, 15 aa, Homo sapiens
  CDR3 for alpha chain variable domain of TCR clone 177117 (TRAV27, TRAJ38)
CAARRNAGNNRKLVW

SEQ ID NO: 354234 - protein, 13 aa, Homo sapiens
  CDR3 for beta chain variable domain of TCR clone 177117 (TRBV10-3, TRBJ2-7)
CASKLAVNYEQYF

SEQ ID NO: 354235 - protein, 14 aa, Homo sapiens
  CDR3 for alpha chain variable domain of TCR clone 177118 (TRAV8-4, TRAJ23)
CAVSAPGSGGKLIF

SEQ ID NO: 354236 - protein, 17 aa, Homo sapiens
  CDR3 for beta chain variable domain of TCR clone 177118 (TRBV4-3, TRBJ2-3)
CASSQDPLAGAVVTQYF

SEQ ID NO: 354237 - protein, 14 aa, Homo sapiens
  CDR3 for alpha chain variable domain of TCR clone 177119 (TRAV13-1, TRAJ40)
CAASMTSGTYKYIF

SEQ ID NO: 354238 - protein, 15 aa, Homo sapiens
  CDR3 for beta chain variable domain of TCR clone 177119 (TRBV7-3, TRBJ2-1)
CASTPTGGGEVEQFF

SEQ ID NO: 354239 - protein, 13 aa, Homo sapiens
  CDR3 for alpha chain variable domain of TCR clone 177120 (TRAV27, TRAJ8)
CAGGPTGFQKLVF

SEQ ID NO: 354240 - protein, 15 aa, Homo sapiens
  CDR3 for beta chain variable domain of TCR clone 177120 (TRBV6-1, TRBJ2-7)
CASSEGMGDFYKQYF

SEQ ID NO: 354241 - protein, 12 aa, Homo sapiens
  CDR3 for alpha chain variable domain of TCR clone 177121 (TRAV29/DV5, TRAJ22)
CAASGSARQLTF

SEQ ID NO: 354242 - protein, 15 aa, Homo sapiens
  CDR3 for beta chain variable domain of TCR clone 177121 (TRBV10-2, TRBJ2-6)
CASSEQGTGANVLTF

SEQ ID NO: 354243 - protein, 14 aa, Homo sapiens
  CDR3 for alpha chain variable domain of TCR clone 177122 (TRAV8-4, TRAJ13)
CAVTLSGGYQKVTF

SEQ ID NO: 354244 - protein, 14 aa, Homo sapiens
  CDR3 for beta chain variable domain of TCR clone 177122 (TRBV15, TRBJ2-7)
CATSRVARGYEQYF

SEQ ID NO: 354245 - protein, 15 aa, Homo sapiens
  CDR3 for alpha chain variable domain of TCR clone 177123 (TRAV12-3, TRAJ17)
CAMSPSLAAGNKLTF

SEQ ID NO: 354246 - protein, 15 aa, Homo sapiens
  CDR3 for beta chain variable domain of TCR clone 177123 (TRBV9, TRBJ1-6)
CASSVAGTGDSPLLF

SEQ ID NO: 354247 - protein, 13 aa, Homo sapiens
  CDR3 for alpha chain variable domain of TCR clone 177124 (TRAV30, TRAJ24)
CGTVTDSWGKLQF

SEQ ID NO: 354248 - protein, 14 aa, Homo sapiens
  CDR3 for beta chain variable domain of TCR clone 177124 (TRBV6-3, TRBJ2-2)
SASTYTPDTGELFF

SEQ ID NO: 354249 - protein, 14 aa, Homo sapiens
  CDR3 for alpha chain variable domain of TCR clone 177125 (TRAV3, TRAJ33)
CAVRDMGSNYQLIW

SEQ ID NO: 354250 - protein, 17 aa, Homo sapiens
  CDR3 for beta chain variable domain of TCR clone 177125 (TRBV19, TRBJ2-1)
CASSIWSARPTHNEQFF

SEQ ID NO: 354251 - protein, 12 aa, Homo sapiens
  CDR3 for alpha chain variable domain of TCR clone 177126 (TRAV3, TRAJ27)
CSVRDKAGKSTF

SEQ ID NO: 354252 - protein, 14 aa, Homo sapiens
  CDR3 for beta chain variable domain of TCR clone 177126 (TRBV5-1, TRBJ1-2)
CASSVDSTNYGYTF

SEQ ID NO: 354253 - protein, 16 aa, Homo sapiens
  CDR3 for alpha chain variable domain of TCR clone 177127 (TRAV3, TRAJ10)
CAVRDMRAGGGNKLTF

SEQ ID NO: 354254 - protein, 19 aa, Homo sapiens
  CDR3 for beta chain variable domain of TCR clone 177127 (TRBV6-3, TRBJ1-2)
CASSYSKGLTGPPNYGYTF

SEQ ID NO: 354255 - protein, 15 aa, Homo sapiens
  CDR3 for alpha chain variable domain of TCR clone 177128 (TRAV8-3, TRAJ27)
CAVGPSKTNAGKSTF

SEQ ID NO: 354256 - protein, 15 aa, Homo sapiens
  CDR3 for beta chain variable domain of TCR clone 177128 (TRBV7-2, TRBJ2-1)
CASSAGIAGGNEQFF

SEQ ID NO: 354257 - protein, 18 aa, Homo sapiens
  CDR3 for alpha chain variable domain of TCR clone 177129 (TRAV21, TRAJ52)
CAVRPSPAGGNSYGKLTL

SEQ ID NO: 354258 - protein, 14 aa, Homo sapiens
  CDR3 for beta chain variable domain of TCR clone 177129 (TRBV4-2, TRBJ2-1)
CASGLDRAYNEQFF

SEQ ID NO: 354259 - protein, 14 aa, Homo sapiens
  CDR3 for alpha chain variable domain of TCR clone 177130 (TRAV12-3, TRAJ10)
SHLPLTGGGNKLTF

SEQ ID NO: 354260 - protein, 16 aa, Homo sapiens
  CDR3 for beta chain variable domain of TCR clone 177130 (TRBV15, TRBJ1-1)
CTSRVGGADGDTEAFF

SEQ ID NO: 354261 - protein, 16 aa, Homo sapiens
  CDR3 for alpha chain variable domain of TCR clone 177131 (TRAV20, TRAJ22)
CAVQASSSGSARQLTF

SEQ ID NO: 354262 - protein, 13 aa, Homo sapiens
  CDR3 for beta chain variable domain of TCR clone 177131 (TRBV7-2, TRBJ1-1)
CASSFGGNTEAFF

SEQ ID NO: 354263 - protein, 13 aa, Homo sapiens
  CDR3 for alpha chain variable domain of TCR clone 177132 (TRAV21, TRAJ57)
CAVIEGGSEKLVF

SEQ ID NO: 354264 - protein, 16 aa, Homo sapiens
  CDR3 for beta chain variable domain of TCR clone 177132 (TRBV27, TRBJ2-2)
CASSSSGVSNTGELFF

SEQ ID NO: 354265 - protein, 13 aa, Homo sapiens
  CDR3 for alpha chain variable domain of TCR clone 177133 (TRAV12-3, TRAJ47)
GAMKKEYGNKLVF

SEQ ID NO: 354266 - protein, 15 aa, Homo sapiens
  CDR3 for beta chain variable domain of TCR clone 177133 (TRBV20-1, TRBJ2-7)
CSARDRVSGMDEQYF

SEQ ID NO: 354267 - protein, 15 aa, Homo sapiens
  CDR3 for alpha chain variable domain of TCR clone 177134 (TRAV16, TRAJ42)
CALRRGGGSQGNLIF

SEQ ID NO: 354268 - protein, 16 aa, Homo sapiens
  CDR3 for beta chain variable domain of TCR clone 177134 (TRBV13, TRBJ2-2)
CASSPRTGEHTGELFF

SEQ ID NO: 354269 - protein, 12 aa, Homo sapiens
  CDR3 for alpha chain variable domain of TCR clone 177135 (TRAV17, TRAJ12)
CATLRSSYKLIC

SEQ ID NO: 354270 - protein, 17 aa, Homo sapiens
  CDR3 for beta chain variable domain of TCR clone 177135 (TRBV19, TRBJ1-5)
CASSPGRTFYSNQPQHF

SEQ ID NO: 354271 - protein, 14 aa, Homo sapiens
  CDR3 for alpha chain variable domain of TCR clone 177136 (TRAV29/DV5, TRAJ28)
CAATEGAGSYQLTF

SEQ ID NO: 354272 - protein, 17 aa, Homo sapiens
  CDR3 for beta chain variable domain of TCR clone 177136 (TRBV20-1, TRBJ2-1)
CSASSSGLAGSYNEQFF

SEQ ID NO: 354273 - protein, 15 aa, Homo sapiens
  CDR3 for alpha chain variable domain of TCR clone 177137 (TRAV8-3, TRAJ45)
CASSYSGGCADGLTF

SEQ ID NO: 354274 - protein, 15 aa, Homo sapiens
  CDR3 for beta chain variable domain of TCR clone 177137 (TRBV18, TRBJ1-1)
CASSPRQGENTEAFF

SEQ ID NO: 354275 - protein, 14 aa, Homo sapiens
  CDR3 for alpha chain variable domain of TCR clone 177138 (TRAV12-3, TRAJ9)
CAMSPNTGGFKTIF

SEQ ID NO: 354276 - protein, 17 aa, Homo sapiens
  CDR3 for beta chain variable domain of TCR clone 177138 (TRBV7-2, TRBJ1-2)
CASSSRAGRGIVYGYTF

SEQ ID NO: 354277 - protein, 15 aa, Homo sapiens
  CDR3 for alpha chain variable domain of TCR clone 177139 (TRAV23/DV6, TRAJ18)
CAARYRGPTLGRLYF

SEQ ID NO: 354278 - protein, 15 aa, Homo sapiens
  CDR3 for beta chain variable domain of TCR clone 177139 (TRBV7-8, TRBJ2-1)
CASSLADSLYNEQFF

SEQ ID NO: 354279 - protein, 12 aa, Homo sapiens
  CDR3 for alpha chain variable domain of TCR clone 177140 (TRAV12-3, TRAJ17)
CVMTLTGNKLTF

SEQ ID NO: 354280 - protein, 16 aa, Homo sapiens
  CDR3 for beta chain variable domain of TCR clone 177140 (TRBV4-2, TRBJ1-1)
CASSQAGFGMNTEAFF

SEQ ID NO: 354281 - protein, 13 aa, Homo sapiens
  CDR3 for alpha chain variable domain of TCR clone 177141 (TRAV30, TRAJ6)
CGFIEGGSYIPTF

SEQ ID NO: 354282 - protein, 14 aa, Homo sapiens
  CDR3 for beta chain variable domain of TCR clone 177141 (TRBV7-6, TRBJ2-3)
CASSVAGGTDTQYF

SEQ ID NO: 354283 - protein, 18 aa, Homo sapiens
  CDR3 for alpha chain variable domain of TCR clone 177142 (TRAV13-1, TRAJ52)
CAASKRSAGGTSYGKLTF

SEQ ID NO: 354284 - protein, 15 aa, Homo sapiens
  CDR3 for beta chain variable domain of TCR clone 177142 (TRBV20-1, TRBJ1-1)
CSASRRVTGNTEAFF

SEQ ID NO: 354285 - protein, 15 aa, Homo sapiens
  CDR3 for alpha chain variable domain of TCR clone 177143 (TRAV26-1, TRAJ29)
CIVRVEGSGNTPLVF

SEQ ID NO: 354286 - protein, 13 aa, Homo sapiens
  CDR3 for beta chain variable domain of TCR clone 177143 (TRBV19, TRBJ1-2)
CASSVAGQDGYTF

SEQ ID NO: 354287 - protein, 11 aa, Homo sapiens
  CDR3 for alpha chain variable domain of TCR clone 177144 (TRAV21, TRAJ34)
CAVTNTDKLIF

SEQ ID NO: 354288 - protein, 21 aa, Homo sapiens
  CDR3 for beta chain variable domain of TCR clone 177144 (TRBV20-1, TRBJ2-1)
CSARSPSGGPPTMSSSSGQGH

SEQ ID NO: 354289 - protein, 13 aa, Homo sapiens
  CDR3 for alpha chain variable domain of TCR clone 177145 (TRAV3, TRAJ21)
CAVREPDFNKFYF

SEQ ID NO: 354290 - protein, 18 aa, Homo sapiens
  CDR3 for beta chain variable domain of TCR clone 177145 (TRBV11-2, TRBJ2-3)
CASSLGGASRGAPNTQYC

SEQ ID NO: 354291 - protein, 14 aa, Homo sapiens
  CDR3 for alpha chain variable domain of TCR clone 177146 (TRAV12-1, TRAJ30)
CVVNIGGRDDKIIF

SEQ ID NO: 354292 - protein, 13 aa, Homo sapiens
  CDR3 for beta chain variable domain of TCR clone 177146 (TRBV12-5, TRBJ2-1)
CASGLGRVNEQFF

SEQ ID NO: 354293 - protein, 10 aa, Homo sapiens
  CDR3 for alpha chain variable domain of TCR clone 177147 (TRAV1-2, TRAJ20)
CVPNDYKLSF

SEQ ID NO: 354294 - protein, 13 aa, Homo sapiens
  CDR3 for beta chain variable domain of TCR clone 177147 (TRBV7-9, TRBJ1-2)
CASSLKQNYGCTF

SEQ ID NO: 354295 - protein, 12 aa, Homo sapiens
  CDR3 for alpha chain variable domain of TCR clone 177148 (TRAV3, TRAJ31)
CAAQRVNARLMF

SEQ ID NO: 354296 - protein, 14 aa, Homo sapiens
  CDR3 for beta chain variable domain of TCR clone 177148 (TRBV5-5, TRBJ1-5)
CASSGQGVDQPQHF

SEQ ID NO: 354297 - protein, 14 aa, Homo sapiens
  CDR3 for alpha chain variable domain of TCR clone 177149 (TRAV2, TRAJ39)
CAVEGDNAGNMLTF

SEQ ID NO: 354298 - protein, 13 aa, Homo sapiens
  CDR3 for beta chain variable domain of TCR clone 177149 (TRBV19, TRBJ2-7)
CASSPRQSYEQYF

SEQ ID NO: 354299 - protein, 13 aa, Homo sapiens
  CDR3 for alpha chain variable domain of TCR clone 177150 (TRAV12-2, TRAJ40)
CAVKRTGTDKYIF

SEQ ID NO: 354300 - protein, 15 aa, Homo sapiens
  CDR3 for beta chain variable domain of TCR clone 177150 (TRBV12-4, TRBJ1-2)
CASSPITGGGYGYTF

SEQ ID NO: 354301 - protein, 15 aa, Homo sapiens
  CDR3 for alpha chain variable domain of TCR clone 177151 (TRAV29/DV5, TRAJ24)
CAASGATDSWGKFQF

SEQ ID NO: 354302 - protein, 14 aa, Homo sapiens
  CDR3 for beta chain variable domain of TCR clone 177151 (TRBV12-5, TRBJ2-5)
CASGSRTHQATQYF

SEQ ID NO: 354303 - protein, 19 aa, Homo sapiens
  CDR3 for alpha chain variable domain of TCR clone 177152 (TRAV8-3, TRAJ34)
LSTSVLWVWGLRNTDKLIF

SEQ ID NO: 354304 - protein, 15 aa, Homo sapiens
  CDR3 for beta chain variable domain of TCR clone 177152 (TRBV7-8, TRBJ2-1)
CASSLHGGPYNEQFF

SEQ ID NO: 354305 - protein, 10 aa, Homo sapiens
  CDR3 for alpha chain variable domain of TCR clone 177153 (TRAV13-1, TRAJ27)
CAPLARQINL

SEQ ID NO: 354306 - protein, 13 aa, Homo sapiens
  CDR3 for beta chain variable domain of TCR clone 177153 (TRBV7-3, TRBJ1-1)
CASSQDWGAEAFC

SEQ ID NO: 354307 - protein, 15 aa, Homo sapiens
  CDR3 for alpha chain variable domain of TCR clone 177154 (TRAV3, TRAJ22)
CAVRDRGGSARQLTF

SEQ ID NO: 354308 - protein, 15 aa, Homo sapiens
  CDR3 for beta chain variable domain of TCR clone 177154 (TRBV19, TRBJ1-2)
CASTPGQVANYSYTF

SEQ ID NO: 354309 - protein, 13 aa, Homo sapiens
  CDR3 for alpha chain variable domain of TCR clone 177155 (TRAV3, TRAJ33)
CAVRDRINYQLIW

SEQ ID NO: 354310 - protein, 16 aa, Homo sapiens
  CDR3 for beta chain variable domain of TCR clone 177155 (TRBV4-2, TRBJ2-7)
CASSQDRGTSSYEQYF

SEQ ID NO: 354311 - protein, 12 aa, Homo sapiens
  CDR3 for alpha chain variable domain of TCR clone 177156 (TRAV26-1, TRAJ54)
CIGGWGAQKLVF

SEQ ID NO: 354312 - protein, 14 aa, Homo sapiens
  CDR3 for beta chain variable domain of TCR clone 177156 (TRBV11-2, TRBJ1-2)
RASSSGQAGDGYTF

SEQ ID NO: 354313 - protein, 13 aa, Homo sapiens
  CDR3 for alpha chain variable domain of TCR clone 177157 (TRAV12-3, TRAJ35)
CAMAIGFGNVLHC

SEQ ID NO: 354314 - protein, 18 aa, Homo sapiens
  CDR3 for beta chain variable domain of TCR clone 177157 (TRBV18, TRBJ1-3)
CASSPRGGAGPSGNTIYF

SEQ ID NO: 354315 - protein, 15 aa, Homo sapiens
  CDR3 for alpha chain variable domain of TCR clone 177158 (TRAV8-2, TRAJ40)
CVVSDRGSGTYKYIF

SEQ ID NO: 354316 - protein, 16 aa, Homo sapiens
  CDR3 for beta chain variable domain of TCR clone 177158 (TRBV4-1, TRBJ2-5)
CASSSGLAGVLGTQYF

SEQ ID NO: 354317 - protein, 12 aa, Homo sapiens
  CDR3 for alpha chain variable domain of TCR clone 177159 (TRAV23/DV6, TRAJ30)
CAASKGDDKNIF

SEQ ID NO: 354318 - protein, 13 aa, Homo sapiens
  CDR3 for beta chain variable domain of TCR clone 177159 (TRBV19, TRBJ1-2)
CASSVPGQDGYTF

SEQ ID NO: 354319 - protein, 13 aa, Homo sapiens
  CDR3 for alpha chain variable domain of TCR clone 177160 (TRAV20, TRAJ29)
SAVQAVGNTPLVF

SEQ ID NO: 354320 - protein, 15 aa, Homo sapiens
  CDR3 for beta chain variable domain of TCR clone 177160 (TRBV10-2, TRBJ2-5)
CASRGSGGPQETQYF

SEQ ID NO: 354321 - protein, 11 aa, Homo sapiens
  CDR3 for alpha chain variable domain of TCR clone 177161 (TRAV1-2, TRAJ40)
CAVPGTYKYIF

SEQ ID NO: 354322 - protein, 11 aa, Homo sapiens
  CDR3 for beta chain variable domain of TCR clone 177161 (TRBV29-1, TRBJ2-7)
VGTSRSYEQYF

SEQ ID NO: 354323 - protein, 14 aa, Homo sapiens
  CDR3 for alpha chain variable domain of TCR clone 177162 (TRAV12-3, TRAJ10)
SHLPLTGGGNKLTF

SEQ ID NO: 354324 - protein, 15 aa, Homo sapiens
  CDR3 for beta chain variable domain of TCR clone 177162 (TRBV19, TRBJ1-1)
CASTSGQIQDTEAFF

SEQ ID NO: 354325 - protein, 13 aa, Homo sapiens
  CDR3 for alpha chain variable domain of TCR clone 177163 (TRAV26-2, TRAJ43)
CILRAVNNNDMRF

SEQ ID NO: 354326 - protein, 17 aa, Homo sapiens
  CDR3 for beta chain variable domain of TCR clone 177163 (TRBV18, TRBJ1-5)
CASSPTMGQGTNQPQHF

SEQ ID NO: 354327 - protein, 13 aa, Homo sapiens
  CDR3 for alpha chain variable domain of TCR clone 177164 (TRAV17, TRAJ5)
CATVDTGRRALTF

SEQ ID NO: 354328 - protein, 15 aa, Homo sapiens
  CDR3 for beta chain variable domain of TCR clone 177164 (TRBV7-9, TRBJ1-5)
CASSQGHQPNQPQHF

SEQ ID NO: 354329 - protein, 12 aa, Homo sapiens
  CDR3 for alpha chain variable domain of TCR clone 177165 (TRAV21, TRAJ13)
PGPSGGYQKVTF

SEQ ID NO: 354330 - protein, 14 aa, Homo sapiens
  CDR3 for beta chain variable domain of TCR clone 177165 (TRBV20-1, TRBJ2-7)
CSAKDSKGAYEQYF

SEQ ID NO: 354331 - protein, 15 aa, Homo sapiens
  CDR3 for alpha chain variable domain of TCR clone 177166 (TRAV38-2/DV8, TRAJ48)
CAYRSGGFGNEKLTF

SEQ ID NO: 354332 - protein, 16 aa, Homo sapiens
  CDR3 for beta chain variable domain of TCR clone 177166 (TRBV28, TRBJ2-7)
CASSPWVATVDLSQYF

SEQ ID NO: 354333 - protein, 14 aa, Homo sapiens
  CDR3 for alpha chain variable domain of TCR clone 177167 (TRAV12-3, TRAJ54)
CARSALQGAQKLVF

SEQ ID NO: 354334 - protein, 15 aa, Homo sapiens
  CDR3 for beta chain variable domain of TCR clone 177167 (TRBV19, TRBJ2-4)
CASSTPGIAKNIQYF

SEQ ID NO: 354335 - protein, 12 aa, Homo sapiens
  CDR3 for alpha chain variable domain of TCR clone 177168 (TRAV35, TRAJ39)
LAPNNAGNMLTF

SEQ ID NO: 354336 - protein, 14 aa, Homo sapiens
  CDR3 for beta chain variable domain of TCR clone 177168 (TRBV6-1, TRBJ1-3)
CASVQGGGGNTIYF

SEQ ID NO: 354337 - protein, 12 aa, Homo sapiens
  CDR3 for alpha chain variable domain of TCR clone 177169 (TRAV30, TRAJ39)
CGRGNAGNMLTF

SEQ ID NO: 354338 - protein, 15 aa, Homo sapiens
  CDR3 for beta chain variable domain of TCR clone 177169 (TRBV27, TRBJ2-5)
CASSLYPRGGETQYF

SEQ ID NO: 354339 - protein, 13 aa, Homo sapiens
  CDR3 for alpha chain variable domain of TCR clone 177170 (TRAV3, TRAJ43)
CAVKARNNNDMRF

SEQ ID NO: 354340 - protein, 11 aa, Homo sapiens
  CDR3 for beta chain variable domain of TCR clone 177170 (TRBV12-4, TRBJ2-3)
CASTATDTQYF

SEQ ID NO: 354341 - protein, 15 aa, Homo sapiens
  CDR3 for alpha chain variable domain of TCR clone 177171 (TRAV35, TRAJ50)
CAGQLRKTSYDKVIF

SEQ ID NO: 354342 - protein, 16 aa, Homo sapiens
  CDR3 for beta chain variable domain of TCR clone 177171 (TRBV20-1, TRBJ1-4)
CSAPGQGLLTNDKLFF

SEQ ID NO: 354343 - protein, 14 aa, Homo sapiens
  CDR3 for alpha chain variable domain of TCR clone 177172 (TRAV17, TRAJ23)
CATALGGQGGKLIF

SEQ ID NO: 354344 - protein, 13 aa, Homo sapiens
  CDR3 for beta chain variable domain of TCR clone 177172 (TRBV15, TRBJ1-6)
CATSGGLNSPLHF

SEQ ID NO: 354345 - protein, 12 aa, Homo sapiens
  CDR3 for alpha chain variable domain of TCR clone 177173 (TRAV26-1, TRAJ39)
CIVRVEGNMLTF

SEQ ID NO: 354346 - protein, 17 aa, Homo sapiens
  CDR3 for beta chain variable domain of TCR clone 177173 (TRBV6-5, TRBJ2-4)
CASRPTPGQGSKNIQYF

SEQ ID NO: 354347 - protein, 12 aa, Homo sapiens
  CDR3 for alpha chain variable domain of TCR clone 177174 (TRAV23/DV6, TRAJ30)
CAASKGDDKIIF

SEQ ID NO: 354348 - protein, 14 aa, Homo sapiens
  CDR3 for beta chain variable domain of TCR clone 177174 (TRBV7-8, TRBJ2-3)
CASSLEAETDTQYF

SEQ ID NO: 354349 - protein, 14 aa, Homo sapiens
  CDR3 for alpha chain variable domain of TCR clone 177175 (TRAV23/DV6, TRAJ11)
CAALIGGGYSTLTF

SEQ ID NO: 354350 - protein, 13 aa, Homo sapiens
  CDR3 for beta chain variable domain of TCR clone 177175 (TRBV11-3, TRBJ1-1)
CAGSLGGNTEAFF

SEQ ID NO: 354351 - protein, 18 aa, Homo sapiens
  CDR3 for alpha chain variable domain of TCR clone 177176 (TRAV21, TRAJ52)
CAVRPSPAGGTSYGKLTF

SEQ ID NO: 354352 - protein, 13 aa, Homo sapiens
  CDR3 for beta chain variable domain of TCR clone 177176 (TRBV18, TRBJ2-7)
CASQSGGGYEQYF

SEQ ID NO: 354353 - protein, 13 aa, Homo sapiens
  CDR3 for alpha chain variable domain of TCR clone 177177 (TRAV8-3, TRAJ15)
CAVGIQSGTALIF

SEQ ID NO: 354354 - protein, 17 aa, Homo sapiens
  CDR3 for beta chain variable domain of TCR clone 177177 (TRBV20-1, TRBJ2-1)
CSARDPLAGVSYNEQFF

SEQ ID NO: 354355 - protein, 19 aa, Homo sapiens
  CDR3 for alpha chain variable domain of TCR clone 177178 (TRAV8-3, TRAJ8)
LSTSVLWDPMNTGFQKLVF

SEQ ID NO: 354356 - protein, 14 aa, Homo sapiens
  CDR3 for beta chain variable domain of TCR clone 177178 (TRBV6-1, TRBJ1-3)
CASVQGGGGNTIYF

SEQ ID NO: 354357 - protein, 16 aa, Homo sapiens
  CDR3 for alpha chain variable domain of TCR clone 177179 (TRAV26-1, TRAJ38)
CIVRAYNVGNNRKLIW

SEQ ID NO: 354358 - protein, 13 aa, Homo sapiens
  CDR3 for beta chain variable domain of TCR clone 177179 (TRBV4-2, TRBJ2-7)
CASSRDPHDEQYF

SEQ ID NO: 354359 - protein, 17 aa, Homo sapiens
  CDR3 for alpha chain variable domain of TCR clone 177180 (TRAV23/DV6, TRAJ57)
CAASSTLSQGGSEQLVF

SEQ ID NO: 354360 - protein, 14 aa, Homo sapiens
  CDR3 for beta chain variable domain of TCR clone 177180 (TRBV25-1, TRBJ1-1)
CDSTHLGGNTEAFF

SEQ ID NO: 354361 - protein, 11 aa, Homo sapiens
  CDR3 for alpha chain variable domain of TCR clone 177181 (TRAV21, TRAJ11)
CAVNGSSTLTF

SEQ ID NO: 354362 - protein, 11 aa, Homo sapiens
  CDR3 for beta chain variable domain of TCR clone 177181 (TRBV19, TRBJ1-1)
CASSIGSEAFF

SEQ ID NO: 354363 - protein, 15 aa, Homo sapiens
  CDR3 for alpha chain variable domain of TCR clone 177182 (TRAV12-1, TRAJ42)
CVVTRDGGSQGNLIF

SEQ ID NO: 354364 - protein, 16 aa, Homo sapiens
  CDR3 for beta chain variable domain of TCR clone 177182 (TRBV5-5, TRBJ2-2)
CASSGRREGATGELFF

SEQ ID NO: 354365 - protein, 14 aa, Homo sapiens
  CDR3 for alpha chain variable domain of TCR clone 177183 (TRAV12-2, TRAJ13)
CAVKKTGGYQKVTF

SEQ ID NO: 354366 - protein, 13 aa, Homo sapiens
  CDR3 for beta chain variable domain of TCR clone 177183 (TRBV28, TRBJ2-7)
CASEAGGVYEQYF

SEQ ID NO: 354367 - protein, 13 aa, Homo sapiens
  CDR3 for alpha chain variable domain of TCR clone 177184 (TRAV13-1, TRAJ21)
CAASIYNFNKFYF

SEQ ID NO: 354368 - protein, 13 aa, Homo sapiens
  CDR3 for beta chain variable domain of TCR clone 177184 (TRBV27, TRBJ1-4)
RASSLMGDEKLFF

SEQ ID NO: 354369 - protein, 15 aa, Homo sapiens
  CDR3 for alpha chain variable domain of TCR clone 177185 (TRAV21, TRAJ24)
CAARSSTDSWGKLQF

SEQ ID NO: 354370 - protein, 18 aa, Homo sapiens
  CDR3 for beta chain variable domain of TCR clone 177185 (TRBV7-3, TRBJ2-3)
CASSSTGTYPGSTDTQYF

SEQ ID NO: 354371 - protein, 14 aa, Homo sapiens
  CDR3 for alpha chain variable domain of TCR clone 177186 (TRAV17, TRAJ57)
CATDPQGGSAKLVF

SEQ ID NO: 354372 - protein, 14 aa, Homo sapiens
  CDR3 for beta chain variable domain of TCR clone 177186 (TRBV13, TRBJ2-7)
CASSLKGASYEQYF

SEQ ID NO: 354373 - protein, 14 aa, Homo sapiens
  CDR3 for alpha chain variable domain of TCR clone 177187 (TRAV12-2, TRAJ40)
CAVKISSGTYKYIF

SEQ ID NO: 354374 - protein, 14 aa, Homo sapiens
  CDR3 for beta chain variable domain of TCR clone 177187 (TRBV4-1, TRBJ2-2)
CASSQAVNTGELFF

SEQ ID NO: 354375 - protein, 16 aa, Homo sapiens
  CDR3 for alpha chain variable domain of TCR clone 177188 (TRAV3, TRAJ37)
CAVRGKGSGNTGKLIF

SEQ ID NO: 354376 - protein, 17 aa, Homo sapiens
  CDR3 for beta chain variable domain of TCR clone 177188 (TRBV15, TRBJ1-5)
CATSRAPPGTRNQPQHF

SEQ ID NO: 354377 - protein, 11 aa, Homo sapiens
  CDR3 for alpha chain variable domain of TCR clone 177189 (TRAV3, TRAJ21)
CAVGNFNNFYF

SEQ ID NO: 354378 - protein, 16 aa, Homo sapiens
  CDR3 for beta chain variable domain of TCR clone 177189 (TRBV19, TRBJ2-1)
CASSEAGPSSYNEQFF

SEQ ID NO: 354379 - protein, 17 aa, Homo sapiens
  CDR3 for alpha chain variable domain of TCR clone 177190 (TRAV26-1, TRAJ53)
CIARVDDSGGSNYKLPF

SEQ ID NO: 354380 - protein, 15 aa, Homo sapiens
  CDR3 for beta chain variable domain of TCR clone 177190 (TRBV20-1, TRBJ2-7)
CSARVPAAYFYEQYF

SEQ ID NO: 354381 - protein, 16 aa, Homo sapiens
  CDR3 for alpha chain variable domain of TCR clone 177191 (TRAV12-3, TRAJ53)
CAMSPGSGGSNYKLTF

SEQ ID NO: 354382 - protein, 11 aa, Homo sapiens
  CDR3 for beta chain variable domain of TCR clone 177191 (TRBV29-1, TRBJ2-5)
CSEDRTCTQYF

SEQ ID NO: 354383 - protein, 14 aa, Homo sapiens
  CDR3 for alpha chain variable domain of TCR clone 177192 (TRAV1-2, TRAJ8)
CAVREDTGFQKLVF

SEQ ID NO: 354384 - protein, 17 aa, Homo sapiens
  CDR3 for beta chain variable domain of TCR clone 177192 (TRBV7-8, TRBJ1-2)
CASSLRPLQGHLYGYTF

SEQ ID NO: 354385 - protein, 17 aa, Homo sapiens
  CDR3 for alpha chain variable domain of TCR clone 177193 (TRAV14/DV4, TRAJ12)
WAMRELPWMDSSYKLIF

SEQ ID NO: 354386 - protein, 14 aa, Homo sapiens
  CDR3 for beta chain variable domain of TCR clone 177193 (TRBV20-1, TRBJ2-7)
CSARRSGSSYEQYF

SEQ ID NO: 354387 - protein, 12 aa, Homo sapiens
  CDR3 for alpha chain variable domain of TCR clone 177194 (TRAV21, TRAJ47)
CAAMEYGNKLVF

SEQ ID NO: 354388 - protein, 11 aa, Homo sapiens
  CDR3 for beta chain variable domain of TCR clone 177194 (TRBV19, TRBJ1-1)
CASSIGSEAFF

SEQ ID NO: 354389 - protein, 13 aa, Homo sapiens
  CDR3 for alpha chain variable domain of TCR clone 177195 (TRAV13-1, TRAJ9)
CAARGTGGFKTIV

SEQ ID NO: 354390 - protein, 12 aa, Homo sapiens
  CDR3 for beta chain variable domain of TCR clone 177195 (TRBV2, TRBJ2-1)
CAYGPPGNEQFF

SEQ ID NO: 354391 - protein, 13 aa, Homo sapiens
  CDR3 for alpha chain variable domain of TCR clone 177196 (TRAV20, TRAJ41)
CAVLTNSGYALNF

SEQ ID NO: 354392 - protein, 11 aa, Homo sapiens
  CDR3 for beta chain variable domain of TCR clone 177196 (TRBV3-1, TRBJ2-7)
CASSRGYEQYF

SEQ ID NO: 354393 - protein, 16 aa, Homo sapiens
  CDR3 for alpha chain variable domain of TCR clone 177197 (TRAV3, TRAJ37)
CAVRGKGTGNTGKLIF

SEQ ID NO: 354394 - protein, 15 aa, Homo sapiens
  CDR3 for beta chain variable domain of TCR clone 177197 (TRBV7-9, TRBJ2-2)
CASGPLDTFPGELFF

SEQ ID NO: 354395 - protein, 15 aa, Homo sapiens
  CDR3 for alpha chain variable domain of TCR clone 177198 (TRAV27, TRAJ38)
CAARRHAGDNRKLIW

SEQ ID NO: 354396 - protein, 13 aa, Homo sapiens
  CDR3 for beta chain variable domain of TCR clone 177198 (TRBV12-5, TRBJ2-3)
CASGDRQSDTQYF

SEQ ID NO: 354397 - protein, 14 aa, Homo sapiens
  CDR3 for alpha chain variable domain of TCR clone 177199 (TRAV26-1, TRAJ34)
CIVRESYNTDKLIF

SEQ ID NO: 354398 - protein, 15 aa, Homo sapiens
  CDR3 for beta chain variable domain of TCR clone 177199 (TRBV15, TRBJ1-4)
CATSRDMGSYEKLFF

SEQ ID NO: 354399 - protein, 16 aa, Homo sapiens
  CDR3 for alpha chain variable domain of TCR clone 177200 (TRAV3, TRAJ3)
CAVRDRANSSASKIIF

SEQ ID NO: 354400 - protein, 13 aa, Homo sapiens
  CDR3 for beta chain variable domain of TCR clone 177200 (TRBV10-3, TRBJ2-7)
CASKLAVNYEQYF

SEQ ID NO: 354401 - protein, 12 aa, Homo sapiens
  CDR3 for alpha chain variable domain of TCR clone 177201 (TRAV16, TRAJ22)
CALEVSARQLTF

SEQ ID NO: 354402 - protein, 13 aa, Homo sapiens
  CDR3 for beta chain variable domain of TCR clone 177201 (TRBV11-2, TRBJ2-3)
CQQLNSETDTQYF

SEQ ID NO: 354403 - protein, 16 aa, Homo sapiens
  CDR3 for alpha chain variable domain of TCR clone 177202 (TRAV3, TRAJ18)
CAVRDGRGSTLGRLYF

SEQ ID NO: 354404 - protein, 17 aa, Homo sapiens
  CDR3 for beta chain variable domain of TCR clone 177202 (TRBV20-1, TRBJ2-2)
CSASGSGQGGLTGELFF

SEQ ID NO: 354405 - protein, 18 aa, Homo sapiens
  CDR3 for alpha chain variable domain of TCR clone 177203 (TRAV9-2, TRAJ52)
CALSRHNTGGTSYGKLTF

SEQ ID NO: 354406 - protein, 16 aa, Homo sapiens
  CDR3 for beta chain variable domain of TCR clone 177203 (TRBV20-1, TRBJ1-2)
CSASMGQGVANYGYTF

SEQ ID NO: 354407 - protein, 14 aa, Homo sapiens
  CDR3 for alpha chain variable domain of TCR clone 177204 (TRAV12-1, TRAJ30)
CVVRGMNRDDKIIF

SEQ ID NO: 354408 - protein, 14 aa, Homo sapiens
  CDR3 for beta chain variable domain of TCR clone 177204 (TRBV7-2, TRBJ2-1)
CASSLTSGNGRQFF

SEQ ID NO: 354409 - protein, 12 aa, Homo sapiens
  CDR3 for alpha chain variable domain of TCR clone 177205 (TRAV2, TRAJ33)
CAVPDSNYQLIW

SEQ ID NO: 354410 - protein, 14 aa, Homo sapiens
  CDR3 for beta chain variable domain of TCR clone 177205 (TRBV12-5, TRBJ2-5)
CASGSRTHQETQYF

SEQ ID NO: 354411 - protein, 16 aa, Homo sapiens
  CDR3 for alpha chain variable domain of TCR clone 177206 (TRAV8-6, TRAJ32)
CAVSDLYGGATNKLIF

SEQ ID NO: 354412 - protein, 18 aa, Homo sapiens
  CDR3 for beta chain variable domain of TCR clone 177206 (TRBV4-2, TRBJ2-6)
CASSQLQGVLTGANVLTF

SEQ ID NO: 354413 - protein, 20 aa, Homo sapiens
  CDR3 for alpha chain variable domain of TCR clone 177207 (TRAV8-3, TRAJ45)
LSTSVLWGSYSGGGADGLTF

SEQ ID NO: 354414 - protein, 12 aa, Homo sapiens
  CDR3 for beta chain variable domain of TCR clone 177207 (TRBV7-8, TRBJ2-7)
CASSRAQREQYF

SEQ ID NO: 354415 - protein, 13 aa, Homo sapiens
  CDR3 for alpha chain variable domain of TCR clone 177208 (TRAV27, TRAJ45)
CRSSGGGADGLTF

SEQ ID NO: 354416 - protein, 16 aa, Homo sapiens
  CDR3 for beta chain variable domain of TCR clone 177208 (TRBV19, TRBJ2-2)
CASRSPGTGATGELFF

SEQ ID NO: 354417 - protein, 13 aa, Homo sapiens
  CDR3 for alpha chain variable domain of TCR clone 177209 (TRAV17, TRAJ9)
CATSITGGFKTIF

SEQ ID NO: 354418 - protein, 16 aa, Homo sapiens
  CDR3 for beta chain variable domain of TCR clone 177209 (TRBV15, TRBJ2-1)
CATSRNLAGGYNEQFF

SEQ ID NO: 354419 - protein, 15 aa, Homo sapiens
  CDR3 for alpha chain variable domain of TCR clone 177210 (TRAV2, TRAJ36)
CAVQGALTGANNLFF

SEQ ID NO: 354420 - protein, 11 aa, Homo sapiens
  CDR3 for beta chain variable domain of TCR clone 177210 (TRBV29-1, TRBJ2-5)
CSEDRTGTQYF

SEQ ID NO: 354421 - protein, 14 aa, Homo sapiens
  CDR3 for alpha chain variable domain of TCR clone 177211 (TRAV23/DV6, TRAJ4)
CAANLSGGYNKLIF

SEQ ID NO: 354422 - protein, 11 aa, Homo sapiens
  CDR3 for beta chain variable domain of TCR clone 177211 (TRBV7-9, TRBJ2-3)
CDSSPTDTQYF

SEQ ID NO: 354423 - protein, 14 aa, Homo sapiens
  CDR3 for alpha chain variable domain of TCR clone 177212 (TRAV1-2, TRAJ16)
CAVNRFSDGQKLLF

SEQ ID NO: 354424 - protein, 14 aa, Homo sapiens
  CDR3 for beta chain variable domain of TCR clone 177212 (TRBV7-9, TRBJ1-6)
CASSPGRGNSPLHF

SEQ ID NO: 354425 - protein, 15 aa, Homo sapiens
  CDR3 for alpha chain variable domain of TCR clone 177213 (TRAV3, TRAJ22)
CAVRDRGGSARQLTF

SEQ ID NO: 354426 - protein, 11 aa, Homo sapiens
  CDR3 for beta chain variable domain of TCR clone 177213 (TRBV7-2, TRBJ2-3)
CASSSSDTQYF

SEQ ID NO: 354427 - protein, 15 aa, Homo sapiens
  CDR3 for alpha chain variable domain of TCR clone 177214 (TRAV35, TRAJ40)
CSGQLGQAGTYKYIF

SEQ ID NO: 354428 - protein, 14 aa, Homo sapiens
  CDR3 for beta chain variable domain of TCR clone 177214 (TRBV7-3, TRBJ2-1)
CASSLTGGANEQFF

SEQ ID NO: 354429 - protein, 19 aa, Homo sapiens
  CDR3 for alpha chain variable domain of TCR clone 177215 (TRAV26-1, TRAJ28)
CIVRVAHAYSGAGSYQLTF

SEQ ID NO: 354430 - protein, 15 aa, Homo sapiens
  CDR3 for beta chain variable domain of TCR clone 177215 (TRBV7-9, TRBJ1-6)
CASSSPGRGNSPLHF

SEQ ID NO: 354431 - protein, 13 aa, Homo sapiens
  CDR3 for alpha chain variable domain of TCR clone 177216 (TRAV26-1, TRAJ29)
CIVRRSGNTPLVF

SEQ ID NO: 354432 - protein, 15 aa, Homo sapiens
  CDR3 for beta chain variable domain of TCR clone 177216 (TRBV7-2, TRBJ1-1)
CASSPQGGANTEAFF

SEQ ID NO: 354433 - protein, 14 aa, Homo sapiens
  CDR3 for alpha chain variable domain of TCR clone 177217 (TRAV3, TRAJ7)
CAVREEEREQQTRF

SEQ ID NO: 354434 - protein, 15 aa, Homo sapiens
  CDR3 for beta chain variable domain of TCR clone 177217 (TRBV19, TRBJ2-1)
CASSSPGVPLDEQFF

SEQ ID NO: 354435 - protein, 17 aa, Homo sapiens
  CDR3 for alpha chain variable domain of TCR clone 177218 (TRAV8-6, TRAJ58)
CAVSSWVGETSGSRLTF

SEQ ID NO: 354436 - protein, 17 aa, Homo sapiens
  CDR3 for beta chain variable domain of TCR clone 177218 (TRBV4-3, TRBJ1-2)
CASSSGLQAGGSVGYTF

SEQ ID NO: 354437 - protein, 16 aa, Homo sapiens
  CDR3 for alpha chain variable domain of TCR clone 177219 (TRAV30, TRAJ24)
CGTEIVDADSRGKSQF

SEQ ID NO: 354438 - protein, 15 aa, Homo sapiens
  CDR3 for beta chain variable domain of TCR clone 177219 (TRBV7-9, TRBJ2-7)
CASSLALAEAYEQYF

SEQ ID NO: 354439 - protein, 13 aa, Homo sapiens
  CDR3 for alpha chain variable domain of TCR clone 177220 (TRAV2, TRAJ15)
CAVASQAGTALIF

SEQ ID NO: 354440 - protein, 18 aa, Homo sapiens
  CDR3 for beta chain variable domain of TCR clone 177220 (TRBV5-1, TRBJ1-1)
CASSSGGNSLTLKLSLDK

SEQ ID NO: 354441 - protein, 14 aa, Homo sapiens
  CDR3 for alpha chain variable domain of TCR clone 177221 (TRAV2, TRAJ37)
CAVDFTSITGKLIF

SEQ ID NO: 354442 - protein, 13 aa, Homo sapiens
  CDR3 for beta chain variable domain of TCR clone 177221 (TRBV20-1, TRBJ1-1)
CSAPLGGGTEAFF

SEQ ID NO: 354443 - protein, 12 aa, Homo sapiens
  CDR3 for alpha chain variable domain of TCR clone 177222 (TRAV3, TRAJ7)
FADLLWEQQTRF

SEQ ID NO: 354444 - protein, 13 aa, Homo sapiens
  CDR3 for beta chain variable domain of TCR clone 177222 (TRBV7-3, TRBJ2-5)
CASSFRGGETQYF

SEQ ID NO: 354445 - protein, 17 aa, Homo sapiens
  CDR3 for alpha chain variable domain of TCR clone 177223 (TRAV26-1, TRAJ53)
CIVRVDDSGGSNYKLTF

SEQ ID NO: 354446 - protein, 15 aa, Homo sapiens
  CDR3 for beta chain variable domain of TCR clone 177223 (TRBV20-1, TRBJ1-2)
CSARDPLRQGYGYTL

SEQ ID NO: 354447 - protein, 11 aa, Homo sapiens
  CDR3 for alpha chain variable domain of TCR clone 177224 (TRAV17, TRAJ31)
CATSNNARLMF

SEQ ID NO: 354448 - protein, 14 aa, Homo sapiens
  CDR3 for beta chain variable domain of TCR clone 177224 (TRBV18, TRBJ2-7)
CASSPRGGTYEQYF

SEQ ID NO: 354449 - protein, 13 aa, Homo sapiens
  CDR3 for alpha chain variable domain of TCR clone 177225 (TRAV35, TRAJ36)
CAGPRIGANNLFF

SEQ ID NO: 354450 - protein, 15 aa, Homo sapiens
  CDR3 for beta chain variable domain of TCR clone 177225 (TRBV20-1, TRBJ2-7)
CSARDRVSGVDEQYF

SEQ ID NO: 354451 - protein, 18 aa, Homo sapiens
  CDR3 for alpha chain variable domain of TCR clone 177226 (TRAV26-1, TRAJ52)
CIVRVEGAGGTSYGKLTF

SEQ ID NO: 354452 - protein, 14 aa, Homo sapiens
  CDR3 for beta chain variable domain of TCR clone 177226 (TRBV7-2, TRBJ2-7)
CASSPKTSFYEQYF

SEQ ID NO: 354453 - protein, 16 aa, Homo sapiens
  CDR3 for alpha chain variable domain of TCR clone 177227 (TRAV3, TRAJ28)
CAVLPRSGAGSYQLTL

SEQ ID NO: 354454 - protein, 13 aa, Homo sapiens
  CDR3 for beta chain variable domain of TCR clone 177227 (TRBV7-9, TRBJ1-2)
RASSLKQNYGYTF

SEQ ID NO: 354455 - protein, 14 aa, Homo sapiens
  CDR3 for alpha chain variable domain of TCR clone 177228 (TRAV23/DV6, TRAJ45)
CAASRRGGADGLTF

SEQ ID NO: 354456 - protein, 13 aa, Homo sapiens
  CDR3 for beta chain variable domain of TCR clone 177228 (TRBV20-1, TRBJ1-5)
CSATAAGGQPQHF

SEQ ID NO: 354457 - protein, 16 aa, Homo sapiens
  CDR3 for alpha chain variable domain of TCR clone 177229 (TRAV36/DV7, TRAJ30)
CAVETYGLDRDDKIIF

SEQ ID NO: 354458 - protein, 15 aa, Homo sapiens
  CDR3 for beta chain variable domain of TCR clone 177229 (TRBV7-2, TRBJ2-1)
CASSSGLAGGNEQFF

SEQ ID NO: 354459 - protein, 13 aa, Homo sapiens
  CDR3 for alpha chain variable domain of TCR clone 177230 (TRAV17, TRAJ33)
CATDADSNYHVIW

SEQ ID NO: 354460 - protein, 17 aa, Homo sapiens
  CDR3 for beta chain variable domain of TCR clone 177230 (TRBV20-1, TRBJ2-3)
CSAVSPGLAGGQDTQYF

SEQ ID NO: 354461 - protein, 14 aa, Homo sapiens
  CDR3 for alpha chain variable domain of TCR clone 177231 (TRAV12-2, TRAJ5)
CAVNRSTGRRALTF

SEQ ID NO: 354462 - protein, 16 aa, Homo sapiens
  CDR3 for beta chain variable domain of TCR clone 177231 (TRBV29-1, TRBJ2-7)
CSVEVVGTSGSYEQYF

SEQ ID NO: 354463 - protein, 14 aa, Homo sapiens
  CDR3 for alpha chain variable domain of TCR clone 177232 (TRAV12-2, TRAJ13)
CAVKKTGGYQKVTF

SEQ ID NO: 354464 - protein, 19 aa, Homo sapiens
  CDR3 for beta chain variable domain of TCR clone 177232 (TRBV19, TRBJ2-2)
CASTRPGLAGGRVTGELFF

SEQ ID NO: 354465 - protein, 15 aa, Homo sapiens
  CDR3 for alpha chain variable domain of TCR clone 177233 (TRAV8-6, TRAJ6)
CAVSGESGGSYIPTF

SEQ ID NO: 354466 - protein, 13 aa, Homo sapiens
  CDR3 for beta chain variable domain of TCR clone 177233 (TRBV7-9, TRBJ2-5)
CASLSPGQETQYF

SEQ ID NO: 354467 - protein, 12 aa, Homo sapiens
  CDR3 for alpha chain variable domain of TCR clone 177234 (TRAV21, TRAJ3)
CCFYSSASEIIF

SEQ ID NO: 354468 - protein, 20 aa, Homo sapiens
  CDR3 for beta chain variable domain of TCR clone 177234 (TRBV19, TRBJ2-1)
CASSKAGPSPTMSSSSGQGH

SEQ ID NO: 354469 - protein, 14 aa, Homo sapiens
  CDR3 for alpha chain variable domain of TCR clone 177235 (TRAV12-1, TRAJ17)
CVVNYKASGNKLTF

SEQ ID NO: 354470 - protein, 15 aa, Homo sapiens
  CDR3 for beta chain variable domain of TCR clone 177235 (TRBV7-2, TRBJ2-1)
CASTHGTGIYNEQFF

SEQ ID NO: 354471 - protein, 14 aa, Homo sapiens
  CDR3 for alpha chain variable domain of TCR clone 177236 (TRAV25, TRAJ20)
CAGKGRWDDYKLSF

SEQ ID NO: 354472 - protein, 12 aa, Homo sapiens
  CDR3 for beta chain variable domain of TCR clone 177236 (TRBV12-5, TRBJ2-3)
CASQASTGTQYF

SEQ ID NO: 354473 - protein, 16 aa, Homo sapiens
  CDR3 for alpha chain variable domain of TCR clone 177237 (TRAV20, TRAJ10)
CAVLRPLTGGGNKLTF

SEQ ID NO: 354474 - protein, 14 aa, Homo sapiens
  CDR3 for beta chain variable domain of TCR clone 177237 (TRBV19, TRBJ1-5)
CASRAPDSFLSQHF

SEQ ID NO: 354475 - protein, 16 aa, Homo sapiens
  CDR3 for alpha chain variable domain of TCR clone 177238 (TRAV22, TRAJ45)
CAVERGKRGGADGLTF

SEQ ID NO: 354476 - protein, 13 aa, Homo sapiens
  CDR3 for beta chain variable domain of TCR clone 177238 (TRBV27, TRBJ1-1)
CASSLSIGDEAFF

SEQ ID NO: 354477 - protein, 14 aa, Homo sapiens
  CDR3 for alpha chain variable domain of TCR clone 177239 (TRAV17, TRAJ56)
CATVPAGANSKLTF

SEQ ID NO: 354478 - protein, 17 aa, Homo sapiens
  CDR3 for beta chain variable domain of TCR clone 177239 (TRBV20-1, TRBJ2-1)
CSARDPLAGVWDNEQFF

SEQ ID NO: 354479 - protein, 12 aa, Homo sapiens
  CDR3 for alpha chain variable domain of TCR clone 177240 (TRAV13-2, TRAJ8)
CASWLGFQKLVF

SEQ ID NO: 354480 - protein, 15 aa, Homo sapiens
  CDR3 for beta chain variable domain of TCR clone 177240 (TRBV12-4, TRBJ2-5)
CASSLSGAFQETQYF

SEQ ID NO: 354481 - protein, 15 aa, Homo sapiens
  CDR3 for alpha chain variable domain of TCR clone 177241 (TRAV16, TRAJ52)
CSKWGWCTSYGKLTF

SEQ ID NO: 354482 - protein, 14 aa, Homo sapiens
  CDR3 for beta chain variable domain of TCR clone 177241 (TRBV19, TRBJ1-2)
CASSLQGQAYGYTF

SEQ ID NO: 354483 - protein, 14 aa, Homo sapiens
  CDR3 for alpha chain variable domain of TCR clone 177242 (TRAV12-2, TRAJ13)
GAVKKTGVYQKVTF

SEQ ID NO: 354484 - protein, 15 aa, Homo sapiens
  CDR3 for beta chain variable domain of TCR clone 177242 (TRBV27, TRBJ2-1)
CASSNGGGSSNEQFF

SEQ ID NO: 354485 - protein, 15 aa, Homo sapiens
  CDR3 for alpha chain variable domain of TCR clone 177243 (TRAV13-1, TRAJ10)
CAATILTGGGNKLTF

SEQ ID NO: 354486 - protein, 15 aa, Homo sapiens
  CDR3 for beta chain variable domain of TCR clone 177243 (TRBV2, TRBJ2-7)
CASTLLGSGATVQYF

SEQ ID NO: 354487 - protein, 10 aa, Homo sapiens
  CDR3 for alpha chain variable domain of TCR clone 177244 (TRAV21, TRAJ49)
CAVTGNQFYF

SEQ ID NO: 354488 - protein, 13 aa, Homo sapiens
  CDR3 for beta chain variable domain of TCR clone 177244 (TRBV10-3, TRBJ2-7)
CASKLAVNYEQYF

SEQ ID NO: 354489 - protein, 11 aa, Homo sapiens
  CDR3 for alpha chain variable domain of TCR clone 177245 (TRAV35, TRAJ30)
CAPGGDDKIIF

SEQ ID NO: 354490 - protein, 14 aa, Homo sapiens
  CDR3 for beta chain variable domain of TCR clone 177245 (TRBV25-1, TRBJ1-6)
CASSLSADISPLHF

SEQ ID NO: 354491 - protein, 14 aa, Homo sapiens
  CDR3 for alpha chain variable domain of TCR clone 177246 (TRAV12-2, TRAJ40)
CAVKIPSGTYKYIF

SEQ ID NO: 354492 - protein, 15 aa, Homo sapiens
  CDR3 for beta chain variable domain of TCR clone 177246 (TRBV5-4, TRBJ2-1)
CASSREGLPYNEQFF

SEQ ID NO: 354493 - protein, 11 aa, Homo sapiens
  CDR3 for alpha chain variable domain of TCR clone 177247 (TRAV3, TRAJ17)
PRGAAGNKLTL

SEQ ID NO: 354494 - protein, 12 aa, Homo sapiens
  CDR3 for beta chain variable domain of TCR clone 177247 (TRBV11-2, TRBJ2-2)
CASSLGGGELFF

SEQ ID NO: 354495 - protein, 13 aa, Homo sapiens
  CDR3 for alpha chain variable domain of TCR clone 177248 (TRAV21, TRAJ27)
CAARPGNAGKSTF

SEQ ID NO: 354496 - protein, 17 aa, Homo sapiens
  CDR3 for beta chain variable domain of TCR clone 177248 (TRBV28, TRBJ2-5)
CASSFGGEWGGQETQYF

SEQ ID NO: 354497 - protein, 13 aa, Homo sapiens
  CDR3 for alpha chain variable domain of TCR clone 177249 (TRAV39, TRAJ58)
CAGEDTSGSRLTF

SEQ ID NO: 354498 - protein, 15 aa, Homo sapiens
  CDR3 for beta chain variable domain of TCR clone 177249 (TRBV15, TRBJ1-1)
CATSLQGGRNTEAFF

SEQ ID NO: 354499 - protein, 12 aa, Homo sapiens
  CDR3 for alpha chain variable domain of TCR clone 177250 (TRAV21, TRAJ3)
CCFYSSASKIIF

SEQ ID NO: 354500 - protein, 13 aa, Homo sapiens
  CDR3 for beta chain variable domain of TCR clone 177250 (TRBV7-9, TRBJ1-2)
CASSLKQNYGYTF

SEQ ID NO: 354501 - protein, 14 aa, Homo sapiens
  CDR3 for alpha chain variable domain of TCR clone 177251 (TRAV8-1, TRAJ4)
CAVKFFGGYNKLIF

SEQ ID NO: 354502 - protein, 22 aa, Homo sapiens
  CDR3 for beta chain variable domain of TCR clone 177251 (TRBV7-3, TRBJ2-5)
CASARDRVILRPRDPVLRARHA

SEQ ID NO: 354503 - protein, 17 aa, Homo sapiens
  CDR3 for alpha chain variable domain of TCR clone 177252 (TRAV13-1, TRAJ52)
CAASSGAGGTSYRKLTF

SEQ ID NO: 354504 - protein, 15 aa, Homo sapiens
  CDR3 for beta chain variable domain of TCR clone 177252 (TRBV2, TRBJ2-1)
CASSELAGSYNEQFF

SEQ ID NO: 354505 - protein, 14 aa, Homo sapiens
  CDR3 for alpha chain variable domain of TCR clone 177253 (TRAV23/DV6, TRAJ37)
CAASTSSNTGKLIS

SEQ ID NO: 354506 - protein, 16 aa, Homo sapiens
  CDR3 for beta chain variable domain of TCR clone 177253 (TRBV7-9, TRBJ1-2)
CASSLGFSSGEDGYTF

SEQ ID NO: 354507 - protein, 15 aa, Homo sapiens
  CDR3 for alpha chain variable domain of TCR clone 177254 (TRAV27, TRAJ38)
CAARRNACNNRKLIW

SEQ ID NO: 354508 - protein, 14 aa, Homo sapiens
  CDR3 for beta chain variable domain of TCR clone 177254 (TRBV2, TRBJ2-3)
CASSEGQNTDTQYF

SEQ ID NO: 354509 - protein, 15 aa, Homo sapiens
  CDR3 for alpha chain variable domain of TCR clone 177255 (TRAV35, TRAJ58)
CAGRRQETSGSRLTF

SEQ ID NO: 354510 - protein, 14 aa, Homo sapiens
  CDR3 for beta chain variable domain of TCR clone 177255 (TRBV7-3, TRBJ1-1)
CASSLGTGYTEAFF

SEQ ID NO: 354511 - protein, 14 aa, Homo sapiens
  CDR3 for alpha chain variable domain of TCR clone 177256 (TRAV16, TRAJ17)
CALSGRAAGNKLTF

SEQ ID NO: 354512 - protein, 17 aa, Homo sapiens
  CDR3 for beta chain variable domain of TCR clone 177256 (TRBV18, TRBJ2-6)
CASSPRQGAVGANVLIF

SEQ ID NO: 354513 - protein, 15 aa, Homo sapiens
  CDR3 for alpha chain variable domain of TCR clone 177257 (TRAV27, TRAJ38)
CAARRNAGNNRKLIW

SEQ ID NO: 354514 - protein, 12 aa, Homo sapiens
  CDR3 for beta chain variable domain of TCR clone 177257 (TRBV19, TRBJ1-5)
CASSIAQQPQHF

SEQ ID NO: 354515 - protein, 12 aa, Homo sapiens
  CDR3 for alpha chain variable domain of TCR clone 177258 (TRAV17, TRAJ5)
CAILTGRRTLTF

SEQ ID NO: 354516 - protein, 16 aa, Homo sapiens
  CDR3 for beta chain variable domain of TCR clone 177258 (TRBV6-5, TRBJ1-5)
CASSPPGLEGNQPQHF

SEQ ID NO: 354517 - protein, 14 aa, Homo sapiens
  CDR3 for alpha chain variable domain of TCR clone 177259 (TRAV1-2, TRAJ6)
CAVSLSGGRYIPTF

SEQ ID NO: 354518 - protein, 15 aa, Homo sapiens
  CDR3 for beta chain variable domain of TCR clone 177259 (TRBV28, TRBJ2-7)
CASSPGGRGFYEKYF

SEQ ID NO: 354519 - protein, 14 aa, Homo sapiens
  CDR3 for alpha chain variable domain of TCR clone 177260 (TRAV13-1, TRAJ3)
CAASKSSSASKIIF

SEQ ID NO: 354520 - protein, 14 aa, Homo sapiens
  CDR3 for beta chain variable domain of TCR clone 177260 (TRBV5-7, TRBJ1-2)
CASSLVRGDYGYTF

SEQ ID NO: 354521 - protein, 14 aa, Homo sapiens
  CDR3 for alpha chain variable domain of TCR clone 177261 (TRAV12-2, TRAJ13)
CAVKKTGGYQKVTF

SEQ ID NO: 354522 - protein, 15 aa, Homo sapiens
  CDR3 for beta chain variable domain of TCR clone 177261 (TRBV11-2, TRBJ2-1)
CASSRNRGLMYEQFF

SEQ ID NO: 354523 - protein, 16 aa, Homo sapiens
  CDR3 for alpha chain variable domain of TCR clone 177262 (TRAV12-2, TRAJ32)
FAVNLGQGGATNKLIF

SEQ ID NO: 354524 - protein, 15 aa, Homo sapiens
  CDR3 for beta chain variable domain of TCR clone 177262 (TRBV20-1, TRBJ2-7)
CSARGPLAGGREQYF

SEQ ID NO: 354525 - protein, 14 aa, Homo sapiens
  CDR3 for alpha chain variable domain of TCR clone 177263 (TRAV2, TRAJ37)
CAVDFTSNTGKLIF

SEQ ID NO: 354526 - protein, 15 aa, Homo sapiens
  CDR3 for beta chain variable domain of TCR clone 177263 (TRBV20-1, TRBJ2-1)
CSASSAGSSYNEQFF

SEQ ID NO: 354527 - protein, 14 aa, Homo sapiens
  CDR3 for alpha chain variable domain of TCR clone 177264 (TRAV2, TRAJ29)
CAGPFQHGNTPLVF

SEQ ID NO: 354528 - protein, 11 aa, Homo sapiens
  CDR3 for beta chain variable domain of TCR clone 177264 (TRBV29-1, TRBJ2-5)
CSEDRTGTQYF

SEQ ID NO: 354529 - protein, 10 aa, Homo sapiens
  CDR3 for alpha chain variable domain of TCR clone 177265 (TRAV8-3, TRAJ4)
CSGGYNKLIF

SEQ ID NO: 354530 - protein, 16 aa, Homo sapiens
  CDR3 for beta chain variable domain of TCR clone 177265 (TRBV7-8, TRBJ2-3)
CASSTEGQRETDTQYF

SEQ ID NO: 354531 - protein, 21 aa, Homo sapiens
  CDR3 for alpha chain variable domain of TCR clone 177266 (TRAV8-3, TRAJ6)
CAVRGEEATYLHLEEEPALLF

SEQ ID NO: 354532 - protein, 14 aa, Homo sapiens
  CDR3 for beta chain variable domain of TCR clone 177266 (TRBV5-1, TRBJ2-7)
CASSRGESLYEQYF

SEQ ID NO: 354533 - protein, 18 aa, Homo sapiens
  CDR3 for alpha chain variable domain of TCR clone 177267 (TRAV21, TRAJ52)
SAVRPSPAGGTSYGKLTF

SEQ ID NO: 354534 - protein, 11 aa, Homo sapiens
  CDR3 for beta chain variable domain of TCR clone 177267 (TRBV11-2, TRBJ2-2)
CASSLPGELFF

SEQ ID NO: 354535 - protein, 12 aa, Homo sapiens
  CDR3 for alpha chain variable domain of TCR clone 177268 (TRAV25, TRAJ31)
CAGHLNNARLMF

SEQ ID NO: 354536 - protein, 16 aa, Homo sapiens
  CDR3 for beta chain variable domain of TCR clone 177268 (TRBV7-9, TRBJ1-2)
CASSPGGGAINYGYTF

SEQ ID NO: 354537 - protein, 13 aa, Homo sapiens
  CDR3 for alpha chain variable domain of TCR clone 177269 (TRAV8-4, TRAJ10)
CSAFTGGGNKLTF

SEQ ID NO: 354538 - protein, 12 aa, Homo sapiens
  CDR3 for beta chain variable domain of TCR clone 177269 (TRBV3-1, TRBJ2-1)
CASSQGSSGQFF

SEQ ID NO: 354539 - protein, 13 aa, Homo sapiens
  CDR3 for alpha chain variable domain of TCR clone 177270 (TRAV8-3, TRAJ28)
CAVGAVGSYQLTF

SEQ ID NO: 354540 - protein, 13 aa, Homo sapiens
  CDR3 for beta chain variable domain of TCR clone 177270 (TRBV5-1, TRBJ2-7)
CASSATGGNEQYF

SEQ ID NO: 354541 - protein, 14 aa, Homo sapiens
  CDR3 for alpha chain variable domain of TCR clone 177271 (TRAV3, TRAJ40)
GAGRDRRGTYKYIC

SEQ ID NO: 354542 - protein, 15 aa, Homo sapiens
  CDR3 for beta chain variable domain of TCR clone 177271 (TRBV11-1, TRBJ1-3)
CASTDPRAFGNTIYF

SEQ ID NO: 354543 - protein, 11 aa, Homo sapiens
  CDR3 for alpha chain variable domain of TCR clone 177272 (TRAV2, TRAJ33)
CAVDSNYQLIW

SEQ ID NO: 354544 - protein, 14 aa, Homo sapiens
  CDR3 for beta chain variable domain of TCR clone 177272 (TRBV11-2, TRBJ2-3)
CASSRLARIDTQYF

SEQ ID NO: 354545 - protein, 13 aa, Homo sapiens
  CDR3 for alpha chain variable domain of TCR clone 177273 (TRAV2, TRAJ40)
CAVVTSGTYKYIF

SEQ ID NO: 354546 - protein, 13 aa, Homo sapiens
  CDR3 for beta chain variable domain of TCR clone 177273 (TRBV7-8, TRBJ2-7)
CASSFAGLYEQYF

SEQ ID NO: 354547 - protein, 13 aa, Homo sapiens
  CDR3 for alpha chain variable domain of TCR clone 177274 (TRAV38-1, TRAJ42)
CARWGGSQGNLIF

SEQ ID NO: 354548 - protein, 10 aa, Homo sapiens
  CDR3 for beta chain variable domain of TCR clone 177274 (TRBV2, TRBJ2-5)
CASSAAAQYF

SEQ ID NO: 354549 - protein, 14 aa, Homo sapiens
  CDR3 for alpha chain variable domain of TCR clone 177275 (TRAV2, TRAJ9)
RAVEDRSGGFKTIF

SEQ ID NO: 354550 - protein, 13 aa, Homo sapiens
  CDR3 for beta chain variable domain of TCR clone 177275 (TRBV7-3, TRBJ2-5)
CASSFRGGETQYF

SEQ ID NO: 354551 - protein, 12 aa, Homo sapiens
  CDR3 for alpha chain variable domain of TCR clone 177276 (TRAV20, TRAJ39)
CAVGNAGNMLTL

SEQ ID NO: 354552 - protein, 17 aa, Homo sapiens
  CDR3 for beta chain variable domain of TCR clone 177276 (TRBV4-1, TRBJ2-3)
CASSQGYVSGGTDTQYF

SEQ ID NO: 354553 - protein, 13 aa, Homo sapiens
  CDR3 for alpha chain variable domain of TCR clone 177277 (TRAV8-3, TRAJ43)
CAVVPYNNNDMRF

SEQ ID NO: 354554 - protein, 15 aa, Homo sapiens
  CDR3 for beta chain variable domain of TCR clone 177277 (TRBV5-1, TRBJ2-1)
CASRPPRAPYNEQFF

SEQ ID NO: 354555 - protein, 16 aa, Homo sapiens
  CDR3 for alpha chain variable domain of TCR clone 177278 (TRAV30, TRAJ24)
CGTEIVDADSGGKFQF

SEQ ID NO: 354556 - protein, 12 aa, Homo sapiens
  CDR3 for beta chain variable domain of TCR clone 177278 (TRBV7-8, TRBJ2-7)
CASSLGDREQYF

SEQ ID NO: 354557 - protein, 23 aa, Homo sapiens
  CDR3 for alpha chain variable domain of TCR clone 177279 (TRAV26-1, TRAJ38)
CIVRPLNAGNNHIQKPDPSVYQL

SEQ ID NO: 354558 - protein, 13 aa, Homo sapiens
  CDR3 for beta chain variable domain of TCR clone 177279 (TRBV18, TRBJ1-1)
CASSPNGDTEAFF

SEQ ID NO: 354559 - protein, 17 aa, Homo sapiens
  CDR3 for alpha chain variable domain of TCR clone 177280 (TRAV12-3, TRAJ26)
CAMGGGRGDNYGKNFVF

SEQ ID NO: 354560 - protein, 12 aa, Homo sapiens
  CDR3 for beta chain variable domain of TCR clone 177280 (TRBV19, TRBJ1-1)
CASSTTGIEAFF

SEQ ID NO: 354561 - protein, 11 aa, Homo sapiens
  CDR3 for alpha chain variable domain of TCR clone 177281 (TRAV17, TRAJ43)
CATPRSNDMRF

SEQ ID NO: 354562 - protein, 16 aa, Homo sapiens
  CDR3 for beta chain variable domain of TCR clone 177281 (TRBV12-4, TRBJ2-7)
CASSLIGGTGTYEQYF

SEQ ID NO: 354563 - protein, 13 aa, Homo sapiens
  CDR3 for alpha chain variable domain of TCR clone 177282 (TRAV21, TRAJ3)
CAVRGSSASKIIF

SEQ ID NO: 354564 - protein, 17 aa, Homo sapiens
  CDR3 for beta chain variable domain of TCR clone 177282 (TRBV5-7, TRBJ2-5)
CARSWIQDRGREGTQYF

SEQ ID NO: 354565 - protein, 14 aa, Homo sapiens
  CDR3 for alpha chain variable domain of TCR clone 177283 (TRAV8-2, TRAJ4)
CVVSPSGGYNKLIF

SEQ ID NO: 354566 - protein, 15 aa, Homo sapiens
  CDR3 for beta chain variable domain of TCR clone 177283 (TRBV2, TRBJ2-1)
CASSELAGSYNEQYF

SEQ ID NO: 354567 - protein, 13 aa, Homo sapiens
  CDR3 for alpha chain variable domain of TCR clone 177284 (TRAV13-1, TRAJ20)
YAARVSNDYKLSF

SEQ ID NO: 354568 - protein, 12 aa, Homo sapiens
  CDR3 for beta chain variable domain of TCR clone 177284 (TRBV20-1, TRBJ2-1)
CSARLGTDEQFF

SEQ ID NO: 354569 - protein, 15 aa, Homo sapiens
  CDR3 for alpha chain variable domain of TCR clone 177285 (TRAV8-3, TRAJ45)
CASSYSGGGDEGLTF

SEQ ID NO: 354570 - protein, 15 aa, Homo sapiens
  CDR3 for beta chain variable domain of TCR clone 177285 (TRBV18, TRBJ1-1)
CASSPRQGENTEAFF

SEQ ID NO: 354571 - protein, 12 aa, Homo sapiens
  CDR3 for alpha chain variable domain of TCR clone 177286 (TRAV13-1, TRAJ34)
CAASKGTDKLIF

SEQ ID NO: 354572 - protein, 18 aa, Homo sapiens
  CDR3 for beta chain variable domain of TCR clone 177286 (TRBV4-1, TRBJ1-5)
CASSQDPRGQGLNQPQHF

SEQ ID NO: 354573 - protein, 15 aa, Homo sapiens
  CDR3 for alpha chain variable domain of TCR clone 177287 (TRAV3, TRAJ22)
CAVRARGGSARQLTF

SEQ ID NO: 354574 - protein, 13 aa, Homo sapiens
  CDR3 for beta chain variable domain of TCR clone 177287 (TRBV7-3, TRBJ2-1)
CASSPVAYNEQFF

SEQ ID NO: 354575 - protein, 16 aa, Homo sapiens
  CDR3 for alpha chain variable domain of TCR clone 177288 (TRAV2, TRAJ4)
CAVGDRFSGGYNKLIF

SEQ ID NO: 354576 - protein, 13 aa, Homo sapiens
  CDR3 for beta chain variable domain of TCR clone 177288 (TRBV7-7, TRBJ2-5)
CASSRSGQETQYF

SEQ ID NO: 354577 - protein, 15 aa, Homo sapiens
  CDR3 for alpha chain variable domain of TCR clone 177289 (TRAV2, TRAJ9)
CAVAALNTGGFKTIF

SEQ ID NO: 354578 - protein, 14 aa, Homo sapiens
  CDR3 for beta chain variable domain of TCR clone 177289 (TRBV18, TRBJ2-3)
CASSGLADTDTQYF

SEQ ID NO: 354579 - protein, 14 aa, Homo sapiens
  CDR3 for alpha chain variable domain of TCR clone 177290 (TRAV20, TRAJ42)
CAVQAGGSQGNLIF

SEQ ID NO: 354580 - protein, 12 aa, Homo sapiens
  CDR3 for beta chain variable domain of TCR clone 177290 (TRBV11-2, TRBJ2-2)
CASSLGGGELFF

SEQ ID NO: 354581 - protein, 12 aa, Homo sapiens
  CDR3 for alpha chain variable domain of TCR clone 177291 (TRAV12-3, TRAJ17)
CAMTLTGNKLTF

SEQ ID NO: 354582 - protein, 16 aa, Homo sapiens
  CDR3 for beta chain variable domain of TCR clone 177291 (TRBV11-2, TRBJ2-1)
CQQLITPGVEYNEQFF

SEQ ID NO: 354583 - protein, 15 aa, Homo sapiens
  CDR3 for alpha chain variable domain of TCR clone 177292 (TRAV3, TRAJ5)
CAVRDLDTGRWSLTF

SEQ ID NO: 354584 - protein, 13 aa, Homo sapiens
  CDR3 for beta chain variable domain of TCR clone 177292 (TRBV12-4, TRBJ2-7)
CASSPTETYEQYF

SEQ ID NO: 354585 - protein, 15 aa, Homo sapiens
  CDR3 for alpha chain variable domain of TCR clone 177293 (TRAV17, TRAJ13)
CATDAGSGGYQKVTF

SEQ ID NO: 354586 - protein, 17 aa, Homo sapiens
  CDR3 for beta chain variable domain of TCR clone 177293 (TRBV11-2, TRBJ2-1)
CASSLYPPAVEYNEQFF

SEQ ID NO: 354587 - protein, 13 aa, Homo sapiens
  CDR3 for alpha chain variable domain of TCR clone 177294 (TRAV21, TRAJ8)
CAAPNTGFQKLVF

SEQ ID NO: 354588 - protein, 14 aa, Homo sapiens
  CDR3 for beta chain variable domain of TCR clone 177294 (TRBV7-2, TRBJ2-7)
CASSPKPSFYEQYF

SEQ ID NO: 354589 - protein, 12 aa, Homo sapiens
  CDR3 for alpha chain variable domain of TCR clone 177295 (TRAV1-2, TRAJ33)
CAALDSNYQLIW

SEQ ID NO: 354590 - protein, 12 aa, Homo sapiens
  CDR3 for beta chain variable domain of TCR clone 177295 (TRBV7-2, TRBJ1-6)
CASSLSSSPLHF

SEQ ID NO: 354591 - protein, 15 aa, Homo sapiens
  CDR3 for alpha chain variable domain of TCR clone 177296 (TRAV17, TRAJ56)
CATEPFTGANSKLTF

SEQ ID NO: 354592 - protein, 16 aa, Homo sapiens
  CDR3 for beta chain variable domain of TCR clone 177296 (TRBV19, TRBJ2-1)
CASKNIVLRGEKLLGR

SEQ ID NO: 354593 - protein, 12 aa, Homo sapiens
  CDR3 for alpha chain variable domain of TCR clone 177297 (TRAV12-3, TRAJ17)
CAMTLTSNKLTF

SEQ ID NO: 354594 - protein, 20 aa, Homo sapiens
  CDR3 for beta chain variable domain of TCR clone 177297 (TRBV7-8, TRBJ2-2)
CASSHLFPGPTIHITGELFF

SEQ ID NO: 354595 - protein, 16 aa, Homo sapiens
  CDR3 for alpha chain variable domain of TCR clone 177298 (TRAV12-2, TRAJ32)
CAGNMNYGGATNKPIF

SEQ ID NO: 354596 - protein, 16 aa, Homo sapiens
  CDR3 for beta chain variable domain of TCR clone 177298 (TRBV7-8, TRBJ2-3)
CASSTEGQRETDTQYF

SEQ ID NO: 354597 - protein, 16 aa, Homo sapiens
  CDR3 for alpha chain variable domain of TCR clone 177299 (TRAV26-1, TRAJ52)
CIVSNAGGTSSGKLTF

SEQ ID NO: 354598 - protein, 16 aa, Homo sapiens
  CDR3 for beta chain variable domain of TCR clone 177299 (TRBV5-1, TRBJ2-1)
CASSLEGRGLYNEQFF

SEQ ID NO: 354599 - protein, 14 aa, Homo sapiens
  CDR3 for alpha chain variable domain of TCR clone 177300 (TRAV26-1, TRAJ38)
CIADNAGKNRKLIW

SEQ ID NO: 354600 - protein, 11 aa, Homo sapiens
  CDR3 for beta chain variable domain of TCR clone 177300 (TRBV2, TRBJ1-1)
CASREGTEAFF

SEQ ID NO: 354601 - protein, 13 aa, Homo sapiens
  CDR3 for alpha chain variable domain of TCR clone 177301 (TRAV4, TRAJ16)
CLVGSSDGQKLHF

SEQ ID NO: 354602 - protein, 15 aa, Homo sapiens
  CDR3 for beta chain variable domain of TCR clone 177301 (TRBV11-3, TRBJ2-1)
CASSSGGTVADEQFF

SEQ ID NO: 354603 - protein, 12 aa, Homo sapiens
  CDR3 for alpha chain variable domain of TCR clone 177302 (TRAV12-1, TRAJ40)
CGFYSGTYNYIF

SEQ ID NO: 354604 - protein, 18 aa, Homo sapiens
  CDR3 for beta chain variable domain of TCR clone 177302 (TRBV12-4, TRBJ2-2)
CASSLVAGTRGRTGELFF

SEQ ID NO: 354605 - protein, 17 aa, Homo sapiens
  CDR3 for alpha chain variable domain of TCR clone 177303 (TRAV3, TRAJ42)
CAVRDRDYGGSQGNLIF

SEQ ID NO: 354606 - protein, 13 aa, Homo sapiens
  CDR3 for beta chain variable domain of TCR clone 177303 (TRBV7-2, TRBJ1-1)
CASSRNTNTEAFF

SEQ ID NO: 354607 - protein, 11 aa, Homo sapiens
  CDR3 for alpha chain variable domain of TCR clone 177304 (TRAV2, TRAJ21)
CAVFNFNKFYF

SEQ ID NO: 354608 - protein, 13 aa, Homo sapiens
  CDR3 for beta chain variable domain of TCR clone 177304 (TRBV19, TRBJ2-7)
CASRPRQSYEQYF

SEQ ID NO: 354609 - protein, 11 aa, Homo sapiens
  CDR3 for alpha chain variable domain of TCR clone 177305 (TRAV3, TRAJ21)
CAVGNFNKFYF

SEQ ID NO: 354610 - protein, 15 aa, Homo sapiens
  CDR3 for beta chain variable domain of TCR clone 177305 (TRBV15, TRBJ1-4)
CATSRDMGSYEKLFF

SEQ ID NO: 354611 - protein, 13 aa, Homo sapiens
  CDR3 for alpha chain variable domain of TCR clone 177306 (TRAV2, TRAJ40)
CAVVTSGTYKYIF

SEQ ID NO: 354612 - protein, 13 aa, Homo sapiens
  CDR3 for beta chain variable domain of TCR clone 177306 (TRBV7-3, TRBJ1-2)
CASSLKRGYGYAF

SEQ ID NO: 354613 - protein, 14 aa, Homo sapiens
  CDR3 for alpha chain variable domain of TCR clone 177307 (TRAV2, TRAJ9)
CAVEDRSGGFKTIF

SEQ ID NO: 354614 - protein, 12 aa, Homo sapiens
  CDR3 for beta chain variable domain of TCR clone 177307 (TRBV29-1, TRBJ2-3)
CSVTGGAGTQYF

SEQ ID NO: 354615 - protein, 14 aa, Homo sapiens
  CDR3 for alpha chain variable domain of TCR clone 177308 (TRAV12-3, TRAJ10)
SHLPLTGGGNKLTF

SEQ ID NO: 354616 - protein, 14 aa, Homo sapiens
  CDR3 for beta chain variable domain of TCR clone 177308 (TRBV11-2, TRBJ2-7)
CASSPDRNTYEQYF

SEQ ID NO: 354617 - protein, 17 aa, Homo sapiens
  CDR3 for alpha chain variable domain of TCR clone 177309 (TRAV3, TRAJ12)
CCDRRDGTMDSSYKLIF

SEQ ID NO: 354618 - protein, 15 aa, Homo sapiens
  CDR3 for beta chain variable domain of TCR clone 177309 (TRBV5-5, TRBJ1-5)
CASSLKGGGEQPQHF

SEQ ID NO: 354619 - protein, 14 aa, Homo sapiens
  CDR3 for alpha chain variable domain of TCR clone 177310 (TRAV13-1, TRAJ48)
CAASTDFGNEKLTF

SEQ ID NO: 354620 - protein, 14 aa, Homo sapiens
  CDR3 for beta chain variable domain of TCR clone 177310 (TRBV10-3, TRBJ2-5)
CATKGGNNQESQYF

SEQ ID NO: 354621 - protein, 13 aa, Homo sapiens
  CDR3 for alpha chain variable domain of TCR clone 177311 (TRAV12-3, TRAJ44)
CARTTGTASKLTF

SEQ ID NO: 354622 - protein, 15 aa, Homo sapiens
  CDR3 for beta chain variable domain of TCR clone 177311 (TRBV29-1, TRBJ1-2)
CSGLDVRGVNYGYTF

SEQ ID NO: 354623 - protein, 12 aa, Homo sapiens
  CDR3 for alpha chain variable domain of TCR clone 177312 (TRAV8-3, TRAJ20)
CAVGANDYKLSF

SEQ ID NO: 354624 - protein, 16 aa, Homo sapiens
  CDR3 for beta chain variable domain of TCR clone 177312 (TRBV11-2, TRBJ2-7)
CASSPTTGGVSYEQYF

SEQ ID NO: 354625 - protein, 15 aa, Homo sapiens
  CDR3 for alpha chain variable domain of TCR clone 177313 (TRAV26-1, TRAJ22)
CIVRVSFWFCKATDL

SEQ ID NO: 354626 - protein, 13 aa, Homo sapiens
  CDR3 for beta chain variable domain of TCR clone 177313 (TRBV7-9, TRBJ1-2)
CASSLKQIYGYTF

SEQ ID NO: 354627 - protein, 17 aa, Homo sapiens
  CDR3 for alpha chain variable domain of TCR clone 177314 (TRAV3, TRAJ6)
CAVRDGPRAGGSSIPTF

SEQ ID NO: 354628 - protein, 15 aa, Homo sapiens
  CDR3 for beta chain variable domain of TCR clone 177314 (TRBV5-1, TRBJ2-3)
CASSVTSGSTDTQYF

SEQ ID NO: 354629 - protein, 17 aa, Homo sapiens
  CDR3 for alpha chain variable domain of TCR clone 177315 (TRAV3, TRAJ6)
CAVRDGPRAGGSYITTF

SEQ ID NO: 354630 - protein, 14 aa, Homo sapiens
  CDR3 for beta chain variable domain of TCR clone 177315 (TRBV7-2, TRBJ2-7)
CASSPKTSFYEQYF

SEQ ID NO: 354631 - protein, 13 aa, Homo sapiens
  CDR3 for alpha chain variable domain of TCR clone 177316 (TRAV38-2/DV8, TRAJ56)
CAYQSRANSKLKF

SEQ ID NO: 354632 - protein, 16 aa, Homo sapiens
  CDR3 for beta chain variable domain of TCR clone 177316 (TRBV28, TRBJ1-1)
CASSSGGQPVATEAFF

SEQ ID NO: 354633 - protein, 13 aa, Homo sapiens
  CDR3 for alpha chain variable domain of TCR clone 177317 (TRAV36/DV7, TRAJ33)
CAVDMDSNYQLFW

SEQ ID NO: 354634 - protein, 16 aa, Homo sapiens
  CDR3 for beta chain variable domain of TCR clone 177317 (TRBV15, TRBJ2-3)
CATRLSGGRAPDTQYF

SEQ ID NO: 354635 - protein, 14 aa, Homo sapiens
  CDR3 for alpha chain variable domain of TCR clone 177318 (TRAV12-2, TRAJ17)
CAVNIKAAGNKLTF

SEQ ID NO: 354636 - protein, 16 aa, Homo sapiens
  CDR3 for beta chain variable domain of TCR clone 177318 (TRBV5-1, TRBJ2-2)
CASSSRTGGRTGELFL

SEQ ID NO: 354637 - protein, 15 aa, Homo sapiens
  CDR3 for alpha chain variable domain of TCR clone 177319 (TRAV19, TRAJ23)
CALSEGRNQGGKLIF

SEQ ID NO: 354638 - protein, 16 aa, Homo sapiens
  CDR3 for beta chain variable domain of TCR clone 177319 (TRBV7-2, TRBJ2-7)
CASSLYLSGGAYEQYF

SEQ ID NO: 354639 - protein, 14 aa, Homo sapiens
  CDR3 for alpha chain variable domain of TCR clone 177320 (TRAV2, TRAJ9)
CAVEDRSGGFKTIF

SEQ ID NO: 354640 - protein, 13 aa, Homo sapiens
  CDR3 for beta chain variable domain of TCR clone 177320 (TRBV7-3, TRBJ1-1)
CASSQDWGAEDFF

SEQ ID NO: 354641 - protein, 13 aa, Homo sapiens
  CDR3 for alpha chain variable domain of TCR clone 177321 (TRAV2, TRAJ21)
CAVEDLNFNKFYF

SEQ ID NO: 354642 - protein, 12 aa, Homo sapiens
  CDR3 for beta chain variable domain of TCR clone 177321 (TRBV12-4, TRBJ2-7)
CASSLGGYEQYF

SEQ ID NO: 354643 - protein, 15 aa, Homo sapiens
  CDR3 for alpha chain variable domain of TCR clone 177322 (TRAV3, TRAJ45)
CAVRTPWGGADGHTF

SEQ ID NO: 354644 - protein, 16 aa, Homo sapiens
  CDR3 for beta chain variable domain of TCR clone 177322 (TRBV6-1, TRBJ2-2)
CASSFGQGANTGELFF

SEQ ID NO: 354645 - protein, 16 aa, Homo sapiens
  CDR3 for alpha chain variable domain of TCR clone 177323 (TRAV30, TRAJ24)
CGTEIVDADSWGKFQF

SEQ ID NO: 354646 - protein, 14 aa, Homo sapiens
  CDR3 for beta chain variable domain of TCR clone 177323 (TRBV11-2, TRBJ2-5)
YASSRTGGIETQYF

SEQ ID NO: 354647 - protein, 15 aa, Homo sapiens
  CDR3 for alpha chain variable domain of TCR clone 177324 (TRAV21, TRAJ53)
CATLNSGGSNYKLTF

SEQ ID NO: 354648 - protein, 15 aa, Homo sapiens
  CDR3 for beta chain variable domain of TCR clone 177324 (TRBV11-2, TRBJ2-1)
CASSSPSTRYNEQFF

SEQ ID NO: 354649 - protein, 14 aa, Homo sapiens
  CDR3 for alpha chain variable domain of TCR clone 177325 (TRAV1-2, TRAJ8)
CAVREDTGFQKLVF

SEQ ID NO: 354650 - protein, 17 aa, Homo sapiens
  CDR3 for beta chain variable domain of TCR clone 177325 (TRBV20-1, TRBJ2-2)
CSASGSGQSGLTGELFF

SEQ ID NO: 354651 - protein, 14 aa, Homo sapiens
  CDR3 for alpha chain variable domain of TCR clone 177326 (TRAV12-3, TRAJ22)
CAMSLFGSARQLTF

SEQ ID NO: 354652 - protein, 14 aa, Homo sapiens
  CDR3 for beta chain variable domain of TCR clone 177326 (TRBV7-8, TRBJ1-2)
CASSAGAAIYGYTF

SEQ ID NO: 354653 - protein, 13 aa, Homo sapiens
  CDR3 for alpha chain variable domain of TCR clone 177327 (TRAV20, TRAJ37)
CAWCSSNTGKLIF

SEQ ID NO: 354654 - protein, 17 aa, Homo sapiens
  CDR3 for beta chain variable domain of TCR clone 177327 (TRBV28, TRBJ2-5)
CASSRQGGLAGAETQYF

SEQ ID NO: 354655 - protein, 14 aa, Homo sapiens
  CDR3 for alpha chain variable domain of TCR clone 177328 (TRAV12-2, TRAJ44)
CAVNPAGTASNLTF

SEQ ID NO: 354656 - protein, 16 aa, Homo sapiens
  CDR3 for beta chain variable domain of TCR clone 177328 (TRBV2, TRBJ2-6)
CASSEVGGAGANVLTF

SEQ ID NO: 354657 - protein, 16 aa, Homo sapiens
  CDR3 for alpha chain variable domain of TCR clone 177329 (TRAV17, TRAJ22)
CATGPISSGSARQLAF

SEQ ID NO: 354658 - protein, 14 aa, Homo sapiens
  CDR3 for beta chain variable domain of TCR clone 177329 (TRBV19, TRBJ2-1)
CASPTFVLSGEQFF

SEQ ID NO: 354659 - protein, 14 aa, Homo sapiens
  CDR3 for alpha chain variable domain of TCR clone 177330 (TRAV1-2, TRAJ16)
CAVNRFSDGQKLLF

SEQ ID NO: 354660 - protein, 18 aa, Homo sapiens
  CDR3 for beta chain variable domain of TCR clone 177330 (TRBV6-6, TRBJ1-3)
CASSYSKWDSISGNTMYF

SEQ ID NO: 354661 - protein, 15 aa, Homo sapiens
  CDR3 for alpha chain variable domain of TCR clone 177331 (TRAV8-3, TRAJ32)
CAVGPYGGATNKLIF

SEQ ID NO: 354662 - protein, 14 aa, Homo sapiens
  CDR3 for beta chain variable domain of TCR clone 177331 (TRBV7-2, TRBJ2-5)
CASSFTQGQETQYF

SEQ ID NO: 354663 - protein, 13 aa, Homo sapiens
  CDR3 for alpha chain variable domain of TCR clone 177332 (TRAV26-2, TRAJ57)
CILSRGGPEKLVF

SEQ ID NO: 354664 - protein, 16 aa, Homo sapiens
  CDR3 for beta chain variable domain of TCR clone 177332 (TRBV18, TRBJ1-5)
CASSPRTGGGNQPQHF

SEQ ID NO: 354665 - protein, 15 aa, Homo sapiens
  CDR3 for alpha chain variable domain of TCR clone 177333 (TRAV4, TRAJ17)
FLVGDIGPAGNKLTF

SEQ ID NO: 354666 - protein, 14 aa, Homo sapiens
  CDR3 for beta chain variable domain of TCR clone 177333 (TRBV6-3, TRBJ2-7)
CASSYSVRVYEQYF

SEQ ID NO: 354667 - protein, 16 aa, Homo sapiens
  CDR3 for alpha chain variable domain of TCR clone 177334 (TRAV3, TRAJ10)
RAVRDMMAGGGNKLTF

SEQ ID NO: 354668 - protein, 19 aa, Homo sapiens
  CDR3 for beta chain variable domain of TCR clone 177334 (TRBV6-3, TRBJ1-2)
CASSYSKGRTGPPNYGYTF

SEQ ID NO: 354669 - protein, 13 aa, Homo sapiens
  CDR3 for alpha chain variable domain of TCR clone 177335 (TRAV12-3, TRAJ33)
CAMSVNSNYQLIW

SEQ ID NO: 354670 - protein, 13 aa, Homo sapiens
  CDR3 for beta chain variable domain of TCR clone 177335 (TRBV7-2, TRBJ2-2)
CARSLEVKGELFF

SEQ ID NO: 354671 - protein, 14 aa, Homo sapiens
  CDR3 for alpha chain variable domain of TCR clone 177336 (TRAV12-2, TRAJ13)
CAVKKTGGYQKVTF

SEQ ID NO: 354672 - protein, 17 aa, Homo sapiens
  CDR3 for beta chain variable domain of TCR clone 177336 (TRBV7-3, TRBJ2-5)
CASSLGSGRSGSETRYI

SEQ ID NO: 354673 - protein, 13 aa, Homo sapiens
  CDR3 for alpha chain variable domain of TCR clone 177337 (TRAV36/DV7, TRAJ41)
CAVSSNSGYALNF

SEQ ID NO: 354674 - protein, 16 aa, Homo sapiens
  CDR3 for beta chain variable domain of TCR clone 177337 (TRBV10-3, TRBJ2-1)
CAISGVGDGGGGEQFF

SEQ ID NO: 354675 - protein, 10 aa, Homo sapiens
  CDR3 for alpha chain variable domain of TCR clone 177338 (TRAV12-3, TRAJ18)
CAMSAEAQPW

SEQ ID NO: 354676 - protein, 15 aa, Homo sapiens
  CDR3 for beta chain variable domain of TCR clone 177338 (TRBV7-9, TRBJ2-2)
CASGPLDTFPGELFF

SEQ ID NO: 354677 - protein, 15 aa, Homo sapiens
  CDR3 for alpha chain variable domain of TCR clone 177339 (TRAV25, TRAJ52)
CAGRPGGTSYGKLTF

SEQ ID NO: 354678 - protein, 14 aa, Homo sapiens
  CDR3 for beta chain variable domain of TCR clone 177339 (TRBV5-1, TRBJ1-6)
CASRPGTSNSPLNF

SEQ ID NO: 354679 - protein, 13 aa, Homo sapiens
  CDR3 for alpha chain variable domain of TCR clone 177340 (TRAV2, TRAJ29)
CAAQNSGNTPLVF

SEQ ID NO: 354680 - protein, 14 aa, Homo sapiens
  CDR3 for beta chain variable domain of TCR clone 177340 (TRBV7-9, TRBJ2-4)
CATSLAMGGNIQYF

SEQ ID NO: 354681 - protein, 16 aa, Homo sapiens
  CDR3 for alpha chain variable domain of TCR clone 177341 (TRAV14/DV4, TRAJ54)
CAMREGRIQGAQKMVF

SEQ ID NO: 354682 - protein, 17 aa, Homo sapiens
  CDR3 for beta chain variable domain of TCR clone 177341 (TRBV7-3, TRBJ2-3)
CASSPRGQGYGTDTQYF

SEQ ID NO: 354683 - protein, 13 aa, Homo sapiens
  CDR3 for alpha chain variable domain of TCR clone 177342 (TRAV16, TRAJ28)
CDLTGAGSYQLTF

SEQ ID NO: 354684 - protein, 16 aa, Homo sapiens
  CDR3 for beta chain variable domain of TCR clone 177342 (TRBV28, TRBJ1-5)
CASSLTGQGWNQPQHF

SEQ ID NO: 354685 - protein, 13 aa, Homo sapiens
  CDR3 for alpha chain variable domain of TCR clone 177343 (TRAV8-3, TRAJ28)
CAVGAVGSYQLTV

SEQ ID NO: 354686 - protein, 15 aa, Homo sapiens
  CDR3 for beta chain variable domain of TCR clone 177343 (TRBV7-9, TRBJ1-5)
CASSQGHQPKQPQHF

SEQ ID NO: 354687 - protein, 13 aa, Homo sapiens
  CDR3 for alpha chain variable domain of TCR clone 177344 (TRAV20, TRAJ37)
CAGCSSNTGKLIF

SEQ ID NO: 354688 - protein, 13 aa, Homo sapiens
  CDR3 for beta chain variable domain of TCR clone 177344 (TRBV6-1, TRBJ1-1)
CASSRQGNTEAFF

SEQ ID NO: 354689 - protein, 15 aa, Homo sapiens
  CDR3 for alpha chain variable domain of TCR clone 177345 (TRAV27, TRAJ38)
CAARRNAGNSRKLIW

SEQ ID NO: 354690 - protein, 13 aa, Homo sapiens
  CDR3 for beta chain variable domain of TCR clone 177345 (TRBV12-5, TRBJ2-3)
CASGDRRSDTQYF

SEQ ID NO: 354691 - protein, 15 aa, Homo sapiens
  CDR3 for alpha chain variable domain of TCR clone 177346 (TRAV3, TRAJ3)
CAVRDRHSSASKIIF

SEQ ID NO: 354692 - protein, 12 aa, Homo sapiens
  CDR3 for beta chain variable domain of TCR clone 177346 (TRBV29-1, TRBJ2-3)
CSVTGGADTQYF

SEQ ID NO: 354693 - protein, 14 aa, Homo sapiens
  CDR3 for alpha chain variable domain of TCR clone 177347 (TRAV1-1, TRAJ35)
CAVRSIGFGNVLHC

SEQ ID NO: 354694 - protein, 14 aa, Homo sapiens
  CDR3 for beta chain variable domain of TCR clone 177347 (TRBV12-5, TRBJ2-5)
CASGSRTHQETQYF

SEQ ID NO: 354695 - protein, 11 aa, Homo sapiens
  CDR3 for alpha chain variable domain of TCR clone 177348 (TRAV3, TRAJ33)
CSVRRNYQLIW

SEQ ID NO: 354696 - protein, 15 aa, Homo sapiens
  CDR3 for beta chain variable domain of TCR clone 177348 (TRBV28, TRBJ1-5)
CASSDQVYSNQPQHY

SEQ ID NO: 354697 - protein, 16 aa, Homo sapiens
  CDR3 for alpha chain variable domain of TCR clone 177349 (TRAV30, TRAJ24)
CGTEIVDADSWGKFQF

SEQ ID NO: 354698 - protein, 13 aa, Homo sapiens
  CDR3 for beta chain variable domain of TCR clone 177349 (TRBV11-3, TRBJ1-1)
CATEEGLNTEAFF

SEQ ID NO: 354699 - protein, 15 aa, Homo sapiens
  CDR3 for alpha chain variable domain of TCR clone 177350 (TRAV3, TRAJ29)
CAVRDLYSGNTPLVF

SEQ ID NO: 354700 - protein, 16 aa, Homo sapiens
  CDR3 for beta chain variable domain of TCR clone 177350 (TRBV7-3, TRBJ2-2)
CASSLKRGTLSGELFF

SEQ ID NO: 354701 - protein, 15 aa, Homo sapiens
  CDR3 for alpha chain variable domain of TCR clone 177351 (TRAV12-3, TRAJ6)
CAMSATTGGSYIPTF

SEQ ID NO: 354702 - protein, 14 aa, Homo sapiens
  CDR3 for beta chain variable domain of TCR clone 177351 (TRBV7-9, TRBJ2-3)
CASSLEDGTDTQYF

SEQ ID NO: 354703 - protein, 14 aa, Homo sapiens
  CDR3 for alpha chain variable domain of TCR clone 177352 (TRAV26-1, TRAJ38)
CIAYNADNNRKLIW

SEQ ID NO: 354704 - protein, 16 aa, Homo sapiens
  CDR3 for beta chain variable domain of TCR clone 177352 (TRBV19, TRBJ2-1)
CASSKAGPSSYNEQFF

SEQ ID NO: 354705 - protein, 20 aa, Homo sapiens
  CDR3 for alpha chain variable domain of TCR clone 177353 (TRAV8-3, )
CAVGAGDIQNPDPAVYQLRD

SEQ ID NO: 354706 - protein, 14 aa, Homo sapiens
  CDR3 for beta chain variable domain of TCR clone 177353 (TRBV19, TRBJ2-1)
CARGARSFQWEQFF

SEQ ID NO: 354707 - protein, 14 aa, Homo sapiens
  CDR3 for alpha chain variable domain of TCR clone 177354 (TRAV17, TRAJ35)
CATDRPGFGNLLHC

SEQ ID NO: 354708 - protein, 19 aa, Homo sapiens
  CDR3 for beta chain variable domain of TCR clone 177354 (TRBV11-3, TRBJ2-2)
CASSTRPGAKTTNTGELFF

SEQ ID NO: 354709 - protein, 11 aa, Homo sapiens
  CDR3 for alpha chain variable domain of TCR clone 177355 (TRAV17, TRAJ31)
CATSNSARLMF

SEQ ID NO: 354710 - protein, 14 aa, Homo sapiens
  CDR3 for beta chain variable domain of TCR clone 177355 (TRBV18, TRBJ2-7)
CASSPRGGAYEQYF

SEQ ID NO: 354711 - protein, 14 aa, Homo sapiens
  CDR3 for alpha chain variable domain of TCR clone 177356 (TRAV26-1, TRAJ34)
CIVIVAYNTDKPIF

SEQ ID NO: 354712 - protein, 15 aa, Homo sapiens
  CDR3 for beta chain variable domain of TCR clone 177356 (TRBV20-1, TRBJ2-7)
CSARVPSAYFYKQYF

SEQ ID NO: 354713 - protein, 17 aa, Homo sapiens
  CDR3 for alpha chain variable domain of TCR clone 177357 (TRAV12-2, TRAJ36)
CAVKDNLFFGTGTKLTV

SEQ ID NO: 354714 - protein, 15 aa, Homo sapiens
  CDR3 for beta chain variable domain of TCR clone 177357 (TRBV28, TRBJ2-2)
CASTVAGANTGELFF

SEQ ID NO: 354715 - protein, 14 aa, Homo sapiens
  CDR3 for alpha chain variable domain of TCR clone 177358 (TRAV16, TRAJ39)
CALSKNNAGNMLTF

SEQ ID NO: 354716 - protein, 16 aa, Homo sapiens
  CDR3 for beta chain variable domain of TCR clone 177358 (TRBV6-6, TRBJ2-1)
FASSYSFSGSYNEQFF

SEQ ID NO: 354717 - protein, 17 aa, Homo sapiens
  CDR3 for alpha chain variable domain of TCR clone 177359 (TRAV26-1, TRAJ37)
CIVRVITVSSNTGKLIF

SEQ ID NO: 354718 - protein, 15 aa, Homo sapiens
  CDR3 for beta chain variable domain of TCR clone 177359 (TRBV11-3, TRBJ2-7)
CASSPGPASSYEQYF

SEQ ID NO: 354719 - protein, 11 aa, Homo sapiens
  CDR3 for alpha chain variable domain of TCR clone 177360 (TRAV13-2, TRAJ26)
CAEIPGQNFVF

SEQ ID NO: 354720 - protein, 14 aa, Homo sapiens
  CDR3 for beta chain variable domain of TCR clone 177360 (TRBV19, TRBJ2-1)
CASPTFVLSGEQFF

SEQ ID NO: 354721 - protein, 15 aa, Homo sapiens
  CDR3 for alpha chain variable domain of TCR clone 177361 (TRAV16, TRAJ17)
CALSQIKAAGNKLTF

SEQ ID NO: 354722 - protein, 17 aa, Homo sapiens
  CDR3 for beta chain variable domain of TCR clone 177361 (TRBV11-2, TRBJ2-1)
CASSLYPPGVEYNEQFF

SEQ ID NO: 354723 - protein, 11 aa, Homo sapiens
  CDR3 for alpha chain variable domain of TCR clone 177362 (TRAV12-2, TRAJ33)
CTVTSNYQLIW

SEQ ID NO: 354724 - protein, 14 aa, Homo sapiens
  CDR3 for beta chain variable domain of TCR clone 177362 (TRBV28, TRBJ2-2)
CASRIRSGTGELFY

SEQ ID NO: 354725 - protein, 14 aa, Homo sapiens
  CDR3 for alpha chain variable domain of TCR clone 177363 (TRAV17, TRAJ57)
CATDPQGGSEKRVF

SEQ ID NO: 354726 - protein, 14 aa, Homo sapiens
  CDR3 for beta chain variable domain of TCR clone 177363 (TRBV27, TRBJ2-5)
CASSSLKGWETQYF

SEQ ID NO: 354727 - protein, 13 aa, Homo sapiens
  CDR3 for alpha chain variable domain of TCR clone 177364 (TRAV9-2, TRAJ39)
CALYIYNAGTCSP

SEQ ID NO: 354728 - protein, 14 aa, Homo sapiens
  CDR3 for beta chain variable domain of TCR clone 177364 (TRBV6-1, TRBJ1-3)
CASVQGGGGNTIYF

SEQ ID NO: 354729 - protein, 15 aa, Homo sapiens
  CDR3 for alpha chain variable domain of TCR clone 177365 (TRAV36/DV7, TRAJ28)
CAVGTLGLGVTNSLS

SEQ ID NO: 354730 - protein, 13 aa, Homo sapiens
  CDR3 for beta chain variable domain of TCR clone 177365 (TRBV4-2, TRBJ1-1)
CASSQAGNTEAFF

SEQ ID NO: 354731 - protein, 16 aa, Homo sapiens
  CDR3 for alpha chain variable domain of TCR clone 177366 (TRAV3, TRAJ10)
CAVRDMRAGGGNKLTF

SEQ ID NO: 354732 - protein, 17 aa, Homo sapiens
  CDR3 for beta chain variable domain of TCR clone 177366 (TRBV6-5, TRBJ2-4)
CASRPTPGQASKNIQYF

SEQ ID NO: 354733 - protein, 12 aa, Homo sapiens
  CDR3 for alpha chain variable domain of TCR clone 177367 (TRAV12-2, TRAJ47)
CAVAEYGNKLVF

SEQ ID NO: 354734 - protein, 15 aa, Homo sapiens
  CDR3 for beta chain variable domain of TCR clone 177367 (TRBV28, TRBJ2-1)
CASSRIAGGRSEQFF

SEQ ID NO: 354735 - protein, 13 aa, Homo sapiens
  CDR3 for alpha chain variable domain of TCR clone 177368 (TRAV12-2, TRAJ50)
CAVIVTSYDKVIF

SEQ ID NO: 354736 - protein, 15 aa, Homo sapiens
  CDR3 for beta chain variable domain of TCR clone 177368 (TRBV28, TRBJ2-1)
CASSFQEGVYNEQFF

SEQ ID NO: 354737 - protein, 13 aa, Homo sapiens
  CDR3 for alpha chain variable domain of TCR clone 177369 (TRAV13-1, TRAJ5)
CAARVTGGRALTF

SEQ ID NO: 354738 - protein, 15 aa, Homo sapiens
  CDR3 for beta chain variable domain of TCR clone 177369 (TRBV28, TRBJ2-7)
CASSPGGRGFYEQYF

SEQ ID NO: 354739 - protein, 12 aa, Homo sapiens
  CDR3 for alpha chain variable domain of TCR clone 177370 (TRAV13-2, TRAJ23)
CAERHRGGKLIF

SEQ ID NO: 354740 - protein, 14 aa, Homo sapiens
  CDR3 for beta chain variable domain of TCR clone 177370 (TRBV19, TRBJ1-5)
CASRAPDSFLSQHF

SEQ ID NO: 354741 - protein, 13 aa, Homo sapiens
  CDR3 for alpha chain variable domain of TCR clone 177371 (TRAV21, TRAJ57)
RAVTQGGSEKLVF

SEQ ID NO: 354742 - protein, 13 aa, Homo sapiens
  CDR3 for beta chain variable domain of TCR clone 177371 (TRBV10-3, TRBJ2-7)
CASKLAVNYEQYF

SEQ ID NO: 354743 - protein, 16 aa, Homo sapiens
  CDR3 for alpha chain variable domain of TCR clone 177372 (TRAV3, TRAJ10)
CAVRDMRAGGGNKLTC

SEQ ID NO: 354744 - protein, 19 aa, Homo sapiens
  CDR3 for beta chain variable domain of TCR clone 177372 (TRBV6-3, TRBJ1-2)
CASSYSKGRTGPPNYGYTF

SEQ ID NO: 354745 - protein, 15 aa, Homo sapiens
  CDR3 for alpha chain variable domain of TCR clone 177373 (TRAV3, TRAJ22)
CAVRDRGGSARQLTF

SEQ ID NO: 354746 - protein, 16 aa, Homo sapiens
  CDR3 for beta chain variable domain of TCR clone 177373 (TRBV5-4, TRBJ2-3)
CASQQPGGGGSDTQYF

SEQ ID NO: 354747 - protein, 15 aa, Homo sapiens
  CDR3 for alpha chain variable domain of TCR clone 177374 (TRAV12-3, TRAJ27)
CAMRAYNTNAGKSTF

SEQ ID NO: 354748 - protein, 13 aa, Homo sapiens
  CDR3 for beta chain variable domain of TCR clone 177374 (TRBV11-2, TRBJ2-5)
CASSFSSQETQYF

SEQ ID NO: 354749 - protein, 15 aa, Homo sapiens
  CDR3 for alpha chain variable domain of TCR clone 177375 (TRAV12-1, TRAJ45)
CVVLSGGGGADGRTF

SEQ ID NO: 354750 - protein, 15 aa, Homo sapiens
  CDR3 for beta chain variable domain of TCR clone 177375 (TRBV7-2, TRBJ2-1)
CASTHGTGIYNEQFF

SEQ ID NO: 354751 - protein, 12 aa, Homo sapiens
  CDR3 for alpha chain variable domain of TCR clone 177376 (TRAV21, TRAJ20)
CAVRGNDYKLSF

SEQ ID NO: 354752 - protein, 12 aa, Homo sapiens
  CDR3 for beta chain variable domain of TCR clone 177376 (TRBV7-8, TRBJ2-2)
CASSLGGGELFF

SEQ ID NO: 354753 - protein, 13 aa, Homo sapiens
  CDR3 for alpha chain variable domain of TCR clone 177377 (TRAV24, TRAJ32)
CADLGGATNKLIF

SEQ ID NO: 354754 - protein, 14 aa, Homo sapiens
  CDR3 for beta chain variable domain of TCR clone 177377 (TRBV28, TRBJ1-6)
CASSLWADYSPLHF

SEQ ID NO: 354755 - protein, 11 aa, Homo sapiens
  CDR3 for alpha chain variable domain of TCR clone 177378 (TRAV3, TRAJ21)
CAVGNFNKFYF

SEQ ID NO: 354756 - protein, 17 aa, Homo sapiens
  CDR3 for beta chain variable domain of TCR clone 177378 (TRBV24-1, TRBJ2-4)
CATSDAEARGVRNSQYF

SEQ ID NO: 354757 - protein, 11 aa, Homo sapiens
  CDR3 for alpha chain variable domain of TCR clone 177379 (TRAV2, TRAJ33)
CAVESNYQLIW

SEQ ID NO: 354758 - protein, 13 aa, Homo sapiens
  CDR3 for beta chain variable domain of TCR clone 177379 (TRBV6-6, TRBJ2-7)
CVSSPKHLAEQYF

SEQ ID NO: 354759 - protein, 14 aa, Homo sapiens
  CDR3 for alpha chain variable domain of TCR clone 177380 (TRAV29/DV5, TRAJ40)
CEASLAPGTYKYIF

SEQ ID NO: 354760 - protein, 14 aa, Homo sapiens
  CDR3 for beta chain variable domain of TCR clone 177380 (TRBV19, TRBJ2-1)
CASPTFVLSGEQFF

SEQ ID NO: 354761 - protein, 15 aa, Homo sapiens
  CDR3 for alpha chain variable domain of TCR clone 177381 (TRAV12-1, TRAJ44)
CVADLPTGTASKLTF

SEQ ID NO: 354762 - protein, 12 aa, Homo sapiens
  CDR3 for beta chain variable domain of TCR clone 177381 (TRBV7-8, TRBJ2-7)
CASSLGDREQYF

SEQ ID NO: 354763 - protein, 14 aa, Homo sapiens
  CDR3 for alpha chain variable domain of TCR clone 177382 (TRAV1-2, TRAJ16)
CAVNRFTDGQKLLF

SEQ ID NO: 354764 - protein, 14 aa, Homo sapiens
  CDR3 for beta chain variable domain of TCR clone 177382 (TRBV7-9, TRBJ1-4)
CAITEGEANEKLFF

SEQ ID NO: 354765 - protein, 16 aa, Homo sapiens
  CDR3 for alpha chain variable domain of TCR clone 177383 (TRAV30, TRAJ24)
CGTEIVDAASGGKFQF

SEQ ID NO: 354766 - protein, 15 aa, Homo sapiens
  CDR3 for beta chain variable domain of TCR clone 177383 (TRBV7-9, TRBJ1-6)
CASSSPGRGNSPLHF

SEQ ID NO: 354767 - protein, 14 aa, Homo sapiens
  CDR3 for alpha chain variable domain of TCR clone 177384 (TRAV29/DV5, TRAJ20)
CAATIRSNDYKLSF

SEQ ID NO: 354768 - protein, 15 aa, Homo sapiens
  CDR3 for beta chain variable domain of TCR clone 177384 (TRBV20-1, TRBJ2-1)
CSASSAGSSYNEQAF

SEQ ID NO: 354769 - protein, 15 aa, Homo sapiens
  CDR3 for alpha chain variable domain of TCR clone 177385 (TRAV8-4, TRAJ37)
CAVTYGSSNTGKLIF

SEQ ID NO: 354770 - protein, 13 aa, Homo sapiens
  CDR3 for beta chain variable domain of TCR clone 177385 (TRBV12-4, TRBJ2-5)
CARSLGGSRTQYF

SEQ ID NO: 354771 - protein, 16 aa, Homo sapiens
  CDR3 for alpha chain variable domain of TCR clone 177386 (TRAV14/DV4, TRAJ54)
CAMREGRFQGAQKLVF

SEQ ID NO: 354772 - protein, 13 aa, Homo sapiens
  CDR3 for beta chain variable domain of TCR clone 177386 (TRBV7-9, TRBJ1-2)
CASSLKQNYGYTF

SEQ ID NO: 354773 - protein, 11 aa, Homo sapiens
  CDR3 for alpha chain variable domain of TCR clone 177387 (TRAV3, TRAJ32)
CAVREGIMVVL

SEQ ID NO: 354774 - protein, 13 aa, Homo sapiens
  CDR3 for beta chain variable domain of TCR clone 177387 (TRBV2, TRBJ1-1)
CASSEGGNPEAFF

SEQ ID NO: 354775 - protein, 15 aa, Homo sapiens
  CDR3 for alpha chain variable domain of TCR clone 177388 (TRAV26-1, TRAJ42)
CIVRVKGGSQGNLIF

SEQ ID NO: 354776 - protein, 14 aa, Homo sapiens
  CDR3 for beta chain variable domain of TCR clone 177388 (TRBV19, TRBJ2-2)
CATTGHANTGELLF

SEQ ID NO: 354777 - protein, 11 aa, Homo sapiens
  CDR3 for alpha chain variable domain of TCR clone 177389 (TRAV2, TRAJ13)
CASGGYQKVTF

SEQ ID NO: 354778 - protein, 13 aa, Homo sapiens
  CDR3 for beta chain variable domain of TCR clone 177389 (TRBV25-1, TRBJ1-2)
CASSENMGRGYTF

SEQ ID NO: 354779 - protein, 15 aa, Homo sapiens
  CDR3 for alpha chain variable domain of TCR clone 177390 (TRAV17, TRAJ57)
CATGPSQGGSEKLVF

SEQ ID NO: 354780 - protein, 10 aa, Homo sapiens
  CDR3 for beta chain variable domain of TCR clone 177390 (TRBV6-3, TRBJ2-2)
CASRDGELFF

SEQ ID NO: 354781 - protein, 13 aa, Homo sapiens
  CDR3 for alpha chain variable domain of TCR clone 177391 (TRAV17, TRAJ34)
CATDLYNTDKLIF

SEQ ID NO: 354782 - protein, 15 aa, Homo sapiens
  CDR3 for beta chain variable domain of TCR clone 177391 (TRBV20-1, TRBJ2-3)
CSATGTSGSTDTQYF

SEQ ID NO: 354783 - protein, 14 aa, Homo sapiens
  CDR3 for alpha chain variable domain of TCR clone 177392 (TRAV2, TRAJ9)
CAVEDRSGGFKTIF

SEQ ID NO: 354784 - protein, 14 aa, Homo sapiens
  CDR3 for beta chain variable domain of TCR clone 177392 (TRBV6-1, TRBJ1-3)
CASVQGGGGNTIYF

SEQ ID NO: 354785 - protein, 10 aa, Homo sapiens
  CDR3 for alpha chain variable domain of TCR clone 177393 (TRAV1-2, TRAJ18)
CAVRGEAQTW

SEQ ID NO: 354786 - protein, 15 aa, Homo sapiens
  CDR3 for beta chain variable domain of TCR clone 177393 (TRBV20-1, TRBJ2-1)
CSAEGGLLAGDEQFF

SEQ ID NO: 354787 - protein, 15 aa, Homo sapiens
  CDR3 for alpha chain variable domain of TCR clone 177394 (TRAV8-3, TRAJ27)
CAVVPSKTNAGKSNF

SEQ ID NO: 354788 - protein, 15 aa, Homo sapiens
  CDR3 for beta chain variable domain of TCR clone 177394 (TRBV7-2, TRBJ2-1)
CASSSGLAGGNEQFF

SEQ ID NO: 354789 - protein, 16 aa, Homo sapiens
  CDR3 for alpha chain variable domain of TCR clone 177395 (TRAV12-3, TRAJ53)
CAMSPGSGGSNYKMTF

SEQ ID NO: 354790 - protein, 12 aa, Homo sapiens
  CDR3 for beta chain variable domain of TCR clone 177395 (TRBV11-2, TRBJ2-2)
CASSLPTGELFF

SEQ ID NO: 354791 - protein, 14 aa, Homo sapiens
  CDR3 for alpha chain variable domain of TCR clone 177396 (TRAV12-2, TRAJ13)
CAAKKTGGYQKFTF

SEQ ID NO: 354792 - protein, 14 aa, Homo sapiens
  CDR3 for beta chain variable domain of TCR clone 177396 (TRBV5-5, TRBJ2-7)
CASSLGQGTYEQYF

SEQ ID NO: 354793 - protein, 14 aa, Homo sapiens
  CDR3 for alpha chain variable domain of TCR clone 177397 (TRAV27, TRAJ36)
CAGPPKRGANNLFF

SEQ ID NO: 354794 - protein, 15 aa, Homo sapiens
  CDR3 for beta chain variable domain of TCR clone 177397 (TRBV18, TRBJ2-7)
CASSPASTPNYEQYF

SEQ ID NO: 354795 - protein, 20 aa, Homo sapiens
  CDR3 for alpha chain variable domain of TCR clone 177398 (TRAV26-1, TRAJ37)
CCVLLHRQRGCSGNTGKLIF

SEQ ID NO: 354796 - protein, 17 aa, Homo sapiens
  CDR3 for beta chain variable domain of TCR clone 177398 (TRBV4-1, TRBJ2-7)
CASSRDPLGVRGGEQYF

SEQ ID NO: 354797 - protein, 14 aa, Homo sapiens
  CDR3 for alpha chain variable domain of TCR clone 177399 (TRAV8-1, TRAJ13)
CAVKSSGGYQKVTF

SEQ ID NO: 354798 - protein, 13 aa, Homo sapiens
  CDR3 for beta chain variable domain of TCR clone 177399 (TRBV6-1, TRBJ1-1)
CASSWTVDTEAFF

SEQ ID NO: 354799 - protein, 12 aa, Homo sapiens
  CDR3 for alpha chain variable domain of TCR clone 177400 (TRAV2, TRAJ9)
CAVGAGGFKTIF

SEQ ID NO: 354800 - protein, 14 aa, Homo sapiens
  CDR3 for beta chain variable domain of TCR clone 177400 (TRBV28, TRBJ2-3)
CASRSRDSTDTQYF

SEQ ID NO: 354801 - protein, 14 aa, Homo sapiens
  CDR3 for alpha chain variable domain of TCR clone 177401 (TRAV12-2, TRAJ22)
CAVRFSCSARQLTF

SEQ ID NO: 354802 - protein, 13 aa, Homo sapiens
  CDR3 for beta chain variable domain of TCR clone 177401 (TRBV6-1, TRBJ2-1)
CASTGTGLNEQFF

SEQ ID NO: 354803 - protein, 13 aa, Homo sapiens
  CDR3 for alpha chain variable domain of TCR clone 177402 (TRAV27, TRAJ53)
CAGQGGSNYKLTF

SEQ ID NO: 354804 - protein, 16 aa, Homo sapiens
  CDR3 for beta chain variable domain of TCR clone 177402 (TRBV24-1, TRBJ2-3)
CATSDPGTGATDTQYF

SEQ ID NO: 354805 - protein, 11 aa, Homo sapiens
  CDR3 for alpha chain variable domain of TCR clone 177403 (TRAV4, TRAJ21)
CLIYNLNKFYF

SEQ ID NO: 354806 - protein, 17 aa, Homo sapiens
  CDR3 for beta chain variable domain of TCR clone 177403 (TRBV23-1, TRBJ2-1)
CISAPAVNRDQGGEQFF

SEQ ID NO: 354807 - protein, 13 aa, Homo sapiens
  CDR3 for alpha chain variable domain of TCR clone 177404 (TRAV12-1, TRAJ20)
CVVNVPNDYKLSF

SEQ ID NO: 354808 - protein, 12 aa, Homo sapiens
  CDR3 for beta chain variable domain of TCR clone 177404 (TRBV11-2, TRBJ2-1)
CASSVQLEGQFF

SEQ ID NO: 354809 - protein, 14 aa, Homo sapiens
  CDR3 for alpha chain variable domain of TCR clone 177405 (TRAV1-2, TRAJ16)
CAVNRFSDGQKLLF

SEQ ID NO: 354810 - protein, 12 aa, Homo sapiens
  CDR3 for beta chain variable domain of TCR clone 177405 (TRBV20-1, TRBJ2-5)
FSAPRSQETQYF

SEQ ID NO: 354811 - protein, 13 aa, Homo sapiens
  CDR3 for alpha chain variable domain of TCR clone 177406 (TRAV17, TRAJ15)
CATDARAGTALIF

SEQ ID NO: 354812 - protein, 14 aa, Homo sapiens
  CDR3 for beta chain variable domain of TCR clone 177406 (TRBV7-3, TRBJ2-1)
CASSLAGGTNEQFF

SEQ ID NO: 354813 - protein, 12 aa, Homo sapiens
  CDR3 for alpha chain variable domain of TCR clone 177407 (TRAV8-3, TRAJ6)
CAVAGGSYIPTF

SEQ ID NO: 354814 - protein, 16 aa, Homo sapiens
  CDR3 for beta chain variable domain of TCR clone 177407 (TRBV7-3, TRBJ2-2)
CASSLKRGTLSGELFF

SEQ ID NO: 354815 - protein, 11 aa, Homo sapiens
  CDR3 for alpha chain variable domain of TCR clone 177408 (TRAV1-2, TRAJ20)
CAVANDYKLSF

SEQ ID NO: 354816 - protein, 14 aa, Homo sapiens
  CDR3 for beta chain variable domain of TCR clone 177408 (TRBV12-5, TRBJ2-5)
CASGSRTHQETHYF

SEQ ID NO: 354817 - protein, 13 aa, Homo sapiens
  CDR3 for alpha chain variable domain of TCR clone 177409 (TRAV16, TRAJ54)
CALMVQGAQKLVF

SEQ ID NO: 354818 - protein, 12 aa, Homo sapiens
  CDR3 for beta chain variable domain of TCR clone 177409 (TRBV18, TRBJ2-7)
CVSSTAMGEQYF

SEQ ID NO: 354819 - protein, 14 aa, Homo sapiens
  CDR3 for alpha chain variable domain of TCR clone 177410 (TRAV8-3, TRAJ4)
CAVGAAGGYNKLIF

SEQ ID NO: 354820 - protein, 14 aa, Homo sapiens
  CDR3 for beta chain variable domain of TCR clone 177410 (TRBV4-2, TRBJ2-3)
CASRETRAPGMQYF

SEQ ID NO: 354821 - protein, 14 aa, Homo sapiens
  CDR3 for alpha chain variable domain of TCR clone 177411 (TRAV1-2, TRAJ16)
CAVNRFSDGQKLLF

SEQ ID NO: 354822 - protein, 15 aa, Homo sapiens
  CDR3 for beta chain variable domain of TCR clone 177411 (TRBV12-4, TRBJ1-1)
CASSLAVSRGAEAFF

SEQ ID NO: 354823 - protein, 17 aa, Homo sapiens
  CDR3 for alpha chain variable domain of TCR clone 177412 (TRAV23/DV6, TRAJ9)
CAASLSPPNTGGFKTIF

SEQ ID NO: 354824 - protein, 14 aa, Homo sapiens
  CDR3 for beta chain variable domain of TCR clone 177412 (TRBV11-2, TRBJ2-5)
CASGRTGGIETKYF

SEQ ID NO: 354825 - protein, 14 aa, Homo sapiens
  CDR3 for alpha chain variable domain of TCR clone 177413 (TRAV17, TRAJ56)
CATDYTGANSKLTF

SEQ ID NO: 354826 - protein, 14 aa, Homo sapiens
  CDR3 for beta chain variable domain of TCR clone 177413 (TRBV18, TRBJ2-5)
CASSPRASSETQYF

SEQ ID NO: 354827 - protein, 15 aa, Homo sapiens
  CDR3 for alpha chain variable domain of TCR clone 177414 (TRAV26-1, TRAJ29)
CIVRVEGSGNTPLVF

SEQ ID NO: 354828 - protein, 15 aa, Homo sapiens
  CDR3 for beta chain variable domain of TCR clone 177414 (TRBV7-9, TRBJ1-5)
CAGSQGHQPNQPRHF

SEQ ID NO: 354829 - protein, 16 aa, Homo sapiens
  CDR3 for alpha chain variable domain of TCR clone 177415 (TRAV16, TRAJ52)
CALSAAGGTSYGKLTF

SEQ ID NO: 354830 - protein, 16 aa, Homo sapiens
  CDR3 for beta chain variable domain of TCR clone 177415 (TRBV4-2, TRBJ2-3)
CASSQELAGDTDTQYF

SEQ ID NO: 354831 - protein, 13 aa, Homo sapiens
  CDR3 for alpha chain variable domain of TCR clone 177416 (TRAV12-3, TRAJ33)
CAMSMNSNYQLIW

SEQ ID NO: 354832 - protein, 12 aa, Homo sapiens
  CDR3 for beta chain variable domain of TCR clone 177416 (TRBV11-2, TRBJ2-2)
CASSLGGGELFF

SEQ ID NO: 354833 - protein, 14 aa, Homo sapiens
  CDR3 for alpha chain variable domain of TCR clone 177417 (TRAV38-1, TRAJ45)
CAYYSGGGSDGLPF

SEQ ID NO: 354834 - protein, 20 aa, Homo sapiens
  CDR3 for beta chain variable domain of TCR clone 177417 (TRBV28, TRBJ2-1)
CASTPIGRSPGLAGGNEQFF

SEQ ID NO: 354835 - protein, 15 aa, Homo sapiens
  CDR3 for alpha chain variable domain of TCR clone 177418 (TRAV8-1, TRAJ6)
CAVNTPPGGSYIPTF

SEQ ID NO: 354836 - protein, 13 aa, Homo sapiens
  CDR3 for beta chain variable domain of TCR clone 177418 (TRBV20-1, TRBJ1-1)
CSARGGGNTEAFF

SEQ ID NO: 354837 - protein, 16 aa, Homo sapiens
  CDR3 for alpha chain variable domain of TCR clone 177419 (TRAV26-1, TRAJ36)
CIVRVSYQTEANNLFF

SEQ ID NO: 354838 - protein, 13 aa, Homo sapiens
  CDR3 for beta chain variable domain of TCR clone 177419 (TRBV5-5, TRBJ1-5)
CASSLGIGGDQHF

SEQ ID NO: 354839 - protein, 11 aa, Homo sapiens
  CDR3 for alpha chain variable domain of TCR clone 177420 (TRAV1-1, TRAJ23)
CAVRQGGKLTF

SEQ ID NO: 354840 - protein, 12 aa, Homo sapiens
  CDR3 for beta chain variable domain of TCR clone 177420 (TRBV19, TRBJ1-5)
CASSIAQQPQHF

SEQ ID NO: 354841 - protein, 12 aa, Homo sapiens
  CDR3 for alpha chain variable domain of TCR clone 177421 (TRAV12-1, TRAJ34)
CVVTFNTDKVIF

SEQ ID NO: 354842 - protein, 17 aa, Homo sapiens
  CDR3 for beta chain variable domain of TCR clone 177421 (TRBV5-1, TRBJ2-2)
CASSEKPNFANTGELFF

SEQ ID NO: 354843 - protein, 14 aa, Homo sapiens
  CDR3 for alpha chain variable domain of TCR clone 177422 (TRAV26-2, TRAJ31)
CILIPGNNNARLML

SEQ ID NO: 354844 - protein, 16 aa, Homo sapiens
  CDR3 for beta chain variable domain of TCR clone 177422 (TRBV7-3, TRBJ2-1)
CASSLVSGSSNNEQFF

SEQ ID NO: 354845 - protein, 14 aa, Homo sapiens
  CDR3 for alpha chain variable domain of TCR clone 177423 (TRAV1-2, TRAJ8)
CAAREDTGFQKLVF

SEQ ID NO: 354846 - protein, 15 aa, Homo sapiens
  CDR3 for beta chain variable domain of TCR clone 177423 (TRBV4-2, TRBJ1-2)
CASSRNTGAGYGYTF

SEQ ID NO: 354847 - protein, 15 aa, Homo sapiens
  CDR3 for alpha chain variable domain of TCR clone 177424 (TRAV25, TRAJ23)
CALAPYYNQGGKLIF

SEQ ID NO: 354848 - protein, 13 aa, Homo sapiens
  CDR3 for beta chain variable domain of TCR clone 177424 (TRBV11-3, TRBJ1-1)
CASSWDGNTEAFF

SEQ ID NO: 354849 - protein, 12 aa, Homo sapiens
  CDR3 for alpha chain variable domain of TCR clone 177425 (TRAV12-2, TRAJ10)
CGVTGGGNKLNF

SEQ ID NO: 354850 - protein, 14 aa, Homo sapiens
  CDR3 for beta chain variable domain of TCR clone 177425 (TRBV12-4, TRBJ1-4)
CASSRQGANEKLFF

SEQ ID NO: 354851 - protein, 12 aa, Homo sapiens
  CDR3 for alpha chain variable domain of TCR clone 177426 (TRAV5, TRAJ43)
CAESMDNNDMRF

SEQ ID NO: 354852 - protein, 12 aa, Homo sapiens
  CDR3 for beta chain variable domain of TCR clone 177426 (TRBV12-4, TRBJ2-7)
CASNPGGGEQYF

SEQ ID NO: 354853 - protein, 14 aa, Homo sapiens
  CDR3 for alpha chain variable domain of TCR clone 177427 (TRAV22, TRAJ6)
CAGVGPGGSYIPTF

SEQ ID NO: 354854 - protein, 11 aa, Homo sapiens
  CDR3 for beta chain variable domain of TCR clone 177427 (TRBV20-1, TRBJ2-1)
CSLSSGSEQIF

SEQ ID NO: 354855 - protein, 14 aa, Homo sapiens
  CDR3 for alpha chain variable domain of TCR clone 177428 (TRAV17, TRAJ45)
CATASGGGGDGLTF

SEQ ID NO: 354856 - protein, 15 aa, Homo sapiens
  CDR3 for beta chain variable domain of TCR clone 177428 (TRBV11-2, TRBJ2-1)
CASSRNRGLMNEQFF

SEQ ID NO: 354857 - protein, 15 aa, Homo sapiens
  CDR3 for alpha chain variable domain of TCR clone 177429 (TRAV26-1, TRAJ56)
CIVRVATGANSKVTF

SEQ ID NO: 354858 - protein, 16 aa, Homo sapiens
  CDR3 for beta chain variable domain of TCR clone 177429 (TRBV12-5, TRBJ2-5)
CASGPRTSGNQETQYF

SEQ ID NO: 354859 - protein, 13 aa, Homo sapiens
  CDR3 for alpha chain variable domain of TCR clone 177430 (TRAV2, TRAJ40)
CAVVTSVTYKYIF

SEQ ID NO: 354860 - protein, 15 aa, Homo sapiens
  CDR3 for beta chain variable domain of TCR clone 177430 (TRBV28, TRBJ2-1)
CASSGLAEVDNEQFF

SEQ ID NO: 354861 - protein, 12 aa, Homo sapiens
  CDR3 for alpha chain variable domain of TCR clone 177431 (TRAV8-3, TRAJ26)
CAGDNYGQNFVF

SEQ ID NO: 354862 - protein, 15 aa, Homo sapiens
  CDR3 for beta chain variable domain of TCR clone 177431 (TRBV7-3, TRBJ2-3)
CASSPLAVSTDTQYF

SEQ ID NO: 354863 - protein, 16 aa, Homo sapiens
  CDR3 for alpha chain variable domain of TCR clone 177432 (TRAV3, TRAJ10)
CAVRDMRAGGGNKLTF

SEQ ID NO: 354864 - protein, 14 aa, Homo sapiens
  CDR3 for beta chain variable domain of TCR clone 177432 (TRBV20-1, TRBJ2-7)
CSAWTALSSYEQYF

SEQ ID NO: 354865 - protein, 13 aa, Homo sapiens
  CDR3 for alpha chain variable domain of TCR clone 177433 (TRAV21, TRAJ37)
CAVSSDNTGKLIF

SEQ ID NO: 354866 - protein, 17 aa, Homo sapiens
  CDR3 for beta chain variable domain of TCR clone 177433 (TRBV5-1, TRBJ2-5)
CASSLLGLAANQETQYF

SEQ ID NO: 354867 - protein, 10 aa, Homo sapiens
  CDR3 for alpha chain variable domain of TCR clone 177434 (TRAV17, TRAJ36)
CATVAGNLFF

SEQ ID NO: 354868 - protein, 15 aa, Homo sapiens
  CDR3 for beta chain variable domain of TCR clone 177434 (TRBV2, TRBJ2-7)
CASTLLGSGATEQYF

SEQ ID NO: 354869 - protein, 14 aa, Homo sapiens
  CDR3 for alpha chain variable domain of TCR clone 177435 (TRAV38-1, TRAJ45)
CAYYSGGGADGPTF

SEQ ID NO: 354870 - protein, 20 aa, Homo sapiens
  CDR3 for beta chain variable domain of TCR clone 177435 (TRBV28, TRBJ2-1)
CASTPIGRSPVLAGGNEQFF

SEQ ID NO: 354871 - protein, 14 aa, Homo sapiens
  CDR3 for alpha chain variable domain of TCR clone 177436 (TRAV29/DV5, TRAJ32)
CAAAYGGATNKLIF

SEQ ID NO: 354872 - protein, 15 aa, Homo sapiens
  CDR3 for beta chain variable domain of TCR clone 177436 (TRBV27, TRBJ2-7)
CASSTAGIGSYEQYF

SEQ ID NO: 354873 - protein, 16 aa, Homo sapiens
  CDR3 for alpha chain variable domain of TCR clone 177437 (TRAV1-2, TRAJ6)
CAVRDQGTGGSYIPTF

SEQ ID NO: 354874 - protein, 13 aa, Homo sapiens
  CDR3 for beta chain variable domain of TCR clone 177437 (TRBV28, TRBJ2-7)
CASTPGLAGEQYV

SEQ ID NO: 354875 - protein, 15 aa, Homo sapiens
  CDR3 for alpha chain variable domain of TCR clone 177438 (TRAV40, TRAJ53)
CLLANSGGSNYKLTF

SEQ ID NO: 354876 - protein, 15 aa, Homo sapiens
  CDR3 for beta chain variable domain of TCR clone 177438 (TRBV7-6, TRBJ2-2)
CASSRTSGNTGELFF

SEQ ID NO: 354877 - protein, 13 aa, Homo sapiens
  CDR3 for alpha chain variable domain of TCR clone 177439 (TRAV8-2, TRAJ49)
CVVTPNTGKQFYF

SEQ ID NO: 354878 - protein, 15 aa, Homo sapiens
  CDR3 for beta chain variable domain of TCR clone 177439 (TRBV11-2, TRBJ2-1)
CASSLTSGGYNEQFF

SEQ ID NO: 354879 - protein, 12 aa, Homo sapiens
  CDR3 for alpha chain variable domain of TCR clone 177440 (TRAV13-2, TRAJ8)
CAPWLGFQKLVF

SEQ ID NO: 354880 - protein, 22 aa, Homo sapiens
  CDR3 for beta chain variable domain of TCR clone 177440 (TRBV6-1, TRBJ1-3)
CASVQGGGWKHHIFWRGKLAHC

SEQ ID NO: 354881 - protein, 12 aa, Homo sapiens
  CDR3 for alpha chain variable domain of TCR clone 177441 (TRAV36/DV7, TRAJ54)
CAVVRGAQKLVF

SEQ ID NO: 354882 - protein, 11 aa, Homo sapiens
  CDR3 for beta chain variable domain of TCR clone 177441 (TRBV11-2, TRBJ2-2)
CASSLPGELFF

SEQ ID NO: 354883 - protein, 11 aa, Homo sapiens
  CDR3 for alpha chain variable domain of TCR clone 177442 (TRAV3, TRAJ21)
CAVGNFNKFYF

SEQ ID NO: 354884 - protein, 14 aa, Homo sapiens
  CDR3 for beta chain variable domain of TCR clone 177442 (TRBV29-1, TRBJ2-2)
CSGRGSGNTGELCF

SEQ ID NO: 354885 - protein, 12 aa, Homo sapiens
  CDR3 for alpha chain variable domain of TCR clone 177443 (TRAV13-2, TRAJ8)
CAPWLGFQKLVF

SEQ ID NO: 354886 - protein, 15 aa, Homo sapiens
  CDR3 for beta chain variable domain of TCR clone 177443 (TRBV11-2, TRBJ2-2)
CASSSDRVNAGELFF

SEQ ID NO: 354887 - protein, 14 aa, Homo sapiens
  CDR3 for alpha chain variable domain of TCR clone 177444 (TRAV26-1, TRAJ34)
CIVRESYNTDKLIF

SEQ ID NO: 354888 - protein, 13 aa, Homo sapiens
  CDR3 for beta chain variable domain of TCR clone 177444 (TRBV19, TRBJ2-1)
CATARGVYNEQFF

SEQ ID NO: 354889 - protein, 10 aa, Homo sapiens
  CDR3 for alpha chain variable domain of TCR clone 177445 (TRAV1-2, TRAJ28)
SGAGSYQLTF

SEQ ID NO: 354890 - protein, 13 aa, Homo sapiens
  CDR3 for beta chain variable domain of TCR clone 177445 (TRBV20-1, TRBJ2-7)
CSATHTSGYEQYF

SEQ ID NO: 354891 - protein, 17 aa, Homo sapiens
  CDR3 for alpha chain variable domain of TCR clone 177446 (TRAV23/DV6, TRAJ57)
CAASSTLSQGGSEKLFF

SEQ ID NO: 354892 - protein, 13 aa, Homo sapiens
  CDR3 for beta chain variable domain of TCR clone 177446 (TRBV25-1, TRBJ1-1)
CQHPPGGNTEAFF

SEQ ID NO: 354893 - protein, 12 aa, Homo sapiens
  CDR3 for alpha chain variable domain of TCR clone 177447 (TRAV36/DV7, TRAJ40)
CAVGTGTYKYIF

SEQ ID NO: 354894 - protein, 15 aa, Homo sapiens
  CDR3 for beta chain variable domain of TCR clone 177447 (TRBV10-1, TRBJ2-1)
CASSEWRGTYNEQFF

SEQ ID NO: 354895 - protein, 13 aa, Homo sapiens
  CDR3 for alpha chain variable domain of TCR clone 177448 (TRAV27, TRAJ29)
CAGAHSGNTPRVF

SEQ ID NO: 354896 - protein, 14 aa, Homo sapiens
  CDR3 for beta chain variable domain of TCR clone 177448 (TRBV7-9, TRBJ2-7)
CASSIGQGAGEQYF

SEQ ID NO: 354897 - protein, 23 aa, Homo sapiens
  CDR3 for alpha chain variable domain of TCR clone 177449 (TRAV26-1, TRAJ38)
CIADNAGNNHIQNPDPAVYQLRD

SEQ ID NO: 354898 - protein, 12 aa, Homo sapiens
  CDR3 for beta chain variable domain of TCR clone 177449 (TRBV19, TRBJ1-5)
CASSIAQQPQHF

SEQ ID NO: 354899 - protein, 16 aa, Homo sapiens
  CDR3 for alpha chain variable domain of TCR clone 177450 (TRAV3, TRAJ21)
CAVRDIERGNFNKFYF

SEQ ID NO: 354900 - protein, 13 aa, Homo sapiens
  CDR3 for beta chain variable domain of TCR clone 177450 (TRBV7-6, TRBJ2-7)
CASSLDHTHEQYF

SEQ ID NO: 354901 - protein, 16 aa, Homo sapiens
  CDR3 for alpha chain variable domain of TCR clone 177451 (TRAV17, TRAJ52)
CATSNAGCTSYGKLTF

SEQ ID NO: 354902 - protein, 13 aa, Homo sapiens
  CDR3 for beta chain variable domain of TCR clone 177451 (TRBV27, TRBJ1-6)
CASSLVLVSPLHF

SEQ ID NO: 354903 - protein, 12 aa, Homo sapiens
  CDR3 for alpha chain variable domain of TCR clone 177452 (TRAV12-2, TRAJ47)
CAVAEYGNKLVF

SEQ ID NO: 354904 - protein, 11 aa, Homo sapiens
  CDR3 for beta chain variable domain of TCR clone 177452 (TRBV19, TRBJ1-1)
CASSIGSEAFF

SEQ ID NO: 354905 - protein, 21 aa, Homo sapiens
  CDR3 for alpha chain variable domain of TCR clone 177453 (TRAV23/DV6, TRAJ4)
CISWIPSLDTQPPTSVQQEIF

SEQ ID NO: 354906 - protein, 13 aa, Homo sapiens
  CDR3 for beta chain variable domain of TCR clone 177453 (TRBV7-2, TRBJ1-1)
CASSRNTNTEAFF

SEQ ID NO: 354907 - protein, 12 aa, Homo sapiens
  CDR3 for alpha chain variable domain of TCR clone 177454 (TRAV13-1, TRAJ21)
CAAKEGFNKFYF

SEQ ID NO: 354908 - protein, 14 aa, Homo sapiens
  CDR3 for beta chain variable domain of TCR clone 177454 (TRBV2, TRBJ1-2)
CASRKGALDYGYTF

SEQ ID NO: 354909 - protein, 13 aa, Homo sapiens
  CDR3 for alpha chain variable domain of TCR clone 177455 (TRAV16, TRAJ9)
CALSNTGRFKTIF

SEQ ID NO: 354910 - protein, 14 aa, Homo sapiens
  CDR3 for beta chain variable domain of TCR clone 177455 (TRBV5-1, TRBJ2-1)
CASSLEGPVYEQFF

SEQ ID NO: 354911 - protein, 18 aa, Homo sapiens
  CDR3 for alpha chain variable domain of TCR clone 177456 (TRAV13-1, TRAJ52)
CAAKNPNAGGTSYVKLTF

SEQ ID NO: 354912 - protein, 15 aa, Homo sapiens
  CDR3 for beta chain variable domain of TCR clone 177456 (TRBV6-1, TRBJ2-3)
CASSERGGITDTQYF

SEQ ID NO: 354913 - protein, 12 aa, Homo sapiens
  CDR3 for alpha chain variable domain of TCR clone 177457 (TRAV8-4, TRAJ31)
CAVSDSNARLMF

SEQ ID NO: 354914 - protein, 15 aa, Homo sapiens
  CDR3 for beta chain variable domain of TCR clone 177457 (TRBV6-5, TRBJ2-7)
CASRFWGQGADEQYF

SEQ ID NO: 354915 - protein, 17 aa, Homo sapiens
  CDR3 for alpha chain variable domain of TCR clone 177458 (TRAV3, TRAJ42)
CAVRDRDYGGSQGNLIL

SEQ ID NO: 354916 - protein, 15 aa, Homo sapiens
  CDR3 for beta chain variable domain of TCR clone 177458 (TRBV6-6, TRBJ2-7)
CASSYPYGGSYEQYF

SEQ ID NO: 354917 - protein, 12 aa, Homo sapiens
  CDR3 for alpha chain variable domain of TCR clone 177459 (TRAV8-3, TRAJ41)
CAVALSGYALNF

SEQ ID NO: 354918 - protein, 18 aa, Homo sapiens
  CDR3 for beta chain variable domain of TCR clone 177459 (TRBV20-1, TRBJ2-6)
SSAETTPTHGSGANVLTF

SEQ ID NO: 354919 - protein, 17 aa, Homo sapiens
  CDR3 for alpha chain variable domain of TCR clone 177460 (TRAV13-1, TRAJ28)
CAASPPYSGAGSYQLTF

SEQ ID NO: 354920 - protein, 12 aa, Homo sapiens
  CDR3 for beta chain variable domain of TCR clone 177460 (TRBV11-2, TRBJ2-2)
CAGCLPTGELFF

SEQ ID NO: 354921 - protein, 13 aa, Homo sapiens
  CDR3 for alpha chain variable domain of TCR clone 177461 (TRAV13-2, TRAJ54)
CAENYQGAQKLVF

SEQ ID NO: 354922 - protein, 16 aa, Homo sapiens
  CDR3 for beta chain variable domain of TCR clone 177461 (TRBV9, TRBJ2-1)
CASSVGGGGNYNEQFF

SEQ ID NO: 354923 - protein, 22 aa, Homo sapiens
  CDR3 for alpha chain variable domain of TCR clone 177462 (TRAV12-2, TRAJ53)
SPVIQPTTSVPPILSSNYKLTF

SEQ ID NO: 354924 - protein, 13 aa, Homo sapiens
  CDR3 for beta chain variable domain of TCR clone 177462 (TRBV7-7, TRBJ2-3)
CASSLSRADTQYF

SEQ ID NO: 354925 - protein, 14 aa, Homo sapiens
  CDR3 for alpha chain variable domain of TCR clone 177463 (TRAV1-2, TRAJ8)
CAVREDTGFQKLVF

SEQ ID NO: 354926 - protein, 16 aa, Homo sapiens
  CDR3 for beta chain variable domain of TCR clone 177463 (TRBV19, TRBJ2-1)
CASSSKGTRSYNEQFF

SEQ ID NO: 354927 - protein, 14 aa, Homo sapiens
  CDR3 for alpha chain variable domain of TCR clone 177464 (TRAV1-2, TRAJ16)
CAVRGFSDGQKMLF

SEQ ID NO: 354928 - protein, 12 aa, Homo sapiens
  CDR3 for beta chain variable domain of TCR clone 177464 (TRBV14, TRBJ2-7)
CASSRLKGEQYF

SEQ ID NO: 354929 - protein, 17 aa, Homo sapiens
  CDR3 for alpha chain variable domain of TCR clone 177465 (TRAV36/DV7, TRAJ52)
CAVAQRAGGTSFGKLTF

SEQ ID NO: 354930 - protein, 15 aa, Homo sapiens
  CDR3 for beta chain variable domain of TCR clone 177465 (TRBV6-5, TRBJ1-2)
CASSYSQAFNYGYTF

SEQ ID NO: 354931 - protein, 16 aa, Homo sapiens
  CDR3 for alpha chain variable domain of TCR clone 177466 (TRAV39, TRAJ17)
CAVDIQRSTAGNKLTF

SEQ ID NO: 354932 - protein, 12 aa, Homo sapiens
  CDR3 for beta chain variable domain of TCR clone 177466 (TRBV6-5, TRBJ2-7)
CASYVYGYEQYF

SEQ ID NO: 354933 - protein, 14 aa, Homo sapiens
  CDR3 for alpha chain variable domain of TCR clone 177467 (TRAV8-2, TRAJ4)
SVVSPSGGYNKLIF

SEQ ID NO: 354934 - protein, 15 aa, Homo sapiens
  CDR3 for beta chain variable domain of TCR clone 177467 (TRBV4-1, TRBJ1-4)
CASSDTGGTNEKLFF

SEQ ID NO: 354935 - protein, 22 aa, Homo sapiens
  CDR3 for alpha chain variable domain of TCR clone 177468 (TRAV27, TRAJ41)
CAVRTQIPDIQNPDPAVHQLRD

SEQ ID NO: 354936 - protein, 16 aa, Homo sapiens
  CDR3 for beta chain variable domain of TCR clone 177468 (TRBV5-1, TRBJ2-3)
CAGSLGLAVYTDTQYF

SEQ ID NO: 354937 - protein, 16 aa, Homo sapiens
  CDR3 for alpha chain variable domain of TCR clone 177469 (TRAV26-1, TRAJ36)
CIVRVPDQTGANNLFF

SEQ ID NO: 354938 - protein, 17 aa, Homo sapiens
  CDR3 for beta chain variable domain of TCR clone 177469 (TRBV28, TRBJ2-5)
CASSTPEGDALQETQYF

SEQ ID NO: 354939 - protein, 13 aa, Homo sapiens
  CDR3 for alpha chain variable domain of TCR clone 177470 (TRAV1-2, TRAJ9)
CAALNTGGFKTIF

SEQ ID NO: 354940 - protein, 18 aa, Homo sapiens
  CDR3 for beta chain variable domain of TCR clone 177470 (TRBV20-1, TRBJ2-6)
CSAETTPTHGSGANVLTF

SEQ ID NO: 354941 - protein, 13 aa, Homo sapiens
  CDR3 for alpha chain variable domain of TCR clone 177471 (TRAV23/DV6, TRAJ12)
CAPGGDSSYKLIF

SEQ ID NO: 354942 - protein, 12 aa, Homo sapiens
  CDR3 for beta chain variable domain of TCR clone 177471 (TRBV28, TRBJ2-3)
CASSLYRDTQYF

SEQ ID NO: 354943 - protein, 15 aa, Homo sapiens
  CDR3 for alpha chain variable domain of TCR clone 177472 (TRAV26-1, TRAJ23)
CIVRVLNNQGGKLIF

SEQ ID NO: 354944 - protein, 17 aa, Homo sapiens
  CDR3 for beta chain variable domain of TCR clone 177472 (TRBV28, TRBJ2-7)
CASSPLHRASGVYEQYF

SEQ ID NO: 354945 - protein, 16 aa, Homo sapiens
  CDR3 for alpha chain variable domain of TCR clone 177473 (TRAV3, TRAJ10)
CAVRDMRSGGGNKLTF

SEQ ID NO: 354946 - protein, 17 aa, Homo sapiens
  CDR3 for beta chain variable domain of TCR clone 177473 (TRBV6-5, TRBJ2-4)
CASRPTPGQGSKNIQYF

SEQ ID NO: 354947 - protein, 15 aa, Homo sapiens
  CDR3 for alpha chain variable domain of TCR clone 177474 (TRAV12-2, )
CAVASLATAISRTLT

SEQ ID NO: 354948 - protein, 16 aa, Homo sapiens
  CDR3 for beta chain variable domain of TCR clone 177474 (TRBV5-1, TRBJ2-2)
CASSSRTGGRTGELFF

SEQ ID NO: 354949 - protein, 11 aa, Homo sapiens
  CDR3 for alpha chain variable domain of TCR clone 177475 (TRAV25, TRAJ43)
CAGPRNNDMRF

SEQ ID NO: 354950 - protein, 16 aa, Homo sapiens
  CDR3 for beta chain variable domain of TCR clone 177475 (TRBV13, TRBJ2-2)
CASSLGRGYGTGELFF

SEQ ID NO: 354951 - protein, 15 aa, Homo sapiens
  CDR3 for alpha chain variable domain of TCR clone 177476 (TRAV1-2, TRAJ9)
CAVRDDGTGGFKTIF

SEQ ID NO: 354952 - protein, 16 aa, Homo sapiens
  CDR3 for beta chain variable domain of TCR clone 177476 (TRBV19, TRBJ2-7)
CASSPALGQGLYEQYF

SEQ ID NO: 354953 - protein, 16 aa, Homo sapiens
  CDR3 for alpha chain variable domain of TCR clone 177477 (TRAV30, TRAJ24)
CGTEIVDADSWGKFQF

SEQ ID NO: 354954 - protein, 17 aa, Homo sapiens
  CDR3 for beta chain variable domain of TCR clone 177477 (TRBV6-3, TRBJ2-1)
CASSYSSGTRGLDEQFF

SEQ ID NO: 354955 - protein, 14 aa, Homo sapiens
  CDR3 for alpha chain variable domain of TCR clone 177478 (TRAV12-2, TRAJ12)
CAVINRDSSYKLIF

SEQ ID NO: 354956 - protein, 15 aa, Homo sapiens
  CDR3 for beta chain variable domain of TCR clone 177478 (TRBV28, TRBJ2-1)
RASSLDTSSYNEQFF

SEQ ID NO: 354957 - protein, 12 aa, Homo sapiens
  CDR3 for alpha chain variable domain of TCR clone 177479 (TRAV12-1, TRAJ40)
CVFYSGTYKYIF

SEQ ID NO: 354958 - protein, 18 aa, Homo sapiens
  CDR3 for beta chain variable domain of TCR clone 177479 (TRBV12-4, TRBJ2-2)
CASSLLAGTRGRTGELFF

SEQ ID NO: 354959 - protein, 13 aa, Homo sapiens
  CDR3 for alpha chain variable domain of TCR clone 177480 (TRAV13-1, TRAJ4)
CAASIGGYNKLIF

SEQ ID NO: 354960 - protein, 18 aa, Homo sapiens
  CDR3 for beta chain variable domain of TCR clone 177480 (TRBV18, TRBJ1-3)
CASSPRGGAGPSGNTIYF

SEQ ID NO: 354961 - protein, 17 aa, Homo sapiens
  CDR3 for alpha chain variable domain of TCR clone 177481 (TRAV13-1, TRAJ31)
CAPRDRLMFGDGTQLVV

SEQ ID NO: 354962 - protein, 14 aa, Homo sapiens
  CDR3 for beta chain variable domain of TCR clone 177481 (TRBV11-2, TRBJ2-3)
CASSRLARTDTQYF

SEQ ID NO: 354963 - protein, 13 aa, Homo sapiens
  CDR3 for alpha chain variable domain of TCR clone 177482 (TRAV26-2, TRAJ54)
CIPRVGGAQKLVF

SEQ ID NO: 354964 - protein, 16 aa, Homo sapiens
  CDR3 for beta chain variable domain of TCR clone 177482 (TRBV4-1, TRBJ1-1)
CASSFMSERPNTEAFF

SEQ ID NO: 354965 - protein, 13 aa, Homo sapiens
  CDR3 for alpha chain variable domain of TCR clone 177483 (TRAV17, TRAJ22)
CAHHSGSARQLTF

SEQ ID NO: 354966 - protein, 17 aa, Homo sapiens
  CDR3 for beta chain variable domain of TCR clone 177483 (TRBV11-2, TRBJ2-1)
CASSLYPPGVEYNEQFF

SEQ ID NO: 354967 - protein, 13 aa, Homo sapiens
  CDR3 for alpha chain variable domain of TCR clone 177484 (TRAV17, TRAJ29)
CATGPSGNTPLVF

SEQ ID NO: 354968 - protein, 14 aa, Homo sapiens
  CDR3 for beta chain variable domain of TCR clone 177484 (TRBV12-5, TRBJ2-5)
CASGSRTHQETQYF

SEQ ID NO: 354969 - protein, 15 aa, Homo sapiens
  CDR3 for alpha chain variable domain of TCR clone 177485 (TRAV23/DV6, TRAJ17)
CARGSCRQQAHFWRR

SEQ ID NO: 354970 - protein, 14 aa, Homo sapiens
  CDR3 for beta chain variable domain of TCR clone 177485 (TRBV7-2, TRBJ1-2)
CASSQTGSTYGYTF

SEQ ID NO: 354971 - protein, 16 aa, Homo sapiens
  CDR3 for alpha chain variable domain of TCR clone 177486 (TRAV8-6, TRAJ58)
CAASDHTETSGSRLTF

SEQ ID NO: 354972 - protein, 14 aa, Homo sapiens
  CDR3 for beta chain variable domain of TCR clone 177486 (TRBV7-2, TRBJ1-5)
CASSPRGGPQPQHF

SEQ ID NO: 354973 - protein, 15 aa, Homo sapiens
  CDR3 for alpha chain variable domain of TCR clone 177487 (TRAV29/DV5, TRAJ29)
CAASQRSSGNTPLVF

SEQ ID NO: 354974 - protein, 17 aa, Homo sapiens
  CDR3 for beta chain variable domain of TCR clone 177487 (TRBV4-1, TRBJ1-4)
CASSQEGPRGVEEKLFF

SEQ ID NO: 354975 - protein, 16 aa, Homo sapiens
  CDR3 for alpha chain variable domain of TCR clone 177488 (TRAV3, TRAJ10)
CAVRDMRAGGGNKLTF

SEQ ID NO: 354976 - protein, 12 aa, Homo sapiens
  CDR3 for beta chain variable domain of TCR clone 177488 (TRBV19, TRBJ2-7)
CASTSGTYEQYF

SEQ ID NO: 354977 - protein, 14 aa, Homo sapiens
  CDR3 for alpha chain variable domain of TCR clone 177489 (TRAV1-2, TRAJ15)
CAVRDRQAGTALIF

SEQ ID NO: 354978 - protein, 16 aa, Homo sapiens
  CDR3 for beta chain variable domain of TCR clone 177489 (TRBV7-3, TRBJ2-2)
CASSLKRGTLPGELFF

SEQ ID NO: 354979 - protein, 20 aa, Homo sapiens
  CDR3 for alpha chain variable domain of TCR clone 177490 (TRAV8-3, TRAJ44)
LSTSVLWVRLYTGTASKLTF

SEQ ID NO: 354980 - protein, 15 aa, Homo sapiens
  CDR3 for beta chain variable domain of TCR clone 177490 (TRBV9, TRBJ1-6)
CASSVAGTGDSPLHF

SEQ ID NO: 354981 - protein, 12 aa, Homo sapiens
  CDR3 for alpha chain variable domain of TCR clone 177491 (TRAV12-1, TRAJ40)
CVVYSGTYKYIS

SEQ ID NO: 354982 - protein, 14 aa, Homo sapiens
  CDR3 for beta chain variable domain of TCR clone 177491 (TRBV7-6, TRBJ2-1)
CASSLGGGADEQFF

SEQ ID NO: 354983 - protein, 15 aa, Homo sapiens
  CDR3 for alpha chain variable domain of TCR clone 177492 (TRAV8-4, TRAJ48)
CAVGAAYFGNEKLTF

SEQ ID NO: 354984 - protein, 12 aa, Homo sapiens
  CDR3 for beta chain variable domain of TCR clone 177492 (TRBV3-1, TRBJ2-5)
CASSQRGETQYF

SEQ ID NO: 354985 - protein, 18 aa, Homo sapiens
  CDR3 for alpha chain variable domain of TCR clone 177493 (TRAV35, TRAJ28)
CAGHNYPLSGAGSYQLTF

SEQ ID NO: 354986 - protein, 12 aa, Homo sapiens
  CDR3 for beta chain variable domain of TCR clone 177493 (TRBV7-9, TRBJ1-1)
CVSSLEGTEAFF

SEQ ID NO: 354987 - protein, 12 aa, Homo sapiens
  CDR3 for alpha chain variable domain of TCR clone 177494 (TRAV30, TRAJ39)
CGRGNAGNMLTF

SEQ ID NO: 354988 - protein, 14 aa, Homo sapiens
  CDR3 for beta chain variable domain of TCR clone 177494 (TRBV12-5, TRBJ2-5)
CASGSRTHQETQYF

SEQ ID NO: 354989 - protein, 14 aa, Homo sapiens
  CDR3 for alpha chain variable domain of TCR clone 177495 (TRAV29/DV5, TRAJ34)
CAASASRETDKLIF

SEQ ID NO: 354990 - protein, 15 aa, Homo sapiens
  CDR3 for beta chain variable domain of TCR clone 177495 (TRBV7-9, TRBJ1-6)
CASSSPGRGNSPLHF

SEQ ID NO: 354991 - protein, 23 aa, Homo sapiens
  CDR3 for alpha chain variable domain of TCR clone 177496 (TRAV36/DV7, TRAJ50)
CAVEPENLLRQDIQNPDPPVYQL

SEQ ID NO: 354992 - protein, 13 aa, Homo sapiens
  CDR3 for beta chain variable domain of TCR clone 177496 (TRBV7-2, TRBJ2-7)
CASSSPSGSEQYF

SEQ ID NO: 354993 - protein, 14 aa, Homo sapiens
  CDR3 for alpha chain variable domain of TCR clone 177497 (TRAV26-1, TRAJ38)
CIADNAGNNRKLIW

SEQ ID NO: 354994 - protein, 20 aa, Homo sapiens
  CDR3 for beta chain variable domain of TCR clone 177497 (TRBV7-8, TRBJ2-2)
CASSHLFPGPTIQITGELFF

SEQ ID NO: 354995 - protein, 15 aa, Homo sapiens
  CDR3 for alpha chain variable domain of TCR clone 177498 (TRAV3, TRAJ20)
CAVRDIKLSDYKLTF

SEQ ID NO: 354996 - protein, 16 aa, Homo sapiens
  CDR3 for beta chain variable domain of TCR clone 177498 (TRBV7-3, TRBJ2-2)
CASSLKRGTLSGELFF

SEQ ID NO: 354997 - protein, 14 aa, Homo sapiens
  CDR3 for alpha chain variable domain of TCR clone 177499 (TRAV38-1, TRAJ29)
CAFITPSGNTPLAF

SEQ ID NO: 354998 - protein, 15 aa, Homo sapiens
  CDR3 for beta chain variable domain of TCR clone 177499 (TRBV5-1, TRBJ2-1)
CASSPPRAPTMSSSS

SEQ ID NO: 354999 - protein, 23 aa, Homo sapiens
  CDR3 for alpha chain variable domain of TCR clone 177500 (TRAV8-3, TRAJ6)
CAVGPLGEEAIYLHLEEEPALLF

SEQ ID NO: 355000 - protein, 14 aa, Homo sapiens
  CDR3 for beta chain variable domain of TCR clone 177500 (TRBV19, TRBJ2-2)
CASSTGQGAGELFF

SEQ ID NO: 355001 - protein, 16 aa, Homo sapiens
  CDR3 for alpha chain variable domain of TCR clone 177501 (TRAV1-2, TRAJ6)
CAVRDQGTGGSYIPTF

SEQ ID NO: 355002 - protein, 13 aa, Homo sapiens
  CDR3 for beta chain variable domain of TCR clone 177501 (TRBV28, TRBJ2-7)
FSSTPGLAGEQYF

SEQ ID NO: 355003 - protein, 14 aa, Homo sapiens
  CDR3 for alpha chain variable domain of TCR clone 177502 (TRAV12-3, TRAJ13)
CAMRNSGGYQKVTF

SEQ ID NO: 355004 - protein, 13 aa, Homo sapiens
  CDR3 for beta chain variable domain of TCR clone 177502 (TRBV27, TRBJ1-4)
CASSLMGDEKPFF

SEQ ID NO: 355005 - protein, 12 aa, Homo sapiens
  CDR3 for alpha chain variable domain of TCR clone 177503 (TRAV1-2, TRAJ33)
CAALDSNYQLIW

SEQ ID NO: 355006 - protein, 16 aa, Homo sapiens
  CDR3 for beta chain variable domain of TCR clone 177503 (TRBV5-4, TRBJ2-3)
CASQQPGAGGADTQYF

SEQ ID NO: 355007 - protein, 14 aa, Homo sapiens
  CDR3 for alpha chain variable domain of TCR clone 177504 (TRAV1-2, TRAJ8)
CAVREDTGFQKLVF

SEQ ID NO: 355008 - protein, 15 aa, Homo sapiens
  CDR3 for beta chain variable domain of TCR clone 177504 (TRBV28, TRBJ2-6)
CASSLPGSGANVLTF

SEQ ID NO: 355009 - protein, 14 aa, Homo sapiens
  CDR3 for alpha chain variable domain of TCR clone 177505 (TRAV3, TRAJ20)
CAFPPAPNDYKLSF

SEQ ID NO: 355010 - protein, 13 aa, Homo sapiens
  CDR3 for beta chain variable domain of TCR clone 177505 (TRBV15, TRBJ1-2)
CATSRVDARSPVF

SEQ ID NO: 355011 - protein, 12 aa, Homo sapiens
  CDR3 for alpha chain variable domain of TCR clone 177506 (TRAV13-1, TRAJ48)
CAANFGNEKLTF

SEQ ID NO: 355012 - protein, 16 aa, Homo sapiens
  CDR3 for beta chain variable domain of TCR clone 177506 (TRBV11-2, TRBJ2-7)
CASSPTTGGVSYEQYF

SEQ ID NO: 355013 - protein, 13 aa, Homo sapiens
  CDR3 for alpha chain variable domain of TCR clone 177507 (TRAV20, TRAJ54)
CAVQAGGAQKPGF

SEQ ID NO: 355014 - protein, 14 aa, Homo sapiens
  CDR3 for beta chain variable domain of TCR clone 177507 (TRBV20-1, TRBJ2-7)
CSAKTGTGGYEQYF

SEQ ID NO: 355015 - protein, 13 aa, Homo sapiens
  CDR3 for alpha chain variable domain of TCR clone 177508 (TRAV8-6, TRAJ29)
CAVILFRKHTSCL

SEQ ID NO: 355016 - protein, 12 aa, Homo sapiens
  CDR3 for beta chain variable domain of TCR clone 177508 (TRBV5-4, TRBJ1-1)
CASSFGQTEAFF

SEQ ID NO: 355017 - protein, 14 aa, Homo sapiens
  CDR3 for alpha chain variable domain of TCR clone 177509 (TRAV12-2, TRAJ40)
CAVKIPSGTYKYIF

SEQ ID NO: 355018 - protein, 12 aa, Homo sapiens
  CDR3 for beta chain variable domain of TCR clone 177509 (TRBV7-3, TRBJ1-2)
CASSKKGVPVTF

SEQ ID NO: 355019 - protein, 14 aa, Homo sapiens
  CDR3 for alpha chain variable domain of TCR clone 177510 (TRAV8-1, TRAJ5)
CAVSMATGRRALTF

SEQ ID NO: 355020 - protein, 15 aa, Homo sapiens
  CDR3 for beta chain variable domain of TCR clone 177510 (TRBV19, TRBJ2-4)
CASRGPRRGENIQYF

SEQ ID NO: 355021 - protein, 16 aa, Homo sapiens
  CDR3 for alpha chain variable domain of TCR clone 177511 (TRAV3, TRAJ10)
CAVRDMRAGGGNKLTS

SEQ ID NO: 355022 - protein, 14 aa, Homo sapiens
  CDR3 for beta chain variable domain of TCR clone 177511 (TRBV25-1, TRBJ1-1)
CASTHLGGNTEALF

SEQ ID NO: 355023 - protein, 15 aa, Homo sapiens
  CDR3 for alpha chain variable domain of TCR clone 177512 (TRAV12-2, TRAJ53)
CAVNGGGGRKYKLTF

SEQ ID NO: 355024 - protein, 13 aa, Homo sapiens
  CDR3 for beta chain variable domain of TCR clone 177512 (TRBV3-1, TRBJ1-1)
CASSLGVITEAFF

SEQ ID NO: 355025 - protein, 12 aa, Homo sapiens
  CDR3 for alpha chain variable domain of TCR clone 177513 (TRAV17, TRAJ57)
CATDGGSEKLVF

SEQ ID NO: 355026 - protein, 12 aa, Homo sapiens
  CDR3 for beta chain variable domain of TCR clone 177513 (TRBV29-1, TRBJ2-2)
CSVDKYTGELFF

SEQ ID NO: 355027 - protein, 15 aa, Homo sapiens
  CDR3 for alpha chain variable domain of TCR clone 177514 (TRAV23/DV6, TRAJ4)
CAASPLRGGYNKLIF

SEQ ID NO: 355028 - protein, 16 aa, Homo sapiens
  CDR3 for beta chain variable domain of TCR clone 177514 (TRBV11-2, TRBJ2-1)
CASARGSYSHHNEQFF

SEQ ID NO: 355029 - protein, 12 aa, Homo sapiens
  CDR3 for alpha chain variable domain of TCR clone 177515 (TRAV13-2, TRAJ8)
CAPWLGFQKLVF

SEQ ID NO: 355030 - protein, 15 aa, Homo sapiens
  CDR3 for beta chain variable domain of TCR clone 177515 (TRBV7-2, TRBJ2-7)
CASSWGQGAIYEQYF

SEQ ID NO: 355031 - protein, 14 aa, Homo sapiens
  CDR3 for alpha chain variable domain of TCR clone 177516 (TRAV8-4, TRAJ8)
CAVSLNTGFQKLVF

SEQ ID NO: 355032 - protein, 13 aa, Homo sapiens
  CDR3 for beta chain variable domain of TCR clone 177516 (TRBV7-9, TRBJ2-3)
CASSPVSTDTQYF

SEQ ID NO: 355033 - protein, 16 aa, Homo sapiens
  CDR3 for alpha chain variable domain of TCR clone 177517 (TRAV30, TRAJ24)
CGTEIVDADSWGKFQF

SEQ ID NO: 355034 - protein, 13 aa, Homo sapiens
  CDR3 for beta chain variable domain of TCR clone 177517 (TRBV20-1, TRBJ1-1)
CSAPPGGHTEAFL

SEQ ID NO: 355035 - protein, 14 aa, Homo sapiens
  CDR3 for alpha chain variable domain of TCR clone 177518 (TRAV21, TRAJ15)
CAVSLNQAGTALIF

SEQ ID NO: 355036 - protein, 13 aa, Homo sapiens
  CDR3 for beta chain variable domain of TCR clone 177518 (TRBV10-3, TRBJ2-7)
CASKLAVNYEQYF

SEQ ID NO: 355037 - protein, 14 aa, Homo sapiens
  CDR3 for alpha chain variable domain of TCR clone 177519 (TRAV1-2, TRAJ16)
CAVNRFSDCQKLLF

SEQ ID NO: 355038 - protein, 15 aa, Homo sapiens
  CDR3 for beta chain variable domain of TCR clone 177519 (TRBV19, TRBJ1-5)
CASSIVWADNQPQHF

SEQ ID NO: 355039 - protein, 16 aa, Homo sapiens
  CDR3 for alpha chain variable domain of TCR clone 177520 (TRAV29/DV5, TRAJ30)
QCTSVQQASRDDKIIF

SEQ ID NO: 355040 - protein, 13 aa, Homo sapiens
  CDR3 for beta chain variable domain of TCR clone 177520 (TRBV12-5, TRBJ2-3)
CASQNRGTDTQYF

SEQ ID NO: 355041 - protein, 16 aa, Homo sapiens
  CDR3 for alpha chain variable domain of TCR clone 177521 (TRAV8-1, TRAJ42)
CAVTSRYGGSQGNLIF

SEQ ID NO: 355042 - protein, 14 aa, Homo sapiens
  CDR3 for beta chain variable domain of TCR clone 177521 (TRBV11-2, TRBJ1-2)
CASSLGTANYGYTF

SEQ ID NO: 355043 - protein, 13 aa, Homo sapiens
  CDR3 for alpha chain variable domain of TCR clone 177522 (TRAV27, TRAJ45)
CRSSGGGADGLTF

SEQ ID NO: 355044 - protein, 14 aa, Homo sapiens
  CDR3 for beta chain variable domain of TCR clone 177522 (TRBV7-9, TRBJ2-1)
CASSSMVGFGEHFF

SEQ ID NO: 355045 - protein, 11 aa, Homo sapiens
  CDR3 for alpha chain variable domain of TCR clone 177523 (TRAV3, TRAJ21)
CAVGNFNNFYF

SEQ ID NO: 355046 - protein, 12 aa, Homo sapiens
  CDR3 for beta chain variable domain of TCR clone 177523 (TRBV29-1, TRBJ2-3)
CSVTGGAYTQYF

SEQ ID NO: 355047 - protein, 16 aa, Homo sapiens
  CDR3 for alpha chain variable domain of TCR clone 177524 (TRAV30, TRAJ24)
CGTEIVDADSWGKFQF

SEQ ID NO: 355048 - protein, 14 aa, Homo sapiens
  CDR3 for beta chain variable domain of TCR clone 177524 (TRBV12-5, TRBJ2-5)
CASGSRRHQEAQYF

SEQ ID NO: 355049 - protein, 15 aa, Homo sapiens
  CDR3 for alpha chain variable domain of TCR clone 177525 (TRAV13-1, TRAJ52)
SYYNDGGTSYGKLTF

SEQ ID NO: 355050 - protein, 11 aa, Homo sapiens
  CDR3 for beta chain variable domain of TCR clone 177525 (TRBV12-4, TRBJ2-2)
CASSSAGELFF

SEQ ID NO: 355051 - protein, 15 aa, Homo sapiens
  CDR3 for alpha chain variable domain of TCR clone 177526 (TRAV38-1, TRAJ37)
CAFIFGSGNTGKLIF

SEQ ID NO: 355052 - protein, 14 aa, Homo sapiens
  CDR3 for beta chain variable domain of TCR clone 177526 (TRBV7-2, TRBJ2-1)
CASSLGVGYNEQFF

SEQ ID NO: 355053 - protein, 13 aa, Homo sapiens
  CDR3 for alpha chain variable domain of TCR clone 177527 (TRAV36/DV7, TRAJ29)
CAVEPSGNTPLVF

SEQ ID NO: 355054 - protein, 15 aa, Homo sapiens
  CDR3 for beta chain variable domain of TCR clone 177527 (TRBV5-1, TRBJ2-2)
CASSSQGGNTGELFF

SEQ ID NO: 355055 - protein, 16 aa, Homo sapiens
  CDR3 for alpha chain variable domain of TCR clone 177528 (TRAV13-1, TRAJ10)
CAAGYILTGGGNKLTF

SEQ ID NO: 355056 - protein, 15 aa, Homo sapiens
  CDR3 for beta chain variable domain of TCR clone 177528 (TRBV12-4, TRBJ2-7)
CASSQTGGISYEQYF

SEQ ID NO: 355057 - protein, 12 aa, Homo sapiens
  CDR3 for alpha chain variable domain of TCR clone 177529 (TRAV12-3, TRAJ17)
CAMTLTGNKLTF

SEQ ID NO: 355058 - protein, 20 aa, Homo sapiens
  CDR3 for beta chain variable domain of TCR clone 177529 (TRBV7-8, TRBJ2-2)
CASSHLLPGPTIHITGELFF

SEQ ID NO: 355059 - protein, 16 aa, Homo sapiens
  CDR3 for alpha chain variable domain of TCR clone 177530 (TRAV8-3, TRAJ18)
CAVGARRGSTLGRLYF

SEQ ID NO: 355060 - protein, 16 aa, Homo sapiens
  CDR3 for beta chain variable domain of TCR clone 177530 (TRBV7-3, TRBJ2-2)
CASSLKRGTLSGELFF

SEQ ID NO: 355061 - protein, 14 aa, Homo sapiens
  CDR3 for alpha chain variable domain of TCR clone 177531 (TRAV17, TRAJ22)
CATSPSGSARQLTF

SEQ ID NO: 355062 - protein, 15 aa, Homo sapiens
  CDR3 for beta chain variable domain of TCR clone 177531 (TRBV4-1, TRBJ2-5)
CASSQWDLYHETQYF

SEQ ID NO: 355063 - protein, 13 aa, Homo sapiens
  CDR3 for alpha chain variable domain of TCR clone 177532 (TRAV13-2, TRAJ48)
CAEVDFGNEKLTF

SEQ ID NO: 355064 - protein, 15 aa, Homo sapiens
  CDR3 for beta chain variable domain of TCR clone 177532 (TRBV2, TRBJ1-6)
CASRIMAGENSPLHF

SEQ ID NO: 355065 - protein, 12 aa, Homo sapiens
  CDR3 for alpha chain variable domain of TCR clone 177533 (TRAV26-1, TRAJ52)
NAGGTSYGKLTF

SEQ ID NO: 355066 - protein, 14 aa, Homo sapiens
  CDR3 for beta chain variable domain of TCR clone 177533 (TRBV5-1, TRBJ1-2)
CASNIGTGDYGYTF

SEQ ID NO: 355067 - protein, 11 aa, Homo sapiens
  CDR3 for alpha chain variable domain of TCR clone 177534 (TRAV21, TRAJ34)
CAHYNTDKLIF

SEQ ID NO: 355068 - protein, 13 aa, Homo sapiens
  CDR3 for beta chain variable domain of TCR clone 177534 (TRBV7-6, TRBJ1-2)
CASSLVADYGNTF

SEQ ID NO: 355069 - protein, 15 aa, Homo sapiens
  CDR3 for alpha chain variable domain of TCR clone 177535 (TRAV8-3, TRAJ27)
CAVAPSKTNAGKSTF

SEQ ID NO: 355070 - protein, 15 aa, Homo sapiens
  CDR3 for beta chain variable domain of TCR clone 177535 (TRBV7-2, TRBJ2-1)
CASSSGLAGGNEQFF

SEQ ID NO: 355071 - protein, 15 aa, Homo sapiens
  CDR3 for alpha chain variable domain of TCR clone 177536 (TRAV3, TRAJ22)
CAVRGRGGSARQLTF

SEQ ID NO: 355072 - protein, 14 aa, Homo sapiens
  CDR3 for beta chain variable domain of TCR clone 177536 (TRBV4-3, TRBJ2-7)
CASSQDVAGGEQYF

SEQ ID NO: 355073 - protein, 12 aa, Homo sapiens
  CDR3 for alpha chain variable domain of TCR clone 177537 (TRAV16, TRAJ10)
CSRTGGGNKLTF

SEQ ID NO: 355074 - protein, 15 aa, Homo sapiens
  CDR3 for beta chain variable domain of TCR clone 177537 (TRBV28, TRBJ2-7)
CASSVRQVSSYEQYF

SEQ ID NO: 355075 - protein, 14 aa, Homo sapiens
  CDR3 for alpha chain variable domain of TCR clone 177538 (TRAV8-2, TRAJ4)
CVVSPSGGYNKLIF

SEQ ID NO: 355076 - protein, 14 aa, Homo sapiens
  CDR3 for beta chain variable domain of TCR clone 177538 (TRBV9, TRBJ2-4)
CASSPSGTSGFQYF

SEQ ID NO: 355077 - protein, 10 aa, Homo sapiens
  CDR3 for alpha chain variable domain of TCR clone 177539 (TRAV13-1, TRAJ7)
LIGGTNRLAV

SEQ ID NO: 355078 - protein, 15 aa, Homo sapiens
  CDR3 for beta chain variable domain of TCR clone 177539 (TRBV7-8, TRBJ1-2)
CASSLVRDGGLGYTF

SEQ ID NO: 355079 - protein, 18 aa, Homo sapiens
  CDR3 for alpha chain variable domain of TCR clone 177540 (TRAV26-1, TRAJ52)
CIVRVEGAGGTSYGKLTF

SEQ ID NO: 355080 - protein, 13 aa, Homo sapiens
  CDR3 for beta chain variable domain of TCR clone 177540 (TRBV7-3, TRBJ1-2)
CASILKRGYGYTF

SEQ ID NO: 355081 - protein, 14 aa, Homo sapiens
  CDR3 for alpha chain variable domain of TCR clone 177541 (TRAV8-6, TRAJ30)
CAVSPVNRDDKIIF

SEQ ID NO: 355082 - protein, 17 aa, Homo sapiens
  CDR3 for beta chain variable domain of TCR clone 177541 (TRBV7-8, TRBJ2-6)
CASSAGTGGAGANVLTF

SEQ ID NO: 355083 - protein, 14 aa, Homo sapiens
  CDR3 for alpha chain variable domain of TCR clone 177542 (TRAV29/DV5, TRAJ32)
CAPAYGVATNKLIF

SEQ ID NO: 355084 - protein, 11 aa, Homo sapiens
  CDR3 for beta chain variable domain of TCR clone 177542 (TRBV11-2, TRBJ2-2)
CASSLPGELFF

SEQ ID NO: 355085 - protein, 13 aa, Homo sapiens
  CDR3 for alpha chain variable domain of TCR clone 177543 (TRAV13-2, TRAJ13)
CAERPGGYQRVTF

SEQ ID NO: 355086 - protein, 16 aa, Homo sapiens
  CDR3 for beta chain variable domain of TCR clone 177543 (TRBV18, TRBJ2-5)
CASSPPSSAGAKTQYF

SEQ ID NO: 355087 - protein, 14 aa, Homo sapiens
  CDR3 for alpha chain variable domain of TCR clone 177544 (TRAV13-2, TRAJ17)
CAENSKAAGNKLTF

SEQ ID NO: 355088 - protein, 15 aa, Homo sapiens
  CDR3 for beta chain variable domain of TCR clone 177544 (TRBV28, TRBJ2-5)
CASSSGRTIQETQYF

SEQ ID NO: 355089 - protein, 15 aa, Homo sapiens
  CDR3 for alpha chain variable domain of TCR clone 177545 (TRAV8-3, TRAJ37)
CAVGTPSSNTGKLIF

SEQ ID NO: 355090 - protein, 15 aa, Homo sapiens
  CDR3 for beta chain variable domain of TCR clone 177545 (TRBV11-2, TRBJ1-2)
CASSQMRGLNYGDTF

SEQ ID NO: 355091 - protein, 14 aa, Homo sapiens
  CDR3 for alpha chain variable domain of TCR clone 177546 (TRAV17, TRAJ54)
CATDANQGAQKLVF

SEQ ID NO: 355092 - protein, 14 aa, Homo sapiens
  CDR3 for beta chain variable domain of TCR clone 177546 (TRBV25-1, TRBJ1-1)
CASTHLGGNTEAVF

SEQ ID NO: 355093 - protein, 11 aa, Homo sapiens
  CDR3 for alpha chain variable domain of TCR clone 177547 (TRAV17, TRAJ36)
CAPTGAHNLFF

SEQ ID NO: 355094 - protein, 12 aa, Homo sapiens
  CDR3 for beta chain variable domain of TCR clone 177547 (TRBV29-1, TRBJ2-3)
CSVTGGADTQYF

SEQ ID NO: 355095 - protein, 13 aa, Homo sapiens
  CDR3 for alpha chain variable domain of TCR clone 177548 (TRAV8-6, TRAJ49)
CAVITNTGNQLYF

SEQ ID NO: 355096 - protein, 15 aa, Homo sapiens
  CDR3 for beta chain variable domain of TCR clone 177548 (TRBV7-9, TRBJ1-4)
CASSARTGGNEKLFF

SEQ ID NO: 355097 - protein, 14 aa, Homo sapiens
  CDR3 for alpha chain variable domain of TCR clone 177549 (TRAV12-3, TRAJ10)
SHLPLTGGGNKLTF

SEQ ID NO: 355098 - protein, 15 aa, Homo sapiens
  CDR3 for beta chain variable domain of TCR clone 177549 (TRBV4-2, TRBJ1-1)
CASSQDPDSNTEAFF

SEQ ID NO: 355099 - protein, 15 aa, Homo sapiens
  CDR3 for alpha chain variable domain of TCR clone 177550 (TRAV3, TRAJ5)
CAVRDRKTGRRALTF

SEQ ID NO: 355100 - protein, 13 aa, Homo sapiens
  CDR3 for beta chain variable domain of TCR clone 177550 (TRBV28, TRBJ2-2)
CASIRESTGELFF

SEQ ID NO: 355101 - protein, 10 aa, Homo sapiens
  CDR3 for alpha chain variable domain of TCR clone 177551 (TRAV1-2, TRAJ20)
CALNDYKLSF

SEQ ID NO: 355102 - protein, 12 aa, Homo sapiens
  CDR3 for beta chain variable domain of TCR clone 177551 (TRBV11-2, TRBJ2-1)
CASSPGNNEQFF

SEQ ID NO: 355103 - protein, 13 aa, Homo sapiens
  CDR3 for alpha chain variable domain of TCR clone 177552 (TRAV8-3, TRAJ28)
CAVGAFGSSNSLS

SEQ ID NO: 355104 - protein, 15 aa, Homo sapiens
  CDR3 for beta chain variable domain of TCR clone 177552 (TRBV7-9, TRBJ1-5)
CASSQGHQPNQPQHF

SEQ ID NO: 355105 - protein, 16 aa, Homo sapiens
  CDR3 for alpha chain variable domain of TCR clone 177553 (TRAV30, TRAJ24)
CGTEIVDADSWGKFQF

SEQ ID NO: 355106 - protein, 15 aa, Homo sapiens
  CDR3 for beta chain variable domain of TCR clone 177553 (TRBV11-3, TRBJ2-1)
CASSLGDSSHNEQFF

SEQ ID NO: 355107 - protein, 13 aa, Homo sapiens
  CDR3 for alpha chain variable domain of TCR clone 177554 (TRAV23/DV6, TRAJ45)
CAARRGGADGPTF

SEQ ID NO: 355108 - protein, 14 aa, Homo sapiens
  CDR3 for beta chain variable domain of TCR clone 177554 (TRBV7-2, TRBJ2-3)
CASSLARGTDTQYF

SEQ ID NO: 355109 - protein, 11 aa, Homo sapiens
  CDR3 for alpha chain variable domain of TCR clone 177555 (TRAV12-2, TRAJ33)
CAVGSNYQLIW

SEQ ID NO: 355110 - protein, 16 aa, Homo sapiens
  CDR3 for beta chain variable domain of TCR clone 177555 (TRBV13, TRBJ2-3)
CQQPLQGSGGRNTQYF

SEQ ID NO: 355111 - protein, 15 aa, Homo sapiens
  CDR3 for alpha chain variable domain of TCR clone 177556 (TRAV3, TRAJ4)
CAQNMFSGGYNKMIF

SEQ ID NO: 355112 - protein, 16 aa, Homo sapiens
  CDR3 for beta chain variable domain of TCR clone 177556 (TRBV3-1, TRBJ1-6)
CASSQEFQGSYSPLHF

SEQ ID NO: 355113 - protein, 21 aa, Homo sapiens
  CDR3 for alpha chain variable domain of TCR clone 177557 (TRAV4, TRAJ3)
CCVLLPRGCPPGYSSASKIIF

SEQ ID NO: 355114 - protein, 14 aa, Homo sapiens
  CDR3 for beta chain variable domain of TCR clone 177557 (TRBV2, TRBJ1-6)
CALSPADPRSPLHF

SEQ ID NO: 355115 - protein, 13 aa, Homo sapiens
  CDR3 for alpha chain variable domain of TCR clone 177558 (TRAV12-2, TRAJ42)
CAVKRGSQGNLIF

SEQ ID NO: 355116 - protein, 15 aa, Homo sapiens
  CDR3 for beta chain variable domain of TCR clone 177558 (TRBV20-1, TRBJ2-7)
CSARDRVSGMDEQYF

SEQ ID NO: 355117 - protein, 13 aa, Homo sapiens
  CDR3 for alpha chain variable domain of TCR clone 177559 (TRAV8-4, TRAJ39)
STPPSDAGTMLTF

SEQ ID NO: 355118 - protein, 13 aa, Homo sapiens
  CDR3 for beta chain variable domain of TCR clone 177559 (TRBV12-4, TRBJ2-7)
CASSPTETYEQYF

SEQ ID NO: 355119 - protein, 15 aa, Homo sapiens
  CDR3 for alpha chain variable domain of TCR clone 177560 (TRAV3, TRAJ22)
CAVRDRGGSARQLTF

SEQ ID NO: 355120 - protein, 13 aa, Homo sapiens
  CDR3 for beta chain variable domain of TCR clone 177560 (TRBV7-9, TRBJ2-4)
CATEGLAGNIQYF

SEQ ID NO: 355121 - protein, 17 aa, Homo sapiens
  CDR3 for alpha chain variable domain of TCR clone 177561 (TRAV3, TRAJ38)
CAVRDCLNAGNNRKLIW

SEQ ID NO: 355122 - protein, 13 aa, Homo sapiens
  CDR3 for beta chain variable domain of TCR clone 177561 (TRBV10-3, TRBJ1-2)
CAISERDSYGYTF

SEQ ID NO: 355123 - protein, 15 aa, Homo sapiens
  CDR3 for alpha chain variable domain of TCR clone 177562 (TRAV26-1, TRAJ29)
CIVRVEGYGNTPLVF

SEQ ID NO: 355124 - protein, 14 aa, Homo sapiens
  CDR3 for beta chain variable domain of TCR clone 177562 (TRBV18, TRBJ2-5)
CASSPGVSQEAQYF

SEQ ID NO: 355125 - protein, 12 aa, Homo sapiens
  CDR3 for alpha chain variable domain of TCR clone 177563 (TRAV5, TRAJ27)
CAEITNAGKSTF

SEQ ID NO: 355126 - protein, 15 aa, Homo sapiens
  CDR3 for beta chain variable domain of TCR clone 177563 (TRBV11-2, TRBJ1-2)
CASSLEGVQRNGYIF

SEQ ID NO: 355127 - protein, 14 aa, Homo sapiens
  CDR3 for alpha chain variable domain of TCR clone 177564 (TRAV1-2, TRAJ8)
CAVREDTGFQQLVF

SEQ ID NO: 355128 - protein, 14 aa, Homo sapiens
  CDR3 for beta chain variable domain of TCR clone 177564 (TRBV7-2, TRBJ2-7)
CASSPKTSFYEQYF

SEQ ID NO: 355129 - protein, 13 aa, Homo sapiens
  CDR3 for alpha chain variable domain of TCR clone 177565 (TRAV3, TRAJ20)
CAVRPLNDYTLSF

SEQ ID NO: 355130 - protein, 12 aa, Homo sapiens
  CDR3 for beta chain variable domain of TCR clone 177565 (TRBV6-1, TRBJ2-1)
CATYGLNNEQFF

SEQ ID NO: 355131 - protein, 11 aa, Homo sapiens
  CDR3 for alpha chain variable domain of TCR clone 177566 (TRAV1-1, TRAJ23)
CAVRQGGKLIF

SEQ ID NO: 355132 - protein, 11 aa, Homo sapiens
  CDR3 for beta chain variable domain of TCR clone 177566 (TRBV7-9, TRBJ2-3)
CASSGPDTQYF

SEQ ID NO: 355133 - protein, 12 aa, Homo sapiens
  CDR3 for alpha chain variable domain of TCR clone 177567 (TRAV12-2, TRAJ8)
CAVNTGFQKLVY

SEQ ID NO: 355134 - protein, 15 aa, Homo sapiens
  CDR3 for beta chain variable domain of TCR clone 177567 (TRBV7-8, TRBJ1-5)
CASSLERRGLEPQHF

SEQ ID NO: 355135 - protein, 17 aa, Homo sapiens
  CDR3 for alpha chain variable domain of TCR clone 177568 (TRAV3, TRAJ38)
CAVRDCLNAGNNRKLIW

SEQ ID NO: 355136 - protein, 12 aa, Homo sapiens
  CDR3 for beta chain variable domain of TCR clone 177568 (TRBV5-7, TRBJ2-7)
CASSLGRYEQYF

SEQ ID NO: 355137 - protein, 10 aa, Homo sapiens
  CDR3 for alpha chain variable domain of TCR clone 177569 (TRAV13-2, TRAJ42)
CAEKGKNYEE

SEQ ID NO: 355138 - protein, 16 aa, Homo sapiens
  CDR3 for beta chain variable domain of TCR clone 177569 (TRBV7-9, TRBJ2-1)
CASSLGTGWDYNEQFF

SEQ ID NO: 355139 - protein, 15 aa, Homo sapiens
  CDR3 for alpha chain variable domain of TCR clone 177570 (TRAV20, TRAJ53)
CAVQERGGSNYKLTF

SEQ ID NO: 355140 - protein, 12 aa, Homo sapiens
  CDR3 for beta chain variable domain of TCR clone 177570 (TRBV7-9, TRBJ2-7)
CASSLEGYEQYF

SEQ ID NO: 355141 - protein, 16 aa, Homo sapiens
  CDR3 for alpha chain variable domain of TCR clone 177571 (TRAV8-1, TRAJ42)
CAVTSRYGGSQENPIF

SEQ ID NO: 355142 - protein, 12 aa, Homo sapiens
  CDR3 for beta chain variable domain of TCR clone 177571 (TRBV6-3, TRBJ2-7)
CASSLGRRGLYF

SEQ ID NO: 355143 - protein, 12 aa, Homo sapiens
  CDR3 for alpha chain variable domain of TCR clone 177572 (TRAV13-1, TRAJ15)
CAASQAGTALIL

SEQ ID NO: 355144 - protein, 14 aa, Homo sapiens
  CDR3 for beta chain variable domain of TCR clone 177572 (TRBV19, TRBJ2-1)
CASPTFVLSDEQFF

SEQ ID NO: 355145 - protein, 18 aa, Homo sapiens
  CDR3 for alpha chain variable domain of TCR clone 177573 (TRAV21, TRAJ52)
CAVRPSPAGGTSYGNLTF

SEQ ID NO: 355146 - protein, 17 aa, Homo sapiens
  CDR3 for beta chain variable domain of TCR clone 177573 (TRBV13, TRBJ2-3)
WASSLSRVAGGRNTQYF

SEQ ID NO: 355147 - protein, 16 aa, Homo sapiens
  CDR3 for alpha chain variable domain of TCR clone 177574 (TRAV26-2, TRAJ57)
CILRDVWSGGSEKLVF

SEQ ID NO: 355148 - protein, 13 aa, Homo sapiens
  CDR3 for beta chain variable domain of TCR clone 177574 (TRBV18, TRBJ2-3)
CASSPGVTDTQYF

SEQ ID NO: 355149 - protein, 12 aa, Homo sapiens
  CDR3 for alpha chain variable domain of TCR clone 177575 (TRAV1-1, TRAJ12)
CAVGDSSYKFIF

SEQ ID NO: 355150 - protein, 14 aa, Homo sapiens
  CDR3 for beta chain variable domain of TCR clone 177575 (TRBV20-1, TRBJ2-7)
CSAPELAGVGEQYF

SEQ ID NO: 355151 - protein, 15 aa, Homo sapiens
  CDR3 for alpha chain variable domain of TCR clone 177576 (TRAV4, TRAJ39)
CLVGPNNNAGNMLTF

SEQ ID NO: 355152 - protein, 13 aa, Homo sapiens
  CDR3 for beta chain variable domain of TCR clone 177576 (TRBV11-2, TRBJ2-5)
CASSSTGEETEYF

SEQ ID NO: 355153 - protein, 16 aa, Homo sapiens
  CDR3 for alpha chain variable domain of TCR clone 177577 (TRAV16, TRAJ52)
CALSAAGGTSYGKLTF

SEQ ID NO: 355154 - protein, 14 aa, Homo sapiens
  CDR3 for beta chain variable domain of TCR clone 177577 (TRBV13, TRBJ2-7)
CASSLKGASYEQYF

SEQ ID NO: 355155 - protein, 13 aa, Homo sapiens
  CDR3 for alpha chain variable domain of TCR clone 177578 (TRAV20, TRAJ37)
CAGCSSNTGKLIF

SEQ ID NO: 355156 - protein, 15 aa, Homo sapiens
  CDR3 for beta chain variable domain of TCR clone 177578 (TRBV7-2, TRBJ2-1)
CASSVQADEYNEQFF

SEQ ID NO: 355157 - protein, 11 aa, Homo sapiens
  CDR3 for alpha chain variable domain of TCR clone 177579 (TRAV12-1, TRAJ30)
CVVNGQDQIIF

SEQ ID NO: 355158 - protein, 12 aa, Homo sapiens
  CDR3 for beta chain variable domain of TCR clone 177579 (TRBV27, TRBJ2-2)
CASKLFTGELFV

SEQ ID NO: 355159 - protein, 12 aa, Homo sapiens
  CDR3 for alpha chain variable domain of TCR clone 177580 (TRAV17, TRAJ39)
CTTGAAGNMLTF

SEQ ID NO: 355160 - protein, 14 aa, Homo sapiens
  CDR3 for beta chain variable domain of TCR clone 177580 (TRBV7-9, TRBJ1-2)
CASSRQGANYGYTF

SEQ ID NO: 355161 - protein, 13 aa, Homo sapiens
  CDR3 for alpha chain variable domain of TCR clone 177581 (TRAV3, TRAJ27)
CAVRPLGAGKSTF

SEQ ID NO: 355162 - protein, 16 aa, Homo sapiens
  CDR3 for beta chain variable domain of TCR clone 177581 (TRBV2, TRBJ2-6)
CASSEVGGAGANVLTF

SEQ ID NO: 355163 - protein, 11 aa, Homo sapiens
  CDR3 for alpha chain variable domain of TCR clone 177582 (TRAV29/DV5, TRAJ37)
CATSNTGKLIF

SEQ ID NO: 355164 - protein, 12 aa, Homo sapiens
  CDR3 for beta chain variable domain of TCR clone 177582 (TRBV11-3, TRBJ2-1)
CASSPGNNEQFF

SEQ ID NO: 355165 - protein, 12 aa, Homo sapiens
  CDR3 for alpha chain variable domain of TCR clone 177583 (TRAV38-2/DV8, TRAJ48)
CALFSGNEKLTF

SEQ ID NO: 355166 - protein, 15 aa, Homo sapiens
  CDR3 for beta chain variable domain of TCR clone 177583 (TRBV6-1, TRBJ2-1)
CASSELRGQYNEQFF

SEQ ID NO: 355167 - protein, 12 aa, Homo sapiens
  CDR3 for alpha chain variable domain of TCR clone 177584 (TRAV12-3, TRAJ17)
CAMTLTGNKLTL

SEQ ID NO: 355168 - protein, 13 aa, Homo sapiens
  CDR3 for beta chain variable domain of TCR clone 177584 (TRBV12-4, TRBJ1-1)
CASSPGTGFEAFF

SEQ ID NO: 355169 - protein, 16 aa, Homo sapiens
  CDR3 for alpha chain variable domain of TCR clone 177585 (TRAV16, TRAJ4)
CALSRMFSGGYNKLIF

SEQ ID NO: 355170 - protein, 16 aa, Homo sapiens
  CDR3 for beta chain variable domain of TCR clone 177585 (TRBV27, TRBJ2-5)
CASSSQTSGFQETQYF

SEQ ID NO: 355171 - protein, 18 aa, Homo sapiens
  CDR3 for alpha chain variable domain of TCR clone 177586 (TRAV21, TRAJ52)
CAVRPSPAGGTSYVMLTF

SEQ ID NO: 355172 - protein, 13 aa, Homo sapiens
  CDR3 for beta chain variable domain of TCR clone 177586 (TRBV7-3, TRBJ1-1)
CASSQDWGAEAFF

SEQ ID NO: 355173 - protein, 15 aa, Homo sapiens
  CDR3 for alpha chain variable domain of TCR clone 177587 (TRAV16, TRAJ57)
CALSGGQGGSEKLVF

SEQ ID NO: 355174 - protein, 15 aa, Homo sapiens
  CDR3 for beta chain variable domain of TCR clone 177587 (TRBV5-1, TRBJ2-1)
YASSPPRAPYNEQFF

SEQ ID NO: 355175 - protein, 11 aa, Homo sapiens
  CDR3 for alpha chain variable domain of TCR clone 177588 (TRAV1-2, TRAJ40)
CAVPGTYKYIF

SEQ ID NO: 355176 - protein, 15 aa, Homo sapiens
  CDR3 for beta chain variable domain of TCR clone 177588 (TRBV7-2, TRBJ1-4)
CASSLGLRGREKLFF

SEQ ID NO: 355177 - protein, 15 aa, Homo sapiens
  CDR3 for alpha chain variable domain of TCR clone 177589 (TRAV1-2, TRAJ3)
CAVRGGYSSASKIIF

SEQ ID NO: 355178 - protein, 13 aa, Homo sapiens
  CDR3 for beta chain variable domain of TCR clone 177589 (TRBV7-3, TRBJ1-1)
CASSQDWGAEAFF

SEQ ID NO: 355179 - protein, 13 aa, Homo sapiens
  CDR3 for alpha chain variable domain of TCR clone 177590 (TRAV27, TRAJ29)
CAGAHSGNTPLVF

SEQ ID NO: 355180 - protein, 19 aa, Homo sapiens
  CDR3 for beta chain variable domain of TCR clone 177590 (TRBV25-1, TRBJ2-2)
CAILVYRVDSGRKTGELFF

SEQ ID NO: 355181 - protein, 14 aa, Homo sapiens
  CDR3 for alpha chain variable domain of TCR clone 177591 (TRAV27, )
CAGIQNPDPAVYQL

SEQ ID NO: 355182 - protein, 13 aa, Homo sapiens
  CDR3 for beta chain variable domain of TCR clone 177591 (TRBV28, TRBJ2-5)
CASSSRNQETQYF

SEQ ID NO: 355183 - protein, 12 aa, Homo sapiens
  CDR3 for alpha chain variable domain of TCR clone 177592 (TRAV29/DV5, TRAJ15)
CESNQAGTALIF

SEQ ID NO: 355184 - protein, 15 aa, Homo sapiens
  CDR3 for beta chain variable domain of TCR clone 177592 (TRBV11-2, TRBJ2-2)
CASSSDRVNAGELFF

SEQ ID NO: 355185 - protein, 11 aa, Homo sapiens
  CDR3 for alpha chain variable domain of TCR clone 177593 (TRAV2, TRAJ21)
CAVFNFNKFYF

SEQ ID NO: 355186 - protein, 13 aa, Homo sapiens
  CDR3 for beta chain variable domain of TCR clone 177593 (TRBV7-9, TRBJ2-2)
CASSLDPTGELFF

SEQ ID NO: 355187 - protein, 14 aa, Homo sapiens
  CDR3 for alpha chain variable domain of TCR clone 177594 (TRAV29/DV5, TRAJ48)
CAAMALFGNEKLTF

SEQ ID NO: 355188 - protein, 15 aa, Homo sapiens
  CDR3 for beta chain variable domain of TCR clone 177594 (TRBV7-2, TRBJ2-1)
CASTDGTGIYNEQFF

SEQ ID NO: 355189 - protein, 14 aa, Homo sapiens
  CDR3 for alpha chain variable domain of TCR clone 177595 (TRAV4, TRAJ9)
CLVGSGTGGFKTIF

SEQ ID NO: 355190 - protein, 11 aa, Homo sapiens
  CDR3 for beta chain variable domain of TCR clone 177595 (TRBV12-4, TRBJ2-3)
CASTATDTQYF

SEQ ID NO: 355191 - protein, 10 aa, Homo sapiens
  CDR3 for alpha chain variable domain of TCR clone 177596 (TRAV12-3, TRAJ18)
CAMSAEAQPW

SEQ ID NO: 355192 - protein, 16 aa, Homo sapiens
  CDR3 for beta chain variable domain of TCR clone 177596 (TRBV20-1, TRBJ1-4)
CSAPGQGLLTNEKLFF

SEQ ID NO: 355193 - protein, 16 aa, Homo sapiens
  CDR3 for alpha chain variable domain of TCR clone 177597 (TRAV3, TRAJ37)
CAVRPHGSGNTGKLIF

SEQ ID NO: 355194 - protein, 15 aa, Homo sapiens
  CDR3 for beta chain variable domain of TCR clone 177597 (TRBV6-1, TRBJ2-1)
CASSEAAYSYNEQFF

SEQ ID NO: 355195 - protein, 11 aa, Homo sapiens
  CDR3 for alpha chain variable domain of TCR clone 177598 (TRAV12-3, TRAJ34)
CAHYNTDKLIF

SEQ ID NO: 355196 - protein, 13 aa, Homo sapiens
  CDR3 for beta chain variable domain of TCR clone 177598 (TRBV7-6, TRBJ1-2)
CASSLVADYGYTF

SEQ ID NO: 355197 - protein, 14 aa, Homo sapiens
  CDR3 for alpha chain variable domain of TCR clone 177599 (TRAV3, TRAJ36)
CAVRDGTGANNLFF

SEQ ID NO: 355198 - protein, 13 aa, Homo sapiens
  CDR3 for beta chain variable domain of TCR clone 177599 (TRBV19, TRBJ1-2)
CASSVPGQDGYTL

SEQ ID NO: 355199 - protein, 11 aa, Homo sapiens
  CDR3 for alpha chain variable domain of TCR clone 177600 (TRAV17, TRAJ49)
CATDAGNQFYF

SEQ ID NO: 355200 - protein, 16 aa, Homo sapiens
  CDR3 for beta chain variable domain of TCR clone 177600 (TRBV7-2, TRBJ1-2)
CASSPTSGTALGGYTF

SEQ ID NO: 355201 - protein, 14 aa, Homo sapiens
  CDR3 for alpha chain variable domain of TCR clone 177601 (TRAV12-2, TRAJ9)
CAVNALEGGFKTIF

SEQ ID NO: 355202 - protein, 13 aa, Homo sapiens
  CDR3 for beta chain variable domain of TCR clone 177601 (TRBV19, TRBJ1-2)
CASSVPGQDGYTF

SEQ ID NO: 355203 - protein, 15 aa, Homo sapiens
  CDR3 for alpha chain variable domain of TCR clone 177602 (TRAV8-3, TRAJ11)
CAVGLLNSGYSTLTF

SEQ ID NO: 355204 - protein, 14 aa, Homo sapiens
  CDR3 for beta chain variable domain of TCR clone 177602 (TRBV7-6, TRBJ2-7)
CASSFRQGADEQYF

SEQ ID NO: 355205 - protein, 14 aa, Homo sapiens
  CDR3 for alpha chain variable domain of TCR clone 177603 (TRAV12-2, TRAJ11)
CAVNRESGYSTLTF

SEQ ID NO: 355206 - protein, 15 aa, Homo sapiens
  CDR3 for beta chain variable domain of TCR clone 177603 (TRBV2, TRBJ2-7)
CASSEGLARSYEQYF

SEQ ID NO: 355207 - protein, 12 aa, Homo sapiens
  CDR3 for alpha chain variable domain of TCR clone 177604 (TRAV13-1, TRAJ27)
CAAHTNAGKSTF

SEQ ID NO: 355208 - protein, 16 aa, Homo sapiens
  CDR3 for beta chain variable domain of TCR clone 177604 (TRBV29-1, TRBJ2-7)
CSVEDAEDGTAYEQYF

SEQ ID NO: 355209 - protein, 15 aa, Homo sapiens
  CDR3 for alpha chain variable domain of TCR clone 177605 (TRAV17, TRAJ13)
CATDAGSGGYQKVTF

SEQ ID NO: 355210 - protein, 14 aa, Homo sapiens
  CDR3 for beta chain variable domain of TCR clone 177605 (TRBV7-7, TRBJ2-1)
CASSSGLASNEQFF

SEQ ID NO: 355211 - protein, 10 aa, Homo sapiens
  CDR3 for alpha chain variable domain of TCR clone 177606 (TRAV12-2, TRAJ31)
CAVNNARLMF

SEQ ID NO: 355212 - protein, 15 aa, Homo sapiens
  CDR3 for beta chain variable domain of TCR clone 177606 (TRBV7-3, TRBJ2-1)
CASSRIGTGSSEQFF

SEQ ID NO: 355213 - protein, 11 aa, Homo sapiens
  CDR3 for alpha chain variable domain of TCR clone 177607 (TRAV13-1, TRAJ20)
CAASNDYKPSF

SEQ ID NO: 355214 - protein, 16 aa, Homo sapiens
  CDR3 for beta chain variable domain of TCR clone 177607 (TRBV27, TRBJ2-1)
CASSLSKGFGLDEQFF

SEQ ID NO: 355215 - protein, 15 aa, Homo sapiens
  CDR3 for alpha chain variable domain of TCR clone 177608 (TRAV17, TRAJ57)
CATGPSQGGSEKLVF

SEQ ID NO: 355216 - protein, 16 aa, Homo sapiens
  CDR3 for beta chain variable domain of TCR clone 177608 (TRBV4-1, TRBJ2-3)
CASSQRAGGLTDTQYF

SEQ ID NO: 355217 - protein, 11 aa, Homo sapiens
  CDR3 for alpha chain variable domain of TCR clone 177609 (TRAV2, TRAJ13)
CASGGYQKVTF

SEQ ID NO: 355218 - protein, 12 aa, Homo sapiens
  CDR3 for beta chain variable domain of TCR clone 177609 (TRBV28, TRBJ1-6)
CASSLLRGGIAF

SEQ ID NO: 355219 - protein, 13 aa, Homo sapiens
  CDR3 for alpha chain variable domain of TCR clone 177610 (TRAV36/DV7, TRAJ49)
CAGDSNTGNQFYF

SEQ ID NO: 355220 - protein, 13 aa, Homo sapiens
  CDR3 for beta chain variable domain of TCR clone 177610 (TRBV7-9, TRBJ2-3)
CASSPGSTDTQYF

SEQ ID NO: 355221 - protein, 12 aa, Homo sapiens
  CDR3 for alpha chain variable domain of TCR clone 177611 (TRAV21, TRAJ33)
CAKMDSNYQLIW

SEQ ID NO: 355222 - protein, 13 aa, Homo sapiens
  CDR3 for beta chain variable domain of TCR clone 177611 (TRBV7-7, TRBJ2-5)
CASSRSGQETQYF

SEQ ID NO: 355223 - protein, 11 aa, Homo sapiens
  CDR3 for alpha chain variable domain of TCR clone 177612 (TRAV3, TRAJ21)
CAVGNFNNIYF

SEQ ID NO: 355224 - protein, 16 aa, Homo sapiens
  CDR3 for beta chain variable domain of TCR clone 177612 (TRBV19, TRBJ2-1)
CASSKAGPSSYNEQFF

SEQ ID NO: 355225 - protein, 14 aa, Homo sapiens
  CDR3 for alpha chain variable domain of TCR clone 177613 (TRAV1-2, TRAJ16)
CDVNRFSDGQKLLF

SEQ ID NO: 355226 - protein, 15 aa, Homo sapiens
  CDR3 for beta chain variable domain of TCR clone 177613 (TRBV12-4, TRBJ2-5)
CASSPPTGLQETQYF

SEQ ID NO: 355227 - protein, 11 aa, Homo sapiens
  CDR3 for alpha chain variable domain of TCR clone 177614 (TRAV2, TRAJ13)
CASGGYQKVTF

SEQ ID NO: 355228 - protein, 14 aa, Homo sapiens
  CDR3 for beta chain variable domain of TCR clone 177614 (TRBV9, TRBJ2-1)
CASSVDPRGKEQFF

SEQ ID NO: 355229 - protein, 15 aa, Homo sapiens
  CDR3 for alpha chain variable domain of TCR clone 177615 (TRAV3, TRAJ22)
CAVRDRGGSARQLAF

SEQ ID NO: 355230 - protein, 15 aa, Homo sapiens
  CDR3 for beta chain variable domain of TCR clone 177615 (TRBV11-2, TRBJ1-1)
CASSSRSSLLLSLDK

SEQ ID NO: 355231 - protein, 13 aa, Homo sapiens
  CDR3 for alpha chain variable domain of TCR clone 177616 (TRAV3, TRAJ43)
CAVRDTRGGVMRF

SEQ ID NO: 355232 - protein, 15 aa, Homo sapiens
  CDR3 for beta chain variable domain of TCR clone 177616 (TRBV6-5, TRBJ1-5)
CASSYSRRSNQPQHF

SEQ ID NO: 355233 - protein, 14 aa, Homo sapiens
  CDR3 for alpha chain variable domain of TCR clone 177617 (TRAV8-3, TRAJ6)
CAVGASGGSYITTF

SEQ ID NO: 355234 - protein, 17 aa, Homo sapiens
  CDR3 for beta chain variable domain of TCR clone 177617 (TRBV18, TRBJ2-2)
CASSPSDPWQNTGELFF

SEQ ID NO: 355235 - protein, 13 aa, Homo sapiens
  CDR3 for alpha chain variable domain of TCR clone 177618 (TRAV1-2, TRAJ9)
CAVLNTGGFKTIF

SEQ ID NO: 355236 - protein, 13 aa, Homo sapiens
  CDR3 for beta chain variable domain of TCR clone 177618 (TRBV19, TRBJ2-7)
CACRKAGGSEQYF

SEQ ID NO: 355237 - protein, 12 aa, Homo sapiens
  CDR3 for alpha chain variable domain of TCR clone 177619 (TRAV13-2, TRAJ8)
CAPWLGFQKLVF

SEQ ID NO: 355238 - protein, 14 aa, Homo sapiens
  CDR3 for beta chain variable domain of TCR clone 177619 (TRBV7-2, TRBJ2-7)
CASSFLGRVYEQYF

SEQ ID NO: 355239 - protein, 15 aa, Homo sapiens
  CDR3 for alpha chain variable domain of TCR clone 177620 (TRAV12-3, TRAJ6)
CAMSATSGGSYIPTF

SEQ ID NO: 355240 - protein, 13 aa, Homo sapiens
  CDR3 for beta chain variable domain of TCR clone 177620 (TRBV7-2, TRBJ2-2)
CASSLAVTGELFF

SEQ ID NO: 355241 - protein, 14 aa, Homo sapiens
  CDR3 for alpha chain variable domain of TCR clone 177621 (TRAV29/DV5, TRAJ36)
CAARRKTGANNLFF

SEQ ID NO: 355242 - protein, 15 aa, Homo sapiens
  CDR3 for beta chain variable domain of TCR clone 177621 (TRBV11-2, TRBJ1-6)
CASSLDPWAVSPLHF

SEQ ID NO: 355243 - protein, 13 aa, Homo sapiens
  CDR3 for alpha chain variable domain of TCR clone 177622 (TRAV16, TRAJ11)
CALTQSGYRTLTF

SEQ ID NO: 355244 - protein, 14 aa, Homo sapiens
  CDR3 for beta chain variable domain of TCR clone 177622 (TRBV19, TRBJ2-7)
CASSTTRSSYEQYF

SEQ ID NO: 355245 - protein, 18 aa, Homo sapiens
  CDR3 for alpha chain variable domain of TCR clone 177623 (TRAV3, TRAJ52)
CAVRPSPAGGTSYGKLTF

SEQ ID NO: 355246 - protein, 17 aa, Homo sapiens
  CDR3 for beta chain variable domain of TCR clone 177623 (TRBV13, TRBJ2-3)
CASSLSRVAGGRNTQYF

SEQ ID NO: 355247 - protein, 14 aa, Homo sapiens
  CDR3 for alpha chain variable domain of TCR clone 177624 (TRAV26-1, TRAJ44)
CIVRPTGTASKLTF

SEQ ID NO: 355248 - protein, 13 aa, Homo sapiens
  CDR3 for beta chain variable domain of TCR clone 177624 (TRBV7-3, TRBJ1-1)
CASSQDWGAEAFF

SEQ ID NO: 355249 - protein, 17 aa, Homo sapiens
  CDR3 for alpha chain variable domain of TCR clone 177625 (TRAV9-2, TRAJ45)
CALSGYYSGGGADGLTF

SEQ ID NO: 355250 - protein, 17 aa, Homo sapiens
  CDR3 for beta chain variable domain of TCR clone 177625 (TRBV4-3, TRBJ1-2)
CASSSRLQAGGSVGYTF

SEQ ID NO: 355251 - protein, 14 aa, Homo sapiens
  CDR3 for alpha chain variable domain of TCR clone 177626 (TRAV12-3, TRAJ10)
SHLPLTGGGNKLTF

SEQ ID NO: 355252 - protein, 17 aa, Homo sapiens
  CDR3 for beta chain variable domain of TCR clone 177626 (TRBV5-1, TRBJ2-3)
CASSKIGLADRTDTQYF

SEQ ID NO: 355253 - protein, 16 aa, Homo sapiens
  CDR3 for alpha chain variable domain of TCR clone 177627 (TRAV3, TRAJ40)
CAVRDRFASGTYKYIF

SEQ ID NO: 355254 - protein, 16 aa, Homo sapiens
  CDR3 for beta chain variable domain of TCR clone 177627 (TRBV6-1, TRBJ1-2)
CASSEANSIINYGYTF

SEQ ID NO: 355255 - protein, 14 aa, Homo sapiens
  CDR3 for alpha chain variable domain of TCR clone 177628 (TRAV26-1, TRAJ34)
CIVRVAYNTDKLIF

SEQ ID NO: 355256 - protein, 15 aa, Homo sapiens
  CDR3 for beta chain variable domain of TCR clone 177628 (TRBV19, TRBJ2-7)
CASSPAGSGEALRYF

SEQ ID NO: 355257 - protein, 14 aa, Homo sapiens
  CDR3 for alpha chain variable domain of TCR clone 177629 (TRAV13-1, TRAJ35)
CAASKGGFGNVLHC

SEQ ID NO: 355258 - protein, 13 aa, Homo sapiens
  CDR3 for beta chain variable domain of TCR clone 177629 (TRBV7-3, TRBJ1-1)
RASSQDWWAEAFF

SEQ ID NO: 355259 - protein, 14 aa, Homo sapiens
  CDR3 for alpha chain variable domain of TCR clone 177630 (TRAV12-3, TRAJ10)
SHLPLTGGGNKLTF

SEQ ID NO: 355260 - protein, 14 aa, Homo sapiens
  CDR3 for beta chain variable domain of TCR clone 177630 (TRBV27, TRBJ1-1)
CASSPQGKRAEAFF

SEQ ID NO: 355261 - protein, 22 aa, Homo sapiens
  CDR3 for alpha chain variable domain of TCR clone 177631 (TRAV3, )
CAVRHTPDIQNPDPAVYQLRDF

SEQ ID NO: 355262 - protein, 15 aa, Homo sapiens
  CDR3 for beta chain variable domain of TCR clone 177631 (TRBV11-3, TRBJ2-5)
CASSDTSGGIETQYF

SEQ ID NO: 355263 - protein, 14 aa, Homo sapiens
  CDR3 for alpha chain variable domain of TCR clone 177632 (TRAV12-2, TRAJ13)
CAVKKTGGYQKVTF

SEQ ID NO: 355264 - protein, 15 aa, Homo sapiens
  CDR3 for beta chain variable domain of TCR clone 177632 (TRBV6-3, TRBJ2-7)
CASCSPGTVFYEQYF

SEQ ID NO: 355265 - protein, 14 aa, Homo sapiens
  CDR3 for alpha chain variable domain of TCR clone 177633 (TRAV2, TRAJ9)
CAVEDRCGGFKTIF

SEQ ID NO: 355266 - protein, 15 aa, Homo sapiens
  CDR3 for beta chain variable domain of TCR clone 177633 (TRBV11-3, TRBJ2-3)
CASLKDGREGDTQYF

SEQ ID NO: 355267 - protein, 11 aa, Homo sapiens
  CDR3 for alpha chain variable domain of TCR clone 177634 (TRAV2, TRAJ33)
CAVESNYQLIW

SEQ ID NO: 355268 - protein, 17 aa, Homo sapiens
  CDR3 for beta chain variable domain of TCR clone 177634 (TRBV7-8, TRBJ2-6)
CASSARTGGAGANVLTF

SEQ ID NO: 355269 - protein, 10 aa, Homo sapiens
  CDR3 for alpha chain variable domain of TCR clone 177635 (TRAV8-4, TRAJ43)
CAASADDMRF

SEQ ID NO: 355270 - protein, 13 aa, Homo sapiens
  CDR3 for beta chain variable domain of TCR clone 177635 (TRBV12-4, TRBJ2-5)
CASSPGTEETQYF

SEQ ID NO: 355271 - protein, 17 aa, Homo sapiens
  CDR3 for alpha chain variable domain of TCR clone 177636 (TRAV27, TRAJ45)
ASTSVQGSGGGADGLTF

SEQ ID NO: 355272 - protein, 17 aa, Homo sapiens
  CDR3 for beta chain variable domain of TCR clone 177636 (TRBV11-2, TRBJ2-1)
CASSLYPPGVEYNEQFF

SEQ ID NO: 355273 - protein, 12 aa, Homo sapiens
  CDR3 for alpha chain variable domain of TCR clone 177637 (TRAV8-3, TRAJ27)
CAVGAEAGQSTF

SEQ ID NO: 355274 - protein, 14 aa, Homo sapiens
  CDR3 for beta chain variable domain of TCR clone 177637 (TRBV2, TRBJ2-1)
CASRLIVGHDEQFF

SEQ ID NO: 355275 - protein, 14 aa, Homo sapiens
  CDR3 for alpha chain variable domain of TCR clone 177638 (TRAV8-3, TRAJ39)
CALGANNAGNMLTF

SEQ ID NO: 355276 - protein, 12 aa, Homo sapiens
  CDR3 for beta chain variable domain of TCR clone 177638 (TRBV11-3, TRBJ1-1)
CASSHRQGEAFF

SEQ ID NO: 355277 - protein, 17 aa, Homo sapiens
  CDR3 for alpha chain variable domain of TCR clone 177639 (TRAV3, TRAJ6)
CAVRDGPRAGGSYIPTF

SEQ ID NO: 355278 - protein, 14 aa, Homo sapiens
  CDR3 for beta chain variable domain of TCR clone 177639 (TRBV7-8, TRBJ2-7)
CASSPRDRVYEQYF

SEQ ID NO: 355279 - protein, 13 aa, Homo sapiens
  CDR3 for alpha chain variable domain of TCR clone 177640 (TRAV9-2, TRAJ58)
CSATGTSCSRLTF

SEQ ID NO: 355280 - protein, 14 aa, Homo sapiens
  CDR3 for beta chain variable domain of TCR clone 177640 (TRBV7-9, TRBJ2-1)
CASSPRDSLYEQFF

SEQ ID NO: 355281 - protein, 17 aa, Homo sapiens
  CDR3 for alpha chain variable domain of TCR clone 177641 (TRAV26-1, TRAJ37)
CIVRVITVSSNTGKLTF

SEQ ID NO: 355282 - protein, 14 aa, Homo sapiens
  CDR3 for beta chain variable domain of TCR clone 177641 (TRBV19, TRBJ2-1)
CASPTFVLSGEQFF

SEQ ID NO: 355283 - protein, 15 aa, Homo sapiens
  CDR3 for alpha chain variable domain of TCR clone 177642 (TRAV27, TRAJ38)
CPARRNAGNNRKLIW

SEQ ID NO: 355284 - protein, 13 aa, Homo sapiens
  CDR3 for beta chain variable domain of TCR clone 177642 (TRBV12-5, TRBJ2-3)
CASGDRQSDTQYF

SEQ ID NO: 355285 - protein, 12 aa, Homo sapiens
  CDR3 for alpha chain variable domain of TCR clone 177643 (TRAV26-1, TRAJ36)
CIVRVRADNLFF

SEQ ID NO: 355286 - protein, 16 aa, Homo sapiens
  CDR3 for beta chain variable domain of TCR clone 177643 (TRBV7-3, TRBJ2-3)
CQQLFTSSLNTDTQYF

SEQ ID NO: 355287 - protein, 12 aa, Homo sapiens
  CDR3 for alpha chain variable domain of TCR clone 177644 (TRAV12-3, TRAJ40)
CAMSSGTYKYIF

SEQ ID NO: 355288 - protein, 12 aa, Homo sapiens
  CDR3 for beta chain variable domain of TCR clone 177644 (TRBV7-9, TRBJ1-5)
CASSPQGQPQHF

SEQ ID NO: 355289 - protein, 13 aa, Homo sapiens
  CDR3 for alpha chain variable domain of TCR clone 177645 (TRAV3, TRAJ29)
CAVRDWGSTPLVF

SEQ ID NO: 355290 - protein, 15 aa, Homo sapiens
  CDR3 for beta chain variable domain of TCR clone 177645 (TRBV12-4, TRBJ2-5)
CASIGRTGEGETQYF

SEQ ID NO: 355291 - protein, 19 aa, Homo sapiens
  CDR3 for alpha chain variable domain of TCR clone 177646 (TRAV16, )
CALSGDIQNPDPAVYQLTD

SEQ ID NO: 355292 - protein, 16 aa, Homo sapiens
  CDR3 for beta chain variable domain of TCR clone 177646 (TRBV12-5, TRBJ2-5)
CASGPRTSGNQETQYF

SEQ ID NO: 355293 - protein, 13 aa, Homo sapiens
  CDR3 for alpha chain variable domain of TCR clone 177647 (TRAV36/DV7, TRAJ37)
CAVFSSNTGKLIF

SEQ ID NO: 355294 - protein, 15 aa, Homo sapiens
  CDR3 for beta chain variable domain of TCR clone 177647 (TRBV6-5, TRBJ2-1)
CASSYDAGAGNEQFF

SEQ ID NO: 355295 - protein, 13 aa, Homo sapiens
  CDR3 for alpha chain variable domain of TCR clone 177648 (TRAV12-3, TRAJ6)
CANPSGGSYIPTY

SEQ ID NO: 355296 - protein, 14 aa, Homo sapiens
  CDR3 for beta chain variable domain of TCR clone 177648 (TRBV19, TRBJ1-1)
CASSRDRDATEAFF

SEQ ID NO: 355297 - protein, 11 aa, Homo sapiens
  CDR3 for alpha chain variable domain of TCR clone 177649 (TRAV27, TRAJ47)
CRRNQGNKLVF

SEQ ID NO: 355298 - protein, 16 aa, Homo sapiens
  CDR3 for beta chain variable domain of TCR clone 177649 (TRBV7-9, TRBJ2-1)
CASSDVAGGSYNEQFF

SEQ ID NO: 355299 - protein, 17 aa, Homo sapiens
  CDR3 for alpha chain variable domain of TCR clone 177650 (TRAV3, TRAJ42)
CAVRDRDYGGSKGNLIF

SEQ ID NO: 355300 - protein, 15 aa, Homo sapiens
  CDR3 for beta chain variable domain of TCR clone 177650 (TRBV3-1, TRBJ2-1)
CASSQVVDDGEEQFF

SEQ ID NO: 355301 - protein, 11 aa, Homo sapiens
  CDR3 for alpha chain variable domain of TCR clone 177651 (TRAV16, TRAJ49)
CSLNTGNQVYF

SEQ ID NO: 355302 - protein, 12 aa, Homo sapiens
  CDR3 for beta chain variable domain of TCR clone 177651 (TRBV7-9, TRBJ1-4)
CASSTDREKLFF

SEQ ID NO: 355303 - protein, 14 aa, Homo sapiens
  CDR3 for alpha chain variable domain of TCR clone 177652 (TRAV12-3, TRAJ58)
CAMSTETSGSRLTF

SEQ ID NO: 355304 - protein, 15 aa, Homo sapiens
  CDR3 for beta chain variable domain of TCR clone 177652 (TRBV4-1, TRBJ1-4)
CASSDTGGTNDKLFF

SEQ ID NO: 355305 - protein, 14 aa, Homo sapiens
  CDR3 for alpha chain variable domain of TCR clone 177653 (TRAV12-3, TRAJ54)
CAMRGIQGAQKLVF

SEQ ID NO: 355306 - protein, 17 aa, Homo sapiens
  CDR3 for beta chain variable domain of TCR clone 177653 (TRBV20-1, TRBJ2-1)
CSARDPLAGVWDNEQFF

SEQ ID NO: 355307 - protein, 14 aa, Homo sapiens
  CDR3 for alpha chain variable domain of TCR clone 177654 (TRAV13-1, TRAJ40)
CAASMTSGTHKYIF

SEQ ID NO: 355308 - protein, 13 aa, Homo sapiens
  CDR3 for beta chain variable domain of TCR clone 177654 (TRBV18, TRBJ2-3)
CASSTGRTDTQYF

SEQ ID NO: 355309 - protein, 10 aa, Homo sapiens
  CDR3 for alpha chain variable domain of TCR clone 177655 (TRAV36/DV7, TRAJ48)
CAVGNEKLTF

SEQ ID NO: 355310 - protein, 16 aa, Homo sapiens
  CDR3 for beta chain variable domain of TCR clone 177655 (TRBV12-5, TRBJ2-5)
CASGPRTSGNQETQYF

SEQ ID NO: 355311 - protein, 16 aa, Homo sapiens
  CDR3 for alpha chain variable domain of TCR clone 177656 (TRAV12-3, TRAJ53)
CAMSPGSGGSNYQLTF

SEQ ID NO: 355312 - protein, 16 aa, Homo sapiens
  CDR3 for beta chain variable domain of TCR clone 177656 (TRBV4-2, TRBJ1-1)
CASSQAGFGMNTEAFF

SEQ ID NO: 355313 - protein, 15 aa, Homo sapiens
  CDR3 for alpha chain variable domain of TCR clone 177657 (TRAV27, TRAJ38)
CAARRNAGNNRKLIW

SEQ ID NO: 355314 - protein, 13 aa, Homo sapiens
  CDR3 for beta chain variable domain of TCR clone 177657 (TRBV12-5, TRBJ2-3)
CASGDRQSDRQYF

SEQ ID NO: 355315 - protein, 14 aa, Homo sapiens
  CDR3 for alpha chain variable domain of TCR clone 177658 (TRAV13-1, TRAJ23)
CAASRLGRGGKLIF

SEQ ID NO: 355316 - protein, 15 aa, Homo sapiens
  CDR3 for beta chain variable domain of TCR clone 177658 (TRBV7-2, TRBJ2-1)
CASSLVAGRYNEQCF

SEQ ID NO: 355317 - protein, 12 aa, Homo sapiens
  CDR3 for alpha chain variable domain of TCR clone 177659 (TRAV12-3, TRAJ17)
CAMTLTGNKLTF

SEQ ID NO: 355318 - protein, 15 aa, Homo sapiens
  CDR3 for beta chain variable domain of TCR clone 177659 (TRBV28, TRBJ2-7)
CASRPWDRFSYEQYF

SEQ ID NO: 355319 - protein, 12 aa, Homo sapiens
  CDR3 for alpha chain variable domain of TCR clone 177660 (TRAV8-3, TRAJ41)
CAVALSGHALNF

SEQ ID NO: 355320 - protein, 16 aa, Homo sapiens
  CDR3 for beta chain variable domain of TCR clone 177660 (TRBV27, TRBJ2-7)
CAGSSERRDSAYEQYF

SEQ ID NO: 355321 - protein, 14 aa, Homo sapiens
  CDR3 for alpha chain variable domain of TCR clone 177661 (TRAV4, TRAJ43)
CLVGPMYNNNDIRF

SEQ ID NO: 355322 - protein, 21 aa, Homo sapiens
  CDR3 for beta chain variable domain of TCR clone 177661 (TRBV11-1, TRBJ2-1)
GASSARERLRPEGPSYNEQFF

SEQ ID NO: 355323 - protein, 13 aa, Homo sapiens
  CDR3 for alpha chain variable domain of TCR clone 177662 (TRAV12-3, TRAJ13)
CAMSSGGYQKVTF

SEQ ID NO: 355324 - protein, 15 aa, Homo sapiens
  CDR3 for beta chain variable domain of TCR clone 177662 (TRBV13, TRBJ1-2)
CASSLGRQPGYGYTF

SEQ ID NO: 355325 - protein, 17 aa, Homo sapiens
  CDR3 for alpha chain variable domain of TCR clone 177663 (TRAV26-1, TRAJ53)
CIVRVDDSGGSNYKLTF

SEQ ID NO: 355326 - protein, 14 aa, Homo sapiens
  CDR3 for beta chain variable domain of TCR clone 177663 (TRBV6-1, TRBJ1-3)
CASVQGGGGNTIYF

SEQ ID NO: 355327 - protein, 11 aa, Homo sapiens
  CDR3 for alpha chain variable domain of TCR clone 177664 (TRAV13-1, TRAJ15)
CAATPGTALIF

SEQ ID NO: 355328 - protein, 16 aa, Homo sapiens
  CDR3 for beta chain variable domain of TCR clone 177664 (TRBV6-6, TRBJ1-5)
CASSYSTLVGNQPQHF

SEQ ID NO: 355329 - protein, 14 aa, Homo sapiens
  CDR3 for alpha chain variable domain of TCR clone 177665 (TRAV8-3, TRAJ13)
CSVGAQEGYQKVTF

SEQ ID NO: 355330 - protein, 13 aa, Homo sapiens
  CDR3 for beta chain variable domain of TCR clone 177665 (TRBV11-2, TRBJ2-5)
CASSSTGEETQYF

SEQ ID NO: 355331 - protein, 12 aa, Homo sapiens
  CDR3 for alpha chain variable domain of TCR clone 177666 (TRAV17, TRAJ12)
CATLRSSYKLLF

SEQ ID NO: 355332 - protein, 14 aa, Homo sapiens
  CDR3 for beta chain variable domain of TCR clone 177666 (TRBV19, TRBJ2-1)
CARGARSFQWEQFF

SEQ ID NO: 355333 - protein, 15 aa, Homo sapiens
  CDR3 for alpha chain variable domain of TCR clone 177667 (TRAV8-3, TRAJ27)
CAVGPSKTNAGKSTF

SEQ ID NO: 355334 - protein, 14 aa, Homo sapiens
  CDR3 for beta chain variable domain of TCR clone 177667 (TRBV7-8, TRBJ2-3)
CASSLDRGTDTQYF

SEQ ID NO: 355335 - protein, 19 aa, Homo sapiens
  CDR3 for alpha chain variable domain of TCR clone 177668 (TRAV26-1, TRAJ52)
CIVRAHRNAGGTSYGKLTF

SEQ ID NO: 355336 - protein, 15 aa, Homo sapiens
  CDR3 for beta chain variable domain of TCR clone 177668 (TRBV29-1, TRBJ2-1)
CSGRDRKSSYNEQCF

SEQ ID NO: 355337 - protein, 15 aa, Homo sapiens
  CDR3 for alpha chain variable domain of TCR clone 177669 (TRAV1-1, TRAJ24)
CALSGGTDSLGKFQF

SEQ ID NO: 355338 - protein, 16 aa, Homo sapiens
  CDR3 for beta chain variable domain of TCR clone 177669 (TRBV2, TRBJ2-7)
CASSEPWTGPSYEQYF

SEQ ID NO: 355339 - protein, 14 aa, Homo sapiens
  CDR3 for alpha chain variable domain of TCR clone 177670 (TRAV20, TRAJ56)
CAVQFGGANSKLTF

SEQ ID NO: 355340 - protein, 15 aa, Homo sapiens
  CDR3 for beta chain variable domain of TCR clone 177670 (TRBV11-3, TRBJ2-1)
CASSLGDSSHNEQFF

SEQ ID NO: 355341 - protein, 13 aa, Homo sapiens
  CDR3 for alpha chain variable domain of TCR clone 177671 (TRAV36/DV7, TRAJ29)
CAVEPSGNKPLVF

SEQ ID NO: 355342 - protein, 11 aa, Homo sapiens
  CDR3 for beta chain variable domain of TCR clone 177671 (TRBV19, TRBJ2-7)
CASGNSYEQYF

SEQ ID NO: 355343 - protein, 14 aa, Homo sapiens
  CDR3 for alpha chain variable domain of TCR clone 177672 (TRAV12-3, TRAJ9)
CAMSVETGGFTTIF

SEQ ID NO: 355344 - protein, 14 aa, Homo sapiens
  CDR3 for beta chain variable domain of TCR clone 177672 (TRBV7-2, TRBJ2-7)
CASRSQGAAYEQYF

SEQ ID NO: 355345 - protein, 16 aa, Homo sapiens
  CDR3 for alpha chain variable domain of TCR clone 177673 (TRAV3, TRAJ21)
CAVRDIERGNFNKFYF

SEQ ID NO: 355346 - protein, 14 aa, Homo sapiens
  CDR3 for beta chain variable domain of TCR clone 177673 (TRBV6-1, TRBJ1-3)
CASVQGGGGNTIYF

SEQ ID NO: 355347 - protein, 10 aa, Homo sapiens
  CDR3 for alpha chain variable domain of TCR clone 177674 (TRAV17, TRAJ52)
SATSYGKLTF

SEQ ID NO: 355348 - protein, 16 aa, Homo sapiens
  CDR3 for beta chain variable domain of TCR clone 177674 (TRBV13, TRBJ2-2)
CASSPRTGEHTGELFF

SEQ ID NO: 355349 - protein, 12 aa, Homo sapiens
  CDR3 for alpha chain variable domain of TCR clone 177675 (TRAV27, TRAJ21)
CAGVRQLQQILL

SEQ ID NO: 355350 - protein, 14 aa, Homo sapiens
  CDR3 for beta chain variable domain of TCR clone 177675 (TRBV7-9, TRBJ1-4)
CASSLEGKSEKLFF

SEQ ID NO: 355351 - protein, 11 aa, Homo sapiens
  CDR3 for alpha chain variable domain of TCR clone 177676 (TRAV12-2, TRAJ49)
CTVNTGNQFYF

SEQ ID NO: 355352 - protein, 13 aa, Homo sapiens
  CDR3 for beta chain variable domain of TCR clone 177676 (TRBV24-1, TRBJ2-2)
CATSDWSTGELFF

SEQ ID NO: 355353 - protein, 12 aa, Homo sapiens
  CDR3 for alpha chain variable domain of TCR clone 177677 (TRAV12-3, TRAJ3)
CAIDSSASKIIF

SEQ ID NO: 355354 - protein, 16 aa, Homo sapiens
  CDR3 for beta chain variable domain of TCR clone 177677 (TRBV7-9, TRBJ2-3)
CASSQSTSGAEDTQYF

SEQ ID NO: 355355 - protein, 14 aa, Homo sapiens
  CDR3 for alpha chain variable domain of TCR clone 177678 (TRAV1-2, TRAJ8)
CAVREDPGFQKLVF

SEQ ID NO: 355356 - protein, 14 aa, Homo sapiens
  CDR3 for beta chain variable domain of TCR clone 177678 (TRBV29-1, TRBJ2-3)
CSAGAGVGADTQYF

SEQ ID NO: 355357 - protein, 14 aa, Homo sapiens
  CDR3 for alpha chain variable domain of TCR clone 177679 (TRAV12-1, TRAJ17)
CVVNYKAAGNKLTF

SEQ ID NO: 355358 - protein, 17 aa, Homo sapiens
  CDR3 for beta chain variable domain of TCR clone 177679 (TRBV18, TRBJ2-1)
CASSRGLSGGADNEQFF

SEQ ID NO: 355359 - protein, 13 aa, Homo sapiens
  CDR3 for alpha chain variable domain of TCR clone 177680 (TRAV39, TRAJ58)
CAGEETGGPRLTF

SEQ ID NO: 355360 - protein, 13 aa, Homo sapiens
  CDR3 for beta chain variable domain of TCR clone 177680 (TRBV15, TRBJ2-7)
CATSTTGHYEQYF

SEQ ID NO: 355361 - protein, 12 aa, Homo sapiens
  CDR3 for alpha chain variable domain of TCR clone 177681 (TRAV8-6, TRAJ20)
CAVSSNDYKLSF

SEQ ID NO: 355362 - protein, 15 aa, Homo sapiens
  CDR3 for beta chain variable domain of TCR clone 177681 (TRBV19, TRBJ2-1)
CASSIQATSYNEQFF

SEQ ID NO: 355363 - protein, 11 aa, Homo sapiens
  CDR3 for alpha chain variable domain of TCR clone 177682 (TRAV1-1, TRAJ16)
CAAGDGQKLLF

SEQ ID NO: 355364 - protein, 15 aa, Homo sapiens
  CDR3 for beta chain variable domain of TCR clone 177682 (TRBV28, TRBJ1-2)
CASIPQGSDDYGYPF

SEQ ID NO: 355365 - protein, 15 aa, Homo sapiens
  CDR3 for alpha chain variable domain of TCR clone 177683 (TRAV3, TRAJ5)
CAVRDLDTCRRSLTF

SEQ ID NO: 355366 - protein, 13 aa, Homo sapiens
  CDR3 for beta chain variable domain of TCR clone 177683 (TRBV12-4, TRBJ2-7)
CASSPTETYEQYF

SEQ ID NO: 355367 - protein, 11 aa, Homo sapiens
  CDR3 for alpha chain variable domain of TCR clone 177684 (TRAV1-2, TRAJ20)
CAVANDYKLSF

SEQ ID NO: 355368 - protein, 18 aa, Homo sapiens
  CDR3 for beta chain variable domain of TCR clone 177684 (TRBV20-1, TRBJ2-6)
CSAETTPTHGSGDNDLTF

SEQ ID NO: 355369 - protein, 15 aa, Homo sapiens
  CDR3 for alpha chain variable domain of TCR clone 177685 (TRAV12-1, TRAJ10)
CVVNKLTGGGNKLPF

SEQ ID NO: 355370 - protein, 17 aa, Homo sapiens
  CDR3 for beta chain variable domain of TCR clone 177685 (TRBV5-1, TRBJ1-6)
CASSPSLQGSDNSPLHF

SEQ ID NO: 355371 - protein, 23 aa, Homo sapiens
  CDR3 for alpha chain variable domain of TCR clone 177686 (TRAV30, TRAJ43)
CTLRPPSSVTQAPTSAALSDMRF

SEQ ID NO: 355372 - protein, 13 aa, Homo sapiens
  CDR3 for beta chain variable domain of TCR clone 177686 (TRBV12-4, TRBJ2-2)
CASSITGSGELFF

SEQ ID NO: 355373 - protein, 10 aa, Homo sapiens
  CDR3 for alpha chain variable domain of TCR clone 177687 (TRAV23/DV6, TRAJ57)
CAASSTLSQG

SEQ ID NO: 355374 - protein, 14 aa, Homo sapiens
  CDR3 for beta chain variable domain of TCR clone 177687 (TRBV25-1, TRBJ1-1)
CTSTHLGGNTEAFC

SEQ ID NO: 355375 - protein, 18 aa, Homo sapiens
  CDR3 for alpha chain variable domain of TCR clone 177688 (TRAV13-1, TRAJ52)
CAAKNPNAGGTSYGKLTF

SEQ ID NO: 355376 - protein, 14 aa, Homo sapiens
  CDR3 for beta chain variable domain of TCR clone 177688 (TRBV7-9, TRBJ2-2)
CASRFDRGTGELFF

SEQ ID NO: 355377 - protein, 14 aa, Homo sapiens
  CDR3 for alpha chain variable domain of TCR clone 177689 (TRAV12-3, TRAJ10)
SHLPLTGGENKLTF

SEQ ID NO: 355378 - protein, 11 aa, Homo sapiens
  CDR3 for beta chain variable domain of TCR clone 177689 (TRBV19, TRBJ1-1)
CDSSIGSEAFF

SEQ ID NO: 355379 - protein, 15 aa, Homo sapiens
  CDR3 for alpha chain variable domain of TCR clone 177690 (TRAV13-1, TRAJ36)
CAASIRQTGANNLFF

SEQ ID NO: 355380 - protein, 14 aa, Homo sapiens
  CDR3 for beta chain variable domain of TCR clone 177690 (TRBV6-1, TRBJ1-3)
CASVQGGGGNTIYC

SEQ ID NO: 355381 - protein, 14 aa, Homo sapiens
  CDR3 for alpha chain variable domain of TCR clone 177691 (TRAV26-1, TRAJ38)
CIADNAGNNRKLIW

SEQ ID NO: 355382 - protein, 15 aa, Homo sapiens
  CDR3 for beta chain variable domain of TCR clone 177691 (TRBV7-2, TRBJ2-1)
CARSLVAGRYNEQFF

SEQ ID NO: 355383 - protein, 11 aa, Homo sapiens
  CDR3 for alpha chain variable domain of TCR clone 177692 (TRAV12-3, TRAJ43)
CAMSVSNDMRF

SEQ ID NO: 355384 - protein, 14 aa, Homo sapiens
  CDR3 for beta chain variable domain of TCR clone 177692 (TRBV7-8, TRBJ2-3)
CASSLEAVTDTQYF

SEQ ID NO: 355385 - protein, 13 aa, Homo sapiens
  CDR3 for alpha chain variable domain of TCR clone 177693 (TRAV3, TRAJ21)
CAVREPDFNKFYF

SEQ ID NO: 355386 - protein, 13 aa, Homo sapiens
  CDR3 for beta chain variable domain of TCR clone 177693 (TRBV7-9, TRBJ1-2)
CASSLKQSYGYTF

SEQ ID NO: 355387 - protein, 12 aa, Homo sapiens
  CDR3 for alpha chain variable domain of TCR clone 177694 (TRAV23/DV6, TRAJ17)
CAAKAAGNKLTF

SEQ ID NO: 355388 - protein, 13 aa, Homo sapiens
  CDR3 for beta chain variable domain of TCR clone 177694 (TRBV27, TRBJ2-1)
CASRTLGVGEQFF

SEQ ID NO: 355389 - protein, 20 aa, Homo sapiens
  CDR3 for alpha chain variable domain of TCR clone 177695 (TRAV30, TRAJ54)
SAAQSRSETQVVQGAQKLVF

SEQ ID NO: 355390 - protein, 11 aa, Homo sapiens
  CDR3 for beta chain variable domain of TCR clone 177695 (TRBV25-1, TRBJ2-4)
CQSRDQNTQYF

SEQ ID NO: 355391 - protein, 13 aa, Homo sapiens
  CDR3 for alpha chain variable domain of TCR clone 177696 (TRAV27, TRAJ11)
CAGARAGYSTLTF

SEQ ID NO: 355392 - protein, 16 aa, Homo sapiens
  CDR3 for beta chain variable domain of TCR clone 177696 (TRBV10-2, TRBJ2-2)
CASSESRDRGSGELFF

SEQ ID NO: 355393 - protein, 14 aa, Homo sapiens
  CDR3 for alpha chain variable domain of TCR clone 177697 (TRAV12-2, TRAJ40)
CAVKIPSGTYKYIF

SEQ ID NO: 355394 - protein, 15 aa, Homo sapiens
  CDR3 for beta chain variable domain of TCR clone 177697 (TRBV28, TRBJ2-5)
CASSPGQGSIETQYF

SEQ ID NO: 355395 - protein, 14 aa, Homo sapiens
  CDR3 for alpha chain variable domain of TCR clone 177698 (TRAV23/DV6, TRAJ22)
CAASVSGSARQLTF

SEQ ID NO: 355396 - protein, 13 aa, Homo sapiens
  CDR3 for beta chain variable domain of TCR clone 177698 (TRBV28, TRBJ2-2)
CASIRESTGELFF

SEQ ID NO: 355397 - protein, 13 aa, Homo sapiens
  CDR3 for alpha chain variable domain of TCR clone 177699 (TRAV27, TRAJ6)
CAGGTRGSYIPTF

SEQ ID NO: 355398 - protein, 13 aa, Homo sapiens
  CDR3 for beta chain variable domain of TCR clone 177699 (TRBV10-2, TRBJ2-3)
CASSELGDHTQYF

SEQ ID NO: 355399 - protein, 16 aa, Homo sapiens
  CDR3 for alpha chain variable domain of TCR clone 177700 (TRAV3, TRAJ4)
CAVRPSPFGGYNKLIF

SEQ ID NO: 355400 - protein, 12 aa, Homo sapiens
  CDR3 for beta chain variable domain of TCR clone 177700 (TRBV7-9, TRBJ2-7)
CASSQGVYEQYF

SEQ ID NO: 355401 - protein, 14 aa, Homo sapiens
  CDR3 for alpha chain variable domain of TCR clone 177701 (TRAV12-2, TRAJ53)
CAVKGGGSNYKLTF

SEQ ID NO: 355402 - protein, 12 aa, Homo sapiens
  CDR3 for beta chain variable domain of TCR clone 177701 (TRBV7-8, TRBJ2-7)
CASSLGDREQYF

SEQ ID NO: 355403 - protein, 15 aa, Homo sapiens
  CDR3 for alpha chain variable domain of TCR clone 177702 (TRAV8-3, TRAJ15)
CAVGAPNQAGTALIF

SEQ ID NO: 355404 - protein, 12 aa, Homo sapiens
  CDR3 for beta chain variable domain of TCR clone 177702 (TRBV11-2, TRBJ2-1)
CASSPGNNEQFF

SEQ ID NO: 355405 - protein, 13 aa, Homo sapiens
  CDR3 for alpha chain variable domain of TCR clone 177703 (TRAV27, TRAJ27)
CAGKDTNAGKSTF

SEQ ID NO: 355406 - protein, 16 aa, Homo sapiens
  CDR3 for beta chain variable domain of TCR clone 177703 (TRBV5-4, TRBJ2-3)
CASQQPGAGGADTQYF

SEQ ID NO: 355407 - protein, 14 aa, Homo sapiens
  CDR3 for alpha chain variable domain of TCR clone 177704 (TRAV30, TRAJ33)
CGTVAPRSNYQLIW

SEQ ID NO: 355408 - protein, 17 aa, Homo sapiens
  CDR3 for beta chain variable domain of TCR clone 177704 (TRBV4-2, TRBJ2-1)
CASSQVSGLAMNNEQFF

SEQ ID NO: 355409 - protein, 15 aa, Homo sapiens
  CDR3 for alpha chain variable domain of TCR clone 177705 (TRAV3, TRAJ22)
CAVRDRGGSARQMNF

SEQ ID NO: 355410 - protein, 13 aa, Homo sapiens
  CDR3 for beta chain variable domain of TCR clone 177705 (TRBV27, TRBJ2-7)
CASSFSQGYEQYF

SEQ ID NO: 355411 - protein, 16 aa, Homo sapiens
  CDR3 for alpha chain variable domain of TCR clone 177706 (TRAV38-1, TRAJ39)
CAFMKPGQNAGNMLTF

SEQ ID NO: 355412 - protein, 15 aa, Homo sapiens
  CDR3 for beta chain variable domain of TCR clone 177706 (TRBV7-2, TRBJ2-1)
CASSSGLAGGNEQFF

SEQ ID NO: 355413 - protein, 14 aa, Homo sapiens
  CDR3 for alpha chain variable domain of TCR clone 177707 (TRAV35, TRAJ22)
CAGLRPGSARQLTF

SEQ ID NO: 355414 - protein, 15 aa, Homo sapiens
  CDR3 for beta chain variable domain of TCR clone 177707 (TRBV18, TRBJ1-1)
CASSPSSWVNTEAFF

SEQ ID NO: 355415 - protein, 14 aa, Homo sapiens
  CDR3 for alpha chain variable domain of TCR clone 177708 (TRAV12-3, TRAJ9)
CAMSPNTGGFKTIF

SEQ ID NO: 355416 - protein, 15 aa, Homo sapiens
  CDR3 for beta chain variable domain of TCR clone 177708 (TRBV13, TRBJ1-5)
CASSRTGRGHQPQHF

SEQ ID NO: 355417 - protein, 12 aa, Homo sapiens
  CDR3 for alpha chain variable domain of TCR clone 177709 (TRAV27, TRAJ9)
CAGESGGFKTIF

SEQ ID NO: 355418 - protein, 14 aa, Homo sapiens
  CDR3 for beta chain variable domain of TCR clone 177709 (TRBV6-1, TRBJ2-1)
CAAAKDGFYNGQFF

SEQ ID NO: 355419 - protein, 12 aa, Homo sapiens
  CDR3 for alpha chain variable domain of TCR clone 177710 (TRAV13-1, TRAJ48)
CAANFGNEKLTF

SEQ ID NO: 355420 - protein, 12 aa, Homo sapiens
  CDR3 for beta chain variable domain of TCR clone 177710 (TRBV7-8, TRBJ2-7)
CASNLGDREQYF

SEQ ID NO: 355421 - protein, 14 aa, Homo sapiens
  CDR3 for alpha chain variable domain of TCR clone 177711 (TRAV12-3, TRAJ42)
CAVNYGGSQGNLIF

SEQ ID NO: 355422 - protein, 15 aa, Homo sapiens
  CDR3 for beta chain variable domain of TCR clone 177711 (TRBV9, TRBJ1-6)
CASSVAGTGDSPLHF

SEQ ID NO: 355423 - protein, 14 aa, Homo sapiens
  CDR3 for alpha chain variable domain of TCR clone 177712 (TRAV13-1, TRAJ35)
CAASKGGFGNVLHC

SEQ ID NO: 355424 - protein, 16 aa, Homo sapiens
  CDR3 for beta chain variable domain of TCR clone 177712 (TRBV7-9, TRBJ2-1)
CARSDVAGGSYNEQFF

SEQ ID NO: 355425 - protein, 11 aa, Homo sapiens
  CDR3 for alpha chain variable domain of TCR clone 177713 (TRAV2, TRAJ13)
CASGGYQKVTF

SEQ ID NO: 355426 - protein, 14 aa, Homo sapiens
  CDR3 for beta chain variable domain of TCR clone 177713 (TRBV7-9, TRBJ2-7)
CASSPSGGQNEQYF

SEQ ID NO: 355427 - protein, 19 aa, Homo sapiens
  CDR3 for alpha chain variable domain of TCR clone 177714 (TRAV30, TRAJ52)
CGTEANTNAGGTSYGKLTF

SEQ ID NO: 355428 - protein, 17 aa, Homo sapiens
  CDR3 for beta chain variable domain of TCR clone 177714 (TRBV28, TRBJ2-7)
CASGPLRGRRWKGGQYF

SEQ ID NO: 355429 - protein, 14 aa, Homo sapiens
  CDR3 for alpha chain variable domain of TCR clone 177715 (TRAV12-3, TRAJ22)
CAMSLFGSARQLTF

SEQ ID NO: 355430 - protein, 11 aa, Homo sapiens
  CDR3 for beta chain variable domain of TCR clone 177715 (TRBV5-1, TRBJ1-2)
CASSLGGGYTF

SEQ ID NO: 355431 - protein, 13 aa, Homo sapiens
  CDR3 for alpha chain variable domain of TCR clone 177716 (TRAV8-4, TRAJ10)
CAASTGGGNKLTF

SEQ ID NO: 355432 - protein, 11 aa, Homo sapiens
  CDR3 for beta chain variable domain of TCR clone 177716 (TRBV3-1, TRBJ2-1)
CQQPRVQWQFF

SEQ ID NO: 355433 - protein, 13 aa, Homo sapiens
  CDR3 for alpha chain variable domain of TCR clone 177717 (TRAV2, TRAJ40)
CAVVTSGTYKYIF

SEQ ID NO: 355434 - protein, 15 aa, Homo sapiens
  CDR3 for beta chain variable domain of TCR clone 177717 (TRBV18, TRBJ2-1)
CANSPPSASYNEQFF

SEQ ID NO: 355435 - protein, 16 aa, Homo sapiens
  CDR3 for alpha chain variable domain of TCR clone 177718 (TRAV8-2, TRAJ37)
CVVNPPALATQANYSL

SEQ ID NO: 355436 - protein, 13 aa, Homo sapiens
  CDR3 for beta chain variable domain of TCR clone 177718 (TRBV27, TRBJ2-7)
CASSLRHRYEQYF

SEQ ID NO: 355437 - protein, 13 aa, Homo sapiens
  CDR3 for alpha chain variable domain of TCR clone 177719 (TRAV21, TRAJ27)
CAARPGNAGKSTF

SEQ ID NO: 355438 - protein, 14 aa, Homo sapiens
  CDR3 for beta chain variable domain of TCR clone 177719 (TRBV5-7, TRBJ2-7)
CASSFKGATGEQYF

SEQ ID NO: 355439 - protein, 16 aa, Homo sapiens
  CDR3 for alpha chain variable domain of TCR clone 177720 (TRAV12-3, TRAJ3)
CASRGPLYSSASKIIF

SEQ ID NO: 355440 - protein, 14 aa, Homo sapiens
  CDR3 for beta chain variable domain of TCR clone 177720 (TRBV18, TRBJ1-5)
CASSPGNSNQPQHF

SEQ ID NO: 355441 - protein, 15 aa, Homo sapiens
  CDR3 for alpha chain variable domain of TCR clone 177721 (TRAV3, TRAJ22)
CAVRDRGGSARQLTF

SEQ ID NO: 355442 - protein, 12 aa, Homo sapiens
  CDR3 for beta chain variable domain of TCR clone 177721 (TRBV11-2, TRBJ2-5)
CASSLGQETQYF

SEQ ID NO: 355443 - protein, 15 aa, Homo sapiens
  CDR3 for alpha chain variable domain of TCR clone 177722 (TRAV2, TRAJ9)
CAVAAFNTGGFKTIF

SEQ ID NO: 355444 - protein, 15 aa, Homo sapiens
  CDR3 for beta chain variable domain of TCR clone 177722 (TRBV7-9, TRBJ1-6)
CASSSPGRGNSPLHF

SEQ ID NO: 355445 - protein, 15 aa, Homo sapiens
  CDR3 for alpha chain variable domain of TCR clone 177723 (TRAV26-1, TRAJ29)
CIVRVEGSGNMPLVF

SEQ ID NO: 355446 - protein, 14 aa, Homo sapiens
  CDR3 for beta chain variable domain of TCR clone 177723 (TRBV18, TRBJ2-5)
CASSPGVSQETQYF

SEQ ID NO: 355447 - protein, 16 aa, Homo sapiens
  CDR3 for alpha chain variable domain of TCR clone 177724 (TRAV26-2, TRAJ57)
CILRDVGSGGSEKLVF

SEQ ID NO: 355448 - protein, 13 aa, Homo sapiens
  CDR3 for beta chain variable domain of TCR clone 177724 (TRBV18, TRBJ2-3)
YASSPGVTDTQYF

SEQ ID NO: 355449 - protein, 11 aa, Homo sapiens
  CDR3 for alpha chain variable domain of TCR clone 177725 (TRAV13-1, TRAJ40)
CAVSGTYKYIF

SEQ ID NO: 355450 - protein, 13 aa, Homo sapiens
  CDR3 for beta chain variable domain of TCR clone 177725 (TRBV19, TRBJ1-5)
CASSIGGNQPQHL

SEQ ID NO: 355451 - protein, 14 aa, Homo sapiens
  CDR3 for alpha chain variable domain of TCR clone 177726 (TRAV8-4, TRAJ17)
CAVSSPAAGNKRTF

SEQ ID NO: 355452 - protein, 14 aa, Homo sapiens
  CDR3 for beta chain variable domain of TCR clone 177726 (TRBV10-3, TRBJ2-5)
CAISVGGVYETQYF

SEQ ID NO: 355453 - protein, 15 aa, Homo sapiens
  CDR3 for alpha chain variable domain of TCR clone 177727 (TRAV3, TRAJ22)
CAVRDRGGSAKQQTF

SEQ ID NO: 355454 - protein, 14 aa, Homo sapiens
  CDR3 for beta chain variable domain of TCR clone 177727 (TRBV25-1, TRBJ1-1)
CASTHLGGNTEAFF

SEQ ID NO: 355455 - protein, 10 aa, Homo sapiens
  CDR3 for alpha chain variable domain of TCR clone 177728 (TRAV26-1, TRAJ22)
RSGSARQLTF

SEQ ID NO: 355456 - protein, 13 aa, Homo sapiens
  CDR3 for beta chain variable domain of TCR clone 177728 (TRBV7-9, TRBJ1-2)
CASSVKQNYGYTF

SEQ ID NO: 355457 - protein, 16 aa, Homo sapiens
  CDR3 for alpha chain variable domain of TCR clone 177729 (TRAV8-3, TRAJ13)
CAVGAYPSGGYQKVTF

SEQ ID NO: 355458 - protein, 15 aa, Homo sapiens
  CDR3 for beta chain variable domain of TCR clone 177729 (TRBV19, TRBJ1-5)
CASSIVGADNQPQHF

SEQ ID NO: 355459 - protein, 14 aa, Homo sapiens
  CDR3 for alpha chain variable domain of TCR clone 177730 (TRAV8-2, TRAJ45)
CVVSAGGGADGLTV

SEQ ID NO: 355460 - protein, 12 aa, Homo sapiens
  CDR3 for beta chain variable domain of TCR clone 177730 (TRBV12-4, TRBJ2-1)
CASSLVRVEQFF

SEQ ID NO: 355461 - protein, 15 aa, Homo sapiens
  CDR3 for alpha chain variable domain of TCR clone 177731 (TRAV26-1, TRAJ40)
CIVRVTTSGTYKYIF

SEQ ID NO: 355462 - protein, 15 aa, Homo sapiens
  CDR3 for beta chain variable domain of TCR clone 177731 (TRBV27, TRBJ2-7)
CASSLSVQGGYEQYF

SEQ ID NO: 355463 - protein, 15 aa, Homo sapiens
  CDR3 for alpha chain variable domain of TCR clone 177732 (TRAV29/DV5, TRAJ36)
CAARRKTGKQPLLWD

SEQ ID NO: 355464 - protein, 13 aa, Homo sapiens
  CDR3 for beta chain variable domain of TCR clone 177732 (TRBV15, TRBJ1-2)
CATSMTANYGYTF

SEQ ID NO: 355465 - protein, 13 aa, Homo sapiens
  CDR3 for alpha chain variable domain of TCR clone 177733 (TRAV8-3, TRAJ36)
CAVGATRANNLFF

SEQ ID NO: 355466 - protein, 15 aa, Homo sapiens
  CDR3 for beta chain variable domain of TCR clone 177733 (TRBV7-2, TRBJ1-2)
CASSPRAGWNYGYSF

SEQ ID NO: 355467 - protein, 16 aa, Homo sapiens
  CDR3 for alpha chain variable domain of TCR clone 177734 (TRAV8-3, TRAJ42)
CAVGGWGGGSQGNRIF

SEQ ID NO: 355468 - protein, 15 aa, Homo sapiens
  CDR3 for beta chain variable domain of TCR clone 177734 (TRBV7-2, TRBJ2-7)
CASSLGGAKSGEQYF

SEQ ID NO: 355469 - protein, 14 aa, Homo sapiens
  CDR3 for alpha chain variable domain of TCR clone 177735 (TRAV2, TRAJ29)
CAGPFHYGNTPLVF

SEQ ID NO: 355470 - protein, 18 aa, Homo sapiens
  CDR3 for beta chain variable domain of TCR clone 177735 (TRBV6-1, TRBJ1-6)
CASSGSDGRRINNSPLHF

SEQ ID NO: 355471 - protein, 11 aa, Homo sapiens
  CDR3 for alpha chain variable domain of TCR clone 177736 (TRAV21, TRAJ34)
CAHYNTDKLIF

SEQ ID NO: 355472 - protein, 16 aa, Homo sapiens
  CDR3 for beta chain variable domain of TCR clone 177736 (TRBV7-2, TRBJ2-7)
CASSQDGGSLRGEQYF

SEQ ID NO: 355473 - protein, 11 aa, Homo sapiens
  CDR3 for alpha chain variable domain of TCR clone 177737 (TRAV17, TRAJ9)
CATTGGFKTLF

SEQ ID NO: 355474 - protein, 13 aa, Homo sapiens
  CDR3 for beta chain variable domain of TCR clone 177737 (TRBV20-1, TRBJ1-1)
CSAPLGGGTEAFF

SEQ ID NO: 355475 - protein, 15 aa, Homo sapiens
  CDR3 for alpha chain variable domain of TCR clone 177738 (TRAV25, TRAJ52)
CAGTSGGTSYGKLTF

SEQ ID NO: 355476 - protein, 13 aa, Homo sapiens
  CDR3 for beta chain variable domain of TCR clone 177738 (TRBV6-5, TRBJ2-5)
CASSPPGGETQYF

SEQ ID NO: 355477 - protein, 11 aa, Homo sapiens
  CDR3 for alpha chain variable domain of TCR clone 177739 (TRAV2, TRAJ13)
CASGGYQKVTF

SEQ ID NO: 355478 - protein, 16 aa, Homo sapiens
  CDR3 for beta chain variable domain of TCR clone 177739 (TRBV2, TRBJ2-1)
CARRKTSGGSYNEQFF

SEQ ID NO: 355479 - protein, 13 aa, Homo sapiens
  CDR3 for alpha chain variable domain of TCR clone 177740 (TRAV12-1, TRAJ33)
CGDAPDSNYQLIW

SEQ ID NO: 355480 - protein, 14 aa, Homo sapiens
  CDR3 for beta chain variable domain of TCR clone 177740 (TRBV11-2, TRBJ1-2)
CASSLGTANYGYTF

SEQ ID NO: 355481 - protein, 16 aa, Homo sapiens
  CDR3 for alpha chain variable domain of TCR clone 177741 (TRAV4, TRAJ22)
CLVGDLYSGSARQLTF

SEQ ID NO: 355482 - protein, 12 aa, Homo sapiens
  CDR3 for beta chain variable domain of TCR clone 177741 (TRBV14, TRBJ1-1)
CASSQLKGLAFF

SEQ ID NO: 355483 - protein, 17 aa, Homo sapiens
  CDR3 for alpha chain variable domain of TCR clone 177742 (TRAV36/DV7, TRAJ52)
CAVAQRAGGTSYGKPTF

SEQ ID NO: 355484 - protein, 15 aa, Homo sapiens
  CDR3 for beta chain variable domain of TCR clone 177742 (TRBV25-1, TRBJ1-4)
CASSPGDSTNEKLFF

SEQ ID NO: 355485 - protein, 16 aa, Homo sapiens
  CDR3 for alpha chain variable domain of TCR clone 177743 (TRAV12-3, TRAJ58)
CAMTDTEETSGSRLTF

SEQ ID NO: 355486 - protein, 15 aa, Homo sapiens
  CDR3 for beta chain variable domain of TCR clone 177743 (TRBV4-2, TRBJ1-6)
CASSYHRDSDSTLHF

SEQ ID NO: 355487 - protein, 14 aa, Homo sapiens
  CDR3 for alpha chain variable domain of TCR clone 177744 (TRAV1-2, TRAJ8)
CAVREDTGFQKLVF

SEQ ID NO: 355488 - protein, 16 aa, Homo sapiens
  CDR3 for beta chain variable domain of TCR clone 177744 (TRBV7-3, TRBJ2-2)
CASSLKRGTLSRELFF

SEQ ID NO: 355489 - protein, 13 aa, Homo sapiens
  CDR3 for alpha chain variable domain of TCR clone 177745 (TRAV12-1, TRAJ7)
CVVNMRGNNRLAF

SEQ ID NO: 355490 - protein, 15 aa, Homo sapiens
  CDR3 for beta chain variable domain of TCR clone 177745 (TRBV27, TRBJ2-3)
CASSLGLAATDTQYF

SEQ ID NO: 355491 - protein, 14 aa, Homo sapiens
  CDR3 for alpha chain variable domain of TCR clone 177746 (TRAV26-1, TRAJ45)
CIEVTGGGADGLTF

SEQ ID NO: 355492 - protein, 16 aa, Homo sapiens
  CDR3 for beta chain variable domain of TCR clone 177746 (TRBV7-8, TRBJ2-4)
CASSAERTLAKNIQYF

SEQ ID NO: 355493 - protein, 12 aa, Homo sapiens
  CDR3 for alpha chain variable domain of TCR clone 177747 (TRAV12-3, TRAJ17)
CAMTLTGNKLTF

SEQ ID NO: 355494 - protein, 16 aa, Homo sapiens
  CDR3 for beta chain variable domain of TCR clone 177747 (TRBV12-4, TRBJ2-5)
CASSFFVRGRQESQYF

SEQ ID NO: 355495 - protein, 14 aa, Homo sapiens
  CDR3 for alpha chain variable domain of TCR clone 177748 (TRAV8-3, TRAJ39)
CAVGANNAGKMLTF

SEQ ID NO: 355496 - protein, 13 aa, Homo sapiens
  CDR3 for beta chain variable domain of TCR clone 177748 (TRBV4-2, TRBJ1-1)
CASSQAGNTEAFF

SEQ ID NO: 355497 - protein, 12 aa, Homo sapiens
  CDR3 for alpha chain variable domain of TCR clone 177749 (TRAV12-2, TRAJ10)
WGVTGGGNKLTF

SEQ ID NO: 355498 - protein, 12 aa, Homo sapiens
  CDR3 for beta chain variable domain of TCR clone 177749 (TRBV18, TRBJ2-1)
CASSPGTSEGFF

SEQ ID NO: 355499 - protein, 13 aa, Homo sapiens
  CDR3 for alpha chain variable domain of TCR clone 177750 (TRAV8-3, TRAJ40)
CAVGAQYLRNLQI

SEQ ID NO: 355500 - protein, 15 aa, Homo sapiens
  CDR3 for beta chain variable domain of TCR clone 177750 (TRBV7-9, TRBJ1-5)
CASSQGHQPNQPQHF

SEQ ID NO: 355501 - protein, 17 aa, Homo sapiens
  CDR3 for alpha chain variable domain of TCR clone 177751 (TRAV3, TRAJ6)
CAVRDGPRAGGSYIPTF

SEQ ID NO: 355502 - protein, 13 aa, Homo sapiens
  CDR3 for beta chain variable domain of TCR clone 177751 (TRBV13, TRBJ1-1)
CASSPRMNTEAFF

SEQ ID NO: 355503 - protein, 13 aa, Homo sapiens
  CDR3 for alpha chain variable domain of TCR clone 177752 (TRAV21, TRAJ20)
CAVGLRVDSKLSF

SEQ ID NO: 355504 - protein, 13 aa, Homo sapiens
  CDR3 for beta chain variable domain of TCR clone 177752 (TRBV6-1, TRBJ1-1)
CASSRQGNTGAFF

SEQ ID NO: 355505 - protein, 14 aa, Homo sapiens
  CDR3 for alpha chain variable domain of TCR clone 177753 (TRAV23/DV6, TRAJ4)
CAANLSGGYTKLLF

SEQ ID NO: 355506 - protein, 11 aa, Homo sapiens
  CDR3 for beta chain variable domain of TCR clone 177753 (TRBV7-9, TRBJ2-3)
CASSPTDTQYF

SEQ ID NO: 355507 - protein, 12 aa, Homo sapiens
  CDR3 for alpha chain variable domain of TCR clone 177754 (TRAV12-3, TRAJ5)
CAMDTGRRALTF

SEQ ID NO: 355508 - protein, 15 aa, Homo sapiens
  CDR3 for beta chain variable domain of TCR clone 177754 (TRBV5-1, TRBJ2-7)
CASSLNGGPAREQYF

SEQ ID NO: 355509 - protein, 13 aa, Homo sapiens
  CDR3 for alpha chain variable domain of TCR clone 177755 (TRAV21, TRAJ49)
CAVGQSTGNQFYF

SEQ ID NO: 355510 - protein, 13 aa, Homo sapiens
  CDR3 for beta chain variable domain of TCR clone 177755 (TRBV6-6, TRBJ1-5)
CASRAYQDQPQHF

SEQ ID NO: 355511 - protein, 10 aa, Homo sapiens
  CDR3 for alpha chain variable domain of TCR clone 177756 (TRAV26-1, TRAJ40)
CIAGTYKYIF

SEQ ID NO: 355512 - protein, 15 aa, Homo sapiens
  CDR3 for beta chain variable domain of TCR clone 177756 (TRBV19, TRBJ2-1)
CASSSPGVPLAEQFF

SEQ ID NO: 355513 - protein, 14 aa, Homo sapiens
  CDR3 for alpha chain variable domain of TCR clone 177757 (TRAV17, TRAJ16)
FATADFSDGQKLLF

SEQ ID NO: 355514 - protein, 15 aa, Homo sapiens
  CDR3 for beta chain variable domain of TCR clone 177757 (TRBV18, TRBJ2-1)
CASSPPSASYNEQFF

SEQ ID NO: 355515 - protein, 14 aa, Homo sapiens
  CDR3 for alpha chain variable domain of TCR clone 177758 (TRAV20, TRAJ56)
CAVQFGGANSKLTF

SEQ ID NO: 355516 - protein, 14 aa, Homo sapiens
  CDR3 for beta chain variable domain of TCR clone 177758 (TRBV19, TRBJ2-1)
CARGARSFQWEQCF

SEQ ID NO: 355517 - protein, 14 aa, Homo sapiens
  CDR3 for alpha chain variable domain of TCR clone 177759 (TRAV3, TRAJ21)
CAVRDAYNFNKFYF

SEQ ID NO: 355518 - protein, 15 aa, Homo sapiens
  CDR3 for beta chain variable domain of TCR clone 177759 (TRBV7-2, TRBJ1-5)
CASSLDRGQDQPQHF

SEQ ID NO: 355519 - protein, 14 aa, Homo sapiens
  CDR3 for alpha chain variable domain of TCR clone 177760 (TRAV8-2, TRAJ37)
CVVSISGNTGKLIF

SEQ ID NO: 355520 - protein, 15 aa, Homo sapiens
  CDR3 for beta chain variable domain of TCR clone 177760 (TRBV28, TRBJ2-1)
CASSIIAGGRSEQFF

SEQ ID NO: 355521 - protein, 10 aa, Homo sapiens
  CDR3 for alpha chain variable domain of TCR clone 177761 (TRAV23/DV6, TRAJ21)
CAASSGGGTT

SEQ ID NO: 355522 - protein, 11 aa, Homo sapiens
  CDR3 for beta chain variable domain of TCR clone 177761 (TRBV7-8, TRBJ2-7)
CASSLSLEQYF

SEQ ID NO: 355523 - protein, 11 aa, Homo sapiens
  CDR3 for alpha chain variable domain of TCR clone 177762 (TRAV13-1, TRAJ40)
CAVSGTYKYIF

SEQ ID NO: 355524 - protein, 18 aa, Homo sapiens
  CDR3 for beta chain variable domain of TCR clone 177762 (TRBV20-1, TRBJ2-3)
CSSSGLAGGPGTTDTQYF

SEQ ID NO: 355525 - protein, 14 aa, Homo sapiens
  CDR3 for alpha chain variable domain of TCR clone 177763 (TRAV13-2, TRAJ11)
CAETGNSGYSHLTF

SEQ ID NO: 355526 - protein, 16 aa, Homo sapiens
  CDR3 for beta chain variable domain of TCR clone 177763 (TRBV10-3, TRBJ2-1)
CAISGVGDGGGGEQFF

SEQ ID NO: 355527 - protein, 13 aa, Homo sapiens
  CDR3 for alpha chain variable domain of TCR clone 177764 (TRAV12-3, TRAJ13)
CAMTSGGYQKVTF

SEQ ID NO: 355528 - protein, 13 aa, Homo sapiens
  CDR3 for beta chain variable domain of TCR clone 177764 (TRBV20-1, TRBJ2-2)
CSALSGGAGELFC

SEQ ID NO: 355529 - protein, 15 aa, Homo sapiens
  CDR3 for alpha chain variable domain of TCR clone 177765 (TRAV4, TRAJ39)
CLVGPNNNAGNMLTF

SEQ ID NO: 355530 - protein, 15 aa, Homo sapiens
  CDR3 for beta chain variable domain of TCR clone 177765 (TRBV7-9, TRBJ1-6)
CASSSPGRGNSPLYC

SEQ ID NO: 355531 - protein, 13 aa, Homo sapiens
  CDR3 for alpha chain variable domain of TCR clone 177766 (TRAV2, TRAJ40)
CAVVTSGTYKYIF

SEQ ID NO: 355532 - protein, 15 aa, Homo sapiens
  CDR3 for beta chain variable domain of TCR clone 177766 (TRBV15, TRBJ1-1)
CATSLQGGRNTEAFF

SEQ ID NO: 355533 - protein, 18 aa, Homo sapiens
  CDR3 for alpha chain variable domain of TCR clone 177767 (TRAV29/DV5, TRAJ52)
CAAGFRDAGGTSDGKLTF

SEQ ID NO: 355534 - protein, 16 aa, Homo sapiens
  CDR3 for beta chain variable domain of TCR clone 177767 (TRBV7-3, TRBJ2-2)
CASSLKRGTLSGELFF

SEQ ID NO: 355535 - protein, 14 aa, Homo sapiens
  CDR3 for alpha chain variable domain of TCR clone 177768 (TRAV12-3, TRAJ10)
SHLPLTGGGNKLTF

SEQ ID NO: 355536 - protein, 12 aa, Homo sapiens
  CDR3 for beta chain variable domain of TCR clone 177768 (TRBV20-1, TRBJ1-1)
CSARHSGTEAFF

SEQ ID NO: 355537 - protein, 14 aa, Homo sapiens
  CDR3 for alpha chain variable domain of TCR clone 177769 (TRAV1-2, TRAJ8)
CAVREDTGFQKLVF

SEQ ID NO: 355538 - protein, 12 aa, Homo sapiens
  CDR3 for beta chain variable domain of TCR clone 177769 (TRBV2, TRBJ2-1)
CAYGPPGNEQFF

SEQ ID NO: 355539 - protein, 13 aa, Homo sapiens
  CDR3 for alpha chain variable domain of TCR clone 177770 (TRAV21, TRAJ33)
CAVAGDSNYQLIW

SEQ ID NO: 355540 - protein, 15 aa, Homo sapiens
  CDR3 for beta chain variable domain of TCR clone 177770 (TRBV19, TRBJ1-1)
CASTSGQIQNTEAFF

SEQ ID NO: 355541 - protein, 12 aa, Homo sapiens
  CDR3 for alpha chain variable domain of TCR clone 177771 (TRAV3, TRAJ20)
CAVRDPDYKLTF

SEQ ID NO: 355542 - protein, 14 aa, Homo sapiens
  CDR3 for beta chain variable domain of TCR clone 177771 (TRBV4-2, TRBJ2-1)
CASGLDRAYNEQFF

SEQ ID NO: 355543 - protein, 13 aa, Homo sapiens
  CDR3 for alpha chain variable domain of TCR clone 177772 (TRAV23/DV6, TRAJ6)
CAAKTGGSYIPTF

SEQ ID NO: 355544 - protein, 15 aa, Homo sapiens
  CDR3 for beta chain variable domain of TCR clone 177772 (TRBV5-1, TRBJ1-2)
CASSSYGQFDYGYTF

SEQ ID NO: 355545 - protein, 13 aa, Homo sapiens
  CDR3 for alpha chain variable domain of TCR clone 177773 (TRAV8-6, TRAJ49)
CAVITNTGNQFYF

SEQ ID NO: 355546 - protein, 14 aa, Homo sapiens
  CDR3 for beta chain variable domain of TCR clone 177773 (TRBV5-1, TRBJ2-7)
CASNRGESLYEQYF

SEQ ID NO: 355547 - protein, 13 aa, Homo sapiens
  CDR3 for alpha chain variable domain of TCR clone 177774 (TRAV20, TRAJ54)
CALTFEGAQKLVF

SEQ ID NO: 355548 - protein, 17 aa, Homo sapiens
  CDR3 for beta chain variable domain of TCR clone 177774 (TRBV4-1, TRBJ1-4)
CASSQEGPRGVEEKLFF

SEQ ID NO: 355549 - protein, 12 aa, Homo sapiens
  CDR3 for alpha chain variable domain of TCR clone 177775 (TRAV22, TRAJ22)
CAPGGSARQLTF

SEQ ID NO: 355550 - protein, 15 aa, Homo sapiens
  CDR3 for beta chain variable domain of TCR clone 177775 (TRBV7-9, TRBJ2-7)
CASSLPMGQANEQYF

SEQ ID NO: 355551 - protein, 16 aa, Homo sapiens
  CDR3 for alpha chain variable domain of TCR clone 177776 (TRAV3, TRAJ10)
CAVRDMREGGGNKLTF

SEQ ID NO: 355552 - protein, 14 aa, Homo sapiens
  CDR3 for beta chain variable domain of TCR clone 177776 (TRBV25-1, TRBJ1-1)
CASTHLGGNTEAFF

SEQ ID NO: 355553 - protein, 17 aa, Homo sapiens
  CDR3 for alpha chain variable domain of TCR clone 177777 (TRAV17, TRAJ52)
CATDRNAGGTSYGKLTF

SEQ ID NO: 355554 - protein, 14 aa, Homo sapiens
  CDR3 for beta chain variable domain of TCR clone 177777 (TRBV7-8, TRBJ2-7)
CASSPRDRVYEQYF

SEQ ID NO: 355555 - protein, 12 aa, Homo sapiens
  CDR3 for alpha chain variable domain of TCR clone 177778 (TRAV12-1, TRAJ34)
CVVAGATDKLIF

SEQ ID NO: 355556 - protein, 14 aa, Homo sapiens
  CDR3 for beta chain variable domain of TCR clone 177778 (TRBV12-4, TRBJ2-7)
CASSLTGRAYEQYF

SEQ ID NO: 355557 - protein, 15 aa, Homo sapiens
  CDR3 for alpha chain variable domain of TCR clone 177779 (TRAV36/DV7, TRAJ53)
CAVEGSGGSNYKLTF

SEQ ID NO: 355558 - protein, 11 aa, Homo sapiens
  CDR3 for beta chain variable domain of TCR clone 177779 (TRBV29-1, TRBJ2-5)
CSEDRTGTQYF

SEQ ID NO: 355559 - protein, 13 aa, Homo sapiens
  CDR3 for alpha chain variable domain of TCR clone 177780 (TRAV30, TRAJ24)
CGTVTDSWGKLQF

SEQ ID NO: 355560 - protein, 14 aa, Homo sapiens
  CDR3 for beta chain variable domain of TCR clone 177780 (TRBV7-2, TRBJ2-5)
CASSFTQGQETQYF

SEQ ID NO: 355561 - protein, 11 aa, Homo sapiens
  CDR3 for alpha chain variable domain of TCR clone 177781 (TRAV3, TRAJ21)
CAVGNFNKFYF

SEQ ID NO: 355562 - protein, 16 aa, Homo sapiens
  CDR3 for beta chain variable domain of TCR clone 177781 (TRBV7-3, TRBJ2-2)
CASSLKRGTLSGEPFF

SEQ ID NO: 355563 - protein, 16 aa, Homo sapiens
  CDR3 for alpha chain variable domain of TCR clone 177782 (TRAV30, TRAJ24)
CGTEIVDADSWGKFQF

SEQ ID NO: 355564 - protein, 15 aa, Homo sapiens
  CDR3 for beta chain variable domain of TCR clone 177782 (TRBV12-4, TRBJ2-7)
CASSQRTSVNYEQYF

SEQ ID NO: 355565 - protein, 19 aa, Homo sapiens
  CDR3 for alpha chain variable domain of TCR clone 177783 (TRAV1-2, TRAJ26)
CLLPLCCERPDNYCQNFVF

SEQ ID NO: 355566 - protein, 12 aa, Homo sapiens
  CDR3 for beta chain variable domain of TCR clone 177783 (TRBV20-1, TRBJ2-1)
CSAQYTYNEQFF

SEQ ID NO: 355567 - protein, 14 aa, Homo sapiens
  CDR3 for alpha chain variable domain of TCR clone 177784 (TRAV12-3, TRAJ41)
CAMSAGNSGYALNF

SEQ ID NO: 355568 - protein, 15 aa, Homo sapiens
  CDR3 for beta chain variable domain of TCR clone 177784 (TRBV2, TRBJ2-2)
CASSRETVGTGELFF

SEQ ID NO: 355569 - protein, 16 aa, Homo sapiens
  CDR3 for alpha chain variable domain of TCR clone 177785 (TRAV29/DV5, TRAJ36)
CAASAGVETGANNLFF

SEQ ID NO: 355570 - protein, 13 aa, Homo sapiens
  CDR3 for beta chain variable domain of TCR clone 177785 (TRBV12-4, TRBJ2-2)
CASSITGSGELFF

SEQ ID NO: 355571 - protein, 16 aa, Homo sapiens
  CDR3 for alpha chain variable domain of TCR clone 177786 (TRAV26-1, TRAJ21)
CIVRVDTTSTNFTLDL

SEQ ID NO: 355572 - protein, 17 aa, Homo sapiens
  CDR3 for beta chain variable domain of TCR clone 177786 (TRBV2, TRBJ1-5)
CASSVGTGMRGYQPQHF

SEQ ID NO: 355573 - protein, 23 aa, Homo sapiens
  CDR3 for alpha chain variable domain of TCR clone 177787 (TRAV26-1, TRAJ38)
CIADNAGNNHIQNPDPAVYQLKS

SEQ ID NO: 355574 - protein, 13 aa, Homo sapiens
  CDR3 for beta chain variable domain of TCR clone 177787 (TRBV20-1, TRBJ1-1)
CSARGGGNTEAFF

SEQ ID NO: 355575 - protein, 17 aa, Homo sapiens
  CDR3 for alpha chain variable domain of TCR clone 177788 (TRAV3, TRAJ6)
CAVRDGPRAGGSYILTC

SEQ ID NO: 355576 - protein, 20 aa, Homo sapiens
  CDR3 for beta chain variable domain of TCR clone 177788 (TRBV28, TRBJ2-1)
CASTPIGRSPGLAGGNEQFF

SEQ ID NO: 355577 - protein, 14 aa, Homo sapiens
  CDR3 for alpha chain variable domain of TCR clone 177789 (TRAV8-4, TRAJ9)
FAVRINTGGFKTIF

SEQ ID NO: 355578 - protein, 13 aa, Homo sapiens
  CDR3 for beta chain variable domain of TCR clone 177789 (TRBV4-1, TRBJ2-1)
CASSQAGGDEQFF

SEQ ID NO: 355579 - protein, 16 aa, Homo sapiens
  CDR3 for alpha chain variable domain of TCR clone 177790 (TRAV38-1, TRAJ56)
CAFMKRQTGANSKLTF

SEQ ID NO: 355580 - protein, 12 aa, Homo sapiens
  CDR3 for beta chain variable domain of TCR clone 177790 (TRBV7-9, TRBJ1-5)
CASSPQGQPQHF

SEQ ID NO: 355581 - protein, 10 aa, Homo sapiens
  CDR3 for alpha chain variable domain of TCR clone 177791 (TRAV23/DV6, TRAJ57)
CAASSTLSQR

SEQ ID NO: 355582 - protein, 14 aa, Homo sapiens
  CDR3 for beta chain variable domain of TCR clone 177791 (TRBV12-5, TRBJ2-5)
CASGSRTHQETQYF

SEQ ID NO: 355583 - protein, 14 aa, Homo sapiens
  CDR3 for alpha chain variable domain of TCR clone 177792 (TRAV26-1, TRAJ38)
CIADNAGNNRKLIW

SEQ ID NO: 355584 - protein, 11 aa, Homo sapiens
  CDR3 for beta chain variable domain of TCR clone 177792 (TRBV7-9, TRBJ2-3)
CASSYTDTQYF

SEQ ID NO: 355585 - protein, 17 aa, Homo sapiens
  CDR3 for alpha chain variable domain of TCR clone 177793 (TRAV9-2, TRAJ45)
CALSGYYSGGGADGLTF

SEQ ID NO: 355586 - protein, 13 aa, Homo sapiens
  CDR3 for beta chain variable domain of TCR clone 177793 (TRBV7-3, TRBJ1-1)
CASSQDWGAEAFF

SEQ ID NO: 355587 - protein, 15 aa, Homo sapiens
  CDR3 for alpha chain variable domain of TCR clone 177794 (TRAV8-3, TRAJ45)
CASSYSGGGAAGLTF

SEQ ID NO: 355588 - protein, 16 aa, Homo sapiens
  CDR3 for beta chain variable domain of TCR clone 177794 (TRBV7-9, TRBJ2-2)
CASSGFGGANTGELFF

SEQ ID NO: 355589 - protein, 15 aa, Homo sapiens
  CDR3 for alpha chain variable domain of TCR clone 177795 (TRAV26-1, TRAJ56)
CIVRVATGANRKLTF

SEQ ID NO: 355590 - protein, 16 aa, Homo sapiens
  CDR3 for beta chain variable domain of TCR clone 177795 (TRBV12-5, TRBJ2-5)
CASGPRTSGNQETQYF

SEQ ID NO: 355591 - protein, 11 aa, Homo sapiens
  CDR3 for alpha chain variable domain of TCR clone 177796 (TRAV16, TRAJ26)
CFKGWGQNFVF

SEQ ID NO: 355592 - protein, 13 aa, Homo sapiens
  CDR3 for beta chain variable domain of TCR clone 177796 (TRBV25-1, TRBJ1-1)
CASSDRGRAEAFF

SEQ ID NO: 355593 - protein, 12 aa, Homo sapiens
  CDR3 for alpha chain variable domain of TCR clone 177797 (TRAV4, TRAJ21)
CLVGDNFNKFYF

SEQ ID NO: 355594 - protein, 15 aa, Homo sapiens
  CDR3 for beta chain variable domain of TCR clone 177797 (TRBV20-1, TRBJ2-7)
CSARDRVSGMDEQYF

SEQ ID NO: 355595 - protein, 15 aa, Homo sapiens
  CDR3 for alpha chain variable domain of TCR clone 177798 (TRAV23/DV6, TRAJ30)
CAASSQESRDDKIIF

SEQ ID NO: 355596 - protein, 11 aa, Homo sapiens
  CDR3 for beta chain variable domain of TCR clone 177798 (TRBV12-4, TRBJ2-3)
CASTATDTQYF

SEQ ID NO: 355597 - protein, 14 aa, Homo sapiens
  CDR3 for alpha chain variable domain of TCR clone 177799 (TRAV17, TRAJ6)
CAMNPAGGSYIPTF

SEQ ID NO: 355598 - protein, 15 aa, Homo sapiens
  CDR3 for beta chain variable domain of TCR clone 177799 (TRBV3-1, TRBJ2-5)
CASSANLGGPETQYF

SEQ ID NO: 355599 - protein, 15 aa, Homo sapiens
  CDR3 for alpha chain variable domain of TCR clone 177800 (TRAV3, TRAJ5)
CAVRDRDTGRRALTF

SEQ ID NO: 355600 - protein, 13 aa, Homo sapiens
  CDR3 for beta chain variable domain of TCR clone 177800 (TRBV20-1, TRBJ2-5)
CSARDSKQATQYF

SEQ ID NO: 355601 - protein, 13 aa, Homo sapiens
  CDR3 for alpha chain variable domain of TCR clone 177801 (TRAV13-1, TRAJ11)
CAASIRGYSTLTF

SEQ ID NO: 355602 - protein, 17 aa, Homo sapiens
  CDR3 for beta chain variable domain of TCR clone 177801 (TRBV4-3, TRBJ1-2)
CASSSRLQAGGPVGYTF

SEQ ID NO: 355603 - protein, 12 aa, Homo sapiens
  CDR3 for alpha chain variable domain of TCR clone 177802 (TRAV1-1, TRAJ8)
CAGGTGFQKLVF

SEQ ID NO: 355604 - protein, 15 aa, Homo sapiens
  CDR3 for beta chain variable domain of TCR clone 177802 (TRBV7-9, TRBJ1-4)
CASSRTGDLNEKLFF

SEQ ID NO: 355605 - protein, 15 aa, Homo sapiens
  CDR3 for alpha chain variable domain of TCR clone 177803 (TRAV38-2/DV8, TRAJ48)
CTYRSGGFGNEKLTF

SEQ ID NO: 355606 - protein, 16 aa, Homo sapiens
  CDR3 for beta chain variable domain of TCR clone 177803 (TRBV28, TRBJ2-7)
CASSPWVATGDLSQYS

SEQ ID NO: 355607 - protein, 14 aa, Homo sapiens
  CDR3 for alpha chain variable domain of TCR clone 177804 (TRAV22, TRAJ6)
CAGVGPGGSYIPTF

SEQ ID NO: 355608 - protein, 17 aa, Homo sapiens
  CDR3 for beta chain variable domain of TCR clone 177804 (TRBV15, TRBJ1-5)
CATSRAPPGTRNQTQHF

SEQ ID NO: 355609 - protein, 20 aa, Homo sapiens
  CDR3 for alpha chain variable domain of TCR clone 177805 (TRAV27, TRAJ30)
CAGEGEMTRSSLEKGHDFIF

SEQ ID NO: 355610 - protein, 14 aa, Homo sapiens
  CDR3 for beta chain variable domain of TCR clone 177805 (TRBV11-2, TRBJ2-1)
CASSLDGRDNKQFF

SEQ ID NO: 355611 - protein, 13 aa, Homo sapiens
  CDR3 for alpha chain variable domain of TCR clone 177806 (TRAV8-3, TRAJ28)
CAVGAVGSYHLTF

SEQ ID NO: 355612 - protein, 13 aa, Homo sapiens
  CDR3 for beta chain variable domain of TCR clone 177806 (TRBV29-1, TRBJ2-1)
CSVEGGRVNEQFF

SEQ ID NO: 355613 - protein, 12 aa, Homo sapiens
  CDR3 for alpha chain variable domain of TCR clone 177807 (TRAV21, TRAJ39)
CAADNAGNVLTF

SEQ ID NO: 355614 - protein, 13 aa, Homo sapiens
  CDR3 for beta chain variable domain of TCR clone 177807 (TRBV6-1, TRBJ1-1)
CASSRQGNTEAFF

SEQ ID NO: 355615 - protein, 13 aa, Homo sapiens
  CDR3 for alpha chain variable domain of TCR clone 177808 (TRAV8-3, TRAJ43)
CAVGPDNNNDMRF

SEQ ID NO: 355616 - protein, 12 aa, Homo sapiens
  CDR3 for beta chain variable domain of TCR clone 177808 (TRBV7-2, TRBJ1-6)
CASSLSSSPLDF

SEQ ID NO: 355617 - protein, 15 aa, Homo sapiens
  CDR3 for alpha chain variable domain of TCR clone 177809 (TRAV8-3, TRAJ40)
CAVGGRTSGTYNYIF

SEQ ID NO: 355618 - protein, 15 aa, Homo sapiens
  CDR3 for beta chain variable domain of TCR clone 177809 (TRBV19, TRBJ1-1)
CASSGDGLGNTEAFF

SEQ ID NO: 355619 - protein, 15 aa, Homo sapiens
  CDR3 for alpha chain variable domain of TCR clone 177810 (TRAV21, TRAJ53)
CATLNSGGSNYKLTF

SEQ ID NO: 355620 - protein, 16 aa, Homo sapiens
  CDR3 for beta chain variable domain of TCR clone 177810 (TRBV3-1, TRBJ2-7)
CASSVGSSGGNYEQYF

SEQ ID NO: 355621 - protein, 16 aa, Homo sapiens
  CDR3 for alpha chain variable domain of TCR clone 177811 (TRAV8-3, TRAJ4)
CAVGARGSGGYNKLIF

SEQ ID NO: 355622 - protein, 16 aa, Homo sapiens
  CDR3 for beta chain variable domain of TCR clone 177811 (TRBV4-3, TRBJ2-5)
CASSQDSIQLQETQYS

SEQ ID NO: 355623 - protein, 14 aa, Homo sapiens
  CDR3 for alpha chain variable domain of TCR clone 177812 (TRAV12-2, TRAJ17)
CAVLFKAAGNKLTF

SEQ ID NO: 355624 - protein, 15 aa, Homo sapiens
  CDR3 for beta chain variable domain of TCR clone 177812 (TRBV13, TRBJ2-1)
CASSLLSGLNNEQFF

SEQ ID NO: 355625 - protein, 15 aa, Homo sapiens
  CDR3 for alpha chain variable domain of TCR clone 177813 (TRAV8-4, TRAJ7)
CAVSGGTYGNHRLAF

SEQ ID NO: 355626 - protein, 11 aa, Homo sapiens
  CDR3 for beta chain variable domain of TCR clone 177813 (TRBV20-1, TRBJ2-1)
CSLSSGSEQFF

SEQ ID NO: 355627 - protein, 11 aa, Homo sapiens
  CDR3 for alpha chain variable domain of TCR clone 177814 (TRAV1-2, TRAJ40)
CAVPGTYKYIF

SEQ ID NO: 355628 - protein, 18 aa, Homo sapiens
  CDR3 for beta chain variable domain of TCR clone 177814 (TRBV20-1, TRBJ2-3)
CSASGLAGGPGTTDTQYF

SEQ ID NO: 355629 - protein, 14 aa, Homo sapiens
  CDR3 for alpha chain variable domain of TCR clone 177815 (TRAV13-1, TRAJ13)
CAASRVGGYQKVTF

SEQ ID NO: 355630 - protein, 14 aa, Homo sapiens
  CDR3 for beta chain variable domain of TCR clone 177815 (TRBV6-3, TRBJ2-5)
CASSYSGRLSGQYF

SEQ ID NO: 355631 - protein, 17 aa, Homo sapiens
  CDR3 for alpha chain variable domain of TCR clone 177816 (TRAV13-1, TRAJ52)
CAAGPNAGGTSYGKLTF

SEQ ID NO: 355632 - protein, 13 aa, Homo sapiens
  CDR3 for beta chain variable domain of TCR clone 177816 (TRBV7-2, TRBJ1-1)
CASNLKGAKVAFF

SEQ ID NO: 355633 - protein, 14 aa, Homo sapiens
  CDR3 for alpha chain variable domain of TCR clone 177817 (TRAV16, TRAJ42)
CALLAGGSQGNLTS

SEQ ID NO: 355634 - protein, 15 aa, Homo sapiens
  CDR3 for beta chain variable domain of TCR clone 177817 (TRBV2, TRBJ2-7)
CASSEGLARSYEQYF

SEQ ID NO: 355635 - protein, 15 aa, Homo sapiens
  CDR3 for alpha chain variable domain of TCR clone 177818 (TRAV12-1, TRAJ52)
CVGNAGCTSYGKLTF

SEQ ID NO: 355636 - protein, 14 aa, Homo sapiens
  CDR3 for beta chain variable domain of TCR clone 177818 (TRBV7-3, TRBJ2-2)
CASSPDPSGRELFF

SEQ ID NO: 355637 - protein, 14 aa, Homo sapiens
  CDR3 for alpha chain variable domain of TCR clone 177819 (TRAV23/DV6, TRAJ36)
CAASLQTGANNLFF

SEQ ID NO: 355638 - protein, 15 aa, Homo sapiens
  CDR3 for beta chain variable domain of TCR clone 177819 (TRBV4-2, TRBJ1-2)
CASSQRTGGRDGYTF

SEQ ID NO: 355639 - protein, 16 aa, Homo sapiens
  CDR3 for alpha chain variable domain of TCR clone 177820 (TRAV16, TRAJ4)
CITVLPFPGGYNKLIF

SEQ ID NO: 355640 - protein, 14 aa, Homo sapiens
  CDR3 for beta chain variable domain of TCR clone 177820 (TRBV19, TRBJ2-7)
CASSMGQGAIEQYF

SEQ ID NO: 355641 - protein, 15 aa, Homo sapiens
  CDR3 for alpha chain variable domain of TCR clone 177821 (TRAV14/DV4, TRAJ15)
CAMREGWHAGTALIF

SEQ ID NO: 355642 - protein, 14 aa, Homo sapiens
  CDR3 for beta chain variable domain of TCR clone 177821 (TRBV19, TRBJ2-5)
CASSMTGQQETQYF

SEQ ID NO: 355643 - protein, 14 aa, Homo sapiens
  CDR3 for alpha chain variable domain of TCR clone 177822 (TRAV12-3, TRAJ10)
SNLPLTGGGNKLTF

SEQ ID NO: 355644 - protein, 13 aa, Homo sapiens
  CDR3 for beta chain variable domain of TCR clone 177822 (TRBV10-3, TRBJ2-7)
CASKLAVNYEQYF

SEQ ID NO: 355645 - protein, 14 aa, Homo sapiens
  CDR3 for alpha chain variable domain of TCR clone 177823 (TRAV17, TRAJ54)
CATDANQGAQKLVF

SEQ ID NO: 355646 - protein, 15 aa, Homo sapiens
  CDR3 for beta chain variable domain of TCR clone 177823 (TRBV20-1, TRBJ2-7)
CSAESGTSGAYEQYF

SEQ ID NO: 355647 - protein, 22 aa, Homo sapiens
  CDR3 for alpha chain variable domain of TCR clone 177824 (TRAV3, )
CAVRDCLNAGSNHIQNPDPAVY

SEQ ID NO: 355648 - protein, 19 aa, Homo sapiens
  CDR3 for beta chain variable domain of TCR clone 177824 (TRBV7-2, TRBJ2-3)
RASSFLSRNWGGGTDTQYF

SEQ ID NO: 355649 - protein, 13 aa, Homo sapiens
  CDR3 for alpha chain variable domain of TCR clone 177825 (TRAV2, TRAJ40)
CAVVTSGTSKYIF

SEQ ID NO: 355650 - protein, 13 aa, Homo sapiens
  CDR3 for beta chain variable domain of TCR clone 177825 (TRBV12-4, TRBJ1-2)
CASSLRQGKGYTF

SEQ ID NO: 355651 - protein, 11 aa, Homo sapiens
  CDR3 for alpha chain variable domain of TCR clone 177826 (TRAV4, TRAJ28)
FLVGDNRAETL

SEQ ID NO: 355652 - protein, 13 aa, Homo sapiens
  CDR3 for beta chain variable domain of TCR clone 177826 (TRBV20-1, TRBJ2-7)
CSATHTSGYEQYF

SEQ ID NO: 355653 - protein, 11 aa, Homo sapiens
  CDR3 for alpha chain variable domain of TCR clone 177827 (TRAV21, TRAJ48)
CAVDGHEKLTF

SEQ ID NO: 355654 - protein, 16 aa, Homo sapiens
  CDR3 for beta chain variable domain of TCR clone 177827 (TRBV19, TRBJ2-1)
CASSSKGTRSYNEQFF

SEQ ID NO: 355655 - protein, 14 aa, Homo sapiens
  CDR3 for alpha chain variable domain of TCR clone 177828 (TRAV1-2, TRAJ8)
CAVREDTGFQKLVF

SEQ ID NO: 355656 - protein, 15 aa, Homo sapiens
  CDR3 for beta chain variable domain of TCR clone 177828 (TRBV29-1, TRBJ2-7)
CSVEFFDRGSYEQYF

SEQ ID NO: 355657 - protein, 12 aa, Homo sapiens
  CDR3 for alpha chain variable domain of TCR clone 177829 (TRAV12-3, TRAJ17)
CAMTLTGNKLTF

SEQ ID NO: 355658 - protein, 12 aa, Homo sapiens
  CDR3 for beta chain variable domain of TCR clone 177829 (TRBV12-4, TRBJ1-2)
CAILGRNYGYTF

SEQ ID NO: 355659 - protein, 15 aa, Homo sapiens
  CDR3 for alpha chain variable domain of TCR clone 177830 (TRAV3, TRAJ30)
CAVRDEYGRDAKIIF

SEQ ID NO: 355660 - protein, 16 aa, Homo sapiens
  CDR3 for beta chain variable domain of TCR clone 177830 (TRBV5-1, TRBJ2-5)
CASSLANHRGRETQYF

SEQ ID NO: 355661 - protein, 15 aa, Homo sapiens
  CDR3 for alpha chain variable domain of TCR clone 177831 (TRAV29/DV5, TRAJ10)
CAASALTGGGNKLTF

SEQ ID NO: 355662 - protein, 13 aa, Homo sapiens
  CDR3 for beta chain variable domain of TCR clone 177831 (TRBV27, TRBJ2-7)
CASSFSQGYEQYF

SEQ ID NO: 355663 - protein, 17 aa, Homo sapiens
  CDR3 for alpha chain variable domain of TCR clone 177832 (TRAV3, TRAJ6)
CAVRDGPRAGGSYIPTF

SEQ ID NO: 355664 - protein, 16 aa, Homo sapiens
  CDR3 for beta chain variable domain of TCR clone 177832 (TRBV5-1, TRBJ2-2)
CASSFPEGANTGELFF

SEQ ID NO: 355665 - protein, 15 aa, Homo sapiens
  CDR3 for alpha chain variable domain of TCR clone 177833 (TRAV21, TRAJ53)
CATLNSGVSNYKLTF

SEQ ID NO: 355666 - protein, 14 aa, Homo sapiens
  CDR3 for beta chain variable domain of TCR clone 177833 (TRBV12-5, TRBJ2-5)
CASGSRTHQETQYF

SEQ ID NO: 355667 - protein, 14 aa, Homo sapiens
  CDR3 for alpha chain variable domain of TCR clone 177834 (TRAV13-1, TRAJ44)
CAAKATGTASKLTF

SEQ ID NO: 355668 - protein, 16 aa, Homo sapiens
  CDR3 for beta chain variable domain of TCR clone 177834 (TRBV19, TRBJ2-1)
CASSKAGPSPYNEQFF

SEQ ID NO: 355669 - protein, 17 aa, Homo sapiens
  CDR3 for alpha chain variable domain of TCR clone 177835 (TRAV3, TRAJ6)
CAVRDGPRAGGSYITTF

SEQ ID NO: 355670 - protein, 20 aa, Homo sapiens
  CDR3 for beta chain variable domain of TCR clone 177835 (TRBV28, TRBJ2-1)
CVSTPIGRSPGLAGGNEQFL

SEQ ID NO: 355671 - protein, 11 aa, Homo sapiens
  CDR3 for alpha chain variable domain of TCR clone 177836 (TRAV35, TRAJ30)
CAGERDDKIIF

SEQ ID NO: 355672 - protein, 13 aa, Homo sapiens
  CDR3 for beta chain variable domain of TCR clone 177836 (TRBV24-1, TRBJ2-1)
CATSAGPYNEQFF

SEQ ID NO: 355673 - protein, 14 aa, Homo sapiens
  CDR3 for alpha chain variable domain of TCR clone 177837 (TRAV12-2, TRAJ40)
CAVKIPSGTYKYIF

SEQ ID NO: 355674 - protein, 13 aa, Homo sapiens
  CDR3 for beta chain variable domain of TCR clone 177837 (TRBV11-3, TRBJ1-1)
CASSLALGTEAFF

SEQ ID NO: 355675 - protein, 12 aa, Homo sapiens
  CDR3 for alpha chain variable domain of TCR clone 177838 (TRAV21, TRAJ20)
CAVRRNDYKLSF

SEQ ID NO: 355676 - protein, 12 aa, Homo sapiens
  CDR3 for beta chain variable domain of TCR clone 177838 (TRBV7-9, TRBJ2-7)
CASSIKREEQYF

SEQ ID NO: 355677 - protein, 17 aa, Homo sapiens
  CDR3 for alpha chain variable domain of TCR clone 177839 (TRAV35, TRAJ52)
CAGQLAACGTSYGKLTF

SEQ ID NO: 355678 - protein, 12 aa, Homo sapiens
  CDR3 for beta chain variable domain of TCR clone 177839 (TRBV20-1, TRBJ2-7)
CSAGRRQSEQYF

SEQ ID NO: 355679 - protein, 11 aa, Homo sapiens
  CDR3 for alpha chain variable domain of TCR clone 177840 (TRAV26-1, TRAJ27)
CIDPNAGKSTF

SEQ ID NO: 355680 - protein, 18 aa, Homo sapiens
  CDR3 for beta chain variable domain of TCR clone 177840 (TRBV7-9, TRBJ2-6)
CASSFPGAGISGANVLIF

SEQ ID NO: 355681 - protein, 13 aa, Homo sapiens
  CDR3 for alpha chain variable domain of TCR clone 177841 (TRAV13-1, TRAJ23)
CAASGRGGGKLIF

SEQ ID NO: 355682 - protein, 19 aa, Homo sapiens
  CDR3 for beta chain variable domain of TCR clone 177841 (TRBV7-9, TRBJ2-6)
CASSLESATVLPGANVLTF

SEQ ID NO: 355683 - protein, 13 aa, Homo sapiens
  CDR3 for alpha chain variable domain of TCR clone 177842 (TRAV2, TRAJ21)
CAVEDLNFNKFYL

SEQ ID NO: 355684 - protein, 15 aa, Homo sapiens
  CDR3 for beta chain variable domain of TCR clone 177842 (TRBV28, TRBJ2-5)
CGSSPGQGSIETQYF

SEQ ID NO: 355685 - protein, 16 aa, Homo sapiens
  CDR3 for alpha chain variable domain of TCR clone 177843 (TRAV12-2, TRAJ43)
CAGDDMRFGTGTRLTV

SEQ ID NO: 355686 - protein, 16 aa, Homo sapiens
  CDR3 for beta chain variable domain of TCR clone 177843 (TRBV2, TRBJ2-4)
CASSEAPGGEQNIQYF

SEQ ID NO: 355687 - protein, 11 aa, Homo sapiens
  CDR3 for alpha chain variable domain of TCR clone 177844 (TRAV12-3, TRAJ43)
CAMSVSNDMRL

SEQ ID NO: 355688 - protein, 13 aa, Homo sapiens
  CDR3 for beta chain variable domain of TCR clone 177844 (TRBV7-9, TRBJ1-1)
CASSLAGVTEAFF

SEQ ID NO: 355689 - protein, 13 aa, Homo sapiens
  CDR3 for alpha chain variable domain of TCR clone 177845 (TRAV9-2, TRAJ53)
CALSGGSNYKLTF

SEQ ID NO: 355690 - protein, 16 aa, Homo sapiens
  CDR3 for beta chain variable domain of TCR clone 177845 (TRBV12-4, TRBJ2-7)
CASSTEGQGSSYEQYF

SEQ ID NO: 355691 - protein, 13 aa, Homo sapiens
  CDR3 for alpha chain variable domain of TCR clone 177846 (TRAV2, TRAJ40)
CAVVTSGTYKYVF

SEQ ID NO: 355692 - protein, 14 aa, Homo sapiens
  CDR3 for beta chain variable domain of TCR clone 177846 (TRBV28, TRBJ2-1)
CASSYYTAYNEQFF

SEQ ID NO: 355693 - protein, 11 aa, Homo sapiens
  CDR3 for alpha chain variable domain of TCR clone 177847 (TRAV12-2, TRAJ31)
CAVTRWARLMF

SEQ ID NO: 355694 - protein, 16 aa, Homo sapiens
  CDR3 for beta chain variable domain of TCR clone 177847 (TRBV7-3, TRBJ2-2)
CASSLKRGTLSGELFF

SEQ ID NO: 355695 - protein, 12 aa, Homo sapiens
  CDR3 for alpha chain variable domain of TCR clone 177848 (TRAV21, TRAJ33)
CAKMDSNYQLIW

SEQ ID NO: 355696 - protein, 12 aa, Homo sapiens
  CDR3 for beta chain variable domain of TCR clone 177848 (TRBV12-4, TRBJ2-3)
CASSSTTDTQYF

SEQ ID NO: 355697 - protein, 18 aa, Homo sapiens
  CDR3 for alpha chain variable domain of TCR clone 177849 (TRAV21, TRAJ52)
CAVRPSPAGGTSYGNLTF

SEQ ID NO: 355698 - protein, 17 aa, Homo sapiens
  CDR3 for beta chain variable domain of TCR clone 177849 (TRBV13, TRBJ2-3)
CASSLSRVAGGKKTQYF

SEQ ID NO: 355699 - protein, 12 aa, Homo sapiens
  CDR3 for alpha chain variable domain of TCR clone 177850 (TRAV12-1, TRAJ40)
CVVYSGTYKYIF

SEQ ID NO: 355700 - protein, 14 aa, Homo sapiens
  CDR3 for beta chain variable domain of TCR clone 177850 (TRBV20-1, TRBJ2-3)
CNARGGTSTDTQYF

SEQ ID NO: 355701 - protein, 13 aa, Homo sapiens
  CDR3 for alpha chain variable domain of TCR clone 177851 (TRAV21, TRAJ27)
CAARPGHAGKSTF

SEQ ID NO: 355702 - protein, 14 aa, Homo sapiens
  CDR3 for beta chain variable domain of TCR clone 177851 (TRBV20-1, TRBJ2-3)
CRAYSGGRTDTQYF

SEQ ID NO: 355703 - protein, 14 aa, Homo sapiens
  CDR3 for alpha chain variable domain of TCR clone 177852 (TRAV12-2, TRAJ5)
CAVNRSTGRRALTF

SEQ ID NO: 355704 - protein, 16 aa, Homo sapiens
  CDR3 for beta chain variable domain of TCR clone 177852 (TRBV29-1, TRBJ1-2)
CSVEANRDIANYGYTF

SEQ ID NO: 355705 - protein, 12 aa, Homo sapiens
  CDR3 for alpha chain variable domain of TCR clone 177853 (TRAV13-2, TRAJ23)
CAESHRGGKLIF

SEQ ID NO: 355706 - protein, 14 aa, Homo sapiens
  CDR3 for beta chain variable domain of TCR clone 177853 (TRBV11-2, TRBJ1-2)
CASSLGTANYGYTF

SEQ ID NO: 355707 - protein, 15 aa, Homo sapiens
  CDR3 for alpha chain variable domain of TCR clone 177854 (TRAV4, TRAJ26)
CLVGAMNNYGQNFVF

SEQ ID NO: 355708 - protein, 16 aa, Homo sapiens
  CDR3 for beta chain variable domain of TCR clone 177854 (TRBV28, TRBJ1-4)
CASSSRTGAAIEKLFF

SEQ ID NO: 355709 - protein, 11 aa, Homo sapiens
  CDR3 for alpha chain variable domain of TCR clone 177855 (TRAV35, TRAJ34)
CWARNTDKLIF

SEQ ID NO: 355710 - protein, 14 aa, Homo sapiens
  CDR3 for beta chain variable domain of TCR clone 177855 (TRBV7-9, TRBJ2-3)
CASSLEDGTDTQYF

SEQ ID NO: 355711 - protein, 11 aa, Homo sapiens
  CDR3 for alpha chain variable domain of TCR clone 177856 (TRAV21, TRAJ23)
CAPQRRGKLLF

SEQ ID NO: 355712 - protein, 14 aa, Homo sapiens
  CDR3 for beta chain variable domain of TCR clone 177856 (TRBV12-4, TRBJ1-1)
CASTWTGHDTEAFF

SEQ ID NO: 355713 - protein, 16 aa, Homo sapiens
  CDR3 for alpha chain variable domain of TCR clone 177857 (TRAV16, TRAJ4)
CALSRMFSGGYTKLIF

SEQ ID NO: 355714 - protein, 19 aa, Homo sapiens
  CDR3 for beta chain variable domain of TCR clone 177857 (TRBV28, TRBJ2-7)
CASSYSGTSRLGWVYEQYF

SEQ ID NO: 355715 - protein, 12 aa, Homo sapiens
  CDR3 for alpha chain variable domain of TCR clone 177858 (TRAV8-3, TRAJ20)
CAVGANDYELSF

SEQ ID NO: 355716 - protein, 15 aa, Homo sapiens
  CDR3 for beta chain variable domain of TCR clone 177858 (TRBV19, TRBJ2-2)
CQPISRDRATGELFF

SEQ ID NO: 355717 - protein, 12 aa, Homo sapiens
  CDR3 for alpha chain variable domain of TCR clone 177859 (TRAV27, TRAJ34)
CAGAKNTDKLIF

SEQ ID NO: 355718 - protein, 14 aa, Homo sapiens
  CDR3 for beta chain variable domain of TCR clone 177859 (TRBV20-1, TRBJ1-1)
CSAQTRIGGTEAFF

SEQ ID NO: 355719 - protein, 12 aa, Homo sapiens
  CDR3 for alpha chain variable domain of TCR clone 177860 (TRAV3, TRAJ26)
CAVRDYGQNFFL

SEQ ID NO: 355720 - protein, 12 aa, Homo sapiens
  CDR3 for beta chain variable domain of TCR clone 177860 (TRBV29-1, TRBJ2-3)
CSVTGGADTQYF

SEQ ID NO: 355721 - protein, 13 aa, Homo sapiens
  CDR3 for alpha chain variable domain of TCR clone 177861 (TRAV1-2, TRAJ9)
RAALNTGGFKTIF

SEQ ID NO: 355722 - protein, 13 aa, Homo sapiens
  CDR3 for beta chain variable domain of TCR clone 177861 (TRBV19, TRBJ1-2)
CASSVPGQDGYTV

SEQ ID NO: 355723 - protein, 15 aa, Homo sapiens
  CDR3 for alpha chain variable domain of TCR clone 177862 (TRAV26-1, TRAJ29)
CIVRVEGSGNKPLVF

SEQ ID NO: 355724 - protein, 15 aa, Homo sapiens
  CDR3 for beta chain variable domain of TCR clone 177862 (TRBV11-3, TRBJ2-3)
CASLKDGREGDTQYF

SEQ ID NO: 355725 - protein, 13 aa, Homo sapiens
  CDR3 for alpha chain variable domain of TCR clone 177863 (TRAV2, TRAJ40)
CAVVTSGTYKYIF

SEQ ID NO: 355726 - protein, 16 aa, Homo sapiens
  CDR3 for beta chain variable domain of TCR clone 177863 (TRBV7-9, TRBJ1-3)
CASSLWAGSSGNTIYF

SEQ ID NO: 355727 - protein, 14 aa, Homo sapiens
  CDR3 for alpha chain variable domain of TCR clone 177864 (TRAV8-4, TRAJ34)
CAVSDPGDTDKLLF

SEQ ID NO: 355728 - protein, 15 aa, Homo sapiens
  CDR3 for beta chain variable domain of TCR clone 177864 (TRBV6-6, TRBJ1-1)
CASSPRGDVETEAFF

SEQ ID NO: 355729 - protein, 10 aa, Homo sapiens
  CDR3 for alpha chain variable domain of TCR clone 177865 (TRAV38-2/DV8, TRAJ40)
CASGAYKYIF

SEQ ID NO: 355730 - protein, 14 aa, Homo sapiens
  CDR3 for beta chain variable domain of TCR clone 177865 (TRBV7-9, TRBJ2-1)
CASSPRDSLYEQFF

SEQ ID NO: 355731 - protein, 15 aa, Homo sapiens
  CDR3 for alpha chain variable domain of TCR clone 177866 (TRAV21, TRAJ53)
CATLNSGGSNYKLTF

SEQ ID NO: 355732 - protein, 16 aa, Homo sapiens
  CDR3 for beta chain variable domain of TCR clone 177866 (TRBV7-2, TRBJ1-4)
CASSLAPGRRDEKLFF

SEQ ID NO: 355733 - protein, 12 aa, Homo sapiens
  CDR3 for alpha chain variable domain of TCR clone 177867 (TRAV12-1, TRAJ40)
CVVYSGTYKYIF

SEQ ID NO: 355734 - protein, 14 aa, Homo sapiens
  CDR3 for beta chain variable domain of TCR clone 177867 (TRBV15, TRBJ2-5)
CATSIGGLGETQYF

SEQ ID NO: 355735 - protein, 12 aa, Homo sapiens
  CDR3 for alpha chain variable domain of TCR clone 177868 (TRAV12-3, TRAJ3)
CAIDSSASKILF

SEQ ID NO: 355736 - protein, 17 aa, Homo sapiens
  CDR3 for beta chain variable domain of TCR clone 177868 (TRBV7-9, TRBJ2-3)
CASSLEEAGAYPDTQYF

SEQ ID NO: 355737 - protein, 16 aa, Homo sapiens
  CDR3 for alpha chain variable domain of TCR clone 177869 (TRAV12-2, TRAJ32)
CAVNLGQGGATNKLIF

SEQ ID NO: 355738 - protein, 15 aa, Homo sapiens
  CDR3 for beta chain variable domain of TCR clone 177869 (TRBV20-1, TRBJ2-7)
CSARGPVAGGREQYF

SEQ ID NO: 355739 - protein, 10 aa, Homo sapiens
  CDR3 for alpha chain variable domain of TCR clone 177870 (TRAV23/DV6, TRAJ3)
CAATTFALGG

SEQ ID NO: 355740 - protein, 19 aa, Homo sapiens
  CDR3 for beta chain variable domain of TCR clone 177870 (TRBV25-1, TRBJ2-2)
CAILVYRVDRGRKTGELFF

SEQ ID NO: 355741 - protein, 12 aa, Homo sapiens
  CDR3 for alpha chain variable domain of TCR clone 177871 (TRAV12-2, TRAJ10)
WGVTGGGNKLTF

SEQ ID NO: 355742 - protein, 15 aa, Homo sapiens
  CDR3 for beta chain variable domain of TCR clone 177871 (TRBV7-2, TRBJ2-3)
CASSLAGAFIDTQYF

SEQ ID NO: 355743 - protein, 16 aa, Homo sapiens
  CDR3 for alpha chain variable domain of TCR clone 177872 (TRAV3, TRAJ21)
CAVRDIERGNFNKFYF

SEQ ID NO: 355744 - protein, 13 aa, Homo sapiens
  CDR3 for beta chain variable domain of TCR clone 177872 (TRBV4-2, TRBJ1-1)
CASSQAGKTEAFF

SEQ ID NO: 355745 - protein, 17 aa, Homo sapiens
  CDR3 for alpha chain variable domain of TCR clone 177873 (TRAV3, TRAJ6)
CAVRDGPRAGGSDIPTF

SEQ ID NO: 355746 - protein, 13 aa, Homo sapiens
  CDR3 for beta chain variable domain of TCR clone 177873 (TRBV19, TRBJ1-2)
CASSVPGQDGYTF

SEQ ID NO: 355747 - protein, 12 aa, Homo sapiens
  CDR3 for alpha chain variable domain of TCR clone 177874 (TRAV16, TRAJ8)
CAPLGGFQKLVF

SEQ ID NO: 355748 - protein, 15 aa, Homo sapiens
  CDR3 for beta chain variable domain of TCR clone 177874 (TRBV19, TRBJ1-2)
CASSVGQVLNYGYTF

SEQ ID NO: 355749 - protein, 14 aa, Homo sapiens
  CDR3 for alpha chain variable domain of TCR clone 177875 (TRAV13-1, TRAJ35)
CAASKGGFGNVLHC

SEQ ID NO: 355750 - protein, 14 aa, Homo sapiens
  CDR3 for beta chain variable domain of TCR clone 177875 (TRBV7-3, TRBJ2-3)
CASSVAGGTDTQYF

SEQ ID NO: 355751 - protein, 12 aa, Homo sapiens
  CDR3 for alpha chain variable domain of TCR clone 177876 (TRAV1-1, TRAJ39)
CAVPVVGNMLTF

SEQ ID NO: 355752 - protein, 15 aa, Homo sapiens
  CDR3 for beta chain variable domain of TCR clone 177876 (TRBV20-1, TRBJ2-7)
CSARGRGPSSYEQYF

SEQ ID NO: 355753 - protein, 13 aa, Homo sapiens
  CDR3 for alpha chain variable domain of TCR clone 177877 (TRAV12-3, TRAJ7)
CAMTPYGNNRLAF

SEQ ID NO: 355754 - protein, 14 aa, Homo sapiens
  CDR3 for beta chain variable domain of TCR clone 177877 (TRBV19, TRBJ2-1)
CATSQGDTYNEQFF

SEQ ID NO: 355755 - protein, 14 aa, Homo sapiens
  CDR3 for alpha chain variable domain of TCR clone 177878 (TRAV23/DV6, TRAJ24)
CAASLSDSWGKLQF

SEQ ID NO: 355756 - protein, 17 aa, Homo sapiens
  CDR3 for beta chain variable domain of TCR clone 177878 (TRBV7-8, TRBJ2-6)
CASSAGTGGAGANVLTF

SEQ ID NO: 355757 - protein, 12 aa, Homo sapiens
  CDR3 for alpha chain variable domain of TCR clone 177879 (TRAV30, TRAJ43)
CGPEERGNDMRF

SEQ ID NO: 355758 - protein, 15 aa, Homo sapiens
  CDR3 for beta chain variable domain of TCR clone 177879 (TRBV10-2, TRBJ2-6)
CASSEQGTGANVLTF

SEQ ID NO: 355759 - protein, 20 aa, Homo sapiens
  CDR3 for alpha chain variable domain of TCR clone 177880 (TRAV25, TRAJ21)
TATQTTDVGTYPLSFNKFYF

SEQ ID NO: 355760 - protein, 14 aa, Homo sapiens
  CDR3 for beta chain variable domain of TCR clone 177880 (TRBV7-2, TRBJ2-5)
CASSPRGSSETQYF

SEQ ID NO: 355761 - protein, 15 aa, Homo sapiens
  CDR3 for alpha chain variable domain of TCR clone 177881 (TRAV26-1, TRAJ40)
CIVRAVPSGTYKYIF

SEQ ID NO: 355762 - protein, 14 aa, Homo sapiens
  CDR3 for beta chain variable domain of TCR clone 177881 (TRBV7-6, TRBJ2-3)
CASSLGTVTDTQYF

SEQ ID NO: 355763 - protein, 15 aa, Homo sapiens
  CDR3 for alpha chain variable domain of TCR clone 177882 (TRAV29/DV5, TRAJ40)
FAASAQGSGTYKYIF

SEQ ID NO: 355764 - protein, 13 aa, Homo sapiens
  CDR3 for beta chain variable domain of TCR clone 177882 (TRBV10-3, TRBJ2-7)
CASKLAVNYEQYF

SEQ ID NO: 355765 - protein, 12 aa, Homo sapiens
  CDR3 for alpha chain variable domain of TCR clone 177883 (TRAV13-1, TRAJ37)
CAAIRNTAKLIF

SEQ ID NO: 355766 - protein, 13 aa, Homo sapiens
  CDR3 for beta chain variable domain of TCR clone 177883 (TRBV19, TRBJ2-5)
CASRLAGHETQYF

SEQ ID NO: 355767 - protein, 13 aa, Homo sapiens
  CDR3 for alpha chain variable domain of TCR clone 177884 (TRAV3, TRAJ21)
CAVREPAFNKFYF

SEQ ID NO: 355768 - protein, 13 aa, Homo sapiens
  CDR3 for beta chain variable domain of TCR clone 177884 (TRBV9, TRBJ2-1)
CVSSPSGGNEQFF

SEQ ID NO: 355769 - protein, 16 aa, Homo sapiens
  CDR3 for alpha chain variable domain of TCR clone 177885 (TRAV4, TRAJ22)
CLVGDLYSGSASQLTF

SEQ ID NO: 355770 - protein, 16 aa, Homo sapiens
  CDR3 for beta chain variable domain of TCR clone 177885 (TRBV7-9, TRBJ2-1)
CASSDVAGGPYNEQFF

SEQ ID NO: 355771 - protein, 12 aa, Homo sapiens
  CDR3 for alpha chain variable domain of TCR clone 177886 (TRAV13-1, TRAJ21)
CAAKEGFNKFYF

SEQ ID NO: 355772 - protein, 22 aa, Homo sapiens
  CDR3 for beta chain variable domain of TCR clone 177886 (TRBV7-2, TRBJ2-5)
RRTRPGISVPAACQGGGETQYF

SEQ ID NO: 355773 - protein, 13 aa, Homo sapiens
  CDR3 for alpha chain variable domain of TCR clone 177887 (TRAV14/DV4, TRAJ4)
CAMKAGGYNKLIF

SEQ ID NO: 355774 - protein, 13 aa, Homo sapiens
  CDR3 for beta chain variable domain of TCR clone 177887 (TRBV4-2, TRBJ1-1)
CASSQAGNTEAFF

SEQ ID NO: 355775 - protein, 19 aa, Homo sapiens
  CDR3 for alpha chain variable domain of TCR clone 177888 (TRAV16, TRAJ40)
CITVLSMSPTTSGTYQYIF

SEQ ID NO: 355776 - protein, 12 aa, Homo sapiens
  CDR3 for beta chain variable domain of TCR clone 177888 (TRBV7-3, TRBJ2-3)
CASSSLTDTQYF

SEQ ID NO: 355777 - protein, 13 aa, Homo sapiens
  CDR3 for alpha chain variable domain of TCR clone 177889 (TRAV2, TRAJ24)
CDLQLTAGGNSSW

SEQ ID NO: 355778 - protein, 13 aa, Homo sapiens
  CDR3 for beta chain variable domain of TCR clone 177889 (TRBV7-9, TRBJ1-2)
CASSLKQNYGYTF

SEQ ID NO: 355779 - protein, 14 aa, Homo sapiens
  CDR3 for alpha chain variable domain of TCR clone 177890 (TRAV26-1, TRAJ38)
CIDDNAGNNRKLIW

SEQ ID NO: 355780 - protein, 17 aa, Homo sapiens
  CDR3 for beta chain variable domain of TCR clone 177890 (TRBV7-9, TRBJ2-3)
CASSPTVAGDLTDTQYF

SEQ ID NO: 355781 - protein, 14 aa, Homo sapiens
  CDR3 for alpha chain variable domain of TCR clone 177891 (TRAV17, TRAJ54)
CATDANQGAQKLVF

SEQ ID NO: 355782 - protein, 15 aa, Homo sapiens
  CDR3 for beta chain variable domain of TCR clone 177891 (TRBV11-3, TRBJ2-3)
CASLKDGREGDTQYF

SEQ ID NO: 355783 - protein, 14 aa, Homo sapiens
  CDR3 for alpha chain variable domain of TCR clone 177892 (TRAV12-2, TRAJ13)
CAVKKTGGHQKVTF

SEQ ID NO: 355784 - protein, 12 aa, Homo sapiens
  CDR3 for beta chain variable domain of TCR clone 177892 (TRBV12-4, TRBJ1-2)
CASSFIWLHLRF

SEQ ID NO: 355785 - protein, 15 aa, Homo sapiens
  CDR3 for alpha chain variable domain of TCR clone 177893 (TRAV26-1, TRAJ40)
CIVRVTTSGTYKYIF

SEQ ID NO: 355786 - protein, 12 aa, Homo sapiens
  CDR3 for beta chain variable domain of TCR clone 177893 (TRBV7-9, TRBJ1-4)
CASSTGREKLFF

SEQ ID NO: 355787 - protein, 12 aa, Homo sapiens
  CDR3 for alpha chain variable domain of TCR clone 177894 (TRAV12-3, TRAJ17)
CAMTLTGNKLTF

SEQ ID NO: 355788 - protein, 15 aa, Homo sapiens
  CDR3 for beta chain variable domain of TCR clone 177894 (TRBV20-1, TRBJ2-7)
CSDSGRVSGMDEQYF

SEQ ID NO: 355789 - protein, 16 aa, Homo sapiens
  CDR3 for alpha chain variable domain of TCR clone 177895 (TRAV1-1, TRAJ28)
CAVRDDSGAGSYQLTF

SEQ ID NO: 355790 - protein, 12 aa, Homo sapiens
  CDR3 for beta chain variable domain of TCR clone 177895 (TRBV11-2, TRBJ2-1)
CASSLDTQTQFF

SEQ ID NO: 355791 - protein, 16 aa, Homo sapiens
  CDR3 for alpha chain variable domain of TCR clone 177896 (TRAV3, TRAJ10)
CAVRDMRAGGGNKLTC

SEQ ID NO: 355792 - protein, 11 aa, Homo sapiens
  CDR3 for beta chain variable domain of TCR clone 177896 (TRBV29-1, TRBJ2-5)
CSEDRTGTQYF

SEQ ID NO: 355793 - protein, 13 aa, Homo sapiens
  CDR3 for alpha chain variable domain of TCR clone 177897 (TRAV8-3, TRAJ47)
CAVSMEYGNKLVF

SEQ ID NO: 355794 - protein, 14 aa, Homo sapiens
  CDR3 for beta chain variable domain of TCR clone 177897 (TRBV2, TRBJ1-5)
CASSGTGFKQPQHF

SEQ ID NO: 355795 - protein, 12 aa, Homo sapiens
  CDR3 for alpha chain variable domain of TCR clone 177898 (TRAV25, TRAJ5)
CAGGGGRRALTF

SEQ ID NO: 355796 - protein, 15 aa, Homo sapiens
  CDR3 for beta chain variable domain of TCR clone 177898 (TRBV20-1, TRBJ2-7)
CSARDRVSGTDEQYF

SEQ ID NO: 355797 - protein, 11 aa, Homo sapiens
  CDR3 for alpha chain variable domain of TCR clone 177899 (TRAV12-3, TRAJ43)
CAMSVSNDMRS

SEQ ID NO: 355798 - protein, 16 aa, Homo sapiens
  CDR3 for beta chain variable domain of TCR clone 177899 (TRBV7-7, TRBJ2-1)
CASSLASGTSYNEQFF

SEQ ID NO: 355799 - protein, 14 aa, Homo sapiens
  CDR3 for alpha chain variable domain of TCR clone 177900 (TRAV17, TRAJ57)
CATDPQGGSEKLVF

SEQ ID NO: 355800 - protein, 18 aa, Homo sapiens
  CDR3 for beta chain variable domain of TCR clone 177900 (TRBV6-6, TRBJ1-3)
CASSYSKWYSISGNTIYF

SEQ ID NO: 355801 - protein, 14 aa, Homo sapiens
  CDR3 for alpha chain variable domain of TCR clone 177901 (TRAV1-2, TRAJ16)
CAVNRLSDGQKLLF

SEQ ID NO: 355802 - protein, 14 aa, Homo sapiens
  CDR3 for beta chain variable domain of TCR clone 177901 (TRBV4-2, TRBJ1-4)
CASSPSSGNEKLFF

SEQ ID NO: 355803 - protein, 16 aa, Homo sapiens
  CDR3 for alpha chain variable domain of TCR clone 177902 (TRAV8-3, TRAJ13)
CAVGAYPSGGYQKVIF

SEQ ID NO: 355804 - protein, 14 aa, Homo sapiens
  CDR3 for beta chain variable domain of TCR clone 177902 (TRBV18, TRBJ2-5)
CASSPRASSETQYF

SEQ ID NO: 355805 - protein, 14 aa, Homo sapiens
  CDR3 for alpha chain variable domain of TCR clone 177903 (TRAV20, TRAJ10)
YAVRVEGGGNKLTF

SEQ ID NO: 355806 - protein, 13 aa, Homo sapiens
  CDR3 for beta chain variable domain of TCR clone 177903 (TRBV13, TRBJ2-2)
CASSPGLTGELFF

SEQ ID NO: 355807 - protein, 13 aa, Homo sapiens
  CDR3 for alpha chain variable domain of TCR clone 177904 (TRAV2, TRAJ29)
CAVEPSGNTPLVF

SEQ ID NO: 355808 - protein, 15 aa, Homo sapiens
  CDR3 for beta chain variable domain of TCR clone 177904 (TRBV19, TRBJ1-1)
CASTSGQIQNTEAFF

SEQ ID NO: 355809 - protein, 13 aa, Homo sapiens
  CDR3 for alpha chain variable domain of TCR clone 177905 (TRAV38-1, TRAJ42)
CARWGGSQGNLIF

SEQ ID NO: 355810 - protein, 13 aa, Homo sapiens
  CDR3 for beta chain variable domain of TCR clone 177905 (TRBV24-1, TRBJ2-1)
CATSAGPYNEQFF

SEQ ID NO: 355811 - protein, 13 aa, Homo sapiens
  CDR3 for alpha chain variable domain of TCR clone 177906 (TRAV12-2, TRAJ10)
CAVPTGGGNKPTF

SEQ ID NO: 355812 - protein, 14 aa, Homo sapiens
  CDR3 for beta chain variable domain of TCR clone 177906 (TRBV15, TRBJ2-1)
CATSGVEDYNEQFF

SEQ ID NO: 355813 - protein, 14 aa, Homo sapiens
  CDR3 for alpha chain variable domain of TCR clone 177907 (TRAV2, TRAJ37)
CAVDFTSNTVKLIF

SEQ ID NO: 355814 - protein, 16 aa, Homo sapiens
  CDR3 for beta chain variable domain of TCR clone 177907 (TRBV20-1, TRBJ1-2)
CSASMGQGVANYGYTF

SEQ ID NO: 355815 - protein, 11 aa, Homo sapiens
  CDR3 for alpha chain variable domain of TCR clone 177908 (TRAV23/DV6, TRAJ48)
CSPRWGEKLTS

SEQ ID NO: 355816 - protein, 14 aa, Homo sapiens
  CDR3 for beta chain variable domain of TCR clone 177908 (TRBV29-1, TRBJ1-3)
CSVADRVVGNTIYF

SEQ ID NO: 355817 - protein, 14 aa, Homo sapiens
  CDR3 for alpha chain variable domain of TCR clone 177909 (TRAV12-2, TRAJ45)
CAVNIGGGADGLTF

SEQ ID NO: 355818 - protein, 15 aa, Homo sapiens
  CDR3 for beta chain variable domain of TCR clone 177909 (TRBV5-1, TRBJ2-3)
CASSVTSGSTDTQYF

SEQ ID NO: 355819 - protein, 21 aa, Homo sapiens
  CDR3 for alpha chain variable domain of TCR clone 177910 (TRAV35, TRAJ52)
CWAGYADGPTAGGTSYGKLTF

SEQ ID NO: 355820 - protein, 12 aa, Homo sapiens
  CDR3 for beta chain variable domain of TCR clone 177910 (TRBV5-1, TRBJ2-7)
CASSFRGYEQYF

SEQ ID NO: 355821 - protein, 14 aa, Homo sapiens
  CDR3 for alpha chain variable domain of TCR clone 177911 (TRAV17, TRAJ15)
CATDRGQAGTALIV

SEQ ID NO: 355822 - protein, 17 aa, Homo sapiens
  CDR3 for beta chain variable domain of TCR clone 177911 (TRBV29-1, TRBJ2-1)
CSVVGLAGAYSYNEQFF

SEQ ID NO: 355823 - protein, 13 aa, Homo sapiens
  CDR3 for alpha chain variable domain of TCR clone 177912 (TRAV12-3, TRAJ7)
CAMSASGNNRLAF

SEQ ID NO: 355824 - protein, 13 aa, Homo sapiens
  CDR3 for beta chain variable domain of TCR clone 177912 (TRBV7-3, TRBJ1-1)
CASSLTQGTEAFF

SEQ ID NO: 355825 - protein, 13 aa, Homo sapiens
  CDR3 for alpha chain variable domain of TCR clone 177913 (TRAV20, TRAJ35)
CAVQKGFGNVLHC

SEQ ID NO: 355826 - protein, 14 aa, Homo sapiens
  CDR3 for beta chain variable domain of TCR clone 177913 (TRBV5-1, TRBJ1-1)
CASSSATGGTEAFF

SEQ ID NO: 355827 - protein, 12 aa, Homo sapiens
  CDR3 for alpha chain variable domain of TCR clone 177914 (TRAV2, TRAJ33)
WAFMDSNYQLIW

SEQ ID NO: 355828 - protein, 16 aa, Homo sapiens
  CDR3 for beta chain variable domain of TCR clone 177914 (TRBV2, TRBJ2-7)
CASSEPWTGPSYEQYF

SEQ ID NO: 355829 - protein, 11 aa, Homo sapiens
  CDR3 for alpha chain variable domain of TCR clone 177915 (TRAV3, TRAJ17)
CAEAAGNKLTF

SEQ ID NO: 355830 - protein, 12 aa, Homo sapiens
  CDR3 for beta chain variable domain of TCR clone 177915 (TRBV7-9, TRBJ1-4)
CASSTDREKLFF

SEQ ID NO: 355831 - protein, 14 aa, Homo sapiens
  CDR3 for alpha chain variable domain of TCR clone 177916 (TRAV13-1, TRAJ21)
CAAKEGFNKFYLDL

SEQ ID NO: 355832 - protein, 20 aa, Homo sapiens
  CDR3 for beta chain variable domain of TCR clone 177916 (TRBV28, TRBJ2-1)
CASTPIGRSPGLAGGNEQFF

SEQ ID NO: 355833 - protein, 15 aa, Homo sapiens
  CDR3 for alpha chain variable domain of TCR clone 177917 (TRAV13-1, TRAJ17)
CAASIERAAGNKLTF

SEQ ID NO: 355834 - protein, 15 aa, Homo sapiens
  CDR3 for beta chain variable domain of TCR clone 177917 (TRBV18, TRBJ2-1)
CASSPPSASYNEQFF

SEQ ID NO: 355835 - protein, 14 aa, Homo sapiens
  CDR3 for alpha chain variable domain of TCR clone 177918 (TRAV29/DV5, TRAJ44)
CAASAPGTASKLTF

SEQ ID NO: 355836 - protein, 14 aa, Homo sapiens
  CDR3 for beta chain variable domain of TCR clone 177918 (TRBV7-2, TRBJ2-7)
CASSPKTSFYEQYF

SEQ ID NO: 355837 - protein, 13 aa, Homo sapiens
  CDR3 for alpha chain variable domain of TCR clone 177919 (TRAV17, TRAJ9)
CATGSTGGFKTIF

SEQ ID NO: 355838 - protein, 13 aa, Homo sapiens
  CDR3 for beta chain variable domain of TCR clone 177919 (TRBV4-2, TRBJ1-1)
CASSQAGNTEAFF

SEQ ID NO: 355839 - protein, 12 aa, Homo sapiens
  CDR3 for alpha chain variable domain of TCR clone 177920 (TRAV21, TRAJ31)
CAVWGNNARLMF

SEQ ID NO: 355840 - protein, 14 aa, Homo sapiens
  CDR3 for beta chain variable domain of TCR clone 177920 (TRBV7-7, TRBJ2-2)
CATRQDSDTGELFF

SEQ ID NO: 355841 - protein, 14 aa, Homo sapiens
  CDR3 for alpha chain variable domain of TCR clone 177921 (TRAV1-2, TRAJ16)
CAVNRFSDGQKLLF

SEQ ID NO: 355842 - protein, 13 aa, Homo sapiens
  CDR3 for beta chain variable domain of TCR clone 177921 (TRBV7-3, TRBJ2-1)
CQQLSGGTNEQFF

SEQ ID NO: 355843 - protein, 15 aa, Homo sapiens
  CDR3 for alpha chain variable domain of TCR clone 177922 (TRAV23/DV6, TRAJ30)
CAASSQESRDDKIIF

SEQ ID NO: 355844 - protein, 15 aa, Homo sapiens
  CDR3 for beta chain variable domain of TCR clone 177922 (TRBV12-4, TRBJ1-2)
CASSPITGGGYGYTF

SEQ ID NO: 355845 - protein, 13 aa, Homo sapiens
  CDR3 for alpha chain variable domain of TCR clone 177923 (TRAV25, TRAJ54)
CAGTIQGAQKLVF

SEQ ID NO: 355846 - protein, 15 aa, Homo sapiens
  CDR3 for beta chain variable domain of TCR clone 177923 (TRBV19, TRBJ1-5)
CASSILTGENQTQHC

SEQ ID NO: 355847 - protein, 14 aa, Homo sapiens
  CDR3 for alpha chain variable domain of TCR clone 177924 (TRAV1-1, TRAJ27)
CAVIHNTNAVKSTF

SEQ ID NO: 355848 - protein, 15 aa, Homo sapiens
  CDR3 for beta chain variable domain of TCR clone 177924 (TRBV7-2, TRBJ2-1)
CASSSGLAGGNEQFF

SEQ ID NO: 355849 - protein, 17 aa, Homo sapiens
  CDR3 for alpha chain variable domain of TCR clone 177925 (TRAV3, TRAJ6)
CAVRDGPRAGGSYIPTF

SEQ ID NO: 355850 - protein, 18 aa, Homo sapiens
  CDR3 for beta chain variable domain of TCR clone 177925 (TRBV11-2, TRBJ2-1)
CASSTTPGPSGANNEQFF

SEQ ID NO: 355851 - protein, 14 aa, Homo sapiens
  CDR3 for alpha chain variable domain of TCR clone 177926 (TRAV1-2, TRAJ8)
CAVREDTGFQKLVF

SEQ ID NO: 355852 - protein, 14 aa, Homo sapiens
  CDR3 for beta chain variable domain of TCR clone 177926 (TRBV19, TRBJ1-5)
CASSLGTGGQPQHF

SEQ ID NO: 355853 - protein, 14 aa, Homo sapiens
  CDR3 for alpha chain variable domain of TCR clone 177927 (TRAV16, TRAJ29)
CALTRNSGNTPLVF

SEQ ID NO: 355854 - protein, 15 aa, Homo sapiens
  CDR3 for beta chain variable domain of TCR clone 177927 (TRBV12-4, TRBJ2-5)
CASSPPTGLQETQYF

SEQ ID NO: 355855 - protein, 13 aa, Homo sapiens
  CDR3 for alpha chain variable domain of TCR clone 177928 (TRAV1-1, TRAJ28)
CVTSGAGSYQLTF

SEQ ID NO: 355856 - protein, 10 aa, Homo sapiens
  CDR3 for beta chain variable domain of TCR clone 177928 (TRBV18, TRBJ2-2)
CASSQRSSGQ

SEQ ID NO: 355857 - protein, 14 aa, Homo sapiens
  CDR3 for alpha chain variable domain of TCR clone 177929 (TRAV17, TRAJ16)
CATADFSDGQKLLF

SEQ ID NO: 355858 - protein, 15 aa, Homo sapiens
  CDR3 for beta chain variable domain of TCR clone 177929 (TRBV6-5, TRBJ2-1)
CASSYDAGAGNEKFF

SEQ ID NO: 355859 - protein, 15 aa, Homo sapiens
  CDR3 for alpha chain variable domain of TCR clone 177930 (TRAV23/DV6, TRAJ13)
CAAWPGGGGYQKVTF

SEQ ID NO: 355860 - protein, 17 aa, Homo sapiens
  CDR3 for beta chain variable domain of TCR clone 177930 (TRBV19, TRBJ2-7)
CSSSISFYDSYPYEQYF

SEQ ID NO: 355861 - protein, 11 aa, Homo sapiens
  CDR3 for alpha chain variable domain of TCR clone 177931 (TRAV8-3, TRAJ49)
CAVNTGNQFYF

SEQ ID NO: 355862 - protein, 13 aa, Homo sapiens
  CDR3 for beta chain variable domain of TCR clone 177931 (TRBV7-3, TRBJ1-1)
CASSQDWGAEAFF

SEQ ID NO: 355863 - protein, 13 aa, Homo sapiens
  CDR3 for alpha chain variable domain of TCR clone 177932 (TRAV8-3, TRAJ39)
CAVGANNAATCSP

SEQ ID NO: 355864 - protein, 12 aa, Homo sapiens
  CDR3 for beta chain variable domain of TCR clone 177932 (TRBV11-3, TRBJ1-1)
CASSHRQGEAFF

SEQ ID NO: 355865 - protein, 15 aa, Homo sapiens
  CDR3 for alpha chain variable domain of TCR clone 177933 (TRAV26-1, TRAJ17)
CIVRVVKAAGNNLTF

SEQ ID NO: 355866 - protein, 16 aa, Homo sapiens
  CDR3 for beta chain variable domain of TCR clone 177933 (TRBV7-9, TRBJ2-1)
CASSLVSGPSYNEQFF

SEQ ID NO: 355867 - protein, 14 aa, Homo sapiens
  CDR3 for alpha chain variable domain of TCR clone 177934 (TRAV1-2, TRAJ16)
CAVNRFSDGQKLLF

SEQ ID NO: 355868 - protein, 13 aa, Homo sapiens
  CDR3 for beta chain variable domain of TCR clone 177934 (TRBV10-3, TRBJ2-7)
CASKRAVNYERYF

SEQ ID NO: 355869 - protein, 14 aa, Homo sapiens
  CDR3 for alpha chain variable domain of TCR clone 177935 (TRAV3, TRAJ22)
CAVRDYGSARQLTF

SEQ ID NO: 355870 - protein, 13 aa, Homo sapiens
  CDR3 for beta chain variable domain of TCR clone 177935 (TRBV11-2, TRBJ2-5)
CASGHGAKETQSF

SEQ ID NO: 355871 - protein, 13 aa, Homo sapiens
  CDR3 for alpha chain variable domain of TCR clone 177936 (TRAV2, TRAJ29)
CAAQNSGNTPLVF

SEQ ID NO: 355872 - protein, 14 aa, Homo sapiens
  CDR3 for beta chain variable domain of TCR clone 177936 (TRBV7-9, TRBJ2-4)
CASSLAMGGNIKYF

SEQ ID NO: 355873 - protein, 11 aa, Homo sapiens
  CDR3 for alpha chain variable domain of TCR clone 177937 (TRAV12-2, TRAJ31)
CAVTRWARLMF

SEQ ID NO: 355874 - protein, 16 aa, Homo sapiens
  CDR3 for beta chain variable domain of TCR clone 177937 (TRBV19, TRBJ2-2)
CASRSPGTGATGELFF

SEQ ID NO: 355875 - protein, 12 aa, Homo sapiens
  CDR3 for alpha chain variable domain of TCR clone 177938 (TRAV16, TRAJ26)
CSLRSYGQNFVF

SEQ ID NO: 355876 - protein, 14 aa, Homo sapiens
  CDR3 for beta chain variable domain of TCR clone 177938 (TRBV10-3, TRBJ2-1)
CAISSDLAYNEHFF

SEQ ID NO: 355877 - protein, 14 aa, Homo sapiens
  CDR3 for alpha chain variable domain of TCR clone 177939 (TRAV17, TRAJ53)
CATDAGGSNYKLTF

SEQ ID NO: 355878 - protein, 16 aa, Homo sapiens
  CDR3 for beta chain variable domain of TCR clone 177939 (TRBV4-1, TRBJ1-1)
CASRQDAGMGNTEAFF

SEQ ID NO: 355879 - protein, 14 aa, Homo sapiens
  CDR3 for alpha chain variable domain of TCR clone 177940 (TRAV12-2, TRAJ29)
CAVIRNSGNTPLVF

SEQ ID NO: 355880 - protein, 15 aa, Homo sapiens
  CDR3 for beta chain variable domain of TCR clone 177940 (TRBV5-1, TRBJ1-2)
CASSYPGTGSSGYTF

SEQ ID NO: 355881 - protein, 17 aa, Homo sapiens
  CDR3 for alpha chain variable domain of TCR clone 177941 (TRAV12-2, TRAJ48)
CASNEKLTFGTGTRLTI

SEQ ID NO: 355882 - protein, 15 aa, Homo sapiens
  CDR3 for beta chain variable domain of TCR clone 177941 (TRBV5-1, TRBJ2-1)
CASSQAAYWWNEQFF

SEQ ID NO: 355883 - protein, 15 aa, Homo sapiens
  CDR3 for alpha chain variable domain of TCR clone 177942 (TRAV26-1, TRAJ48)
CIARWSWFGNEILTF

SEQ ID NO: 355884 - protein, 12 aa, Homo sapiens
  CDR3 for beta chain variable domain of TCR clone 177942 (TRBV19, TRBJ2-5)
CASSISEETQYF

SEQ ID NO: 355885 - protein, 16 aa, Homo sapiens
  CDR3 for alpha chain variable domain of TCR clone 177943 (TRAV3, TRAJ10)
CAVRDMRTGGGNKLTF

SEQ ID NO: 355886 - protein, 14 aa, Homo sapiens
  CDR3 for beta chain variable domain of TCR clone 177943 (TRBV7-2, TRBJ1-4)
CASSVVEGGEKLFF

SEQ ID NO: 355887 - protein, 12 aa, Homo sapiens
  CDR3 for alpha chain variable domain of TCR clone 177944 (TRAV26-1, TRAJ17)
CIVGSAGNKLTF

SEQ ID NO: 355888 - protein, 13 aa, Homo sapiens
  CDR3 for beta chain variable domain of TCR clone 177944 (TRBV5-5, TRBJ2-7)
CASSSQTRQRQYF

SEQ ID NO: 355889 - protein, 12 aa, Homo sapiens
  CDR3 for alpha chain variable domain of TCR clone 177945 (TRAV4, TRAJ21)
CLVGDNFNKFYF

SEQ ID NO: 355890 - protein, 17 aa, Homo sapiens
  CDR3 for beta chain variable domain of TCR clone 177945 (TRBV3-1, TRBJ2-7)
CASSQDLTGLSSYEQYF

SEQ ID NO: 355891 - protein, 11 aa, Homo sapiens
  CDR3 for alpha chain variable domain of TCR clone 177946 (TRAV3, TRAJ21)
CAVGNFNKFYF

SEQ ID NO: 355892 - protein, 13 aa, Homo sapiens
  CDR3 for beta chain variable domain of TCR clone 177946 (TRBV7-9, TRBJ1-2)
CASSPSNFWGYTF

SEQ ID NO: 355893 - protein, 17 aa, Homo sapiens
  CDR3 for alpha chain variable domain of TCR clone 177947 (TRAV3, TRAJ12)
CAVGDGGRMDSSYKLIF

SEQ ID NO: 355894 - protein, 13 aa, Homo sapiens
  CDR3 for beta chain variable domain of TCR clone 177947 (TRBV7-9, TRBJ2-5)
CASLPSGRETQYF

SEQ ID NO: 355895 - protein, 14 aa, Homo sapiens
  CDR3 for alpha chain variable domain of TCR clone 177948 (TRAV17, TRAJ16)
CATADFSDGQKLLF

SEQ ID NO: 355896 - protein, 12 aa, Homo sapiens
  CDR3 for beta chain variable domain of TCR clone 177948 (TRBV24-1, TRBJ1-1)
CATLFPDTEAFF

SEQ ID NO: 355897 - protein, 13 aa, Homo sapiens
  CDR3 for alpha chain variable domain of TCR clone 177949 (TRAV12-3, TRAJ7)
CAMSASGYNRLAF

SEQ ID NO: 355898 - protein, 14 aa, Homo sapiens
  CDR3 for beta chain variable domain of TCR clone 177949 (TRBV13, TRBJ2-5)
CASSLGPRGETQYF

SEQ ID NO: 355899 - protein, 12 aa, Homo sapiens
  CDR3 for alpha chain variable domain of TCR clone 177950 (TRAV13-2, TRAJ8)
CAPWLGFQKLVF

SEQ ID NO: 355900 - protein, 14 aa, Homo sapiens
  CDR3 for beta chain variable domain of TCR clone 177950 (TRBV18, TRBJ1-5)
CASSRQQRNQPQQF

SEQ ID NO: 355901 - protein, 12 aa, Homo sapiens
  CDR3 for alpha chain variable domain of TCR clone 177951 (TRAV21, TRAJ34)
CAAPYNTDKLIF

SEQ ID NO: 355902 - protein, 16 aa, Homo sapiens
  CDR3 for beta chain variable domain of TCR clone 177951 (TRBV12-4, TRBJ2-5)
CASSFFVRGRQETQYF

SEQ ID NO: 355903 - protein, 12 aa, Homo sapiens
  CDR3 for alpha chain variable domain of TCR clone 177952 (TRAV13-1, TRAJ48)
CASNFGHEKLTF

SEQ ID NO: 355904 - protein, 13 aa, Homo sapiens
  CDR3 for beta chain variable domain of TCR clone 177952 (TRBV7-3, TRBJ1-1)
CASSQDWGAEAFF

SEQ ID NO: 355905 - protein, 15 aa, Homo sapiens
  CDR3 for alpha chain variable domain of TCR clone 177953 (TRAV26-1, TRAJ40)
CIVSFATSGTYTYIF

SEQ ID NO: 355906 - protein, 15 aa, Homo sapiens
  CDR3 for beta chain variable domain of TCR clone 177953 (TRBV5-7, TRBJ2-3)
CASSPGLATTDTQYF

SEQ ID NO: 355907 - protein, 16 aa, Homo sapiens
  CDR3 for alpha chain variable domain of TCR clone 177954 (TRAV8-1, TRAJ42)
CAVTSRYGGSEGNLIF

SEQ ID NO: 355908 - protein, 12 aa, Homo sapiens
  CDR3 for beta chain variable domain of TCR clone 177954 (TRBV6-3, TRBJ2-7)
CASSLGRRGLYF

SEQ ID NO: 355909 - protein, 17 aa, Homo sapiens
  CDR3 for alpha chain variable domain of TCR clone 177955 (TRAV8-6, TRAJ8)
CAVKEGIENTGFQKIVF

SEQ ID NO: 355910 - protein, 12 aa, Homo sapiens
  CDR3 for beta chain variable domain of TCR clone 177955 (TRBV19, TRBJ1-4)
CASMDWPGGLFF

SEQ ID NO: 355911 - protein, 14 aa, Homo sapiens
  CDR3 for alpha chain variable domain of TCR clone 177956 (TRAV4, TRAJ17)
CLVGDMAAGNKLTF

SEQ ID NO: 355912 - protein, 14 aa, Homo sapiens
  CDR3 for beta chain variable domain of TCR clone 177956 (TRBV7-2, TRBJ2-5)
CASSTGGELKTQYF

SEQ ID NO: 355913 - protein, 15 aa, Homo sapiens
  CDR3 for alpha chain variable domain of TCR clone 177957 (TRAV13-1, TRAJ27)
CAARELNTNAGKSTF

SEQ ID NO: 355914 - protein, 14 aa, Homo sapiens
  CDR3 for beta chain variable domain of TCR clone 177957 (TRBV6-5, TRBJ1-2)
CASSYTRDRGRYSF

SEQ ID NO: 355915 - protein, 14 aa, Homo sapiens
  CDR3 for alpha chain variable domain of TCR clone 177958 (TRAV1-2, TRAJ8)
CAVRGDTGFQKLVF

SEQ ID NO: 355916 - protein, 14 aa, Homo sapiens
  CDR3 for beta chain variable domain of TCR clone 177958 (TRBV7-9, TRBJ2-5)
CASSLDTAQETQYF

SEQ ID NO: 355917 - protein, 14 aa, Homo sapiens
  CDR3 for alpha chain variable domain of TCR clone 177959 (TRAV13-1, TRAJ44)
CAAKATGTASKLTF

SEQ ID NO: 355918 - protein, 13 aa, Homo sapiens
  CDR3 for beta chain variable domain of TCR clone 177959 (TRBV5-5, TRBJ1-2)
CASSFWRGEVYTF

SEQ ID NO: 355919 - protein, 15 aa, Homo sapiens
  CDR3 for alpha chain variable domain of TCR clone 177960 (TRAV8-3, TRAJ15)
CAVVSPNQAGTALIF

SEQ ID NO: 355920 - protein, 14 aa, Homo sapiens
  CDR3 for beta chain variable domain of TCR clone 177960 (TRBV20-1, TRBJ2-1)
CSPNDEASYNEQFF

SEQ ID NO: 355921 - protein, 15 aa, Homo sapiens
  CDR3 for alpha chain variable domain of TCR clone 177961 (TRAV20, TRAJ39)
CAVQALLVAGNMLTF

SEQ ID NO: 355922 - protein, 13 aa, Homo sapiens
  CDR3 for beta chain variable domain of TCR clone 177961 (TRBV10-3, TRBJ2-7)
CASKRAVNYEQYF

SEQ ID NO: 355923 - protein, 11 aa, Homo sapiens
  CDR3 for alpha chain variable domain of TCR clone 177962 (TRAV30, TRAJ23)
CGTEIAAKLIF

SEQ ID NO: 355924 - protein, 16 aa, Homo sapiens
  CDR3 for beta chain variable domain of TCR clone 177962 (TRBV7-2, TRBJ2-7)
CASTSQAASGGYEQYF

SEQ ID NO: 355925 - protein, 22 aa, Homo sapiens
  CDR3 for alpha chain variable domain of TCR clone 177963 (TRAV30, TRAJ48)
TASQLSYSGTCFCGIGNEKLTF

SEQ ID NO: 355926 - protein, 16 aa, Homo sapiens
  CDR3 for beta chain variable domain of TCR clone 177963 (TRBV27, TRBJ2-1)
SMNVEPGTSGDNEQFF

SEQ ID NO: 355927 - protein, 23 aa, Homo sapiens
  CDR3 for alpha chain variable domain of TCR clone 177964 (TRAV20, TRAJ32)
CAVDGMVVLQTSSSLELALCLLF

SEQ ID NO: 355928 - protein, 16 aa, Homo sapiens
  CDR3 for beta chain variable domain of TCR clone 177964 (TRBV19, TRBJ2-2)
CASRSPGTGATGELFF

SEQ ID NO: 355929 - protein, 12 aa, Homo sapiens
  CDR3 for alpha chain variable domain of TCR clone 177965 (TRAV17, TRAJ53)
YAFGGSNYKLTF

SEQ ID NO: 355930 - protein, 14 aa, Homo sapiens
  CDR3 for beta chain variable domain of TCR clone 177965 (TRBV15, TRBJ2-5)
CATSIGGLGETQYF

SEQ ID NO: 355931 - protein, 15 aa, Homo sapiens
  CDR3 for alpha chain variable domain of TCR clone 177966 (TRAV1-2, TRAJ30)
CAVRPHGNRDDKIIF

SEQ ID NO: 355932 - protein, 14 aa, Homo sapiens
  CDR3 for beta chain variable domain of TCR clone 177966 (TRBV4-2, TRBJ2-1)
CASGLDRAYNEQFF

SEQ ID NO: 355933 - protein, 14 aa, Homo sapiens
  CDR3 for alpha chain variable domain of TCR clone 177967 (TRAV1-2, TRAJ24)
CAVLTTDSWGKFQF

SEQ ID NO: 355934 - protein, 13 aa, Homo sapiens
  CDR3 for beta chain variable domain of TCR clone 177967 (TRBV6-5, TRBJ1-2)
CASSSYGTHGYTF

SEQ ID NO: 355935 - protein, 15 aa, Homo sapiens
  CDR3 for alpha chain variable domain of TCR clone 177968 (TRAV34, TRAJ38)
CGADFTPGNNRKLIW

SEQ ID NO: 355936 - protein, 15 aa, Homo sapiens
  CDR3 for beta chain variable domain of TCR clone 177968 (TRBV5-1, TRBJ2-2)
CASSSQGGNTGELFF

SEQ ID NO: 355937 - protein, 10 aa, Homo sapiens
  CDR3 for alpha chain variable domain of TCR clone 177969 (TRAV23/DV6, TRAJ57)
CAASSTLPQG

SEQ ID NO: 355938 - protein, 14 aa, Homo sapiens
  CDR3 for beta chain variable domain of TCR clone 177969 (TRBV20-1, TRBJ2-7)
CSAKRGRSSYEQYF

SEQ ID NO: 355939 - protein, 12 aa, Homo sapiens
  CDR3 for alpha chain variable domain of TCR clone 177970 (TRAV8-4, TRAJ37)
CAKSSNTGKLIF

SEQ ID NO: 355940 - protein, 13 aa, Homo sapiens
  CDR3 for beta chain variable domain of TCR clone 177970 (TRBV7-8, TRBJ2-7)
RRVRLTEMGEQYF

SEQ ID NO: 355941 - protein, 11 aa, Homo sapiens
  CDR3 for alpha chain variable domain of TCR clone 177971 (TRAV21, TRAJ34)
FAHYNTDKLIF

SEQ ID NO: 355942 - protein, 13 aa, Homo sapiens
  CDR3 for beta chain variable domain of TCR clone 177971 (TRBV19, TRBJ1-3)
CASRLSLGNTIYF

SEQ ID NO: 355943 - protein, 14 aa, Homo sapiens
  CDR3 for alpha chain variable domain of TCR clone 177972 (TRAV25, TRAJ35)
CARRMEGFGNVLHC

SEQ ID NO: 355944 - protein, 13 aa, Homo sapiens
  CDR3 for beta chain variable domain of TCR clone 177972 (TRBV7-2, TRBJ1-4)
CASRLAGLEKLFF

SEQ ID NO: 355945 - protein, 17 aa, Homo sapiens
  CDR3 for alpha chain variable domain of TCR clone 177973 (TRAV3, TRAJ6)
CAVRDGPRAGGSYIPTF

SEQ ID NO: 355946 - protein, 13 aa, Homo sapiens
  CDR3 for beta chain variable domain of TCR clone 177973 (TRBV27, TRBJ2-1)
CASRTRGIGEQFF

SEQ ID NO: 355947 - protein, 14 aa, Homo sapiens
  CDR3 for alpha chain variable domain of TCR clone 177974 (TRAV29/DV5, TRAJ36)
CAARRKNGANNLFF

SEQ ID NO: 355948 - protein, 15 aa, Homo sapiens
  CDR3 for beta chain variable domain of TCR clone 177974 (TRBV20-1, TRBJ2-7)
CSARDRVSGMDEQYF

SEQ ID NO: 355949 - protein, 13 aa, Homo sapiens
  CDR3 for alpha chain variable domain of TCR clone 177975 (TRAV27, TRAJ45)
CRSSGGGDDGLTF

SEQ ID NO: 355950 - protein, 17 aa, Homo sapiens
  CDR3 for beta chain variable domain of TCR clone 177975 (TRBV10-3, TRBJ2-4)
CTSVPSVNKGSKNMQYF

SEQ ID NO: 355951 - protein, 14 aa, Homo sapiens
  CDR3 for alpha chain variable domain of TCR clone 177976 (TRAV27, TRAJ45)
CAGAQEEVLKDAPL

SEQ ID NO: 355952 - protein, 15 aa, Homo sapiens
  CDR3 for beta chain variable domain of TCR clone 177976 (TRBV20-1, TRBJ2-7)
CSARDRVSGMDEQYF

SEQ ID NO: 355953 - protein, 14 aa, Homo sapiens
  CDR3 for alpha chain variable domain of TCR clone 177977 (TRAV26-1, TRAJ39)
LIVFTNNAGNMLTF

SEQ ID NO: 355954 - protein, 15 aa, Homo sapiens
  CDR3 for beta chain variable domain of TCR clone 177977 (TRBV19, TRBJ2-4)
CASSLTGLTKNIQYF

SEQ ID NO: 355955 - protein, 11 aa, Homo sapiens
  CDR3 for alpha chain variable domain of TCR clone 177978 (TRAV29/DV5, TRAJ37)
CSTSNTGKLIF

SEQ ID NO: 355956 - protein, 13 aa, Homo sapiens
  CDR3 for beta chain variable domain of TCR clone 177978 (TRBV12-4, TRBJ2-3)
CASSSPLGGTQYF

SEQ ID NO: 355957 - protein, 14 aa, Homo sapiens
  CDR3 for alpha chain variable domain of TCR clone 177979 (TRAV34, TRAJ44)
CGADGTGTASKLTF

SEQ ID NO: 355958 - protein, 16 aa, Homo sapiens
  CDR3 for beta chain variable domain of TCR clone 177979 (TRBV27, TRBJ2-7)
CASSSERRDSAYEQYF

SEQ ID NO: 355959 - protein, 10 aa, Homo sapiens
  CDR3 for alpha chain variable domain of TCR clone 177980 (TRAV30, TRAJ48)
CGIGNEKLTF

SEQ ID NO: 355960 - protein, 15 aa, Homo sapiens
  CDR3 for beta chain variable domain of TCR clone 177980 (TRBV28, TRBJ2-5)
CAISPPWSYQETQYF

SEQ ID NO: 355961 - protein, 16 aa, Homo sapiens
  CDR3 for alpha chain variable domain of TCR clone 177981 (TRAV13-1, TRAJ38)
CAASTSNAGNNRKLSW

SEQ ID NO: 355962 - protein, 15 aa, Homo sapiens
  CDR3 for beta chain variable domain of TCR clone 177981 (TRBV27, TRBJ2-1)
CASSNGGGSSNEQFF

SEQ ID NO: 355963 - protein, 15 aa, Homo sapiens
  CDR3 for alpha chain variable domain of TCR clone 177982 (TRAV3, TRAJ4)
CAVRDGTGGYNKLIF

SEQ ID NO: 355964 - protein, 16 aa, Homo sapiens
  CDR3 for beta chain variable domain of TCR clone 177982 (TRBV7-2, TRBJ2-5)
CASSPRGRGGGETQYL

SEQ ID NO: 355965 - protein, 19 aa, Homo sapiens
  CDR3 for alpha chain variable domain of TCR clone 177983 (TRAV26-2, TRAJ50)
CCVLLHPERRETSYDKVIF

SEQ ID NO: 355966 - protein, 16 aa, Homo sapiens
  CDR3 for beta chain variable domain of TCR clone 177983 (TRBV9, TRBJ2-1)
CASSVGGGGNYNEQFF

SEQ ID NO: 355967 - protein, 14 aa, Homo sapiens
  CDR3 for alpha chain variable domain of TCR clone 177984 (TRAV12-2, TRAJ33)
CPVDYPDSNYQLIW

SEQ ID NO: 355968 - protein, 16 aa, Homo sapiens
  CDR3 for beta chain variable domain of TCR clone 177984 (TRBV19, TRBJ2-1)
CASSKAGPSSYNERFF

SEQ ID NO: 355969 - protein, 19 aa, Homo sapiens
  CDR3 for alpha chain variable domain of TCR clone 177985 (TRAV8-4, )
CAGGEDIQNPDPDVYQLRD

SEQ ID NO: 355970 - protein, 15 aa, Homo sapiens
  CDR3 for beta chain variable domain of TCR clone 177985 (TRBV7-2, TRBJ2-1)
CASRKTGSSYNEQFF

SEQ ID NO: 355971 - protein, 15 aa, Homo sapiens
  CDR3 for alpha chain variable domain of TCR clone 177986 (TRAV26-1, TRAJ44)
CIVRIGTGTASKLTF

SEQ ID NO: 355972 - protein, 19 aa, Homo sapiens
  CDR3 for beta chain variable domain of TCR clone 177986 (TRBV28, TRBJ2-7)
CASSYSGTSRLGWVYEQYF

SEQ ID NO: 355973 - protein, 14 aa, Homo sapiens
  CDR3 for alpha chain variable domain of TCR clone 177987 (TRAV8-1, TRAJ5)
CAVRTDTGRRALTF

SEQ ID NO: 355974 - protein, 14 aa, Homo sapiens
  CDR3 for beta chain variable domain of TCR clone 177987 (TRBV11-2, TRBJ2-3)
CASSRLARTDTQYF

SEQ ID NO: 355975 - protein, 14 aa, Homo sapiens
  CDR3 for alpha chain variable domain of TCR clone 177988 (TRAV1-1, TRAJ27)
CAVIYNNNAGKSTF

SEQ ID NO: 355976 - protein, 15 aa, Homo sapiens
  CDR3 for beta chain variable domain of TCR clone 177988 (TRBV6-3, TRBJ2-7)
CASSSPGTVFYEQYF

SEQ ID NO: 355977 - protein, 16 aa, Homo sapiens
  CDR3 for alpha chain variable domain of TCR clone 177989 (TRAV30, TRAJ24)
CGTEIVDADSWGKFQF

SEQ ID NO: 355978 - protein, 13 aa, Homo sapiens
  CDR3 for beta chain variable domain of TCR clone 177989 (TRBV20-1, TRBJ1-1)
CSARGGGNTETFF

SEQ ID NO: 355979 - protein, 10 aa, Homo sapiens
  CDR3 for alpha chain variable domain of TCR clone 177990 (TRAV16, TRAJ22)
SAMYLRQLTF

SEQ ID NO: 355980 - protein, 14 aa, Homo sapiens
  CDR3 for beta chain variable domain of TCR clone 177990 (TRBV7-9, TRBJ1-1)
CASSSTKGNTEAFF

SEQ ID NO: 355981 - protein, 16 aa, Homo sapiens
  CDR3 for alpha chain variable domain of TCR clone 177991 (TRAV30, TRAJ24)
CGTEMVDDDSWGKFQF

SEQ ID NO: 355982 - protein, 14 aa, Homo sapiens
  CDR3 for beta chain variable domain of TCR clone 177991 (TRBV12-5, TRBJ2-5)
CASGSRTHQETQYF

SEQ ID NO: 355983 - protein, 14 aa, Homo sapiens
  CDR3 for alpha chain variable domain of TCR clone 177992 (TRAV17, TRAJ54)
CATDANQGAQKLVF

SEQ ID NO: 355984 - protein, 16 aa, Homo sapiens
  CDR3 for beta chain variable domain of TCR clone 177992 (TRBV12-5, TRBJ2-5)
CASGPRTSGNQETQYF

SEQ ID NO: 355985 - protein, 15 aa, Homo sapiens
  CDR3 for alpha chain variable domain of TCR clone 177993 (TRAV21, TRAJ53)
CATLNSGGSNYKLTF

SEQ ID NO: 355986 - protein, 12 aa, Homo sapiens
  CDR3 for beta chain variable domain of TCR clone 177993 (TRBV7-8, TRBJ2-7)
CASSLAGYEQYF

SEQ ID NO: 355987 - protein, 14 aa, Homo sapiens
  CDR3 for alpha chain variable domain of TCR clone 177994 (TRAV13-2, TRAJ10)
CAATFTGGGNKLTF

SEQ ID NO: 355988 - protein, 16 aa, Homo sapiens
  CDR3 for beta chain variable domain of TCR clone 177994 (TRBV18, TRBJ2-7)
CASSPRSQGISYEQYF

SEQ ID NO: 355989 - protein, 15 aa, Homo sapiens
  CDR3 for alpha chain variable domain of TCR clone 177995 (TRAV21, TRAJ24)
CAARSSTDSWGKLQF

SEQ ID NO: 355990 - protein, 18 aa, Homo sapiens
  CDR3 for beta chain variable domain of TCR clone 177995 (TRBV11-2, TRBJ2-7)
CASSWRTVQTGQSYEQYF

SEQ ID NO: 355991 - protein, 13 aa, Homo sapiens
  CDR3 for alpha chain variable domain of TCR clone 177996 (TRAV12-2, TRAJ6)
CAVNVSRKLHTYI

SEQ ID NO: 355992 - protein, 14 aa, Homo sapiens
  CDR3 for beta chain variable domain of TCR clone 177996 (TRBV7-9, TRBJ2-7)
CASSSRLVLHEQYF

SEQ ID NO: 355993 - protein, 13 aa, Homo sapiens
  CDR3 for alpha chain variable domain of TCR clone 177997 (TRAV8-6, TRAJ50)
CAVIKTSYDKVIF

SEQ ID NO: 355994 - protein, 14 aa, Homo sapiens
  CDR3 for beta chain variable domain of TCR clone 177997 (TRBV19, TRBJ2-1)
CATSQGDTYNEQFF

SEQ ID NO: 355995 - protein, 13 aa, Homo sapiens
  CDR3 for alpha chain variable domain of TCR clone 177998 (TRAV39, TRAJ33)
CAANPDSNYQLIW

SEQ ID NO: 355996 - protein, 13 aa, Homo sapiens
  CDR3 for beta chain variable domain of TCR clone 177998 (TRBV18, TRBJ1-1)
CASSGGRNTEAFS

SEQ ID NO: 355997 - protein, 23 aa, Homo sapiens
  CDR3 for alpha chain variable domain of TCR clone 177999 (TRAV9-2, TRAJ4)
CQTQRCTSVLWAIRSGGYNKLIF

SEQ ID NO: 355998 - protein, 12 aa, Homo sapiens
  CDR3 for beta chain variable domain of TCR clone 177999 (TRBV11-2, TRBJ2-2)
CASSLGGGELFF

SEQ ID NO: 355999 - protein, 14 aa, Homo sapiens
  CDR3 for alpha chain variable domain of TCR clone 178000 (TRAV29/DV5, TRAJ36)
CAARSKTGANNLFF

SEQ ID NO: 356000 - protein, 12 aa, Homo sapiens
  CDR3 for beta chain variable domain of TCR clone 178000 (TRBV12-5, TRBJ2-5)
CASGQGVETQYF

SEQ ID NO: 356001 - protein, 14 aa, Homo sapiens
  CDR3 for alpha chain variable domain of TCR clone 178001 (TRAV35, TRAJ42)
CAGRYGGSQGNLIF

SEQ ID NO: 356002 - protein, 15 aa, Homo sapiens
  CDR3 for beta chain variable domain of TCR clone 178001 (TRBV7-9, TRBJ2-1)
CAGSLGWGRANEQFF

SEQ ID NO: 356003 - protein, 13 aa, Homo sapiens
  CDR3 for alpha chain variable domain of TCR clone 178002 (TRAV13-2, TRAJ13)
CAERPGGYQKVTF

SEQ ID NO: 356004 - protein, 13 aa, Homo sapiens
  CDR3 for beta chain variable domain of TCR clone 178002 (TRBV29-1, TRBJ2-7)
CSVKRGGNYEQYF

SEQ ID NO: 356005 - protein, 16 aa, Homo sapiens
  CDR3 for alpha chain variable domain of TCR clone 178003 (TRAV12-3, TRAJ53)
CAMSPGSGGSNYKLTF

SEQ ID NO: 356006 - protein, 11 aa, Homo sapiens
  CDR3 for beta chain variable domain of TCR clone 178003 (TRBV29-1, TRBJ2-5)
CSEYRTGTQYF

SEQ ID NO: 356007 - protein, 16 aa, Homo sapiens
  CDR3 for alpha chain variable domain of TCR clone 178004 (TRAV3, TRAJ42)
CAVRDIEGGSQGNLIF

SEQ ID NO: 356008 - protein, 14 aa, Homo sapiens
  CDR3 for beta chain variable domain of TCR clone 178004 (TRBV18, TRBJ1-1)
CASSPPTGRTEAVF

SEQ ID NO: 356009 - protein, 16 aa, Homo sapiens
  CDR3 for alpha chain variable domain of TCR clone 178005 (TRAV3, TRAJ10)
CAVRDMRAGGGNKLTF

SEQ ID NO: 356010 - protein, 13 aa, Homo sapiens
  CDR3 for beta chain variable domain of TCR clone 178005 (TRBV4-2, TRBJ1-1)
CASSQAWNTEAFF

SEQ ID NO: 356011 - protein, 14 aa, Homo sapiens
  CDR3 for alpha chain variable domain of TCR clone 178006 (TRAV1-2, TRAJ16)
CAVNRFSDGQKLLF

SEQ ID NO: 356012 - protein, 20 aa, Homo sapiens
  CDR3 for beta chain variable domain of TCR clone 178006 (TRBV7-8, TRBJ2-2)
CASSHLFPGPTIHSTGELFF

SEQ ID NO: 356013 - protein, 13 aa, Homo sapiens
  CDR3 for alpha chain variable domain of TCR clone 178007 (TRAV17, TRAJ9)
CATDYTGGFKTIF

SEQ ID NO: 356014 - protein, 14 aa, Homo sapiens
  CDR3 for beta chain variable domain of TCR clone 178007 (TRBV19, TRBJ1-2)
CASSIGAGSYGYTF

SEQ ID NO: 356015 - protein, 14 aa, Homo sapiens
  CDR3 for alpha chain variable domain of TCR clone 178008 (TRAV12-2, TRAJ40)
CAVKIPSGTYKYTF

SEQ ID NO: 356016 - protein, 20 aa, Homo sapiens
  CDR3 for beta chain variable domain of TCR clone 178008 (TRBV28, TRBJ2-1)
CASTPIGRSPGRAGGNEQFF

SEQ ID NO: 356017 - protein, 12 aa, Homo sapiens
  CDR3 for alpha chain variable domain of TCR clone 178009 (TRAV27, TRAJ9)
CAGESGGFKTIF

SEQ ID NO: 356018 - protein, 14 aa, Homo sapiens
  CDR3 for beta chain variable domain of TCR clone 178009 (TRBV19, TRBJ2-3)
CASSEGPRTDTQYF

SEQ ID NO: 356019 - protein, 13 aa, Homo sapiens
  CDR3 for alpha chain variable domain of TCR clone 178010 (TRAV20, TRAJ34)
CAVSSYNTDKLIF

SEQ ID NO: 356020 - protein, 13 aa, Homo sapiens
  CDR3 for beta chain variable domain of TCR clone 178010 (TRBV7-9, TRBJ1-2)
CDSSLKQNYGYTF

SEQ ID NO: 356021 - protein, 10 aa, Homo sapiens
  CDR3 for alpha chain variable domain of TCR clone 178011 (TRAV12-3, TRAJ49)
CAMNDDQFYF

SEQ ID NO: 356022 - protein, 14 aa, Homo sapiens
  CDR3 for beta chain variable domain of TCR clone 178011 (TRBV13, TRBJ2-5)
CASSLGPRGETQYL

SEQ ID NO: 356023 - protein, 13 aa, Homo sapiens
  CDR3 for alpha chain variable domain of TCR clone 178012 (TRAV8-3, TRAJ4)
WVFYSGGYNKLIF

SEQ ID NO: 356024 - protein, 16 aa, Homo sapiens
  CDR3 for beta chain variable domain of TCR clone 178012 (TRBV12-5, TRBJ2-5)
CASGPRTSGNQETQYF

SEQ ID NO: 356025 - protein, 16 aa, Homo sapiens
  CDR3 for alpha chain variable domain of TCR clone 178013 (TRAV16, TRAJ4)
CALSRRFSGGYNKLIF

SEQ ID NO: 356026 - protein, 16 aa, Homo sapiens
  CDR3 for beta chain variable domain of TCR clone 178013 (TRBV24-1, TRBJ2-3)
CATSDPGTGATDTQYF

SEQ ID NO: 356027 - protein, 16 aa, Homo sapiens
  CDR3 for alpha chain variable domain of TCR clone 178014 (TRAV26-1, TRAJ23)
CIVRVPPYNQGGKLIF

SEQ ID NO: 356028 - protein, 13 aa, Homo sapiens
  CDR3 for beta chain variable domain of TCR clone 178014 (TRBV20-1, TRBJ2-5)
CSARGDYQETQYF

SEQ ID NO: 356029 - protein, 12 aa, Homo sapiens
  CDR3 for alpha chain variable domain of TCR clone 178015 (TRAV13-1, TRAJ11)
CAGPSGYSTLTF

SEQ ID NO: 356030 - protein, 18 aa, Homo sapiens
  CDR3 for beta chain variable domain of TCR clone 178015 (TRBV4-1, TRBJ1-5)
CASSQDPRGQGLNQPQHF

SEQ ID NO: 356031 - protein, 12 aa, Homo sapiens
  CDR3 for alpha chain variable domain of TCR clone 178016 (TRAV8-3, TRAJ20)
CAVGANDYKLSF

SEQ ID NO: 356032 - protein, 13 aa, Homo sapiens
  CDR3 for beta chain variable domain of TCR clone 178016 (TRBV27, TRBJ2-3)
CASSLSQGDTQYF

SEQ ID NO: 356033 - protein, 15 aa, Homo sapiens
  CDR3 for alpha chain variable domain of TCR clone 178017 (TRAV26-1, TRAJ48)
CIVRVGDFGNEKLTF

SEQ ID NO: 356034 - protein, 14 aa, Homo sapiens
  CDR3 for beta chain variable domain of TCR clone 178017 (TRBV13, TRBJ2-5)
CASSLGPRGETQYF

SEQ ID NO: 356035 - protein, 11 aa, Homo sapiens
  CDR3 for alpha chain variable domain of TCR clone 178018 (TRAV1-2, TRAJ11)
CAVRGYSTLTF

SEQ ID NO: 356036 - protein, 18 aa, Homo sapiens
  CDR3 for beta chain variable domain of TCR clone 178018 (TRBV20-1, TRBJ2-6)
CSAETTPTHGSGANGLTF

SEQ ID NO: 356037 - protein, 15 aa, Homo sapiens
  CDR3 for alpha chain variable domain of TCR clone 178019 (TRAV30, TRAJ13)
CGTQGVNGGYQKVTF

SEQ ID NO: 356038 - protein, 17 aa, Homo sapiens
  CDR3 for beta chain variable domain of TCR clone 178019 (TRBV20-1, TRBJ2-2)
CSARVKRTHVRSGELFF

SEQ ID NO: 356039 - protein, 14 aa, Homo sapiens
  CDR3 for alpha chain variable domain of TCR clone 178020 (TRAV1-1, TRAJ30)
CAVRSLNRDDKLIF

SEQ ID NO: 356040 - protein, 13 aa, Homo sapiens
  CDR3 for beta chain variable domain of TCR clone 178020 (TRBV11-2, TRBJ2-5)
CASSSTGEETQYF

SEQ ID NO: 356041 - protein, 13 aa, Homo sapiens
  CDR3 for alpha chain variable domain of TCR clone 178021 (TRAV1-2, TRAJ11)
CAVRDSGYSTLTF

SEQ ID NO: 356042 - protein, 17 aa, Homo sapiens
  CDR3 for beta chain variable domain of TCR clone 178021 (TRBV11-2, TRBJ2-1)
CASSLYPPGVEYNEQFF

SEQ ID NO: 356043 - protein, 14 aa, Homo sapiens
  CDR3 for alpha chain variable domain of TCR clone 178022 (TRAV26-1, TRAJ45)
CIVREGGGADGLTV

SEQ ID NO: 356044 - protein, 14 aa, Homo sapiens
  CDR3 for beta chain variable domain of TCR clone 178022 (TRBV2, TRBJ1-2)
CASNEGTGPYGYTF

SEQ ID NO: 356045 - protein, 13 aa, Homo sapiens
  CDR3 for alpha chain variable domain of TCR clone 178023 (TRAV17, TRAJ33)
CATDADSNYQLIW

SEQ ID NO: 356046 - protein, 17 aa, Homo sapiens
  CDR3 for beta chain variable domain of TCR clone 178023 (TRBV20-1, TRBJ2-3)
CSAVSPVLAGGQDTQYF

SEQ ID NO: 356047 - protein, 15 aa, Homo sapiens
  CDR3 for alpha chain variable domain of TCR clone 178024 (TRAV2, TRAJ44)
CAVEAYTGTASKLPF

SEQ ID NO: 356048 - protein, 17 aa, Homo sapiens
  CDR3 for beta chain variable domain of TCR clone 178024 (TRBV12-4, TRBJ2-1)
CASSPGLAGGRINEQFF

SEQ ID NO: 356049 - protein, 11 aa, Homo sapiens
  CDR3 for alpha chain variable domain of TCR clone 178025 (TRAV1-1, TRAJ23)
CAVRQGGKLIF

SEQ ID NO: 356050 - protein, 20 aa, Homo sapiens
  CDR3 for beta chain variable domain of TCR clone 178025 (TRBV7-8, TRBJ2-2)
SSSSHVFPGPTIHITGELFF

SEQ ID NO: 356051 - protein, 14 aa, Homo sapiens
  CDR3 for alpha chain variable domain of TCR clone 178026 (TRAV3, TRAJ34)
CAVRDINNTYKLIF

SEQ ID NO: 356052 - protein, 13 aa, Homo sapiens
  CDR3 for beta chain variable domain of TCR clone 178026 (TRBV20-1, TRBJ1-1)
CSARGGGNTEAFF

SEQ ID NO: 356053 - protein, 14 aa, Homo sapiens
  CDR3 for alpha chain variable domain of TCR clone 178027 (TRAV1-2, TRAJ8)
CAVREDTGFQKLVF

SEQ ID NO: 356054 - protein, 13 aa, Homo sapiens
  CDR3 for beta chain variable domain of TCR clone 178027 (TRBV12-4, TRBJ1-2)
CASSLRQGKSYTF

SEQ ID NO: 356055 - protein, 13 aa, Homo sapiens
  CDR3 for alpha chain variable domain of TCR clone 178028 (TRAV12-2, TRAJ17)
CAVKGAAGNKLTF

SEQ ID NO: 356056 - protein, 12 aa, Homo sapiens
  CDR3 for beta chain variable domain of TCR clone 178028 (TRBV5-1, TRBJ1-2)
CASSLGGLGYTF

SEQ ID NO: 356057 - protein, 10 aa, Homo sapiens
  CDR3 for alpha chain variable domain of TCR clone 178029 (TRAV1-2, TRAJ20)
CACNDYKLSF

SEQ ID NO: 356058 - protein, 15 aa, Homo sapiens
  CDR3 for beta chain variable domain of TCR clone 178029 (TRBV7-9, TRBJ2-7)
CASSLALAEAYEQYF

SEQ ID NO: 356059 - protein, 13 aa, Homo sapiens
  CDR3 for alpha chain variable domain of TCR clone 178030 (TRAV1-2, TRAJ9)
CAALNTGGFKTIF

SEQ ID NO: 356060 - protein, 13 aa, Homo sapiens
  CDR3 for beta chain variable domain of TCR clone 178030 (TRBV19, TRBJ1-2)
CASRLPGQGGYTF

SEQ ID NO: 356061 - protein, 12 aa, Homo sapiens
  CDR3 for alpha chain variable domain of TCR clone 178031 (TRAV21, TRAJ33)
CAKMDSNYQLIW

SEQ ID NO: 356062 - protein, 15 aa, Homo sapiens
  CDR3 for beta chain variable domain of TCR clone 178031 (TRBV27, TRBJ2-1)
CASSNGGGSSNEQFF

SEQ ID NO: 356063 - protein, 12 aa, Homo sapiens
  CDR3 for alpha chain variable domain of TCR clone 178032 (TRAV3, TRAJ27)
CAVRDKAGKSTF

SEQ ID NO: 356064 - protein, 13 aa, Homo sapiens
  CDR3 for beta chain variable domain of TCR clone 178032 (TRBV6-5, TRBJ2-5)
CASSPQGGETQDL

SEQ ID NO: 356065 - protein, 23 aa, Homo sapiens
  CDR3 for alpha chain variable domain of TCR clone 178033 (TRAV26-1, )
CIADNAGNTYIQNPDPAVYQLRD

SEQ ID NO: 356066 - protein, 13 aa, Homo sapiens
  CDR3 for beta chain variable domain of TCR clone 178033 (TRBV20-1, TRBJ1-1)
CSARGGGNTEAFF

SEQ ID NO: 356067 - protein, 13 aa, Homo sapiens
  CDR3 for alpha chain variable domain of TCR clone 178034 (TRAV21, TRAJ27)
CAARPGNAGKSTF

SEQ ID NO: 356068 - protein, 15 aa, Homo sapiens
  CDR3 for beta chain variable domain of TCR clone 178034 (TRBV20-1, TRBJ2-7)
CSAGDRVSGMDKQYF

SEQ ID NO: 356069 - protein, 12 aa, Homo sapiens
  CDR3 for alpha chain variable domain of TCR clone 178035 (TRAV30, TRAJ43)
CGPEERGNDMRF

SEQ ID NO: 356070 - protein, 14 aa, Homo sapiens
  CDR3 for beta chain variable domain of TCR clone 178035 (TRBV7-2, TRBJ2-7)
CASSPKTSFYEQYF

SEQ ID NO: 356071 - protein, 19 aa, Homo sapiens
  CDR3 for alpha chain variable domain of TCR clone 178036 (TRAV29/DV5, TRAJ53)
CSVLLCSKPDRGSNYKPTF

SEQ ID NO: 356072 - protein, 15 aa, Homo sapiens
  CDR3 for beta chain variable domain of TCR clone 178036 (TRBV19, TRBJ2-4)
CASSIGLAGANIQYF

SEQ ID NO: 356073 - protein, 11 aa, Homo sapiens
  CDR3 for alpha chain variable domain of TCR clone 178037 (TRAV21, TRAJ11)
CAVNGYSTLTF

SEQ ID NO: 356074 - protein, 11 aa, Homo sapiens
  CDR3 for beta chain variable domain of TCR clone 178037 (TRBV19, TRBJ1-1)
CASTIGSEAFF

SEQ ID NO: 356075 - protein, 11 aa, Homo sapiens
  CDR3 for alpha chain variable domain of TCR clone 178038 (TRAV2, TRAJ33)
CAVDSNYQLIW

SEQ ID NO: 356076 - protein, 13 aa, Homo sapiens
  CDR3 for beta chain variable domain of TCR clone 178038 (TRBV19, TRBJ1-2)
CASSQGQVYGYTF

SEQ ID NO: 356077 - protein, 13 aa, Homo sapiens
  CDR3 for alpha chain variable domain of TCR clone 178039 (TRAV2, TRAJ15)
CAVASQAGTALIF

SEQ ID NO: 356078 - protein, 16 aa, Homo sapiens
  CDR3 for beta chain variable domain of TCR clone 178039 (TRBV11-2, TRBJ2-3)
CASSLGVSGGQDTQYF

SEQ ID NO: 356079 - protein, 14 aa, Homo sapiens
  CDR3 for alpha chain variable domain of TCR clone 178040 (TRAV13-1, TRAJ39)
CAASKNNAGNMLTF

SEQ ID NO: 356080 - protein, 15 aa, Homo sapiens
  CDR3 for beta chain variable domain of TCR clone 178040 (TRBV7-9, TRBJ1-6)
CASSSPGRGNSPLDF

SEQ ID NO: 356081 - protein, 14 aa, Homo sapiens
  CDR3 for alpha chain variable domain of TCR clone 178041 (TRAV34, TRAJ22)
CGADTSGSARQLTF

SEQ ID NO: 356082 - protein, 14 aa, Homo sapiens
  CDR3 for beta chain variable domain of TCR clone 178041 (TRBV6-1, TRBJ1-2)
CASSDTGASYRHTF

SEQ ID NO: 356083 - protein, 23 aa, Homo sapiens
  CDR3 for alpha chain variable domain of TCR clone 178042 (TRAV26-1, TRAJ38)
CIADNAGNNHIQNPDPAVYQLRD

SEQ ID NO: 356084 - protein, 14 aa, Homo sapiens
  CDR3 for beta chain variable domain of TCR clone 178042 (TRBV5-1, TRBJ2-7)
CASRWDWQFHEQYF

SEQ ID NO: 356085 - protein, 15 aa, Homo sapiens
  CDR3 for alpha chain variable domain of TCR clone 178043 (TRAV17, TRAJ57)
CATGPSQGGSEKLVF

SEQ ID NO: 356086 - protein, 16 aa, Homo sapiens
  CDR3 for beta chain variable domain of TCR clone 178043 (TRBV12-4, TRBJ1-5)
CASSRPVGGSNEPQYF

SEQ ID NO: 356087 - protein, 12 aa, Homo sapiens
  CDR3 for alpha chain variable domain of TCR clone 178044 (TRAV27, TRAJ35)
CAGADFGNVLHC

SEQ ID NO: 356088 - protein, 15 aa, Homo sapiens
  CDR3 for beta chain variable domain of TCR clone 178044 (TRBV3-1, TRBJ2-5)
CASSANLGGPETQYF

SEQ ID NO: 356089 - protein, 12 aa, Homo sapiens
  CDR3 for alpha chain variable domain of TCR clone 178045 (TRAV23/DV6, TRAJ39)
CAALNAGNMLTF

SEQ ID NO: 356090 - protein, 16 aa, Homo sapiens
  CDR3 for beta chain variable domain of TCR clone 178045 (TRBV20-1, TRBJ2-2)
CSASASGIPGAGELFF

SEQ ID NO: 356091 - protein, 14 aa, Homo sapiens
  CDR3 for alpha chain variable domain of TCR clone 178046 (TRAV1-2, TRAJ16)
CAVNRFSDGQKLLF

SEQ ID NO: 356092 - protein, 13 aa, Homo sapiens
  CDR3 for beta chain variable domain of TCR clone 178046 (TRBV11-2, TRBJ2-7)
CASSGARPYEQYF

SEQ ID NO: 356093 - protein, 18 aa, Homo sapiens
  CDR3 for alpha chain variable domain of TCR clone 178047 (TRAV26-1, TRAJ23)
CIVRVGLEVWNQGGKLIF

SEQ ID NO: 356094 - protein, 15 aa, Homo sapiens
  CDR3 for beta chain variable domain of TCR clone 178047 (TRBV10-3, TRBJ2-3)
CANSDWDRDTDTQYF

SEQ ID NO: 356095 - protein, 12 aa, Homo sapiens
  CDR3 for alpha chain variable domain of TCR clone 178048 (TRAV3, TRAJ20)
CAMRDPDYKLSF

SEQ ID NO: 356096 - protein, 15 aa, Homo sapiens
  CDR3 for beta chain variable domain of TCR clone 178048 (TRBV6-5, TRBJ2-5)
CASSPLAGGIETQYF

SEQ ID NO: 356097 - protein, 13 aa, Homo sapiens
  CDR3 for alpha chain variable domain of TCR clone 178049 (TRAV16, TRAJ34)
CALRTWNTDKLIF

SEQ ID NO: 356098 - protein, 16 aa, Homo sapiens
  CDR3 for beta chain variable domain of TCR clone 178049 (TRBV2, TRBJ1-3)
CASSERGVNSGNTMYF

SEQ ID NO: 356099 - protein, 17 aa, Homo sapiens
  CDR3 for alpha chain variable domain of TCR clone 178050 (TRAV3, TRAJ6)
CAVRDGPRAGGSHIPKF

SEQ ID NO: 356100 - protein, 13 aa, Homo sapiens
  CDR3 for beta chain variable domain of TCR clone 178050 (TRBV27, TRBJ1-1)
CASSLSIGAEAFF

SEQ ID NO: 356101 - protein, 15 aa, Homo sapiens
  CDR3 for alpha chain variable domain of TCR clone 178051 (TRAV27, TRAJ38)
CAARRNAGNNRKLIW

SEQ ID NO: 356102 - protein, 14 aa, Homo sapiens
  CDR3 for beta chain variable domain of TCR clone 178051 (TRBV10-3, TRBJ2-7)
CAISAPRGAYEQYF

SEQ ID NO: 356103 - protein, 15 aa, Homo sapiens
  CDR3 for alpha chain variable domain of TCR clone 178052 (TRAV22, TRAJ24)
CAVPLSTDSWVKLQF

SEQ ID NO: 356104 - protein, 14 aa, Homo sapiens
  CDR3 for beta chain variable domain of TCR clone 178052 (TRBV7-2, TRBJ2-7)
CASRSQGAAYEQYF

SEQ ID NO: 356105 - protein, 14 aa, Homo sapiens
  CDR3 for alpha chain variable domain of TCR clone 178053 (TRAV12-2, TRAJ5)
CAVNRSTGRRALTF

SEQ ID NO: 356106 - protein, 15 aa, Homo sapiens
  CDR3 for beta chain variable domain of TCR clone 178053 (TRBV28, TRBJ2-5)
CASSPPWSYQETQYF

SEQ ID NO: 356107 - protein, 14 aa, Homo sapiens
  CDR3 for alpha chain variable domain of TCR clone 178054 (TRAV26-1, TRAJ38)
CIVVGAGNNRKLIW

SEQ ID NO: 356108 - protein, 12 aa, Homo sapiens
  CDR3 for beta chain variable domain of TCR clone 178054 (TRBV5-1, TRBJ2-5)
CASSGDQETQYF

SEQ ID NO: 356109 - protein, 14 aa, Homo sapiens
  CDR3 for alpha chain variable domain of TCR clone 178055 (TRAV2, TRAJ9)
CAVEDRSVGFKTIF

SEQ ID NO: 356110 - protein, 13 aa, Homo sapiens
  CDR3 for beta chain variable domain of TCR clone 178055 (TRBV4-2, TRBJ1-1)
CASSQAGNTEAFF

SEQ ID NO: 356111 - protein, 16 aa, Homo sapiens
  CDR3 for alpha chain variable domain of TCR clone 178056 (TRAV8-1, TRAJ39)
CAVNVPSYNAGNMLTF

SEQ ID NO: 356112 - protein, 13 aa, Homo sapiens
  CDR3 for beta chain variable domain of TCR clone 178056 (TRBV4-1, TRBJ2-3)
RQPIDEGTDTQYF

SEQ ID NO: 356113 - protein, 11 aa, Homo sapiens
  CDR3 for alpha chain variable domain of TCR clone 178057 (TRAV13-1, TRAJ15)
CAATPGTALIF

SEQ ID NO: 356114 - protein, 14 aa, Homo sapiens
  CDR3 for beta chain variable domain of TCR clone 178057 (TRBV19, TRBJ2-1)
CASPTFVLSGEQFF

SEQ ID NO: 356115 - protein, 15 aa, Homo sapiens
  CDR3 for alpha chain variable domain of TCR clone 178058 (TRAV8-6, TRAJ10)
CAVSDHAGGGNKLTF

SEQ ID NO: 356116 - protein, 15 aa, Homo sapiens
  CDR3 for beta chain variable domain of TCR clone 178058 (TRBV3-1, TRBJ2-5)
CASSANLGGPETQYF

SEQ ID NO: 356117 - protein, 14 aa, Homo sapiens
  CDR3 for alpha chain variable domain of TCR clone 178059 (TRAV23/DV6, TRAJ24)
CAASLSDSWGELQF

SEQ ID NO: 356118 - protein, 16 aa, Homo sapiens
  CDR3 for beta chain variable domain of TCR clone 178059 (TRBV7-9, TRBJ2-6)
CASSLKGPLRANVLTF

SEQ ID NO: 356119 - protein, 15 aa, Homo sapiens
  CDR3 for alpha chain variable domain of TCR clone 178060 (TRAV26-1, TRAJ29)
CIVRVEGSGNTPPFF

SEQ ID NO: 356120 - protein, 15 aa, Homo sapiens
  CDR3 for beta chain variable domain of TCR clone 178060 (TRBV7-9, TRBJ1-5)
CASSQGHQPNQPQHF

SEQ ID NO: 356121 - protein, 14 aa, Homo sapiens
  CDR3 for alpha chain variable domain of TCR clone 178061 (TRAV2, TRAJ37)
CAADFTSNTGKLIF

SEQ ID NO: 356122 - protein, 13 aa, Homo sapiens
  CDR3 for beta chain variable domain of TCR clone 178061 (TRBV6-1, TRBJ1-1)
CASSRQGNTEAFF

SEQ ID NO: 356123 - protein, 13 aa, Homo sapiens
  CDR3 for alpha chain variable domain of TCR clone 178062 (TRAV27, TRAJ49)
CAPRPYTGNQFYF

SEQ ID NO: 356124 - protein, 17 aa, Homo sapiens
  CDR3 for beta chain variable domain of TCR clone 178062 (TRBV28, TRBJ2-5)
CASSRQGGLAGAETQYF

SEQ ID NO: 356125 - protein, 13 aa, Homo sapiens
  CDR3 for alpha chain variable domain of TCR clone 178063 (TRAV12-2, TRAJ20)
CAVNRFYDYKLSF

SEQ ID NO: 356126 - protein, 12 aa, Homo sapiens
  CDR3 for beta chain variable domain of TCR clone 178063 (TRBV28, TRBJ2-3)
CASSLYRDTQYF

SEQ ID NO: 356127 - protein, 14 aa, Homo sapiens
  CDR3 for alpha chain variable domain of TCR clone 178064 (TRAV16, TRAJ15)
CSLSVPQAGTALIF

SEQ ID NO: 356128 - protein, 12 aa, Homo sapiens
  CDR3 for beta chain variable domain of TCR clone 178064 (TRBV18, TRBJ2-5)
CASSPSKETQYF

SEQ ID NO: 356129 - protein, 15 aa, Homo sapiens
  CDR3 for alpha chain variable domain of TCR clone 178065 (TRAV3, TRAJ3)
CAVRDRDSSASKIIF

SEQ ID NO: 356130 - protein, 15 aa, Homo sapiens
  CDR3 for beta chain variable domain of TCR clone 178065 (TRBV19, TRBJ2-1)
CASSAPGVPLDEQFF

SEQ ID NO: 356131 - protein, 13 aa, Homo sapiens
  CDR3 for alpha chain variable domain of TCR clone 178066 (TRAV35, TRAJ48)
CAGHELGNEKLTF

SEQ ID NO: 356132 - protein, 14 aa, Homo sapiens
  CDR3 for beta chain variable domain of TCR clone 178066 (TRBV19, TRBJ2-1)
CASPTFVLSGEQFY

SEQ ID NO: 356133 - protein, 14 aa, Homo sapiens
  CDR3 for alpha chain variable domain of TCR clone 178067 (TRAV1-2, TRAJ16)
CAVNRFSDGQKLLF

SEQ ID NO: 356134 - protein, 13 aa, Homo sapiens
  CDR3 for beta chain variable domain of TCR clone 178067 (TRBV7-3, TRBJ1-1)
CASSQDCGAEAFF

SEQ ID NO: 356135 - protein, 14 aa, Homo sapiens
  CDR3 for alpha chain variable domain of TCR clone 178068 (TRAV12-2, TRAJ13)
CAVKKTGGYQKFTF

SEQ ID NO: 356136 - protein, 15 aa, Homo sapiens
  CDR3 for beta chain variable domain of TCR clone 178068 (TRBV12-4, TRBJ2-5)
CASSPPTGLQETQYF

SEQ ID NO: 356137 - protein, 12 aa, Homo sapiens
  CDR3 for alpha chain variable domain of TCR clone 178069 (TRAV8-3, TRAJ26)
CAGDNYGQNFVF

SEQ ID NO: 356138 - protein, 13 aa, Homo sapiens
  CDR3 for beta chain variable domain of TCR clone 178069 (TRBV7-8, TRBJ2-7)
CASSFAGLYEQYF

SEQ ID NO: 356139 - protein, 16 aa, Homo sapiens
  CDR3 for alpha chain variable domain of TCR clone 178070 (TRAV38-1, TRAJ45)
CAFTESTGGGADGLTF

SEQ ID NO: 356140 - protein, 16 aa, Homo sapiens
  CDR3 for beta chain variable domain of TCR clone 178070 (TRBV12-4, TRBJ1-5)
CASSRPVGGSNQPQHF

SEQ ID NO: 356141 - protein, 14 aa, Homo sapiens
  CDR3 for alpha chain variable domain of TCR clone 178071 (TRAV23/DV6, TRAJ22)
CAASVSGSARPLTF

SEQ ID NO: 356142 - protein, 16 aa, Homo sapiens
  CDR3 for beta chain variable domain of TCR clone 178071 (TRBV19, TRBJ2-2)
CASSFPGQGLAGELFF

SEQ ID NO: 356143 - protein, 13 aa, Homo sapiens
  CDR3 for alpha chain variable domain of TCR clone 178072 (TRAV12-1, TRAJ47)
CVVNPGYVNKLVF

SEQ ID NO: 356144 - protein, 12 aa, Homo sapiens
  CDR3 for beta chain variable domain of TCR clone 178072 (TRBV11-2, TRBJ2-2)
CASSLGGGELFF

SEQ ID NO: 356145 - protein, 12 aa, Homo sapiens
  CDR3 for alpha chain variable domain of TCR clone 178073 (TRAV2, TRAJ31)
CAVEDNNARLMF

SEQ ID NO: 356146 - protein, 14 aa, Homo sapiens
  CDR3 for beta chain variable domain of TCR clone 178073 (TRBV7-9, TRBJ2-2)
CDSSLGHRTGELFF

SEQ ID NO: 356147 - protein, 15 aa, Homo sapiens
  CDR3 for alpha chain variable domain of TCR clone 178074 (TRAV35, TRAJ50)
CAGQLGKTSYDKVIF

SEQ ID NO: 356148 - protein, 12 aa, Homo sapiens
  CDR3 for beta chain variable domain of TCR clone 178074 (TRBV5-1, TRBJ2-5)
CASSLGLETQYF

SEQ ID NO: 356149 - protein, 14 aa, Homo sapiens
  CDR3 for alpha chain variable domain of TCR clone 178075 (TRAV1-2, TRAJ8)
CTVREDTGFQKLVF

SEQ ID NO: 356150 - protein, 16 aa, Homo sapiens
  CDR3 for beta chain variable domain of TCR clone 178075 (TRBV20-1, TRBJ1-4)
CSAPGQGLLTNEKLFF

SEQ ID NO: 356151 - protein, 14 aa, Homo sapiens
  CDR3 for alpha chain variable domain of TCR clone 178076 (TRAV1-2, TRAJ16)
CAVNRFSDGQKLLF

SEQ ID NO: 356152 - protein, 11 aa, Homo sapiens
  CDR3 for beta chain variable domain of TCR clone 178076 (TRBV12-4, TRBJ2-3)
CGSTATDTQYF

SEQ ID NO: 356153 - protein, 13 aa, Homo sapiens
  CDR3 for alpha chain variable domain of TCR clone 178077 (TRAV21, TRAJ27)
CASLNTNAGKSTF

SEQ ID NO: 356154 - protein, 14 aa, Homo sapiens
  CDR3 for beta chain variable domain of TCR clone 178077 (TRBV27, TRBJ1-1)
CASSLLSGLSEAFF

SEQ ID NO: 356155 - protein, 12 aa, Homo sapiens
  CDR3 for alpha chain variable domain of TCR clone 178078 (TRAV23/DV6, TRAJ49)
CAATYIGNQFYF

SEQ ID NO: 356156 - protein, 17 aa, Homo sapiens
  CDR3 for beta chain variable domain of TCR clone 178078 (TRBV4-1, TRBJ2-3)
CASSQVLQGGGTDTQYF

SEQ ID NO: 356157 - protein, 20 aa, Homo sapiens
  CDR3 for alpha chain variable domain of TCR clone 178079 (TRAV12-1, TRAJ42)
SSVIQPPTSVKGGSQGNLIF

SEQ ID NO: 356158 - protein, 13 aa, Homo sapiens
  CDR3 for beta chain variable domain of TCR clone 178079 (TRBV19, TRBJ2-7)
CASRKAGGSEQYF

SEQ ID NO: 356159 - protein, 14 aa, Homo sapiens
  CDR3 for alpha chain variable domain of TCR clone 178080 (TRAV29/DV5, TRAJ36)
CAARRKTGANNLFF

SEQ ID NO: 356160 - protein, 13 aa, Homo sapiens
  CDR3 for beta chain variable domain of TCR clone 178080 (TRBV20-1, TRBJ2-5)
CSAREAFQETQYF

SEQ ID NO: 356161 - protein, 15 aa, Homo sapiens
  CDR3 for alpha chain variable domain of TCR clone 178081 (TRAV17, TRAJ54)
CATEKLGQGTQKLVF

SEQ ID NO: 356162 - protein, 14 aa, Homo sapiens
  CDR3 for beta chain variable domain of TCR clone 178081 (TRBV7-3, TRBJ1-1)
CQQLRGQMNTEAFF

SEQ ID NO: 356163 - protein, 14 aa, Homo sapiens
  CDR3 for alpha chain variable domain of TCR clone 178082 (TRAV26-1, TRAJ38)
CIAANAGNNRKLIW

SEQ ID NO: 356164 - protein, 13 aa, Homo sapiens
  CDR3 for beta chain variable domain of TCR clone 178082 (TRBV20-1, TRBJ2-1)
CSARSSPRDEQFF

SEQ ID NO: 356165 - protein, 13 aa, Homo sapiens
  CDR3 for alpha chain variable domain of TCR clone 178083 (TRAV30, TRAJ24)
CGAVTDSWGKLQF

SEQ ID NO: 356166 - protein, 16 aa, Homo sapiens
  CDR3 for beta chain variable domain of TCR clone 178083 (TRBV7-3, TRBJ2-2)
CASSLKRGTLSGELFF

SEQ ID NO: 356167 - protein, 17 aa, Homo sapiens
  CDR3 for alpha chain variable domain of TCR clone 178084 (TRAV3, TRAJ6)
CAVRDGPRAGGSYLPTF

SEQ ID NO: 356168 - protein, 16 aa, Homo sapiens
  CDR3 for beta chain variable domain of TCR clone 178084 (TRBV12-4, TRBJ1-5)
CASSRPVGGSNQPQHF

SEQ ID NO: 356169 - protein, 13 aa, Homo sapiens
  CDR3 for alpha chain variable domain of TCR clone 178085 (TRAV1-2, TRAJ9)
CAALNTGGFKAIF

SEQ ID NO: 356170 - protein, 15 aa, Homo sapiens
  CDR3 for beta chain variable domain of TCR clone 178085 (TRBV7-2, TRBJ1-2)
CASSLVSGGDYGYTF

SEQ ID NO: 356171 - protein, 13 aa, Homo sapiens
  CDR3 for alpha chain variable domain of TCR clone 178086 (TRAV36/DV7, TRAJ49)
CAVEANPGNQFYF

SEQ ID NO: 356172 - protein, 14 aa, Homo sapiens
  CDR3 for beta chain variable domain of TCR clone 178086 (TRBV20-1, TRBJ2-5)
CSASSGRAAETQCF

SEQ ID NO: 356173 - protein, 15 aa, Homo sapiens
  CDR3 for alpha chain variable domain of TCR clone 178087 (TRAV8-4, TRAJ3)
CAVTGENLVQQCFQD

SEQ ID NO: 356174 - protein, 13 aa, Homo sapiens
  CDR3 for beta chain variable domain of TCR clone 178087 (TRBV28, TRBJ2-5)
CASSWGTQETQYF

SEQ ID NO: 356175 - protein, 15 aa, Homo sapiens
  CDR3 for alpha chain variable domain of TCR clone 178088 (TRAV25, TRAJ52)
YAGRPGGTSYGKLTF

SEQ ID NO: 356176 - protein, 14 aa, Homo sapiens
  CDR3 for beta chain variable domain of TCR clone 178088 (TRBV4-2, TRBJ2-1)
CASGLDRAYNEQFF

SEQ ID NO: 356177 - protein, 16 aa, Homo sapiens
  CDR3 for alpha chain variable domain of TCR clone 178089 (TRAV8-2, TRAJ7)
CVVSEGPYYGNKRLAF

SEQ ID NO: 356178 - protein, 13 aa, Homo sapiens
  CDR3 for beta chain variable domain of TCR clone 178089 (TRBV19, TRBJ2-1)
CASSMYRVNEQFF

SEQ ID NO: 356179 - protein, 12 aa, Homo sapiens
  CDR3 for alpha chain variable domain of TCR clone 178090 (TRAV12-3, TRAJ17)
CAMTLTGNKLTF

SEQ ID NO: 356180 - protein, 19 aa, Homo sapiens
  CDR3 for beta chain variable domain of TCR clone 178090 (TRBV25-1, TRBJ2-2)
CAILVYRVDRGRKTGELFF

SEQ ID NO: 356181 - protein, 14 aa, Homo sapiens
  CDR3 for alpha chain variable domain of TCR clone 178091 (TRAV9-2, TRAJ39)
CALYIYNAGNMLTF

SEQ ID NO: 356182 - protein, 14 aa, Homo sapiens
  CDR3 for beta chain variable domain of TCR clone 178091 (TRBV19, TRBJ2-5)
CASSMTGRQETQYF

SEQ ID NO: 356183 - protein, 14 aa, Homo sapiens
  CDR3 for alpha chain variable domain of TCR clone 178092 (TRAV38-2/DV8, TRAJ29)
CAYRSRSGTTPLVF

SEQ ID NO: 356184 - protein, 17 aa, Homo sapiens
  CDR3 for beta chain variable domain of TCR clone 178092 (TRBV6-1, TRBJ1-2)
CASSGTHSQRGNYGYTF

SEQ ID NO: 356185 - protein, 16 aa, Homo sapiens
  CDR3 for alpha chain variable domain of TCR clone 178093 (TRAV3, TRAJ10)
CAVRDMRAGGGNKLTF

SEQ ID NO: 356186 - protein, 18 aa, Homo sapiens
  CDR3 for beta chain variable domain of TCR clone 178093 (TRBV19, TRBJ2-6)
CASSKNRGTHSGANVLTF

SEQ ID NO: 356187 - protein, 14 aa, Homo sapiens
  CDR3 for alpha chain variable domain of TCR clone 178094 (TRAV20, TRAJ10)
CAVRVEGGGNKLTF

SEQ ID NO: 356188 - protein, 18 aa, Homo sapiens
  CDR3 for beta chain variable domain of TCR clone 178094 (TRBV24-1, TRBJ2-1)
CATSDLMFLDRGVHEQFF

SEQ ID NO: 356189 - protein, 20 aa, Homo sapiens
  CDR3 for alpha chain variable domain of TCR clone 178095 (TRAV8-3, TRAJ44)
LSTSVLWVRLYTGTASKLTF

SEQ ID NO: 356190 - protein, 14 aa, Homo sapiens
  CDR3 for beta chain variable domain of TCR clone 178095 (TRBV6-1, TRBJ1-3)
CASVQGGGGNTIYF

SEQ ID NO: 356191 - protein, 16 aa, Homo sapiens
  CDR3 for alpha chain variable domain of TCR clone 178096 (TRAV30, TRAJ24)
CGTEVVDADSWGKFQF

SEQ ID NO: 356192 - protein, 15 aa, Homo sapiens
  CDR3 for beta chain variable domain of TCR clone 178096 (TRBV7-8, TRBJ1-1)
CASSLGDSRNTEAFF

SEQ ID NO: 356193 - protein, 15 aa, Homo sapiens
  CDR3 for alpha chain variable domain of TCR clone 178097 (TRAV17, TRAJ56)
CATEPFTGANSKLTF

SEQ ID NO: 356194 - protein, 14 aa, Homo sapiens
  CDR3 for beta chain variable domain of TCR clone 178097 (TRBV19, TRBJ2-1)
CASLTFVLSGEQFF

SEQ ID NO: 356195 - protein, 13 aa, Homo sapiens
  CDR3 for alpha chain variable domain of TCR clone 178098 (TRAV12-2, TRAJ42)
CAVKRGSQGNLIF

SEQ ID NO: 356196 - protein, 13 aa, Homo sapiens
  CDR3 for beta chain variable domain of TCR clone 178098 (TRBV7-3, TRBJ2-3)
CASSISAQGTQYF

SEQ ID NO: 356197 - protein, 13 aa, Homo sapiens
  CDR3 for alpha chain variable domain of TCR clone 178099 (TRAV8-6, TRAJ41)
CAVSLKFRVCTQL

SEQ ID NO: 356198 - protein, 15 aa, Homo sapiens
  CDR3 for beta chain variable domain of TCR clone 178099 (TRBV7-9, TRBJ1-4)
CASSRTGGFNEKLFF

SEQ ID NO: 356199 - protein, 17 aa, Homo sapiens
  CDR3 for alpha chain variable domain of TCR clone 178100 (TRAV35, TRAJ38)
CAGQLQRNAGNNRKLSL

SEQ ID NO: 356200 - protein, 15 aa, Homo sapiens
  CDR3 for beta chain variable domain of TCR clone 178100 (TRBV7-9, TRBJ2-1)
CASSLGLAGGTEQFF

SEQ ID NO: 356201 - protein, 14 aa, Homo sapiens
  CDR3 for alpha chain variable domain of TCR clone 178101 (TRAV12-2, TRAJ9)
CAVNMEGGGFKTIF

SEQ ID NO: 356202 - protein, 14 aa, Homo sapiens
  CDR3 for beta chain variable domain of TCR clone 178101 (TRBV27, TRBJ2-5)
CARSSLKGWETQYF

SEQ ID NO: 356203 - protein, 11 aa, Homo sapiens
  CDR3 for alpha chain variable domain of TCR clone 178102 (TRAV23/DV6, TRAJ58)
CAARLLRGETS

SEQ ID NO: 356204 - protein, 13 aa, Homo sapiens
  CDR3 for beta chain variable domain of TCR clone 178102 (TRBV5-1, TRBJ1-2)
CASSIDRPEGYTF

SEQ ID NO: 356205 - protein, 14 aa, Homo sapiens
  CDR3 for alpha chain variable domain of TCR clone 178103 (TRAV35, TRAJ33)
CAGSSQDSNYQLIW

SEQ ID NO: 356206 - protein, 15 aa, Homo sapiens
  CDR3 for beta chain variable domain of TCR clone 178103 (TRBV28, TRBJ2-1)
CASSIIAGGRSEQFF

SEQ ID NO: 356207 - protein, 15 aa, Homo sapiens
  CDR3 for alpha chain variable domain of TCR clone 178104 (TRAV13-2, TRAJ16)
CAENDRFSDGQKLLF

SEQ ID NO: 356208 - protein, 16 aa, Homo sapiens
  CDR3 for beta chain variable domain of TCR clone 178104 (TRBV5-1, TRBJ2-2)
CASSLGGTGSTGELFF

SEQ ID NO: 356209 - protein, 15 aa, Homo sapiens
  CDR3 for alpha chain variable domain of TCR clone 178105 (TRAV12-1, TRAJ9)
CVVSFGDTGGFKTIF

SEQ ID NO: 356210 - protein, 16 aa, Homo sapiens
  CDR3 for beta chain variable domain of TCR clone 178105 (TRBV27, TRBJ2-5)
CASSCGPGGTKETQYF

SEQ ID NO: 356211 - protein, 15 aa, Homo sapiens
  CDR3 for alpha chain variable domain of TCR clone 178106 (TRAV23/DV6, TRAJ13)
CAAWPGGGGYQEVTF

SEQ ID NO: 356212 - protein, 15 aa, Homo sapiens
  CDR3 for beta chain variable domain of TCR clone 178106 (TRBV20-1, TRBJ1-6)
CSARAASSYNSPLHF

SEQ ID NO: 356213 - protein, 14 aa, Homo sapiens
  CDR3 for alpha chain variable domain of TCR clone 178107 (TRAV12-2, TRAJ17)
CAVLFKAAGNKLTF

SEQ ID NO: 356214 - protein, 14 aa, Homo sapiens
  CDR3 for beta chain variable domain of TCR clone 178107 (TRBV7-3, TRBJ1-1)
CSSSLKGGNTEAFF

SEQ ID NO: 356215 - protein, 13 aa, Homo sapiens
  CDR3 for alpha chain variable domain of TCR clone 178108 (TRAV1-1, TRAJ13)
CAVNSGGYQKVTF

SEQ ID NO: 356216 - protein, 12 aa, Homo sapiens
  CDR3 for beta chain variable domain of TCR clone 178108 (TRBV28, TRBJ2-1)
CPSSVQINEQFF

SEQ ID NO: 356217 - protein, 14 aa, Homo sapiens
  CDR3 for alpha chain variable domain of TCR clone 178109 (TRAV3, TRAJ28)
CAVRRGAGSHQLPF

SEQ ID NO: 356218 - protein, 16 aa, Homo sapiens
  CDR3 for beta chain variable domain of TCR clone 178109 (TRBV4-1, TRBJ2-7)
CASSQEWTSGPLEQYF

SEQ ID NO: 356219 - protein, 15 aa, Homo sapiens
  CDR3 for alpha chain variable domain of TCR clone 178110 (TRAV12-2, TRAJ53)
CAVNGGGGSNYKLTF

SEQ ID NO: 356220 - protein, 12 aa, Homo sapiens
  CDR3 for beta chain variable domain of TCR clone 178110 (TRBV3-1, TRBJ2-2)
CASSLFLGELFF

SEQ ID NO: 356221 - protein, 14 aa, Homo sapiens
  CDR3 for alpha chain variable domain of TCR clone 178111 (TRAV17, TRAJ13)
CATVYSGGYQKVTF

SEQ ID NO: 356222 - protein, 13 aa, Homo sapiens
  CDR3 for beta chain variable domain of TCR clone 178111 (TRBV12-4, TRBJ1-2)
CASSFGSRRSYTF

SEQ ID NO: 356223 - protein, 15 aa, Homo sapiens
  CDR3 for alpha chain variable domain of TCR clone 178112 (TRAV12-2, TRAJ53)
CAVNGGGGSNYKLTI

SEQ ID NO: 356224 - protein, 11 aa, Homo sapiens
  CDR3 for beta chain variable domain of TCR clone 178112 (TRBV29-1, TRBJ2-5)
CSEDRTGTQYF

SEQ ID NO: 356225 - protein, 15 aa, Homo sapiens
  CDR3 for alpha chain variable domain of TCR clone 178113 (TRAV3, TRAJ5)
CAVRGLDTGRRALTF

SEQ ID NO: 356226 - protein, 13 aa, Homo sapiens
  CDR3 for beta chain variable domain of TCR clone 178113 (TRBV12-4, TRBJ2-7)
CASSPTETYELYF

SEQ ID NO: 356227 - protein, 14 aa, Homo sapiens
  CDR3 for alpha chain variable domain of TCR clone 178114 (TRAV12-1, TRAJ39)
CLVNFNNAGNMLTF

SEQ ID NO: 356228 - protein, 13 aa, Homo sapiens
  CDR3 for beta chain variable domain of TCR clone 178114 (TRBV7-3, TRBJ1-1)
CASSQDWGAEAFF

SEQ ID NO: 356229 - protein, 12 aa, Homo sapiens
  CDR3 for alpha chain variable domain of TCR clone 178115 (TRAV17, TRAJ30)
CATDARDDKIIS

SEQ ID NO: 356230 - protein, 15 aa, Homo sapiens
  CDR3 for beta chain variable domain of TCR clone 178115 (TRBV4-1, TRBJ2-1)
CASSQGGELYNEQFF

SEQ ID NO: 356231 - protein, 18 aa, Homo sapiens
  CDR3 for alpha chain variable domain of TCR clone 178116 (TRAV13-1, TRAJ52)
CAASKRSAGGTSYGKLTF

SEQ ID NO: 356232 - protein, 13 aa, Homo sapiens
  CDR3 for beta chain variable domain of TCR clone 178116 (TRBV7-2, TRBJ2-5)
CQQHRGGVKTQYF

SEQ ID NO: 356233 - protein, 14 aa, Homo sapiens
  CDR3 for alpha chain variable domain of TCR clone 178117 (TRAV13-2, TRAJ22)
CADGTLGSVRQLTV

SEQ ID NO: 356234 - protein, 15 aa, Homo sapiens
  CDR3 for beta chain variable domain of TCR clone 178117 (TRBV6-3, TRBJ2-7)
CASSSPGTVFYEQYF

SEQ ID NO: 356235 - protein, 14 aa, Homo sapiens
  CDR3 for alpha chain variable domain of TCR clone 178118 (TRAV13-2, TRAJ22)
GADGTLGSARQLTF

SEQ ID NO: 356236 - protein, 16 aa, Homo sapiens
  CDR3 for beta chain variable domain of TCR clone 178118 (TRBV19, TRBJ2-1)
CASSSKGTRSYNEQFF

SEQ ID NO: 356237 - protein, 16 aa, Homo sapiens
  CDR3 for alpha chain variable domain of TCR clone 178119 (TRAV30, TRAJ24)
CGTEIVDADSGGKFQF

SEQ ID NO: 356238 - protein, 18 aa, Homo sapiens
  CDR3 for beta chain variable domain of TCR clone 178119 (TRBV7-9, TRBJ2-7)
CASSLTTSGSRTWYEQYF

SEQ ID NO: 356239 - protein, 14 aa, Homo sapiens
  CDR3 for alpha chain variable domain of TCR clone 178120 (TRAV12-2, TRAJ5)
CAVNRSTGRRALTF

SEQ ID NO: 356240 - protein, 13 aa, Homo sapiens
  CDR3 for beta chain variable domain of TCR clone 178120 (TRBV7-2, TRBJ2-2)
CASSLAVTGELFF

SEQ ID NO: 356241 - protein, 12 aa, Homo sapiens
  CDR3 for alpha chain variable domain of TCR clone 178121 (TRAV21, TRAJ3)
CCFYSSASKIIF

SEQ ID NO: 356242 - protein, 16 aa, Homo sapiens
  CDR3 for beta chain variable domain of TCR clone 178121 (TRBV19, TRBJ2-1)
CTSSKAGPSSYNEQFF

SEQ ID NO: 356243 - protein, 14 aa, Homo sapiens
  CDR3 for alpha chain variable domain of TCR clone 178122 (TRAV20, TRAJ20)
CAVRRGYNDYKLSF

SEQ ID NO: 356244 - protein, 16 aa, Homo sapiens
  CDR3 for beta chain variable domain of TCR clone 178122 (TRBV3-1, TRBJ2-7)
CASSQGATGVAYEQYF

SEQ ID NO: 356245 - protein, 14 aa, Homo sapiens
  CDR3 for alpha chain variable domain of TCR clone 178123 (TRAV29/DV5, TRAJ49)
CAASLSNTGNQSYF

SEQ ID NO: 356246 - protein, 15 aa, Homo sapiens
  CDR3 for beta chain variable domain of TCR clone 178123 (TRBV20-1, TRBJ2-1)
CSARGIRGTYNEQFF

SEQ ID NO: 356247 - protein, 13 aa, Homo sapiens
  CDR3 for alpha chain variable domain of TCR clone 178124 (TRAV16, TRAJ31)
CALSAHNNARLMF

SEQ ID NO: 356248 - protein, 14 aa, Homo sapiens
  CDR3 for beta chain variable domain of TCR clone 178124 (TRBV12-4, TRBJ2-7)
CASTFGLSTYEQYF

SEQ ID NO: 356249 - protein, 12 aa, Homo sapiens
  CDR3 for alpha chain variable domain of TCR clone 178125 (TRAV3, TRAJ20)
CAVRDGDYKLSF

SEQ ID NO: 356250 - protein, 12 aa, Homo sapiens
  CDR3 for beta chain variable domain of TCR clone 178125 (TRBV7-9, TRBJ2-7)
CASSGEGYEQYF

SEQ ID NO: 356251 - protein, 13 aa, Homo sapiens
  CDR3 for alpha chain variable domain of TCR clone 178126 (TRAV8-3, TRAJ36)
CAVGATGANNLFF

SEQ ID NO: 356252 - protein, 18 aa, Homo sapiens
  CDR3 for beta chain variable domain of TCR clone 178126 (TRBV28, TRBJ2-1)
CASSATSGRANSYNEQFF

SEQ ID NO: 356253 - protein, 14 aa, Homo sapiens
  CDR3 for alpha chain variable domain of TCR clone 178127 (TRAV3, TRAJ13)
CAVSYSGGYQKVTF

SEQ ID NO: 356254 - protein, 13 aa, Homo sapiens
  CDR3 for beta chain variable domain of TCR clone 178127 (TRBV10-2, TRBJ2-7)
CASGTSGGYEQYF

SEQ ID NO: 356255 - protein, 16 aa, Homo sapiens
  CDR3 for alpha chain variable domain of TCR clone 178128 (TRAV27, TRAJ13)
CAGAKSDSGGYQKVTF

SEQ ID NO: 356256 - protein, 16 aa, Homo sapiens
  CDR3 for beta chain variable domain of TCR clone 178128 (TRBV27, TRBJ2-5)
CASSSQTSGFQETQYF

SEQ ID NO: 356257 - protein, 17 aa, Homo sapiens
  CDR3 for alpha chain variable domain of TCR clone 178129 (TRAV3, TRAJ42)
CAVRERDYGGSQGNLIF

SEQ ID NO: 356258 - protein, 14 aa, Homo sapiens
  CDR3 for beta chain variable domain of TCR clone 178129 (TRBV19, TRBJ2-5)
CASSMTGQQETQYF

SEQ ID NO: 356259 - protein, 12 aa, Homo sapiens
  CDR3 for alpha chain variable domain of TCR clone 178130 (TRAV26-1, TRAJ17)
CIVRSAGNKLTF

SEQ ID NO: 356260 - protein, 15 aa, Homo sapiens
  CDR3 for beta chain variable domain of TCR clone 178130 (TRBV7-6, TRBJ1-2)
CASSSGGRGGYGHTF

SEQ ID NO: 356261 - protein, 16 aa, Homo sapiens
  CDR3 for alpha chain variable domain of TCR clone 178131 (TRAV26-1, TRAJ38)
CIVRPLNAGHNRKLIW

SEQ ID NO: 356262 - protein, 13 aa, Homo sapiens
  CDR3 for beta chain variable domain of TCR clone 178131 (TRBV18, TRBJ1-1)
CASSPNGDTEAFF

SEQ ID NO: 356263 - protein, 15 aa, Homo sapiens
  CDR3 for alpha chain variable domain of TCR clone 178132 (TRAV6, TRAJ52)
CSLTAGGTSYGKLTF

SEQ ID NO: 356264 - protein, 14 aa, Homo sapiens
  CDR3 for beta chain variable domain of TCR clone 178132 (TRBV11-2, TRBJ2-1)
CASTTGQGNNEQFF

SEQ ID NO: 356265 - protein, 13 aa, Homo sapiens
  CDR3 for alpha chain variable domain of TCR clone 178133 (TRAV17, TRAJ15)
CATDARAGTALIF

SEQ ID NO: 356266 - protein, 14 aa, Homo sapiens
  CDR3 for beta chain variable domain of TCR clone 178133 (TRBV7-2, TRBJ2-5)
CASSIRLTEETQYF

SEQ ID NO: 356267 - protein, 11 aa, Homo sapiens
  CDR3 for alpha chain variable domain of TCR clone 178134 (TRAV13-1, TRAJ15)
CAATPGTAMLF

SEQ ID NO: 356268 - protein, 17 aa, Homo sapiens
  CDR3 for beta chain variable domain of TCR clone 178134 (TRBV13, TRBJ2-3)
CASSLSRVAGGRNTQYF

SEQ ID NO: 356269 - protein, 22 aa, Homo sapiens
  CDR3 for alpha chain variable domain of TCR clone 178135 (TRAV26-1, TRAJ52)
CCVLLHRQRAECWCTSYGKLTF

SEQ ID NO: 356270 - protein, 14 aa, Homo sapiens
  CDR3 for beta chain variable domain of TCR clone 178135 (TRBV6-6, TRBJ1-3)
CASVAGDSGNTIYF

SEQ ID NO: 356271 - protein, 14 aa, Homo sapiens
  CDR3 for alpha chain variable domain of TCR clone 178136 (TRAV38-1, TRAJ28)
CAFTSGAGSYQLTF

SEQ ID NO: 356272 - protein, 12 aa, Homo sapiens
  CDR3 for beta chain variable domain of TCR clone 178136 (TRBV11-2, TRBJ2-2)
CASSLGGGELFF

SEQ ID NO: 356273 - protein, 16 aa, Homo sapiens
  CDR3 for alpha chain variable domain of TCR clone 178137 (TRAV17, TRAJ39)
CFLLLPTGAAGNMLTF

SEQ ID NO: 356274 - protein, 14 aa, Homo sapiens
  CDR3 for beta chain variable domain of TCR clone 178137 (TRBV7-9, TRBJ1-2)
CASSRQGANYGYTF

SEQ ID NO: 356275 - protein, 19 aa, Homo sapiens
  CDR3 for alpha chain variable domain of TCR clone 178138 (TRAV26-1, TRAJ28)
CIVRVDHAYSGAGSYQLTF

SEQ ID NO: 356276 - protein, 15 aa, Homo sapiens
  CDR3 for beta chain variable domain of TCR clone 178138 (TRBV5-1, TRBJ1-3)
CASSSKTGAGNTIYF

SEQ ID NO: 356277 - protein, 12 aa, Homo sapiens
  CDR3 for alpha chain variable domain of TCR clone 178139 (TRAV25, TRAJ11)
CAGASGYSTLTF

SEQ ID NO: 356278 - protein, 16 aa, Homo sapiens
  CDR3 for beta chain variable domain of TCR clone 178139 (TRBV19, TRBJ1-6)
CASSVAPVAGNSPLHF

SEQ ID NO: 356279 - protein, 15 aa, Homo sapiens
  CDR3 for alpha chain variable domain of TCR clone 178140 (TRAV21, TRAJ13)
CAVPRSFWGLPESYL

SEQ ID NO: 356280 - protein, 16 aa, Homo sapiens
  CDR3 for beta chain variable domain of TCR clone 178140 (TRBV15, TRBJ1-2)
CATSRGPRTGGGGYTF

SEQ ID NO: 356281 - protein, 18 aa, Homo sapiens
  CDR3 for alpha chain variable domain of TCR clone 178141 (TRAV21, TRAJ52)
CAVRPSPAVGTSYGKLTF

SEQ ID NO: 356282 - protein, 18 aa, Homo sapiens
  CDR3 for beta chain variable domain of TCR clone 178141 (TRBV11-2, TRBJ2-3)
CASSLRGASRGAPNTQYF

SEQ ID NO: 356283 - protein, 13 aa, Homo sapiens
  CDR3 for alpha chain variable domain of TCR clone 178142 (TRAV8-6, TRAJ49)
CAVITKTGNQFYF

SEQ ID NO: 356284 - protein, 13 aa, Homo sapiens
  CDR3 for beta chain variable domain of TCR clone 178142 (TRBV7-9, TRBJ1-2)
CASSLKQNYGYTF

SEQ ID NO: 356285 - protein, 13 aa, Homo sapiens
  CDR3 for alpha chain variable domain of TCR clone 178143 (TRAV2, TRAJ40)
CAVVTSGTYKYIF

SEQ ID NO: 356286 - protein, 14 aa, Homo sapiens
  CDR3 for beta chain variable domain of TCR clone 178143 (TRBV19, TRBJ2-1)
CASPTFVVSGEQSF

SEQ ID NO: 356287 - protein, 11 aa, Homo sapiens
  CDR3 for alpha chain variable domain of TCR clone 178144 (TRAV1-1, TRAJ23)
CTKNQGGKLIF

SEQ ID NO: 356288 - protein, 17 aa, Homo sapiens
  CDR3 for beta chain variable domain of TCR clone 178144 (TRBV19, TRBJ2-6)
CVSSTGQVFSGANVLTF

SEQ ID NO: 356289 - protein, 12 aa, Homo sapiens
  CDR3 for alpha chain variable domain of TCR clone 178145 (TRAV12-2, TRAJ42)
CAVGGSQGNLIF

SEQ ID NO: 356290 - protein, 16 aa, Homo sapiens
  CDR3 for beta chain variable domain of TCR clone 178145 (TRBV5-4, TRBJ2-3)
CASQQPGAGGADTQYF

SEQ ID NO: 356291 - protein, 15 aa, Homo sapiens
  CDR3 for alpha chain variable domain of TCR clone 178146 (TRAV3, TRAJ22)
CAVRDRGGSARQLTF

SEQ ID NO: 356292 - protein, 15 aa, Homo sapiens
  CDR3 for beta chain variable domain of TCR clone 178146 (TRBV5-8, TRBJ2-3)
CQPAAGGGRADTQYF

SEQ ID NO: 356293 - protein, 13 aa, Homo sapiens
  CDR3 for alpha chain variable domain of TCR clone 178147 (TRAV13-1, TRAJ11)
CAASKEGYSTLTF

SEQ ID NO: 356294 - protein, 16 aa, Homo sapiens
  CDR3 for beta chain variable domain of TCR clone 178147 (TRBV23-1, TRBJ2-5)
CASTPRDRAQEETQYF

SEQ ID NO: 356295 - protein, 17 aa, Homo sapiens
  CDR3 for alpha chain variable domain of TCR clone 178148 (TRAV16, TRAJ42)
CALSPTLYGGSQGNLIF

SEQ ID NO: 356296 - protein, 13 aa, Homo sapiens
  CDR3 for beta chain variable domain of TCR clone 178148 (TRBV19, TRBJ1-5)
CASSTRRDQPQHF

SEQ ID NO: 356297 - protein, 14 aa, Homo sapiens
  CDR3 for alpha chain variable domain of TCR clone 178149 (TRAV12-2, TRAJ39)
CAVTPNNAGNMLPF

SEQ ID NO: 356298 - protein, 13 aa, Homo sapiens
  CDR3 for beta chain variable domain of TCR clone 178149 (TRBV7-9, TRBJ2-5)
CASSRGTKETQYF

SEQ ID NO: 356299 - protein, 13 aa, Homo sapiens
  CDR3 for alpha chain variable domain of TCR clone 178150 (TRAV21, TRAJ37)
CAVSSGNPGKLIF

SEQ ID NO: 356300 - protein, 15 aa, Homo sapiens
  CDR3 for beta chain variable domain of TCR clone 178150 (TRBV12-4, TRBJ1-2)
CASSFVDRGNYGYTF

SEQ ID NO: 356301 - protein, 13 aa, Homo sapiens
  CDR3 for alpha chain variable domain of TCR clone 178151 (TRAV26-1, TRAJ36)
CIAVRRGANNLFF

SEQ ID NO: 356302 - protein, 16 aa, Homo sapiens
  CDR3 for beta chain variable domain of TCR clone 178151 (TRBV27, TRBJ2-2)
CASSLSGFWVTGELFF

SEQ ID NO: 356303 - protein, 15 aa, Homo sapiens
  CDR3 for alpha chain variable domain of TCR clone 178152 (TRAV8-3, TRAJ40)
FAAPSLGSGTYKYIF

SEQ ID NO: 356304 - protein, 16 aa, Homo sapiens
  CDR3 for beta chain variable domain of TCR clone 178152 (TRBV7-3, TRBJ2-3)
CASSLSGYRPEDTQYF

SEQ ID NO: 356305 - protein, 14 aa, Homo sapiens
  CDR3 for alpha chain variable domain of TCR clone 178153 (TRAV12-1, TRAJ23)
CVVIVYNQGGKLIF

SEQ ID NO: 356306 - protein, 13 aa, Homo sapiens
  CDR3 for beta chain variable domain of TCR clone 178153 (TRBV11-2, TRBJ2-5)
CASIFSSQETQYF

SEQ ID NO: 356307 - protein, 14 aa, Homo sapiens
  CDR3 for alpha chain variable domain of TCR clone 178154 (TRAV12-2, TRAJ24)
CAVTPADSWGKLQF

SEQ ID NO: 356308 - protein, 15 aa, Homo sapiens
  CDR3 for beta chain variable domain of TCR clone 178154 (TRBV27, TRBJ2-1)
CASSNGGGSSNEKFF

SEQ ID NO: 356309 - protein, 16 aa, Homo sapiens
  CDR3 for alpha chain variable domain of TCR clone 178155 (TRAV12-3, TRAJ53)
CAMSPGGGGSNYKLTF

SEQ ID NO: 356310 - protein, 13 aa, Homo sapiens
  CDR3 for beta chain variable domain of TCR clone 178155 (TRBV12-5, TRBJ2-3)
CASGDRQSDTQYF

SEQ ID NO: 356311 - protein, 18 aa, Homo sapiens
  CDR3 for alpha chain variable domain of TCR clone 178156 (TRAV9-2, TRAJ52)
CALSRHNAGGTSYGKLTF

SEQ ID NO: 356312 - protein, 13 aa, Homo sapiens
  CDR3 for beta chain variable domain of TCR clone 178156 (TRBV20-1, TRBJ2-2)
CSASAAGTGELFF

SEQ ID NO: 356313 - protein, 15 aa, Homo sapiens
  CDR3 for alpha chain variable domain of TCR clone 178157 (TRAV17, TRAJ10)
CATVLLTGGGNKLTF

SEQ ID NO: 356314 - protein, 14 aa, Homo sapiens
  CDR3 for beta chain variable domain of TCR clone 178157 (TRBV19, TRBJ2-2)
CASSTLHRSGELFF

SEQ ID NO: 356315 - protein, 14 aa, Homo sapiens
  CDR3 for alpha chain variable domain of TCR clone 178158 (TRAV1-2, TRAJ16)
CAVNRFSDCQKLLF

SEQ ID NO: 356316 - protein, 12 aa, Homo sapiens
  CDR3 for beta chain variable domain of TCR clone 178158 (TRBV20-1, TRBJ1-5)
CSAAGWDQPQHF

SEQ ID NO: 356317 - protein, 15 aa, Homo sapiens
  CDR3 for alpha chain variable domain of TCR clone 178159 (TRAV26-2, TRAJ21)
CILSNTTSTNFTLDL

SEQ ID NO: 356318 - protein, 14 aa, Homo sapiens
  CDR3 for beta chain variable domain of TCR clone 178159 (TRBV7-2, TRBJ2-7)
CASRSQGAAYEQYF

SEQ ID NO: 356319 - protein, 13 aa, Homo sapiens
  CDR3 for alpha chain variable domain of TCR clone 178160 (TRAV12-3, TRAJ13)
CAMSSWGYQKVIF

SEQ ID NO: 356320 - protein, 14 aa, Homo sapiens
  CDR3 for beta chain variable domain of TCR clone 178160 (TRBV2, TRBJ2-1)
CASRTGSSYNEQFF

SEQ ID NO: 356321 - protein, 11 aa, Homo sapiens
  CDR3 for alpha chain variable domain of TCR clone 178161 (TRAV36/DV7, TRAJ36)
CAVIARRQTTS

SEQ ID NO: 356322 - protein, 13 aa, Homo sapiens
  CDR3 for beta chain variable domain of TCR clone 178161 (TRBV11-2, TRBJ2-5)
CASSRGPSETQYF

SEQ ID NO: 356323 - protein, 13 aa, Homo sapiens
  CDR3 for alpha chain variable domain of TCR clone 178162 (TRAV12-3, TRAJ54)
CAMTLQGAEKLVF

SEQ ID NO: 356324 - protein, 14 aa, Homo sapiens
  CDR3 for beta chain variable domain of TCR clone 178162 (TRBV4-1, TRBJ2-2)
CASSQAVNTGELFF

SEQ ID NO: 356325 - protein, 12 aa, Homo sapiens
  CDR3 for alpha chain variable domain of TCR clone 178163 (TRAV1-2, TRAJ8)
CAVRTGFQKLVF

SEQ ID NO: 356326 - protein, 13 aa, Homo sapiens
  CDR3 for beta chain variable domain of TCR clone 178163 (TRBV4-1, TRBJ2-3)
CASSQPPTDTQYF

SEQ ID NO: 356327 - protein, 17 aa, Homo sapiens
  CDR3 for alpha chain variable domain of TCR clone 178164 (TRAV4, TRAJ13)
CLVGVQGSSRGYQKGTF

SEQ ID NO: 356328 - protein, 13 aa, Homo sapiens
  CDR3 for beta chain variable domain of TCR clone 178164 (TRBV10-3, TRBJ2-7)
CASKLAVNYEQYF

SEQ ID NO: 356329 - protein, 11 aa, Homo sapiens
  CDR3 for alpha chain variable domain of TCR clone 178165 (TRAV3, TRAJ32)
CAVREGIMVVL

SEQ ID NO: 356330 - protein, 12 aa, Homo sapiens
  CDR3 for beta chain variable domain of TCR clone 178165 (TRBV11-2, TRBJ2-2)
CASSLGGGELFF

SEQ ID NO: 356331 - protein, 14 aa, Homo sapiens
  CDR3 for alpha chain variable domain of TCR clone 178166 (TRAV38-1, TRAJ28)
CAFTSGAGSYPLTF

SEQ ID NO: 356332 - protein, 18 aa, Homo sapiens
  CDR3 for beta chain variable domain of TCR clone 178166 (TRBV7-9, TRBJ1-1)
CASSKPCDTMGMNTEAFF

SEQ ID NO: 356333 - protein, 12 aa, Homo sapiens
  CDR3 for alpha chain variable domain of TCR clone 178167 (TRAV12-3, TRAJ20)
CAMVRGDYKLSF

SEQ ID NO: 356334 - protein, 16 aa, Homo sapiens
  CDR3 for beta chain variable domain of TCR clone 178167 (TRBV25-1, TRBJ1-1)
CASSGDRDRGRIEAFF

SEQ ID NO: 356335 - protein, 13 aa, Homo sapiens
  CDR3 for alpha chain variable domain of TCR clone 178168 (TRAV17, TRAJ26)
CATVDNYGQNFVF

SEQ ID NO: 356336 - protein, 16 aa, Homo sapiens
  CDR3 for beta chain variable domain of TCR clone 178168 (TRBV9, TRBJ2-2)
CASSAMGKGNTGELFF

SEQ ID NO: 356337 - protein, 14 aa, Homo sapiens
  CDR3 for alpha chain variable domain of TCR clone 178169 (TRAV1-2, TRAJ29)
CAVRELTSATPLVF

SEQ ID NO: 356338 - protein, 16 aa, Homo sapiens
  CDR3 for beta chain variable domain of TCR clone 178169 (TRBV7-8, TRBJ2-6)
CASRVGDSSGANVLTF

SEQ ID NO: 356339 - protein, 13 aa, Homo sapiens
  CDR3 for alpha chain variable domain of TCR clone 178170 (TRAV26-2, TRAJ37)
CIRGSSNTGKLIF

SEQ ID NO: 356340 - protein, 18 aa, Homo sapiens
  CDR3 for beta chain variable domain of TCR clone 178170 (TRBV18, TRBJ1-3)
CASSPRGGAGPSGNTIYF

SEQ ID NO: 356341 - protein, 12 aa, Homo sapiens
  CDR3 for alpha chain variable domain of TCR clone 178171 (TRAV3, TRAJ43)
CAVRDPNNDMRF

SEQ ID NO: 356342 - protein, 15 aa, Homo sapiens
  CDR3 for beta chain variable domain of TCR clone 178171 (TRBV27, TRBJ1-5)
CASSLGTGVDQPQHF

SEQ ID NO: 356343 - protein, 13 aa, Homo sapiens
  CDR3 for alpha chain variable domain of TCR clone 178172 (TRAV16, TRAJ9)
CALSNTGGFKTIF

SEQ ID NO: 356344 - protein, 11 aa, Homo sapiens
  CDR3 for beta chain variable domain of TCR clone 178172 (TRBV12-4, TRBJ2-3)
CASTATDTQYF

SEQ ID NO: 356345 - protein, 14 aa, Homo sapiens
  CDR3 for alpha chain variable domain of TCR clone 178173 (TRAV12-3, TRAJ10)
SHLPLTGGGNKLTF

SEQ ID NO: 356346 - protein, 15 aa, Homo sapiens
  CDR3 for beta chain variable domain of TCR clone 178173 (TRBV19, TRBJ2-1)
CASSIQATSYNEQFF

SEQ ID NO: 356347 - protein, 18 aa, Homo sapiens
  CDR3 for alpha chain variable domain of TCR clone 178174 (TRAV26-1, TRAJ52)
CIVRVEGAGGTSYGKLTF

SEQ ID NO: 356348 - protein, 16 aa, Homo sapiens
  CDR3 for beta chain variable domain of TCR clone 178174 (TRBV2, TRBJ2-4)
CASSEAPGGEQNIQYF

SEQ ID NO: 356349 - protein, 16 aa, Homo sapiens
  CDR3 for alpha chain variable domain of TCR clone 178175 (TRAV3, TRAJ10)
CAVRDMRAGGGNKLTF

SEQ ID NO: 356350 - protein, 15 aa, Homo sapiens
  CDR3 for beta chain variable domain of TCR clone 178175 (TRBV9, TRBJ1-6)
CASSVAGTGDSHLHF

SEQ ID NO: 356351 - protein, 14 aa, Homo sapiens
  CDR3 for alpha chain variable domain of TCR clone 178176 (TRAV22, TRAJ28)
CAVASGAGSYQLTF

SEQ ID NO: 356352 - protein, 16 aa, Homo sapiens
  CDR3 for beta chain variable domain of TCR clone 178176 (TRBV10-2, TRBJ2-5)
CASSGGGRPSTSGQAR

SEQ ID NO: 356353 - protein, 14 aa, Homo sapiens
  CDR3 for alpha chain variable domain of TCR clone 178177 (TRAV8-3, TRAJ39)
CAVGTNNAGNMLTF

SEQ ID NO: 356354 - protein, 12 aa, Homo sapiens
  CDR3 for beta chain variable domain of TCR clone 178177 (TRBV28, TRBJ1-3)
CASVSSGNTIYF

SEQ ID NO: 356355 - protein, 13 aa, Homo sapiens
  CDR3 for alpha chain variable domain of TCR clone 178178 (TRAV2, TRAJ40)
CAVVTSGTYKYIF

SEQ ID NO: 356356 - protein, 19 aa, Homo sapiens
  CDR3 for beta chain variable domain of TCR clone 178178 (TRBV4-1, TRBJ2-1)
RASSQGPLPGLGSRNEQFF

SEQ ID NO: 356357 - protein, 14 aa, Homo sapiens
  CDR3 for alpha chain variable domain of TCR clone 178179 (TRAV12-1, TRAJ42)
CVVIYGGSPGNLIF

SEQ ID NO: 356358 - protein, 13 aa, Homo sapiens
  CDR3 for beta chain variable domain of TCR clone 178179 (TRBV18, TRBJ2-5)
CASSPPGKETQYF

SEQ ID NO: 356359 - protein, 14 aa, Homo sapiens
  CDR3 for alpha chain variable domain of TCR clone 178180 (TRAV13-2, TRAJ17)
CAENGKAAGNKLTF

SEQ ID NO: 356360 - protein, 16 aa, Homo sapiens
  CDR3 for beta chain variable domain of TCR clone 178180 (TRBV7-3, TRBJ2-1)
CASSLVSGSSNNEQFF

SEQ ID NO: 356361 - protein, 13 aa, Homo sapiens
  CDR3 for alpha chain variable domain of TCR clone 178181 (TRAV21, TRAJ21)
CAVKGFELQQILL

SEQ ID NO: 356362 - protein, 13 aa, Homo sapiens
  CDR3 for beta chain variable domain of TCR clone 178181 (TRBV18, TRBJ1-1)
CASSPETRPEAFF

SEQ ID NO: 356363 - protein, 15 aa, Homo sapiens
  CDR3 for alpha chain variable domain of TCR clone 178182 (TRAV26-1, TRAJ40)
CIVRVTISGTYKYIF

SEQ ID NO: 356364 - protein, 12 aa, Homo sapiens
  CDR3 for beta chain variable domain of TCR clone 178182 (TRBV7-9, TRBJ1-4)
CASSTDREKLFF

SEQ ID NO: 356365 - protein, 12 aa, Homo sapiens
  CDR3 for alpha chain variable domain of TCR clone 178183 (TRAV29/DV5, TRAJ49)
CAATDTGNQFSF

SEQ ID NO: 356366 - protein, 15 aa, Homo sapiens
  CDR3 for beta chain variable domain of TCR clone 178183 (TRBV19, TRBJ2-2)
CASRQTGADTGELFF

SEQ ID NO: 356367 - protein, 14 aa, Homo sapiens
  CDR3 for alpha chain variable domain of TCR clone 178184 (TRAV1-2, TRAJ16)
CAVNRFSDGQKLLF

SEQ ID NO: 356368 - protein, 14 aa, Homo sapiens
  CDR3 for beta chain variable domain of TCR clone 178184 (TRBV5-5, TRBJ1-1)
CASSLTPVNTEAFF

SEQ ID NO: 356369 - protein, 14 aa, Homo sapiens
  CDR3 for alpha chain variable domain of TCR clone 178185 (TRAV3, TRAJ22)
CAVRDYGSARQLTF

SEQ ID NO: 356370 - protein, 17 aa, Homo sapiens
  CDR3 for beta chain variable domain of TCR clone 178185 (TRBV19, TRBJ2-7)
CASSISFYDSYPYEQYF

SEQ ID NO: 356371 - protein, 14 aa, Homo sapiens
  CDR3 for alpha chain variable domain of TCR clone 178186 (TRAV8-4, TRAJ48)
TAVLFNFGNEKLTF

SEQ ID NO: 356372 - protein, 12 aa, Homo sapiens
  CDR3 for beta chain variable domain of TCR clone 178186 (TRBV7-3, TRBJ1-2)
CASSKKGVPVTF

SEQ ID NO: 356373 - protein, 22 aa, Homo sapiens
  CDR3 for alpha chain variable domain of TCR clone 178187 (TRAV8-3, )
CAVGGTTVRANIQNPDPAVYQL

SEQ ID NO: 356374 - protein, 15 aa, Homo sapiens
  CDR3 for beta chain variable domain of TCR clone 178187 (TRBV12-4, TRBJ2-5)
CASSPPTGLQETQYF

SEQ ID NO: 356375 - protein, 12 aa, Homo sapiens
  CDR3 for alpha chain variable domain of TCR clone 178188 (TRAV21, TRAJ49)
CAVNDGGNQLYF

SEQ ID NO: 356376 - protein, 14 aa, Homo sapiens
  CDR3 for beta chain variable domain of TCR clone 178188 (TRBV12-5, TRBJ2-5)
CASGSRTHQETQYF

SEQ ID NO: 356377 - protein, 15 aa, Homo sapiens
  CDR3 for alpha chain variable domain of TCR clone 178189 (TRAV3, TRAJ20)
CAVRDIKLSDYKLSF

SEQ ID NO: 356378 - protein, 18 aa, Homo sapiens
  CDR3 for beta chain variable domain of TCR clone 178189 (TRBV20-1, TRBJ2-5)
CSQTGDSGSLGGKETQYF

SEQ ID NO: 356379 - protein, 16 aa, Homo sapiens
  CDR3 for alpha chain variable domain of TCR clone 178190 (TRAV30, TRAJ24)
CGTEIVDADSWGKFQF

SEQ ID NO: 356380 - protein, 15 aa, Homo sapiens
  CDR3 for beta chain variable domain of TCR clone 178190 (TRBV9, TRBJ1-6)
CASSVAGTGDSPLYF

SEQ ID NO: 356381 - protein, 15 aa, Homo sapiens
  CDR3 for alpha chain variable domain of TCR clone 178191 (TRAV17, TRAJ56)
CATEPFPGANSKLQF

SEQ ID NO: 356382 - protein, 15 aa, Homo sapiens
  CDR3 for beta chain variable domain of TCR clone 178191 (TRBV28, TRBJ1-5)
CASSRTGGYVQPQHF

SEQ ID NO: 356383 - protein, 12 aa, Homo sapiens
  CDR3 for alpha chain variable domain of TCR clone 178192 (TRAV8-1, TRAJ6)
CASPGGSYLPTF

SEQ ID NO: 356384 - protein, 12 aa, Homo sapiens
  CDR3 for beta chain variable domain of TCR clone 178192 (TRBV19, TRBJ1-1)
CASMNRYTEAFF

SEQ ID NO: 356385 - protein, 20 aa, Homo sapiens
  CDR3 for alpha chain variable domain of TCR clone 178193 (TRAV12-2, TRAJ52)
SPVIQPPARAGGTSNGKLTF

SEQ ID NO: 356386 - protein, 16 aa, Homo sapiens
  CDR3 for beta chain variable domain of TCR clone 178193 (TRBV15, TRBJ1-2)
CATSRGPRTGGGGYTF

SEQ ID NO: 356387 - protein, 13 aa, Homo sapiens
  CDR3 for alpha chain variable domain of TCR clone 178194 (TRAV21, TRAJ27)
CAARPGNAGKSTF

SEQ ID NO: 356388 - protein, 14 aa, Homo sapiens
  CDR3 for beta chain variable domain of TCR clone 178194 (TRBV11-2, TRBJ2-7)
FASSLGAGAYEQCF

SEQ ID NO: 356389 - protein, 15 aa, Homo sapiens
  CDR3 for alpha chain variable domain of TCR clone 178195 (TRAV3, TRAJ5)
CAVRDRKKGRRELTF

SEQ ID NO: 356390 - protein, 15 aa, Homo sapiens
  CDR3 for beta chain variable domain of TCR clone 178195 (TRBV7-8, TRBJ2-1)
CASSLADSLYNEQSF

SEQ ID NO: 356391 - protein, 16 aa, Homo sapiens
  CDR3 for alpha chain variable domain of TCR clone 178196 (TRAV30, TRAJ24)
CGTELVDADSWGKFQF

SEQ ID NO: 356392 - protein, 16 aa, Homo sapiens
  CDR3 for beta chain variable domain of TCR clone 178196 (TRBV6-1, TRBJ2-1)
CASILRQGSSYNEQFF

SEQ ID NO: 356393 - protein, 15 aa, Homo sapiens
  CDR3 for alpha chain variable domain of TCR clone 178197 (TRAV38-1, TRAJ37)
CAFIFGSGNTGKLIF

SEQ ID NO: 356394 - protein, 15 aa, Homo sapiens
  CDR3 for beta chain variable domain of TCR clone 178197 (TRBV7-2, TRBJ1-2)
CASSPRAGWNYGYTF

SEQ ID NO: 356395 - protein, 19 aa, Homo sapiens
  CDR3 for alpha chain variable domain of TCR clone 178198 (TRAV17, TRAJ17)
CATDGRPGVIKAAGNKLTV

SEQ ID NO: 356396 - protein, 15 aa, Homo sapiens
  CDR3 for beta chain variable domain of TCR clone 178198 (TRBV27, TRBJ2-1)
CASSNGGGSSNEQFF

SEQ ID NO: 356397 - protein, 12 aa, Homo sapiens
  CDR3 for alpha chain variable domain of TCR clone 178199 (TRAV21, TRAJ13)
PGPSGGYQKVTF

SEQ ID NO: 356398 - protein, 15 aa, Homo sapiens
  CDR3 for beta chain variable domain of TCR clone 178199 (TRBV7-9, TRBJ1-6)
CASSSPGRGTSPLHF

SEQ ID NO: 356399 - protein, 14 aa, Homo sapiens
  CDR3 for alpha chain variable domain of TCR clone 178200 (TRAV29/DV5, TRAJ36)
CAARRKTGANNLFF

SEQ ID NO: 356400 - protein, 13 aa, Homo sapiens
  CDR3 for beta chain variable domain of TCR clone 178200 (TRBV11-2, TRBJ2-1)
CASSSEAYNEQFF

SEQ ID NO: 356401 - protein, 16 aa, Homo sapiens
  CDR3 for alpha chain variable domain of TCR clone 178201 (TRAV3, TRAJ37)
CAVRVRGSGNTGKLIF

SEQ ID NO: 356402 - protein, 11 aa, Homo sapiens
  CDR3 for beta chain variable domain of TCR clone 178201 (TRBV11-2, TRBJ2-2)
CASSLLGELFF

SEQ ID NO: 356403 - protein, 15 aa, Homo sapiens
  CDR3 for alpha chain variable domain of TCR clone 178202 (TRAV35, TRAJ23)
CAGQRGYNQGGKLSF

SEQ ID NO: 356404 - protein, 16 aa, Homo sapiens
  CDR3 for beta chain variable domain of TCR clone 178202 (TRBV27, TRBJ2-1)
CASSSRLAGNYNEQFF

SEQ ID NO: 356405 - protein, 11 aa, Homo sapiens
  CDR3 for alpha chain variable domain of TCR clone 178203 (TRAV21, TRAJ9)
CAVPGGFKTIF

SEQ ID NO: 356406 - protein, 15 aa, Homo sapiens
  CDR3 for beta chain variable domain of TCR clone 178203 (TRBV7-2, TRBJ1-2)
CASSLVSGGDYGYTF

SEQ ID NO: 356407 - protein, 12 aa, Homo sapiens
  CDR3 for alpha chain variable domain of TCR clone 178204 (TRAV13-2, TRAJ23)
CAERHRGGKLIF

SEQ ID NO: 356408 - protein, 16 aa, Homo sapiens
  CDR3 for beta chain variable domain of TCR clone 178204 (TRBV7-3, TRBJ2-2)
GGTQPCIQWNTGELFF

SEQ ID NO: 356409 - protein, 14 aa, Homo sapiens
  CDR3 for alpha chain variable domain of TCR clone 178205 (TRAV16, TRAJ42)
CALLAGGSQGNRIF

SEQ ID NO: 356410 - protein, 15 aa, Homo sapiens
  CDR3 for beta chain variable domain of TCR clone 178205 (TRBV2, TRBJ2-7)
CASSEGLARSYEQYF

SEQ ID NO: 356411 - protein, 15 aa, Homo sapiens
  CDR3 for alpha chain variable domain of TCR clone 178206 (TRAV21, TRAJ24)
SAARSSTDRWGKLQF

SEQ ID NO: 356412 - protein, 13 aa, Homo sapiens
  CDR3 for beta chain variable domain of TCR clone 178206 (TRBV11-2, TRBJ2-5)
CASSSTGEETQYF

SEQ ID NO: 356413 - protein, 14 aa, Homo sapiens
  CDR3 for alpha chain variable domain of TCR clone 178207 (TRAV8-4, TRAJ47)
CAVSIMEYGNKLVF

SEQ ID NO: 356414 - protein, 16 aa, Homo sapiens
  CDR3 for beta chain variable domain of TCR clone 178207 (TRBV14, TRBJ1-2)
CASSQGPTTASYGYTF

SEQ ID NO: 356415 - protein, 12 aa, Homo sapiens
  CDR3 for alpha chain variable domain of TCR clone 178208 (TRAV12-1, TRAJ40)
CVVYSGAYKYIF

SEQ ID NO: 356416 - protein, 14 aa, Homo sapiens
  CDR3 for beta chain variable domain of TCR clone 178208 (TRBV7-9, TRBJ2-5)
CASSLGTAQETQHF

SEQ ID NO: 356417 - protein, 12 aa, Homo sapiens
  CDR3 for alpha chain variable domain of TCR clone 178209 (TRAV25, TRAJ33)
CAGPDSNYQLIW

SEQ ID NO: 356418 - protein, 20 aa, Homo sapiens
  CDR3 for beta chain variable domain of TCR clone 178209 (TRBV4-1, TRBJ2-2)
CVSSQASPPGLASNAGELFF

SEQ ID NO: 356419 - protein, 11 aa, Homo sapiens
  CDR3 for alpha chain variable domain of TCR clone 178210 (TRAV21, TRAJ34)
CAHYNTNKLIF

SEQ ID NO: 356420 - protein, 16 aa, Homo sapiens
  CDR3 for beta chain variable domain of TCR clone 178210 (TRBV10-2, TRBJ1-1)
CASSEFGEGASTEAFF

SEQ ID NO: 356421 - protein, 15 aa, Homo sapiens
  CDR3 for alpha chain variable domain of TCR clone 178211 (TRAV3, TRAJ22)
CAVRDRGGSPRQLTF

SEQ ID NO: 356422 - protein, 16 aa, Homo sapiens
  CDR3 for beta chain variable domain of TCR clone 178211 (TRBV11-2, TRBJ2-1)
CASARGSYSHHNEQFF

SEQ ID NO: 356423 - protein, 14 aa, Homo sapiens
  CDR3 for alpha chain variable domain of TCR clone 178212 (TRAV26-1, TRAJ38)
CIADNAGNNRKLIW

SEQ ID NO: 356424 - protein, 17 aa, Homo sapiens
  CDR3 for beta chain variable domain of TCR clone 178212 (TRBV24-1, TRBJ2-1)
CATSDVSTSGTYNEQFF

SEQ ID NO: 356425 - protein, 13 aa, Homo sapiens
  CDR3 for alpha chain variable domain of TCR clone 178213 (TRAV20, TRAJ21)
CAVEGYNFNKFYF

SEQ ID NO: 356426 - protein, 17 aa, Homo sapiens
  CDR3 for beta chain variable domain of TCR clone 178213 (TRBV28, TRBJ2-1)
CASSSASQALTYNEQFF

SEQ ID NO: 356427 - protein, 12 aa, Homo sapiens
  CDR3 for alpha chain variable domain of TCR clone 178214 (TRAV21, TRAJ3)
CCFYSNASKIIF

SEQ ID NO: 356428 - protein, 15 aa, Homo sapiens
  CDR3 for beta chain variable domain of TCR clone 178214 (TRBV20-1, TRBJ2-7)
CSARDRVSGMDEQYF

SEQ ID NO: 356429 - protein, 14 aa, Homo sapiens
  CDR3 for alpha chain variable domain of TCR clone 178215 (TRAV12-2, TRAJ6)
CASKWGGGSYIPTF

SEQ ID NO: 356430 - protein, 13 aa, Homo sapiens
  CDR3 for beta chain variable domain of TCR clone 178215 (TRBV2, TRBJ1-1)
CASSEGGNTEAFC

SEQ ID NO: 356431 - protein, 14 aa, Homo sapiens
  CDR3 for alpha chain variable domain of TCR clone 178216 (TRAV8-3, TRAJ15)
CAVGRHQAGTALIF

SEQ ID NO: 356432 - protein, 16 aa, Homo sapiens
  CDR3 for beta chain variable domain of TCR clone 178216 (TRBV7-3, TRBJ2-1)
CASSLVSGSSNNEQFF

SEQ ID NO: 356433 - protein, 15 aa, Homo sapiens
  CDR3 for alpha chain variable domain of TCR clone 178217 (TRAV2, TRAJ9)
CAVEDLGTGGFKTIF

SEQ ID NO: 356434 - protein, 16 aa, Homo sapiens
  CDR3 for beta chain variable domain of TCR clone 178217 (TRBV12-4, TRBJ1-5)
CASSRPVGGSNQPQHF

SEQ ID NO: 356435 - protein, 10 aa, Homo sapiens
  CDR3 for alpha chain variable domain of TCR clone 178218 (TRAV14/DV4, TRAJ27)
CAMREANQPL

SEQ ID NO: 356436 - protein, 14 aa, Homo sapiens
  CDR3 for beta chain variable domain of TCR clone 178218 (TRBV4-2, TRBJ2-1)
CASGLDRAYNEQFF

SEQ ID NO: 356437 - protein, 15 aa, Homo sapiens
  CDR3 for alpha chain variable domain of TCR clone 178219 (TRAV12-1, TRAJ9)
CVVSFGDNGGFKTIF

SEQ ID NO: 356438 - protein, 15 aa, Homo sapiens
  CDR3 for beta chain variable domain of TCR clone 178219 (TRBV20-1, TRBJ2-7)
CSARDRVSGMDEQYF

SEQ ID NO: 356439 - protein, 15 aa, Homo sapiens
  CDR3 for alpha chain variable domain of TCR clone 178220 (TRAV12-2, TRAJ9)
CAVNNERTGAFKTIF

SEQ ID NO: 356440 - protein, 14 aa, Homo sapiens
  CDR3 for beta chain variable domain of TCR clone 178220 (TRBV4-1, TRBJ1-4)
CASSQERKNEKLFF

SEQ ID NO: 356441 - protein, 15 aa, Homo sapiens
  CDR3 for alpha chain variable domain of TCR clone 178221 (TRAV27, TRAJ38)
CAAHRNACTNRKLIW

SEQ ID NO: 356442 - protein, 17 aa, Homo sapiens
  CDR3 for beta chain variable domain of TCR clone 178221 (TRBV20-1, TRBJ2-2)
CSASGSGQGGLTGELFF

SEQ ID NO: 356443 - protein, 14 aa, Homo sapiens
  CDR3 for alpha chain variable domain of TCR clone 178222 (TRAV26-1, TRAJ39)
CIVFTNNAGNMLTF

SEQ ID NO: 356444 - protein, 15 aa, Homo sapiens
  CDR3 for beta chain variable domain of TCR clone 178222 (TRBV9, TRBJ1-6)
CASSVAGTGDSPLHF

SEQ ID NO: 356445 - protein, 14 aa, Homo sapiens
  CDR3 for alpha chain variable domain of TCR clone 178223 (TRAV1-2, TRAJ16)
CAVNRFSDGQKLLF

SEQ ID NO: 356446 - protein, 13 aa, Homo sapiens
  CDR3 for beta chain variable domain of TCR clone 178223 (TRBV7-3, TRBJ1-1)
CASSQDWGTEAFF

SEQ ID NO: 356447 - protein, 15 aa, Homo sapiens
  CDR3 for alpha chain variable domain of TCR clone 178224 (TRAV13-1, TRAJ42)
CAASELWRKPRKSHL

SEQ ID NO: 356448 - protein, 16 aa, Homo sapiens
  CDR3 for beta chain variable domain of TCR clone 178224 (TRBV19, TRBJ1-5)
CASSIDRGGPRQPQHF

SEQ ID NO: 356449 - protein, 16 aa, Homo sapiens
  CDR3 for alpha chain variable domain of TCR clone 178225 (TRAV12-1, TRAJ53)
CVVTSVAGGSNYKLTL

SEQ ID NO: 356450 - protein, 14 aa, Homo sapiens
  CDR3 for beta chain variable domain of TCR clone 178225 (TRBV7-9, TRBJ2-5)
CASSLDTAQETQYF

SEQ ID NO: 356451 - protein, 16 aa, Homo sapiens
  CDR3 for alpha chain variable domain of TCR clone 178226 (TRAV3, TRAJ22)
CAVRDMGSGSARQLTF

SEQ ID NO: 356452 - protein, 11 aa, Homo sapiens
  CDR3 for beta chain variable domain of TCR clone 178226 (TRBV10-1, TRBJ2-3)
CASSDSDTQYF

SEQ ID NO: 356453 - protein, 11 aa, Homo sapiens
  CDR3 for alpha chain variable domain of TCR clone 178227 (TRAV3, TRAJ21)
CAVGNFNKFYF

SEQ ID NO: 356454 - protein, 13 aa, Homo sapiens
  CDR3 for beta chain variable domain of TCR clone 178227 (TRBV7-9, TRBJ1-2)
CASSLKQTYGYTF

SEQ ID NO: 356455 - protein, 11 aa, Homo sapiens
  CDR3 for alpha chain variable domain of TCR clone 178228 (TRAV3, TRAJ21)
CAVGNFNKFYF

SEQ ID NO: 356456 - protein, 16 aa, Homo sapiens
  CDR3 for beta chain variable domain of TCR clone 178228 (TRBV7-2, TRBJ1-5)
CASSWTGGPGNQPQHF

SEQ ID NO: 356457 - protein, 16 aa, Homo sapiens
  CDR3 for alpha chain variable domain of TCR clone 178229 (TRAV27, TRAJ18)
CAGAGNRGSTLGRLYF

SEQ ID NO: 356458 - protein, 14 aa, Homo sapiens
  CDR3 for beta chain variable domain of TCR clone 178229 (TRBV19, TRBJ2-1)
CASPTFVLSGEQFF

SEQ ID NO: 356459 - protein, 14 aa, Homo sapiens
  CDR3 for alpha chain variable domain of TCR clone 178230 (TRAV26-1, TRAJ38)
CIADNAGNNRKLIR

SEQ ID NO: 356460 - protein, 15 aa, Homo sapiens
  CDR3 for beta chain variable domain of TCR clone 178230 (TRBV7-6, TRBJ1-4)
CASSLGAGAGEKLFF

SEQ ID NO: 356461 - protein, 14 aa, Homo sapiens
  CDR3 for alpha chain variable domain of TCR clone 178231 (TRAV13-1, TRAJ44)
CAAKETGTASKLTF

SEQ ID NO: 356462 - protein, 17 aa, Homo sapiens
  CDR3 for beta chain variable domain of TCR clone 178231 (TRBV7-3, TRBJ2-3)
RASSLMKRMRGADTQYF

SEQ ID NO: 356463 - protein, 14 aa, Homo sapiens
  CDR3 for alpha chain variable domain of TCR clone 178232 (TRAV14/DV4, TRAJ11)
CAMRSNSGYSTLTF

SEQ ID NO: 356464 - protein, 11 aa, Homo sapiens
  CDR3 for beta chain variable domain of TCR clone 178232 (TRBV7-9, TRBJ2-3)
CASSGPDTQYF

SEQ ID NO: 356465 - protein, 13 aa, Homo sapiens
  CDR3 for alpha chain variable domain of TCR clone 178233 (TRAV16, TRAJ28)
CALTGAGSYQLTF

SEQ ID NO: 356466 - protein, 15 aa, Homo sapiens
  CDR3 for beta chain variable domain of TCR clone 178233 (TRBV10-3, TRBJ1-3)
CAISDSQGAGNTIYF

SEQ ID NO: 356467 - protein, 12 aa, Homo sapiens
  CDR3 for alpha chain variable domain of TCR clone 178234 (TRAV26-2, TRAJ48)
CILRKGNEKLTF

SEQ ID NO: 356468 - protein, 14 aa, Homo sapiens
  CDR3 for beta chain variable domain of TCR clone 178234 (TRBV28, TRBJ2-7)
CASSTLRGGFEQYF

SEQ ID NO: 356469 - protein, 18 aa, Homo sapiens
  CDR3 for alpha chain variable domain of TCR clone 178235 (TRAV27, TRAJ13)
PLPLCRSSNSGGYQKVTF

SEQ ID NO: 356470 - protein, 10 aa, Homo sapiens
  CDR3 for beta chain variable domain of TCR clone 178235 (TRBV2, TRBJ2-5)
CASSAATQYF

SEQ ID NO: 356471 - protein, 15 aa, Homo sapiens
  CDR3 for alpha chain variable domain of TCR clone 178236 (TRAV17, TRAJ57)
CATGPSQGGSEKLVV

SEQ ID NO: 356472 - protein, 14 aa, Homo sapiens
  CDR3 for beta chain variable domain of TCR clone 178236 (TRBV12-5, TRBJ2-5)
CASGSRTHHETQYF

SEQ ID NO: 356473 - protein, 12 aa, Homo sapiens
  CDR3 for alpha chain variable domain of TCR clone 178237 (TRAV38-2/DV8, TRAJ48)
CAYRRGREKLTF

SEQ ID NO: 356474 - protein, 14 aa, Homo sapiens
  CDR3 for beta chain variable domain of TCR clone 178237 (TRBV7-3, TRBJ2-1)
CASSLAGGTNEQFF

SEQ ID NO: 356475 - protein, 13 aa, Homo sapiens
  CDR3 for alpha chain variable domain of TCR clone 178238 (TRAV27, TRAJ37)
CAGGPSNTGKLIL

SEQ ID NO: 356476 - protein, 13 aa, Homo sapiens
  CDR3 for beta chain variable domain of TCR clone 178238 (TRBV19, TRBJ1-2)
CASSVPGQDGYTF

SEQ ID NO: 356477 - protein, 17 aa, Homo sapiens
  CDR3 for alpha chain variable domain of TCR clone 178239 (TRAV8-6, TRAJ58)
CAVSSWVGETSGPRLTF

SEQ ID NO: 356478 - protein, 14 aa, Homo sapiens
  CDR3 for beta chain variable domain of TCR clone 178239 (TRBV7-2, TRBJ2-7)
CASRSQGAAYEQYF

SEQ ID NO: 356479 - protein, 14 aa, Homo sapiens
  CDR3 for alpha chain variable domain of TCR clone 178240 (TRAV26-1, TRAJ21)
CIVRPPYNFYKFYF

SEQ ID NO: 356480 - protein, 14 aa, Homo sapiens
  CDR3 for beta chain variable domain of TCR clone 178240 (TRBV11-3, TRBJ2-1)
CASSATTSGSIQFF

SEQ ID NO: 356481 - protein, 12 aa, Homo sapiens
  CDR3 for alpha chain variable domain of TCR clone 178241 (TRAV27, TRAJ9)
CAGESGCFKTIF

SEQ ID NO: 356482 - protein, 14 aa, Homo sapiens
  CDR3 for beta chain variable domain of TCR clone 178241 (TRBV6-1, TRBJ2-1)
CASAKDGFYNEQFF

SEQ ID NO: 356483 - protein, 14 aa, Homo sapiens
  CDR3 for alpha chain variable domain of TCR clone 178242 (TRAV12-3, TRAJ42)
CAMNYGGSQGNLIF

SEQ ID NO: 356484 - protein, 14 aa, Homo sapiens
  CDR3 for beta chain variable domain of TCR clone 178242 (TRBV7-2, TRBJ2-5)
CASSFTQGQETQYC

SEQ ID NO: 356485 - protein, 15 aa, Homo sapiens
  CDR3 for alpha chain variable domain of TCR clone 178243 (TRAV26-1, TRAJ40)
CIDRYATSGTYKYIF

SEQ ID NO: 356486 - protein, 15 aa, Homo sapiens
  CDR3 for beta chain variable domain of TCR clone 178243 (TRBV27, TRBJ2-1)
CASSNGGGSSNEQFF

SEQ ID NO: 356487 - protein, 15 aa, Homo sapiens
  CDR3 for alpha chain variable domain of TCR clone 178244 (TRAV17, TRAJ57)
CATGPSQGGSEKLVF

SEQ ID NO: 356488 - protein, 18 aa, Homo sapiens
  CDR3 for beta chain variable domain of TCR clone 178244 (TRBV20-1, TRBJ2-6)
CSARTLAGGPSGANVLTF

SEQ ID NO: 356489 - protein, 11 aa, Homo sapiens
  CDR3 for alpha chain variable domain of TCR clone 178245 (TRAV3, TRAJ49)
CAPITVNQLYF

SEQ ID NO: 356490 - protein, 13 aa, Homo sapiens
  CDR3 for beta chain variable domain of TCR clone 178245 (TRBV4-2, TRBJ1-1)
CASSQAGNTEAFF

SEQ ID NO: 356491 - protein, 14 aa, Homo sapiens
  CDR3 for alpha chain variable domain of TCR clone 178246 (TRAV38-1, TRAJ29)
FAFITPSGNTPLVF

SEQ ID NO: 356492 - protein, 14 aa, Homo sapiens
  CDR3 for beta chain variable domain of TCR clone 178246 (TRBV18, TRBJ2-7)
CASSPRGGAYEHYF

SEQ ID NO: 356493 - protein, 17 aa, Homo sapiens
  CDR3 for alpha chain variable domain of TCR clone 178247 (TRAV29/DV5, TRAJ40)
CAASVIYTTSGTYQYIF

SEQ ID NO: 356494 - protein, 12 aa, Homo sapiens
  CDR3 for beta chain variable domain of TCR clone 178247 (TRBV6-1, TRBJ2-1)
CQQHDRNNEQFF

SEQ ID NO: 356495 - protein, 10 aa, Homo sapiens
  CDR3 for alpha chain variable domain of TCR clone 178248 (TRAV8-4, TRAJ43)
CAVSADDMRF

SEQ ID NO: 356496 - protein, 15 aa, Homo sapiens
  CDR3 for beta chain variable domain of TCR clone 178248 (TRBV5-1, TRBJ2-3)
CASSVTSGSRDTQYF

SEQ ID NO: 356497 - protein, 14 aa, Homo sapiens
  CDR3 for alpha chain variable domain of TCR clone 178249 (TRAV2, TRAJ37)
CAVDFTSNTGKLIF

SEQ ID NO: 356498 - protein, 15 aa, Homo sapiens
  CDR3 for beta chain variable domain of TCR clone 178249 (TRBV4-2, TRBJ2-3)
CASSPAGGGIDTQYF

SEQ ID NO: 356499 - protein, 16 aa, Homo sapiens
  CDR3 for alpha chain variable domain of TCR clone 178250 (TRAV1-1, TRAJ29)
CAVRSTRNSGNTPLVF

SEQ ID NO: 356500 - protein, 16 aa, Homo sapiens
  CDR3 for beta chain variable domain of TCR clone 178250 (TRBV27, TRBJ1-1)
CASSSRGRTGYTESFF

SEQ ID NO: 356501 - protein, 14 aa, Homo sapiens
  CDR3 for alpha chain variable domain of TCR clone 178251 (TRAV27, TRAJ36)
CAGPPKRGANNLFL

SEQ ID NO: 356502 - protein, 15 aa, Homo sapiens
  CDR3 for beta chain variable domain of TCR clone 178251 (TRBV18, TRBJ2-7)
IPSSPASTPNYEQYF

SEQ ID NO: 356503 - protein, 14 aa, Homo sapiens
  CDR3 for alpha chain variable domain of TCR clone 178252 (TRAV8-4, TRAJ13)
CAVTLSGGYQKVTF

SEQ ID NO: 356504 - protein, 14 aa, Homo sapiens
  CDR3 for beta chain variable domain of TCR clone 178252 (TRBV7-2, TRBJ1-2)
CASSQTESTYGYIF

SEQ ID NO: 356505 - protein, 12 aa, Homo sapiens
  CDR3 for alpha chain variable domain of TCR clone 178253 (TRAV41, TRAJ58)
CAVETSGSRLTF

SEQ ID NO: 356506 - protein, 15 aa, Homo sapiens
  CDR3 for beta chain variable domain of TCR clone 178253 (TRBV5-1, TRBJ2-2)
CASSLFGQNTGELFF

SEQ ID NO: 356507 - protein, 15 aa, Homo sapiens
  CDR3 for alpha chain variable domain of TCR clone 178254 (TRAV3, TRAJ22)
CAVRDRGGSARQMPF

SEQ ID NO: 356508 - protein, 13 aa, Homo sapiens
  CDR3 for beta chain variable domain of TCR clone 178254 (TRBV7-9, TRBJ2-3)
CASSPGSTDTQYF

SEQ ID NO: 356509 - protein, 13 aa, Homo sapiens
  CDR3 for alpha chain variable domain of TCR clone 178255 (TRAV27, TRAJ8)
CAGGPTGFQKLVF

SEQ ID NO: 356510 - protein, 13 aa, Homo sapiens
  CDR3 for beta chain variable domain of TCR clone 178255 (TRBV18, TRBJ2-5)
CASSLQGQETQYF

SEQ ID NO: 356511 - protein, 15 aa, Homo sapiens
  CDR3 for alpha chain variable domain of TCR clone 178256 (TRAV3, TRAJ20)
CAVRDIKLSDYKLSF

SEQ ID NO: 356512 - protein, 14 aa, Homo sapiens
  CDR3 for beta chain variable domain of TCR clone 178256 (TRBV7-9, TRBJ1-6)
CASSVMTDYSPLHF

SEQ ID NO: 356513 - protein, 17 aa, Homo sapiens
  CDR3 for alpha chain variable domain of TCR clone 178257 (TRAV26-1, TRAJ28)
CIVRVPDSGAGSYQLTF

SEQ ID NO: 356514 - protein, 17 aa, Homo sapiens
  CDR3 for beta chain variable domain of TCR clone 178257 (TRBV28, TRBJ2-7)
CGSSPLPAGGKSYEQYF

SEQ ID NO: 356515 - protein, 12 aa, Homo sapiens
  CDR3 for alpha chain variable domain of TCR clone 178258 (TRAV36/DV7, TRAJ13)
CVSSGGYQKVTF

SEQ ID NO: 356516 - protein, 15 aa, Homo sapiens
  CDR3 for beta chain variable domain of TCR clone 178258 (TRBV11-2, TRBJ2-2)
CASSSDRVNAGELFF

SEQ ID NO: 356517 - protein, 11 aa, Homo sapiens
  CDR3 for alpha chain variable domain of TCR clone 178259 (TRAV8-1, TRAJ8)
CAMTGFQKLVF

SEQ ID NO: 356518 - protein, 15 aa, Homo sapiens
  CDR3 for beta chain variable domain of TCR clone 178259 (TRBV11-2, TRBJ2-1)
CASSLGTSGLNEQFF

SEQ ID NO: 356519 - protein, 17 aa, Homo sapiens
  CDR3 for alpha chain variable domain of TCR clone 178260 (TRAV26-1, TRAJ37)
CIVRVITVSSNTGKLIF

SEQ ID NO: 356520 - protein, 15 aa, Homo sapiens
  CDR3 for beta chain variable domain of TCR clone 178260 (TRBV9, TRBJ1-6)
CSSSVAGTGDSPLHF

SEQ ID NO: 356521 - protein, 14 aa, Homo sapiens
  CDR3 for alpha chain variable domain of TCR clone 178261 (TRAV23/DV6, TRAJ40)
CAASLTSGTYKYIF

SEQ ID NO: 356522 - protein, 15 aa, Homo sapiens
  CDR3 for beta chain variable domain of TCR clone 178261 (TRBV7-3, TRBJ2-3)
CASSLGLTLGDTQYF

SEQ ID NO: 356523 - protein, 16 aa, Homo sapiens
  CDR3 for alpha chain variable domain of TCR clone 178262 (TRAV9-2, TRAJ52)
CALQGAGGTSYGKLKF

SEQ ID NO: 356524 - protein, 15 aa, Homo sapiens
  CDR3 for beta chain variable domain of TCR clone 178262 (TRBV18, TRBJ1-5)
CASSPSDKSNQPQHF

SEQ ID NO: 356525 - protein, 14 aa, Homo sapiens
  CDR3 for alpha chain variable domain of TCR clone 178263 (TRAV16, TRAJ33)
CALSAMASNYQLIW

SEQ ID NO: 356526 - protein, 17 aa, Homo sapiens
  CDR3 for beta chain variable domain of TCR clone 178263 (TRBV25-1, TRBJ2-7)
CASSDARVVFSSYEQYF

SEQ ID NO: 356527 - protein, 17 aa, Homo sapiens
  CDR3 for alpha chain variable domain of TCR clone 178264 (TRAV21, TRAJ52)
CCRPSPAGGTSYGKLTF

SEQ ID NO: 356528 - protein, 17 aa, Homo sapiens
  CDR3 for beta chain variable domain of TCR clone 178264 (TRBV13, TRBJ2-3)
CASSLARVAGGRNTQYF

SEQ ID NO: 356529 - protein, 16 aa, Homo sapiens
  CDR3 for alpha chain variable domain of TCR clone 178265 (TRAV30, TRAJ24)
CGTETVDADSWGKFQF

SEQ ID NO: 356530 - protein, 13 aa, Homo sapiens
  CDR3 for beta chain variable domain of TCR clone 178265 (TRBV6-3, TRBJ1-6)
CASSEGTGPPLHF

SEQ ID NO: 356531 - protein, 11 aa, Homo sapiens
  CDR3 for alpha chain variable domain of TCR clone 178266 (TRAV2, TRAJ23)
CAVETRGKLIF

SEQ ID NO: 356532 - protein, 12 aa, Homo sapiens
  CDR3 for beta chain variable domain of TCR clone 178266 (TRBV7-2, TRBJ2-5)
CASSQYQETQYF

SEQ ID NO: 356533 - protein, 14 aa, Homo sapiens
  CDR3 for alpha chain variable domain of TCR clone 178267 (TRAV25, TRAJ42)
CAGNYGGSQGNLIF

SEQ ID NO: 356534 - protein, 13 aa, Homo sapiens
  CDR3 for beta chain variable domain of TCR clone 178267 (TRBV15, TRBJ1-6)
CATSGGLNSPLHF

SEQ ID NO: 356535 - protein, 12 aa, Homo sapiens
  CDR3 for alpha chain variable domain of TCR clone 178268 (TRAV3, TRAJ20)
CAVRDGDYKLSF

SEQ ID NO: 356536 - protein, 15 aa, Homo sapiens
  CDR3 for beta chain variable domain of TCR clone 178268 (TRBV6-6, TRBJ2-7)
CASSYSYGGSYEQYF

SEQ ID NO: 356537 - protein, 12 aa, Homo sapiens
  CDR3 for alpha chain variable domain of TCR clone 178269 (TRAV2, TRAJ5)
CALDTGRSALTF

SEQ ID NO: 356538 - protein, 15 aa, Homo sapiens
  CDR3 for beta chain variable domain of TCR clone 178269 (TRBV10-3, TRBJ2-1)
CAISDVQDRAYEQFF

SEQ ID NO: 356539 - protein, 15 aa, Homo sapiens
  CDR3 for alpha chain variable domain of TCR clone 178270 (TRAV2, TRAJ24)
CAVVRLKNSWGKLQF

SEQ ID NO: 356540 - protein, 14 aa, Homo sapiens
  CDR3 for beta chain variable domain of TCR clone 178270 (TRBV25-1, TRBJ1-1)
CASTHLGGNTEAFF

SEQ ID NO: 356541 - protein, 14 aa, Homo sapiens
  CDR3 for alpha chain variable domain of TCR clone 178271 (TRAV26-1, TRAJ45)
CIVRVVGGDDGLTF

SEQ ID NO: 356542 - protein, 16 aa, Homo sapiens
  CDR3 for beta chain variable domain of TCR clone 178271 (TRBV7-9, TRBJ1-1)
CASSLTQVRSNTEAFF

SEQ ID NO: 356543 - protein, 14 aa, Homo sapiens
  CDR3 for alpha chain variable domain of TCR clone 178272 (TRAV12-2, TRAJ17)
CAVLFKAAGNKLTF

SEQ ID NO: 356544 - protein, 14 aa, Homo sapiens
  CDR3 for beta chain variable domain of TCR clone 178272 (TRBV7-2, TRBJ2-7)
CASRSQAAAYEQYF

SEQ ID NO: 356545 - protein, 13 aa, Homo sapiens
  CDR3 for alpha chain variable domain of TCR clone 178273 (TRAV35, TRAJ48)
CAGNEFGNEKLTF

SEQ ID NO: 356546 - protein, 13 aa, Homo sapiens
  CDR3 for beta chain variable domain of TCR clone 178273 (TRBV7-2, TRBJ1-6)
CASSLVGSSPLHF

SEQ ID NO: 356547 - protein, 13 aa, Homo sapiens
  CDR3 for alpha chain variable domain of TCR clone 178274 (TRAV12-3, TRAJ7)
CAMTPYGNNRLAF

SEQ ID NO: 356548 - protein, 13 aa, Homo sapiens
  CDR3 for beta chain variable domain of TCR clone 178274 (TRBV7-3, TRBJ2-1)
CASSPVAYNEQFF

SEQ ID NO: 356549 - protein, 13 aa, Homo sapiens
  CDR3 for alpha chain variable domain of TCR clone 178275 (TRAV3, TRAJ27)
CAVRPLGAGKSTF

SEQ ID NO: 356550 - protein, 16 aa, Homo sapiens
  CDR3 for beta chain variable domain of TCR clone 178275 (TRBV5-1, TRBJ2-2)
CASSLWDTTNTGELFF

SEQ ID NO: 356551 - protein, 12 aa, Homo sapiens
  CDR3 for alpha chain variable domain of TCR clone 178276 (TRAV16, TRAJ10)
CSRTGGGNKLTF

SEQ ID NO: 356552 - protein, 14 aa, Homo sapiens
  CDR3 for beta chain variable domain of TCR clone 178276 (TRBV18, TRBJ2-7)
CASSPGGGAYEQYF

SEQ ID NO: 356553 - protein, 13 aa, Homo sapiens
  CDR3 for alpha chain variable domain of TCR clone 178277 (TRAV38-2/DV8, TRAJ34)
CAYRTWNTDKLIF

SEQ ID NO: 356554 - protein, 15 aa, Homo sapiens
  CDR3 for beta chain variable domain of TCR clone 178277 (TRBV10-2, TRBJ2-6)
CASSEQGTGANVLTF

SEQ ID NO: 356555 - protein, 15 aa, Homo sapiens
  CDR3 for alpha chain variable domain of TCR clone 178278 (TRAV17, TRAJ52)
CATEAGGTSYGKLTI

SEQ ID NO: 356556 - protein, 14 aa, Homo sapiens
  CDR3 for beta chain variable domain of TCR clone 178278 (TRBV28, TRBJ1-5)
CASSLGVLVKPQHF

SEQ ID NO: 356557 - protein, 15 aa, Homo sapiens
  CDR3 for alpha chain variable domain of TCR clone 178279 (TRAV2, TRAJ9)
CAVEDRGTGGFKTIF

SEQ ID NO: 356558 - protein, 13 aa, Homo sapiens
  CDR3 for beta chain variable domain of TCR clone 178279 (TRBV19, TRBJ1-2)
CASSVPGQDGDTF

SEQ ID NO: 356559 - protein, 15 aa, Homo sapiens
  CDR3 for alpha chain variable domain of TCR clone 178280 (TRAV8-3, TRAJ45)
CASSYSGGGADGLTF

SEQ ID NO: 356560 - protein, 12 aa, Homo sapiens
  CDR3 for beta chain variable domain of TCR clone 178280 (TRBV10-3, TRBJ2-7)
CASSLGGYEQYF

SEQ ID NO: 356561 - protein, 14 aa, Homo sapiens
  CDR3 for alpha chain variable domain of TCR clone 178281 (TRAV12-2, TRAJ44)
CAVNPAGTASKLTF

SEQ ID NO: 356562 - protein, 16 aa, Homo sapiens
  CDR3 for beta chain variable domain of TCR clone 178281 (TRBV2, TRBJ2-6)
CASSEVGGAGANFLTF

SEQ ID NO: 356563 - protein, 15 aa, Homo sapiens
  CDR3 for alpha chain variable domain of TCR clone 178282 (TRAV25, TRAJ52)
CAGTSGSTSYGKLTF

SEQ ID NO: 356564 - protein, 16 aa, Homo sapiens
  CDR3 for beta chain variable domain of TCR clone 178282 (TRBV15, TRBJ1-2)
CANSRGPRTGGGGYTF

SEQ ID NO: 356565 - protein, 18 aa, Homo sapiens
  CDR3 for alpha chain variable domain of TCR clone 178283 (TRAV21, TRAJ53)
CAVKGGENSGGSNYKLTF

SEQ ID NO: 356566 - protein, 13 aa, Homo sapiens
  CDR3 for beta chain variable domain of TCR clone 178283 (TRBV12-5, TRBJ2-3)
CASGDRQSDTQYF

SEQ ID NO: 356567 - protein, 17 aa, Homo sapiens
  CDR3 for alpha chain variable domain of TCR clone 178284 (TRAV3, TRAJ42)
CAVRDRDYGGSQGYLIF

SEQ ID NO: 356568 - protein, 14 aa, Homo sapiens
  CDR3 for beta chain variable domain of TCR clone 178284 (TRBV25-1, TRBJ1-1)
CASTHLGGNTEAFF

SEQ ID NO: 356569 - protein, 11 aa, Homo sapiens
  CDR3 for alpha chain variable domain of TCR clone 178285 (TRAV2, TRAJ13)
CASGGYQKVTF

SEQ ID NO: 356570 - protein, 14 aa, Homo sapiens
  CDR3 for beta chain variable domain of TCR clone 178285 (TRBV7-8, TRBJ2-5)
CASSATGGQETQYF

SEQ ID NO: 356571 - protein, 15 aa, Homo sapiens
  CDR3 for alpha chain variable domain of TCR clone 178286 (TRAV25, TRAJ52)
CAVLPGGTSYGKLTF

SEQ ID NO: 356572 - protein, 17 aa, Homo sapiens
  CDR3 for beta chain variable domain of TCR clone 178286 (TRBV7-8, TRBJ2-6)
CASSAGTGGAGANVLTF

SEQ ID NO: 356573 - protein, 15 aa, Homo sapiens
  CDR3 for alpha chain variable domain of TCR clone 178287 (TRAV27, TRAJ38)
CAARRNAGNNRKLIW

SEQ ID NO: 356574 - protein, 16 aa, Homo sapiens
  CDR3 for beta chain variable domain of TCR clone 178287 (TRBV20-1, TRBJ2-1)
CSARDLKQGMNNEQFF

SEQ ID NO: 356575 - protein, 15 aa, Homo sapiens
  CDR3 for alpha chain variable domain of TCR clone 178288 (TRAV38-1, TRAJ57)
CAFMDSQGGSEKLFS

SEQ ID NO: 356576 - protein, 16 aa, Homo sapiens
  CDR3 for beta chain variable domain of TCR clone 178288 (TRBV10-3, TRBJ2-1)
CAIRGGGRGDYNEQFF

SEQ ID NO: 356577 - protein, 13 aa, Homo sapiens
  CDR3 for alpha chain variable domain of TCR clone 178289 (TRAV27, TRAJ57)
CRSAQGGSEKLIF

SEQ ID NO: 356578 - protein, 11 aa, Homo sapiens
  CDR3 for beta chain variable domain of TCR clone 178289 (TRBV11-2, TRBJ1-1)
CASSINTEAFF

SEQ ID NO: 356579 - protein, 13 aa, Homo sapiens
  CDR3 for alpha chain variable domain of TCR clone 178290 (TRAV12-2, TRAJ9)
CAAKSAGGFKTIF

SEQ ID NO: 356580 - protein, 15 aa, Homo sapiens
  CDR3 for beta chain variable domain of TCR clone 178290 (TRBV5-1, TRBJ1-4)
CASSLTADSDEKLFF

SEQ ID NO: 356581 - protein, 14 aa, Homo sapiens
  CDR3 for alpha chain variable domain of TCR clone 178291 (TRAV13-2, TRAJ45)
CAEMSGGGADGITF

SEQ ID NO: 356582 - protein, 14 aa, Homo sapiens
  CDR3 for beta chain variable domain of TCR clone 178291 (TRBV2, TRBJ1-4)
CASNQGGLSLGLFF

SEQ ID NO: 356583 - protein, 12 aa, Homo sapiens
  CDR3 for alpha chain variable domain of TCR clone 178292 (TRAV12-3, TRAJ17)
CAMTLTGNKLTF

SEQ ID NO: 356584 - protein, 16 aa, Homo sapiens
  CDR3 for beta chain variable domain of TCR clone 178292 (TRBV18, TRBJ2-7)
CASSPRSQGISYEQYF

SEQ ID NO: 356585 - protein, 12 aa, Homo sapiens
  CDR3 for alpha chain variable domain of TCR clone 178293 (TRAV13-1, TRAJ5)
CAAKAGRRALTF

SEQ ID NO: 356586 - protein, 13 aa, Homo sapiens
  CDR3 for beta chain variable domain of TCR clone 178293 (TRBV7-9, TRBJ1-2)
CAISLKQNYGYTF

SEQ ID NO: 356587 - protein, 14 aa, Homo sapiens
  CDR3 for alpha chain variable domain of TCR clone 178294 (TRAV12-2, TRAJ17)
CAVLFKAAGNKLTF

SEQ ID NO: 356588 - protein, 15 aa, Homo sapiens
  CDR3 for beta chain variable domain of TCR clone 178294 (TRBV4-3, TRBJ2-7)
CASSQGGRGIYEQYF

SEQ ID NO: 356589 - protein, 12 aa, Homo sapiens
  CDR3 for alpha chain variable domain of TCR clone 178295 (TRAV12-1, TRAJ40)
CVVYSGTYKYIF

SEQ ID NO: 356590 - protein, 12 aa, Homo sapiens
  CDR3 for beta chain variable domain of TCR clone 178295 (TRBV7-3, TRBJ1-1)
CQQPGLGAEAFF

SEQ ID NO: 356591 - protein, 14 aa, Homo sapiens
  CDR3 for alpha chain variable domain of TCR clone 178296 (TRAV13-1, TRAJ35)
CAASKGGFGNVLHC

SEQ ID NO: 356592 - protein, 15 aa, Homo sapiens
  CDR3 for beta chain variable domain of TCR clone 178296 (TRBV18, TRBJ2-7)
CASSSAPTGNYEKYF

SEQ ID NO: 356593 - protein, 14 aa, Homo sapiens
  CDR3 for alpha chain variable domain of TCR clone 178297 (TRAV13-1, TRAJ13)
CAASRVGGYQKVTF

SEQ ID NO: 356594 - protein, 14 aa, Homo sapiens
  CDR3 for beta chain variable domain of TCR clone 178297 (TRBV7-9, TRBJ2-4)
CASSLAMGGNIQYF

SEQ ID NO: 356595 - protein, 16 aa, Homo sapiens
  CDR3 for alpha chain variable domain of TCR clone 178298 (TRAV1-1, TRAJ45)
CSVRAYSGGGADGLTF

SEQ ID NO: 356596 - protein, 13 aa, Homo sapiens
  CDR3 for beta chain variable domain of TCR clone 178298 (TRBV20-1, TRBJ1-2)
CSARGTADYGYTF

SEQ ID NO: 356597 - protein, 16 aa, Homo sapiens
  CDR3 for alpha chain variable domain of TCR clone 178299 (TRAV29/DV5, TRAJ28)
CAADAYSVAGSYQLTF

SEQ ID NO: 356598 - protein, 15 aa, Homo sapiens
  CDR3 for beta chain variable domain of TCR clone 178299 (TRBV24-1, TRBJ1-4)
CATSDPQGADEKLFF

SEQ ID NO: 356599 - protein, 17 aa, Homo sapiens
  CDR3 for alpha chain variable domain of TCR clone 178300 (TRAV26-1, TRAJ22)
CIVRVPSHSGSARQLTF

SEQ ID NO: 356600 - protein, 16 aa, Homo sapiens
  CDR3 for beta chain variable domain of TCR clone 178300 (TRBV19, TRBJ2-2)
CASRSPGTGATGELFF

SEQ ID NO: 356601 - protein, 14 aa, Homo sapiens
  CDR3 for alpha chain variable domain of TCR clone 178301 (TRAV1-2, TRAJ16)
CAVNRFSDGQKLLF

SEQ ID NO: 356602 - protein, 16 aa, Homo sapiens
  CDR3 for beta chain variable domain of TCR clone 178301 (TRBV20-1, TRBJ1-4)
CSAPRQGLLTNEQLFF

SEQ ID NO: 356603 - protein, 14 aa, Homo sapiens
  CDR3 for alpha chain variable domain of TCR clone 178302 (TRAV1-2, TRAJ16)
CAVNRFSDGQKLLF

SEQ ID NO: 356604 - protein, 18 aa, Homo sapiens
  CDR3 for beta chain variable domain of TCR clone 178302 (TRBV4-1, TRBJ1-1)
CASSQDSSGGGFWAEAFF

SEQ ID NO: 356605 - protein, 16 aa, Homo sapiens
  CDR3 for alpha chain variable domain of TCR clone 178303 (TRAV12-2, TRAJ37)
CAVKEKGSSNTVKLIF

SEQ ID NO: 356606 - protein, 12 aa, Homo sapiens
  CDR3 for beta chain variable domain of TCR clone 178303 (TRBV10-1, TRBJ1-5)
CASSDSNQPQHF

SEQ ID NO: 356607 - protein, 12 aa, Homo sapiens
  CDR3 for alpha chain variable domain of TCR clone 178304 (TRAV36/DV7, TRAJ54)
CAVVRGAQKLVF

SEQ ID NO: 356608 - protein, 13 aa, Homo sapiens
  CDR3 for beta chain variable domain of TCR clone 178304 (TRBV7-2, TRBJ2-5)
CASSQTSVETQYF

SEQ ID NO: 356609 - protein, 14 aa, Homo sapiens
  CDR3 for alpha chain variable domain of TCR clone 178305 (TRAV8-4, TRAJ40)
CAVLSTSGTYKYIF

SEQ ID NO: 356610 - protein, 16 aa, Homo sapiens
  CDR3 for beta chain variable domain of TCR clone 178305 (TRBV7-3, TRBJ2-2)
CASSLKRGTLSGELFF

SEQ ID NO: 356611 - protein, 18 aa, Homo sapiens
  CDR3 for alpha chain variable domain of TCR clone 178306 (TRAV26-1, TRAJ52)
CIVRVEGAGGTSYGKVTF

SEQ ID NO: 356612 - protein, 13 aa, Homo sapiens
  CDR3 for beta chain variable domain of TCR clone 178306 (TRBV7-3, TRBJ1-2)
CASSLKRGYGYTF

SEQ ID NO: 356613 - protein, 13 aa, Homo sapiens
  CDR3 for alpha chain variable domain of TCR clone 178307 (TRAV12-3, TRAJ33)
CAMSVNSNYQLIW

SEQ ID NO: 356614 - protein, 14 aa, Homo sapiens
  CDR3 for beta chain variable domain of TCR clone 178307 (TRBV6-3, TRBJ2-7)
CASSYSVRVYEQYF

SEQ ID NO: 356615 - protein, 18 aa, Homo sapiens
  CDR3 for alpha chain variable domain of TCR clone 178308 (TRAV13-1, TRAJ52)
CAASERSAGGTSYGKLTF

SEQ ID NO: 356616 - protein, 13 aa, Homo sapiens
  CDR3 for beta chain variable domain of TCR clone 178308 (TRBV12-4, TRBJ1-2)
CASSVRQGKGYTF

SEQ ID NO: 356617 - protein, 15 aa, Homo sapiens
  CDR3 for alpha chain variable domain of TCR clone 178309 (TRAV21, TRAJ53)
CTTLNSGGSNYKLTF

SEQ ID NO: 356618 - protein, 16 aa, Homo sapiens
  CDR3 for beta chain variable domain of TCR clone 178309 (TRBV9, TRBJ2-1)
CASSVGGGGNYNEQFF

SEQ ID NO: 356619 - protein, 12 aa, Homo sapiens
  CDR3 for alpha chain variable domain of TCR clone 178310 (TRAV22, TRAJ43)
CAVELNNNDMRF

SEQ ID NO: 356620 - protein, 12 aa, Homo sapiens
  CDR3 for beta chain variable domain of TCR clone 178310 (TRBV24-1, TRBJ1-1)
CATSDSDRGAFF

SEQ ID NO: 356621 - protein, 14 aa, Homo sapiens
  CDR3 for alpha chain variable domain of TCR clone 178311 (TRAV27, TRAJ44)
CAASFTVTASKLTF

SEQ ID NO: 356622 - protein, 13 aa, Homo sapiens
  CDR3 for beta chain variable domain of TCR clone 178311 (TRBV27, TRBJ2-3)
CATSRGGLYTQYF

SEQ ID NO: 356623 - protein, 14 aa, Homo sapiens
  CDR3 for alpha chain variable domain of TCR clone 178312 (TRAV26-1, TRAJ39)
CIVRGPRAGNMRTL

SEQ ID NO: 356624 - protein, 15 aa, Homo sapiens
  CDR3 for beta chain variable domain of TCR clone 178312 (TRBV7-9, TRBJ1-5)
CASSQGHQPNQPQHF

SEQ ID NO: 356625 - protein, 16 aa, Homo sapiens
  CDR3 for alpha chain variable domain of TCR clone 178313 (TRAV3, TRAJ10)
CAVRDMRAGGGNKLTF

SEQ ID NO: 356626 - protein, 16 aa, Homo sapiens
  CDR3 for beta chain variable domain of TCR clone 178313 (TRBV4-1, TRBJ1-1)
CASSSMSERPNTEAFF

SEQ ID NO: 356627 - protein, 14 aa, Homo sapiens
  CDR3 for alpha chain variable domain of TCR clone 178314 (TRAV8-3, TRAJ4)
CVVGASGGYNKLIF

SEQ ID NO: 356628 - protein, 16 aa, Homo sapiens
  CDR3 for beta chain variable domain of TCR clone 178314 (TRBV4-3, TRBJ2-2)
CASSHLQGSGTGELFF

SEQ ID NO: 356629 - protein, 14 aa, Homo sapiens
  CDR3 for alpha chain variable domain of TCR clone 178315 (TRAV8-2, TRAJ17)
CAVSEGAAGNKLTF

SEQ ID NO: 356630 - protein, 13 aa, Homo sapiens
  CDR3 for beta chain variable domain of TCR clone 178315 (TRBV19, TRBJ2-1)
CASSRYRVNEQFF

SEQ ID NO: 356631 - protein, 17 aa, Homo sapiens
  CDR3 for alpha chain variable domain of TCR clone 178316 (TRAV3, TRAJ42)
CAVRDRDYGGSQGNRIF

SEQ ID NO: 356632 - protein, 15 aa, Homo sapiens
  CDR3 for beta chain variable domain of TCR clone 178316 (TRBV4-1, TRBJ2-5)
CASSQWDLYQETQYF

SEQ ID NO: 356633 - protein, 16 aa, Homo sapiens
  CDR3 for alpha chain variable domain of TCR clone 178317 (TRAV16, TRAJ4)
FARSRMFSGGYNKLIF

SEQ ID NO: 356634 - protein, 16 aa, Homo sapiens
  CDR3 for beta chain variable domain of TCR clone 178317 (TRBV24-1, TRBJ2-3)
CATSDPGTGATDTQYF

SEQ ID NO: 356635 - protein, 13 aa, Homo sapiens
  CDR3 for alpha chain variable domain of TCR clone 178318 (TRAV12-2, TRAJ43)
CAVSGDNNNDMRF

SEQ ID NO: 356636 - protein, 14 aa, Homo sapiens
  CDR3 for beta chain variable domain of TCR clone 178318 (TRBV19, TRBJ2-3)
CASSAPRGTDTQYF

SEQ ID NO: 356637 - protein, 17 aa, Homo sapiens
  CDR3 for alpha chain variable domain of TCR clone 178319 (TRAV3, TRAJ12)
CAVRDGGRIDSSYKLIF

SEQ ID NO: 356638 - protein, 13 aa, Homo sapiens
  CDR3 for beta chain variable domain of TCR clone 178319 (TRBV4-2, TRBJ1-1)
CASSQAGNTEAFF

SEQ ID NO: 356639 - protein, 11 aa, Homo sapiens
  CDR3 for alpha chain variable domain of TCR clone 178320 (TRAV4, TRAJ21)
CLIYNFNKFHF

SEQ ID NO: 356640 - protein, 13 aa, Homo sapiens
  CDR3 for beta chain variable domain of TCR clone 178320 (TRBV6-1, TRBJ2-7)
CASSADTSYERYF

SEQ ID NO: 356641 - protein, 13 aa, Homo sapiens
  CDR3 for alpha chain variable domain of TCR clone 178321 (TRAV3, TRAJ20)
CAVRDTPRYKLSF

SEQ ID NO: 356642 - protein, 15 aa, Homo sapiens
  CDR3 for beta chain variable domain of TCR clone 178321 (TRBV27, TRBJ2-5)
CASSLYPRGGETQYF

SEQ ID NO: 356643 - protein, 11 aa, Homo sapiens
  CDR3 for alpha chain variable domain of TCR clone 178322 (TRAV21, TRAJ27)
CAVRMQVNQPL

SEQ ID NO: 356644 - protein, 16 aa, Homo sapiens
  CDR3 for beta chain variable domain of TCR clone 178322 (TRBV3-1, TRBJ2-7)
CASSQGATGVAYEQYF

SEQ ID NO: 356645 - protein, 17 aa, Homo sapiens
  CDR3 for alpha chain variable domain of TCR clone 178323 (TRAV16, TRAJ37)
CAFWLKNGSSNTGKLIF

SEQ ID NO: 356646 - protein, 13 aa, Homo sapiens
  CDR3 for beta chain variable domain of TCR clone 178323 (TRBV7-3, TRBJ1-1)
CASSQDWGAEAFF

SEQ ID NO: 356647 - protein, 10 aa, Homo sapiens
  CDR3 for alpha chain variable domain of TCR clone 178324 (TRAV30, TRAJ34)
CGTNPDNLIF

SEQ ID NO: 356648 - protein, 12 aa, Homo sapiens
  CDR3 for beta chain variable domain of TCR clone 178324 (TRBV19, TRBJ1-1)
CASSLSDTEAFF

SEQ ID NO: 356649 - protein, 12 aa, Homo sapiens
  CDR3 for alpha chain variable domain of TCR clone 178325 (TRAV13-1, TRAJ21)
CAAKEGFNKFYF

SEQ ID NO: 356650 - protein, 15 aa, Homo sapiens
  CDR3 for beta chain variable domain of TCR clone 178325 (TRBV25-1, TRBJ1-4)
CASSPGDSANEKLFF

SEQ ID NO: 356651 - protein, 15 aa, Homo sapiens
  CDR3 for alpha chain variable domain of TCR clone 178326 (TRAV27, TRAJ53)
CAGVVGGGSNYKLTF

SEQ ID NO: 356652 - protein, 13 aa, Homo sapiens
  CDR3 for beta chain variable domain of TCR clone 178326 (TRBV10-3, TRBJ2-7)
CASKLAVNYEQYF

SEQ ID NO: 356653 - protein, 16 aa, Homo sapiens
  CDR3 for alpha chain variable domain of TCR clone 178327 (TRAV4, TRAJ8)
CLGGDSGNTGFQKLVF

SEQ ID NO: 356654 - protein, 15 aa, Homo sapiens
  CDR3 for beta chain variable domain of TCR clone 178327 (TRBV15, TRBJ1-2)
CATSRVRASGSGYTF

SEQ ID NO: 356655 - protein, 11 aa, Homo sapiens
  CDR3 for alpha chain variable domain of TCR clone 178328 (TRAV1-1, TRAJ23)
CAVRQGGKLIF

SEQ ID NO: 356656 - protein, 14 aa, Homo sapiens
  CDR3 for beta chain variable domain of TCR clone 178328 (TRBV19, TRBJ2-1)
CASPTFVLSGELFF

SEQ ID NO: 356657 - protein, 11 aa, Homo sapiens
  CDR3 for alpha chain variable domain of TCR clone 178329 (TRAV17, TRAJ9)
CGFTGGFKTIF

SEQ ID NO: 356658 - protein, 18 aa, Homo sapiens
  CDR3 for beta chain variable domain of TCR clone 178329 (TRBV19, TRBJ2-1)
CASPRDPSGGKNYNEQFF

SEQ ID NO: 356659 - protein, 12 aa, Homo sapiens
  CDR3 for alpha chain variable domain of TCR clone 178330 (TRAV35, TRAJ49)
CAGWTTGNQFYF

SEQ ID NO: 356660 - protein, 16 aa, Homo sapiens
  CDR3 for beta chain variable domain of TCR clone 178330 (TRBV5-1, TRBJ2-2)
CASSLWDTTNTGELFF

SEQ ID NO: 356661 - protein, 11 aa, Homo sapiens
  CDR3 for alpha chain variable domain of TCR clone 178331 (TRAV21, TRAJ20)
CAHYNTNKLSF

SEQ ID NO: 356662 - protein, 17 aa, Homo sapiens
  CDR3 for beta chain variable domain of TCR clone 178331 (TRBV5-1, TRBJ2-1)
CASSMGLAGEGYNEQFF

SEQ ID NO: 356663 - protein, 12 aa, Homo sapiens
  CDR3 for alpha chain variable domain of TCR clone 178332 (TRAV13-2, TRAJ23)
CAERHRGGKLIF

SEQ ID NO: 356664 - protein, 13 aa, Homo sapiens
  CDR3 for beta chain variable domain of TCR clone 178332 (TRBV15, TRBJ1-6)
CATSGGRNSPLHF

SEQ ID NO: 356665 - protein, 13 aa, Homo sapiens
  CDR3 for alpha chain variable domain of TCR clone 178333 (TRAV17, TRAJ40)
CAMAPGGTYKYIF

SEQ ID NO: 356666 - protein, 12 aa, Homo sapiens
  CDR3 for beta chain variable domain of TCR clone 178333 (TRBV2, TRBJ1-5)
CASSENRTPQHF

SEQ ID NO: 356667 - protein, 16 aa, Homo sapiens
  CDR3 for alpha chain variable domain of TCR clone 178334 (TRAV27, TRAJ52)
CAGAGAGGTSYGKLTF

SEQ ID NO: 356668 - protein, 17 aa, Homo sapiens
  CDR3 for beta chain variable domain of TCR clone 178334 (TRBV24-1, TRBJ2-3)
CATRDLPSGEDTDTQYF

SEQ ID NO: 356669 - protein, 11 aa, Homo sapiens
  CDR3 for alpha chain variable domain of TCR clone 178335 (TRAV1-2, TRAJ40)
CAVPGTYKYVF

SEQ ID NO: 356670 - protein, 13 aa, Homo sapiens
  CDR3 for beta chain variable domain of TCR clone 178335 (TRBV27, TRBJ1-4)
CASSLMGDEKLFF

SEQ ID NO: 356671 - protein, 19 aa, Homo sapiens
  CDR3 for alpha chain variable domain of TCR clone 178336 (TRAV1-2, TRAJ26)
CLLPLCCERPDNYGQNFGF

SEQ ID NO: 356672 - protein, 15 aa, Homo sapiens
  CDR3 for beta chain variable domain of TCR clone 178336 (TRBV9, TRBJ1-6)
CASSVAGTGDSPLHF

SEQ ID NO: 356673 - protein, 14 aa, Homo sapiens
  CDR3 for alpha chain variable domain of TCR clone 178337 (TRAV8-6, TRAJ13)
CAVSDREGYQKVTF

SEQ ID NO: 356674 - protein, 13 aa, Homo sapiens
  CDR3 for beta chain variable domain of TCR clone 178337 (TRBV28, TRBJ2-7)
CASSVTWDREMYF

SEQ ID NO: 356675 - protein, 13 aa, Homo sapiens
  CDR3 for alpha chain variable domain of TCR clone 178338 (TRAV21, TRAJ28)
CCGLWGWSYQLTF

SEQ ID NO: 356676 - protein, 14 aa, Homo sapiens
  CDR3 for beta chain variable domain of TCR clone 178338 (TRBV18, TRBJ1-4)
CASSPGPNGEKLFF

SEQ ID NO: 356677 - protein, 14 aa, Homo sapiens
  CDR3 for alpha chain variable domain of TCR clone 178339 (TRAV30, TRAJ26)
CGTEIVSYGQNFVF

SEQ ID NO: 356678 - protein, 16 aa, Homo sapiens
  CDR3 for beta chain variable domain of TCR clone 178339 (TRBV9, TRBJ2-2)
CASSAMGKGNTGELFF

SEQ ID NO: 356679 - protein, 22 aa, Homo sapiens
  CDR3 for alpha chain variable domain of TCR clone 178340 (TRAV4, )
CLVGPHNYDIQNPDPAVYQLRD

SEQ ID NO: 356680 - protein, 17 aa, Homo sapiens
  CDR3 for beta chain variable domain of TCR clone 178340 (TRBV24-1, TRBJ2-1)
CATNDVSTSGTYNEQFF

SEQ ID NO: 356681 - protein, 15 aa, Homo sapiens
  CDR3 for alpha chain variable domain of TCR clone 178341 (TRAV38-1, TRAJ37)
CAFIFGSGNTAKLIF

SEQ ID NO: 356682 - protein, 16 aa, Homo sapiens
  CDR3 for beta chain variable domain of TCR clone 178341 (TRBV6-1, TRBJ2-3)
CASSEVIGQGTDTQYF

SEQ ID NO: 356683 - protein, 17 aa, Homo sapiens
  CDR3 for alpha chain variable domain of TCR clone 178342 (TRAV4, TRAJ42)
CLVGVLNYGGSQGNLIF

SEQ ID NO: 356684 - protein, 15 aa, Homo sapiens
  CDR3 for beta chain variable domain of TCR clone 178342 (TRBV6-6, TRBJ2-7)
CASSYSYGGSYEQYF

SEQ ID NO: 356685 - protein, 13 aa, Homo sapiens
  CDR3 for alpha chain variable domain of TCR clone 178343 (TRAV27, TRAJ41)
CAGEGNSGYALNF

SEQ ID NO: 356686 - protein, 20 aa, Homo sapiens
  CDR3 for beta chain variable domain of TCR clone 178343 (TRBV28, TRBJ2-1)
CASTPIGRSPGLAGGNEQFF

SEQ ID NO: 356687 - protein, 15 aa, Homo sapiens
  CDR3 for alpha chain variable domain of TCR clone 178344 (TRAV26-1, TRAJ29)
CIVRVEGSGNTPLVF

SEQ ID NO: 356688 - protein, 16 aa, Homo sapiens
  CDR3 for beta chain variable domain of TCR clone 178344 (TRBV7-2, TRBJ1-2)
CASSPTSGTSLGGYTF

SEQ ID NO: 356689 - protein, 11 aa, Homo sapiens
  CDR3 for alpha chain variable domain of TCR clone 178345 (TRAV21, TRAJ34)
CAVTNTDKLIL

SEQ ID NO: 356690 - protein, 16 aa, Homo sapiens
  CDR3 for beta chain variable domain of TCR clone 178345 (TRBV12-5, TRBJ2-5)
CASGPRTSGNQETQYF

SEQ ID NO: 356691 - protein, 14 aa, Homo sapiens
  CDR3 for alpha chain variable domain of TCR clone 178346 (TRAV30, TRAJ26)
CGTEIVSYGQNFVF

SEQ ID NO: 356692 - protein, 13 aa, Homo sapiens
  CDR3 for beta chain variable domain of TCR clone 178346 (TRBV19, TRBJ1-3)
CGSRLSLGNTIYF

SEQ ID NO: 356693 - protein, 11 aa, Homo sapiens
  CDR3 for alpha chain variable domain of TCR clone 178347 (TRAV1-2, TRAJ20)
CDVSNDYKLSF

SEQ ID NO: 356694 - protein, 16 aa, Homo sapiens
  CDR3 for beta chain variable domain of TCR clone 178347 (TRBV29-1, TRBJ2-6)
CSVADITYSGANVLTF

SEQ ID NO: 356695 - protein, 13 aa, Homo sapiens
  CDR3 for alpha chain variable domain of TCR clone 178348 (TRAV29/DV5, TRAJ31)
CAASRTNNARLMF

SEQ ID NO: 356696 - protein, 16 aa, Homo sapiens
  CDR3 for beta chain variable domain of TCR clone 178348 (TRBV20-1, TRBJ1-4)
CSAPGQGLLTNEKLFF

SEQ ID NO: 356697 - protein, 12 aa, Homo sapiens
  CDR3 for alpha chain variable domain of TCR clone 178349 (TRAV35, TRAJ10)
CILTGGGNKLTF

SEQ ID NO: 356698 - protein, 16 aa, Homo sapiens
  CDR3 for beta chain variable domain of TCR clone 178349 (TRBV12-5, TRBJ2-5)
CASGPRTSGNQETQYF

SEQ ID NO: 356699 - protein, 14 aa, Homo sapiens
  CDR3 for alpha chain variable domain of TCR clone 178350 (TRAV17, TRAJ57)
CATDPQGGSEKLVF

SEQ ID NO: 356700 - protein, 16 aa, Homo sapiens
  CDR3 for beta chain variable domain of TCR clone 178350 (TRBV20-1, TRBJ1-4)
CSAPGQGLLTNENLFF

SEQ ID NO: 356701 - protein, 14 aa, Homo sapiens
  CDR3 for alpha chain variable domain of TCR clone 178351 (TRAV1-1, TRAJ27)
CAVIYNTNAGKSTF

SEQ ID NO: 356702 - protein, 13 aa, Homo sapiens
  CDR3 for beta chain variable domain of TCR clone 178351 (TRBV10-3, TRBJ1-2)
CAISERDSYGYTF

SEQ ID NO: 356703 - protein, 16 aa, Homo sapiens
  CDR3 for alpha chain variable domain of TCR clone 178352 (TRAV30, TRAJ24)
CGTETVDADSWGKFQF

SEQ ID NO: 356704 - protein, 15 aa, Homo sapiens
  CDR3 for beta chain variable domain of TCR clone 178352 (TRBV7-2, TRBJ2-1)
CASTHGTGIYNEQFF

SEQ ID NO: 356705 - protein, 12 aa, Homo sapiens
  CDR3 for alpha chain variable domain of TCR clone 178353 (TRAV13-2, TRAJ23)
CAERHRGGKLIF

SEQ ID NO: 356706 - protein, 14 aa, Homo sapiens
  CDR3 for beta chain variable domain of TCR clone 178353 (TRBV4-1, TRBJ1-1)
CASSRSGQSFEAFF

SEQ ID NO: 356707 - protein, 13 aa, Homo sapiens
  CDR3 for alpha chain variable domain of TCR clone 178354 (TRAV8-3, TRAJ28)
CAVGAVGSYQLTF

SEQ ID NO: 356708 - protein, 16 aa, Homo sapiens
  CDR3 for beta chain variable domain of TCR clone 178354 (TRBV7-2, TRBJ2-7)
CASSQEWTSGPLEQYF

SEQ ID NO: 356709 - protein, 13 aa, Homo sapiens
  CDR3 for alpha chain variable domain of TCR clone 178355 (TRAV13-1, TRAJ6)
CAASSGGSYIPTF

SEQ ID NO: 356710 - protein, 14 aa, Homo sapiens
  CDR3 for beta chain variable domain of TCR clone 178355 (TRBV7-8, TRBJ2-7)
CASSPKTSFYEQYF

SEQ ID NO: 356711 - protein, 14 aa, Homo sapiens
  CDR3 for alpha chain variable domain of TCR clone 178356 (TRAV8-2, TRAJ4)
CVVSPSGGYNKLIF

SEQ ID NO: 356712 - protein, 15 aa, Homo sapiens
  CDR3 for beta chain variable domain of TCR clone 178356 (TRBV4-1, TRBJ1-4)
CASIDTGGTNEKLFF

SEQ ID NO: 356713 - protein, 13 aa, Homo sapiens
  CDR3 for alpha chain variable domain of TCR clone 178357 (TRAV12-2, TRAJ3)
CAAPYSSASKIIF

SEQ ID NO: 356714 - protein, 18 aa, Homo sapiens
  CDR3 for beta chain variable domain of TCR clone 178357 (TRBV4-1, TRBJ1-5)
CASSQDPPGAGGNRPQHF

SEQ ID NO: 356715 - protein, 13 aa, Homo sapiens
  CDR3 for alpha chain variable domain of TCR clone 178358 (TRAV8-3, TRAJ28)
CAVGAVGSYQLTF

SEQ ID NO: 356716 - protein, 19 aa, Homo sapiens
  CDR3 for beta chain variable domain of TCR clone 178358 (TRBV11-2, TRBJ2-2)
LRTRPCISVPAAYPGSCFF

SEQ ID NO: 356717 - protein, 15 aa, Homo sapiens
  CDR3 for alpha chain variable domain of TCR clone 178359 (TRAV1-2, TRAJ35)
CAVRDPGGFGNVLHC

SEQ ID NO: 356718 - protein, 14 aa, Homo sapiens
  CDR3 for beta chain variable domain of TCR clone 178359 (TRBV5-1, TRBJ2-1)
CASSLDDRFDEQFS

SEQ ID NO: 356719 - protein, 11 aa, Homo sapiens
  CDR3 for alpha chain variable domain of TCR clone 178360 (TRAV21, TRAJ11)
CAVSGYSTLTF

SEQ ID NO: 356720 - protein, 11 aa, Homo sapiens
  CDR3 for beta chain variable domain of TCR clone 178360 (TRBV19, TRBJ1-1)
CASSIGREAFF

SEQ ID NO: 356721 - protein, 14 aa, Homo sapiens
  CDR3 for alpha chain variable domain of TCR clone 178361 (TRAV1-2, TRAJ8)
CAVREDTGFQKLVF

SEQ ID NO: 356722 - protein, 14 aa, Homo sapiens
  CDR3 for beta chain variable domain of TCR clone 178361 (TRBV7-2, TRBJ2-1)
CASSLSGVYNEQFF

SEQ ID NO: 356723 - protein, 11 aa, Homo sapiens
  CDR3 for alpha chain variable domain of TCR clone 178362 (TRAV2, TRAJ33)
CAVESNYQLIW

SEQ ID NO: 356724 - protein, 15 aa, Homo sapiens
  CDR3 for beta chain variable domain of TCR clone 178362 (TRBV13, TRBJ2-1)
CASSLLSGLNNEQFF

SEQ ID NO: 356725 - protein, 11 aa, Homo sapiens
  CDR3 for alpha chain variable domain of TCR clone 178363 (TRAV3, TRAJ21)
CAVGHFNKFYF

SEQ ID NO: 356726 - protein, 14 aa, Homo sapiens
  CDR3 for beta chain variable domain of TCR clone 178363 (TRBV29-1, TRBJ2-2)
CSGRGSGNTGELFF

SEQ ID NO: 356727 - protein, 14 aa, Homo sapiens
  CDR3 for alpha chain variable domain of TCR clone 178364 (TRAV3, TRAJ17)
CAVRDAAAGNKLTF

SEQ ID NO: 356728 - protein, 13 aa, Homo sapiens
  CDR3 for beta chain variable domain of TCR clone 178364 (TRBV2, TRBJ1-1)
CASSVSGYIEAFF

SEQ ID NO: 356729 - protein, 13 aa, Homo sapiens
  CDR3 for alpha chain variable domain of TCR clone 178365 (TRAV12-3, TRAJ53)
CAMRGGSNYKLTF

SEQ ID NO: 356730 - protein, 15 aa, Homo sapiens
  CDR3 for beta chain variable domain of TCR clone 178365 (TRBV2, TRBJ2-1)
CATQDRLVMIGEQFF

SEQ ID NO: 356731 - protein, 12 aa, Homo sapiens
  CDR3 for alpha chain variable domain of TCR clone 178366 (TRAV21, TRAJ20)
CTVRGNDYKLSF

SEQ ID NO: 356732 - protein, 14 aa, Homo sapiens
  CDR3 for beta chain variable domain of TCR clone 178366 (TRBV7-8, TRBJ2-7)
CASSQTQGADEQYF

SEQ ID NO: 356733 - protein, 14 aa, Homo sapiens
  CDR3 for alpha chain variable domain of TCR clone 178367 (TRAV25, TRAJ39)
CGRSNNNAGNMLTF

SEQ ID NO: 356734 - protein, 17 aa, Homo sapiens
  CDR3 for beta chain variable domain of TCR clone 178367 (TRBV13, TRBJ2-3)
CASSLSRVAGGRNTQYF

SEQ ID NO: 356735 - protein, 15 aa, Homo sapiens
  CDR3 for alpha chain variable domain of TCR clone 178368 (TRAV27, TRAJ53)
CAGVVGGGSNYKLTF

SEQ ID NO: 356736 - protein, 13 aa, Homo sapiens
  CDR3 for beta chain variable domain of TCR clone 178368 (TRBV20-1, TRBJ1-1)
CSARGGGNTEAFF

SEQ ID NO: 356737 - protein, 14 aa, Homo sapiens
  CDR3 for alpha chain variable domain of TCR clone 178369 (TRAV1-2, TRAJ16)
CDVNRFSDGQKLLF

SEQ ID NO: 356738 - protein, 14 aa, Homo sapiens
  CDR3 for beta chain variable domain of TCR clone 178369 (TRBV20-1, TRBJ2-1)
CSAQIGGSANEQFF

SEQ ID NO: 356739 - protein, 15 aa, Homo sapiens
  CDR3 for alpha chain variable domain of TCR clone 178370 (TRAV21, TRAJ53)
CAVNGGGGSNYKLTF

SEQ ID NO: 356740 - protein, 12 aa, Homo sapiens
  CDR3 for beta chain variable domain of TCR clone 178370 (TRBV11-3, TRBJ2-2)
CASSLGGGELFF

SEQ ID NO: 356741 - protein, 17 aa, Homo sapiens
  CDR3 for alpha chain variable domain of TCR clone 178371 (TRAV3, TRAJ42)
CAVRDRDYGGSQGNLIF

SEQ ID NO: 356742 - protein, 17 aa, Homo sapiens
  CDR3 for beta chain variable domain of TCR clone 178371 (TRBV28, TRBJ2-5)
CASSRQGGLAGAETQYF

SEQ ID NO: 356743 - protein, 17 aa, Homo sapiens
  CDR3 for alpha chain variable domain of TCR clone 178372 (TRAV3, TRAJ12)
CAVRDGGRMDSRYKLIF

SEQ ID NO: 356744 - protein, 14 aa, Homo sapiens
  CDR3 for beta chain variable domain of TCR clone 178372 (TRBV19, TRBJ2-1)
CASPTFVLSGEQFF

SEQ ID NO: 356745 - protein, 13 aa, Homo sapiens
  CDR3 for alpha chain variable domain of TCR clone 178373 (TRAV27, TRAJ45)
CRSAGGGADGLTF

SEQ ID NO: 356746 - protein, 15 aa, Homo sapiens
  CDR3 for beta chain variable domain of TCR clone 178373 (TRBV11-2, TRBJ2-1)
CASSSPSTRYNEQFF

SEQ ID NO: 356747 - protein, 13 aa, Homo sapiens
  CDR3 for alpha chain variable domain of TCR clone 178374 (TRAV12-3, TRAJ43)
CAMIRPNNNDMRF

SEQ ID NO: 356748 - protein, 13 aa, Homo sapiens
  CDR3 for beta chain variable domain of TCR clone 178374 (TRBV11-2, TRBJ1-1)
CAGSAVVGTEAFF

SEQ ID NO: 356749 - protein, 13 aa, Homo sapiens
  CDR3 for alpha chain variable domain of TCR clone 178375 (TRAV12-3, TRAJ33)
CAMGVNSNYRLIW

SEQ ID NO: 356750 - protein, 13 aa, Homo sapiens
  CDR3 for beta chain variable domain of TCR clone 178375 (TRBV4-1, TRBJ2-2)
CASSQENTGELFF

SEQ ID NO: 356751 - protein, 15 aa, Homo sapiens
  CDR3 for alpha chain variable domain of TCR clone 178376 (TRAV12-3, TRAJ11)
CAMSEENSGYSTLTF

SEQ ID NO: 356752 - protein, 16 aa, Homo sapiens
  CDR3 for beta chain variable domain of TCR clone 178376 (TRBV5-1, TRBJ2-7)
CASSFEGLAGLYEQYF

SEQ ID NO: 356753 - protein, 16 aa, Homo sapiens
  CDR3 for alpha chain variable domain of TCR clone 178377 (TRAV12-2, TRAJ32)
WAVNMNYGGATNKLIF

SEQ ID NO: 356754 - protein, 16 aa, Homo sapiens
  CDR3 for beta chain variable domain of TCR clone 178377 (TRBV7-8, TRBJ2-3)
CASSTEGQRETDTQYF

SEQ ID NO: 356755 - protein, 11 aa, Homo sapiens
  CDR3 for alpha chain variable domain of TCR clone 178378 (TRAV1-2, TRAJ31)
CAVNNNARLMF

SEQ ID NO: 356756 - protein, 16 aa, Homo sapiens
  CDR3 for beta chain variable domain of TCR clone 178378 (TRBV28, TRBJ1-4)
CASSSRTGAANEKLFF

SEQ ID NO: 356757 - protein, 14 aa, Homo sapiens
  CDR3 for alpha chain variable domain of TCR clone 178379 (TRAV12-2, TRAJ13)
CAVKKTGGYQKVTF

SEQ ID NO: 356758 - protein, 13 aa, Homo sapiens
  CDR3 for beta chain variable domain of TCR clone 178379 (TRBV3-1, TRBJ2-2)
CASLARGSGELFF

SEQ ID NO: 356759 - protein, 15 aa, Homo sapiens
  CDR3 for alpha chain variable domain of TCR clone 178380 (TRAV3, TRAJ4)
CAVRDGTSGYNKLIF

SEQ ID NO: 356760 - protein, 14 aa, Homo sapiens
  CDR3 for beta chain variable domain of TCR clone 178380 (TRBV2, TRBJ2-1)
CASSEALIYNEQFF

SEQ ID NO: 356761 - protein, 14 aa, Homo sapiens
  CDR3 for alpha chain variable domain of TCR clone 178381 (TRAV2, TRAJ37)
CAVDFTSNTGKLIF

SEQ ID NO: 356762 - protein, 12 aa, Homo sapiens
  CDR3 for beta chain variable domain of TCR clone 178381 (TRBV29-1, TRBJ2-3)
CSVTGGAGTQYF

SEQ ID NO: 356763 - protein, 14 aa, Homo sapiens
  CDR3 for alpha chain variable domain of TCR clone 178382 (TRAV2, TRAJ37)
CAVDFTSNTGKLIF

SEQ ID NO: 356764 - protein, 15 aa, Homo sapiens
  CDR3 for beta chain variable domain of TCR clone 178382 (TRBV9, TRBJ1-5)
CASSVAGGANQPQHF

SEQ ID NO: 356765 - protein, 10 aa, Homo sapiens
  CDR3 for alpha chain variable domain of TCR clone 178383 (TRAV12-3, TRAJ49)
CAMNDDQFYF

SEQ ID NO: 356766 - protein, 15 aa, Homo sapiens
  CDR3 for beta chain variable domain of TCR clone 178383 (TRBV7-9, TRBJ1-6)
CGSSSPGRGNSPLHF

SEQ ID NO: 356767 - protein, 13 aa, Homo sapiens
  CDR3 for alpha chain variable domain of TCR clone 178384 (TRAV27, TRAJ6)
CAGGTRGSYIPTF

SEQ ID NO: 356768 - protein, 15 aa, Homo sapiens
  CDR3 for beta chain variable domain of TCR clone 178384 (TRBV11-2, TRBJ1-3)
CASSLGPLVRDTMYF

SEQ ID NO: 356769 - protein, 16 aa, Homo sapiens
  CDR3 for alpha chain variable domain of TCR clone 178385 (TRAV8-3, TRAJ10)
CAVGPILTGGGNKLTF

SEQ ID NO: 356770 - protein, 17 aa, Homo sapiens
  CDR3 for beta chain variable domain of TCR clone 178385 (TRBV7-2, TRBJ2-2)
CASSPRGAGEGTGELFF

SEQ ID NO: 356771 - protein, 15 aa, Homo sapiens
  CDR3 for alpha chain variable domain of TCR clone 178386 (TRAV12-1, TRAJ44)
CVVFVNTGTASKLTF

SEQ ID NO: 356772 - protein, 15 aa, Homo sapiens
  CDR3 for beta chain variable domain of TCR clone 178386 (TRBV7-8, TRBJ2-2)
CASSLTGQGTGELFF

SEQ ID NO: 356773 - protein, 13 aa, Homo sapiens
  CDR3 for alpha chain variable domain of TCR clone 178387 (TRAV10, TRAJ40)
CVVSALGTYKYIF

SEQ ID NO: 356774 - protein, 15 aa, Homo sapiens
  CDR3 for beta chain variable domain of TCR clone 178387 (TRBV27, TRBJ2-1)
CASSNGGGASNEQFF

SEQ ID NO: 356775 - protein, 16 aa, Homo sapiens
  CDR3 for alpha chain variable domain of TCR clone 178388 (TRAV2, TRAJ4)
CAVEDRFSGGYNKLIF

SEQ ID NO: 356776 - protein, 14 aa, Homo sapiens
  CDR3 for beta chain variable domain of TCR clone 178388 (TRBV4-1, TRBJ2-3)
CASSQDWSTDTQYF

SEQ ID NO: 356777 - protein, 16 aa, Homo sapiens
  CDR3 for alpha chain variable domain of TCR clone 178389 (TRAV30, TRAJ24)
CGTEIVDADSWGKFQF

SEQ ID NO: 356778 - protein, 15 aa, Homo sapiens
  CDR3 for beta chain variable domain of TCR clone 178389 (TRBV11-3, TRBJ2-2)
CASSLSGLATGELFF

SEQ ID NO: 356779 - protein, 18 aa, Homo sapiens
  CDR3 for alpha chain variable domain of TCR clone 178390 (TRAV13-1, TRAJ52)
CAASKRSAGGTSYGKRKF

SEQ ID NO: 356780 - protein, 13 aa, Homo sapiens
  CDR3 for beta chain variable domain of TCR clone 178390 (TRBV12-4, TRBJ1-2)
CASSLRQGKGYTF

SEQ ID NO: 356781 - protein, 11 aa, Homo sapiens
  CDR3 for alpha chain variable domain of TCR clone 178391 (TRAV13-1, TRAJ6)
CATLGSYIPTF

SEQ ID NO: 356782 - protein, 16 aa, Homo sapiens
  CDR3 for beta chain variable domain of TCR clone 178391 (TRBV7-3, TRBJ2-2)
CASSLKRGTLSGELFF

SEQ ID NO: 356783 - protein, 15 aa, Homo sapiens
  CDR3 for alpha chain variable domain of TCR clone 178392 (TRAV12-2, TRAJ53)
CAVNGGGGSNYKLTF

SEQ ID NO: 356784 - protein, 14 aa, Homo sapiens
  CDR3 for beta chain variable domain of TCR clone 178392 (TRBV18, TRBJ2-7)
CASPPRGGAYEQYF

SEQ ID NO: 356785 - protein, 16 aa, Homo sapiens
  CDR3 for alpha chain variable domain of TCR clone 178393 (TRAV14/DV4, TRAJ53)
CAMREGGGGSNYKLTF

SEQ ID NO: 356786 - protein, 14 aa, Homo sapiens
  CDR3 for beta chain variable domain of TCR clone 178393 (TRBV19, TRBJ2-2)
CASSIAGAFGELFF

SEQ ID NO: 356787 - protein, 13 aa, Homo sapiens
  CDR3 for alpha chain variable domain of TCR clone 178394 (TRAV13-2, TRAJ8)
CAFMNTGFQKLVF

SEQ ID NO: 356788 - protein, 13 aa, Homo sapiens
  CDR3 for beta chain variable domain of TCR clone 178394 (TRBV7-9, TRBJ1-2)
CASSLKQNYGYTF

SEQ ID NO: 356789 - protein, 18 aa, Homo sapiens
  CDR3 for alpha chain variable domain of TCR clone 178395 (TRAV21, TRAJ52)
CAVRPSPAVGTSYGKLTF

SEQ ID NO: 356790 - protein, 14 aa, Homo sapiens
  CDR3 for beta chain variable domain of TCR clone 178395 (TRBV7-9, TRBJ2-5)
CASSLDTAQETQYF

SEQ ID NO: 356791 - protein, 11 aa, Homo sapiens
  CDR3 for alpha chain variable domain of TCR clone 178396 (TRAV2, TRAJ13)
CASGGYQKVTF

SEQ ID NO: 356792 - protein, 13 aa, Homo sapiens
  CDR3 for beta chain variable domain of TCR clone 178396 (TRBV3-1, TRBJ2-2)
CASLARGSGELFF

SEQ ID NO: 356793 - protein, 17 aa, Homo sapiens
  CDR3 for alpha chain variable domain of TCR clone 178397 (TRAV4, TRAJ18)
CLVVAAGRGSTLGRLYF

SEQ ID NO: 356794 - protein, 17 aa, Homo sapiens
  CDR3 for beta chain variable domain of TCR clone 178397 (TRBV28, TRBJ2-2)
CAGSLATGMGDAGELFF

SEQ ID NO: 356795 - protein, 16 aa, Homo sapiens
  CDR3 for alpha chain variable domain of TCR clone 178398 (TRAV3, TRAJ18)
CAVRDGRGSTLGRLYF

SEQ ID NO: 356796 - protein, 15 aa, Homo sapiens
  CDR3 for beta chain variable domain of TCR clone 178398 (TRBV7-9, TRBJ1-6)
CASSVPGRGNSPLHV

SEQ ID NO: 356797 - protein, 23 aa, Homo sapiens
  CDR3 for alpha chain variable domain of TCR clone 178399 (TRAV8-3, )
CAVVTTRIPDIQNPDPAVYQLRD

SEQ ID NO: 356798 - protein, 14 aa, Homo sapiens
  CDR3 for beta chain variable domain of TCR clone 178399 (TRBV11-2, TRBJ2-7)
CTSSPSTTSYEQYF

SEQ ID NO: 356799 - protein, 11 aa, Homo sapiens
  CDR3 for alpha chain variable domain of TCR clone 178400 (TRAV4, TRAJ31)
CLVGDNARLMF

SEQ ID NO: 356800 - protein, 11 aa, Homo sapiens
  CDR3 for beta chain variable domain of TCR clone 178400 (TRBV12-4, TRBJ2-3)
CASIATDTQHF

SEQ ID NO: 356801 - protein, 12 aa, Homo sapiens
  CDR3 for alpha chain variable domain of TCR clone 178401 (TRAV20, TRAJ39)
CAVGNAGNMLTF

SEQ ID NO: 356802 - protein, 14 aa, Homo sapiens
  CDR3 for beta chain variable domain of TCR clone 178401 (TRBV7-8, TRBJ1-2)
CASSPDSLSYGYTF

SEQ ID NO: 356803 - protein, 16 aa, Homo sapiens
  CDR3 for alpha chain variable domain of TCR clone 178402 (TRAV12-3, TRAJ53)
CAMSVGSGGSNYKLTF

SEQ ID NO: 356804 - protein, 15 aa, Homo sapiens
  CDR3 for beta chain variable domain of TCR clone 178402 (TRBV4-1, TRBJ2-5)
CASSQWDLYQETQYF

SEQ ID NO: 356805 - protein, 13 aa, Homo sapiens
  CDR3 for alpha chain variable domain of TCR clone 178403 (TRAV17, TRAJ9)
CATGSTGGFKTIF

SEQ ID NO: 356806 - protein, 14 aa, Homo sapiens
  CDR3 for beta chain variable domain of TCR clone 178403 (TRBV7-8, TRBJ2-7)
CASTFRGWPNEQYF

SEQ ID NO: 356807 - protein, 15 aa, Homo sapiens
  CDR3 for alpha chain variable domain of TCR clone 178404 (TRAV12-3, TRAJ11)
CAMSEENSGYSTLTF

SEQ ID NO: 356808 - protein, 14 aa, Homo sapiens
  CDR3 for beta chain variable domain of TCR clone 178404 (TRBV2, TRBJ2-7)
CASSLTSGGYEQYF

SEQ ID NO: 356809 - protein, 12 aa, Homo sapiens
  CDR3 for alpha chain variable domain of TCR clone 178405 (TRAV12-3, TRAJ54)
CTRPPGAQKLVF

SEQ ID NO: 356810 - protein, 15 aa, Homo sapiens
  CDR3 for beta chain variable domain of TCR clone 178405 (TRBV4-1, TRBJ2-2)
CASSQDSRGTGELFF

SEQ ID NO: 356811 - protein, 14 aa, Homo sapiens
  CDR3 for alpha chain variable domain of TCR clone 178406 (TRAV1-2, TRAJ8)
CAVREDTGFQKLVF

SEQ ID NO: 356812 - protein, 22 aa, Homo sapiens
  CDR3 for beta chain variable domain of TCR clone 178406 (TRBV7-6, TRBJ2-6)
CASSLPGLWGQRPDFRGRQQAD

SEQ ID NO: 356813 - protein, 14 aa, Homo sapiens
  CDR3 for alpha chain variable domain of TCR clone 178407 (TRAV1-1, TRAJ27)
CAVIYNTNAGESTF

SEQ ID NO: 356814 - protein, 13 aa, Homo sapiens
  CDR3 for beta chain variable domain of TCR clone 178407 (TRBV7-9, TRBJ1-2)
CASSLKQNYGYTF

SEQ ID NO: 356815 - protein, 12 aa, Homo sapiens
  CDR3 for alpha chain variable domain of TCR clone 178408 (TRAV8-3, TRAJ26)
CAGDNYGQNFVF

SEQ ID NO: 356816 - protein, 20 aa, Homo sapiens
  CDR3 for beta chain variable domain of TCR clone 178408 (TRBV28, TRBJ2-1)
CASTPIGRSPGLAGGHEQFF

SEQ ID NO: 356817 - protein, 14 aa, Homo sapiens
  CDR3 for alpha chain variable domain of TCR clone 178409 (TRAV26-1, TRAJ38)
CIADNACNNRKPIW

SEQ ID NO: 356818 - protein, 13 aa, Homo sapiens
  CDR3 for beta chain variable domain of TCR clone 178409 (TRBV20-1, TRBJ1-1)
CSARGGGNTEAFF

SEQ ID NO: 356819 - protein, 13 aa, Homo sapiens
  CDR3 for alpha chain variable domain of TCR clone 178410 (TRAV2, TRAJ40)
CAVVTSGIYKYIF

SEQ ID NO: 356820 - protein, 14 aa, Homo sapiens
  CDR3 for beta chain variable domain of TCR clone 178410 (TRBV19, TRBJ2-1)
CASPTFVLSSEQFF

SEQ ID NO: 356821 - protein, 12 aa, Homo sapiens
  CDR3 for alpha chain variable domain of TCR clone 178411 (TRAV12-1, TRAJ40)
CVVYSGTYKYIF

SEQ ID NO: 356822 - protein, 17 aa, Homo sapiens
  CDR3 for beta chain variable domain of TCR clone 178411 (TRBV11-2, TRBJ2-3)
CQQVRGDSRGAPNTQYF

SEQ ID NO: 356823 - protein, 11 aa, Homo sapiens
  CDR3 for alpha chain variable domain of TCR clone 178412 (TRAV27, TRAJ45)
CAGAQEEVLTD

SEQ ID NO: 356824 - protein, 11 aa, Homo sapiens
  CDR3 for beta chain variable domain of TCR clone 178412 (TRBV19, TRBJ1-1)
CASSIGSDAFF

SEQ ID NO: 356825 - protein, 12 aa, Homo sapiens
  CDR3 for alpha chain variable domain of TCR clone 178413 (TRAV1-2, TRAJ33)
CAALDSNYQLIW

SEQ ID NO: 356826 - protein, 15 aa, Homo sapiens
  CDR3 for beta chain variable domain of TCR clone 178413 (TRBV4-2, TRBJ1-2)
CASSQRTGGRDGYTF

SEQ ID NO: 356827 - protein, 13 aa, Homo sapiens
  CDR3 for alpha chain variable domain of TCR clone 178414 (TRAV13-1, TRAJ5)
CAASDTGRSALTF

SEQ ID NO: 356828 - protein, 12 aa, Homo sapiens
  CDR3 for beta chain variable domain of TCR clone 178414 (TRBV28, TRBJ2-3)
CVSSLYRDTQYF

SEQ ID NO: 356829 - protein, 12 aa, Homo sapiens
  CDR3 for alpha chain variable domain of TCR clone 178415 (TRAV12-3, TRAJ17)
CAMTLTGNKLTF

SEQ ID NO: 356830 - protein, 14 aa, Homo sapiens
  CDR3 for beta chain variable domain of TCR clone 178415 (TRBV11-2, TRBJ2-2)
CASRGQGAAGELFF

SEQ ID NO: 356831 - protein, 16 aa, Homo sapiens
  CDR3 for alpha chain variable domain of TCR clone 178416 (TRAV17, TRAJ28)
CASYAYFGAGSYQLTF

SEQ ID NO: 356832 - protein, 15 aa, Homo sapiens
  CDR3 for beta chain variable domain of TCR clone 178416 (TRBV4-2, TRBJ2-1)
CASSPGGGLYNEQFF

SEQ ID NO: 356833 - protein, 14 aa, Homo sapiens
  CDR3 for alpha chain variable domain of TCR clone 178417 (TRAV13-1, TRAJ47)
CAADPGEYGNKLVF

SEQ ID NO: 356834 - protein, 14 aa, Homo sapiens
  CDR3 for beta chain variable domain of TCR clone 178417 (TRBV4-2, TRBJ2-1)
CASGLDRAYNEQFF

SEQ ID NO: 356835 - protein, 16 aa, Homo sapiens
  CDR3 for alpha chain variable domain of TCR clone 178418 (TRAV30, TRAJ24)
CGTEIVDADSWGKFQF

SEQ ID NO: 356836 - protein, 14 aa, Homo sapiens
  CDR3 for beta chain variable domain of TCR clone 178418 (TRBV6-5, TRBJ2-7)
CASSLFPGGYEQYF

SEQ ID NO: 356837 - protein, 12 aa, Homo sapiens
  CDR3 for alpha chain variable domain of TCR clone 178419 (TRAV35, TRAJ39)
LAPNNAGNMLTF

SEQ ID NO: 356838 - protein, 14 aa, Homo sapiens
  CDR3 for beta chain variable domain of TCR clone 178419 (TRBV7-2, TRBJ1-1)
CASSFLTGTTEAFF

SEQ ID NO: 356839 - protein, 19 aa, Homo sapiens
  CDR3 for alpha chain variable domain of TCR clone 178420 (TRAV26-1, TRAJ52)
CTVRAHRNAGGTSYGKLTF

SEQ ID NO: 356840 - protein, 13 aa, Homo sapiens
  CDR3 for beta chain variable domain of TCR clone 178420 (TRBV2, TRBJ1-5)
CASSQGGSQPQHF

SEQ ID NO: 356841 - protein, 16 aa, Homo sapiens
  CDR3 for alpha chain variable domain of TCR clone 178421 (TRAV20, TRAJ38)
CAVQASNAGNNRKPIR

SEQ ID NO: 356842 - protein, 16 aa, Homo sapiens
  CDR3 for beta chain variable domain of TCR clone 178421 (TRBV7-8, TRBJ2-6)
CASRVGDSSGANVLTF

SEQ ID NO: 356843 - protein, 14 aa, Homo sapiens
  CDR3 for alpha chain variable domain of TCR clone 178422 (TRAV23/DV6, TRAJ17)
CAASIGAAGTKLTF

SEQ ID NO: 356844 - protein, 12 aa, Homo sapiens
  CDR3 for beta chain variable domain of TCR clone 178422 (TRBV20-1, TRBJ2-5)
CSAGGAGETQYF

SEQ ID NO: 356845 - protein, 12 aa, Homo sapiens
  CDR3 for alpha chain variable domain of TCR clone 178423 (TRAV16, TRAJ10)
CSRPGGGNKLNF

SEQ ID NO: 356846 - protein, 15 aa, Homo sapiens
  CDR3 for beta chain variable domain of TCR clone 178423 (TRBV6-3, TRBJ2-7)
CASSSPGTVFYEQYF

SEQ ID NO: 356847 - protein, 14 aa, Homo sapiens
  CDR3 for alpha chain variable domain of TCR clone 178424 (TRAV29/DV5, TRAJ20)
CAASAPIEDYKLSF

SEQ ID NO: 356848 - protein, 16 aa, Homo sapiens
  CDR3 for beta chain variable domain of TCR clone 178424 (TRBV12-4, TRBJ1-5)
CASSRPVGGSNQPQHF

SEQ ID NO: 356849 - protein, 12 aa, Homo sapiens
  CDR3 for alpha chain variable domain of TCR clone 178425 (TRAV1-1, TRAJ8)
CAGGTGFQKLVF

SEQ ID NO: 356850 - protein, 15 aa, Homo sapiens
  CDR3 for beta chain variable domain of TCR clone 178425 (TRBV20-1, TRBJ2-1)
CSARGIGGTYNEQFF

SEQ ID NO: 356851 - protein, 12 aa, Homo sapiens
  CDR3 for alpha chain variable domain of TCR clone 178426 (TRAV12-1, TRAJ40)
CVVYSGTYKYIF

SEQ ID NO: 356852 - protein, 13 aa, Homo sapiens
  CDR3 for beta chain variable domain of TCR clone 178426 (TRBV7-9, TRBJ1-1)
CASSLAGVTEAFF

SEQ ID NO: 356853 - protein, 17 aa, Homo sapiens
  CDR3 for alpha chain variable domain of TCR clone 178427 (TRAV14/DV4, TRAJ3)
CAMREGPEYSSASKIIV

SEQ ID NO: 356854 - protein, 17 aa, Homo sapiens
  CDR3 for beta chain variable domain of TCR clone 178427 (TRBV20-1, TRBJ1-5)
CSARVGGERQGDQPQHF

SEQ ID NO: 356855 - protein, 17 aa, Homo sapiens
  CDR3 for alpha chain variable domain of TCR clone 178428 (TRAV3, TRAJ6)
CAVRDGPRAGGSYIPTF

SEQ ID NO: 356856 - protein, 15 aa, Homo sapiens
  CDR3 for beta chain variable domain of TCR clone 178428 (TRBV5-1, TRBJ1-2)
CASSLGQVSGRGYTF

SEQ ID NO: 356857 - protein, 14 aa, Homo sapiens
  CDR3 for alpha chain variable domain of TCR clone 178429 (TRAV9-2, TRAJ39)
CALYIYNAGNMLTF

SEQ ID NO: 356858 - protein, 14 aa, Homo sapiens
  CDR3 for beta chain variable domain of TCR clone 178429 (TRBV6-1, TRBJ1-3)
CASVQGEGGNTIYF

SEQ ID NO: 356859 - protein, 12 aa, Homo sapiens
  CDR3 for alpha chain variable domain of TCR clone 178430 (TRAV36/DV7, TRAJ26)
CAADNYGQNFVF

SEQ ID NO: 356860 - protein, 13 aa, Homo sapiens
  CDR3 for beta chain variable domain of TCR clone 178430 (TRBV12-4, TRBJ2-1)
CASSSGTVNEQFF

SEQ ID NO: 356861 - protein, 13 aa, Homo sapiens
  CDR3 for alpha chain variable domain of TCR clone 178431 (TRAV27, TRAJ11)
CAGGGSGYSTLTF

SEQ ID NO: 356862 - protein, 12 aa, Homo sapiens
  CDR3 for beta chain variable domain of TCR clone 178431 (TRBV28, TRBJ2-7)
CASSLNRYEQYF

SEQ ID NO: 356863 - protein, 14 aa, Homo sapiens
  CDR3 for alpha chain variable domain of TCR clone 178432 (TRAV12-1, TRAJ34)
CVVNLDYNTDKLIF

SEQ ID NO: 356864 - protein, 18 aa, Homo sapiens
  CDR3 for beta chain variable domain of TCR clone 178432 (TRBV20-1, TRBJ2-7)
SAVLPELAGGGSSYEQYF

SEQ ID NO: 356865 - protein, 15 aa, Homo sapiens
  CDR3 for alpha chain variable domain of TCR clone 178433 (TRAV3, TRAJ5)
CAVRDLDTGRRALTF

SEQ ID NO: 356866 - protein, 17 aa, Homo sapiens
  CDR3 for beta chain variable domain of TCR clone 178433 (TRBV20-1, TRBJ2-1)
CSASSSGLAGSYNEQFF

SEQ ID NO: 356867 - protein, 15 aa, Homo sapiens
  CDR3 for alpha chain variable domain of TCR clone 178434 (TRAV23/DV6, TRAJ53)
CAASMERGSNYKLIF

SEQ ID NO: 356868 - protein, 13 aa, Homo sapiens
  CDR3 for beta chain variable domain of TCR clone 178434 (TRBV12-4, TRBJ2-7)
CASSPTETYEQYF

SEQ ID NO: 356869 - protein, 21 aa, Homo sapiens
  CDR3 for alpha chain variable domain of TCR clone 178435 (TRAV1-1, TRAJ6)
CAVRREEATYLHLEEEPALLF

SEQ ID NO: 356870 - protein, 12 aa, Homo sapiens
  CDR3 for beta chain variable domain of TCR clone 178435 (TRBV20-1, TRBJ2-7)
CSASSGANEQYF

SEQ ID NO: 356871 - protein, 13 aa, Homo sapiens
  CDR3 for alpha chain variable domain of TCR clone 178436 (TRAV12-3, TRAJ13)
CAMTSGGYQKVTF

SEQ ID NO: 356872 - protein, 13 aa, Homo sapiens
  CDR3 for beta chain variable domain of TCR clone 178436 (TRBV7-3, TRBJ1-1)
CASSQDWGAEAFF

SEQ ID NO: 356873 - protein, 14 aa, Homo sapiens
  CDR3 for alpha chain variable domain of TCR clone 178437 (TRAV1-2, TRAJ8)
CAVREDTGFQKLVF

SEQ ID NO: 356874 - protein, 16 aa, Homo sapiens
  CDR3 for beta chain variable domain of TCR clone 178437 (TRBV7-6, TRBJ2-6)
CASSLPRLSGANVLTF

SEQ ID NO: 356875 - protein, 18 aa, Homo sapiens
  CDR3 for alpha chain variable domain of TCR clone 178438 (TRAV21, TRAJ52)
CAVRPSPAGGTSYGKLTF

SEQ ID NO: 356876 - protein, 17 aa, Homo sapiens
  CDR3 for beta chain variable domain of TCR clone 178438 (TRBV25-1, TRBJ2-1)
CASSAYGQGRGVYEQCF

SEQ ID NO: 356877 - protein, 14 aa, Homo sapiens
  CDR3 for alpha chain variable domain of TCR clone 178439 (TRAV26-1, TRAJ38)
CIADNAGNNRKLIW

SEQ ID NO: 356878 - protein, 17 aa, Homo sapiens
  CDR3 for beta chain variable domain of TCR clone 178439 (TRBV15, TRBJ1-1)
CATSRVGGADGDTDAFF

SEQ ID NO: 356879 - protein, 14 aa, Homo sapiens
  CDR3 for alpha chain variable domain of TCR clone 178440 (TRAV21, TRAJ35)
CAVMPIGFGNVLHC

SEQ ID NO: 356880 - protein, 16 aa, Homo sapiens
  CDR3 for beta chain variable domain of TCR clone 178440 (TRBV12-4, TRBJ2-1)
RASSPQERPSYNEQFF

SEQ ID NO: 356881 - protein, 14 aa, Homo sapiens
  CDR3 for alpha chain variable domain of TCR clone 178441 (TRAV12-2, TRAJ17)
CAVLFKAAGNKLTF

SEQ ID NO: 356882 - protein, 12 aa, Homo sapiens
  CDR3 for beta chain variable domain of TCR clone 178441 (TRBV11-2, TRBJ2-2)
CASSLGGGELFY

SEQ ID NO: 356883 - protein, 14 aa, Homo sapiens
  CDR3 for alpha chain variable domain of TCR clone 178442 (TRAV26-1, TRAJ52)
CIPAGGTSYGKLTF

SEQ ID NO: 356884 - protein, 15 aa, Homo sapiens
  CDR3 for beta chain variable domain of TCR clone 178442 (TRBV19, TRBJ2-2)
CQYHWSQGGRRELFF

SEQ ID NO: 356885 - protein, 14 aa, Homo sapiens
  CDR3 for alpha chain variable domain of TCR clone 178443 (TRAV12-2, TRAJ5)
CAVNRSTGRRALTF

SEQ ID NO: 356886 - protein, 18 aa, Homo sapiens
  CDR3 for beta chain variable domain of TCR clone 178443 (TRBV18, TRBJ2-5)
CASSPGVSQDPVLRARHA

SEQ ID NO: 356887 - protein, 12 aa, Homo sapiens
  CDR3 for alpha chain variable domain of TCR clone 178444 (TRAV12-3, TRAJ17)
CAMTLTGNKLTF

SEQ ID NO: 356888 - protein, 15 aa, Homo sapiens
  CDR3 for beta chain variable domain of TCR clone 178444 (TRBV20-1, TRBJ2-7)
RSARDRVSGMDEQYV

SEQ ID NO: 356889 - protein, 15 aa, Homo sapiens
  CDR3 for alpha chain variable domain of TCR clone 178445 (TRAV2, TRAJ9)
CAVEDRGTGGFKTIF

SEQ ID NO: 356890 - protein, 13 aa, Homo sapiens
  CDR3 for beta chain variable domain of TCR clone 178445 (TRBV2, TRBJ1-1)
CARNPTGGFHAFF

SEQ ID NO: 356891 - protein, 16 aa, Homo sapiens
  CDR3 for alpha chain variable domain of TCR clone 178446 (TRAV20, TRAJ22)
CAVQASSAGSARQLTF

SEQ ID NO: 356892 - protein, 16 aa, Homo sapiens
  CDR3 for beta chain variable domain of TCR clone 178446 (TRBV20-1, TRBJ1-5)
CSASRGTGYSNQPQHF

SEQ ID NO: 356893 - protein, 15 aa, Homo sapiens
  CDR3 for alpha chain variable domain of TCR clone 178447 (TRAV23/DV6, TRAJ18)
CAARYRGSTLGRLYF

SEQ ID NO: 356894 - protein, 13 aa, Homo sapiens
  CDR3 for beta chain variable domain of TCR clone 178447 (TRBV7-2, TRBJ2-7)
CSSSSPSGSEQYF

SEQ ID NO: 356895 - protein, 23 aa, Homo sapiens
  CDR3 for alpha chain variable domain of TCR clone 178448 (TRAV26-1, )
CIADNAGNNNIQNPDPAAYQLRD

SEQ ID NO: 356896 - protein, 13 aa, Homo sapiens
  CDR3 for beta chain variable domain of TCR clone 178448 (TRBV20-1, TRBJ1-1)
CSARGGGNTEAFF

SEQ ID NO: 356897 - protein, 11 aa, Homo sapiens
  CDR3 for alpha chain variable domain of TCR clone 178449 (TRAV17, TRAJ21)
CATGNFNKFYF

SEQ ID NO: 356898 - protein, 14 aa, Homo sapiens
  CDR3 for beta chain variable domain of TCR clone 178449 (TRBV25-1, TRBJ1-1)
CASTHLGGNTEAFF

SEQ ID NO: 356899 - protein, 11 aa, Homo sapiens
  CDR3 for alpha chain variable domain of TCR clone 178450 (TRAV21, TRAJ31)
CAVRNNARLMF

SEQ ID NO: 356900 - protein, 13 aa, Homo sapiens
  CDR3 for beta chain variable domain of TCR clone 178450 (TRBV29-1, TRBJ2-1)
CSVEGGRVNEQFF

SEQ ID NO: 356901 - protein, 18 aa, Homo sapiens
  CDR3 for alpha chain variable domain of TCR clone 178451 (TRAV21, TRAJ52)
CAVRPSPAGGTSYGKLTF

SEQ ID NO: 356902 - protein, 14 aa, Homo sapiens
  CDR3 for beta chain variable domain of TCR clone 178451 (TRBV11-2, TRBJ2-1)
CASTTGQGNNEQFF

SEQ ID NO: 356903 - protein, 13 aa, Homo sapiens
  CDR3 for alpha chain variable domain of TCR clone 178452 (TRAV1-1, TRAJ38)
CASNAGNNRKLIC

SEQ ID NO: 356904 - protein, 15 aa, Homo sapiens
  CDR3 for beta chain variable domain of TCR clone 178452 (TRBV28, TRBJ1-2)
CASIPQGSDDYGYTF

SEQ ID NO: 356905 - protein, 13 aa, Homo sapiens
  CDR3 for alpha chain variable domain of TCR clone 178453 (TRAV12-1, TRAJ33)
CGDVPDSNYQLIW

SEQ ID NO: 356906 - protein, 13 aa, Homo sapiens
  CDR3 for beta chain variable domain of TCR clone 178453 (TRBV24-1, TRBJ2-2)
CATSDWSTGELFF

SEQ ID NO: 356907 - protein, 13 aa, Homo sapiens
  CDR3 for alpha chain variable domain of TCR clone 178454 (TRAV36/DV7, TRAJ53)
CALSGGSNYKLTF

SEQ ID NO: 356908 - protein, 13 aa, Homo sapiens
  CDR3 for beta chain variable domain of TCR clone 178454 (TRBV28, TRBJ2-4)
CASSQSSKKLQYF

SEQ ID NO: 356909 - protein, 15 aa, Homo sapiens
  CDR3 for alpha chain variable domain of TCR clone 178455 (TRAV13-1, TRAJ57)
CAASNTQCGSEKLVF

SEQ ID NO: 356910 - protein, 16 aa, Homo sapiens
  CDR3 for beta chain variable domain of TCR clone 178455 (TRBV19, TRBJ2-1)
CASSKAGPSSYNEQFF

SEQ ID NO: 356911 - protein, 14 aa, Homo sapiens
  CDR3 for alpha chain variable domain of TCR clone 178456 (TRAV26-1, TRAJ38)
CIADNAGNNRKLIW

SEQ ID NO: 356912 - protein, 16 aa, Homo sapiens
  CDR3 for beta chain variable domain of TCR clone 178456 (TRBV19, TRBJ2-1)
CASSKAGPSLYNEQFF

SEQ ID NO: 356913 - protein, 14 aa, Homo sapiens
  CDR3 for alpha chain variable domain of TCR clone 178457 (TRAV1-2, TRAJ16)
CAVNRFSDGQKLLF

SEQ ID NO: 356914 - protein, 12 aa, Homo sapiens
  CDR3 for beta chain variable domain of TCR clone 178457 (TRBV7-9, TRBJ2-7)
CASSFGSDEQYF

SEQ ID NO: 356915 - protein, 16 aa, Homo sapiens
  CDR3 for alpha chain variable domain of TCR clone 178458 (TRAV16, TRAJ4)
CSLSRMFSGGYNKLIF

SEQ ID NO: 356916 - protein, 16 aa, Homo sapiens
  CDR3 for beta chain variable domain of TCR clone 178458 (TRBV24-1, TRBJ2-3)
CATSDPGTEATDTQYF

SEQ ID NO: 356917 - protein, 14 aa, Homo sapiens
  CDR3 for alpha chain variable domain of TCR clone 178459 (TRAV1-2, TRAJ16)
CAVNRFSGGQKLLF

SEQ ID NO: 356918 - protein, 19 aa, Homo sapiens
  CDR3 for beta chain variable domain of TCR clone 178459 (TRBV6-3, TRBJ1-2)
CASSYSKGRTGPPNYGYAF

SEQ ID NO: 356919 - protein, 12 aa, Homo sapiens
  CDR3 for alpha chain variable domain of TCR clone 178460 (TRAV12-1, TRAJ40)
CLVNGETYKYIF

SEQ ID NO: 356920 - protein, 14 aa, Homo sapiens
  CDR3 for beta chain variable domain of TCR clone 178460 (TRBV7-9, TRBJ1-1)
CASSSTKGNTEAFF

SEQ ID NO: 356921 - protein, 20 aa, Homo sapiens
  CDR3 for alpha chain variable domain of TCR clone 178461 (TRAV1-1, TRAJ39)
CLLLLRCESSAYNAGNMLTF

SEQ ID NO: 356922 - protein, 13 aa, Homo sapiens
  CDR3 for beta chain variable domain of TCR clone 178461 (TRBV12-4, TRBJ1-5)
CASSPYRAQPQHF

SEQ ID NO: 356923 - protein, 14 aa, Homo sapiens
  CDR3 for alpha chain variable domain of TCR clone 178462 (TRAV8-3, TRAJ15)
CAVVRHQAGTALIF

SEQ ID NO: 356924 - protein, 13 aa, Homo sapiens
  CDR3 for beta chain variable domain of TCR clone 178462 (TRBV9, TRBJ2-7)
CASSASDSYEQYF

SEQ ID NO: 356925 - protein, 13 aa, Homo sapiens
  CDR3 for alpha chain variable domain of TCR clone 178463 (TRAV2, TRAJ40)
RAVVTSGTYKYIF

SEQ ID NO: 356926 - protein, 12 aa, Homo sapiens
  CDR3 for beta chain variable domain of TCR clone 178463 (TRBV11-2, TRBJ2-1)
RASSPGNNEQFF

SEQ ID NO: 356927 - protein, 15 aa, Homo sapiens
  CDR3 for alpha chain variable domain of TCR clone 178464 (TRAV17, TRAJ35)
CATAFVLGFGNLLHC

SEQ ID NO: 356928 - protein, 14 aa, Homo sapiens
  CDR3 for beta chain variable domain of TCR clone 178464 (TRBV12-5, TRBJ2-5)
CASGSRTHQETQYF

SEQ ID NO: 356929 - protein, 13 aa, Homo sapiens
  CDR3 for alpha chain variable domain of TCR clone 178465 (TRAV2, TRAJ40)
CAVVTSGTSKYIF

SEQ ID NO: 356930 - protein, 15 aa, Homo sapiens
  CDR3 for beta chain variable domain of TCR clone 178465 (TRBV18, TRBJ1-1)
CASSPRQGENTEAFF

SEQ ID NO: 356931 - protein, 14 aa, Homo sapiens
  CDR3 for alpha chain variable domain of TCR clone 178466 (TRAV26-1, TRAJ38)
CIADNAGNNRKLIW

SEQ ID NO: 356932 - protein, 15 aa, Homo sapiens
  CDR3 for beta chain variable domain of TCR clone 178466 (TRBV20-1, TRBJ2-7)
CSARDRVSGIDEQYF

SEQ ID NO: 356933 - protein, 13 aa, Homo sapiens
  CDR3 for alpha chain variable domain of TCR clone 178467 (TRAV39, TRAJ58)
CAGDETSGSRSTF

SEQ ID NO: 356934 - protein, 13 aa, Homo sapiens
  CDR3 for beta chain variable domain of TCR clone 178467 (TRBV15, TRBJ2-7)
CATSTTGHYEQYF

SEQ ID NO: 356935 - protein, 11 aa, Homo sapiens
  CDR3 for alpha chain variable domain of TCR clone 178468 (TRAV4, TRAJ28)
CLVGDSRAETL

SEQ ID NO: 356936 - protein, 13 aa, Homo sapiens
  CDR3 for beta chain variable domain of TCR clone 178468 (TRBV20-1, TRBJ2-7)
CSATHTSGYEQYF

SEQ ID NO: 356937 - protein, 12 aa, Homo sapiens
  CDR3 for alpha chain variable domain of TCR clone 178469 (TRAV2, TRAJ9)
CAVGAGGFKTIF

SEQ ID NO: 356938 - protein, 15 aa, Homo sapiens
  CDR3 for beta chain variable domain of TCR clone 178469 (TRBV6-1, TRBJ2-3)
CASSERGGITDTQYF

SEQ ID NO: 356939 - protein, 21 aa, Homo sapiens
  CDR3 for alpha chain variable domain of TCR clone 178470 (TRAV1-1, TRAJ6)
CAVRREEATYLHLEEEPALLF

SEQ ID NO: 356940 - protein, 15 aa, Homo sapiens
  CDR3 for beta chain variable domain of TCR clone 178470 (TRBV6-6, TRBJ2-1)
CATRQGVSSYNEQLF

SEQ ID NO: 356941 - protein, 13 aa, Homo sapiens
  CDR3 for alpha chain variable domain of TCR clone 178471 (TRAV38-1, TRAJ42)
FARWGGSQGNLIF

SEQ ID NO: 356942 - protein, 14 aa, Homo sapiens
  CDR3 for beta chain variable domain of TCR clone 178471 (TRBV6-1, TRBJ1-3)
CASVQGGGGNTIYF

SEQ ID NO: 356943 - protein, 18 aa, Homo sapiens
  CDR3 for alpha chain variable domain of TCR clone 178472 (TRAV3, TRAJ32)
CAVRDIRGYGGDTNKLIF

SEQ ID NO: 356944 - protein, 15 aa, Homo sapiens
  CDR3 for beta chain variable domain of TCR clone 178472 (TRBV12-4, TRBJ2-2)
CASSLGVRHTGELFF

SEQ ID NO: 356945 - protein, 12 aa, Homo sapiens
  CDR3 for alpha chain variable domain of TCR clone 178473 (TRAV38-1, TRAJ34)
CAFMKETNKLIF

SEQ ID NO: 356946 - protein, 17 aa, Homo sapiens
  CDR3 for beta chain variable domain of TCR clone 178473 (TRBV7-8, TRBJ2-6)
CASSAGTGGAGANVLTF

SEQ ID NO: 356947 - protein, 16 aa, Homo sapiens
  CDR3 for alpha chain variable domain of TCR clone 178474 (TRAV23/DV6, TRAJ52)
CAARPSVGTSYGKLTF

SEQ ID NO: 356948 - protein, 14 aa, Homo sapiens
  CDR3 for beta chain variable domain of TCR clone 178474 (TRBV20-1, TRBJ2-3)
CSARDASSTDTQYF

SEQ ID NO: 356949 - protein, 13 aa, Homo sapiens
  CDR3 for alpha chain variable domain of TCR clone 178475 (TRAV12-1, TRAJ39)
CVARSGAGNMLTF

SEQ ID NO: 356950 - protein, 14 aa, Homo sapiens
  CDR3 for beta chain variable domain of TCR clone 178475 (TRBV11-2, TRBJ1-2)
CASSLGTANYGYTF

SEQ ID NO: 356951 - protein, 16 aa, Homo sapiens
  CDR3 for alpha chain variable domain of TCR clone 178476 (TRAV16, TRAJ4)
CALSRMFSGGYNKLIF

SEQ ID NO: 356952 - protein, 16 aa, Homo sapiens
  CDR3 for beta chain variable domain of TCR clone 178476 (TRBV24-1, TRBJ2-3)
CATSVPGTGATDTQYF

SEQ ID NO: 356953 - protein, 12 aa, Homo sapiens
  CDR3 for alpha chain variable domain of TCR clone 178477 (TRAV12-3, TRAJ43)
CAISSNNNDMRF

SEQ ID NO: 356954 - protein, 15 aa, Homo sapiens
  CDR3 for beta chain variable domain of TCR clone 178477 (TRBV27, TRBJ1-4)
CASSHRHATNEKLFL

SEQ ID NO: 356955 - protein, 15 aa, Homo sapiens
  CDR3 for alpha chain variable domain of TCR clone 178478 (TRAV3, TRAJ10)
CAVRDGSGGGNKLTF

SEQ ID NO: 356956 - protein, 15 aa, Homo sapiens
  CDR3 for beta chain variable domain of TCR clone 178478 (TRBV4-2, TRBJ1-4)
CASSLVQREVEKLFF

SEQ ID NO: 356957 - protein, 11 aa, Homo sapiens
  CDR3 for alpha chain variable domain of TCR clone 178479 (TRAV2, TRAJ13)
CASGGYQKVTF

SEQ ID NO: 356958 - protein, 14 aa, Homo sapiens
  CDR3 for beta chain variable domain of TCR clone 178479 (TRBV12-5, TRBJ2-5)
CASGSRTHQETHYF

SEQ ID NO: 356959 - protein, 11 aa, Homo sapiens
  CDR3 for alpha chain variable domain of TCR clone 178480 (TRAV2, TRAJ13)
CASGGYQKVTF

SEQ ID NO: 356960 - protein, 14 aa, Homo sapiens
  CDR3 for beta chain variable domain of TCR clone 178480 (TRBV7-3, TRBJ2-7)
CASSYDQDYYEQSF

SEQ ID NO: 356961 - protein, 15 aa, Homo sapiens
  CDR3 for alpha chain variable domain of TCR clone 178481 (TRAV23/DV6, TRAJ38)
CAASGGAGNHRKLIL

SEQ ID NO: 356962 - protein, 13 aa, Homo sapiens
  CDR3 for beta chain variable domain of TCR clone 178481 (TRBV7-2, TRBJ1-2)
CASSLPGLYGYAF

SEQ ID NO: 356963 - protein, 17 aa, Homo sapiens
  CDR3 for alpha chain variable domain of TCR clone 178482 (TRAV23/DV6, TRAJ57)
CAASSTLSRGGSEKLGF

SEQ ID NO: 356964 - protein, 14 aa, Homo sapiens
  CDR3 for beta chain variable domain of TCR clone 178482 (TRBV25-1, TRBJ1-1)
CASTHLGGNTEAFF

SEQ ID NO: 356965 - protein, 13 aa, Homo sapiens
  CDR3 for alpha chain variable domain of TCR clone 178483 (TRAV16, TRAJ31)
CALSAHNNARLMF

SEQ ID NO: 356966 - protein, 17 aa, Homo sapiens
  CDR3 for beta chain variable domain of TCR clone 178483 (TRBV12-4, TRBJ2-1)
CASSPGLAGGRINEQFC

SEQ ID NO: 356967 - protein, 15 aa, Homo sapiens
  CDR3 for alpha chain variable domain of TCR clone 178484 (TRAV12-1, TRAJ45)
CVVLSGGGGADGLTF

SEQ ID NO: 356968 - protein, 14 aa, Homo sapiens
  CDR3 for beta chain variable domain of TCR clone 178484 (TRBV7-3, TRBJ2-3)
CASSPSARTDTQYF

SEQ ID NO: 356969 - protein, 12 aa, Homo sapiens
  CDR3 for alpha chain variable domain of TCR clone 178485 (TRAV8-3, TRAJ20)
CAVDFNDYKLSF

SEQ ID NO: 356970 - protein, 16 aa, Homo sapiens
  CDR3 for beta chain variable domain of TCR clone 178485 (TRBV4-1, TRBJ1-2)
CASSQDAGQVLYGYTF

SEQ ID NO: 356971 - protein, 13 aa, Homo sapiens
  CDR3 for alpha chain variable domain of TCR clone 178486 (TRAV2, TRAJ40)
CAVVTSGTYKYIF

SEQ ID NO: 356972 - protein, 16 aa, Homo sapiens
  CDR3 for beta chain variable domain of TCR clone 178486 (TRBV2, TRBJ2-5)
CASSETQGVGEETQYF

SEQ ID NO: 356973 - protein, 14 aa, Homo sapiens
  CDR3 for alpha chain variable domain of TCR clone 178487 (TRAV17, TRAJ22)
CATSPSGSARQLTF

SEQ ID NO: 356974 - protein, 13 aa, Homo sapiens
  CDR3 for beta chain variable domain of TCR clone 178487 (TRBV4-1, TRBJ1-1)
CASSRKMNTEAFF

SEQ ID NO: 356975 - protein, 15 aa, Homo sapiens
  CDR3 for alpha chain variable domain of TCR clone 178488 (TRAV12-3, TRAJ6)
CAMSATTGGSYIPTF

SEQ ID NO: 356976 - protein, 13 aa, Homo sapiens
  CDR3 for beta chain variable domain of TCR clone 178488 (TRBV20-1, TRBJ1-1)
CSAPLGGGTEAFF

SEQ ID NO: 356977 - protein, 16 aa, Homo sapiens
  CDR3 for alpha chain variable domain of TCR clone 178489 (TRAV8-4, TRAJ18)
CAVTANGGSTLGRLYV

SEQ ID NO: 356978 - protein, 14 aa, Homo sapiens
  CDR3 for beta chain variable domain of TCR clone 178489 (TRBV12-4, TRBJ1-2)
CASSSAGHIYGYTF

SEQ ID NO: 356979 - protein, 14 aa, Homo sapiens
  CDR3 for alpha chain variable domain of TCR clone 178490 (TRAV17, TRAJ22)
CATDAWGSARQLTF

SEQ ID NO: 356980 - protein, 15 aa, Homo sapiens
  CDR3 for beta chain variable domain of TCR clone 178490 (TRBV19, TRBJ1-2)
CASGRDGGGGYGYTF

SEQ ID NO: 356981 - protein, 14 aa, Homo sapiens
  CDR3 for alpha chain variable domain of TCR clone 178491 (TRAV14/DV4, TRAJ15)
CAMRRDQAGTALLF

SEQ ID NO: 356982 - protein, 11 aa, Homo sapiens
  CDR3 for beta chain variable domain of TCR clone 178491 (TRBV7-2, TRBJ2-7)
RASSSGLWQYF

SEQ ID NO: 356983 - protein, 11 aa, Homo sapiens
  CDR3 for alpha chain variable domain of TCR clone 178492 (TRAV16, TRAJ20)
CALSEGFKAAL

SEQ ID NO: 356984 - protein, 15 aa, Homo sapiens
  CDR3 for beta chain variable domain of TCR clone 178492 (TRBV27, TRBJ2-1)
CASSNGGGSSNEQFF

SEQ ID NO: 356985 - protein, 11 aa, Homo sapiens
  CDR3 for alpha chain variable domain of TCR clone 178493 (TRAV17, TRAJ43)
CATPRSNDMRF

SEQ ID NO: 356986 - protein, 15 aa, Homo sapiens
  CDR3 for beta chain variable domain of TCR clone 178493 (TRBV2, TRBJ2-1)
CASSELAGSYNEQFF

SEQ ID NO: 356987 - protein, 16 aa, Homo sapiens
  CDR3 for alpha chain variable domain of TCR clone 178494 (TRAV12-3, TRAJ53)
CAMSPGSGGSNYQPTF

SEQ ID NO: 356988 - protein, 11 aa, Homo sapiens
  CDR3 for beta chain variable domain of TCR clone 178494 (TRBV29-1, TRBJ2-5)
CSEDRTGTQYF

SEQ ID NO: 356989 - protein, 13 aa, Homo sapiens
  CDR3 for alpha chain variable domain of TCR clone 178495 (TRAV12-2, TRAJ4)
CAGFSGGYNKLIF

SEQ ID NO: 356990 - protein, 16 aa, Homo sapiens
  CDR3 for beta chain variable domain of TCR clone 178495 (TRBV12-4, TRBJ1-5)
CASSRPVGGSNQPQHF

SEQ ID NO: 356991 - protein, 12 aa, Homo sapiens
  CDR3 for alpha chain variable domain of TCR clone 178496 (TRAV12-2, TRAJ16)
CAVNLDGQKLLF

SEQ ID NO: 356992 - protein, 15 aa, Homo sapiens
  CDR3 for beta chain variable domain of TCR clone 178496 (TRBV27, TRBJ2-1)
CASSNGGGSSNEQFF

SEQ ID NO: 356993 - protein, 16 aa, Homo sapiens
  CDR3 for alpha chain variable domain of TCR clone 178497 (TRAV26-1, TRAJ40)
CIVRGYPTSGTYKYIF

SEQ ID NO: 356994 - protein, 17 aa, Homo sapiens
  CDR3 for beta chain variable domain of TCR clone 178497 (TRBV24-1, TRBJ2-4)
CATSDAEARGVRNIQYF

SEQ ID NO: 356995 - protein, 14 aa, Homo sapiens
  CDR3 for alpha chain variable domain of TCR clone 178498 (TRAV12-1, TRAJ26)
CVVKGSNYGQNFVF

SEQ ID NO: 356996 - protein, 14 aa, Homo sapiens
  CDR3 for beta chain variable domain of TCR clone 178498 (TRBV4-1, TRBJ1-1)
CASSQQGNGNEAFF

SEQ ID NO: 356997 - protein, 16 aa, Homo sapiens
  CDR3 for alpha chain variable domain of TCR clone 178499 (TRAV3, TRAJ21)
CAVRDIERGNFNIFYF

SEQ ID NO: 356998 - protein, 13 aa, Homo sapiens
  CDR3 for beta chain variable domain of TCR clone 178499 (TRBV27, TRBJ2-7)
CASSLTTGYEQYF

SEQ ID NO: 356999 - protein, 12 aa, Homo sapiens
  CDR3 for alpha chain variable domain of TCR clone 178500 (TRAV22, TRAJ29)
CAPPSGNTPPVF

SEQ ID NO: 357000 - protein, 14 aa, Homo sapiens
  CDR3 for beta chain variable domain of TCR clone 178500 (TRBV11-2, TRBJ2-7)
CASSLGAGAYEQYF

SEQ ID NO: 357001 - protein, 14 aa, Homo sapiens
  CDR3 for alpha chain variable domain of TCR clone 178501 (TRAV26-1, TRAJ40)
CIVRLLSGTYKYIF

SEQ ID NO: 357002 - protein, 21 aa, Homo sapiens
  CDR3 for beta chain variable domain of TCR clone 178501 (TRBV2, TRBJ2-7)
CASRGTTQLAALSTPFYEQYF

SEQ ID NO: 357003 - protein, 16 aa, Homo sapiens
  CDR3 for alpha chain variable domain of TCR clone 178502 (TRAV27, TRAJ52)
CAGAPAGGTSYGKLTF

SEQ ID NO: 357004 - protein, 12 aa, Homo sapiens
  CDR3 for beta chain variable domain of TCR clone 178502 (TRBV27, TRBJ2-1)
CASRVFYNEQFF

SEQ ID NO: 357005 - protein, 13 aa, Homo sapiens
  CDR3 for alpha chain variable domain of TCR clone 178503 (TRAV8-3, TRAJ43)
CAEGPDNNNDMRF

SEQ ID NO: 357006 - protein, 12 aa, Homo sapiens
  CDR3 for beta chain variable domain of TCR clone 178503 (TRBV7-2, TRBJ1-6)
CASSLSSSPLHF

SEQ ID NO: 357007 - protein, 16 aa, Homo sapiens
  CDR3 for alpha chain variable domain of TCR clone 178504 (TRAV30, TRAJ24)
CGTEIVDADSWGKFQF

SEQ ID NO: 357008 - protein, 13 aa, Homo sapiens
  CDR3 for beta chain variable domain of TCR clone 178504 (TRBV2, TRBJ1-1)
CASNLLRNTEAFF

SEQ ID NO: 357009 - protein, 14 aa, Homo sapiens
  CDR3 for alpha chain variable domain of TCR clone 178505 (TRAV13-1, TRAJ44)
CAAKATGTASKLTF

SEQ ID NO: 357010 - protein, 17 aa, Homo sapiens
  CDR3 for beta chain variable domain of TCR clone 178505 (TRBV7-3, TRBJ2-3)
RASILMKRMRGADTQYF

SEQ ID NO: 357011 - protein, 18 aa, Homo sapiens
  CDR3 for alpha chain variable domain of TCR clone 178506 (TRAV26-1, TRAJ5)
CIVRVVPPRDTGWRALTF

SEQ ID NO: 357012 - protein, 15 aa, Homo sapiens
  CDR3 for beta chain variable domain of TCR clone 178506 (TRBV7-9, TRBJ2-7)
CASSLPMGQANEQYF

SEQ ID NO: 357013 - protein, 15 aa, Homo sapiens
  CDR3 for alpha chain variable domain of TCR clone 178507 (TRAV21, TRAJ53)
CAARQSGGSNYKLTF

SEQ ID NO: 357014 - protein, 16 aa, Homo sapiens
  CDR3 for beta chain variable domain of TCR clone 178507 (TRBV7-3, TRBJ2-2)
CASSLKRGTLSGELFF

SEQ ID NO: 357015 - protein, 14 aa, Homo sapiens
  CDR3 for alpha chain variable domain of TCR clone 178508 (TRAV23/DV6, TRAJ27)
CAASKSTNAGKSTF

SEQ ID NO: 357016 - protein, 16 aa, Homo sapiens
  CDR3 for beta chain variable domain of TCR clone 178508 (TRBV20-1, TRBJ1-4)
CSAPGQGLLTNEKLFF

SEQ ID NO: 357017 - protein, 14 aa, Homo sapiens
  CDR3 for alpha chain variable domain of TCR clone 178509 (TRAV3, TRAJ21)
CAVRDAYNFNKFYF

SEQ ID NO: 357018 - protein, 16 aa, Homo sapiens
  CDR3 for beta chain variable domain of TCR clone 178509 (TRBV19, TRBJ2-1)
CASSKAGPSSYNEQFF

SEQ ID NO: 357019 - protein, 14 aa, Homo sapiens
  CDR3 for alpha chain variable domain of TCR clone 178510 (TRAV12-3, TRAJ10)
SHLPLTVGGNKLTF

SEQ ID NO: 357020 - protein, 14 aa, Homo sapiens
  CDR3 for beta chain variable domain of TCR clone 178510 (TRBV27, TRBJ2-2)
CASSLGAATGELFF

SEQ ID NO: 357021 - protein, 14 aa, Homo sapiens
  CDR3 for alpha chain variable domain of TCR clone 178511 (TRAV23/DV6, TRAJ13)
CAAMYSGGHQKVTF

SEQ ID NO: 357022 - protein, 14 aa, Homo sapiens
  CDR3 for beta chain variable domain of TCR clone 178511 (TRBV7-9, TRBJ2-1)
CASSPRDSLYEQFF

SEQ ID NO: 357023 - protein, 16 aa, Homo sapiens
  CDR3 for alpha chain variable domain of TCR clone 178512 (TRAV3, TRAJ37)
CAVRGKGSGNTGKLIF

SEQ ID NO: 357024 - protein, 16 aa, Homo sapiens
  CDR3 for beta chain variable domain of TCR clone 178512 (TRBV12-4, TRBJ2-3)
CASSPETGGFSDTQYF

SEQ ID NO: 357025 - protein, 11 aa, Homo sapiens
  CDR3 for alpha chain variable domain of TCR clone 178513 (TRAV21, TRAJ48)
CAVDGNEKLTF

SEQ ID NO: 357026 - protein, 15 aa, Homo sapiens
  CDR3 for beta chain variable domain of TCR clone 178513 (TRBV5-1, TRBJ1-1)
CASSLSDLGGTEAFF

SEQ ID NO: 357027 - protein, 15 aa, Homo sapiens
  CDR3 for alpha chain variable domain of TCR clone 178514 (TRAV13-1, TRAJ27)
CAASGANTNAGKSTF

SEQ ID NO: 357028 - protein, 15 aa, Homo sapiens
  CDR3 for beta chain variable domain of TCR clone 178514 (TRBV12-4, TRBJ1-5)
CASTRQGSGNQPQHF

SEQ ID NO: 357029 - protein, 13 aa, Homo sapiens
  CDR3 for alpha chain variable domain of TCR clone 178515 (TRAV13-1, TRAJ17)
CAADGAAGNKLTF

SEQ ID NO: 357030 - protein, 14 aa, Homo sapiens
  CDR3 for beta chain variable domain of TCR clone 178515 (TRBV11-2, TRBJ1-3)
CASSRTQGRNTIYF

SEQ ID NO: 357031 - protein, 12 aa, Homo sapiens
  CDR3 for alpha chain variable domain of TCR clone 178516 (TRAV8-4, TRAJ43)
CAVSVNNNELRF

SEQ ID NO: 357032 - protein, 14 aa, Homo sapiens
  CDR3 for beta chain variable domain of TCR clone 178516 (TRBV11-2, TRBJ1-2)
CASSLGTANYGYTF

SEQ ID NO: 357033 - protein, 15 aa, Homo sapiens
  CDR3 for alpha chain variable domain of TCR clone 178517 (TRAV12-1, TRAJ40)
CVVNMHFPGTYKYIF

SEQ ID NO: 357034 - protein, 15 aa, Homo sapiens
  CDR3 for beta chain variable domain of TCR clone 178517 (TRBV6-3, TRBJ2-7)
CASSSPGTVFYEQYF

SEQ ID NO: 357035 - protein, 13 aa, Homo sapiens
  CDR3 for alpha chain variable domain of TCR clone 178518 (TRAV20, TRAJ42)
CAVQGGSQGNLIF

SEQ ID NO: 357036 - protein, 13 aa, Homo sapiens
  CDR3 for beta chain variable domain of TCR clone 178518 (TRBV20-1, TRBJ1-6)
CSAPLGVGSPLHF

SEQ ID NO: 357037 - protein, 14 aa, Homo sapiens
  CDR3 for alpha chain variable domain of TCR clone 178519 (TRAV13-1, TRAJ44)
CAAKATGTASKLTL

SEQ ID NO: 357038 - protein, 17 aa, Homo sapiens
  CDR3 for beta chain variable domain of TCR clone 178519 (TRBV13, TRBJ2-3)
CASSLSRVAGGRNTQYF

SEQ ID NO: 357039 - protein, 10 aa, Homo sapiens
  CDR3 for alpha chain variable domain of TCR clone 178520 (TRAV8-6, TRAJ23)
CAVTGGKLIF

SEQ ID NO: 357040 - protein, 13 aa, Homo sapiens
  CDR3 for beta chain variable domain of TCR clone 178520 (TRBV15, TRBJ1-6)
CATSGGLNSPLHF

SEQ ID NO: 357041 - protein, 14 aa, Homo sapiens
  CDR3 for alpha chain variable domain of TCR clone 178521 (TRAV29/DV5, TRAJ36)
CAARRKTGANNPFF

SEQ ID NO: 357042 - protein, 17 aa, Homo sapiens
  CDR3 for beta chain variable domain of TCR clone 178521 (TRBV5-1, TRBJ2-2)
CASSLAGLSGGTGELFF

SEQ ID NO: 357043 - protein, 12 aa, Homo sapiens
  CDR3 for alpha chain variable domain of TCR clone 178522 (TRAV13-1, TRAJ21)
CAAKEGFNKFYF

SEQ ID NO: 357044 - protein, 15 aa, Homo sapiens
  CDR3 for beta chain variable domain of TCR clone 178522 (TRBV7-3, TRBJ2-1)
CQQLQTSGRYNEQFF

SEQ ID NO: 357045 - protein, 13 aa, Homo sapiens
  CDR3 for alpha chain variable domain of TCR clone 178523 (TRAV29/DV5, TRAJ43)
CAASAAHFNDMRF

SEQ ID NO: 357046 - protein, 16 aa, Homo sapiens
  CDR3 for beta chain variable domain of TCR clone 178523 (TRBV20-1, TRBJ1-4)
CSAPGQGLLTNEKLFF

SEQ ID NO: 357047 - protein, 15 aa, Homo sapiens
  CDR3 for alpha chain variable domain of TCR clone 178524 (TRAV12-1, TRAJ44)
CVVFVNTGTASKLTF

SEQ ID NO: 357048 - protein, 17 aa, Homo sapiens
  CDR3 for beta chain variable domain of TCR clone 178524 (TRBV7-8, TRBJ2-6)
CASSAGTEGAGANVLTF

SEQ ID NO: 357049 - protein, 14 aa, Homo sapiens
  CDR3 for alpha chain variable domain of TCR clone 178525 (TRAV8-4, TRAJ13)
CAVTLSGGYQKFTF

SEQ ID NO: 357050 - protein, 13 aa, Homo sapiens
  CDR3 for beta chain variable domain of TCR clone 178525 (TRBV7-9, TRBJ1-2)
CASSLKQNYGYTF

SEQ ID NO: 357051 - protein, 16 aa, Homo sapiens
  CDR3 for alpha chain variable domain of TCR clone 178526 (TRAV8-3, TRAJ42)
SAVGEGNGGSQGNRIF

SEQ ID NO: 357052 - protein, 14 aa, Homo sapiens
  CDR3 for beta chain variable domain of TCR clone 178526 (TRBV7-2, TRBJ2-1)
CASSRGGARNGQFF

SEQ ID NO: 357053 - protein, 14 aa, Homo sapiens
  CDR3 for alpha chain variable domain of TCR clone 178527 (TRAV12-2, TRAJ9)
CAVNALEGGFKSIF

SEQ ID NO: 357054 - protein, 16 aa, Homo sapiens
  CDR3 for beta chain variable domain of TCR clone 178527 (TRBV19, TRBJ1-6)
CASSVAPVAGNSPLHF

SEQ ID NO: 357055 - protein, 15 aa, Homo sapiens
  CDR3 for alpha chain variable domain of TCR clone 178528 (TRAV26-1, TRAJ22)
CIVRVSFWFCKATDL

SEQ ID NO: 357056 - protein, 13 aa, Homo sapiens
  CDR3 for beta chain variable domain of TCR clone 178528 (TRBV11-2, TRBJ1-1)
CASSLETSTEAFF

SEQ ID NO: 357057 - protein, 14 aa, Homo sapiens
  CDR3 for alpha chain variable domain of TCR clone 178529 (TRAV13-1, TRAJ9)
CAASALTGGFKTIF

SEQ ID NO: 357058 - protein, 14 aa, Homo sapiens
  CDR3 for beta chain variable domain of TCR clone 178529 (TRBV25-1, TRBJ1-1)
CASTHLGGNTDAFF

SEQ ID NO: 357059 - protein, 15 aa, Homo sapiens
  CDR3 for alpha chain variable domain of TCR clone 178530 (TRAV8-3, TRAJ45)
CTSSYSGGGADGLTF

SEQ ID NO: 357060 - protein, 13 aa, Homo sapiens
  CDR3 for beta chain variable domain of TCR clone 178530 (TRBV10-3, TRBJ2-7)
CASKLAVNYDQYF

SEQ ID NO: 357061 - protein, 13 aa, Homo sapiens
  CDR3 for alpha chain variable domain of TCR clone 178531 (TRAV27, TRAJ45)
CRSSGGGVDGLTF

SEQ ID NO: 357062 - protein, 13 aa, Homo sapiens
  CDR3 for beta chain variable domain of TCR clone 178531 (TRBV7-7, TRBJ2-5)
CASSRSGQETQYF

SEQ ID NO: 357063 - protein, 17 aa, Homo sapiens
  CDR3 for alpha chain variable domain of TCR clone 178532 (TRAV3, TRAJ6)
CAVRDGPRAGGSYIPTF

SEQ ID NO: 357064 - protein, 14 aa, Homo sapiens
  CDR3 for beta chain variable domain of TCR clone 178532 (TRBV7-2, TRBJ2-7)
CAGRPKTSFYEQYF

SEQ ID NO: 357065 - protein, 18 aa, Homo sapiens
  CDR3 for alpha chain variable domain of TCR clone 178533 (TRAV3, TRAJ42)
CAVRDEGTGGGSQGNLIF

SEQ ID NO: 357066 - protein, 16 aa, Homo sapiens
  CDR3 for beta chain variable domain of TCR clone 178533 (TRBV9, TRBJ1-2)
CASSVAKGREDYGYTF

SEQ ID NO: 357067 - protein, 13 aa, Homo sapiens
  CDR3 for alpha chain variable domain of TCR clone 178534 (TRAV12-2, TRAJ4)
CAGFSGGYNKLIF

SEQ ID NO: 357068 - protein, 16 aa, Homo sapiens
  CDR3 for beta chain variable domain of TCR clone 178534 (TRBV4-1, TRBJ1-5)
CASSQGGHTTNHPQHF

SEQ ID NO: 357069 - protein, 12 aa, Homo sapiens
  CDR3 for alpha chain variable domain of TCR clone 178535 (TRAV16, TRAJ10)
CSRTEGGNKLTF

SEQ ID NO: 357070 - protein, 13 aa, Homo sapiens
  CDR3 for beta chain variable domain of TCR clone 178535 (TRBV7-3, TRBJ1-1)
CASSQDWGAEAFF

SEQ ID NO: 357071 - protein, 15 aa, Homo sapiens
  CDR3 for alpha chain variable domain of TCR clone 178536 (TRAV26-1, TRAJ22)
CIVRVSFWFCKATDL

SEQ ID NO: 357072 - protein, 14 aa, Homo sapiens
  CDR3 for beta chain variable domain of TCR clone 178536 (TRBV2, TRBJ2-5)
CASSEVLAQETQYF

SEQ ID NO: 357073 - protein, 13 aa, Homo sapiens
  CDR3 for alpha chain variable domain of TCR clone 178537 (TRAV8-1, TRAJ39)
CAGLNNAGNMLTL

SEQ ID NO: 357074 - protein, 17 aa, Homo sapiens
  CDR3 for beta chain variable domain of TCR clone 178537 (TRBV19, TRBJ2-3)
CDSSIDPAGGGTDTQYF

SEQ ID NO: 357075 - protein, 14 aa, Homo sapiens
  CDR3 for alpha chain variable domain of TCR clone 178538 (TRAV26-1, TRAJ21)
CIVRVVYNFNQFYF

SEQ ID NO: 357076 - protein, 17 aa, Homo sapiens
  CDR3 for beta chain variable domain of TCR clone 178538 (TRBV11-2, TRBJ2-1)
CASSLYPPGVEYNEQFF

SEQ ID NO: 357077 - protein, 14 aa, Homo sapiens
  CDR3 for alpha chain variable domain of TCR clone 178539 (TRAV30, TRAJ33)
CGTVAPRSNYQLIW

SEQ ID NO: 357078 - protein, 15 aa, Homo sapiens
  CDR3 for beta chain variable domain of TCR clone 178539 (TRBV4-1, TRBJ2-3)
CASSRGQGIPDTQYF

SEQ ID NO: 357079 - protein, 21 aa, Homo sapiens
  CDR3 for alpha chain variable domain of TCR clone 178540 (TRAV8-3, TRAJ6)
CAVGGEEATYLPLEEEPDLLF

SEQ ID NO: 357080 - protein, 14 aa, Homo sapiens
  CDR3 for beta chain variable domain of TCR clone 178540 (TRBV5-1, TRBJ2-7)
CASSRGESLYEQYF

SEQ ID NO: 357081 - protein, 15 aa, Homo sapiens
  CDR3 for alpha chain variable domain of TCR clone 178541 (TRAV25, TRAJ53)
CAATGGGGSNYKLTF

SEQ ID NO: 357082 - protein, 19 aa, Homo sapiens
  CDR3 for beta chain variable domain of TCR clone 178541 (TRBV7-2, TRBJ2-3)
CASSFVSRNWGGGTDTQYF

SEQ ID NO: 357083 - protein, 17 aa, Homo sapiens
  CDR3 for alpha chain variable domain of TCR clone 178542 (TRAV26-1, TRAJ46)
IASSESEKKSSGYKLTF

SEQ ID NO: 357084 - protein, 13 aa, Homo sapiens
  CDR3 for beta chain variable domain of TCR clone 178542 (TRBV12-5, TRBJ2-3)
CASGDRQSDTQYF

SEQ ID NO: 357085 - protein, 12 aa, Homo sapiens
  CDR3 for alpha chain variable domain of TCR clone 178543 (TRAV12-1, TRAJ40)
CVVPSGTYQYIF

SEQ ID NO: 357086 - protein, 12 aa, Homo sapiens
  CDR3 for beta chain variable domain of TCR clone 178543 (TRBV11-2, TRBJ2-1)
CASSPGNNEQFF

SEQ ID NO: 357087 - protein, 11 aa, Homo sapiens
  CDR3 for alpha chain variable domain of TCR clone 178544 (TRAV17, TRAJ43)
CATPRSHDMRF

SEQ ID NO: 357088 - protein, 15 aa, Homo sapiens
  CDR3 for beta chain variable domain of TCR clone 178544 (TRBV11-2, TRBJ2-1)
CASSLGTRGLNEQFF

SEQ ID NO: 357089 - protein, 16 aa, Homo sapiens
  CDR3 for alpha chain variable domain of TCR clone 178545 (TRAV12-3, TRAJ53)
CAMSPASGGSNYKLTF

SEQ ID NO: 357090 - protein, 15 aa, Homo sapiens
  CDR3 for beta chain variable domain of TCR clone 178545 (TRBV25-1, TRBJ1-4)
CASSKRIATNEKLFF

SEQ ID NO: 357091 - protein, 14 aa, Homo sapiens
  CDR3 for alpha chain variable domain of TCR clone 178546 (TRAV8-4, TRAJ29)
CAVSDVEGNTPLVF

SEQ ID NO: 357092 - protein, 13 aa, Homo sapiens
  CDR3 for beta chain variable domain of TCR clone 178546 (TRBV12-4, TRBJ2-7)
CASSFQGRYEQYF

SEQ ID NO: 357093 - protein, 13 aa, Homo sapiens
  CDR3 for alpha chain variable domain of TCR clone 178547 (TRAV1-2, TRAJ9)
CAALNTGGFKTIF

SEQ ID NO: 357094 - protein, 18 aa, Homo sapiens
  CDR3 for beta chain variable domain of TCR clone 178547 (TRBV4-1, TRBJ2-7)
CASSQAPGTGTLGDEQYF

SEQ ID NO: 357095 - protein, 17 aa, Homo sapiens
  CDR3 for alpha chain variable domain of TCR clone 178548 (TRAV13-1, TRAJ28)
CAASPPYSGAGSYQLTF

SEQ ID NO: 357096 - protein, 14 aa, Homo sapiens
  CDR3 for beta chain variable domain of TCR clone 178548 (TRBV2, TRBJ2-7)
CASSLTSGGYEQYF

SEQ ID NO: 357097 - protein, 14 aa, Homo sapiens
  CDR3 for alpha chain variable domain of TCR clone 178549 (TRAV16, TRAJ33)
CALSAMDSNYQLIW

SEQ ID NO: 357098 - protein, 17 aa, Homo sapiens
  CDR3 for beta chain variable domain of TCR clone 178549 (TRBV25-1, TRBJ2-7)
CASSDARLVFSSYEQYV

SEQ ID NO: 357099 - protein, 15 aa, Homo sapiens
  CDR3 for alpha chain variable domain of TCR clone 178550 (TRAV21, TRAJ53)
CATLNSGGRNYKLTF

SEQ ID NO: 357100 - protein, 17 aa, Homo sapiens
  CDR3 for beta chain variable domain of TCR clone 178550 (TRBV20-1, TRBJ2-2)
CSASGSGQGGLTGELFF

SEQ ID NO: 357101 - protein, 11 aa, Homo sapiens
  CDR3 for alpha chain variable domain of TCR clone 178551 (TRAV3, TRAJ49)
CAPITGNQFYF

SEQ ID NO: 357102 - protein, 15 aa, Homo sapiens
  CDR3 for beta chain variable domain of TCR clone 178551 (TRBV20-1, TRBJ2-7)
CSARDRVSGMDEQYF

SEQ ID NO: 357103 - protein, 15 aa, Homo sapiens
  CDR3 for alpha chain variable domain of TCR clone 178552 (TRAV4, TRAJ39)
CLVGPKNNACNMLTF

SEQ ID NO: 357104 - protein, 13 aa, Homo sapiens
  CDR3 for beta chain variable domain of TCR clone 178552 (TRBV11-2, TRBJ2-5)
CASSATGEETQYF

SEQ ID NO: 357105 - protein, 11 aa, Homo sapiens
  CDR3 for alpha chain variable domain of TCR clone 178553 (TRAV3, TRAJ21)
CAVGNFNKFDF

SEQ ID NO: 357106 - protein, 13 aa, Homo sapiens
  CDR3 for beta chain variable domain of TCR clone 178553 (TRBV7-9, TRBJ1-2)
CASSLTQNYGYTF

SEQ ID NO: 357107 - protein, 14 aa, Homo sapiens
  CDR3 for alpha chain variable domain of TCR clone 178554 (TRAV29/DV5, TRAJ32)
CAAANGGATNKLIF

SEQ ID NO: 357108 - protein, 11 aa, Homo sapiens
  CDR3 for beta chain variable domain of TCR clone 178554 (TRBV11-2, TRBJ2-2)
CASSLPGELFF

SEQ ID NO: 357109 - protein, 11 aa, Homo sapiens
  CDR3 for alpha chain variable domain of TCR clone 178555 (TRAV30, TRAJ23)
CGTEIAGKLIF

SEQ ID NO: 357110 - protein, 16 aa, Homo sapiens
  CDR3 for beta chain variable domain of TCR clone 178555 (TRBV7-2, TRBJ2-7)
CASTSQADSGGYEQYF

SEQ ID NO: 357111 - protein, 12 aa, Homo sapiens
  CDR3 for alpha chain variable domain of TCR clone 178556 (TRAV12-3, TRAJ17)
CAMTLTGHKLTF

SEQ ID NO: 357112 - protein, 15 aa, Homo sapiens
  CDR3 for beta chain variable domain of TCR clone 178556 (TRBV20-1, TRBJ2-7)
CSARDRVSGMDELYF

SEQ ID NO: 357113 - protein, 18 aa, Homo sapiens
  CDR3 for alpha chain variable domain of TCR clone 178557 (TRAV21, TRAJ52)
CAVRPSPAGGTSYGKLTF

SEQ ID NO: 357114 - protein, 15 aa, Homo sapiens
  CDR3 for beta chain variable domain of TCR clone 178557 (TRBV25-1, TRBJ1-2)
CASSETGGPSYGYTF

SEQ ID NO: 357115 - protein, 16 aa, Homo sapiens
  CDR3 for alpha chain variable domain of TCR clone 178558 (TRAV23/DV6, TRAJ35)
CAASIGLRGFGNVLHC

SEQ ID NO: 357116 - protein, 16 aa, Homo sapiens
  CDR3 for beta chain variable domain of TCR clone 178558 (TRBV12-4, TRBJ1-5)
CASRQPVEGSNQPQHF

SEQ ID NO: 357117 - protein, 10 aa, Homo sapiens
  CDR3 for alpha chain variable domain of TCR clone 178559 (TRAV1-2, TRAJ31)
CSFFDARLMF

SEQ ID NO: 357118 - protein, 17 aa, Homo sapiens
  CDR3 for beta chain variable domain of TCR clone 178559 (TRBV15, TRBJ1-2)
CATSGREIDVVNYGYTF

SEQ ID NO: 357119 - protein, 15 aa, Homo sapiens
  CDR3 for alpha chain variable domain of TCR clone 178560 (TRAV23/DV6, TRAJ30)
FAASSQESRDEKIIF

SEQ ID NO: 357120 - protein, 17 aa, Homo sapiens
  CDR3 for beta chain variable domain of TCR clone 178560 (TRBV4-3, TRBJ2-1)
CASSQFSSGRASGEQFF

SEQ ID NO: 357121 - protein, 15 aa, Homo sapiens
  CDR3 for alpha chain variable domain of TCR clone 178561 (TRAV26-1, TRAJ29)
CIVRVEGSGNTPLVF

SEQ ID NO: 357122 - protein, 14 aa, Homo sapiens
  CDR3 for beta chain variable domain of TCR clone 178561 (TRBV18, TRBJ2-5)
CASSPGVSQETQYL

SEQ ID NO: 357123 - protein, 14 aa, Homo sapiens
  CDR3 for alpha chain variable domain of TCR clone 178562 (TRAV17, TRAJ42)
CAQNYGGSQGNLIF

SEQ ID NO: 357124 - protein, 13 aa, Homo sapiens
  CDR3 for beta chain variable domain of TCR clone 178562 (TRBV20-1, TRBJ1-2)
CSSPRSGRYGYTF

SEQ ID NO: 357125 - protein, 13 aa, Homo sapiens
  CDR3 for alpha chain variable domain of TCR clone 178563 (TRAV23/DV6, TRAJ58)
CAASEIGGSRLTF

SEQ ID NO: 357126 - protein, 13 aa, Homo sapiens
  CDR3 for beta chain variable domain of TCR clone 178563 (TRBV3-1, TRBJ1-5)
CASSQFGDQPQRF

SEQ ID NO: 357127 - protein, 14 aa, Homo sapiens
  CDR3 for alpha chain variable domain of TCR clone 178564 (TRAV1-1, TRAJ5)
CAVRDGAGRRALTF

SEQ ID NO: 357128 - protein, 14 aa, Homo sapiens
  CDR3 for beta chain variable domain of TCR clone 178564 (TRBV28, TRBJ2-1)
CASSHYTAYNEQFF

SEQ ID NO: 357129 - protein, 16 aa, Homo sapiens
  CDR3 for alpha chain variable domain of TCR clone 178565 (TRAV13-2, TRAJ53)
CAENANSGCSNYKLTF

SEQ ID NO: 357130 - protein, 19 aa, Homo sapiens
  CDR3 for beta chain variable domain of TCR clone 178565 (TRBV28, TRBJ2-7)
CASSYSGTSRLGWVYEQYF

SEQ ID NO: 357131 - protein, 16 aa, Homo sapiens
  CDR3 for alpha chain variable domain of TCR clone 178566 (TRAV30, TRAJ24)
CGTKIVDADSWGKFQF

SEQ ID NO: 357132 - protein, 12 aa, Homo sapiens
  CDR3 for beta chain variable domain of TCR clone 178566 (TRBV11-2, TRBJ2-1)
CASSPGNNEQFF

SEQ ID NO: 357133 - protein, 17 aa, Homo sapiens
  CDR3 for alpha chain variable domain of TCR clone 178567 (TRAV3, TRAJ38)
CAVRDCLNAGNNRKLIW

SEQ ID NO: 357134 - protein, 14 aa, Homo sapiens
  CDR3 for beta chain variable domain of TCR clone 178567 (TRBV12-5, TRBJ2-5)
CASGSRTHQETQYF

SEQ ID NO: 357135 - protein, 14 aa, Homo sapiens
  CDR3 for alpha chain variable domain of TCR clone 178568 (TRAV8-4, TRAJ48)
CAVSETFGIEKLTF

SEQ ID NO: 357136 - protein, 14 aa, Homo sapiens
  CDR3 for beta chain variable domain of TCR clone 178568 (TRBV13, TRBJ2-7)
CASSLKGASYEQYF

SEQ ID NO: 357137 - protein, 11 aa, Homo sapiens
  CDR3 for alpha chain variable domain of TCR clone 178569 (TRAV17, TRAJ31)
CATSNNARLIF

SEQ ID NO: 357138 - protein, 16 aa, Homo sapiens
  CDR3 for beta chain variable domain of TCR clone 178569 (TRBV7-8, TRBJ2-4)
CASSAERTLAKDIQYF

SEQ ID NO: 357139 - protein, 13 aa, Homo sapiens
  CDR3 for alpha chain variable domain of TCR clone 178570 (TRAV13-2, TRAJ8)
CAFMNTGVQKLVF

SEQ ID NO: 357140 - protein, 17 aa, Homo sapiens
  CDR3 for beta chain variable domain of TCR clone 178570 (TRBV28, TRBJ2-1)
CASSYARQALTYNEQFF

SEQ ID NO: 357141 - protein, 14 aa, Homo sapiens
  CDR3 for alpha chain variable domain of TCR clone 178571 (TRAV9-2, TRAJ39)
CALYIYNAGNMLTF

SEQ ID NO: 357142 - protein, 14 aa, Homo sapiens
  CDR3 for beta chain variable domain of TCR clone 178571 (TRBV7-9, TRBJ2-5)
CASSLVGGEETQYF

SEQ ID NO: 357143 - protein, 12 aa, Homo sapiens
  CDR3 for alpha chain variable domain of TCR clone 178572 (TRAV12-3, TRAJ17)
CAMTLTGNNLTF

SEQ ID NO: 357144 - protein, 15 aa, Homo sapiens
  CDR3 for beta chain variable domain of TCR clone 178572 (TRBV20-1, TRBJ2-7)
CSARDRVSGMDEQYY

SEQ ID NO: 357145 - protein, 14 aa, Homo sapiens
  CDR3 for alpha chain variable domain of TCR clone 178573 (TRAV13-1, TRAJ26)
CAASRGNYGQNFVF

SEQ ID NO: 357146 - protein, 19 aa, Homo sapiens
  CDR3 for beta chain variable domain of TCR clone 178573 (TRBV25-1, TRBJ2-2)
CAILVYRVDRGRKTGELFF

SEQ ID NO: 357147 - protein, 13 aa, Homo sapiens
  CDR3 for alpha chain variable domain of TCR clone 178574 (TRAV8-1, TRAJ13)
CAVSKGGCQKVTL

SEQ ID NO: 357148 - protein, 18 aa, Homo sapiens
  CDR3 for beta chain variable domain of TCR clone 178574 (TRBV11-2, TRBJ2-7)
CASSWRTVQTGQSYEQYF

SEQ ID NO: 357149 - protein, 13 aa, Homo sapiens
  CDR3 for alpha chain variable domain of TCR clone 178575 (TRAV17, TRAJ5)
CAPMDTGRRALTF

SEQ ID NO: 357150 - protein, 17 aa, Homo sapiens
  CDR3 for beta chain variable domain of TCR clone 178575 (TRBV7-7, TRBJ1-4)
CASSLVGQGASNEKLFF

SEQ ID NO: 357151 - protein, 15 aa, Homo sapiens
  CDR3 for alpha chain variable domain of TCR clone 178576 (TRAV4, TRAJ39)
CLVGPNNSAGNLLTF

SEQ ID NO: 357152 - protein, 16 aa, Homo sapiens
  CDR3 for beta chain variable domain of TCR clone 178576 (TRBV13, TRBJ2-2)
CASSPRTGEHTGELFF

SEQ ID NO: 357153 - protein, 14 aa, Homo sapiens
  CDR3 for alpha chain variable domain of TCR clone 178577 (TRAV38-2/DV8, TRAJ47)
CAYRTLEYGNKLVF

SEQ ID NO: 357154 - protein, 12 aa, Homo sapiens
  CDR3 for beta chain variable domain of TCR clone 178577 (TRBV11-2, TRBJ2-5)
CASSLVGETQYF

SEQ ID NO: 357155 - protein, 19 aa, Homo sapiens
  CDR3 for alpha chain variable domain of TCR clone 178578 (TRAV3, TRAJ37)
CAVRDIVGGYPINTGKLIF

SEQ ID NO: 357156 - protein, 14 aa, Homo sapiens
  CDR3 for beta chain variable domain of TCR clone 178578 (TRBV7-8, TRBJ2-3)
CASSLEAGTDTQYF

SEQ ID NO: 357157 - protein, 13 aa, Homo sapiens
  CDR3 for alpha chain variable domain of TCR clone 178579 (TRAV13-1, TRAJ13)
CAASKGGYQKVTF

SEQ ID NO: 357158 - protein, 13 aa, Homo sapiens
  CDR3 for beta chain variable domain of TCR clone 178579 (TRBV19, TRBJ1-2)
CASSVPGQDGYTF

SEQ ID NO: 357159 - protein, 17 aa, Homo sapiens
  CDR3 for alpha chain variable domain of TCR clone 178580 (TRAV36/DV7, TRAJ52)
CAVAQRAGGTSYGQLTF

SEQ ID NO: 357160 - protein, 14 aa, Homo sapiens
  CDR3 for beta chain variable domain of TCR clone 178580 (TRBV6-1, TRBJ1-3)
CASVQGGGGNTIYF

SEQ ID NO: 357161 - protein, 15 aa, Homo sapiens
  CDR3 for alpha chain variable domain of TCR clone 178581 (TRAV5, TRAJ33)
CAEAPAMDSNYQLTW

SEQ ID NO: 357162 - protein, 12 aa, Homo sapiens
  CDR3 for beta chain variable domain of TCR clone 178581 (TRBV6-3, TRBJ2-7)
CASSLTPYEQYF

SEQ ID NO: 357163 - protein, 15 aa, Homo sapiens
  CDR3 for alpha chain variable domain of TCR clone 178582 (TRAV21, TRAJ24)
CAARSSTDSWGKLPF

SEQ ID NO: 357164 - protein, 15 aa, Homo sapiens
  CDR3 for beta chain variable domain of TCR clone 178582 (TRBV5-1, TRBJ2-1)
CASSPPRAPYNEQFF

SEQ ID NO: 357165 - protein, 15 aa, Homo sapiens
  CDR3 for alpha chain variable domain of TCR clone 178583 (TRAV27, TRAJ24)
CAGGTSADSWGKLQF

SEQ ID NO: 357166 - protein, 14 aa, Homo sapiens
  CDR3 for beta chain variable domain of TCR clone 178583 (TRBV12-5, TRBJ2-5)
CASGSRTHQETQYF

SEQ ID NO: 357167 - protein, 14 aa, Homo sapiens
  CDR3 for alpha chain variable domain of TCR clone 178584 (TRAV12-2, TRAJ40)
CAVKIPSGTSKYVF

SEQ ID NO: 357168 - protein, 14 aa, Homo sapiens
  CDR3 for beta chain variable domain of TCR clone 178584 (TRBV20-1, TRBJ1-1)
CSAQTRIGGTEAFF

SEQ ID NO: 357169 - protein, 13 aa, Homo sapiens
  CDR3 for alpha chain variable domain of TCR clone 178585 (TRAV8-3, TRAJ28)
CAVGAVGSYHLTF

SEQ ID NO: 357170 - protein, 15 aa, Homo sapiens
  CDR3 for beta chain variable domain of TCR clone 178585 (TRBV7-9, TRBJ1-5)
CASSQGHQPNQAQHF

SEQ ID NO: 357171 - protein, 12 aa, Homo sapiens
  CDR3 for alpha chain variable domain of TCR clone 178586 (TRAV21, TRAJ8)
FAVNTGFQKLVF

SEQ ID NO: 357172 - protein, 14 aa, Homo sapiens
  CDR3 for beta chain variable domain of TCR clone 178586 (TRBV4-2, TRBJ2-1)
CASGLDRAYNEQFF

SEQ ID NO: 357173 - protein, 12 aa, Homo sapiens
  CDR3 for alpha chain variable domain of TCR clone 178587 (TRAV38-2/DV8, TRAJ48)
CALLSGNEKLTF

SEQ ID NO: 357174 - protein, 15 aa, Homo sapiens
  CDR3 for beta chain variable domain of TCR clone 178587 (TRBV6-1, TRBJ2-1)
CASSELWGQYNEQFF

SEQ ID NO: 357175 - protein, 10 aa, Homo sapiens
  CDR3 for alpha chain variable domain of TCR clone 178588 (TRAV13-2, TRAJ49)
CADTGNQFYF

SEQ ID NO: 357176 - protein, 16 aa, Homo sapiens
  CDR3 for beta chain variable domain of TCR clone 178588 (TRBV20-1, TRBJ2-6)
CSASSQGYDGANVLTF

SEQ ID NO: 357177 - protein, 16 aa, Homo sapiens
  CDR3 for alpha chain variable domain of TCR clone 178589 (TRAV26-1, TRAJ36)
CIVRVPAQTGANNLFF

SEQ ID NO: 357178 - protein, 12 aa, Homo sapiens
  CDR3 for beta chain variable domain of TCR clone 178589 (TRBV29-1, TRBJ2-3)
CSVTGGADTQYF

SEQ ID NO: 357179 - protein, 16 aa, Homo sapiens
  CDR3 for alpha chain variable domain of TCR clone 178590 (TRAV13-1, TRAJ58)
CAASSPYAPSGSRLTF

SEQ ID NO: 357180 - protein, 14 aa, Homo sapiens
  CDR3 for beta chain variable domain of TCR clone 178590 (TRBV19, TRBJ2-1)
CASPTFVLSGEQFF

SEQ ID NO: 357181 - protein, 13 aa, Homo sapiens
  CDR3 for alpha chain variable domain of TCR clone 178591 (TRAV13-1, TRAJ33)
CAASGAGNYQLIW

SEQ ID NO: 357182 - protein, 12 aa, Homo sapiens
  CDR3 for beta chain variable domain of TCR clone 178591 (TRBV11-2, TRBJ1-2)
CASSREGDGYTF

SEQ ID NO: 357183 - protein, 11 aa, Homo sapiens
  CDR3 for alpha chain variable domain of TCR clone 178592 (TRAV1-1, TRAJ5)
CAVRVRRALTF

SEQ ID NO: 357184 - protein, 12 aa, Homo sapiens
  CDR3 for beta chain variable domain of TCR clone 178592 (TRBV7-9, TRBJ2-7)
CASSIKREEQYF

SEQ ID NO: 357185 - protein, 14 aa, Homo sapiens
  CDR3 for alpha chain variable domain of TCR clone 178593 (TRAV12-2, TRAJ24)
CAVTPADSRGKLQF

SEQ ID NO: 357186 - protein, 13 aa, Homo sapiens
  CDR3 for beta chain variable domain of TCR clone 178593 (TRBV6-4, TRBJ1-5)
CASSADLNQPQHF

SEQ ID NO: 357187 - protein, 12 aa, Homo sapiens
  CDR3 for alpha chain variable domain of TCR clone 178594 (TRAV16, TRAJ8)
CAPLGGFQELVF

SEQ ID NO: 357188 - protein, 15 aa, Homo sapiens
  CDR3 for beta chain variable domain of TCR clone 178594 (TRBV6-1, TRBJ1-5)
CASIPDRLGNQPQHF

SEQ ID NO: 357189 - protein, 14 aa, Homo sapiens
  CDR3 for alpha chain variable domain of TCR clone 178595 (TRAV12-3, TRAJ10)
SHLPLTGGGNKLTF

SEQ ID NO: 357190 - protein, 22 aa, Homo sapiens
  CDR3 for beta chain variable domain of TCR clone 178595 (TRBV6-1, TRBJ1-3)
CASVQGGGWKHHIFWRGKLAHR

SEQ ID NO: 357191 - protein, 12 aa, Homo sapiens
  CDR3 for alpha chain variable domain of TCR clone 178596 (TRAV30, TRAJ43)
CGTEERGKDMRF

SEQ ID NO: 357192 - protein, 17 aa, Homo sapiens
  CDR3 for beta chain variable domain of TCR clone 178596 (TRBV11-2, TRBJ2-1)
CASSLYPPGVEYNEQFF

SEQ ID NO: 357193 - protein, 18 aa, Homo sapiens
  CDR3 for alpha chain variable domain of TCR clone 178597 (TRAV21, TRAJ52)
CAVRPSPAGGTSSGKLTF

SEQ ID NO: 357194 - protein, 16 aa, Homo sapiens
  CDR3 for beta chain variable domain of TCR clone 178597 (TRBV7-3, TRBJ2-2)
CASSLKRGTLSGELFF

SEQ ID NO: 357195 - protein, 14 aa, Homo sapiens
  CDR3 for alpha chain variable domain of TCR clone 178598 (TRAV12-2, TRAJ17)
CAVLFKAAGNKLTF

SEQ ID NO: 357196 - protein, 15 aa, Homo sapiens
  CDR3 for beta chain variable domain of TCR clone 178598 (TRBV28, TRBJ2-5)
CASSSGRTIQETQYF

SEQ ID NO: 357197 - protein, 15 aa, Homo sapiens
  CDR3 for alpha chain variable domain of TCR clone 178599 (TRAV21, TRAJ53)
CATLNSGGSNYKLTF

SEQ ID NO: 357198 - protein, 14 aa, Homo sapiens
  CDR3 for beta chain variable domain of TCR clone 178599 (TRBV19, TRBJ2-1)
CASSPGLAPNEQFF

SEQ ID NO: 357199 - protein, 13 aa, Homo sapiens
  CDR3 for alpha chain variable domain of TCR clone 178600 (TRAV1-2, TRAJ33)
CAVSEDSNYQLIW

SEQ ID NO: 357200 - protein, 15 aa, Homo sapiens
  CDR3 for beta chain variable domain of TCR clone 178600 (TRBV5-1, TRBJ2-3)
CASSVTSGSTDTQYF

SEQ ID NO: 357201 - protein, 15 aa, Homo sapiens
  CDR3 for alpha chain variable domain of TCR clone 178601 (TRAV3, TRAJ22)
CAVRDRGGSARQLTF

SEQ ID NO: 357202 - protein, 15 aa, Homo sapiens
  CDR3 for beta chain variable domain of TCR clone 178601 (TRBV12-4, TRBJ2-1)
CASSLLATGNNEQFF

SEQ ID NO: 357203 - protein, 14 aa, Homo sapiens
  CDR3 for alpha chain variable domain of TCR clone 178602 (TRAV13-1, TRAJ31)
CAATSRPNNARLMF

SEQ ID NO: 357204 - protein, 15 aa, Homo sapiens
  CDR3 for beta chain variable domain of TCR clone 178602 (TRBV4-2, TRBJ2-4)
CASSPLGAAKNIQYF

SEQ ID NO: 357205 - protein, 14 aa, Homo sapiens
  CDR3 for alpha chain variable domain of TCR clone 178603 (TRAV38-1, TRAJ43)
CAFMKHNNNNDMRF

SEQ ID NO: 357206 - protein, 20 aa, Homo sapiens
  CDR3 for beta chain variable domain of TCR clone 178603 (TRBV7-8, TRBJ2-2)
CASSHLFPGPTIHITGELFF

SEQ ID NO: 357207 - protein, 18 aa, Homo sapiens
  CDR3 for alpha chain variable domain of TCR clone 178604 (TRAV16, TRAJ4)
CALSRMFSGGYNKLILEQ

SEQ ID NO: 357208 - protein, 14 aa, Homo sapiens
  CDR3 for beta chain variable domain of TCR clone 178604 (TRBV4-1, TRBJ2-2)
CASSQAVNTGELFF

SEQ ID NO: 357209 - protein, 14 aa, Homo sapiens
  CDR3 for alpha chain variable domain of TCR clone 178605 (TRAV2, TRAJ9)
CAVEDRSGVFNTIF

SEQ ID NO: 357210 - protein, 13 aa, Homo sapiens
  CDR3 for beta chain variable domain of TCR clone 178605 (TRBV7-3, TRBJ1-1)
CASSQDWGAEAFF

SEQ ID NO: 357211 - protein, 15 aa, Homo sapiens
  CDR3 for alpha chain variable domain of TCR clone 178606 (TRAV3, TRAJ22)
CAVRDRGGSARQLTF

SEQ ID NO: 357212 - protein, 16 aa, Homo sapiens
  CDR3 for beta chain variable domain of TCR clone 178606 (TRBV5-4, TRBJ2-3)
CASQQPGAGGADTQNF

SEQ ID NO: 357213 - protein, 11 aa, Homo sapiens
  CDR3 for alpha chain variable domain of TCR clone 178607 (TRAV13-1, TRAJ5)
CAPKGRRALTF

SEQ ID NO: 357214 - protein, 17 aa, Homo sapiens
  CDR3 for beta chain variable domain of TCR clone 178607 (TRBV28, TRBJ2-5)
CASSTAEGDALQETQYF

SEQ ID NO: 357215 - protein, 14 aa, Homo sapiens
  CDR3 for alpha chain variable domain of TCR clone 178608 (TRAV3, TRAJ21)
CALGRGSTNFTLDL

SEQ ID NO: 357216 - protein, 14 aa, Homo sapiens
  CDR3 for beta chain variable domain of TCR clone 178608 (TRBV7-9, TRBJ2-4)
CASSLAVGGNIQYF

SEQ ID NO: 357217 - protein, 14 aa, Homo sapiens
  CDR3 for alpha chain variable domain of TCR clone 178609 (TRAV13-1, TRAJ35)
CAASKGGFGNVLHC

SEQ ID NO: 357218 - protein, 13 aa, Homo sapiens
  CDR3 for beta chain variable domain of TCR clone 178609 (TRBV7-3, TRBJ1-1)
CASGQDWGAEAFF

SEQ ID NO: 357219 - protein, 13 aa, Homo sapiens
  CDR3 for alpha chain variable domain of TCR clone 178610 (TRAV23/DV6, TRAJ21)
CAASIGNFNKFSF

SEQ ID NO: 357220 - protein, 15 aa, Homo sapiens
  CDR3 for beta chain variable domain of TCR clone 178610 (TRBV20-1, TRBJ2-7)
CSARDRVSGMDEQYF

SEQ ID NO: 357221 - protein, 16 aa, Homo sapiens
  CDR3 for alpha chain variable domain of TCR clone 178611 (TRAV14/DV4, TRAJ53)
CAMREGGGGSNYKLTF

SEQ ID NO: 357222 - protein, 12 aa, Homo sapiens
  CDR3 for beta chain variable domain of TCR clone 178611 (TRBV6-3, TRBJ2-3)
CASGDWTDTQYF

SEQ ID NO: 357223 - protein, 15 aa, Homo sapiens
  CDR3 for alpha chain variable domain of TCR clone 178612 (TRAV4, TRAJ39)
CLVGPNNNAGNMPTF

SEQ ID NO: 357224 - protein, 17 aa, Homo sapiens
  CDR3 for beta chain variable domain of TCR clone 178612 (TRBV11-2, TRBJ2-1)
CASSLYPPGVEYNEQFF

SEQ ID NO: 357225 - protein, 13 aa, Homo sapiens
  CDR3 for alpha chain variable domain of TCR clone 178613 (TRAV23/DV6, TRAJ16)
CAASISDGQKTLF

SEQ ID NO: 357226 - protein, 15 aa, Homo sapiens
  CDR3 for beta chain variable domain of TCR clone 178613 (TRBV2, TRBJ2-2)
CASSRETVGTGELFF

SEQ ID NO: 357227 - protein, 14 aa, Homo sapiens
  CDR3 for alpha chain variable domain of TCR clone 178614 (TRAV1-2, TRAJ16)
CAVNRFSDGQKLLF

SEQ ID NO: 357228 - protein, 11 aa, Homo sapiens
  CDR3 for beta chain variable domain of TCR clone 178614 (TRBV6-1, TRBJ1-3)
CKGGGGNTIYF

SEQ ID NO: 357229 - protein, 15 aa, Homo sapiens
  CDR3 for alpha chain variable domain of TCR clone 178615 (TRAV26-2, TRAJ39)
CSLRGNNNAGNMLTF

SEQ ID NO: 357230 - protein, 15 aa, Homo sapiens
  CDR3 for beta chain variable domain of TCR clone 178615 (TRBV5-4, TRBJ1-1)
CASSSRGWANTESFF

SEQ ID NO: 357231 - protein, 14 aa, Homo sapiens
  CDR3 for alpha chain variable domain of TCR clone 178616 (TRAV8-6, TRAJ9)
CAVSSYNGGFKTIF

SEQ ID NO: 357232 - protein, 15 aa, Homo sapiens
  CDR3 for beta chain variable domain of TCR clone 178616 (TRBV2, TRBJ1-2)
CASSESRTVNYGYAF

SEQ ID NO: 357233 - protein, 14 aa, Homo sapiens
  CDR3 for alpha chain variable domain of TCR clone 178617 (TRAV26-2, TRAJ38)
CILYNAGNNRKLIW

SEQ ID NO: 357234 - protein, 16 aa, Homo sapiens
  CDR3 for beta chain variable domain of TCR clone 178617 (TRBV19, TRBJ2-1)
CASSKAGPSSYNEQFF

SEQ ID NO: 357235 - protein, 14 aa, Homo sapiens
  CDR3 for alpha chain variable domain of TCR clone 178618 (TRAV8-1, TRAJ34)
CAVNPAYNTDKLIF

SEQ ID NO: 357236 - protein, 16 aa, Homo sapiens
  CDR3 for beta chain variable domain of TCR clone 178618 (TRBV7-2, TRBJ2-6)
CASSLAGRSGANVLTF

SEQ ID NO: 357237 - protein, 13 aa, Homo sapiens
  CDR3 for alpha chain variable domain of TCR clone 178619 (TRAV8-3, TRAJ6)
CAVSSGGSYIPTF

SEQ ID NO: 357238 - protein, 14 aa, Homo sapiens
  CDR3 for beta chain variable domain of TCR clone 178619 (TRBV11-2, TRBJ1-1)
CASSTQRGRTGAFF

SEQ ID NO: 357239 - protein, 17 aa, Homo sapiens
  CDR3 for alpha chain variable domain of TCR clone 178620 (TRAV26-2, TRAJ42)
CTLRDVGYGGSQGNLIF

SEQ ID NO: 357240 - protein, 16 aa, Homo sapiens
  CDR3 for beta chain variable domain of TCR clone 178620 (TRBV6-5, TRBJ2-1)
CASSETLAGHYNEQFF

SEQ ID NO: 357241 - protein, 12 aa, Homo sapiens
  CDR3 for alpha chain variable domain of TCR clone 178621 (TRAV12-3, TRAJ17)
CAMTLTGNKLTF

SEQ ID NO: 357242 - protein, 15 aa, Homo sapiens
  CDR3 for beta chain variable domain of TCR clone 178621 (TRBV20-1, TRBJ2-7)
CSARDRVSGLDGQYF

SEQ ID NO: 357243 - protein, 11 aa, Homo sapiens
  CDR3 for alpha chain variable domain of TCR clone 178622 (TRAV27, TRAJ47)
CRSNQGNKLVF

SEQ ID NO: 357244 - protein, 13 aa, Homo sapiens
  CDR3 for beta chain variable domain of TCR clone 178622 (TRBV7-9, TRBJ1-2)
CASSLKQNYGDTF

SEQ ID NO: 357245 - protein, 15 aa, Homo sapiens
  CDR3 for alpha chain variable domain of TCR clone 178623 (TRAV13-1, TRAJ44)
CAASRGGGTASKLTF

SEQ ID NO: 357246 - protein, 14 aa, Homo sapiens
  CDR3 for beta chain variable domain of TCR clone 178623 (TRBV7-2, TRBJ2-5)
CASSPRGSSDTQYF

SEQ ID NO: 357247 - protein, 15 aa, Homo sapiens
  CDR3 for alpha chain variable domain of TCR clone 178624 (TRAV4, TRAJ39)
CLVGPNNNAGNMLTC

SEQ ID NO: 357248 - protein, 13 aa, Homo sapiens
  CDR3 for beta chain variable domain of TCR clone 178624 (TRBV11-2, TRBJ2-5)
CASSSTGEETQYF

SEQ ID NO: 357249 - protein, 17 aa, Homo sapiens
  CDR3 for alpha chain variable domain of TCR clone 178625 (TRAV3, TRAJ6)
CAVRDGPRVGGSYIPTF

SEQ ID NO: 357250 - protein, 12 aa, Homo sapiens
  CDR3 for beta chain variable domain of TCR clone 178625 (TRBV11-2, TRBJ2-2)
RASSLGGGELFF

SEQ ID NO: 357251 - protein, 11 aa, Homo sapiens
  CDR3 for alpha chain variable domain of TCR clone 178626 (TRAV23/DV6, TRAJ58)
CAATLLRGETS

SEQ ID NO: 357252 - protein, 13 aa, Homo sapiens
  CDR3 for beta chain variable domain of TCR clone 178626 (TRBV6-4, TRBJ1-5)
CASSADLNQPQHF

SEQ ID NO: 357253 - protein, 14 aa, Homo sapiens
  CDR3 for alpha chain variable domain of TCR clone 178627 (TRAV12-2, TRAJ17)
CAVLFRAAGNKLTF

SEQ ID NO: 357254 - protein, 15 aa, Homo sapiens
  CDR3 for beta chain variable domain of TCR clone 178627 (TRBV27, TRBJ2-5)
CASSLYPRGGETQYF

SEQ ID NO: 357255 - protein, 21 aa, Homo sapiens
  CDR3 for alpha chain variable domain of TCR clone 178628 (TRAV3, TRAJ17)
CAVRARRGGRSCRQKANLWRM

SEQ ID NO: 357256 - protein, 14 aa, Homo sapiens
  CDR3 for beta chain variable domain of TCR clone 178628 (TRBV4-1, TRBJ2-2)
CASSQAVNTGELFF

SEQ ID NO: 357257 - protein, 15 aa, Homo sapiens
  CDR3 for alpha chain variable domain of TCR clone 178629 (TRAV3, TRAJ47)
CAVRDIGEYGNKLVF

SEQ ID NO: 357258 - protein, 15 aa, Homo sapiens
  CDR3 for beta chain variable domain of TCR clone 178629 (TRBV7-3, TRBJ2-7)
CASSPTVALNYEQYF

SEQ ID NO: 357259 - protein, 12 aa, Homo sapiens
  CDR3 for alpha chain variable domain of TCR clone 178630 (TRAV1-1, TRAJ8)
CAEGTGFQKLVF

SEQ ID NO: 357260 - protein, 15 aa, Homo sapiens
  CDR3 for beta chain variable domain of TCR clone 178630 (TRBV7-9, TRBJ1-4)
CASSRTGGFNEKLFF

SEQ ID NO: 357261 - protein, 13 aa, Homo sapiens
  CDR3 for alpha chain variable domain of TCR clone 178631 (TRAV21, TRAJ34)
CAVSEGDTDKLII

SEQ ID NO: 357262 - protein, 17 aa, Homo sapiens
  CDR3 for beta chain variable domain of TCR clone 178631 (TRBV20-1, TRBJ1-5)
CSARDPSAQGFNQPQHF

SEQ ID NO: 357263 - protein, 15 aa, Homo sapiens
  CDR3 for alpha chain variable domain of TCR clone 178632 (TRAV27, TRAJ50)
CAGVGRGTSYNKVIF

SEQ ID NO: 357264 - protein, 14 aa, Homo sapiens
  CDR3 for beta chain variable domain of TCR clone 178632 (TRBV7-2, TRBJ1-1)
CASSFYDLNTEAFF

SEQ ID NO: 357265 - protein, 14 aa, Homo sapiens
  CDR3 for alpha chain variable domain of TCR clone 178633 (TRAV1-2, TRAJ16)
CAVNRVSDGQKMLF

SEQ ID NO: 357266 - protein, 16 aa, Homo sapiens
  CDR3 for beta chain variable domain of TCR clone 178633 (TRBV11-2, TRBJ1-2)
CASSLDTGGADYGYTF

SEQ ID NO: 357267 - protein, 14 aa, Homo sapiens
  CDR3 for alpha chain variable domain of TCR clone 178634 (TRAV1-2, TRAJ8)
CAVREDTGFQKLVF

SEQ ID NO: 357268 - protein, 12 aa, Homo sapiens
  CDR3 for beta chain variable domain of TCR clone 178634 (TRBV24-1, TRBJ1-1)
CATLYLDTEAFF

SEQ ID NO: 357269 - protein, 14 aa, Homo sapiens
  CDR3 for alpha chain variable domain of TCR clone 178635 (TRAV30, TRAJ33)
CGTVAPRSNYQLIW

SEQ ID NO: 357270 - protein, 13 aa, Homo sapiens
  CDR3 for beta chain variable domain of TCR clone 178635 (TRBV10-3, TRBJ2-7)
CGLRAGGPHEQYF

SEQ ID NO: 357271 - protein, 15 aa, Homo sapiens
  CDR3 for alpha chain variable domain of TCR clone 178636 (TRAV3, TRAJ12)
CAVRDIRDSSYKLIF

SEQ ID NO: 357272 - protein, 14 aa, Homo sapiens
  CDR3 for beta chain variable domain of TCR clone 178636 (TRBV7-9, TRBJ2-2)
CASSLGHRTGELFF

SEQ ID NO: 357273 - protein, 18 aa, Homo sapiens
  CDR3 for alpha chain variable domain of TCR clone 178637 (TRAV21, TRAJ52)
RAVRPSPAGGTSYGKLPF

SEQ ID NO: 357274 - protein, 15 aa, Homo sapiens
  CDR3 for beta chain variable domain of TCR clone 178637 (TRBV19, TRBJ1-1)
CASTSGQIQNTEAFF

SEQ ID NO: 357275 - protein, 16 aa, Homo sapiens
  CDR3 for alpha chain variable domain of TCR clone 178638 (TRAV30, TRAJ24)
CGTEIVDADSWGKFQF

SEQ ID NO: 357276 - protein, 15 aa, Homo sapiens
  CDR3 for beta chain variable domain of TCR clone 178638 (TRBV12-4, TRBJ2-5)
CASSLGGQGRETQYF

SEQ ID NO: 357277 - protein, 13 aa, Homo sapiens
  CDR3 for alpha chain variable domain of TCR clone 178639 (TRAV27, TRAJ3)
ASLRCSSAPKIIF

SEQ ID NO: 357278 - protein, 15 aa, Homo sapiens
  CDR3 for beta chain variable domain of TCR clone 178639 (TRBV28, TRBJ1-3)
CASSMGWASGNTIYF

SEQ ID NO: 357279 - protein, 13 aa, Homo sapiens
  CDR3 for alpha chain variable domain of TCR clone 178640 (TRAV8-3, TRAJ43)
CAVVPYNNNDIRF

SEQ ID NO: 357280 - protein, 20 aa, Homo sapiens
  CDR3 for beta chain variable domain of TCR clone 178640 (TRBV7-8, TRBJ2-2)
CASSHLFPGPTIHITGELFF

SEQ ID NO: 357281 - protein, 14 aa, Homo sapiens
  CDR3 for alpha chain variable domain of TCR clone 178641 (TRAV12-2, TRAJ15)
CAPHTGQAGTALIF

SEQ ID NO: 357282 - protein, 14 aa, Homo sapiens
  CDR3 for beta chain variable domain of TCR clone 178641 (TRBV7-8, TRBJ2-7)
CASSPRDRVYGQYF

SEQ ID NO: 357283 - protein, 11 aa, Homo sapiens
  CDR3 for alpha chain variable domain of TCR clone 178642 (TRAV2, TRAJ40)
CAVEGTYKYIF

SEQ ID NO: 357284 - protein, 19 aa, Homo sapiens
  CDR3 for beta chain variable domain of TCR clone 178642 (TRBV25-1, TRBJ2-2)
CAILVYRVDRGRKTGELFF

SEQ ID NO: 357285 - protein, 12 aa, Homo sapiens
  CDR3 for alpha chain variable domain of TCR clone 178643 (TRAV23/DV6, TRAJ16)
CAARGRGQKLLL

SEQ ID NO: 357286 - protein, 19 aa, Homo sapiens
  CDR3 for beta chain variable domain of TCR clone 178643 (TRBV7-2, TRBJ2-3)
CASSFLSRNWGGGTDTQYF

SEQ ID NO: 357287 - protein, 16 aa, Homo sapiens
  CDR3 for alpha chain variable domain of TCR clone 178644 (TRAV8-3, TRAJ10)
CAVGPGVTGGGNKLTF

SEQ ID NO: 357288 - protein, 13 aa, Homo sapiens
  CDR3 for beta chain variable domain of TCR clone 178644 (TRBV18, TRBJ1-1)
CASSPGPSGEAVF

SEQ ID NO: 357289 - protein, 14 aa, Homo sapiens
  CDR3 for alpha chain variable domain of TCR clone 178645 (TRAV9-2, TRAJ39)
CALFIYNAGNMLTF

SEQ ID NO: 357290 - protein, 14 aa, Homo sapiens
  CDR3 for beta chain variable domain of TCR clone 178645 (TRBV7-2, TRBJ2-7)
CASRSQGAAYEQYF

SEQ ID NO: 357291 - protein, 14 aa, Homo sapiens
  CDR3 for alpha chain variable domain of TCR clone 178646 (TRAV12-3, TRAJ42)
CAMNYGGSQGSLIF

SEQ ID NO: 357292 - protein, 15 aa, Homo sapiens
  CDR3 for beta chain variable domain of TCR clone 178646 (TRBV5-7, TRBJ1-5)
CASSYGKLWDQTQHF

SEQ ID NO: 357293 - protein, 13 aa, Homo sapiens
  CDR3 for alpha chain variable domain of TCR clone 178647 (TRAV8-4, TRAJ5)
CAVLDTGRRALTC

SEQ ID NO: 357294 - protein, 12 aa, Homo sapiens
  CDR3 for beta chain variable domain of TCR clone 178647 (TRBV7-9, TRBJ1-6)
CASSASESPLHF

SEQ ID NO: 357295 - protein, 12 aa, Homo sapiens
  CDR3 for alpha chain variable domain of TCR clone 178648 (TRAV3, TRAJ27)
CAVRDKAGKSTF

SEQ ID NO: 357296 - protein, 14 aa, Homo sapiens
  CDR3 for beta chain variable domain of TCR clone 178648 (TRBV15, TRBJ2-5)
CASSIGGLGETQYF

SEQ ID NO: 357297 - protein, 12 aa, Homo sapiens
  CDR3 for alpha chain variable domain of TCR clone 178649 (TRAV13-1, TRAJ9)
CASHTGGFETIF

SEQ ID NO: 357298 - protein, 18 aa, Homo sapiens
  CDR3 for beta chain variable domain of TCR clone 178649 (TRBV11-2, TRBJ2-3)
WASSLGGASRGAPNTQYF

SEQ ID NO: 357299 - protein, 15 aa, Homo sapiens
  CDR3 for alpha chain variable domain of TCR clone 178650 (TRAV8-4, TRAJ13)
CAVSDWGGGYQKVTF

SEQ ID NO: 357300 - protein, 15 aa, Homo sapiens
  CDR3 for beta chain variable domain of TCR clone 178650 (TRBV10-3, TRBJ2-3)
CAISLTSGGTDTQYF

SEQ ID NO: 357301 - protein, 13 aa, Homo sapiens
  CDR3 for alpha chain variable domain of TCR clone 178651 (TRAV29/DV5, TRAJ44)
CAASTGNASKLTF

SEQ ID NO: 357302 - protein, 15 aa, Homo sapiens
  CDR3 for beta chain variable domain of TCR clone 178651 (TRBV7-3, TRBJ2-2)
CASSETGQGTGELFF

SEQ ID NO: 357303 - protein, 16 aa, Homo sapiens
  CDR3 for alpha chain variable domain of TCR clone 178652 (TRAV1-2, TRAJ10)
CAVRGVLTGGGNKLTF

SEQ ID NO: 357304 - protein, 14 aa, Homo sapiens
  CDR3 for beta chain variable domain of TCR clone 178652 (TRBV12-4, TRBJ1-1)
CASSLGTGGTAAFF

SEQ ID NO: 357305 - protein, 13 aa, Homo sapiens
  CDR3 for alpha chain variable domain of TCR clone 178653 (TRAV25, TRAJ54)
CAGTIQGAQKLGF

SEQ ID NO: 357306 - protein, 15 aa, Homo sapiens
  CDR3 for beta chain variable domain of TCR clone 178653 (TRBV19, TRBJ1-5)
CASSILTGENQRQHF

SEQ ID NO: 357307 - protein, 11 aa, Homo sapiens
  CDR3 for alpha chain variable domain of TCR clone 178654 (TRAV35, TRAJ30)
CAGPGDDKIIF

SEQ ID NO: 357308 - protein, 18 aa, Homo sapiens
  CDR3 for beta chain variable domain of TCR clone 178654 (TRBV20-1, TRBJ2-6)
CSARTLAGGPSGANVLTF

SEQ ID NO: 357309 - protein, 17 aa, Homo sapiens
  CDR3 for alpha chain variable domain of TCR clone 178655 (TRAV27, TRAJ42)
CAERVIYYGRSQGNLIF

SEQ ID NO: 357310 - protein, 14 aa, Homo sapiens
  CDR3 for beta chain variable domain of TCR clone 178655 (TRBV6-6, TRBJ2-3)
CASRLQREADTQYF

SEQ ID NO: 357311 - protein, 15 aa, Homo sapiens
  CDR3 for alpha chain variable domain of TCR clone 178656 (TRAV8-2, TRAJ10)
CVVSHSTGGGNKLTF

SEQ ID NO: 357312 - protein, 13 aa, Homo sapiens
  CDR3 for beta chain variable domain of TCR clone 178656 (TRBV12-5, TRBJ2-3)
CASGDRQSDTQYF

SEQ ID NO: 357313 - protein, 14 aa, Homo sapiens
  CDR3 for alpha chain variable domain of TCR clone 178657 (TRAV12-2, TRAJ13)
CAMKKTGGYQKVTF

SEQ ID NO: 357314 - protein, 12 aa, Homo sapiens
  CDR3 for beta chain variable domain of TCR clone 178657 (TRBV5-7, TRBJ1-2)
CASSLVQNGYTF

SEQ ID NO: 357315 - protein, 14 aa, Homo sapiens
  CDR3 for alpha chain variable domain of TCR clone 178658 (TRAV12-3, TRAJ10)
CAMSGGGGGNKLTF

SEQ ID NO: 357316 - protein, 17 aa, Homo sapiens
  CDR3 for beta chain variable domain of TCR clone 178658 (TRBV4-1, TRBJ1-4)
CASSQEGPRGVEEKLFF

SEQ ID NO: 357317 - protein, 14 aa, Homo sapiens
  CDR3 for alpha chain variable domain of TCR clone 178659 (TRAV8-3, TRAJ6)
CAVGASGGSYIPTF

SEQ ID NO: 357318 - protein, 17 aa, Homo sapiens
  CDR3 for beta chain variable domain of TCR clone 178659 (TRBV18, TRBJ2-2)
CASSRSDPWQNTGELFF

SEQ ID NO: 357319 - protein, 15 aa, Homo sapiens
  CDR3 for alpha chain variable domain of TCR clone 178660 (TRAV8-3, TRAJ45)
CASSYSGGGADGLTF

SEQ ID NO: 357320 - protein, 15 aa, Homo sapiens
  CDR3 for beta chain variable domain of TCR clone 178660 (TRBV20-1, TRBJ1-1)
CSASRGVTGNTEAFF

SEQ ID NO: 357321 - protein, 14 aa, Homo sapiens
  CDR3 for alpha chain variable domain of TCR clone 178661 (TRAV8-3, TRAJ4)
CAVGASSGYNKLIF

SEQ ID NO: 357322 - protein, 13 aa, Homo sapiens
  CDR3 for beta chain variable domain of TCR clone 178661 (TRBV18, TRBJ2-5)
CASSLQGQETQYF

SEQ ID NO: 357323 - protein, 13 aa, Homo sapiens
  CDR3 for alpha chain variable domain of TCR clone 178662 (TRAV8-4, TRAJ36)
CAVSDSGANNLFF

SEQ ID NO: 357324 - protein, 13 aa, Homo sapiens
  CDR3 for beta chain variable domain of TCR clone 178662 (TRBV7-9, TRBJ1-2)
CASSLKQNYGYTF

SEQ ID NO: 357325 - protein, 15 aa, Homo sapiens
  CDR3 for alpha chain variable domain of TCR clone 178663 (TRAV26-1, TRAJ29)
CIVRVEGSGNTPLVF

SEQ ID NO: 357326 - protein, 13 aa, Homo sapiens
  CDR3 for beta chain variable domain of TCR clone 178663 (TRBV7-2, TRBJ2-7)
CASSAPSGSEQYF

SEQ ID NO: 357327 - protein, 13 aa, Homo sapiens
  CDR3 for alpha chain variable domain of TCR clone 178664 (TRAV8-3, TRAJ36)
CAVGATGANNLFF

SEQ ID NO: 357328 - protein, 13 aa, Homo sapiens
  CDR3 for beta chain variable domain of TCR clone 178664 (TRBV7-9, TRBJ2-5)
CASLPSGRETQYF

SEQ ID NO: 357329 - protein, 18 aa, Homo sapiens
  CDR3 for alpha chain variable domain of TCR clone 178665 (TRAV26-1, TRAJ23)
CCVLLHRQSPNQGGKLIF

SEQ ID NO: 357330 - protein, 19 aa, Homo sapiens
  CDR3 for beta chain variable domain of TCR clone 178665 (TRBV25-1, TRBJ2-2)
CAILVYRVDRGRKTGELFF

SEQ ID NO: 357331 - protein, 14 aa, Homo sapiens
  CDR3 for alpha chain variable domain of TCR clone 178666 (TRAV12-2, TRAJ44)
CAVNPAGTASKLTF

SEQ ID NO: 357332 - protein, 15 aa, Homo sapiens
  CDR3 for beta chain variable domain of TCR clone 178666 (TRBV7-2, TRBJ2-1)
CASTHGTGIYNEQFF

SEQ ID NO: 357333 - protein, 13 aa, Homo sapiens
  CDR3 for alpha chain variable domain of TCR clone 178667 (TRAV41, TRAJ45)
CAVRSGGADGLTF

SEQ ID NO: 357334 - protein, 15 aa, Homo sapiens
  CDR3 for beta chain variable domain of TCR clone 178667 (TRBV11-3, TRBJ2-7)
CASSPGPASSYEQYF

SEQ ID NO: 357335 - protein, 12 aa, Homo sapiens
  CDR3 for alpha chain variable domain of TCR clone 178668 (TRAV12-2, TRAJ26)
CAVNVYGQNFVF

SEQ ID NO: 357336 - protein, 16 aa, Homo sapiens
  CDR3 for beta chain variable domain of TCR clone 178668 (TRBV27, TRBJ2-2)
CASSFRGLVRTGELFF

SEQ ID NO: 357337 - protein, 11 aa, Homo sapiens
  CDR3 for alpha chain variable domain of TCR clone 178669 (TRAV35, TRAJ30)
CAGERDDKIIF

SEQ ID NO: 357338 - protein, 14 aa, Homo sapiens
  CDR3 for beta chain variable domain of TCR clone 178669 (TRBV15, TRBJ2-5)
CATSGDRGHETQYF

SEQ ID NO: 357339 - protein, 14 aa, Homo sapiens
  CDR3 for alpha chain variable domain of TCR clone 178670 (TRAV12-1, TRAJ22)
CVVNAGGSARQLTF

SEQ ID NO: 357340 - protein, 12 aa, Homo sapiens
  CDR3 for beta chain variable domain of TCR clone 178670 (TRBV11-2, TRBJ2-2)
CASSLGGGELFF

SEQ ID NO: 357341 - protein, 12 aa, Homo sapiens
  CDR3 for alpha chain variable domain of TCR clone 178671 (TRAV26-1, TRAJ31)
CTVRNNNARLMF

SEQ ID NO: 357342 - protein, 15 aa, Homo sapiens
  CDR3 for beta chain variable domain of TCR clone 178671 (TRBV20-1, TRBJ2-4)
CSARDLTGGPNIQYF

SEQ ID NO: 357343 - protein, 14 aa, Homo sapiens
  CDR3 for alpha chain variable domain of TCR clone 178672 (TRAV8-4, TRAJ43)
CAVSDPRNNKDMRF

SEQ ID NO: 357344 - protein, 15 aa, Homo sapiens
  CDR3 for beta chain variable domain of TCR clone 178672 (TRBV4-2, TRBJ1-2)
CASSQRTGGRDGYTF

SEQ ID NO: 357345 - protein, 11 aa, Homo sapiens
  CDR3 for alpha chain variable domain of TCR clone 178673 (TRAV1-1, TRAJ23)
CAVRQGGKLIF

SEQ ID NO: 357346 - protein, 16 aa, Homo sapiens
  CDR3 for beta chain variable domain of TCR clone 178673 (TRBV5-4, TRBJ2-1)
CASSLVGSGQDNEQFF

SEQ ID NO: 357347 - protein, 23 aa, Homo sapiens
  CDR3 for alpha chain variable domain of TCR clone 178674 (TRAV30, TRAJ43)
CTLRPPSSVTQEPTSAALSDMRF

SEQ ID NO: 357348 - protein, 13 aa, Homo sapiens
  CDR3 for beta chain variable domain of TCR clone 178674 (TRBV12-4, TRBJ2-2)
CASIITGSGELFF

SEQ ID NO: 357349 - protein, 17 aa, Homo sapiens
  CDR3 for alpha chain variable domain of TCR clone 178675 (TRAV12-3, TRAJ6)
CAMSARGGAGGSYKPTF

SEQ ID NO: 357350 - protein, 12 aa, Homo sapiens
  CDR3 for beta chain variable domain of TCR clone 178675 (TRBV12-4, TRBJ2-3)
CASSTLPDTRYF

SEQ ID NO: 357351 - protein, 15 aa, Homo sapiens
  CDR3 for alpha chain variable domain of TCR clone 178676 (TRAV2, TRAJ9)
CAVEDLGTGGCKTIF

SEQ ID NO: 357352 - protein, 16 aa, Homo sapiens
  CDR3 for beta chain variable domain of TCR clone 178676 (TRBV24-1, TRBJ2-3)
CATSDPGTGATDTQYF

SEQ ID NO: 357353 - protein, 17 aa, Homo sapiens
  CDR3 for alpha chain variable domain of TCR clone 178677 (TRAV3, TRAJ42)
CAVDDRDYGGSQGNLIF

SEQ ID NO: 357354 - protein, 18 aa, Homo sapiens
  CDR3 for beta chain variable domain of TCR clone 178677 (TRBV20-1, TRBJ2-3)
CSASGLAGGPGTTDTQYF

SEQ ID NO: 357355 - protein, 15 aa, Homo sapiens
  CDR3 for alpha chain variable domain of TCR clone 178678 (TRAV3, TRAJ12)
CAVREIRDSSYKLIF

SEQ ID NO: 357356 - protein, 15 aa, Homo sapiens
  CDR3 for beta chain variable domain of TCR clone 178678 (TRBV10-3, TRBJ2-3)
CAISLTSGGTDTQYF

SEQ ID NO: 357357 - protein, 15 aa, Homo sapiens
  CDR3 for alpha chain variable domain of TCR clone 178679 (TRAV23/DV6, TRAJ18)
CAASFRGSTLGRLYF

SEQ ID NO: 357358 - protein, 13 aa, Homo sapiens
  CDR3 for beta chain variable domain of TCR clone 178679 (TRBV28, TRBJ2-7)
RAILDRAGGAQYF

SEQ ID NO: 357359 - protein, 12 aa, Homo sapiens
  CDR3 for alpha chain variable domain of TCR clone 178680 (TRAV23/DV6, TRAJ24)
CAANDSWGKLQF

SEQ ID NO: 357360 - protein, 16 aa, Homo sapiens
  CDR3 for beta chain variable domain of TCR clone 178680 (TRBV12-4, TRBJ2-5)
CASSLSTSGWKETQYF

SEQ ID NO: 357361 - protein, 11 aa, Homo sapiens
  CDR3 for alpha chain variable domain of TCR clone 178681 (TRAV17, TRAJ31)
FATDRTARLMF

SEQ ID NO: 357362 - protein, 12 aa, Homo sapiens
  CDR3 for beta chain variable domain of TCR clone 178681 (TRBV29-1, TRBJ2-3)
CSVTGGADTQYF

SEQ ID NO: 357363 - protein, 15 aa, Homo sapiens
  CDR3 for alpha chain variable domain of TCR clone 178682 (TRAV21, TRAJ37)
CAVRPTLSNTGKLIF

SEQ ID NO: 357364 - protein, 17 aa, Homo sapiens
  CDR3 for beta chain variable domain of TCR clone 178682 (TRBV11-2, TRBJ2-1)
CASSLALAEFGRNEQFF

SEQ ID NO: 357365 - protein, 11 aa, Homo sapiens
  CDR3 for alpha chain variable domain of TCR clone 178683 (TRAV21, TRAJ17)
CAAPAGNKLTF

SEQ ID NO: 357366 - protein, 13 aa, Homo sapiens
  CDR3 for beta chain variable domain of TCR clone 178683 (TRBV19, TRBJ1-2)
CASSVPGQDGYTF

SEQ ID NO: 357367 - protein, 12 aa, Homo sapiens
  CDR3 for alpha chain variable domain of TCR clone 178684 (TRAV13-1, TRAJ9)
CASHSGGFKTIF

SEQ ID NO: 357368 - protein, 18 aa, Homo sapiens
  CDR3 for beta chain variable domain of TCR clone 178684 (TRBV11-2, TRBJ2-3)
CASSLGGASRGAPNTQYF

SEQ ID NO: 357369 - protein, 16 aa, Homo sapiens
  CDR3 for alpha chain variable domain of TCR clone 178685 (TRAV30, TRAJ24)
CGTEIVGADSWGKFQF

SEQ ID NO: 357370 - protein, 13 aa, Homo sapiens
  CDR3 for beta chain variable domain of TCR clone 178685 (TRBV12-5, TRBJ2-5)
CSGSRTHQETQYF

SEQ ID NO: 357371 - protein, 15 aa, Homo sapiens
  CDR3 for alpha chain variable domain of TCR clone 178686 (TRAV13-1, TRAJ3)
CAASKLASSASKIIF

SEQ ID NO: 357372 - protein, 14 aa, Homo sapiens
  CDR3 for beta chain variable domain of TCR clone 178686 (TRBV5-1, TRBJ2-1)
CASSLDGDWNEQSF

SEQ ID NO: 357373 - protein, 14 aa, Homo sapiens
  CDR3 for alpha chain variable domain of TCR clone 178687 (TRAV12-3, TRAJ12)
CAISALDSSYKLIF

SEQ ID NO: 357374 - protein, 16 aa, Homo sapiens
  CDR3 for beta chain variable domain of TCR clone 178687 (TRBV7-9, TRBJ2-3)
CASSLQGNPGTDTQYF

SEQ ID NO: 357375 - protein, 14 aa, Homo sapiens
  CDR3 for alpha chain variable domain of TCR clone 178688 (TRAV8-4, TRAJ38)
CAVSYAGNNRKLIG

SEQ ID NO: 357376 - protein, 15 aa, Homo sapiens
  CDR3 for beta chain variable domain of TCR clone 178688 (TRBV12-4, TRBJ2-1)
CASSLLATGNNEQFF

SEQ ID NO: 357377 - protein, 13 aa, Homo sapiens
  CDR3 for alpha chain variable domain of TCR clone 178689 (TRAV21, TRAJ36)
CAVIKTGANNLFF

SEQ ID NO: 357378 - protein, 13 aa, Homo sapiens
  CDR3 for beta chain variable domain of TCR clone 178689 (TRBV29-1, TRBJ2-3)
CSATRGGGDTQYF

SEQ ID NO: 357379 - protein, 14 aa, Homo sapiens
  CDR3 for alpha chain variable domain of TCR clone 178690 (TRAV1-2, TRAJ8)
CAVREDTGFQTLVF

SEQ ID NO: 357380 - protein, 13 aa, Homo sapiens
  CDR3 for beta chain variable domain of TCR clone 178690 (TRBV20-1, TRBJ1-1)
CSARGGGNTDAFF

SEQ ID NO: 357381 - protein, 14 aa, Homo sapiens
  CDR3 for alpha chain variable domain of TCR clone 178691 (TRAV2, TRAJ9)
CAVEDRSGGFKTIF

SEQ ID NO: 357382 - protein, 15 aa, Homo sapiens
  CDR3 for beta chain variable domain of TCR clone 178691 (TRBV19, TRBJ2-1)
CASSSPGVPHDEQFF

SEQ ID NO: 357383 - protein, 11 aa, Homo sapiens
  CDR3 for alpha chain variable domain of TCR clone 178692 (TRAV23/DV6, TRAJ49)
CAVAPVTSSIL

SEQ ID NO: 357384 - protein, 13 aa, Homo sapiens
  CDR3 for beta chain variable domain of TCR clone 178692 (TRBV6-1, TRBJ1-1)
CASSRQGNTEAFV

SEQ ID NO: 357385 - protein, 17 aa, Homo sapiens
  CDR3 for alpha chain variable domain of TCR clone 178693 (TRAV8-6, TRAJ58)
CAVSSCVGETSGSRLTF

SEQ ID NO: 357386 - protein, 17 aa, Homo sapiens
  CDR3 for beta chain variable domain of TCR clone 178693 (TRBV11-2, TRBJ2-1)
CASSLYPPGVEYNEQFF

SEQ ID NO: 357387 - protein, 15 aa, Homo sapiens
  CDR3 for alpha chain variable domain of TCR clone 178694 (TRAV21, TRAJ45)
CAVSYSGGGADGLPF

SEQ ID NO: 357388 - protein, 15 aa, Homo sapiens
  CDR3 for beta chain variable domain of TCR clone 178694 (TRBV6-3, TRBJ2-7)
CASSSPGTVFYEQYF

SEQ ID NO: 357389 - protein, 12 aa, Homo sapiens
  CDR3 for alpha chain variable domain of TCR clone 178695 (TRAV2, TRAJ9)
CAAGAGGFKTIF

SEQ ID NO: 357390 - protein, 16 aa, Homo sapiens
  CDR3 for beta chain variable domain of TCR clone 178695 (TRBV13, TRBJ2-2)
CASSPRTGEHTWELFF

SEQ ID NO: 357391 - protein, 15 aa, Homo sapiens
  CDR3 for alpha chain variable domain of TCR clone 178696 (TRAV12-2, TRAJ5)
CAVNGKDTGRRALTF

SEQ ID NO: 357392 - protein, 14 aa, Homo sapiens
  CDR3 for beta chain variable domain of TCR clone 178696 (TRBV11-2, TRBJ2-5)
CASSRTGGIETQYF

SEQ ID NO: 357393 - protein, 12 aa, Homo sapiens
  CDR3 for alpha chain variable domain of TCR clone 178697 (TRAV2, TRAJ9)
CAVGAGGFKTIF

SEQ ID NO: 357394 - protein, 16 aa, Homo sapiens
  CDR3 for beta chain variable domain of TCR clone 178697 (TRBV13, TRBJ2-2)
CASSPRTREHTGEPFF

SEQ ID NO: 357395 - protein, 12 aa, Homo sapiens
  CDR3 for alpha chain variable domain of TCR clone 178698 (TRAV8-1, TRAJ23)
CAVGNQGGKLSF

SEQ ID NO: 357396 - protein, 16 aa, Homo sapiens
  CDR3 for beta chain variable domain of TCR clone 178698 (TRBV7-3, TRBJ2-2)
CASSLKRGTLSGELFF

SEQ ID NO: 357397 - protein, 15 aa, Homo sapiens
  CDR3 for alpha chain variable domain of TCR clone 178699 (TRAV12-2, TRAJ53)
CAVNGGGGSNYKLTF

SEQ ID NO: 357398 - protein, 13 aa, Homo sapiens
  CDR3 for beta chain variable domain of TCR clone 178699 (TRBV3-1, TRBJ1-1)
CASSPGVITKAFF

SEQ ID NO: 357399 - protein, 14 aa, Homo sapiens
  CDR3 for alpha chain variable domain of TCR clone 178700 (TRAV1-2, TRAJ16)
CSVNRFSDGQKLLF

SEQ ID NO: 357400 - protein, 13 aa, Homo sapiens
  CDR3 for beta chain variable domain of TCR clone 178700 (TRBV13, TRBJ2-3)
ASPGSGGRNTQYF

SEQ ID NO: 357401 - protein, 12 aa, Homo sapiens
  CDR3 for alpha chain variable domain of TCR clone 178701 (TRAV3, TRAJ27)
CAVRDKAGKSTV

SEQ ID NO: 357402 - protein, 13 aa, Homo sapiens
  CDR3 for beta chain variable domain of TCR clone 178701 (TRBV6-5, TRBJ2-5)
CASSPQGGETQYF

SEQ ID NO: 357403 - protein, 14 aa, Homo sapiens
  CDR3 for alpha chain variable domain of TCR clone 178702 (TRAV17, TRAJ31)
CATVLRNNNARLMF

SEQ ID NO: 357404 - protein, 19 aa, Homo sapiens
  CDR3 for beta chain variable domain of TCR clone 178702 (TRBV25-1, TRBJ2-2)
CAILVYRVDRGRKTGELFF

SEQ ID NO: 357405 - protein, 14 aa, Homo sapiens
  CDR3 for alpha chain variable domain of TCR clone 178703 (TRAV13-2, TRAJ43)
CAEIPTYNNNDMRF

SEQ ID NO: 357406 - protein, 12 aa, Homo sapiens
  CDR3 for beta chain variable domain of TCR clone 178703 (TRBV11-2, TRBJ2-2)
CASSLPTGELFF

SEQ ID NO: 357407 - protein, 12 aa, Homo sapiens
  CDR3 for alpha chain variable domain of TCR clone 178704 (TRAV1-1, TRAJ23)
CAVTNQGGKLIF

SEQ ID NO: 357408 - protein, 14 aa, Homo sapiens
  CDR3 for beta chain variable domain of TCR clone 178704 (TRBV11-2, TRBJ2-5)
CASRPLAGRETQYF

SEQ ID NO: 357409 - protein, 14 aa, Homo sapiens
  CDR3 for alpha chain variable domain of TCR clone 178705 (TRAV13-2, TRAJ17)
CAENSKAAGNKLTF

SEQ ID NO: 357410 - protein, 15 aa, Homo sapiens
  CDR3 for beta chain variable domain of TCR clone 178705 (TRBV12-4, TRBJ2-5)
CASSPPTGLQETQYF

SEQ ID NO: 357411 - protein, 16 aa, Homo sapiens
  CDR3 for alpha chain variable domain of TCR clone 178706 (TRAV3, TRAJ10)
CAVRDMNAGGGTKLTF

SEQ ID NO: 357412 - protein, 16 aa, Homo sapiens
  CDR3 for beta chain variable domain of TCR clone 178706 (TRBV6-3, TRBJ1-2)
CASSYSRRASNYGDTF

SEQ ID NO: 357413 - protein, 14 aa, Homo sapiens
  CDR3 for alpha chain variable domain of TCR clone 178707 (TRAV8-6, TRAJ49)
CAVSDPGTGNQFYF

SEQ ID NO: 357414 - protein, 14 aa, Homo sapiens
  CDR3 for beta chain variable domain of TCR clone 178707 (TRBV7-9, TRBJ2-1)
CASSDNSGYNEQFF

SEQ ID NO: 357415 - protein, 12 aa, Homo sapiens
  CDR3 for alpha chain variable domain of TCR clone 178708 (TRAV12-3, TRAJ40)
CAVSSGTYKYIF

SEQ ID NO: 357416 - protein, 15 aa, Homo sapiens
  CDR3 for beta chain variable domain of TCR clone 178708 (TRBV7-9, TRBJ2-7)
CASSPGGGLTHEQYF

SEQ ID NO: 357417 - protein, 16 aa, Homo sapiens
  CDR3 for alpha chain variable domain of TCR clone 178709 (TRAV3, TRAJ10)
CAVRDMRAGGGNKRTF

SEQ ID NO: 357418 - protein, 16 aa, Homo sapiens
  CDR3 for beta chain variable domain of TCR clone 178709 (TRBV9, TRBJ1-2)
CASSVEEKVSPYGYTF

SEQ ID NO: 357419 - protein, 15 aa, Homo sapiens
  CDR3 for alpha chain variable domain of TCR clone 178710 (TRAV3, TRAJ3)
CAVRDGHSSASKIIF

SEQ ID NO: 357420 - protein, 14 aa, Homo sapiens
  CDR3 for beta chain variable domain of TCR clone 178710 (TRBV19, TRBJ2-1)
CASPTFVLSGEQFF

SEQ ID NO: 357421 - protein, 14 aa, Homo sapiens
  CDR3 for alpha chain variable domain of TCR clone 178711 (TRAV2, TRAJ9)
CAVVDRSGGFKTIF

SEQ ID NO: 357422 - protein, 12 aa, Homo sapiens
  CDR3 for beta chain variable domain of TCR clone 178711 (TRBV14, TRBJ2-7)
CDSSRLKGEQYF

SEQ ID NO: 357423 - protein, 15 aa, Homo sapiens
  CDR3 for alpha chain variable domain of TCR clone 178712 (TRAV21, TRAJ24)
CAARSSTDSWGKLQF

SEQ ID NO: 357424 - protein, 13 aa, Homo sapiens
  CDR3 for beta chain variable domain of TCR clone 178712 (TRBV7-3, TRBJ2-5)
CASSFRGGETQYF

SEQ ID NO: 357425 - protein, 14 aa, Homo sapiens
  CDR3 for alpha chain variable domain of TCR clone 178713 (TRAV8-1, TRAJ49)
CASSIANTGNQFYF

SEQ ID NO: 357426 - protein, 12 aa, Homo sapiens
  CDR3 for beta chain variable domain of TCR clone 178713 (TRBV11-2, TRBJ2-2)
CASSLGGGELFF

SEQ ID NO: 357427 - protein, 15 aa, Homo sapiens
  CDR3 for alpha chain variable domain of TCR clone 178714 (TRAV26-1, TRAJ29)
CIVRVEGSGNTPLVF

SEQ ID NO: 357428 - protein, 18 aa, Homo sapiens
  CDR3 for beta chain variable domain of TCR clone 178714 (TRBV11-3, TRBJ2-3)
CASSLGGASRGAPNTQYF

SEQ ID NO: 357429 - protein, 15 aa, Homo sapiens
  CDR3 for alpha chain variable domain of TCR clone 178715 (TRAV8-2, TRAJ36)
CVVSENRGKQPLLWD

SEQ ID NO: 357430 - protein, 15 aa, Homo sapiens
  CDR3 for beta chain variable domain of TCR clone 178715 (TRBV20-1, TRBJ2-5)
CSAEGTGGLQETQYF

SEQ ID NO: 357431 - protein, 16 aa, Homo sapiens
  CDR3 for alpha chain variable domain of TCR clone 178716 (TRAV26-1, TRAJ56)
CVVRVAETGANSKLTF

SEQ ID NO: 357432 - protein, 21 aa, Homo sapiens
  CDR3 for beta chain variable domain of TCR clone 178716 (TRBV6-1, TRBJ1-1)
CASSGVGNYKGISGFDTEAFF

SEQ ID NO: 357433 - protein, 14 aa, Homo sapiens
  CDR3 for alpha chain variable domain of TCR clone 178717 (TRAV3, TRAJ28)
CAVRRGAGSYQLTF

SEQ ID NO: 357434 - protein, 15 aa, Homo sapiens
  CDR3 for beta chain variable domain of TCR clone 178717 (TRBV7-6, TRBJ2-7)
CASSLGTISSYEQYF

SEQ ID NO: 357435 - protein, 13 aa, Homo sapiens
  CDR3 for alpha chain variable domain of TCR clone 178718 (TRAV13-2, TRAJ53)
CAENMGSNYKLKF

SEQ ID NO: 357436 - protein, 13 aa, Homo sapiens
  CDR3 for beta chain variable domain of TCR clone 178718 (TRBV4-1, TRBJ2-2)
CASSQENTGELFF

SEQ ID NO: 357437 - protein, 14 aa, Homo sapiens
  CDR3 for alpha chain variable domain of TCR clone 178719 (TRAV29/DV5, TRAJ44)
CAAFLVGTASKLTF

SEQ ID NO: 357438 - protein, 16 aa, Homo sapiens
  CDR3 for beta chain variable domain of TCR clone 178719 (TRBV19, TRBJ2-1)
CDSSKAGPSSYNEQFF

SEQ ID NO: 357439 - protein, 16 aa, Homo sapiens
  CDR3 for alpha chain variable domain of TCR clone 178720 (TRAV39, TRAJ32)
CAVDMEYGGATNKLIF

SEQ ID NO: 357440 - protein, 14 aa, Homo sapiens
  CDR3 for beta chain variable domain of TCR clone 178720 (TRBV9, TRBJ2-4)
CASSPAGTSGFQYF

SEQ ID NO: 357441 - protein, 14 aa, Homo sapiens
  CDR3 for alpha chain variable domain of TCR clone 178721 (TRAV16, TRAJ8)
CALLMNTGFQKLVF

SEQ ID NO: 357442 - protein, 16 aa, Homo sapiens
  CDR3 for beta chain variable domain of TCR clone 178721 (TRBV11-3, TRBJ2-5)
CASSSVVAGSTETQYF

SEQ ID NO: 357443 - protein, 12 aa, Homo sapiens
  CDR3 for alpha chain variable domain of TCR clone 178722 (TRAV8-1, TRAJ30)
CRIMNRDDKIIF

SEQ ID NO: 357444 - protein, 14 aa, Homo sapiens
  CDR3 for beta chain variable domain of TCR clone 178722 (TRBV7-2, TRBJ1-6)
CASSLQGANSPLHF

SEQ ID NO: 357445 - protein, 13 aa, Homo sapiens
  CDR3 for alpha chain variable domain of TCR clone 178723 (TRAV12-2, TRAJ42)
CAVKRGSQGNLIF

SEQ ID NO: 357446 - protein, 16 aa, Homo sapiens
  CDR3 for beta chain variable domain of TCR clone 178723 (TRBV9, TRBJ2-2)
CASSAMGKGNTGGLFF

SEQ ID NO: 357447 - protein, 13 aa, Homo sapiens
  CDR3 for alpha chain variable domain of TCR clone 178724 (TRAV2, TRAJ40)
CAVVTSGTYTYIF

SEQ ID NO: 357448 - protein, 15 aa, Homo sapiens
  CDR3 for beta chain variable domain of TCR clone 178724 (TRBV9, TRBJ1-6)
CASSVAGTGDSPLHF

SEQ ID NO: 357449 - protein, 13 aa, Homo sapiens
  CDR3 for alpha chain variable domain of TCR clone 178725 (TRAV8-4, TRAJ29)
CAVSATGNTPLVF

SEQ ID NO: 357450 - protein, 20 aa, Homo sapiens
  CDR3 for beta chain variable domain of TCR clone 178725 (TRBV11-3, TRBJ2-3)
LGTRPCISVPAAPITETQYF

SEQ ID NO: 357451 - protein, 15 aa, Homo sapiens
  CDR3 for alpha chain variable domain of TCR clone 178726 (TRAV26-1, TRAJ29)
CIVRVEGSGNTPPVF

SEQ ID NO: 357452 - protein, 14 aa, Homo sapiens
  CDR3 for beta chain variable domain of TCR clone 178726 (TRBV18, TRBJ2-5)
CASSPEVSQETQYF

SEQ ID NO: 357453 - protein, 16 aa, Homo sapiens
  CDR3 for alpha chain variable domain of TCR clone 178727 (TRAV30, TRAJ24)
CGTEIVDADSWGNFQF

SEQ ID NO: 357454 - protein, 13 aa, Homo sapiens
  CDR3 for beta chain variable domain of TCR clone 178727 (TRBV7-7, TRBJ1-1)
CASSLGANTEAFF

SEQ ID NO: 357455 - protein, 11 aa, Homo sapiens
  CDR3 for alpha chain variable domain of TCR clone 178728 (TRAV12-1, TRAJ34)
CVVNKGRELIF

SEQ ID NO: 357456 - protein, 12 aa, Homo sapiens
  CDR3 for beta chain variable domain of TCR clone 178728 (TRBV7-8, TRBJ2-7)
CASSLGDREQYF

SEQ ID NO: 357457 - protein, 12 aa, Homo sapiens
  CDR3 for alpha chain variable domain of TCR clone 178729 (TRAV13-1, TRAJ53)
VASGGSNYKLTF

SEQ ID NO: 357458 - protein, 16 aa, Homo sapiens
  CDR3 for beta chain variable domain of TCR clone 178729 (TRBV28, TRBJ2-6)
CASSNRRGSGANVLTF

SEQ ID NO: 357459 - protein, 14 aa, Homo sapiens
  CDR3 for alpha chain variable domain of TCR clone 178730 (TRAV8-4, TRAJ13)
CAVTLSGGYQKVTF

SEQ ID NO: 357460 - protein, 18 aa, Homo sapiens
  CDR3 for beta chain variable domain of TCR clone 178730 (TRBV7-3, TRBJ2-1)
CASSLTLASGRAMVSSSS

SEQ ID NO: 357461 - protein, 13 aa, Homo sapiens
  CDR3 for alpha chain variable domain of TCR clone 178731 (TRAV8-3, TRAJ36)
CAVGATGANNLFS

SEQ ID NO: 357462 - protein, 13 aa, Homo sapiens
  CDR3 for beta chain variable domain of TCR clone 178731 (TRBV12-5, TRBJ2-3)
CASGDRQSDTQYF

SEQ ID NO: 357463 - protein, 13 aa, Homo sapiens
  CDR3 for alpha chain variable domain of TCR clone 178732 (TRAV23/DV6, TRAJ22)
CAPYSGSARQLTF

SEQ ID NO: 357464 - protein, 15 aa, Homo sapiens
  CDR3 for beta chain variable domain of TCR clone 178732 (TRBV2, TRBJ1-4)
CASSERRGTNEKLFF

SEQ ID NO: 357465 - protein, 11 aa, Homo sapiens
  CDR3 for alpha chain variable domain of TCR clone 178733 (TRAV8-3, TRAJ52)
CAVQPAGGTSY

SEQ ID NO: 357466 - protein, 15 aa, Homo sapiens
  CDR3 for beta chain variable domain of TCR clone 178733 (TRBV11-2, TRBJ2-7)
CARSLAGGVATEQYF

SEQ ID NO: 357467 - protein, 13 aa, Homo sapiens
  CDR3 for alpha chain variable domain of TCR clone 178734 (TRAV12-2, TRAJ52)
CAVSGTSYGKLTF

SEQ ID NO: 357468 - protein, 17 aa, Homo sapiens
  CDR3 for beta chain variable domain of TCR clone 178734 (TRBV11-2, TRBJ2-1)
CASSLYPPGVEYNEQYF

SEQ ID NO: 357469 - protein, 13 aa, Homo sapiens
  CDR3 for alpha chain variable domain of TCR clone 178735 (TRAV12-1, TRAJ29)
CVVDTSGNTPLVF

SEQ ID NO: 357470 - protein, 14 aa, Homo sapiens
  CDR3 for beta chain variable domain of TCR clone 178735 (TRBV12-4, TRBJ2-3)
CASSLVPNTDTQYF

SEQ ID NO: 357471 - protein, 15 aa, Homo sapiens
  CDR3 for alpha chain variable domain of TCR clone 178736 (TRAV27, TRAJ33)
CAGADIMDSNYQLIW

SEQ ID NO: 357472 - protein, 13 aa, Homo sapiens
  CDR3 for beta chain variable domain of TCR clone 178736 (TRBV28, TRBJ1-2)
CASSLQGRGGYTI

SEQ ID NO: 357473 - protein, 14 aa, Homo sapiens
  CDR3 for alpha chain variable domain of TCR clone 178737 (TRAV3, TRAJ21)
CALGRGSTNFTLDL

SEQ ID NO: 357474 - protein, 12 aa, Homo sapiens
  CDR3 for beta chain variable domain of TCR clone 178737 (TRBV11-2, TRBJ2-2)
CASSLGGGELFF

SEQ ID NO: 357475 - protein, 14 aa, Homo sapiens
  CDR3 for alpha chain variable domain of TCR clone 178738 (TRAV20, TRAJ40)
CAVSSTSGTYKYIF

SEQ ID NO: 357476 - protein, 14 aa, Homo sapiens
  CDR3 for beta chain variable domain of TCR clone 178738 (TRBV12-4, TRBJ1-1)
CASSLGTGGTEAFF

SEQ ID NO: 357477 - protein, 12 aa, Homo sapiens
  CDR3 for alpha chain variable domain of TCR clone 178739 (TRAV3, TRAJ23)
CAVRDPDYKLIF

SEQ ID NO: 357478 - protein, 20 aa, Homo sapiens
  CDR3 for beta chain variable domain of TCR clone 178739 (TRBV7-8, TRBJ2-2)
CASSHLFPGPTIHITGELFF

SEQ ID NO: 357479 - protein, 11 aa, Homo sapiens
  CDR3 for alpha chain variable domain of TCR clone 178740 (TRAV3, TRAJ21)
CAVGNLNKFYF

SEQ ID NO: 357480 - protein, 16 aa, Homo sapiens
  CDR3 for beta chain variable domain of TCR clone 178740 (TRBV19, TRBJ2-1)
CASSKAGASSYNEQFF

SEQ ID NO: 357481 - protein, 11 aa, Homo sapiens
  CDR3 for alpha chain variable domain of TCR clone 178741 (TRAV12-1, TRAJ3)
CVVSSASKIIF

SEQ ID NO: 357482 - protein, 16 aa, Homo sapiens
  CDR3 for beta chain variable domain of TCR clone 178741 (TRBV20-1, TRBJ2-5)
SAVLAGLAGGGETQYF

SEQ ID NO: 357483 - protein, 15 aa, Homo sapiens
  CDR3 for alpha chain variable domain of TCR clone 178742 (TRAV23/DV6, TRAJ18)
CAATFRGSTLGRLYF

SEQ ID NO: 357484 - protein, 13 aa, Homo sapiens
  CDR3 for beta chain variable domain of TCR clone 178742 (TRBV28, TRBJ2-7)
CAILDRAGGEQYF

SEQ ID NO: 357485 - protein, 15 aa, Homo sapiens
  CDR3 for alpha chain variable domain of TCR clone 178743 (TRAV2, TRAJ22)
CAVPSRGGSARQLTF

SEQ ID NO: 357486 - protein, 16 aa, Homo sapiens
  CDR3 for beta chain variable domain of TCR clone 178743 (TRBV12-5, TRBJ2-5)
CASGPRTSRNQETQYF

SEQ ID NO: 357487 - protein, 15 aa, Homo sapiens
  CDR3 for alpha chain variable domain of TCR clone 178744 (TRAV12-3, TRAJ11)
CAMSEENSGYSTLTF

SEQ ID NO: 357488 - protein, 11 aa, Homo sapiens
  CDR3 for beta chain variable domain of TCR clone 178744 (TRBV5-5, TRBJ1-1)
CASSLGVEAFF

SEQ ID NO: 357489 - protein, 13 aa, Homo sapiens
  CDR3 for alpha chain variable domain of TCR clone 178745 (TRAV30, TRAJ6)
CGFIAGGSYIPTF

SEQ ID NO: 357490 - protein, 16 aa, Homo sapiens
  CDR3 for beta chain variable domain of TCR clone 178745 (TRBV7-6, TRBJ2-3)
CASSARTSRGTDTQYF

SEQ ID NO: 357491 - protein, 14 aa, Homo sapiens
  CDR3 for alpha chain variable domain of TCR clone 178746 (TRAV26-1, TRAJ38)
CIADNAGNNRKLIW

SEQ ID NO: 357492 - protein, 16 aa, Homo sapiens
  CDR3 for beta chain variable domain of TCR clone 178746 (TRBV7-3, TRBJ2-1)
CASSLSGGVHYNEQFF

SEQ ID NO: 357493 - protein, 15 aa, Homo sapiens
  CDR3 for alpha chain variable domain of TCR clone 178747 (TRAV17, TRAJ22)
CATVAPSGSARQLTF

SEQ ID NO: 357494 - protein, 15 aa, Homo sapiens
  CDR3 for beta chain variable domain of TCR clone 178747 (TRBV10-2, TRBJ2-6)
CASSEQGTGANVLTF

SEQ ID NO: 357495 - protein, 16 aa, Homo sapiens
  CDR3 for alpha chain variable domain of TCR clone 178748 (TRAV3, TRAJ21)
CAVRDIERGNFNKFYF

SEQ ID NO: 357496 - protein, 16 aa, Homo sapiens
  CDR3 for beta chain variable domain of TCR clone 178748 (TRBV25-1, TRBJ2-7)
CASSELTGGGIYEQYF

SEQ ID NO: 357497 - protein, 18 aa, Homo sapiens
  CDR3 for alpha chain variable domain of TCR clone 178749 (TRAV26-2, TRAJ45)
CILSLWVYSGGGADGLTF

SEQ ID NO: 357498 - protein, 17 aa, Homo sapiens
  CDR3 for beta chain variable domain of TCR clone 178749 (TRBV28, TRBJ2-3)
CASSPTPAGGRVDTQYI

SEQ ID NO: 357499 - protein, 14 aa, Homo sapiens
  CDR3 for alpha chain variable domain of TCR clone 178750 (TRAV29/DV5, TRAJ57)
CAARSQGGSEKLVF

SEQ ID NO: 357500 - protein, 15 aa, Homo sapiens
  CDR3 for beta chain variable domain of TCR clone 178750 (TRBV28, TRBJ2-4)
CAAGSGTLLMGMQYF

SEQ ID NO: 357501 - protein, 13 aa, Homo sapiens
  CDR3 for alpha chain variable domain of TCR clone 178751 (TRAV12-3, TRAJ53)
CAMRGGSNYKLTF

SEQ ID NO: 357502 - protein, 15 aa, Homo sapiens
  CDR3 for beta chain variable domain of TCR clone 178751 (TRBV2, TRBJ2-1)
CATQARLVMMGEQFF

SEQ ID NO: 357503 - protein, 16 aa, Homo sapiens
  CDR3 for alpha chain variable domain of TCR clone 178752 (TRAV16, TRAJ52)
CALSGVGGTSYGKLTF

SEQ ID NO: 357504 - protein, 14 aa, Homo sapiens
  CDR3 for beta chain variable domain of TCR clone 178752 (TRBV7-3, TRBJ1-1)
CASSLKGGNTEAFF

SEQ ID NO: 357505 - protein, 16 aa, Homo sapiens
  CDR3 for alpha chain variable domain of TCR clone 178753 (TRAV12-2, TRAJ40)
CAVIIGGTSGTYKYIF

SEQ ID NO: 357506 - protein, 14 aa, Homo sapiens
  CDR3 for beta chain variable domain of TCR clone 178753 (TRBV20-1, TRBJ2-5)
CSARDGRAGETQYF

SEQ ID NO: 357507 - protein, 13 aa, Homo sapiens
  CDR3 for alpha chain variable domain of TCR clone 178754 (TRAV13-2, TRAJ40)
CAEFTSGTYKYIF

SEQ ID NO: 357508 - protein, 14 aa, Homo sapiens
  CDR3 for beta chain variable domain of TCR clone 178754 (TRBV10-2, TRBJ1-5)
CASSSAGRNQPQHF

SEQ ID NO: 357509 - protein, 12 aa, Homo sapiens
  CDR3 for alpha chain variable domain of TCR clone 178755 (TRAV13-1, TRAJ21)
CAAKEGFNNFYF

SEQ ID NO: 357510 - protein, 14 aa, Homo sapiens
  CDR3 for beta chain variable domain of TCR clone 178755 (TRBV11-2, TRBJ2-7)
CASSSTGEGYEQYF

SEQ ID NO: 357511 - protein, 14 aa, Homo sapiens
  CDR3 for alpha chain variable domain of TCR clone 178756 (TRAV1-2, TRAJ16)
CAVNRFSDGQKPLF

SEQ ID NO: 357512 - protein, 13 aa, Homo sapiens
  CDR3 for beta chain variable domain of TCR clone 178756 (TRBV20-1, TRBJ1-1)
CSARAGGNTEAFF

SEQ ID NO: 357513 - protein, 12 aa, Homo sapiens
  CDR3 for alpha chain variable domain of TCR clone 178757 (TRAV25, TRAJ5)
CAGGGGRRALTF

SEQ ID NO: 357514 - protein, 15 aa, Homo sapiens
  CDR3 for beta chain variable domain of TCR clone 178757 (TRBV20-1, TRBJ2-7)
CSARDRVSRMDEQYF

SEQ ID NO: 357515 - protein, 11 aa, Homo sapiens
  CDR3 for alpha chain variable domain of TCR clone 178758 (TRAV2, TRAJ13)
CASGGYQKLTF

SEQ ID NO: 357516 - protein, 16 aa, Homo sapiens
  CDR3 for beta chain variable domain of TCR clone 178758 (TRBV6-1, TRBJ2-5)
CASSETLDRGAETQYF

SEQ ID NO: 357517 - protein, 11 aa, Homo sapiens
  CDR3 for alpha chain variable domain of TCR clone 178759 (TRAV1-2, TRAJ40)
CAVPGTYKYIF

SEQ ID NO: 357518 - protein, 20 aa, Homo sapiens
  CDR3 for beta chain variable domain of TCR clone 178759 (TRBV19, TRBJ2-1)
CASSISRTVTSTRLNNEQFF

SEQ ID NO: 357519 - protein, 13 aa, Homo sapiens
  CDR3 for alpha chain variable domain of TCR clone 178760 (TRAV27, TRAJ29)
CAGAQSGNTPLVF

SEQ ID NO: 357520 - protein, 15 aa, Homo sapiens
  CDR3 for beta chain variable domain of TCR clone 178760 (TRBV15, TRBJ1-4)
CATSRDMGSYEKLFF

SEQ ID NO: 357521 - protein, 15 aa, Homo sapiens
  CDR3 for alpha chain variable domain of TCR clone 178761 (TRAV3, TRAJ29)
CAVRAPLSGNTPLVF

SEQ ID NO: 357522 - protein, 15 aa, Homo sapiens
  CDR3 for beta chain variable domain of TCR clone 178761 (TRBV28, TRBJ1-1)
CASRIKGGLNAEAFF

SEQ ID NO: 357523 - protein, 15 aa, Homo sapiens
  CDR3 for alpha chain variable domain of TCR clone 178762 (TRAV26-1, TRAJ29)
CIVRVEGSGNTPLVF

SEQ ID NO: 357524 - protein, 16 aa, Homo sapiens
  CDR3 for beta chain variable domain of TCR clone 178762 (TRBV7-9, TRBJ2-6)
CASSLKGPLRANVLTF

SEQ ID NO: 357525 - protein, 17 aa, Homo sapiens
  CDR3 for alpha chain variable domain of TCR clone 178763 (TRAV1-1, TRAJ28)
CAVDPAYSGAGSYHLTF

SEQ ID NO: 357526 - protein, 14 aa, Homo sapiens
  CDR3 for beta chain variable domain of TCR clone 178763 (TRBV19, TRBJ2-1)
CASPTFVLSGKQFF

SEQ ID NO: 357527 - protein, 14 aa, Homo sapiens
  CDR3 for alpha chain variable domain of TCR clone 178764 (TRAV12-2, TRAJ13)
CAVKKTGGYLKVTF

SEQ ID NO: 357528 - protein, 17 aa, Homo sapiens
  CDR3 for beta chain variable domain of TCR clone 178764 (TRBV20-1, TRBJ2-2)
CSASGSGQGGLTGELFF

SEQ ID NO: 357529 - protein, 14 aa, Homo sapiens
  CDR3 for alpha chain variable domain of TCR clone 178765 (TRAV1-1, TRAJ23)
CAVSIYNQGGKLIF

SEQ ID NO: 357530 - protein, 13 aa, Homo sapiens
  CDR3 for beta chain variable domain of TCR clone 178765 (TRBV19, TRBJ1-2)
CASSVPGQDGYTF

SEQ ID NO: 357531 - protein, 15 aa, Homo sapiens
  CDR3 for alpha chain variable domain of TCR clone 178766 (TRAV10, TRAJ9)
CVVRPRTGGSYIPTF

SEQ ID NO: 357532 - protein, 14 aa, Homo sapiens
  CDR3 for beta chain variable domain of TCR clone 178766 (TRBV7-3, TRBJ2-1)
CASSLAGGTNEQFF

SEQ ID NO: 357533 - protein, 11 aa, Homo sapiens
  CDR3 for alpha chain variable domain of TCR clone 178767 (TRAV12-2, TRAJ49)
CALQGGNQFYF

SEQ ID NO: 357534 - protein, 17 aa, Homo sapiens
  CDR3 for beta chain variable domain of TCR clone 178767 (TRBV11-2, TRBJ2-1)
CASSLYPPGVEYNEQFF

SEQ ID NO: 357535 - protein, 13 aa, Homo sapiens
  CDR3 for alpha chain variable domain of TCR clone 178768 (TRAV13-2, TRAJ40)
CAEFTSGTYNYIF

SEQ ID NO: 357536 - protein, 14 aa, Homo sapiens
  CDR3 for beta chain variable domain of TCR clone 178768 (TRBV10-2, TRBJ1-5)
CASSSTGRNQPQHF

SEQ ID NO: 357537 - protein, 12 aa, Homo sapiens
  CDR3 for alpha chain variable domain of TCR clone 178769 (TRAV1-2, TRAJ33)
CAALDSNYQLIW

SEQ ID NO: 357538 - protein, 13 aa, Homo sapiens
  CDR3 for beta chain variable domain of TCR clone 178769 (TRBV28, TRBJ2-7)
CASRSSGVYEQYF

SEQ ID NO: 357539 - protein, 12 aa, Homo sapiens
  CDR3 for alpha chain variable domain of TCR clone 178770 (TRAV8-6, TRAJ57)
CAVQGGSEKLVF

SEQ ID NO: 357540 - protein, 11 aa, Homo sapiens
  CDR3 for beta chain variable domain of TCR clone 178770 (TRBV19, TRBJ1-1)
CSSSIGSEAFF

SEQ ID NO: 357541 - protein, 14 aa, Homo sapiens
  CDR3 for alpha chain variable domain of TCR clone 178771 (TRAV3, TRAJ21)
CAVRDWDNFNKFYF

SEQ ID NO: 357542 - protein, 15 aa, Homo sapiens
  CDR3 for beta chain variable domain of TCR clone 178771 (TRBV7-8, TRBJ1-5)
CASSLEGSGNQPQHF

SEQ ID NO: 357543 - protein, 11 aa, Homo sapiens
  CDR3 for alpha chain variable domain of TCR clone 178772 (TRAV8-3, TRAJ49)
CAVNTGNQFYF

SEQ ID NO: 357544 - protein, 14 aa, Homo sapiens
  CDR3 for beta chain variable domain of TCR clone 178772 (TRBV7-2, TRBJ2-7)
CASSPKTSFYEQYF

SEQ ID NO: 357545 - protein, 13 aa, Homo sapiens
  CDR3 for alpha chain variable domain of TCR clone 178773 (TRAV12-2, TRAJ52)
CAVGGTSYGKLTF

SEQ ID NO: 357546 - protein, 14 aa, Homo sapiens
  CDR3 for beta chain variable domain of TCR clone 178773 (TRBV5-1, TRBJ2-7)
CASSRGESLYEQYF

SEQ ID NO: 357547 - protein, 17 aa, Homo sapiens
  CDR3 for alpha chain variable domain of TCR clone 178774 (TRAV38-2/DV8, TRAJ23)
CALSRKLIFGQGTELSV

SEQ ID NO: 357548 - protein, 17 aa, Homo sapiens
  CDR3 for beta chain variable domain of TCR clone 178774 (TRBV4-2, TRBJ2-5)
CASSPGRWRNFQETQYF

SEQ ID NO: 357549 - protein, 13 aa, Homo sapiens
  CDR3 for alpha chain variable domain of TCR clone 178775 (TRAV29/DV5, TRAJ29)
CAASAAGNTPLVF

SEQ ID NO: 357550 - protein, 14 aa, Homo sapiens
  CDR3 for beta chain variable domain of TCR clone 178775 (TRBV19, TRBJ2-3)
CASSASRGTDTQYF

SEQ ID NO: 357551 - protein, 15 aa, Homo sapiens
  CDR3 for alpha chain variable domain of TCR clone 178776 (TRAV3, TRAJ3)
CAVRDMSSSASQIIF

SEQ ID NO: 357552 - protein, 14 aa, Homo sapiens
  CDR3 for beta chain variable domain of TCR clone 178776 (TRBV19, TRBJ2-1)
CASPTFVLSGEQFF

SEQ ID NO: 357553 - protein, 15 aa, Homo sapiens
  CDR3 for alpha chain variable domain of TCR clone 178777 (TRAV12-2, TRAJ43)
CAFDMRFGAGTRLTV

SEQ ID NO: 357554 - protein, 16 aa, Homo sapiens
  CDR3 for beta chain variable domain of TCR clone 178777 (TRBV24-1, TRBJ2-3)
CATSDPGTGATDTQYF

SEQ ID NO: 357555 - protein, 16 aa, Homo sapiens
  CDR3 for alpha chain variable domain of TCR clone 178778 (TRAV26-1, TRAJ38)
CIVRVELGGNNRKLIW

SEQ ID NO: 357556 - protein, 13 aa, Homo sapiens
  CDR3 for beta chain variable domain of TCR clone 178778 (TRBV5-1, TRBJ1-2)
CASSFQGNYGYTF

SEQ ID NO: 357557 - protein, 15 aa, Homo sapiens
  CDR3 for alpha chain variable domain of TCR clone 178779 (TRAV8-4, TRAJ6)
CAVSAPSGGSYIPTF

SEQ ID NO: 357558 - protein, 15 aa, Homo sapiens
  CDR3 for beta chain variable domain of TCR clone 178779 (TRBV7-3, TRBJ2-2)
CASKANGADTGELFF

SEQ ID NO: 357559 - protein, 14 aa, Homo sapiens
  CDR3 for alpha chain variable domain of TCR clone 178780 (TRAV1-2, TRAJ33)
CAVRAPDSNYQLIW

SEQ ID NO: 357560 - protein, 16 aa, Homo sapiens
  CDR3 for beta chain variable domain of TCR clone 178780 (TRBV15, TRBJ2-1)
CATSRNLAGGYNEQFF

SEQ ID NO: 357561 - protein, 15 aa, Homo sapiens
  CDR3 for alpha chain variable domain of TCR clone 178781 (TRAV1-2, TRAJ18)
CAWEGRGSTLGRLYF

SEQ ID NO: 357562 - protein, 14 aa, Homo sapiens
  CDR3 for beta chain variable domain of TCR clone 178781 (TRBV4-2, TRBJ2-1)
CASGLDRAYNEQFF

SEQ ID NO: 357563 - protein, 13 aa, Homo sapiens
  CDR3 for alpha chain variable domain of TCR clone 178782 (TRAV13-1, TRAJ6)
CARGSGGSYIPTL

SEQ ID NO: 357564 - protein, 15 aa, Homo sapiens
  CDR3 for beta chain variable domain of TCR clone 178782 (TRBV2, TRBJ2-1)
CASSELAGSYNEQFF

SEQ ID NO: 357565 - protein, 12 aa, Homo sapiens
  CDR3 for alpha chain variable domain of TCR clone 178783 (TRAV12-3, TRAJ17)
CEMTLTGNKLTF

SEQ ID NO: 357566 - protein, 14 aa, Homo sapiens
  CDR3 for beta chain variable domain of TCR clone 178783 (TRBV7-3, TRBJ2-1)
CASSLAGGTNEQFF

SEQ ID NO: 357567 - protein, 16 aa, Homo sapiens
  CDR3 for alpha chain variable domain of TCR clone 178784 (TRAV12-3, TRAJ53)
CAMSVGSGGSNYKLTF

SEQ ID NO: 357568 - protein, 15 aa, Homo sapiens
  CDR3 for beta chain variable domain of TCR clone 178784 (TRBV7-9, TRBJ1-6)
CASSSPGRGNSPLHF

SEQ ID NO: 357569 - protein, 15 aa, Homo sapiens
  CDR3 for alpha chain variable domain of TCR clone 178785 (TRAV26-1, TRAJ44)
CIVRANIGTASKLTF

SEQ ID NO: 357570 - protein, 13 aa, Homo sapiens
  CDR3 for beta chain variable domain of TCR clone 178785 (TRBV7-3, TRBJ1-1)
CASSQDWGAEAFF

SEQ ID NO: 357571 - protein, 13 aa, Homo sapiens
  CDR3 for alpha chain variable domain of TCR clone 178786 (TRAV2, TRAJ40)
CAVVTSGTYKYIF

SEQ ID NO: 357572 - protein, 13 aa, Homo sapiens
  CDR3 for beta chain variable domain of TCR clone 178786 (TRBV25-1, TRBJ2-5)
CASSESGRETQYF

SEQ ID NO: 357573 - protein, 16 aa, Homo sapiens
  CDR3 for alpha chain variable domain of TCR clone 178787 (TRAV39, TRAJ32)
CAVDMEYGGATNKLIF

SEQ ID NO: 357574 - protein, 15 aa, Homo sapiens
  CDR3 for beta chain variable domain of TCR clone 178787 (TRBV6-3, TRBJ2-7)
CASSSPGTVFYEQYF

SEQ ID NO: 357575 - protein, 16 aa, Homo sapiens
  CDR3 for alpha chain variable domain of TCR clone 178788 (TRAV12-1, TRAJ53)
CVVTSVAGGSNYKLTF

SEQ ID NO: 357576 - protein, 18 aa, Homo sapiens
  CDR3 for beta chain variable domain of TCR clone 178788 (TRBV24-1, TRBJ2-2)
CATSDSGQGTANTGELFF

SEQ ID NO: 357577 - protein, 17 aa, Homo sapiens
  CDR3 for alpha chain variable domain of TCR clone 178789 (TRAV3, TRAJ42)
CAVRDRDYGGSQGNLIF

SEQ ID NO: 357578 - protein, 14 aa, Homo sapiens
  CDR3 for beta chain variable domain of TCR clone 178789 (TRBV18, TRBJ2-5)
CASSPGPAEETQYF

SEQ ID NO: 357579 - protein, 17 aa, Homo sapiens
  CDR3 for alpha chain variable domain of TCR clone 178790 (TRAV14/DV4, TRAJ28)
CAMREVSSGAVSYQLTF

SEQ ID NO: 357580 - protein, 15 aa, Homo sapiens
  CDR3 for beta chain variable domain of TCR clone 178790 (TRBV11-2, TRBJ1-6)
CASTLRETGNSPLHF

SEQ ID NO: 357581 - protein, 14 aa, Homo sapiens
  CDR3 for alpha chain variable domain of TCR clone 178791 (TRAV12-2, TRAJ17)
CAVNIKAAGNKLTF

SEQ ID NO: 357582 - protein, 13 aa, Homo sapiens
  CDR3 for beta chain variable domain of TCR clone 178791 (TRBV5-7, TRBJ2-6)
CASTSSGANVLTF

SEQ ID NO: 357583 - protein, 14 aa, Homo sapiens
  CDR3 for alpha chain variable domain of TCR clone 178792 (TRAV17, TRAJ15)
CATAPNQAGTALIV

SEQ ID NO: 357584 - protein, 14 aa, Homo sapiens
  CDR3 for beta chain variable domain of TCR clone 178792 (TRBV19, TRBJ2-7)
CASSMGQGAIEQYF

SEQ ID NO: 357585 - protein, 14 aa, Homo sapiens
  CDR3 for alpha chain variable domain of TCR clone 178793 (TRAV26-1, TRAJ45)
CIEVTGGGADRLTF

SEQ ID NO: 357586 - protein, 14 aa, Homo sapiens
  CDR3 for beta chain variable domain of TCR clone 178793 (TRBV4-1, TRBJ2-2)
CASSQAVNTGELFF

SEQ ID NO: 357587 - protein, 12 aa, Homo sapiens
  CDR3 for alpha chain variable domain of TCR clone 178794 (TRAV36/DV7, TRAJ54)
CAVVRGSQKLVF

SEQ ID NO: 357588 - protein, 13 aa, Homo sapiens
  CDR3 for beta chain variable domain of TCR clone 178794 (TRBV7-3, TRBJ1-1)
CSSLKGGNTEAFF

SEQ ID NO: 357589 - protein, 13 aa, Homo sapiens
  CDR3 for alpha chain variable domain of TCR clone 178795 (TRAV8-3, TRAJ28)
CAVGAVGSTNSLS

SEQ ID NO: 357590 - protein, 15 aa, Homo sapiens
  CDR3 for beta chain variable domain of TCR clone 178795 (TRBV7-9, TRBJ1-5)
CASSQGHQPNQPQHF

SEQ ID NO: 357591 - protein, 15 aa, Homo sapiens
  CDR3 for alpha chain variable domain of TCR clone 178796 (TRAV12-3, TRAJ27)
CAMRAYNTNAGKSTF

SEQ ID NO: 357592 - protein, 12 aa, Homo sapiens
  CDR3 for beta chain variable domain of TCR clone 178796 (TRBV20-1, TRBJ1-5)
QCVPRANQPQHF

SEQ ID NO: 357593 - protein, 15 aa, Homo sapiens
  CDR3 for alpha chain variable domain of TCR clone 178797 (TRAV3, TRAJ29)
CAVRDLYSGNTPLVF

SEQ ID NO: 357594 - protein, 13 aa, Homo sapiens
  CDR3 for beta chain variable domain of TCR clone 178797 (TRBV20-1, TRBJ2-2)
CSASAAGTGELFF

SEQ ID NO: 357595 - protein, 11 aa, Homo sapiens
  CDR3 for alpha chain variable domain of TCR clone 178798 (TRAV3, TRAJ21)
CAVGNFNKFYF

SEQ ID NO: 357596 - protein, 16 aa, Homo sapiens
  CDR3 for beta chain variable domain of TCR clone 178798 (TRBV20-1, TRBJ2-3)
CSGEAGLAGGQDTQYF

SEQ ID NO: 357597 - protein, 16 aa, Homo sapiens
  CDR3 for alpha chain variable domain of TCR clone 178799 (TRAV12-1, TRAJ53)
CVVTSVAGGSNYKLTF

SEQ ID NO: 357598 - protein, 16 aa, Homo sapiens
  CDR3 for beta chain variable domain of TCR clone 178799 (TRBV6-6, TRBJ2-3)
CASSCSHAGSTDTQYF

SEQ ID NO: 357599 - protein, 11 aa, Homo sapiens
  CDR3 for alpha chain variable domain of TCR clone 178800 (TRAV35, TRAJ30)
CAGSGDDKIIF

SEQ ID NO: 357600 - protein, 12 aa, Homo sapiens
  CDR3 for beta chain variable domain of TCR clone 178800 (TRBV27, TRBJ2-1)
CASRGFYNEQFF

SEQ ID NO: 357601 - protein, 14 aa, Homo sapiens
  CDR3 for alpha chain variable domain of TCR clone 178801 (TRAV13-1, TRAJ52)
CAANGGTSSGKLTF

SEQ ID NO: 357602 - protein, 14 aa, Homo sapiens
  CDR3 for beta chain variable domain of TCR clone 178801 (TRBV12-5, TRBJ2-5)
CASGSRTHQETQYF

SEQ ID NO: 357603 - protein, 14 aa, Homo sapiens
  CDR3 for alpha chain variable domain of TCR clone 178802 (TRAV12-1, TRAJ27)
CGEHVRTNAGKSTF

SEQ ID NO: 357604 - protein, 15 aa, Homo sapiens
  CDR3 for beta chain variable domain of TCR clone 178802 (TRBV19, TRBJ1-1)
CASTSGQIQNTEAFF

SEQ ID NO: 357605 - protein, 16 aa, Homo sapiens
  CDR3 for alpha chain variable domain of TCR clone 178803 (TRAV16, TRAJ52)
CALSGVGGSSYGKLTF

SEQ ID NO: 357606 - protein, 14 aa, Homo sapiens
  CDR3 for beta chain variable domain of TCR clone 178803 (TRBV19, TRBJ1-2)
CASSLQGQAYGYTF

SEQ ID NO: 357607 - protein, 14 aa, Homo sapiens
  CDR3 for alpha chain variable domain of TCR clone 178804 (TRAV38-1, TRAJ45)
CASHSGGGADGLTF

SEQ ID NO: 357608 - protein, 18 aa, Homo sapiens
  CDR3 for beta chain variable domain of TCR clone 178804 (TRBV12-4, TRBJ2-2)
CASSLVAGTRGRTGELFF

SEQ ID NO: 357609 - protein, 15 aa, Homo sapiens
  CDR3 for alpha chain variable domain of TCR clone 178805 (TRAV38-1, TRAJ57)
CAFMDSQGGSEKLVF

SEQ ID NO: 357610 - protein, 13 aa, Homo sapiens
  CDR3 for beta chain variable domain of TCR clone 178805 (TRBV7-3, TRBJ2-1)
CASSLDSYNEQFF

SEQ ID NO: 357611 - protein, 15 aa, Homo sapiens
  CDR3 for alpha chain variable domain of TCR clone 178806 (TRAV26-1, TRAJ56)
CIVRVATGANSKLTF

SEQ ID NO: 357612 - protein, 16 aa, Homo sapiens
  CDR3 for beta chain variable domain of TCR clone 178806 (TRBV12-5, TRBJ2-5)
CASGPRTGGNQETQYF

SEQ ID NO: 357613 - protein, 13 aa, Homo sapiens
  CDR3 for alpha chain variable domain of TCR clone 178807 (TRAV1-2, TRAJ9)
CSALNTGGFKTIF

SEQ ID NO: 357614 - protein, 16 aa, Homo sapiens
  CDR3 for beta chain variable domain of TCR clone 178807 (TRBV28, TRBJ2-2)
CASSLEGGSNTGELFF

SEQ ID NO: 357615 - protein, 15 aa, Homo sapiens
  CDR3 for alpha chain variable domain of TCR clone 178808 (TRAV13-1, TRAJ49)
CAASTEGNTSNQFYF

SEQ ID NO: 357616 - protein, 12 aa, Homo sapiens
  CDR3 for beta chain variable domain of TCR clone 178808 (TRBV11-2, TRBJ2-2)
CASSLGGGELFF

SEQ ID NO: 357617 - protein, 21 aa, Homo sapiens
  CDR3 for alpha chain variable domain of TCR clone 178809 (TRAV12-1, TRAJ37)
CVVNGGRWQHRQTNLGARDNF

SEQ ID NO: 357618 - protein, 12 aa, Homo sapiens
  CDR3 for beta chain variable domain of TCR clone 178809 (TRBV20-1, TRBJ1-2)
CSAPGFNYGYTF

SEQ ID NO: 357619 - protein, 15 aa, Homo sapiens
  CDR3 for alpha chain variable domain of TCR clone 178810 (TRAV26-1, TRAJ52)
CIVSDLGTSYGKLTF

SEQ ID NO: 357620 - protein, 14 aa, Homo sapiens
  CDR3 for beta chain variable domain of TCR clone 178810 (TRBV5-8, TRBJ2-3)
CASSLGQGTDTQYF

SEQ ID NO: 357621 - protein, 18 aa, Homo sapiens
  CDR3 for alpha chain variable domain of TCR clone 178811 (TRAV13-1, TRAJ52)
CAAKNPNAGGTSYGKLTF

SEQ ID NO: 357622 - protein, 13 aa, Homo sapiens
  CDR3 for beta chain variable domain of TCR clone 178811 (TRBV11-2, TRBJ1-5)
CASSSGGNQPQHF

SEQ ID NO: 357623 - protein, 12 aa, Homo sapiens
  CDR3 for alpha chain variable domain of TCR clone 178812 (TRAV2, TRAJ9)
CAVGAGGFKTIF

SEQ ID NO: 357624 - protein, 16 aa, Homo sapiens
  CDR3 for beta chain variable domain of TCR clone 178812 (TRBV7-9, TRBJ1-3)
CASSQTSGLRMGTIYF

SEQ ID NO: 357625 - protein, 14 aa, Homo sapiens
  CDR3 for alpha chain variable domain of TCR clone 178813 (TRAV8-3, TRAJ13)
CAVGGTFGYQKVTF

SEQ ID NO: 357626 - protein, 17 aa, Homo sapiens
  CDR3 for beta chain variable domain of TCR clone 178813 (TRBV7-9, TRBJ2-1)
CASSAGTLCRSYNEQFF

SEQ ID NO: 357627 - protein, 10 aa, Homo sapiens
  CDR3 for alpha chain variable domain of TCR clone 178814 (TRAV23/DV6, TRAJ43)
CAAAVAALEQ

SEQ ID NO: 357628 - protein, 14 aa, Homo sapiens
  CDR3 for beta chain variable domain of TCR clone 178814 (TRBV18, TRBJ1-1)
CASSPPTGRTEAFF

SEQ ID NO: 357629 - protein, 13 aa, Homo sapiens
  CDR3 for alpha chain variable domain of TCR clone 178815 (TRAV12-2, TRAJ6)
CAVNVSRKLHTYI

SEQ ID NO: 357630 - protein, 14 aa, Homo sapiens
  CDR3 for beta chain variable domain of TCR clone 178815 (TRBV7-2, TRBJ2-7)
CASSPKTSFYEQYF

SEQ ID NO: 357631 - protein, 14 aa, Homo sapiens
  CDR3 for alpha chain variable domain of TCR clone 178816 (TRAV9-2, TRAJ39)
CALYIYNAGNMLTF

SEQ ID NO: 357632 - protein, 14 aa, Homo sapiens
  CDR3 for beta chain variable domain of TCR clone 178816 (TRBV19, TRBJ2-3)
CASSAPRGTDTQYF

SEQ ID NO: 357633 - protein, 15 aa, Homo sapiens
  CDR3 for alpha chain variable domain of TCR clone 178817 (TRAV8-1, TRAJ6)
CAVNANPGGSYIPTF

SEQ ID NO: 357634 - protein, 12 aa, Homo sapiens
  CDR3 for beta chain variable domain of TCR clone 178817 (TRBV5-7, TRBJ2-7)
CASSVQGGERYF

SEQ ID NO: 357635 - protein, 14 aa, Homo sapiens
  CDR3 for alpha chain variable domain of TCR clone 178818 (TRAV21, TRAJ15)
CAVSLNQAGTALIF

SEQ ID NO: 357636 - protein, 13 aa, Homo sapiens
  CDR3 for beta chain variable domain of TCR clone 178818 (TRBV4-2, TRBJ1-1)
CASSQAGNTEAFF

SEQ ID NO: 357637 - protein, 15 aa, Homo sapiens
  CDR3 for alpha chain variable domain of TCR clone 178819 (TRAV16, TRAJ57)
CALSGGQGGTEKLVF

SEQ ID NO: 357638 - protein, 15 aa, Homo sapiens
  CDR3 for beta chain variable domain of TCR clone 178819 (TRBV5-1, TRBJ2-1)
CASSPPRAPYNEQFF

SEQ ID NO: 357639 - protein, 14 aa, Homo sapiens
  CDR3 for alpha chain variable domain of TCR clone 178820 (TRAV12-2, TRAJ13)
CAVKKTGGYQKVNF

SEQ ID NO: 357640 - protein, 15 aa, Homo sapiens
  CDR3 for beta chain variable domain of TCR clone 178820 (TRBV27, TRBJ2-1)
CASSNGGGSSNEQFS

SEQ ID NO: 357641 - protein, 10 aa, Homo sapiens
  CDR3 for alpha chain variable domain of TCR clone 178821 (TRAV20, TRAJ22)
CAAPARQLTF

SEQ ID NO: 357642 - protein, 14 aa, Homo sapiens
  CDR3 for beta chain variable domain of TCR clone 178821 (TRBV19, TRBJ2-1)
CASSMGSGATEKFF

SEQ ID NO: 357643 - protein, 12 aa, Homo sapiens
  CDR3 for alpha chain variable domain of TCR clone 178822 (TRAV26-2, TRAJ21)
CILKGNFNKFYF

SEQ ID NO: 357644 - protein, 14 aa, Homo sapiens
  CDR3 for beta chain variable domain of TCR clone 178822 (TRBV7-9, TRBJ1-1)
CANTPLQSYTEAFF

SEQ ID NO: 357645 - protein, 14 aa, Homo sapiens
  CDR3 for alpha chain variable domain of TCR clone 178823 (TRAV27, TRAJ45)
CAGAQEAVRTDSPV

SEQ ID NO: 357646 - protein, 17 aa, Homo sapiens
  CDR3 for beta chain variable domain of TCR clone 178823 (TRBV11-2, TRBJ2-1)
CASSLYPPGVEYNEQFF

SEQ ID NO: 357647 - protein, 15 aa, Homo sapiens
  CDR3 for alpha chain variable domain of TCR clone 178824 (TRAV12-1, TRAJ44)
CVADLPTGTASKLTF

SEQ ID NO: 357648 - protein, 13 aa, Homo sapiens
  CDR3 for beta chain variable domain of TCR clone 178824 (TRBV6-5, TRBJ2-5)
CASTPQGGETQYF

SEQ ID NO: 357649 - protein, 14 aa, Homo sapiens
  CDR3 for alpha chain variable domain of TCR clone 178825 (TRAV1-2, TRAJ8)
CAVREDTGFQKLVF

SEQ ID NO: 357650 - protein, 17 aa, Homo sapiens
  CDR3 for beta chain variable domain of TCR clone 178825 (TRBV4-1, TRBJ2-3)
CASSQVLQGGGTDTQYF

SEQ ID NO: 357651 - protein, 11 aa, Homo sapiens
  CDR3 for alpha chain variable domain of TCR clone 178826 (TRAV21, TRAJ27)
CAVRMQANQPL

SEQ ID NO: 357652 - protein, 18 aa, Homo sapiens
  CDR3 for beta chain variable domain of TCR clone 178826 (TRBV5-5, TRBJ1-4)
CASSYPGQGFNKGEKLFF

SEQ ID NO: 357653 - protein, 15 aa, Homo sapiens
  CDR3 for alpha chain variable domain of TCR clone 178827 (TRAV20, TRAJ52)
CAVQAGGTSYGKLTF

SEQ ID NO: 357654 - protein, 16 aa, Homo sapiens
  CDR3 for beta chain variable domain of TCR clone 178827 (TRBV20-1, TRBJ1-4)
CSAPGQGLLTNEKLFF

SEQ ID NO: 357655 - protein, 13 aa, Homo sapiens
  CDR3 for alpha chain variable domain of TCR clone 178828 (TRAV8-3, TRAJ43)
CAVGPDNNNDMRF

SEQ ID NO: 357656 - protein, 12 aa, Homo sapiens
  CDR3 for beta chain variable domain of TCR clone 178828 (TRBV7-2, TRBJ1-6)
CDSSLSSSPLHF

SEQ ID NO: 357657 - protein, 11 aa, Homo sapiens
  CDR3 for alpha chain variable domain of TCR clone 178829 (TRAV1-1, TRAJ22)
CLGGFCKATDL

SEQ ID NO: 357658 - protein, 18 aa, Homo sapiens
  CDR3 for beta chain variable domain of TCR clone 178829 (TRBV4-1, TRBJ1-4)
CASSPRTGGAWTNEKLFF

SEQ ID NO: 357659 - protein, 15 aa, Homo sapiens
  CDR3 for alpha chain variable domain of TCR clone 178830 (TRAV12-2, TRAJ43)
CAFDMRFGAGTRLTV

SEQ ID NO: 357660 - protein, 18 aa, Homo sapiens
  CDR3 for beta chain variable domain of TCR clone 178830 (TRBV20-1, TRBJ2-3)
CSASGLAGGPETTDTQYF

SEQ ID NO: 357661 - protein, 12 aa, Homo sapiens
  CDR3 for alpha chain variable domain of TCR clone 178831 (TRAV8-3, TRAJ20)
CAVGGGDYKLSF

SEQ ID NO: 357662 - protein, 15 aa, Homo sapiens
  CDR3 for beta chain variable domain of TCR clone 178831 (TRBV5-1, TRBJ2-1)
CASSPPRAPYNEQFF

SEQ ID NO: 357663 - protein, 17 aa, Homo sapiens
  CDR3 for alpha chain variable domain of TCR clone 178832 (TRAV3, TRAJ12)
CAVRDGGRMDSSYKLIF

SEQ ID NO: 357664 - protein, 13 aa, Homo sapiens
  CDR3 for beta chain variable domain of TCR clone 178832 (TRBV15, TRBJ1-6)
CASSGGLNSPLHF

SEQ ID NO: 357665 - protein, 13 aa, Homo sapiens
  CDR3 for alpha chain variable domain of TCR clone 178833 (TRAV2, TRAJ29)
CAVYSSGNTPLVF

SEQ ID NO: 357666 - protein, 14 aa, Homo sapiens
  CDR3 for beta chain variable domain of TCR clone 178833 (TRBV19, TRBJ1-1)
CASTGHRLNTEAFF

SEQ ID NO: 357667 - protein, 13 aa, Homo sapiens
  CDR3 for alpha chain variable domain of TCR clone 178834 (TRAV12-2, TRAJ20)
CAVYPSNDYKLSF

SEQ ID NO: 357668 - protein, 20 aa, Homo sapiens
  CDR3 for beta chain variable domain of TCR clone 178834 (TRBV7-8, TRBJ2-2)
CASSHLFPGPTSHITGELFF

SEQ ID NO: 357669 - protein, 17 aa, Homo sapiens
  CDR3 for alpha chain variable domain of TCR clone 178835 (TRAV14/DV4, TRAJ28)
CAMREVSSGDGSYQLTF

SEQ ID NO: 357670 - protein, 15 aa, Homo sapiens
  CDR3 for beta chain variable domain of TCR clone 178835 (TRBV11-2, TRBJ1-6)
CASTLRETGNSPLHF

SEQ ID NO: 357671 - protein, 12 aa, Homo sapiens
  CDR3 for alpha chain variable domain of TCR clone 178836 (TRAV35, TRAJ30)
CAGQLADDKIIF

SEQ ID NO: 357672 - protein, 16 aa, Homo sapiens
  CDR3 for beta chain variable domain of TCR clone 178836 (TRBV12-5, TRBJ2-5)
CASGPRTSGNQETQYF

SEQ ID NO: 357673 - protein, 14 aa, Homo sapiens
  CDR3 for alpha chain variable domain of TCR clone 178837 (TRAV13-1, TRAJ44)
CAAKATGTASKLTF

SEQ ID NO: 357674 - protein, 18 aa, Homo sapiens
  CDR3 for beta chain variable domain of TCR clone 178837 (TRBV5-4, TRBJ2-3)
CASSPTAGFLPSTDTQYF

SEQ ID NO: 357675 - protein, 15 aa, Homo sapiens
  CDR3 for alpha chain variable domain of TCR clone 178838 (TRAV17, TRAJ35)
CATAFVIGFGKVLHC

SEQ ID NO: 357676 - protein, 14 aa, Homo sapiens
  CDR3 for beta chain variable domain of TCR clone 178838 (TRBV12-4, TRBJ2-5)
CASSQSGGGETQYF

SEQ ID NO: 357677 - protein, 13 aa, Homo sapiens
  CDR3 for alpha chain variable domain of TCR clone 178839 (TRAV8-3, TRAJ40)
CAVGAQYLRNLQI

SEQ ID NO: 357678 - protein, 13 aa, Homo sapiens
  CDR3 for beta chain variable domain of TCR clone 178839 (TRBV7-9, TRBJ1-2)
CASSLKQNYGYTF

SEQ ID NO: 357679 - protein, 10 aa, Homo sapiens
  CDR3 for alpha chain variable domain of TCR clone 178840 (TRAV12-3, TRAJ49)
CAMNDDQFYV

SEQ ID NO: 357680 - protein, 13 aa, Homo sapiens
  CDR3 for beta chain variable domain of TCR clone 178840 (TRBV12-4, TRBJ1-1)
CTSSPGTGFEAFF

SEQ ID NO: 357681 - protein, 14 aa, Homo sapiens
  CDR3 for alpha chain variable domain of TCR clone 178841 (TRAV16, TRAJ42)
CALLAGGSQGILIF

SEQ ID NO: 357682 - protein, 13 aa, Homo sapiens
  CDR3 for beta chain variable domain of TCR clone 178841 (TRBV7-9, TRBJ1-2)
CASSLKQNYGYTF

SEQ ID NO: 357683 - protein, 12 aa, Homo sapiens
  CDR3 for alpha chain variable domain of TCR clone 178842 (TRAV2, TRAJ10)
CSSTGGGNKLTF

SEQ ID NO: 357684 - protein, 20 aa, Homo sapiens
  CDR3 for beta chain variable domain of TCR clone 178842 (TRBV7-8, TRBJ2-2)
CASSHLFPGPTIHITGELFF

SEQ ID NO: 357685 - protein, 13 aa, Homo sapiens
  CDR3 for alpha chain variable domain of TCR clone 178843 (TRAV23/DV6, TRAJ34)
CAAIENNTDTLIF

SEQ ID NO: 357686 - protein, 13 aa, Homo sapiens
  CDR3 for beta chain variable domain of TCR clone 178843 (TRBV29-1, TRBJ2-7)
CSVGPSGGYEQYF

SEQ ID NO: 357687 - protein, 13 aa, Homo sapiens
  CDR3 for alpha chain variable domain of TCR clone 178844 (TRAV26-2, TRAJ54)
CIPRVGGGQKLVF

SEQ ID NO: 357688 - protein, 16 aa, Homo sapiens
  CDR3 for beta chain variable domain of TCR clone 178844 (TRBV4-1, TRBJ1-1)
CASSSMSERPNTEAFF

SEQ ID NO: 357689 - protein, 15 aa, Homo sapiens
  CDR3 for alpha chain variable domain of TCR clone 178845 (TRAV25, TRAJ53)
CPTSNSGGSNYKLTF

SEQ ID NO: 357690 - protein, 15 aa, Homo sapiens
  CDR3 for beta chain variable domain of TCR clone 178845 (TRBV5-7, TRBJ2-1)
CASSYISGRGNEQFF

SEQ ID NO: 357691 - protein, 13 aa, Homo sapiens
  CDR3 for alpha chain variable domain of TCR clone 178846 (TRAV29/DV5, TRAJ31)
CAASRNNNARLMF

SEQ ID NO: 357692 - protein, 14 aa, Homo sapiens
  CDR3 for beta chain variable domain of TCR clone 178846 (TRBV19, TRBJ1-5)
CASSQGYSNQPQHF

SEQ ID NO: 357693 - protein, 15 aa, Homo sapiens
  CDR3 for alpha chain variable domain of TCR clone 178847 (TRAV12-1, TRAJ45)
CVVLSGGGGADGLTF

SEQ ID NO: 357694 - protein, 14 aa, Homo sapiens
  CDR3 for beta chain variable domain of TCR clone 178847 (TRBV2, TRBJ2-7)
CASSVLGAAYEQYF

SEQ ID NO: 357695 - protein, 10 aa, Homo sapiens
  CDR3 for alpha chain variable domain of TCR clone 178848 (TRAV16, TRAJ26)
CAPEELWSEF

SEQ ID NO: 357696 - protein, 13 aa, Homo sapiens
  CDR3 for beta chain variable domain of TCR clone 178848 (TRBV12-4, TRBJ2-7)
CASSPTETYEQYF

SEQ ID NO: 357697 - protein, 13 aa, Homo sapiens
  CDR3 for alpha chain variable domain of TCR clone 178849 (TRAV8-3, TRAJ48)
CAVVPFGNEKLTF

SEQ ID NO: 357698 - protein, 15 aa, Homo sapiens
  CDR3 for beta chain variable domain of TCR clone 178849 (TRBV28, TRBJ1-2)
CASSSHSIANYGYTF

SEQ ID NO: 357699 - protein, 14 aa, Homo sapiens
  CDR3 for alpha chain variable domain of TCR clone 178850 (TRAV16, TRAJ17)
CALSGRAAGNKLPF

SEQ ID NO: 357700 - protein, 17 aa, Homo sapiens
  CDR3 for beta chain variable domain of TCR clone 178850 (TRBV18, TRBJ2-6)
CASSPRQGAVGANVLTF

SEQ ID NO: 357701 - protein, 11 aa, Homo sapiens
  CDR3 for alpha chain variable domain of TCR clone 178851 (TRAV12-2, TRAJ3)
CAVKRASKIIF

SEQ ID NO: 357702 - protein, 15 aa, Homo sapiens
  CDR3 for beta chain variable domain of TCR clone 178851 (TRBV20-1, TRBJ2-7)
CSARDRVSGMDEHYF

SEQ ID NO: 357703 - protein, 16 aa, Homo sapiens
  CDR3 for alpha chain variable domain of TCR clone 178852 (TRAV30, TRAJ24)
CGTEIVDADSWGKFQF

SEQ ID NO: 357704 - protein, 14 aa, Homo sapiens
  CDR3 for beta chain variable domain of TCR clone 178852 (TRBV5-1, TRBJ1-2)
CASSLEAVNYGDTF

SEQ ID NO: 357705 - protein, 15 aa, Homo sapiens
  CDR3 for alpha chain variable domain of TCR clone 178853 (TRAV14/DV4, TRAJ12)
CAMREERDSSYKLIF

SEQ ID NO: 357706 - protein, 16 aa, Homo sapiens
  CDR3 for beta chain variable domain of TCR clone 178853 (TRBV11-2, TRBJ1-2)
CASSLDRGGNNYGHTF

SEQ ID NO: 357707 - protein, 14 aa, Homo sapiens
  CDR3 for alpha chain variable domain of TCR clone 178854 (TRAV3, TRAJ21)
CAVRDKYNFNKFYF

SEQ ID NO: 357708 - protein, 16 aa, Homo sapiens
  CDR3 for beta chain variable domain of TCR clone 178854 (TRBV12-5, TRBJ2-5)
CASGPRTSGNQETQYF

SEQ ID NO: 357709 - protein, 14 aa, Homo sapiens
  CDR3 for alpha chain variable domain of TCR clone 178855 (TRAV8-1, TRAJ39)
CAVNASNAGNMLTF

SEQ ID NO: 357710 - protein, 13 aa, Homo sapiens
  CDR3 for beta chain variable domain of TCR clone 178855 (TRBV11-2, TRBJ2-5)
CASSSTGEETQYF

SEQ ID NO: 357711 - protein, 14 aa, Homo sapiens
  CDR3 for alpha chain variable domain of TCR clone 178856 (TRAV35, TRAJ22)
CAGLRPGSARQLIF

SEQ ID NO: 357712 - protein, 13 aa, Homo sapiens
  CDR3 for beta chain variable domain of TCR clone 178856 (TRBV20-1, TRBJ2-7)
CSATHTSGYEQYF

SEQ ID NO: 357713 - protein, 15 aa, Homo sapiens
  CDR3 for alpha chain variable domain of TCR clone 178857 (TRAV1-2, TRAJ26)
CAVRDLIAMVRILSL

SEQ ID NO: 357714 - protein, 17 aa, Homo sapiens
  CDR3 for beta chain variable domain of TCR clone 178857 (TRBV7-8, TRBJ2-6)
CASSAGTGGAGANVLTF

SEQ ID NO: 357715 - protein, 13 aa, Homo sapiens
  CDR3 for alpha chain variable domain of TCR clone 178858 (TRAV1-2, TRAJ9)
CASLNTGGFKTIF

SEQ ID NO: 357716 - protein, 14 aa, Homo sapiens
  CDR3 for beta chain variable domain of TCR clone 178858 (TRBV13, TRBJ2-3)
CASSSGSPTDTQYF

SEQ ID NO: 357717 - protein, 12 aa, Homo sapiens
  CDR3 for alpha chain variable domain of TCR clone 178859 (TRAV16, TRAJ10)
CSRTGGGNKLTF

SEQ ID NO: 357718 - protein, 19 aa, Homo sapiens
  CDR3 for beta chain variable domain of TCR clone 178859 (TRBV25-1, TRBJ2-2)
CAILVYRVDRGRKTGELFF

SEQ ID NO: 357719 - protein, 15 aa, Homo sapiens
  CDR3 for alpha chain variable domain of TCR clone 178860 (TRAV21, TRAJ56)
CAVTKYTGANSKLTF

SEQ ID NO: 357720 - protein, 14 aa, Homo sapiens
  CDR3 for beta chain variable domain of TCR clone 178860 (TRBV20-1, TRBJ2-3)
CGARVRGSTDTQYF

SEQ ID NO: 357721 - protein, 15 aa, Homo sapiens
  CDR3 for alpha chain variable domain of TCR clone 178861 (TRAV26-1, TRAJ40)
CIVRAVPSGTYKYIF

SEQ ID NO: 357722 - protein, 15 aa, Homo sapiens
  CDR3 for beta chain variable domain of TCR clone 178861 (TRBV6-1, TRBJ2-3)
CASSERGGITDTQYF

SEQ ID NO: 357723 - protein, 11 aa, Homo sapiens
  CDR3 for alpha chain variable domain of TCR clone 178862 (TRAV17, TRAJ43)
CATPRSNDMRF

SEQ ID NO: 357724 - protein, 16 aa, Homo sapiens
  CDR3 for beta chain variable domain of TCR clone 178862 (TRBV7-9, TRBJ1-2)
CASSLGFSSGEDGYSF

SEQ ID NO: 357725 - protein, 18 aa, Homo sapiens
  CDR3 for alpha chain variable domain of TCR clone 178863 (TRAV21, TRAJ52)
CAVRPSPAGGTIYGKLTF

SEQ ID NO: 357726 - protein, 14 aa, Homo sapiens
  CDR3 for beta chain variable domain of TCR clone 178863 (TRBV4-1, TRBJ2-2)
CASSQAVNTGELFF

SEQ ID NO: 357727 - protein, 14 aa, Homo sapiens
  CDR3 for alpha chain variable domain of TCR clone 178864 (TRAV12-2, TRAJ17)
CAVNIKAAGNKLPF

SEQ ID NO: 357728 - protein, 13 aa, Homo sapiens
  CDR3 for beta chain variable domain of TCR clone 178864 (TRBV4-1, TRBJ2-2)
CASSQENTGELFF

SEQ ID NO: 357729 - protein, 15 aa, Homo sapiens
  CDR3 for alpha chain variable domain of TCR clone 178865 (TRAV12-1, TRAJ45)
FVVLSGGGGADGLTF

SEQ ID NO: 357730 - protein, 14 aa, Homo sapiens
  CDR3 for beta chain variable domain of TCR clone 178865 (TRBV11-2, TRBJ2-5)
CASSRTGGIETQYF

SEQ ID NO: 357731 - protein, 14 aa, Homo sapiens
  CDR3 for alpha chain variable domain of TCR clone 178866 (TRAV21, TRAJ35)
CAVMPIGFGNVLHY

SEQ ID NO: 357732 - protein, 12 aa, Homo sapiens
  CDR3 for beta chain variable domain of TCR clone 178866 (TRBV7-9, TRBJ2-7)
CASSIKRKEQYF

SEQ ID NO: 357733 - protein, 13 aa, Homo sapiens
  CDR3 for alpha chain variable domain of TCR clone 178867 (TRAV1-2, TRAJ9)
CAALSTGGFKTIF

SEQ ID NO: 357734 - protein, 13 aa, Homo sapiens
  CDR3 for beta chain variable domain of TCR clone 178867 (TRBV19, TRBJ1-2)
CASSVHGQDGYTF

SEQ ID NO: 357735 - protein, 16 aa, Homo sapiens
  CDR3 for alpha chain variable domain of TCR clone 178868 (TRAV1-2, TRAJ10)
CAVRGVLTGGGNKLTF

SEQ ID NO: 357736 - protein, 15 aa, Homo sapiens
  CDR3 for beta chain variable domain of TCR clone 178868 (TRBV7-9, TRBJ1-6)
CASSSPGRGKSPLHF

SEQ ID NO: 357737 - protein, 15 aa, Homo sapiens
  CDR3 for alpha chain variable domain of TCR clone 178869 (TRAV12-2, TRAJ22)
CAVNGASGSARQLTF

SEQ ID NO: 357738 - protein, 10 aa, Homo sapiens
  CDR3 for beta chain variable domain of TCR clone 178869 (TRBV18, TRBJ2-2)
CASSPPVGFT

SEQ ID NO: 357739 - protein, 17 aa, Homo sapiens
  CDR3 for alpha chain variable domain of TCR clone 178870 (TRAV17, TRAJ7)
CATLGRLAFGKGNQVVV

SEQ ID NO: 357740 - protein, 13 aa, Homo sapiens
  CDR3 for beta chain variable domain of TCR clone 178870 (TRBV12-4, TRBJ2-7)
CASSLERVREQFF

SEQ ID NO: 357741 - protein, 15 aa, Homo sapiens
  CDR3 for alpha chain variable domain of TCR clone 178871 (TRAV12-3, TRAJ6)
CAMSATTGGSYLPTF

SEQ ID NO: 357742 - protein, 15 aa, Homo sapiens
  CDR3 for beta chain variable domain of TCR clone 178871 (TRBV4-1, TRBJ1-4)
CASSDTGGTNEKLFF

SEQ ID NO: 357743 - protein, 12 aa, Homo sapiens
  CDR3 for alpha chain variable domain of TCR clone 178872 (TRAV6, TRAJ9)
CALVTGGFKTIF

SEQ ID NO: 357744 - protein, 16 aa, Homo sapiens
  CDR3 for beta chain variable domain of TCR clone 178872 (TRBV7-3, TRBJ2-2)
GGTRPCIQWNTGELFF

SEQ ID NO: 357745 - protein, 13 aa, Homo sapiens
  CDR3 for alpha chain variable domain of TCR clone 178873 (TRAV13-2, TRAJ45)
QGVTGGGADGLTF

SEQ ID NO: 357746 - protein, 17 aa, Homo sapiens
  CDR3 for beta chain variable domain of TCR clone 178873 (TRBV19, TRBJ1-1)
CASSIAGRGLMNTEAFF

SEQ ID NO: 357747 - protein, 17 aa, Homo sapiens
  CDR3 for alpha chain variable domain of TCR clone 178874 (TRAV26-2, TRAJ52)
CILSSSSGGTSYGKLTF

SEQ ID NO: 357748 - protein, 17 aa, Homo sapiens
  CDR3 for beta chain variable domain of TCR clone 178874 (TRBV11-2, TRBJ2-1)
CASSLYPPGVEYNEQFF

SEQ ID NO: 357749 - protein, 14 aa, Homo sapiens
  CDR3 for alpha chain variable domain of TCR clone 178875 (TRAV4, TRAJ10)
CLVGDTGGGNKLTF

SEQ ID NO: 357750 - protein, 13 aa, Homo sapiens
  CDR3 for beta chain variable domain of TCR clone 178875 (TRBV20-1, TRBJ2-7)
CSATHTSGYEQYF

SEQ ID NO: 357751 - protein, 15 aa, Homo sapiens
  CDR3 for alpha chain variable domain of TCR clone 178876 (TRAV8-4, TRAJ37)
CAVTYGSSNTGKLIF

SEQ ID NO: 357752 - protein, 15 aa, Homo sapiens
  CDR3 for beta chain variable domain of TCR clone 178876 (TRBV5-1, TRBJ2-1)
CASSPPRAPYNEQFF

SEQ ID NO: 357753 - protein, 12 aa, Homo sapiens
  CDR3 for alpha chain variable domain of TCR clone 178877 (TRAV3, TRAJ31)
CAVRGGNARLLF

SEQ ID NO: 357754 - protein, 18 aa, Homo sapiens
  CDR3 for beta chain variable domain of TCR clone 178877 (TRBV7-2, TRBJ2-3)
CASSLKREGSGITDTQYF

SEQ ID NO: 357755 - protein, 13 aa, Homo sapiens
  CDR3 for alpha chain variable domain of TCR clone 178878 (TRAV16, TRAJ10)
FALLTGGGNKLTY

SEQ ID NO: 357756 - protein, 12 aa, Homo sapiens
  CDR3 for beta chain variable domain of TCR clone 178878 (TRBV28, TRBJ2-7)
CASTGNHYEQYF

SEQ ID NO: 357757 - protein, 14 aa, Homo sapiens
  CDR3 for alpha chain variable domain of TCR clone 178879 (TRAV2, TRAJ9)
CAVEDRSGGFKTIF

SEQ ID NO: 357758 - protein, 12 aa, Homo sapiens
  CDR3 for beta chain variable domain of TCR clone 178879 (TRBV12-4, TRBJ2-4)
CASSPSGNIQYF

SEQ ID NO: 357759 - protein, 15 aa, Homo sapiens
  CDR3 for alpha chain variable domain of TCR clone 178880 (TRAV13-2, TRAJ53)
CAERGSRGSNDKLTF

SEQ ID NO: 357760 - protein, 14 aa, Homo sapiens
  CDR3 for beta chain variable domain of TCR clone 178880 (TRBV4-1, TRBJ2-2)
CASSQYPDTGELFF

SEQ ID NO: 357761 - protein, 15 aa, Homo sapiens
  CDR3 for alpha chain variable domain of TCR clone 178881 (TRAV13-1, TRAJ8)
CAASIPNTGFQKLVF

SEQ ID NO: 357762 - protein, 14 aa, Homo sapiens
  CDR3 for beta chain variable domain of TCR clone 178881 (TRBV7-9, TRBJ1-4)
CASSLEGQSEKLFF

SEQ ID NO: 357763 - protein, 11 aa, Homo sapiens
  CDR3 for alpha chain variable domain of TCR clone 178882 (TRAV3, TRAJ21)
CAVGNFNKFYF

SEQ ID NO: 357764 - protein, 17 aa, Homo sapiens
  CDR3 for beta chain variable domain of TCR clone 178882 (TRBV13, TRBJ2-3)
CASSLSRVAGGMNTQYF

SEQ ID NO: 357765 - protein, 12 aa, Homo sapiens
  CDR3 for alpha chain variable domain of TCR clone 178883 (TRAV25, TRAJ38)
CAGTGNNRKLIW

SEQ ID NO: 357766 - protein, 12 aa, Homo sapiens
  CDR3 for beta chain variable domain of TCR clone 178883 (TRBV11-2, TRBJ2-1)
CASSPGNNEQFF

SEQ ID NO: 357767 - protein, 14 aa, Homo sapiens
  CDR3 for alpha chain variable domain of TCR clone 178884 (TRAV1-2, TRAJ16)
CAVNRFSDGQKLLF

SEQ ID NO: 357768 - protein, 16 aa, Homo sapiens
  CDR3 for beta chain variable domain of TCR clone 178884 (TRBV6-6, TRBJ2-1)
CASSLLSDSSYNEQFF

SEQ ID NO: 357769 - protein, 12 aa, Homo sapiens
  CDR3 for alpha chain variable domain of TCR clone 178885 (TRAV3, TRAJ43)
CAVRDNNNDMRF

SEQ ID NO: 357770 - protein, 15 aa, Homo sapiens
  CDR3 for beta chain variable domain of TCR clone 178885 (TRBV27, TRBJ1-5)
CASSLGTGFDQPQHF

SEQ ID NO: 357771 - protein, 12 aa, Homo sapiens
  CDR3 for alpha chain variable domain of TCR clone 178886 (TRAV21, TRAJ13)
PGPSGGYQKVTF

SEQ ID NO: 357772 - protein, 15 aa, Homo sapiens
  CDR3 for beta chain variable domain of TCR clone 178886 (TRBV27, TRBJ2-5)
CASSLYPRVGETQYF

SEQ ID NO: 357773 - protein, 14 aa, Homo sapiens
  CDR3 for alpha chain variable domain of TCR clone 178887 (TRAV3, TRAJ37)
CAVKESGNTGKLIF

SEQ ID NO: 357774 - protein, 14 aa, Homo sapiens
  CDR3 for beta chain variable domain of TCR clone 178887 (TRBV13, TRBJ2-5)
CASSLGRGQETQYF

SEQ ID NO: 357775 - protein, 13 aa, Homo sapiens
  CDR3 for alpha chain variable domain of TCR clone 178888 (TRAV8-3, TRAJ36)
CAVGSTGANNLFF

SEQ ID NO: 357776 - protein, 15 aa, Homo sapiens
  CDR3 for beta chain variable domain of TCR clone 178888 (TRBV5-1, TRBJ2-3)
CASSVTSGSTDTQYF

SEQ ID NO: 357777 - protein, 15 aa, Homo sapiens
  CDR3 for alpha chain variable domain of TCR clone 178889 (TRAV12-1, TRAJ9)
CVVSFGDTGGFKTIF

SEQ ID NO: 357778 - protein, 15 aa, Homo sapiens
  CDR3 for beta chain variable domain of TCR clone 178889 (TRBV20-1, TRBJ2-7)
CSARARVSGMDEQYF

SEQ ID NO: 357779 - protein, 15 aa, Homo sapiens
  CDR3 for alpha chain variable domain of TCR clone 178890 (TRAV12-2, TRAJ43)
CAFDMRFAAGTRLTV

SEQ ID NO: 357780 - protein, 18 aa, Homo sapiens
  CDR3 for beta chain variable domain of TCR clone 178890 (TRBV20-1, TRBJ2-3)
CSASGLAGGPGTTDTQYF

SEQ ID NO: 357781 - protein, 15 aa, Homo sapiens
  CDR3 for alpha chain variable domain of TCR clone 178891 (TRAV12-1, TRAJ44)
CVVFVNTGTASKLTF

SEQ ID NO: 357782 - protein, 15 aa, Homo sapiens
  CDR3 for beta chain variable domain of TCR clone 178891 (TRBV7-9, TRBJ1-5)
CASSQGHQPNQPQHF

SEQ ID NO: 357783 - protein, 13 aa, Homo sapiens
  CDR3 for alpha chain variable domain of TCR clone 178892 (TRAV22, TRAJ29)
CAVGGSGNTPLVF

SEQ ID NO: 357784 - protein, 14 aa, Homo sapiens
  CDR3 for beta chain variable domain of TCR clone 178892 (TRBV5-1, TRBJ2-7)
CASSRGEALYEQYF

SEQ ID NO: 357785 - protein, 14 aa, Homo sapiens
  CDR3 for alpha chain variable domain of TCR clone 178893 (TRAV17, TRAJ22)
CATVLSGSARQLTF

SEQ ID NO: 357786 - protein, 13 aa, Homo sapiens
  CDR3 for beta chain variable domain of TCR clone 178893 (TRBV12-4, TRBJ2-5)
CASSFGTEETQYF

SEQ ID NO: 357787 - protein, 15 aa, Homo sapiens
  CDR3 for alpha chain variable domain of TCR clone 178894 (TRAV3, TRAJ5)
CAVRALDTGRRALTF

SEQ ID NO: 357788 - protein, 16 aa, Homo sapiens
  CDR3 for beta chain variable domain of TCR clone 178894 (TRBV13, TRBJ2-2)
CASSPRTGEHTGELFF

SEQ ID NO: 357789 - protein, 12 aa, Homo sapiens
  CDR3 for alpha chain variable domain of TCR clone 178895 (TRAV12-2, TRAJ10)
WGVTGGGNKLTF

SEQ ID NO: 357790 - protein, 16 aa, Homo sapiens
  CDR3 for beta chain variable domain of TCR clone 178895 (TRBV4-1, TRBJ2-6)
CASSQVGDPGANVLTF

SEQ ID NO: 357791 - protein, 15 aa, Homo sapiens
  CDR3 for alpha chain variable domain of TCR clone 178896 (TRAV4, TRAJ39)
CLVGPNNNAGDMLTF

SEQ ID NO: 357792 - protein, 16 aa, Homo sapiens
  CDR3 for beta chain variable domain of TCR clone 178896 (TRBV13, TRBJ2-2)
CASGPRTGEHTGELFF

SEQ ID NO: 357793 - protein, 15 aa, Homo sapiens
  CDR3 for alpha chain variable domain of TCR clone 178897 (TRAV3, TRAJ13)
CAVRVYSRGYQKVTF

SEQ ID NO: 357794 - protein, 15 aa, Homo sapiens
  CDR3 for beta chain variable domain of TCR clone 178897 (TRBV5-7, TRBJ1-2)
CASSLGVAANYGYTF

SEQ ID NO: 357795 - protein, 12 aa, Homo sapiens
  CDR3 for alpha chain variable domain of TCR clone 178898 (TRAV30, TRAJ43)
CGTEEWGNDMRF

SEQ ID NO: 357796 - protein, 13 aa, Homo sapiens
  CDR3 for beta chain variable domain of TCR clone 178898 (TRBV27, TRBJ2-7)
CASSFSQGYEQYF

SEQ ID NO: 357797 - protein, 17 aa, Homo sapiens
  CDR3 for alpha chain variable domain of TCR clone 178899 (TRAV3, TRAJ38)
CAVRDCLNAGNNRKLIW

SEQ ID NO: 357798 - protein, 16 aa, Homo sapiens
  CDR3 for beta chain variable domain of TCR clone 178899 (TRBV20-1, TRBJ1-4)
CSAPGQGLLTNEKLFF

SEQ ID NO: 357799 - protein, 15 aa, Homo sapiens
  CDR3 for alpha chain variable domain of TCR clone 178900 (TRAV38-2/DV8, TRAJ57)
CAYGRVFGKGTKLTV

SEQ ID NO: 357800 - protein, 18 aa, Homo sapiens
  CDR3 for beta chain variable domain of TCR clone 178900 (TRBV18, TRBJ1-1)
CVSSLPGAPQGAGTEAFF

SEQ ID NO: 357801 - protein, 17 aa, Homo sapiens
  CDR3 for alpha chain variable domain of TCR clone 178901 (TRAV13-1, TRAJ31)
CAPRDRLMFGDGTQLLV

SEQ ID NO: 357802 - protein, 12 aa, Homo sapiens
  CDR3 for beta chain variable domain of TCR clone 178901 (TRBV7-9, TRBJ2-7)
CASSVEGYEQYF

SEQ ID NO: 357803 - protein, 17 aa, Homo sapiens
  CDR3 for alpha chain variable domain of TCR clone 178902 (TRAV17, TRAJ28)
CATDPRRGGAGCYQPTF

SEQ ID NO: 357804 - protein, 16 aa, Homo sapiens
  CDR3 for beta chain variable domain of TCR clone 178902 (TRBV25-1, TRBJ1-1)
CASSGDRDRGRIEAFF

SEQ ID NO: 357805 - protein, 11 aa, Homo sapiens
  CDR3 for alpha chain variable domain of TCR clone 178903 (TRAV3, TRAJ21)
FAVGNFNKFYF

SEQ ID NO: 357806 - protein, 14 aa, Homo sapiens
  CDR3 for beta chain variable domain of TCR clone 178903 (TRBV19, TRBJ2-1)
CASPTFVLSGEQFF

SEQ ID NO: 357807 - protein, 14 aa, Homo sapiens
  CDR3 for alpha chain variable domain of TCR clone 178904 (TRAV13-2, TRAJ29)
CAEGTFETNTHLVF

SEQ ID NO: 357808 - protein, 13 aa, Homo sapiens
  CDR3 for beta chain variable domain of TCR clone 178904 (TRBV2, TRBJ1-1)
CASNLLRNTEAFF

SEQ ID NO: 357809 - protein, 14 aa, Homo sapiens
  CDR3 for alpha chain variable domain of TCR clone 178905 (TRAV3, TRAJ13)
CAVSYSGGYQKVTF

SEQ ID NO: 357810 - protein, 16 aa, Homo sapiens
  CDR3 for beta chain variable domain of TCR clone 178905 (TRBV7-3, TRBJ2-2)
CASSLKRGTLSGELFF

SEQ ID NO: 357811 - protein, 13 aa, Homo sapiens
  CDR3 for alpha chain variable domain of TCR clone 178906 (TRAV21, TRAJ57)
CAVTQGGSEKLVF

SEQ ID NO: 357812 - protein, 15 aa, Homo sapiens
  CDR3 for beta chain variable domain of TCR clone 178906 (TRBV5-1, TRBJ1-1)
CASSSTIGTNTEAFF

SEQ ID NO: 357813 - protein, 14 aa, Homo sapiens
  CDR3 for alpha chain variable domain of TCR clone 178907 (TRAV26-1, TRAJ38)
CIADNAGNNRKLFW

SEQ ID NO: 357814 - protein, 13 aa, Homo sapiens
  CDR3 for beta chain variable domain of TCR clone 178907 (TRBV20-1, TRBJ1-1)
CSARGGGNTEAFS

SEQ ID NO: 357815 - protein, 15 aa, Homo sapiens
  CDR3 for alpha chain variable domain of TCR clone 178908 (TRAV3, TRAJ17)
CAVRDTGAAGNKLTF

SEQ ID NO: 357816 - protein, 18 aa, Homo sapiens
  CDR3 for beta chain variable domain of TCR clone 178908 (TRBV20-1, TRBJ2-6)
CSAETTPTHGSGANVLTF

SEQ ID NO: 357817 - protein, 14 aa, Homo sapiens
  CDR3 for alpha chain variable domain of TCR clone 178909 (TRAV17, TRAJ34)
CATDSLEGTDKLIF

SEQ ID NO: 357818 - protein, 15 aa, Homo sapiens
  CDR3 for beta chain variable domain of TCR clone 178909 (TRBV12-4, TRBJ1-2)
CASSPTTGGGYGYTF

SEQ ID NO: 357819 - protein, 14 aa, Homo sapiens
  CDR3 for alpha chain variable domain of TCR clone 178910 (TRAV12-2, TRAJ17)
CAVNIKAAGNKLTF

SEQ ID NO: 357820 - protein, 14 aa, Homo sapiens
  CDR3 for beta chain variable domain of TCR clone 178910 (TRBV12-5, TRBJ2-5)
CASGSRTHQETQYF

SEQ ID NO: 357821 - protein, 14 aa, Homo sapiens
  CDR3 for alpha chain variable domain of TCR clone 178911 (TRAV3, TRAJ36)
CPVRDGTGANNLFF

SEQ ID NO: 357822 - protein, 16 aa, Homo sapiens
  CDR3 for beta chain variable domain of TCR clone 178911 (TRBV7-3, TRBJ2-5)
CASIQPGGSVQETQHF

SEQ ID NO: 357823 - protein, 13 aa, Homo sapiens
  CDR3 for alpha chain variable domain of TCR clone 178912 (TRAV21, TRAJ27)
CAARPGNAGKSTF

SEQ ID NO: 357824 - protein, 16 aa, Homo sapiens
  CDR3 for beta chain variable domain of TCR clone 178912 (TRBV4-1, TRBJ1-2)
CASSQDAGQVLYGYTF

SEQ ID NO: 357825 - protein, 15 aa, Homo sapiens
  CDR3 for alpha chain variable domain of TCR clone 178913 (TRAV25, TRAJ52)
CAGTPGGTSYGKLTF

SEQ ID NO: 357826 - protein, 16 aa, Homo sapiens
  CDR3 for beta chain variable domain of TCR clone 178913 (TRBV19, TRBJ2-1)
CASSKAGPSSYNEQFF

SEQ ID NO: 357827 - protein, 12 aa, Homo sapiens
  CDR3 for alpha chain variable domain of TCR clone 178914 (TRAV10, TRAJ34)
CVVSGKHRRAHL

SEQ ID NO: 357828 - protein, 14 aa, Homo sapiens
  CDR3 for beta chain variable domain of TCR clone 178914 (TRBV19, TRBJ2-1)
CASPTFVLSGEQFF

SEQ ID NO: 357829 - protein, 13 aa, Homo sapiens
  CDR3 for alpha chain variable domain of TCR clone 178915 (TRAV13-1, TRAJ11)
CAAVLAGYSTITF

SEQ ID NO: 357830 - protein, 17 aa, Homo sapiens
  CDR3 for beta chain variable domain of TCR clone 178915 (TRBV25-1, TRBJ2-7)
CASSDARVVFSSYEQYF

SEQ ID NO: 357831 - protein, 16 aa, Homo sapiens
  CDR3 for alpha chain variable domain of TCR clone 178916 (TRAV12-1, TRAJ42)
CVVTPYYGGSQVNLIF

SEQ ID NO: 357832 - protein, 18 aa, Homo sapiens
  CDR3 for beta chain variable domain of TCR clone 178916 (TRBV24-1, TRBJ2-3)
CATSDLPRLAGGADTQYF

SEQ ID NO: 357833 - protein, 18 aa, Homo sapiens
  CDR3 for alpha chain variable domain of TCR clone 178917 (TRAV13-1, TRAJ52)
CAAKNPNAGGTSYGKLTF

SEQ ID NO: 357834 - protein, 14 aa, Homo sapiens
  CDR3 for beta chain variable domain of TCR clone 178917 (TRBV7-3, TRBJ2-1)
CASSLAGGTNEQCF

SEQ ID NO: 357835 - protein, 14 aa, Homo sapiens
  CDR3 for alpha chain variable domain of TCR clone 178918 (TRAV17, TRAJ12)
CATDEKDSSYKLIF

SEQ ID NO: 357836 - protein, 12 aa, Homo sapiens
  CDR3 for beta chain variable domain of TCR clone 178918 (TRBV6-3, TRBJ2-1)
CASSGSYNEQFF

SEQ ID NO: 357837 - protein, 15 aa, Homo sapiens
  CDR3 for alpha chain variable domain of TCR clone 178919 (TRAV9-2, TRAJ56)
CALSDVDGANSELTF

SEQ ID NO: 357838 - protein, 14 aa, Homo sapiens
  CDR3 for beta chain variable domain of TCR clone 178919 (TRBV5-1, TRBJ2-7)
CASSRGESLYEQYF

SEQ ID NO: 357839 - protein, 15 aa, Homo sapiens
  CDR3 for alpha chain variable domain of TCR clone 178920 (TRAV8-3, TRAJ45)
CASSYSGGGADGLTF

SEQ ID NO: 357840 - protein, 16 aa, Homo sapiens
  CDR3 for beta chain variable domain of TCR clone 178920 (TRBV19, TRBJ2-1)
CASSKAGPGSYNEQFF

SEQ ID NO: 357841 - protein, 13 aa, Homo sapiens
  CDR3 for alpha chain variable domain of TCR clone 178921 (TRAV13-1, TRAJ39)
CAASIWAGNMLTF

SEQ ID NO: 357842 - protein, 15 aa, Homo sapiens
  CDR3 for beta chain variable domain of TCR clone 178921 (TRBV7-9, TRBJ1-1)
CASSLPEQGGTEAFF

SEQ ID NO: 357843 - protein, 16 aa, Homo sapiens
  CDR3 for alpha chain variable domain of TCR clone 178922 (TRAV12-3, TRAJ53)
CAVSPGSGGSNYKLTF

SEQ ID NO: 357844 - protein, 16 aa, Homo sapiens
  CDR3 for beta chain variable domain of TCR clone 178922 (TRBV29-1, TRBJ2-5)
SAARTERDPVLRARHA

SEQ ID NO: 357845 - protein, 12 aa, Homo sapiens
  CDR3 for alpha chain variable domain of TCR clone 178923 (TRAV12-3, TRAJ17)
CAMTLTGNELTF

SEQ ID NO: 357846 - protein, 15 aa, Homo sapiens
  CDR3 for beta chain variable domain of TCR clone 178923 (TRBV20-1, TRBJ2-7)
CSARDRVSGMEEQYF

SEQ ID NO: 357847 - protein, 12 aa, Homo sapiens
  CDR3 for alpha chain variable domain of TCR clone 178924 (TRAV13-1, TRAJ21)
CAAKEGFNKFYF

SEQ ID NO: 357848 - protein, 13 aa, Homo sapiens
  CDR3 for beta chain variable domain of TCR clone 178924 (TRBV19, TRBJ1-2)
CASSVPGQDSYAF

SEQ ID NO: 357849 - protein, 14 aa, Homo sapiens
  CDR3 for alpha chain variable domain of TCR clone 178925 (TRAV38-1, TRAJ40)
CALRPTSGTYKYIF

SEQ ID NO: 357850 - protein, 14 aa, Homo sapiens
  CDR3 for beta chain variable domain of TCR clone 178925 (TRBV20-1, TRBJ2-7)
CSAKRGRSSYEQYF

SEQ ID NO: 357851 - protein, 15 aa, Homo sapiens
  CDR3 for alpha chain variable domain of TCR clone 178926 (TRAV21, TRAJ53)
CATLNSGGSNYKLTF

SEQ ID NO: 357852 - protein, 16 aa, Homo sapiens
  CDR3 for beta chain variable domain of TCR clone 178926 (TRBV24-1, TRBJ2-3)
CATSDPGTGVTDTQYF

SEQ ID NO: 357853 - protein, 14 aa, Homo sapiens
  CDR3 for alpha chain variable domain of TCR clone 178927 (TRAV1-2, TRAJ16)
CAVNRFSDGQKLLF

SEQ ID NO: 357854 - protein, 12 aa, Homo sapiens
  CDR3 for beta chain variable domain of TCR clone 178927 (TRBV5-1, TRBJ2-5)
CASSWDQETQFF

SEQ ID NO: 357855 - protein, 17 aa, Homo sapiens
  CDR3 for alpha chain variable domain of TCR clone 178928 (TRAV3, TRAJ42)
CAVRDRDYGGSQGNLIF

SEQ ID NO: 357856 - protein, 17 aa, Homo sapiens
  CDR3 for beta chain variable domain of TCR clone 178928 (TRBV20-1, TRBJ2-1)
CSAPPRLAGTRYNEQFF

SEQ ID NO: 357857 - protein, 16 aa, Homo sapiens
  CDR3 for alpha chain variable domain of TCR clone 178929 (TRAV23/DV6, TRAJ9)
CAASIGGNTGGFKTTF

SEQ ID NO: 357858 - protein, 15 aa, Homo sapiens
  CDR3 for beta chain variable domain of TCR clone 178929 (TRBV28, TRBJ1-3)
CASSMGWAAGNTIYF

SEQ ID NO: 357859 - protein, 19 aa, Homo sapiens
  CDR3 for alpha chain variable domain of TCR clone 178930 (TRAV1-2, TRAJ26)
CLLPLCCERPDNYGQNFVF

SEQ ID NO: 357860 - protein, 15 aa, Homo sapiens
  CDR3 for beta chain variable domain of TCR clone 178930 (TRBV9, TRBJ1-6)
CASSVAGTGESPLHF

SEQ ID NO: 357861 - protein, 12 aa, Homo sapiens
  CDR3 for alpha chain variable domain of TCR clone 178931 (TRAV13-2, TRAJ23)
CAERHRGGKLIF

SEQ ID NO: 357862 - protein, 16 aa, Homo sapiens
  CDR3 for beta chain variable domain of TCR clone 178931 (TRBV28, TRBJ2-7)
CASSLFFETGGPEQYF

SEQ ID NO: 357863 - protein, 13 aa, Homo sapiens
  CDR3 for alpha chain variable domain of TCR clone 178932 (TRAV12-3, TRAJ43)
CAMIRPNNNDMRF

SEQ ID NO: 357864 - protein, 12 aa, Homo sapiens
  CDR3 for beta chain variable domain of TCR clone 178932 (TRBV11-2, TRBJ2-5)
SASSLGQETQYF

SEQ ID NO: 357865 - protein, 14 aa, Homo sapiens
  CDR3 for alpha chain variable domain of TCR clone 178933 (TRAV29/DV5, TRAJ45)
CAASLRGGADGLAF

SEQ ID NO: 357866 - protein, 11 aa, Homo sapiens
  CDR3 for beta chain variable domain of TCR clone 178933 (TRBV11-2, TRBJ2-2)
CASSLPGELFF

SEQ ID NO: 357867 - protein, 14 aa, Homo sapiens
  CDR3 for alpha chain variable domain of TCR clone 178934 (TRAV29/DV5, TRAJ45)
CAPYSGGGADGLTF

SEQ ID NO: 357868 - protein, 13 aa, Homo sapiens
  CDR3 for beta chain variable domain of TCR clone 178934 (TRBV29-1, TRBJ2-3)
CSATRGGSDTQYF

SEQ ID NO: 357869 - protein, 13 aa, Homo sapiens
  CDR3 for alpha chain variable domain of TCR clone 178935 (TRAV35, TRAJ37)
CSVSSGNTGKLIF

SEQ ID NO: 357870 - protein, 16 aa, Homo sapiens
  CDR3 for beta chain variable domain of TCR clone 178935 (TRBV10-3, TRBJ2-1)
CAISLTSGNSYNEQFF

SEQ ID NO: 357871 - protein, 13 aa, Homo sapiens
  CDR3 for alpha chain variable domain of TCR clone 178936 (TRAV20, TRAJ20)
CAVRDFNDYKLSS

SEQ ID NO: 357872 - protein, 12 aa, Homo sapiens
  CDR3 for beta chain variable domain of TCR clone 178936 (TRBV9, TRBJ2-1)
CASSITYNEQFF

SEQ ID NO: 357873 - protein, 14 aa, Homo sapiens
  CDR3 for alpha chain variable domain of TCR clone 178937 (TRAV12-3, TRAJ10)
SHLPLTGGGNKLTF

SEQ ID NO: 357874 - protein, 18 aa, Homo sapiens
  CDR3 for beta chain variable domain of TCR clone 178937 (TRBV7-9, TRBJ2-7)
CVSSLTTSGSRTWYEQYF

SEQ ID NO: 357875 - protein, 13 aa, Homo sapiens
  CDR3 for alpha chain variable domain of TCR clone 178938 (TRAV29/DV5, TRAJ44)
CAASTGTASKLTF

SEQ ID NO: 357876 - protein, 15 aa, Homo sapiens
  CDR3 for beta chain variable domain of TCR clone 178938 (TRBV5-1, TRBJ2-7)
CASSLDLTSSYEQYF

SEQ ID NO: 357877 - protein, 11 aa, Homo sapiens
  CDR3 for alpha chain variable domain of TCR clone 178939 (TRAV2, TRAJ33)
CAVESNYQLIW

SEQ ID NO: 357878 - protein, 14 aa, Homo sapiens
  CDR3 for beta chain variable domain of TCR clone 178939 (TRBV19, TRBJ1-1)
CQYLGQIQNTEAFF

SEQ ID NO: 357879 - protein, 15 aa, Homo sapiens
  CDR3 for alpha chain variable domain of TCR clone 178940 (TRAV3, TRAJ5)
CAVRDRKTGRRALTF

SEQ ID NO: 357880 - protein, 13 aa, Homo sapiens
  CDR3 for beta chain variable domain of TCR clone 178940 (TRBV11-2, TRBJ2-5)
CASSFSSQETQYF

SEQ ID NO: 357881 - protein, 15 aa, Homo sapiens
  CDR3 for alpha chain variable domain of TCR clone 178941 (TRAV35, TRAJ40)
CAGQLGTSGTYKYIF

SEQ ID NO: 357882 - protein, 13 aa, Homo sapiens
  CDR3 for beta chain variable domain of TCR clone 178941 (TRBV7-3, TRBJ2-1)
CQSLAGGTNEQFF

SEQ ID NO: 357883 - protein, 12 aa, Homo sapiens
  CDR3 for alpha chain variable domain of TCR clone 178942 (TRAV16, TRAJ56)
CAPTGANSKLTF

SEQ ID NO: 357884 - protein, 17 aa, Homo sapiens
  CDR3 for beta chain variable domain of TCR clone 178942 (TRBV27, TRBJ2-6)
CASSLTGFASGANVLPF

SEQ ID NO: 357885 - protein, 13 aa, Homo sapiens
  CDR3 for alpha chain variable domain of TCR clone 178943 (TRAV12-3, TRAJ13)
CAMGTGGYQKVTF

SEQ ID NO: 357886 - protein, 14 aa, Homo sapiens
  CDR3 for beta chain variable domain of TCR clone 178943 (TRBV6-1, TRBJ2-7)
CASRRDIPSYEQYF

SEQ ID NO: 357887 - protein, 12 aa, Homo sapiens
  CDR3 for alpha chain variable domain of TCR clone 178944 (TRAV17, TRAJ57)
CATDGGSEKLVF

SEQ ID NO: 357888 - protein, 13 aa, Homo sapiens
  CDR3 for beta chain variable domain of TCR clone 178944 (TRBV7-9, TRBJ2-7)
CASSFSGAYEQYF

SEQ ID NO: 357889 - protein, 14 aa, Homo sapiens
  CDR3 for alpha chain variable domain of TCR clone 178945 (TRAV1-2, TRAJ16)
CAVNRFSDGQKLLF

SEQ ID NO: 357890 - protein, 14 aa, Homo sapiens
  CDR3 for beta chain variable domain of TCR clone 178945 (TRBV4-1, TRBJ2-2)
CASSQAVNPGELFF

SEQ ID NO: 357891 - protein, 15 aa, Homo sapiens
  CDR3 for alpha chain variable domain of TCR clone 178946 (TRAV35, TRAJ33)
CAGQPPRYSNYQLIW

SEQ ID NO: 357892 - protein, 14 aa, Homo sapiens
  CDR3 for beta chain variable domain of TCR clone 178946 (TRBV7-6, TRBJ2-3)
CASSLGTVTDMQYF

SEQ ID NO: 357893 - protein, 18 aa, Homo sapiens
  CDR3 for alpha chain variable domain of TCR clone 178947 (TRAV21, TRAJ52)
CAVSPSPAGGTSYGKLTV

SEQ ID NO: 357894 - protein, 17 aa, Homo sapiens
  CDR3 for beta chain variable domain of TCR clone 178947 (TRBV13, TRBJ2-3)
CASSLSRVAGGRNTQYF

SEQ ID NO: 357895 - protein, 14 aa, Homo sapiens
  CDR3 for alpha chain variable domain of TCR clone 178948 (TRAV12-2, TRAJ13)
CAVKKTGGYQKVTF

SEQ ID NO: 357896 - protein, 16 aa, Homo sapiens
  CDR3 for beta chain variable domain of TCR clone 178948 (TRBV7-8, TRBJ2-5)
CASSFGGQPTQETQYF

SEQ ID NO: 357897 - protein, 14 aa, Homo sapiens
  CDR3 for alpha chain variable domain of TCR clone 178949 (TRAV20, TRAJ32)
CCGRYGGATNKLIF

SEQ ID NO: 357898 - protein, 16 aa, Homo sapiens
  CDR3 for beta chain variable domain of TCR clone 178949 (TRBV19, TRBJ2-2)
CASRSPGTGVTGELFF

SEQ ID NO: 357899 - protein, 14 aa, Homo sapiens
  CDR3 for alpha chain variable domain of TCR clone 178950 (TRAV12-1, TRAJ17)
WLVNYKAAGNKLTF

SEQ ID NO: 357900 - protein, 14 aa, Homo sapiens
  CDR3 for beta chain variable domain of TCR clone 178950 (TRBV7-8, TRBJ2-3)
CASSLEAGTDTQYF

SEQ ID NO: 357901 - protein, 14 aa, Homo sapiens
  CDR3 for alpha chain variable domain of TCR clone 178951 (TRAV12-3, TRAJ29)
CAMILLSGNTPLVF

SEQ ID NO: 357902 - protein, 16 aa, Homo sapiens
  CDR3 for beta chain variable domain of TCR clone 178951 (TRBV28, TRBJ2-7)
YASSSGTSGRGYEQYF

SEQ ID NO: 357903 - protein, 12 aa, Homo sapiens
  CDR3 for alpha chain variable domain of TCR clone 178952 (TRAV3, TRAJ43)
CAVRDPNNDMRF

SEQ ID NO: 357904 - protein, 11 aa, Homo sapiens
  CDR3 for beta chain variable domain of TCR clone 178952 (TRBV11-2, TRBJ1-1)
CASSINTEAFF

SEQ ID NO: 357905 - protein, 14 aa, Homo sapiens
  CDR3 for alpha chain variable domain of TCR clone 178953 (TRAV8-4, TRAJ54)
CAVSEVLGAQKLVF

SEQ ID NO: 357906 - protein, 17 aa, Homo sapiens
  CDR3 for beta chain variable domain of TCR clone 178953 (TRBV4-1, TRBJ1-4)
CASSPEGPRGVEEKLFF

SEQ ID NO: 357907 - protein, 12 aa, Homo sapiens
  CDR3 for alpha chain variable domain of TCR clone 178954 (TRAV17, TRAJ53)
CAFGGSNYKLTF

SEQ ID NO: 357908 - protein, 16 aa, Homo sapiens
  CDR3 for beta chain variable domain of TCR clone 178954 (TRBV11-2, TRBJ2-4)
CASSQAGRGGLDIQYF

SEQ ID NO: 357909 - protein, 12 aa, Homo sapiens
  CDR3 for alpha chain variable domain of TCR clone 178955 (TRAV2, TRAJ31)
CAVEDNNARLMF

SEQ ID NO: 357910 - protein, 13 aa, Homo sapiens
  CDR3 for beta chain variable domain of TCR clone 178955 (TRBV7-7, TRBJ2-5)
CASSRSGQETQYF

SEQ ID NO: 357911 - protein, 14 aa, Homo sapiens
  CDR3 for alpha chain variable domain of TCR clone 178956 (TRAV1-2, TRAJ8)
CAVREDTGFQKLVF

SEQ ID NO: 357912 - protein, 12 aa, Homo sapiens
  CDR3 for beta chain variable domain of TCR clone 178956 (TRBV6-3, TRBJ2-7)
CASSEPGCEQYF

SEQ ID NO: 357913 - protein, 16 aa, Homo sapiens
  CDR3 for alpha chain variable domain of TCR clone 178957 (TRAV19, TRAJ20)
CALSGWRVPNDYKLSF

SEQ ID NO: 357914 - protein, 17 aa, Homo sapiens
  CDR3 for beta chain variable domain of TCR clone 178957 (TRBV11-2, TRBJ2-1)
CASSLYPPGVEYNEQFF

SEQ ID NO: 357915 - protein, 17 aa, Homo sapiens
  CDR3 for alpha chain variable domain of TCR clone 178958 (TRAV3, TRAJ42)
CAVRDRDYGGSQGNLIF

SEQ ID NO: 357916 - protein, 14 aa, Homo sapiens
  CDR3 for beta chain variable domain of TCR clone 178958 (TRBV19, TRBJ2-5)
CASSMRGQQETQYF

SEQ ID NO: 357917 - protein, 13 aa, Homo sapiens
  CDR3 for alpha chain variable domain of TCR clone 178959 (TRAV8-1, TRAJ28)
CAVSGAGSYRLTF

SEQ ID NO: 357918 - protein, 12 aa, Homo sapiens
  CDR3 for beta chain variable domain of TCR clone 178959 (TRBV12-4, TRBJ2-5)
CASGDYEETQYF

SEQ ID NO: 357919 - protein, 13 aa, Homo sapiens
  CDR3 for alpha chain variable domain of TCR clone 178960 (TRAV8-1, TRAJ23)
CAWRDNQRGKLIF

SEQ ID NO: 357920 - protein, 13 aa, Homo sapiens
  CDR3 for beta chain variable domain of TCR clone 178960 (TRBV20-1, TRBJ2-7)
CSATHTSGYEQYF

SEQ ID NO: 357921 - protein, 18 aa, Homo sapiens
  CDR3 for alpha chain variable domain of TCR clone 178961 (TRAV13-1, TRAJ52)
CAAKNPNAGGTSFGKLTF

SEQ ID NO: 357922 - protein, 14 aa, Homo sapiens
  CDR3 for beta chain variable domain of TCR clone 178961 (TRBV19, TRBJ2-1)
CASPTFVLSGEQFF

SEQ ID NO: 357923 - protein, 13 aa, Homo sapiens
  CDR3 for alpha chain variable domain of TCR clone 178962 (TRAV8-6, TRAJ49)
CAVITNTGNQFYF

SEQ ID NO: 357924 - protein, 13 aa, Homo sapiens
  CDR3 for beta chain variable domain of TCR clone 178962 (TRBV7-9, TRBJ2-5)
CASTPVGQETQYF

SEQ ID NO: 357925 - protein, 16 aa, Homo sapiens
  CDR3 for alpha chain variable domain of TCR clone 178963 (TRAV30, TRAJ24)
CGTAIVDADSWGKFQF

SEQ ID NO: 357926 - protein, 14 aa, Homo sapiens
  CDR3 for beta chain variable domain of TCR clone 178963 (TRBV12-5, TRBJ2-5)
CASGSRTHQETQHF

SEQ ID NO: 357927 - protein, 13 aa, Homo sapiens
  CDR3 for alpha chain variable domain of TCR clone 178964 (TRAV2, TRAJ40)
CAVVTPGTYKYIF

SEQ ID NO: 357928 - protein, 13 aa, Homo sapiens
  CDR3 for beta chain variable domain of TCR clone 178964 (TRBV7-3, TRBJ1-1)
CASSQDWGAEAFF

SEQ ID NO: 357929 - protein, 15 aa, Homo sapiens
  CDR3 for alpha chain variable domain of TCR clone 178965 (TRAV25, TRAJ52)
CAGTSGGTSYGKLTF

SEQ ID NO: 357930 - protein, 16 aa, Homo sapiens
  CDR3 for beta chain variable domain of TCR clone 178965 (TRBV15, TRBJ1-2)
CATSRGPRTGGSGYTF

SEQ ID NO: 357931 - protein, 13 aa, Homo sapiens
  CDR3 for alpha chain variable domain of TCR clone 178966 (TRAV12-3, TRAJ46)
CAVKKSSGDKLTL

SEQ ID NO: 357932 - protein, 13 aa, Homo sapiens
  CDR3 for beta chain variable domain of TCR clone 178966 (TRBV6-1, TRBJ2-1)
CASSHDRNNEQFF

SEQ ID NO: 357933 - protein, 14 aa, Homo sapiens
  CDR3 for alpha chain variable domain of TCR clone 178967 (TRAV1-1, TRAJ27)
CAVIYDTNAGKSTF

SEQ ID NO: 357934 - protein, 14 aa, Homo sapiens
  CDR3 for beta chain variable domain of TCR clone 178967 (TRBV4-2, TRBJ2-1)
CASGLDRAYNEQFF

SEQ ID NO: 357935 - protein, 11 aa, Homo sapiens
  CDR3 for alpha chain variable domain of TCR clone 178968 (TRAV2, TRAJ33)
CAVDSNYQLIW

SEQ ID NO: 357936 - protein, 14 aa, Homo sapiens
  CDR3 for beta chain variable domain of TCR clone 178968 (TRBV11-2, TRBJ2-3)
CASSRLARTDTKYF

SEQ ID NO: 357937 - protein, 11 aa, Homo sapiens
  CDR3 for alpha chain variable domain of TCR clone 178969 (TRAV1-2, TRAJ40)
SAVPGTYKYIF

SEQ ID NO: 357938 - protein, 15 aa, Homo sapiens
  CDR3 for beta chain variable domain of TCR clone 178969 (TRBV5-7, TRBJ1-5)
CASSYGKLWDQPQHF

SEQ ID NO: 357939 - protein, 14 aa, Homo sapiens
  CDR3 for alpha chain variable domain of TCR clone 178970 (TRAV17, TRAJ22)
CATSPSGSARQLTF

SEQ ID NO: 357940 - protein, 13 aa, Homo sapiens
  CDR3 for beta chain variable domain of TCR clone 178970 (TRBV12-4, TRBJ1-2)
CASSLRQGKGYSF

SEQ ID NO: 357941 - protein, 16 aa, Homo sapiens
  CDR3 for alpha chain variable domain of TCR clone 178971 (TRAV8-3, TRAJ10)
CAVGPILTGGGNRLTF

SEQ ID NO: 357942 - protein, 17 aa, Homo sapiens
  CDR3 for beta chain variable domain of TCR clone 178971 (TRBV13, TRBJ2-3)
CASSLSRVAGGRNTQYF

SEQ ID NO: 357943 - protein, 13 aa, Homo sapiens
  CDR3 for alpha chain variable domain of TCR clone 178972 (TRAV17, TRAJ26)
CATVDNYGQNFVF

SEQ ID NO: 357944 - protein, 13 aa, Homo sapiens
  CDR3 for beta chain variable domain of TCR clone 178972 (TRBV13, TRBJ2-5)
CQQLGPRGETQYF

SEQ ID NO: 357945 - protein, 15 aa, Homo sapiens
  CDR3 for alpha chain variable domain of TCR clone 178973 (TRAV27, TRAJ38)
CAARRNAGYNRKLIW

SEQ ID NO: 357946 - protein, 13 aa, Homo sapiens
  CDR3 for beta chain variable domain of TCR clone 178973 (TRBV12-5, TRBJ2-3)
CASGDRQSDMQYF

SEQ ID NO: 357947 - protein, 12 aa, Homo sapiens
  CDR3 for alpha chain variable domain of TCR clone 178974 (TRAV13-1, TRAJ27)
CADHTNAGKSTF

SEQ ID NO: 357948 - protein, 14 aa, Homo sapiens
  CDR3 for beta chain variable domain of TCR clone 178974 (TRBV19, TRBJ2-2)
CASSGQGIAGEPFF

SEQ ID NO: 357949 - protein, 11 aa, Homo sapiens
  CDR3 for alpha chain variable domain of TCR clone 178975 (TRAV3, TRAJ13)
CAVTSYQKVTF

SEQ ID NO: 357950 - protein, 13 aa, Homo sapiens
  CDR3 for beta chain variable domain of TCR clone 178975 (TRBV7-9, TRBJ1-1)
CASSLSGETEAFF

SEQ ID NO: 357951 - protein, 15 aa, Homo sapiens
  CDR3 for alpha chain variable domain of TCR clone 178976 (TRAV26-1, TRAJ17)
CIVRVVKAEGNKLTF

SEQ ID NO: 357952 - protein, 16 aa, Homo sapiens
  CDR3 for beta chain variable domain of TCR clone 178976 (TRBV7-9, TRBJ2-1)
CASSLVSGPSYNEQFF

SEQ ID NO: 357953 - protein, 12 aa, Homo sapiens
  CDR3 for alpha chain variable domain of TCR clone 178977 (TRAV13-1, TRAJ49)
CAAPNTDNQFYF

SEQ ID NO: 357954 - protein, 17 aa, Homo sapiens
  CDR3 for beta chain variable domain of TCR clone 178977 (TRBV25-1, TRBJ2-7)
CASSDARVVFSSYEQYF

SEQ ID NO: 357955 - protein, 15 aa, Homo sapiens
  CDR3 for alpha chain variable domain of TCR clone 178978 (TRAV19, TRAJ58)
CALSQGETSGSRLTF

SEQ ID NO: 357956 - protein, 19 aa, Homo sapiens
  CDR3 for beta chain variable domain of TCR clone 178978 (TRBV2, TRBJ2-7)
CASSDDETSGRANDYEQYF

SEQ ID NO: 357957 - protein, 17 aa, Homo sapiens
  CDR3 for alpha chain variable domain of TCR clone 178979 (TRAV16, TRAJ58)
CITVLSNGETSGSRLTF

SEQ ID NO: 357958 - protein, 17 aa, Homo sapiens
  CDR3 for beta chain variable domain of TCR clone 178979 (TRBV18, TRBJ2-1)
CARSKGLSGGADNEQFF

SEQ ID NO: 357959 - protein, 16 aa, Homo sapiens
  CDR3 for alpha chain variable domain of TCR clone 178980 (TRAV38-1, TRAJ45)
CAFMKGSGGGADGLNF

SEQ ID NO: 357960 - protein, 15 aa, Homo sapiens
  CDR3 for beta chain variable domain of TCR clone 178980 (TRBV20-1, TRBJ2-7)
CSAREGRDSLYEQYF

SEQ ID NO: 357961 - protein, 13 aa, Homo sapiens
  CDR3 for alpha chain variable domain of TCR clone 178981 (TRAV27, TRAJ41)
CSGEGNSGYALNF

SEQ ID NO: 357962 - protein, 13 aa, Homo sapiens
  CDR3 for beta chain variable domain of TCR clone 178981 (TRBV19, TRBJ1-2)
CASSVPGQDGYTF

SEQ ID NO: 357963 - protein, 12 aa, Homo sapiens
  CDR3 for alpha chain variable domain of TCR clone 178982 (TRAV16, TRAJ57)
CALEGGTEKLVF

SEQ ID NO: 357964 - protein, 12 aa, Homo sapiens
  CDR3 for beta chain variable domain of TCR clone 178982 (TRBV28, TRBJ2-7)
CASSGRPYEQYF

SEQ ID NO: 357965 - protein, 14 aa, Homo sapiens
  CDR3 for alpha chain variable domain of TCR clone 178983 (TRAV17, TRAJ49)
CATDARDTGNQFYF

SEQ ID NO: 357966 - protein, 12 aa, Homo sapiens
  CDR3 for beta chain variable domain of TCR clone 178983 (TRBV7-9, TRBJ1-6)
CASSLMTSPLHF

SEQ ID NO: 357967 - protein, 12 aa, Homo sapiens
  CDR3 for alpha chain variable domain of TCR clone 178984 (TRAV29/DV5, TRAJ49)
CAATDTGNQFYF

SEQ ID NO: 357968 - protein, 13 aa, Homo sapiens
  CDR3 for beta chain variable domain of TCR clone 178984 (TRBV11-2, TRBJ1-3)
CASSLEPVNTMYF

SEQ ID NO: 357969 - protein, 17 aa, Homo sapiens
  CDR3 for alpha chain variable domain of TCR clone 178985 (TRAV17, TRAJ52)
CATVPIGGGTSYGKLTF

SEQ ID NO: 357970 - protein, 11 aa, Homo sapiens
  CDR3 for beta chain variable domain of TCR clone 178985 (TRBV7-9, TRBJ2-3)
CASSPTDTQYF

SEQ ID NO: 357971 - protein, 10 aa, Homo sapiens
  CDR3 for alpha chain variable domain of TCR clone 178986 (TRAV30, TRAJ48)
CGIGNEKLTF

SEQ ID NO: 357972 - protein, 15 aa, Homo sapiens
  CDR3 for beta chain variable domain of TCR clone 178986 (TRBV20-1, TRBJ2-6)
CSAPGAHSGANVLTF

SEQ ID NO: 357973 - protein, 12 aa, Homo sapiens
  CDR3 for alpha chain variable domain of TCR clone 178987 (TRAV12-2, TRAJ47)
CAVMEYGNKLVF

SEQ ID NO: 357974 - protein, 15 aa, Homo sapiens
  CDR3 for beta chain variable domain of TCR clone 178987 (TRBV10-2, TRBJ2-6)
CASSEQGTGANVLTF

SEQ ID NO: 357975 - protein, 13 aa, Homo sapiens
  CDR3 for alpha chain variable domain of TCR clone 178988 (TRAV16, TRAJ31)
CALSAHNNARLMF

SEQ ID NO: 357976 - protein, 17 aa, Homo sapiens
  CDR3 for beta chain variable domain of TCR clone 178988 (TRBV12-4, TRBJ2-1)
CASTPGLAGGRINEQFF

SEQ ID NO: 357977 - protein, 12 aa, Homo sapiens
  CDR3 for alpha chain variable domain of TCR clone 178989 (TRAV38-1, TRAJ47)
CAFATYGNKLVF

SEQ ID NO: 357978 - protein, 15 aa, Homo sapiens
  CDR3 for beta chain variable domain of TCR clone 178989 (TRBV20-1, TRBJ2-7)
CSARKGLAESYEQYF

SEQ ID NO: 357979 - protein, 12 aa, Homo sapiens
  CDR3 for alpha chain variable domain of TCR clone 178990 (TRAV27, TRAJ34)
CAGAKNTDKLIF

SEQ ID NO: 357980 - protein, 13 aa, Homo sapiens
  CDR3 for beta chain variable domain of TCR clone 178990 (TRBV4-1, TRBJ2-5)
CASSQEVQETQYF

SEQ ID NO: 357981 - protein, 14 aa, Homo sapiens
  CDR3 for alpha chain variable domain of TCR clone 178991 (TRAV1-2, TRAJ16)
CAVNRFSDGQKLLF

SEQ ID NO: 357982 - protein, 13 aa, Homo sapiens
  CDR3 for beta chain variable domain of TCR clone 178991 (TRBV27, TRBJ1-1)
CSSSLSIGAEAFF

SEQ ID NO: 357983 - protein, 10 aa, Homo sapiens
  CDR3 for alpha chain variable domain of TCR clone 178992 (TRAV23/DV6, TRAJ57)
CAASSTLSQG

SEQ ID NO: 357984 - protein, 15 aa, Homo sapiens
  CDR3 for beta chain variable domain of TCR clone 178992 (TRBV29-1, TRBJ2-6)
CSVGDRGSGANVLTF

SEQ ID NO: 357985 - protein, 13 aa, Homo sapiens
  CDR3 for alpha chain variable domain of TCR clone 178993 (TRAV13-2, TRAJ53)
YAENMGSNYKLTF

SEQ ID NO: 357986 - protein, 13 aa, Homo sapiens
  CDR3 for beta chain variable domain of TCR clone 178993 (TRBV4-1, TRBJ2-2)
CASSQENTGELFF

SEQ ID NO: 357987 - protein, 15 aa, Homo sapiens
  CDR3 for alpha chain variable domain of TCR clone 178994 (TRAV3, TRAJ20)
CAVRDSRSNDYKLSF

SEQ ID NO: 357988 - protein, 13 aa, Homo sapiens
  CDR3 for beta chain variable domain of TCR clone 178994 (TRBV7-2, TRBJ2-1)
CASNRDRWNEQFF

SEQ ID NO: 357989 - protein, 14 aa, Homo sapiens
  CDR3 for alpha chain variable domain of TCR clone 178995 (TRAV1-2, TRAJ8)
CAAREDTGFQKLVF

SEQ ID NO: 357990 - protein, 13 aa, Homo sapiens
  CDR3 for beta chain variable domain of TCR clone 178995 (TRBV10-3, TRBJ1-2)
CAISERDSYGYTF

SEQ ID NO: 357991 - protein, 15 aa, Homo sapiens
  CDR3 for alpha chain variable domain of TCR clone 178996 (TRAV8-2, TRAJ40)
CVVLGTTSGTYKYIF

SEQ ID NO: 357992 - protein, 16 aa, Homo sapiens
  CDR3 for beta chain variable domain of TCR clone 178996 (TRBV7-3, TRBJ2-1)
CASSLEGYRSYNEQFF

SEQ ID NO: 357993 - protein, 15 aa, Homo sapiens
  CDR3 for alpha chain variable domain of TCR clone 178997 (TRAV14/DV4, TRAJ26)
CAMREGQNYGQNFVF

SEQ ID NO: 357994 - protein, 13 aa, Homo sapiens
  CDR3 for beta chain variable domain of TCR clone 178997 (TRBV24-1, TRBJ2-2)
CATSDWSTGELLF

SEQ ID NO: 357995 - protein, 15 aa, Homo sapiens
  CDR3 for alpha chain variable domain of TCR clone 178998 (TRAV12-3, TRAJ6)
CAMSATTGGSYIPTF

SEQ ID NO: 357996 - protein, 16 aa, Homo sapiens
  CDR3 for beta chain variable domain of TCR clone 178998 (TRBV15, TRBJ1-2)
CATSRGPRTGGGGYTF

SEQ ID NO: 357997 - protein, 17 aa, Homo sapiens
  CDR3 for alpha chain variable domain of TCR clone 178999 (TRAV13-1, TRAJ52)
CAASSGADGTSYGKLTF

SEQ ID NO: 357998 - protein, 17 aa, Homo sapiens
  CDR3 for beta chain variable domain of TCR clone 178999 (TRBV11-2, TRBJ2-1)
CASSLYPPGVEYNEQFF

SEQ ID NO: 357999 - protein, 14 aa, Homo sapiens
  CDR3 for alpha chain variable domain of TCR clone 179000 (TRAV1-2, TRAJ8)
CAAREETGFQKLVF

SEQ ID NO: 358000 - protein, 13 aa, Homo sapiens
  CDR3 for beta chain variable domain of TCR clone 179000 (TRBV19, TRBJ1-2)
CASSVPGQDGYTF

SEQ ID NO: 358001 - protein, 12 aa, Homo sapiens
  CDR3 for alpha chain variable domain of TCR clone 179001 (TRAV8-6, TRAJ39)
CAVTTEQATCSP

SEQ ID NO: 358002 - protein, 14 aa, Homo sapiens
  CDR3 for beta chain variable domain of TCR clone 179001 (TRBV7-2, TRBJ2-7)
CASSPKTSFYEQYF

SEQ ID NO: 358003 - protein, 13 aa, Homo sapiens
  CDR3 for alpha chain variable domain of TCR clone 179002 (TRAV35, TRAJ44)
CAGLSGTASKLTF

SEQ ID NO: 358004 - protein, 14 aa, Homo sapiens
  CDR3 for beta chain variable domain of TCR clone 179002 (TRBV7-9, TRBJ1-1)
CASSSTKGNTEAFF

SEQ ID NO: 358005 - protein, 13 aa, Homo sapiens
  CDR3 for alpha chain variable domain of TCR clone 179003 (TRAV21, TRAJ27)
CAARPGNAGKSTL

SEQ ID NO: 358006 - protein, 15 aa, Homo sapiens
  CDR3 for beta chain variable domain of TCR clone 179003 (TRBV20-1, TRBJ2-7)
CSAGDRVSGMDEQYF

SEQ ID NO: 358007 - protein, 18 aa, Homo sapiens
  CDR3 for alpha chain variable domain of TCR clone 179004 (TRAV21, TRAJ52)
CAVRPSPAGGTIYGKLTF

SEQ ID NO: 358008 - protein, 17 aa, Homo sapiens
  CDR3 for beta chain variable domain of TCR clone 179004 (TRBV13, TRBJ2-3)
CASSLSRVEGGRNTQYF

SEQ ID NO: 358009 - protein, 13 aa, Homo sapiens
  CDR3 for alpha chain variable domain of TCR clone 179005 (TRAV12-1, TRAJ21)
CVVTLYNFNKFYF

SEQ ID NO: 358010 - protein, 13 aa, Homo sapiens
  CDR3 for beta chain variable domain of TCR clone 179005 (TRBV7-7, TRBJ1-1)
CASSLGANTEAFF

SEQ ID NO: 358011 - protein, 13 aa, Homo sapiens
  CDR3 for alpha chain variable domain of TCR clone 179006 (TRAV27, TRAJ6)
CAGGTRGSYIPAF

SEQ ID NO: 358012 - protein, 14 aa, Homo sapiens
  CDR3 for beta chain variable domain of TCR clone 179006 (TRBV6-3, TRBJ1-1)
CASSYQRRDTEAFF

SEQ ID NO: 358013 - protein, 17 aa, Homo sapiens
  CDR3 for alpha chain variable domain of TCR clone 179007 (TRAV17, TRAJ28)
CATDPRRGGGGGYQLTF

SEQ ID NO: 358014 - protein, 16 aa, Homo sapiens
  CDR3 for beta chain variable domain of TCR clone 179007 (TRBV25-1, TRBJ1-1)
CASSGDRDRGRIEAFF

SEQ ID NO: 358015 - protein, 12 aa, Homo sapiens
  CDR3 for alpha chain variable domain of TCR clone 179008 (TRAV21, TRAJ33)
FAKMDSKYQLIW

SEQ ID NO: 358016 - protein, 14 aa, Homo sapiens
  CDR3 for beta chain variable domain of TCR clone 179008 (TRBV2, TRBJ2-7)
CASSLTSGGYEQYF

SEQ ID NO: 358017 - protein, 15 aa, Homo sapiens
  CDR3 for alpha chain variable domain of TCR clone 179009 (TRAV27, TRAJ38)
CAARRNAGNNRKLIM

SEQ ID NO: 358018 - protein, 14 aa, Homo sapiens
  CDR3 for beta chain variable domain of TCR clone 179009 (TRBV7-8, TRBJ2-3)
CASSLEAGTDTQYF

SEQ ID NO: 358019 - protein, 14 aa, Homo sapiens
  CDR3 for alpha chain variable domain of TCR clone 179010 (TRAV17, TRAJ49)
CATDARDTGNQLYF

SEQ ID NO: 358020 - protein, 14 aa, Homo sapiens
  CDR3 for beta chain variable domain of TCR clone 179010 (TRBV5-5, TRBJ1-2)
CASSFGQINHGYTF

SEQ ID NO: 358021 - protein, 15 aa, Homo sapiens
  CDR3 for alpha chain variable domain of TCR clone 179011 (TRAV17, TRAJ35)
CATAFVIGFGNVLHC

SEQ ID NO: 358022 - protein, 16 aa, Homo sapiens
  CDR3 for beta chain variable domain of TCR clone 179011 (TRBV11-2, TRBJ2-7)
CASRPLAGGPRYEQYF

SEQ ID NO: 358023 - protein, 13 aa, Homo sapiens
  CDR3 for alpha chain variable domain of TCR clone 179012 (TRAV20, TRAJ37)
CAGCSSNTGKLIF

SEQ ID NO: 358024 - protein, 17 aa, Homo sapiens
  CDR3 for beta chain variable domain of TCR clone 179012 (TRBV20-1, TRBJ2-3)
CSASLLGRGGSADTQYF

SEQ ID NO: 358025 - protein, 12 aa, Homo sapiens
  CDR3 for alpha chain variable domain of TCR clone 179013 (TRAV8-3, TRAJ26)
CAGDDYGQNFVF

SEQ ID NO: 358026 - protein, 16 aa, Homo sapiens
  CDR3 for beta chain variable domain of TCR clone 179013 (TRBV4-3, TRBJ2-1)
CASSPALDRGVNEQFF

SEQ ID NO: 358027 - protein, 16 aa, Homo sapiens
  CDR3 for alpha chain variable domain of TCR clone 179014 (TRAV35, TRAJ28)
CAGQEYSGAGSYQLTF

SEQ ID NO: 358028 - protein, 13 aa, Homo sapiens
  CDR3 for beta chain variable domain of TCR clone 179014 (TRBV7-3, TRBJ1-1)
CASSQDWGAEAFF

SEQ ID NO: 358029 - protein, 12 aa, Homo sapiens
  CDR3 for alpha chain variable domain of TCR clone 179015 (TRAV27, TRAJ9)
CAGESGGFKNIF

SEQ ID NO: 358030 - protein, 18 aa, Homo sapiens
  CDR3 for beta chain variable domain of TCR clone 179015 (TRBV10-2, TRBJ2-2)
CMSAPAVHRQADAGELFF

SEQ ID NO: 358031 - protein, 17 aa, Homo sapiens
  CDR3 for alpha chain variable domain of TCR clone 179016 (TRAV3, TRAJ6)
CAVRDGPRAGGSYRPTF

SEQ ID NO: 358032 - protein, 14 aa, Homo sapiens
  CDR3 for beta chain variable domain of TCR clone 179016 (TRBV7-2, TRBJ2-7)
CASNPKTSFYEQYF

SEQ ID NO: 358033 - protein, 13 aa, Homo sapiens
  CDR3 for alpha chain variable domain of TCR clone 179017 (TRAV12-3, TRAJ40)
CAMSARGTYKYIF

SEQ ID NO: 358034 - protein, 15 aa, Homo sapiens
  CDR3 for beta chain variable domain of TCR clone 179017 (TRBV9, TRBJ1-6)
CASSVAGTGDSPLHV

SEQ ID NO: 358035 - protein, 14 aa, Homo sapiens
  CDR3 for alpha chain variable domain of TCR clone 179018 (TRAV2, TRAJ23)
RAVIIYNQGGKLIF

SEQ ID NO: 358036 - protein, 13 aa, Homo sapiens
  CDR3 for beta chain variable domain of TCR clone 179018 (TRBV20-1, TRBJ2-3)
CSATSGGAGTQYF

SEQ ID NO: 358037 - protein, 13 aa, Homo sapiens
  CDR3 for alpha chain variable domain of TCR clone 179019 (TRAV21, TRAJ57)
CAVTQGGSEKLVF

SEQ ID NO: 358038 - protein, 12 aa, Homo sapiens
  CDR3 for beta chain variable domain of TCR clone 179019 (TRBV7-8, TRBJ2-7)
CASSLAGYEQYF

SEQ ID NO: 358039 - protein, 17 aa, Homo sapiens
  CDR3 for alpha chain variable domain of TCR clone 179020 (TRAV3, TRAJ6)
CAVRDGPRAGGAYIPTF

SEQ ID NO: 358040 - protein, 14 aa, Homo sapiens
  CDR3 for beta chain variable domain of TCR clone 179020 (TRBV7-2, TRBJ2-7)
CASSPKTSFYEQYF

SEQ ID NO: 358041 - protein, 18 aa, Homo sapiens
  CDR3 for alpha chain variable domain of TCR clone 179021 (TRAV26-1, TRAJ5)
CIVRVVPPRDTGRSALTF

SEQ ID NO: 358042 - protein, 15 aa, Homo sapiens
  CDR3 for beta chain variable domain of TCR clone 179021 (TRBV7-9, TRBJ2-7)
CASSLPMGQANEQYS

SEQ ID NO: 358043 - protein, 13 aa, Homo sapiens
  CDR3 for alpha chain variable domain of TCR clone 179022 (TRAV8-3, TRAJ43)
CAVGPDNNNDMRF

SEQ ID NO: 358044 - protein, 12 aa, Homo sapiens
  CDR3 for beta chain variable domain of TCR clone 179022 (TRBV7-2, TRBJ1-6)
FASSLSSSPLHF

SEQ ID NO: 358045 - protein, 16 aa, Homo sapiens
  CDR3 for alpha chain variable domain of TCR clone 179023 (TRAV30, TRAJ24)
CGTEIVDADSWGKFQF

SEQ ID NO: 358046 - protein, 16 aa, Homo sapiens
  CDR3 for beta chain variable domain of TCR clone 179023 (TRBV4-3, TRBJ2-1)
CASSTALDRGVNEQFF

SEQ ID NO: 358047 - protein, 15 aa, Homo sapiens
  CDR3 for alpha chain variable domain of TCR clone 179024 (TRAV8-2, TRAJ28)
WVVSESGAGSYQLTF

SEQ ID NO: 358048 - protein, 16 aa, Homo sapiens
  CDR3 for beta chain variable domain of TCR clone 179024 (TRBV10-3, TRBJ2-1)
CAISLTSGNSYNEQFF

SEQ ID NO: 358049 - protein, 13 aa, Homo sapiens
  CDR3 for alpha chain variable domain of TCR clone 179025 (TRAV13-1, TRAJ9)
CAARITGGFKTIF

SEQ ID NO: 358050 - protein, 13 aa, Homo sapiens
  CDR3 for beta chain variable domain of TCR clone 179025 (TRBV7-2, TRBJ2-7)
CASSSPSGSEQYF

SEQ ID NO: 358051 - protein, 12 aa, Homo sapiens
  CDR3 for alpha chain variable domain of TCR clone 179026 (TRAV12-3, TRAJ41)
CAMSYSGYAPNI

SEQ ID NO: 358052 - protein, 13 aa, Homo sapiens
  CDR3 for beta chain variable domain of TCR clone 179026 (TRBV7-3, TRBJ2-1)
CASSLDSYNEQFF

SEQ ID NO: 358053 - protein, 14 aa, Homo sapiens
  CDR3 for alpha chain variable domain of TCR clone 179027 (TRAV3, TRAJ34)
CAVRDINNTDKLIF

SEQ ID NO: 358054 - protein, 15 aa, Homo sapiens
  CDR3 for beta chain variable domain of TCR clone 179027 (TRBV20-1, TRBJ2-7)
RSARDRVSGMDEQYF

SEQ ID NO: 358055 - protein, 18 aa, Homo sapiens
  CDR3 for alpha chain variable domain of TCR clone 179028 (TRAV26-1, TRAJ23)
CIVRVGLEVWNQGGKLIS

SEQ ID NO: 358056 - protein, 16 aa, Homo sapiens
  CDR3 for beta chain variable domain of TCR clone 179028 (TRBV12-4, TRBJ2-5)
CASSFVVRGRQETQYF

SEQ ID NO: 358057 - protein, 12 aa, Homo sapiens
  CDR3 for alpha chain variable domain of TCR clone 179029 (TRAV13-2, TRAJ39)
CAESRPGNMLTF

SEQ ID NO: 358058 - protein, 13 aa, Homo sapiens
  CDR3 for beta chain variable domain of TCR clone 179029 (TRBV7-3, TRBJ1-1)
CASSQDWGAEAFF

SEQ ID NO: 358059 - protein, 13 aa, Homo sapiens
  CDR3 for alpha chain variable domain of TCR clone 179030 (TRAV30, TRAJ6)
CGTEAGGSYIPTF

SEQ ID NO: 358060 - protein, 17 aa, Homo sapiens
  CDR3 for beta chain variable domain of TCR clone 179030 (TRBV13, TRBJ2-3)
CASSLSRVAGGRNTQYF

SEQ ID NO: 358061 - protein, 10 aa, Homo sapiens
  CDR3 for alpha chain variable domain of TCR clone 179031 (TRAV30, TRAJ24)
WAQRLWMLTA

SEQ ID NO: 358062 - protein, 14 aa, Homo sapiens
  CDR3 for beta chain variable domain of TCR clone 179031 (TRBV12-5, TRBJ2-5)
CASGSRTHQETQYF

SEQ ID NO: 358063 - protein, 12 aa, Homo sapiens
  CDR3 for alpha chain variable domain of TCR clone 179032 (TRAV38-2/DV8, TRAJ57)
CAWKGGSEKMVF

SEQ ID NO: 358064 - protein, 13 aa, Homo sapiens
  CDR3 for beta chain variable domain of TCR clone 179032 (TRBV5-1, TRBJ1-5)
CASSLAQDQPQQF

SEQ ID NO: 358065 - protein, 16 aa, Homo sapiens
  CDR3 for alpha chain variable domain of TCR clone 179033 (TRAV30, TRAJ24)
CGTEIVDADSWGKFQF

SEQ ID NO: 358066 - protein, 14 aa, Homo sapiens
  CDR3 for beta chain variable domain of TCR clone 179033 (TRBV2, TRBJ1-5)
CASSENRGGQPQHF

SEQ ID NO: 358067 - protein, 11 aa, Homo sapiens
  CDR3 for alpha chain variable domain of TCR clone 179034 (TRAV21, TRAJ11)
CAVNGYSTLTF

SEQ ID NO: 358068 - protein, 13 aa, Homo sapiens
  CDR3 for beta chain variable domain of TCR clone 179034 (TRBV7-3, TRBJ1-1)
CASSQDWGAEAVF

SEQ ID NO: 358069 - protein, 11 aa, Homo sapiens
  CDR3 for alpha chain variable domain of TCR clone 179035 (TRAV20, TRAJ23)
CACNQGGKRIF

SEQ ID NO: 358070 - protein, 16 aa, Homo sapiens
  CDR3 for beta chain variable domain of TCR clone 179035 (TRBV7-8, TRBJ2-5)
CASSVGGQPAQETQYF

SEQ ID NO: 358071 - protein, 11 aa, Homo sapiens
  CDR3 for alpha chain variable domain of TCR clone 179036 (TRAV13-1, TRAJ5)
CAPKGRRALTF

SEQ ID NO: 358072 - protein, 13 aa, Homo sapiens
  CDR3 for beta chain variable domain of TCR clone 179036 (TRBV12-4, TRBJ2-7)
CASSPTETYEQYF

SEQ ID NO: 358073 - protein, 11 aa, Homo sapiens
  CDR3 for alpha chain variable domain of TCR clone 179037 (TRAV8-2, TRAJ45)
CTGGGADGLTF

SEQ ID NO: 358074 - protein, 14 aa, Homo sapiens
  CDR3 for beta chain variable domain of TCR clone 179037 (TRBV18, TRBJ2-7)
CASSPRGGAYEQYF

SEQ ID NO: 358075 - protein, 14 aa, Homo sapiens
  CDR3 for alpha chain variable domain of TCR clone 179038 (TRAV2, TRAJ37)
CAVDFTSNTGKLTF

SEQ ID NO: 358076 - protein, 13 aa, Homo sapiens
  CDR3 for beta chain variable domain of TCR clone 179038 (TRBV2, TRBJ2-7)
CASSVGGSGEQYF

SEQ ID NO: 358077 - protein, 13 aa, Homo sapiens
  CDR3 for alpha chain variable domain of TCR clone 179039 (TRAV20, TRAJ45)
CAVKKRRCRRTHL

SEQ ID NO: 358078 - protein, 12 aa, Homo sapiens
  CDR3 for beta chain variable domain of TCR clone 179039 (TRBV28, TRBJ2-3)
CASSLYRDTQYF

SEQ ID NO: 358079 - protein, 14 aa, Homo sapiens
  CDR3 for alpha chain variable domain of TCR clone 179040 (TRAV1-2, TRAJ16)
CAVNRFSDGRKLLF

SEQ ID NO: 358080 - protein, 15 aa, Homo sapiens
  CDR3 for beta chain variable domain of TCR clone 179040 (TRBV5-1, TRBJ2-1)
CASSPPRAPYNEQFF

SEQ ID NO: 358081 - protein, 15 aa, Homo sapiens
  CDR3 for alpha chain variable domain of TCR clone 179041 (TRAV13-1, TRAJ36)
CAASIRQTGANNLFF

SEQ ID NO: 358082 - protein, 14 aa, Homo sapiens
  CDR3 for beta chain variable domain of TCR clone 179041 (TRBV6-1, TRBJ1-3)
FASVQGGGGNSIYF

SEQ ID NO: 358083 - protein, 12 aa, Homo sapiens
  CDR3 for alpha chain variable domain of TCR clone 179042 (TRAV13-2, TRAJ23)
CAERHRGGKLIF

SEQ ID NO: 358084 - protein, 16 aa, Homo sapiens
  CDR3 for beta chain variable domain of TCR clone 179042 (TRBV20-1, TRBJ1-4)
CSVQGQGLLTNEKLFF

SEQ ID NO: 358085 - protein, 17 aa, Homo sapiens
  CDR3 for alpha chain variable domain of TCR clone 179043 (TRAV38-2/DV8, TRAJ56)
CAYRSEVGTGANSKLKF

SEQ ID NO: 358086 - protein, 14 aa, Homo sapiens
  CDR3 for beta chain variable domain of TCR clone 179043 (TRBV11-1, TRBJ1-1)
CASSLEHPNTEAFF

SEQ ID NO: 358087 - protein, 16 aa, Homo sapiens
  CDR3 for alpha chain variable domain of TCR clone 179044 (TRAV30, TRAJ24)
CGTEIVDADSWGKFQF

SEQ ID NO: 358088 - protein, 15 aa, Homo sapiens
  CDR3 for beta chain variable domain of TCR clone 179044 (TRBV20-1, TRBJ1-4)
CSARREWGVNEKLFF

SEQ ID NO: 358089 - protein, 14 aa, Homo sapiens
  CDR3 for alpha chain variable domain of TCR clone 179045 (TRAV1-2, TRAJ16)
CAVNRFSDGQKLLF

SEQ ID NO: 358090 - protein, 16 aa, Homo sapiens
  CDR3 for beta chain variable domain of TCR clone 179045 (TRBV5-1, TRBJ2-7)
CASSYASTSSGGEQYF

SEQ ID NO: 358091 - protein, 17 aa, Homo sapiens
  CDR3 for alpha chain variable domain of TCR clone 179046 (TRAV36/DV7, TRAJ52)
CAVAQRAGGTSYGKLTF

SEQ ID NO: 358092 - protein, 14 aa, Homo sapiens
  CDR3 for beta chain variable domain of TCR clone 179046 (TRBV27, TRBJ1-1)
CASSLLNGKGQGVF

SEQ ID NO: 358093 - protein, 14 aa, Homo sapiens
  CDR3 for alpha chain variable domain of TCR clone 179047 (TRAV17, TRAJ12)
CATDRADSSYKLIF

SEQ ID NO: 358094 - protein, 16 aa, Homo sapiens
  CDR3 for beta chain variable domain of TCR clone 179047 (TRBV11-2, TRBJ2-1)
CASSYRLAGVWNEQFF

SEQ ID NO: 358095 - protein, 14 aa, Homo sapiens
  CDR3 for alpha chain variable domain of TCR clone 179048 (TRAV12-3, TRAJ57)
CAMSAWGGSEKLVF

SEQ ID NO: 358096 - protein, 15 aa, Homo sapiens
  CDR3 for beta chain variable domain of TCR clone 179048 (TRBV20-1, TRBJ1-5)
CSAFKTGQRNQPQHF

SEQ ID NO: 358097 - protein, 17 aa, Homo sapiens
  CDR3 for alpha chain variable domain of TCR clone 179049 (TRAV8-6, TRAJ58)
CAVSSWVGETRGSTLTF

SEQ ID NO: 358098 - protein, 14 aa, Homo sapiens
  CDR3 for beta chain variable domain of TCR clone 179049 (TRBV4-2, TRBJ2-1)
CASGLDRAYNEQFF

SEQ ID NO: 358099 - protein, 14 aa, Homo sapiens
  CDR3 for alpha chain variable domain of TCR clone 179050 (TRAV38-2/DV8, TRAJ23)
CAYRKPNQGGKLIF

SEQ ID NO: 358100 - protein, 15 aa, Homo sapiens
  CDR3 for beta chain variable domain of TCR clone 179050 (TRBV29-1, TRBJ2-1)
CSVGRHALFYNEQFF

SEQ ID NO: 358101 - protein, 17 aa, Homo sapiens
  CDR3 for alpha chain variable domain of TCR clone 179051 (TRAV12-3, TRAJ6)
CAMSARGGAGGSYIPTF

SEQ ID NO: 358102 - protein, 13 aa, Homo sapiens
  CDR3 for beta chain variable domain of TCR clone 179051 (TRBV7-2, TRBJ1-1)
CASNLKGAKVAFF

SEQ ID NO: 358103 - protein, 14 aa, Homo sapiens
  CDR3 for alpha chain variable domain of TCR clone 179052 (TRAV3, TRAJ37)
CAVKESGNTGKLIF

SEQ ID NO: 358104 - protein, 13 aa, Homo sapiens
  CDR3 for beta chain variable domain of TCR clone 179052 (TRBV25-1, TRBJ1-1)
CQHPPGGNTEAFF

SEQ ID NO: 358105 - protein, 12 aa, Homo sapiens
  CDR3 for alpha chain variable domain of TCR clone 179053 (TRAV12-3, TRAJ17)
CAMPLTGNKLTF

SEQ ID NO: 358106 - protein, 15 aa, Homo sapiens
  CDR3 for beta chain variable domain of TCR clone 179053 (TRBV6-6, TRBJ2-5)
CASSPGGGLEETQYF

SEQ ID NO: 358107 - protein, 14 aa, Homo sapiens
  CDR3 for alpha chain variable domain of TCR clone 179054 (TRAV12-2, TRAJ17)
CAVLFKAAGNKLTF

SEQ ID NO: 358108 - protein, 16 aa, Homo sapiens
  CDR3 for beta chain variable domain of TCR clone 179054 (TRBV2, TRBJ2-1)
CASRPRSGGPYGEQFF

SEQ ID NO: 358109 - protein, 14 aa, Homo sapiens
  CDR3 for alpha chain variable domain of TCR clone 179055 (TRAV29/DV5, TRAJ44)
CAAFLVGTASKLTF

SEQ ID NO: 358110 - protein, 20 aa, Homo sapiens
  CDR3 for beta chain variable domain of TCR clone 179055 (TRBV7-8, TRBJ2-2)
CASSHLFPGPTIHITGELFF

SEQ ID NO: 358111 - protein, 14 aa, Homo sapiens
  CDR3 for alpha chain variable domain of TCR clone 179056 (TRAV2, TRAJ9)
CAVDPNTGGFKTIF

SEQ ID NO: 358112 - protein, 17 aa, Homo sapiens
  CDR3 for beta chain variable domain of TCR clone 179056 (TRBV20-1, TRBJ1-5)
CSASLSPGQGGNQPQHF

SEQ ID NO: 358113 - protein, 13 aa, Homo sapiens
  CDR3 for alpha chain variable domain of TCR clone 179057 (TRAV26-1, TRAJ34)
CIFRPWITDKLIF

SEQ ID NO: 358114 - protein, 13 aa, Homo sapiens
  CDR3 for beta chain variable domain of TCR clone 179057 (TRBV5-1, TRBJ2-1)
CPSSLGSYNEQFF

SEQ ID NO: 358115 - protein, 15 aa, Homo sapiens
  CDR3 for alpha chain variable domain of TCR clone 179058 (TRAV26-1, TRAJ15)
CIVRAANQAGTALIF

SEQ ID NO: 358116 - protein, 15 aa, Homo sapiens
  CDR3 for beta chain variable domain of TCR clone 179058 (TRBV20-1, TRBJ1-1)
CSDRSAATSNTEAFF

SEQ ID NO: 358117 - protein, 14 aa, Homo sapiens
  CDR3 for alpha chain variable domain of TCR clone 179059 (TRAV8-6, TRAJ12)
CAVKAADSSYKLIF

SEQ ID NO: 358118 - protein, 15 aa, Homo sapiens
  CDR3 for beta chain variable domain of TCR clone 179059 (TRBV5-1, TRBJ2-5)
CASSLGLAEQKTQYF

SEQ ID NO: 358119 - protein, 13 aa, Homo sapiens
  CDR3 for alpha chain variable domain of TCR clone 179060 (TRAV12-1, TRAJ22)
CVVYSGSARQLIF

SEQ ID NO: 358120 - protein, 15 aa, Homo sapiens
  CDR3 for beta chain variable domain of TCR clone 179060 (TRBV20-1, TRBJ2-7)
CSARDRVSGMDEQYF

SEQ ID NO: 358121 - protein, 15 aa, Homo sapiens
  CDR3 for alpha chain variable domain of TCR clone 179061 (TRAV17, TRAJ56)
CATDANTGANSKLTF

SEQ ID NO: 358122 - protein, 16 aa, Homo sapiens
  CDR3 for beta chain variable domain of TCR clone 179061 (TRBV7-3, TRBJ2-2)
CDSSLKRGTLSGELFF

SEQ ID NO: 358123 - protein, 14 aa, Homo sapiens
  CDR3 for alpha chain variable domain of TCR clone 179062 (TRAV12-3, TRAJ10)
SHLPLTGGGNKLTF

SEQ ID NO: 358124 - protein, 14 aa, Homo sapiens
  CDR3 for beta chain variable domain of TCR clone 179062 (TRBV6-1, TRBJ1-3)
CASVQGGGGNTIYF

SEQ ID NO: 358125 - protein, 14 aa, Homo sapiens
  CDR3 for alpha chain variable domain of TCR clone 179063 (TRAV8-1, TRAJ34)
CAVITTYNTDNLIF

SEQ ID NO: 358126 - protein, 14 aa, Homo sapiens
  CDR3 for beta chain variable domain of TCR clone 179063 (TRBV11-3, TRBJ1-3)
CASSHNGQGNTIYF

SEQ ID NO: 358127 - protein, 12 aa, Homo sapiens
  CDR3 for alpha chain variable domain of TCR clone 179064 (TRAV21, TRAJ8)
CDVNTGFQKLAF

SEQ ID NO: 358128 - protein, 13 aa, Homo sapiens
  CDR3 for beta chain variable domain of TCR clone 179064 (TRBV6-3, TRBJ2-1)
CASSYDNYNEQFF

SEQ ID NO: 358129 - protein, 17 aa, Homo sapiens
  CDR3 for alpha chain variable domain of TCR clone 179065 (TRAV13-1, TRAJ31)
CAPRDRLMFGDGTQLVV

SEQ ID NO: 358130 - protein, 15 aa, Homo sapiens
  CDR3 for beta chain variable domain of TCR clone 179065 (TRBV4-3, TRBJ2-7)
CASSQGGRGIYEQHF

SEQ ID NO: 358131 - protein, 13 aa, Homo sapiens
  CDR3 for alpha chain variable domain of TCR clone 179066 (TRAV8-6, TRAJ54)
CAVSDQGAQKLVF

SEQ ID NO: 358132 - protein, 13 aa, Homo sapiens
  CDR3 for beta chain variable domain of TCR clone 179066 (TRBV14, TRBJ1-1)
CASSRTVNTEAFF

SEQ ID NO: 358133 - protein, 13 aa, Homo sapiens
  CDR3 for alpha chain variable domain of TCR clone 179067 (TRAV30, TRAJ16)
CGTFGGDGQKLLF

SEQ ID NO: 358134 - protein, 15 aa, Homo sapiens
  CDR3 for beta chain variable domain of TCR clone 179067 (TRBV20-1, TRBJ2-5)
CSATPLTGDQETQYF

SEQ ID NO: 358135 - protein, 12 aa, Homo sapiens
  CDR3 for alpha chain variable domain of TCR clone 179068 (TRAV3, TRAJ20)
CAVRDPDYKLSF

SEQ ID NO: 358136 - protein, 15 aa, Homo sapiens
  CDR3 for beta chain variable domain of TCR clone 179068 (TRBV7-8, TRBJ2-1)
CASSLADSLYNEQFF

SEQ ID NO: 358137 - protein, 13 aa, Homo sapiens
  CDR3 for alpha chain variable domain of TCR clone 179069 (TRAV2, TRAJ15)
CAVASQAGTALIF

SEQ ID NO: 358138 - protein, 15 aa, Homo sapiens
  CDR3 for beta chain variable domain of TCR clone 179069 (TRBV20-1, TRBJ2-7)
CSARDRVSGMDEQCF

SEQ ID NO: 358139 - protein, 15 aa, Homo sapiens
  CDR3 for alpha chain variable domain of TCR clone 179070 (TRAV3, TRAJ22)
CAVKDRGGSARQLTF

SEQ ID NO: 358140 - protein, 13 aa, Homo sapiens
  CDR3 for beta chain variable domain of TCR clone 179070 (TRBV12-4, TRBJ1-2)
CASSLRQGKGYTF

SEQ ID NO: 358141 - protein, 14 aa, Homo sapiens
  CDR3 for alpha chain variable domain of TCR clone 179071 (TRAV12-2, TRAJ40)
CAVKIPSGTYKYIF

SEQ ID NO: 358142 - protein, 14 aa, Homo sapiens
  CDR3 for beta chain variable domain of TCR clone 179071 (TRBV11-2, TRBJ1-5)
CASSLDRGGQPQHF

SEQ ID NO: 358143 - protein, 14 aa, Homo sapiens
  CDR3 for alpha chain variable domain of TCR clone 179072 (TRAV13-1, TRAJ24)
CAASRTDSWGKLQF

SEQ ID NO: 358144 - protein, 15 aa, Homo sapiens
  CDR3 for beta chain variable domain of TCR clone 179072 (TRBV7-9, TRBJ1-5)
YASSQGHQPNQPQHF

SEQ ID NO: 358145 - protein, 13 aa, Homo sapiens
  CDR3 for alpha chain variable domain of TCR clone 179073 (TRAV30, TRAJ27)
CGTGNTNAGKSTF

SEQ ID NO: 358146 - protein, 11 aa, Homo sapiens
  CDR3 for beta chain variable domain of TCR clone 179073 (TRBV29-1, TRBJ1-1)
CSVEVNVITFF

SEQ ID NO: 358147 - protein, 15 aa, Homo sapiens
  CDR3 for alpha chain variable domain of TCR clone 179074 (TRAV17, TRAJ57)
CATGPSQGGSVKLVF

SEQ ID NO: 358148 - protein, 14 aa, Homo sapiens
  CDR3 for beta chain variable domain of TCR clone 179074 (TRBV19, TRBJ2-7)
CASTVQGRPYEQYF

SEQ ID NO: 358149 - protein, 14 aa, Homo sapiens
  CDR3 for alpha chain variable domain of TCR clone 179075 (TRAV12-2, TRAJ13)
CSVKKTGGYQKVTF

SEQ ID NO: 358150 - protein, 11 aa, Homo sapiens
  CDR3 for beta chain variable domain of TCR clone 179075 (TRBV11-2, TRBJ2-2)
CASSLPGELFF

SEQ ID NO: 358151 - protein, 14 aa, Homo sapiens
  CDR3 for alpha chain variable domain of TCR clone 179076 (TRAV9-2, TRAJ39)
CALYIYNAGNMLTF

SEQ ID NO: 358152 - protein, 15 aa, Homo sapiens
  CDR3 for beta chain variable domain of TCR clone 179076 (TRBV7-9, TRBJ1-4)
CASSRTGGFNGKLLF

SEQ ID NO: 358153 - protein, 16 aa, Homo sapiens
  CDR3 for alpha chain variable domain of TCR clone 179077 (TRAV23/DV6, )
CAEPDIQNPDPAVYQL

SEQ ID NO: 358154 - protein, 15 aa, Homo sapiens
  CDR3 for beta chain variable domain of TCR clone 179077 (TRBV12-4, TRBJ2-5)
CASTLNSGTGETQYF

SEQ ID NO: 358155 - protein, 15 aa, Homo sapiens
  CDR3 for alpha chain variable domain of TCR clone 179078 (TRAV23/DV6, TRAJ44)
CAAMKPTGTASKITF

SEQ ID NO: 358156 - protein, 16 aa, Homo sapiens
  CDR3 for beta chain variable domain of TCR clone 179078 (TRBV28, TRBJ2-5)
CATSGWPSRLKETQYF

SEQ ID NO: 358157 - protein, 15 aa, Homo sapiens
  CDR3 for alpha chain variable domain of TCR clone 179079 (TRAV13-1, TRAJ5)
CAASKADTGRRALTF

SEQ ID NO: 358158 - protein, 15 aa, Homo sapiens
  CDR3 for beta chain variable domain of TCR clone 179079 (TRBV7-2, TRBJ2-7)
CASSTPGLTRGEQYF

SEQ ID NO: 358159 - protein, 14 aa, Homo sapiens
  CDR3 for alpha chain variable domain of TCR clone 179080 (TRAV8-3, TRAJ27)
CAGGRNTNAGKSNF

SEQ ID NO: 358160 - protein, 16 aa, Homo sapiens
  CDR3 for beta chain variable domain of TCR clone 179080 (TRBV12-5, TRBJ2-5)
CASGPRTSGNQETQYF

SEQ ID NO: 358161 - protein, 16 aa, Homo sapiens
  CDR3 for alpha chain variable domain of TCR clone 179081 (TRAV36/DV7, TRAJ30)
CAVETYGLDRDAKIIF

SEQ ID NO: 358162 - protein, 15 aa, Homo sapiens
  CDR3 for beta chain variable domain of TCR clone 179081 (TRBV6-6, TRBJ2-5)
CASSYGKIIQETQYF

SEQ ID NO: 358163 - protein, 12 aa, Homo sapiens
  CDR3 for alpha chain variable domain of TCR clone 179082 (TRAV12-3, TRAJ40)
CAMSSGTYKYIF

SEQ ID NO: 358164 - protein, 16 aa, Homo sapiens
  CDR3 for beta chain variable domain of TCR clone 179082 (TRBV12-5, TRBJ2-5)
CASGPRTSGNQETQYF

SEQ ID NO: 358165 - protein, 15 aa, Homo sapiens
  CDR3 for alpha chain variable domain of TCR clone 179083 (TRAV2, TRAJ42)
CAVEGYAGSQGNLIF

SEQ ID NO: 358166 - protein, 14 aa, Homo sapiens
  CDR3 for beta chain variable domain of TCR clone 179083 (TRBV11-3, TRBJ2-7)
CASSPDRNTYEQYF

SEQ ID NO: 358167 - protein, 10 aa, Homo sapiens
  CDR3 for alpha chain variable domain of TCR clone 179084 (TRAV13-1, TRAJ30)
CAARDDKIIF

SEQ ID NO: 358168 - protein, 14 aa, Homo sapiens
  CDR3 for beta chain variable domain of TCR clone 179084 (TRBV25-1, TRBJ1-1)
CASTHLGGNTEAFF

SEQ ID NO: 358169 - protein, 17 aa, Homo sapiens
  CDR3 for alpha chain variable domain of TCR clone 179085 (TRAV29/DV5, TRAJ36)
PCTSAARRKTGANNLFF

SEQ ID NO: 358170 - protein, 14 aa, Homo sapiens
  CDR3 for beta chain variable domain of TCR clone 179085 (TRBV19, TRBJ2-1)
CASKDPSSYNEQFF

SEQ ID NO: 358171 - protein, 13 aa, Homo sapiens
  CDR3 for alpha chain variable domain of TCR clone 179086 (TRAV2, TRAJ15)
CAVASQAGTALIF

SEQ ID NO: 358172 - protein, 15 aa, Homo sapiens
  CDR3 for beta chain variable domain of TCR clone 179086 (TRBV7-9, TRBJ1-4)
CASSARTGGNEKLFF

SEQ ID NO: 358173 - protein, 14 aa, Homo sapiens
  CDR3 for alpha chain variable domain of TCR clone 179087 (TRAV1-2, TRAJ16)
CAVNRFSDGQKLLF

SEQ ID NO: 358174 - protein, 16 aa, Homo sapiens
  CDR3 for beta chain variable domain of TCR clone 179087 (TRBV3-1, TRBJ2-5)
CGSSPGQFNGFGTQYF

SEQ ID NO: 358175 - protein, 15 aa, Homo sapiens
  CDR3 for alpha chain variable domain of TCR clone 179088 (TRAV4, TRAJ39)
CLVGPNNNAGNMLTF

SEQ ID NO: 358176 - protein, 16 aa, Homo sapiens
  CDR3 for beta chain variable domain of TCR clone 179088 (TRBV19, TRBJ2-2)
CASRSPGTGATGELFF

SEQ ID NO: 358177 - protein, 11 aa, Homo sapiens
  CDR3 for alpha chain variable domain of TCR clone 179089 (TRAV36/DV7, TRAJ54)
CCGRGAQKLVF

SEQ ID NO: 358178 - protein, 14 aa, Homo sapiens
  CDR3 for beta chain variable domain of TCR clone 179089 (TRBV7-3, TRBJ1-1)
CASSLKGGNTEAFF

SEQ ID NO: 358179 - protein, 12 aa, Homo sapiens
  CDR3 for alpha chain variable domain of TCR clone 179090 (TRAV12-3, TRAJ17)
CAMTLTGNKLTF

SEQ ID NO: 358180 - protein, 13 aa, Homo sapiens
  CDR3 for beta chain variable domain of TCR clone 179090 (TRBV20-1, TRBJ1-1)
CSARVGGNTEAFV

SEQ ID NO: 358181 - protein, 15 aa, Homo sapiens
  CDR3 for alpha chain variable domain of TCR clone 179091 (TRAV8-3, TRAJ11)
CAVGLLNSGYSTLTF

SEQ ID NO: 358182 - protein, 14 aa, Homo sapiens
  CDR3 for beta chain variable domain of TCR clone 179091 (TRBV28, TRBJ1-5)
CASSGQALYQPQHF

SEQ ID NO: 358183 - protein, 14 aa, Homo sapiens
  CDR3 for alpha chain variable domain of TCR clone 179092 (TRAV12-1, TRAJ17)
CVVNYKAAGNKLTF

SEQ ID NO: 358184 - protein, 16 aa, Homo sapiens
  CDR3 for beta chain variable domain of TCR clone 179092 (TRBV27, TRBJ2-7)
CASSSERRDSAYEQYF

SEQ ID NO: 358185 - protein, 14 aa, Homo sapiens
  CDR3 for alpha chain variable domain of TCR clone 179093 (TRAV13-2, TRAJ17)
CAENGKAAGNKLTF

SEQ ID NO: 358186 - protein, 15 aa, Homo sapiens
  CDR3 for beta chain variable domain of TCR clone 179093 (TRBV20-1, TRBJ1-5)
CSARSGPSMNQPQHF

SEQ ID NO: 358187 - protein, 11 aa, Homo sapiens
  CDR3 for alpha chain variable domain of TCR clone 179094 (TRAV35, TRAJ30)
CAGPGDDKFIF

SEQ ID NO: 358188 - protein, 18 aa, Homo sapiens
  CDR3 for beta chain variable domain of TCR clone 179094 (TRBV7-6, TRBJ2-1)
CASSPRTNGMSSYNEQFF

SEQ ID NO: 358189 - protein, 13 aa, Homo sapiens
  CDR3 for alpha chain variable domain of TCR clone 179095 (TRAV3, TRAJ15)
CAVRDQAGTALIF

SEQ ID NO: 358190 - protein, 15 aa, Homo sapiens
  CDR3 for beta chain variable domain of TCR clone 179095 (TRBV11-1, TRBJ2-7)
CASSLHYGASYEQYF

SEQ ID NO: 358191 - protein, 17 aa, Homo sapiens
  CDR3 for alpha chain variable domain of TCR clone 179096 (TRAV8-3, TRAJ34)
CAIPGKLIFGTGTRLQV

SEQ ID NO: 358192 - protein, 15 aa, Homo sapiens
  CDR3 for beta chain variable domain of TCR clone 179096 (TRBV7-9, TRBJ1-4)
CASSARTGGNEKLFF

SEQ ID NO: 358193 - protein, 14 aa, Homo sapiens
  CDR3 for alpha chain variable domain of TCR clone 179097 (TRAV26-1, TRAJ39)
CIVFTNNAGNMLTF

SEQ ID NO: 358194 - protein, 19 aa, Homo sapiens
  CDR3 for beta chain variable domain of TCR clone 179097 (TRBV11-3, TRBJ2-2)
CASSTRPGAKTTNTGELFF

SEQ ID NO: 358195 - protein, 16 aa, Homo sapiens
  CDR3 for alpha chain variable domain of TCR clone 179098 (TRAV4, TRAJ18)
CCVLLIGGSTLGRLYF

SEQ ID NO: 358196 - protein, 14 aa, Homo sapiens
  CDR3 for beta chain variable domain of TCR clone 179098 (TRBV25-1, TRBJ1-1)
CASTHLGGNTEALF

SEQ ID NO: 358197 - protein, 15 aa, Homo sapiens
  CDR3 for alpha chain variable domain of TCR clone 179099 (TRAV16, TRAJ10)
CALEGLTGGGNKLTF

SEQ ID NO: 358198 - protein, 15 aa, Homo sapiens
  CDR3 for beta chain variable domain of TCR clone 179099 (TRBV4-2, TRBJ1-2)
CASSQRTGGRDGYTF

SEQ ID NO: 358199 - protein, 12 aa, Homo sapiens
  CDR3 for alpha chain variable domain of TCR clone 179100 (TRAV21, TRAJ31)
CAVSPARGRLMF

SEQ ID NO: 358200 - protein, 13 aa, Homo sapiens
  CDR3 for beta chain variable domain of TCR clone 179100 (TRBV10-3, TRBJ2-5)
CAMTSGAGETQYF

SEQ ID NO: 358201 - protein, 12 aa, Homo sapiens
  CDR3 for alpha chain variable domain of TCR clone 179101 (TRAV21, TRAJ3)
CCFYSSASKIIF

SEQ ID NO: 358202 - protein, 16 aa, Homo sapiens
  CDR3 for beta chain variable domain of TCR clone 179101 (TRBV19, TRBJ2-1)
CASSKAGPSSYHEQFF

SEQ ID NO: 358203 - protein, 15 aa, Homo sapiens
  CDR3 for alpha chain variable domain of TCR clone 179102 (TRAV12-1, TRAJ15)
CVVTRANQAGTALIF

SEQ ID NO: 358204 - protein, 13 aa, Homo sapiens
  CDR3 for beta chain variable domain of TCR clone 179102 (TRBV6-5, TRBJ2-5)
CASSPQGGETQYF

SEQ ID NO: 358205 - protein, 12 aa, Homo sapiens
  CDR3 for alpha chain variable domain of TCR clone 179103 (TRAV2, TRAJ31)
CAAEDNNARLMF

SEQ ID NO: 358206 - protein, 14 aa, Homo sapiens
  CDR3 for beta chain variable domain of TCR clone 179103 (TRBV19, TRBJ2-5)
CASSMTGQQETQYF

SEQ ID NO: 358207 - protein, 19 aa, Homo sapiens
  CDR3 for alpha chain variable domain of TCR clone 179104 (TRAV17, TRAJ40)
TASLAADTASYFCASKYIF

SEQ ID NO: 358208 - protein, 17 aa, Homo sapiens
  CDR3 for beta chain variable domain of TCR clone 179104 (TRBV11-2, TRBJ2-4)
CASSFLALGGAGDIQYF

SEQ ID NO: 358209 - protein, 15 aa, Homo sapiens
  CDR3 for alpha chain variable domain of TCR clone 179105 (TRAV8-6, TRAJ6)
CAVRPPSGGSYIPTF

SEQ ID NO: 358210 - protein, 15 aa, Homo sapiens
  CDR3 for beta chain variable domain of TCR clone 179105 (TRBV11-3, TRBJ2-3)
CASLKDGREGDTQYF

SEQ ID NO: 358211 - protein, 13 aa, Homo sapiens
  CDR3 for alpha chain variable domain of TCR clone 179106 (TRAV38-2/DV8, TRAJ34)
CAYRNYKTDKLIF

SEQ ID NO: 358212 - protein, 17 aa, Homo sapiens
  CDR3 for beta chain variable domain of TCR clone 179106 (TRBV13, TRBJ2-3)
CASSLSRVAGGRNTQYF

SEQ ID NO: 358213 - protein, 12 aa, Homo sapiens
  CDR3 for alpha chain variable domain of TCR clone 179107 (TRAV12-1, TRAJ40)
CVVYSGTYKYIF

SEQ ID NO: 358214 - protein, 17 aa, Homo sapiens
  CDR3 for beta chain variable domain of TCR clone 179107 (TRBV11-2, TRBJ2-3)
CQQLSGGLAGAPNTQYF

SEQ ID NO: 358215 - protein, 18 aa, Homo sapiens
  CDR3 for alpha chain variable domain of TCR clone 179108 (TRAV21, TRAJ52)
CAVRPSPAGGTSYGKLTF

SEQ ID NO: 358216 - protein, 13 aa, Homo sapiens
  CDR3 for beta chain variable domain of TCR clone 179108 (TRBV7-3, TRBJ1-1)
CTSGQDWGAEAFF

SEQ ID NO: 358217 - protein, 12 aa, Homo sapiens
  CDR3 for alpha chain variable domain of TCR clone 179109 (TRAV29/DV5, TRAJ49)
LAATDTGNQFYF

SEQ ID NO: 358218 - protein, 12 aa, Homo sapiens
  CDR3 for beta chain variable domain of TCR clone 179109 (TRBV12-4, TRBJ2-7)
CASSLGGYEQYF

SEQ ID NO: 358219 - protein, 14 aa, Homo sapiens
  CDR3 for alpha chain variable domain of TCR clone 179110 (TRAV26-1, TRAJ48)
CIVRVGFGNEKLTF

SEQ ID NO: 358220 - protein, 13 aa, Homo sapiens
  CDR3 for beta chain variable domain of TCR clone 179110 (TRBV19, TRBJ2-1)
CQSDFVLSGEQFF

SEQ ID NO: 358221 - protein, 14 aa, Homo sapiens
  CDR3 for alpha chain variable domain of TCR clone 179111 (TRAV1-1, TRAJ27)
CAVIYNTNAGKSTF

SEQ ID NO: 358222 - protein, 17 aa, Homo sapiens
  CDR3 for beta chain variable domain of TCR clone 179111 (TRBV20-1, TRBJ2-2)
CSASGSGQGGLTGELFF

SEQ ID NO: 358223 - protein, 13 aa, Homo sapiens
  CDR3 for alpha chain variable domain of TCR clone 179112 (TRAV13-1, TRAJ6)
CAARRGGSYIPTV

SEQ ID NO: 358224 - protein, 16 aa, Homo sapiens
  CDR3 for beta chain variable domain of TCR clone 179112 (TRBV7-9, TRBJ2-2)
CASSLATGVGTGELFF

SEQ ID NO: 358225 - protein, 14 aa, Homo sapiens
  CDR3 for alpha chain variable domain of TCR clone 179113 (TRAV12-3, TRAJ10)
SHLPLTGGGNKLTF

SEQ ID NO: 358226 - protein, 14 aa, Homo sapiens
  CDR3 for beta chain variable domain of TCR clone 179113 (TRBV7-2, TRBJ2-5)
CASSLVVGQETQYF

SEQ ID NO: 358227 - protein, 13 aa, Homo sapiens
  CDR3 for alpha chain variable domain of TCR clone 179114 (TRAV23/DV6, TRAJ34)
CAAIENNTDKLIF

SEQ ID NO: 358228 - protein, 13 aa, Homo sapiens
  CDR3 for beta chain variable domain of TCR clone 179114 (TRBV29-1, TRBJ2-7)
CSVGPSRGYEQYF

SEQ ID NO: 358229 - protein, 12 aa, Homo sapiens
  CDR3 for alpha chain variable domain of TCR clone 179115 (TRAV8-3, TRAJ41)
CAVGALRYALNF

SEQ ID NO: 358230 - protein, 16 aa, Homo sapiens
  CDR3 for beta chain variable domain of TCR clone 179115 (TRBV7-6, TRBJ2-3)
CASSDSRGEGADTQYF

SEQ ID NO: 358231 - protein, 17 aa, Homo sapiens
  CDR3 for alpha chain variable domain of TCR clone 179116 (TRAV3, TRAJ42)
CAVRDRDYGGSQGKLIF

SEQ ID NO: 358232 - protein, 15 aa, Homo sapiens
  CDR3 for beta chain variable domain of TCR clone 179116 (TRBV2, TRBJ2-7)
CASSEGLAGSYEQYF

SEQ ID NO: 358233 - protein, 13 aa, Homo sapiens
  CDR3 for alpha chain variable domain of TCR clone 179117 (TRAV2, TRAJ15)
CAVASQAGTALIF

SEQ ID NO: 358234 - protein, 15 aa, Homo sapiens
  CDR3 for beta chain variable domain of TCR clone 179117 (TRBV6-1, TRBJ2-4)
CASSEAVWTINIQYF

SEQ ID NO: 358235 - protein, 12 aa, Homo sapiens
  CDR3 for alpha chain variable domain of TCR clone 179118 (TRAV23/DV6, TRAJ33)
CAAEDSNYQLIW

SEQ ID NO: 358236 - protein, 13 aa, Homo sapiens
  CDR3 for beta chain variable domain of TCR clone 179118 (TRBV5-5, TRBJ1-2)
CASSFWRGEDYTF

SEQ ID NO: 358237 - protein, 13 aa, Homo sapiens
  CDR3 for alpha chain variable domain of TCR clone 179119 (TRAV3, TRAJ15)
CAVRDQAGTALIF

SEQ ID NO: 358238 - protein, 15 aa, Homo sapiens
  CDR3 for beta chain variable domain of TCR clone 179119 (TRBV11-1, TRBJ2-7)
CASSLNYGASYELYF

SEQ ID NO: 358239 - protein, 11 aa, Homo sapiens
  CDR3 for alpha chain variable domain of TCR clone 179120 (TRAV1-1, TRAJ31)
CAVPKQCQTHV

SEQ ID NO: 358240 - protein, 17 aa, Homo sapiens
  CDR3 for beta chain variable domain of TCR clone 179120 (TRBV27, TRBJ2-6)
CASSAGTGFAGANVLTF

SEQ ID NO: 358241 - protein, 14 aa, Homo sapiens
  CDR3 for alpha chain variable domain of TCR clone 179121 (TRAV12-2, TRAJ13)
CAVKKTGGYQEVTF

SEQ ID NO: 358242 - protein, 18 aa, Homo sapiens
  CDR3 for beta chain variable domain of TCR clone 179121 (TRBV24-1, TRBJ2-2)
CATSDSGQGTASTGELFF

SEQ ID NO: 358243 - protein, 15 aa, Homo sapiens
  CDR3 for alpha chain variable domain of TCR clone 179122 (TRAV12-1, TRAJ4)
CVVNPFSGGYNKLIF

SEQ ID NO: 358244 - protein, 13 aa, Homo sapiens
  CDR3 for beta chain variable domain of TCR clone 179122 (TRBV20-1, TRBJ1-2)
CSARGTADYGYTL

SEQ ID NO: 358245 - protein, 15 aa, Homo sapiens
  CDR3 for alpha chain variable domain of TCR clone 179123 (TRAV26-1, TRAJ23)
CIVRVAGYQGGNLIF

SEQ ID NO: 358246 - protein, 18 aa, Homo sapiens
  CDR3 for beta chain variable domain of TCR clone 179123 (TRBV28, TRBJ2-1)
CARSSTSGRANSYNEQFF

SEQ ID NO: 358247 - protein, 16 aa, Homo sapiens
  CDR3 for alpha chain variable domain of TCR clone 179124 (TRAV35, TRAJ37)
CWAFLRGSSNTGHLIF

SEQ ID NO: 358248 - protein, 13 aa, Homo sapiens
  CDR3 for beta chain variable domain of TCR clone 179124 (TRBV2, TRBJ1-2)
CASSVRGNYGYTF

SEQ ID NO: 358249 - protein, 12 aa, Homo sapiens
  CDR3 for alpha chain variable domain of TCR clone 179125 (TRAV12-3, TRAJ17)
CAMTLTGNKLTF

SEQ ID NO: 358250 - protein, 13 aa, Homo sapiens
  CDR3 for beta chain variable domain of TCR clone 179125 (TRBV29-1, TRBJ1-3)
CSADVDSGNTIYF

SEQ ID NO: 358251 - protein, 15 aa, Homo sapiens
  CDR3 for alpha chain variable domain of TCR clone 179126 (TRAV34, TRAJ38)
CGADFTPGNNRQLIW

SEQ ID NO: 358252 - protein, 16 aa, Homo sapiens
  CDR3 for beta chain variable domain of TCR clone 179126 (TRBV12-5, TRBJ2-5)
CDSGPRTSGNQETQYF

SEQ ID NO: 358253 - protein, 16 aa, Homo sapiens
  CDR3 for alpha chain variable domain of TCR clone 179127 (TRAV2, TRAJ23)
CVGGKLIFGQGTELSV

SEQ ID NO: 358254 - protein, 14 aa, Homo sapiens
  CDR3 for beta chain variable domain of TCR clone 179127 (TRBV20-1, TRBJ2-5)
CSARAGLAGRLASF

SEQ ID NO: 358255 - protein, 12 aa, Homo sapiens
  CDR3 for alpha chain variable domain of TCR clone 179128 (TRAV2, TRAJ9)
CAVGAGGFKTIF

SEQ ID NO: 358256 - protein, 16 aa, Homo sapiens
  CDR3 for beta chain variable domain of TCR clone 179128 (TRBV13, TRBJ2-2)
CASSPKAGEHTGELFF

SEQ ID NO: 358257 - protein, 13 aa, Homo sapiens
  CDR3 for alpha chain variable domain of TCR clone 179129 (TRAV12-3, TRAJ13)
CAMSSGGYQTVTF

SEQ ID NO: 358258 - protein, 14 aa, Homo sapiens
  CDR3 for beta chain variable domain of TCR clone 179129 (TRBV2, TRBJ2-1)
CASRTGSSYNEQFF

SEQ ID NO: 358259 - protein, 16 aa, Homo sapiens
  CDR3 for alpha chain variable domain of TCR clone 179130 (TRAV12-2, TRAJ45)
CAANMYSGGGADGLTF

SEQ ID NO: 358260 - protein, 17 aa, Homo sapiens
  CDR3 for beta chain variable domain of TCR clone 179130 (TRBV6-3, TRBJ2-2)
CASSYRGRDFYTGELFF

SEQ ID NO: 358261 - protein, 14 aa, Homo sapiens
  CDR3 for alpha chain variable domain of TCR clone 179131 (TRAV17, TRAJ22)
CATSPSGSARQLTF

SEQ ID NO: 358262 - protein, 15 aa, Homo sapiens
  CDR3 for beta chain variable domain of TCR clone 179131 (TRBV4-1, TRBJ2-5)
CASSQCDLYQETQYF

SEQ ID NO: 358263 - protein, 13 aa, Homo sapiens
  CDR3 for alpha chain variable domain of TCR clone 179132 (TRAV12-1, TRAJ22)
CVVYSGSARQLTF

SEQ ID NO: 358264 - protein, 16 aa, Homo sapiens
  CDR3 for beta chain variable domain of TCR clone 179132 (TRBV5-1, TRBJ2-1)
CDSSLADIGSYNEQFF

SEQ ID NO: 358265 - protein, 14 aa, Homo sapiens
  CDR3 for alpha chain variable domain of TCR clone 179133 (TRAV3, TRAJ21)
CAVESHANFNKFYF

SEQ ID NO: 358266 - protein, 13 aa, Homo sapiens
  CDR3 for beta chain variable domain of TCR clone 179133 (TRBV7-9, TRBJ2-3)
CASSPGSTDTQYF

SEQ ID NO: 358267 - protein, 16 aa, Homo sapiens
  CDR3 for alpha chain variable domain of TCR clone 179134 (TRAV3, TRAJ3)
CAVRDRAKSSASKIIF

SEQ ID NO: 358268 - protein, 16 aa, Homo sapiens
  CDR3 for beta chain variable domain of TCR clone 179134 (TRBV7-3, TRBJ2-1)
CASSLVSGSSNNEQFF

SEQ ID NO: 358269 - protein, 14 aa, Homo sapiens
  CDR3 for alpha chain variable domain of TCR clone 179135 (TRAV1-2, TRAJ16)
CAVNRFSDGEKLLF

SEQ ID NO: 358270 - protein, 15 aa, Homo sapiens
  CDR3 for beta chain variable domain of TCR clone 179135 (TRBV7-9, TRBJ1-6)
CASSSPGRGNSPFHF

SEQ ID NO: 358271 - protein, 15 aa, Homo sapiens
  CDR3 for alpha chain variable domain of TCR clone 179136 (TRAV12-3, TRAJ49)
CAMAVTPNTGNQFYF

SEQ ID NO: 358272 - protein, 18 aa, Homo sapiens
  CDR3 for beta chain variable domain of TCR clone 179136 (TRBV4-1, TRBJ1-5)
CASSQGARGQGLNQPQHF

SEQ ID NO: 358273 - protein, 15 aa, Homo sapiens
  CDR3 for alpha chain variable domain of TCR clone 179137 (TRAV13-2, TRAJ45)
CAEHHSGGGADGPTF

SEQ ID NO: 358274 - protein, 15 aa, Homo sapiens
  CDR3 for beta chain variable domain of TCR clone 179137 (TRBV7-2, TRBJ2-7)
CASSLALGSAYEQYF

SEQ ID NO: 358275 - protein, 14 aa, Homo sapiens
  CDR3 for alpha chain variable domain of TCR clone 179138 (TRAV1-2, TRAJ8)
CAVREDTGFQKLVF

SEQ ID NO: 358276 - protein, 17 aa, Homo sapiens
  CDR3 for beta chain variable domain of TCR clone 179138 (TRBV24-1, TRBJ2-2)
CATSDLLRTGGSGELFF

SEQ ID NO: 358277 - protein, 16 aa, Homo sapiens
  CDR3 for alpha chain variable domain of TCR clone 179139 (TRAV8-3, TRAJ10)
CAVGPILTGGGNKLTF

SEQ ID NO: 358278 - protein, 16 aa, Homo sapiens
  CDR3 for beta chain variable domain of TCR clone 179139 (TRBV28, TRBJ2-7)
CASSFPDRHLTYEQYF

SEQ ID NO: 358279 - protein, 13 aa, Homo sapiens
  CDR3 for alpha chain variable domain of TCR clone 179140 (TRAV27, TRAJ23)
CAGVLPKGGKLNF

SEQ ID NO: 358280 - protein, 14 aa, Homo sapiens
  CDR3 for beta chain variable domain of TCR clone 179140 (TRBV5-8, TRBJ2-3)
CASSLSPSTDTQYF

SEQ ID NO: 358281 - protein, 14 aa, Homo sapiens
  CDR3 for alpha chain variable domain of TCR clone 179141 (TRAV12-2, TRAJ5)
CAVNRSTGRRALTF

SEQ ID NO: 358282 - protein, 12 aa, Homo sapiens
  CDR3 for beta chain variable domain of TCR clone 179141 (TRBV19, TRBJ1-5)
CASSLAPQPQHF

SEQ ID NO: 358283 - protein, 14 aa, Homo sapiens
  CDR3 for alpha chain variable domain of TCR clone 179142 (TRAV1-2, TRAJ8)
CAVREGTGFQKLVF

SEQ ID NO: 358284 - protein, 14 aa, Homo sapiens
  CDR3 for beta chain variable domain of TCR clone 179142 (TRBV5-4, TRBJ1-1)
CASSLDSRRDEAFF

SEQ ID NO: 358285 - protein, 14 aa, Homo sapiens
  CDR3 for alpha chain variable domain of TCR clone 179143 (TRAV23/DV6, TRAJ4)
CAANLSGGYNKLVF

SEQ ID NO: 358286 - protein, 11 aa, Homo sapiens
  CDR3 for beta chain variable domain of TCR clone 179143 (TRBV7-9, TRBJ2-3)
CASSPTDTQYF

SEQ ID NO: 358287 - protein, 15 aa, Homo sapiens
  CDR3 for alpha chain variable domain of TCR clone 179144 (TRAV34, TRAJ38)
CGADFTPGNNRKLIW

SEQ ID NO: 358288 - protein, 16 aa, Homo sapiens
  CDR3 for beta chain variable domain of TCR clone 179144 (TRBV7-2, TRBJ2-5)
CASSSKWLSGQETQYF

SEQ ID NO: 358289 - protein, 13 aa, Homo sapiens
  CDR3 for alpha chain variable domain of TCR clone 179145 (TRAV12-3, TRAJ54)
CALVPQVAQKLVF

SEQ ID NO: 358290 - protein, 15 aa, Homo sapiens
  CDR3 for beta chain variable domain of TCR clone 179145 (TRBV4-1, TRBJ2-2)
CASSQDSRGTGELFF

SEQ ID NO: 358291 - protein, 14 aa, Homo sapiens
  CDR3 for alpha chain variable domain of TCR clone 179146 (TRAV29/DV5, TRAJ36)
CAAHRKTGANNLFF

SEQ ID NO: 358292 - protein, 22 aa, Homo sapiens
  CDR3 for beta chain variable domain of TCR clone 179146 (TRBV11-2, TRBJ1-4)
CASSLDITRRGIPRKDNEKLFF

SEQ ID NO: 358293 - protein, 16 aa, Homo sapiens
  CDR3 for alpha chain variable domain of TCR clone 179147 (TRAV8-3, TRAJ13)
CALGAYPSGGYKKVTF

SEQ ID NO: 358294 - protein, 14 aa, Homo sapiens
  CDR3 for beta chain variable domain of TCR clone 179147 (TRBV18, TRBJ2-5)
CASSPRASSETQYF

SEQ ID NO: 358295 - protein, 14 aa, Homo sapiens
  CDR3 for alpha chain variable domain of TCR clone 179148 (TRAV12-2, TRAJ13)
CAVKKTGGYQKVTF

SEQ ID NO: 358296 - protein, 14 aa, Homo sapiens
  CDR3 for beta chain variable domain of TCR clone 179148 (TRBV5-5, TRBJ1-2)
CASSFGQINYGYTF

SEQ ID NO: 358297 - protein, 16 aa, Homo sapiens
  CDR3 for alpha chain variable domain of TCR clone 179149 (TRAV21, TRAJ37)
CAVRPRGSSNTGKLIF

SEQ ID NO: 358298 - protein, 15 aa, Homo sapiens
  CDR3 for beta chain variable domain of TCR clone 179149 (TRBV20-1, TRBJ2-7)
CSARVPAAYFYEQYF

SEQ ID NO: 358299 - protein, 13 aa, Homo sapiens
  CDR3 for alpha chain variable domain of TCR clone 179150 (TRAV13-2, TRAJ48)
CAEMDFGNEKLTF

SEQ ID NO: 358300 - protein, 15 aa, Homo sapiens
  CDR3 for beta chain variable domain of TCR clone 179150 (TRBV7-2, TRBJ2-5)
CASSLGLGGLETQYF

SEQ ID NO: 358301 - protein, 14 aa, Homo sapiens
  CDR3 for alpha chain variable domain of TCR clone 179151 (TRAV2, TRAJ37)
CVVDFTSNTGKLTF

SEQ ID NO: 358302 - protein, 15 aa, Homo sapiens
  CDR3 for beta chain variable domain of TCR clone 179151 (TRBV20-1, TRBJ1-1)
CSASRGVTGNTEAFF

SEQ ID NO: 358303 - protein, 15 aa, Homo sapiens
  CDR3 for alpha chain variable domain of TCR clone 179152 (TRAV3, TRAJ45)
CAVRAPWGGADGLTF

SEQ ID NO: 358304 - protein, 16 aa, Homo sapiens
  CDR3 for beta chain variable domain of TCR clone 179152 (TRBV6-1, TRBJ2-2)
YASSFGQGANTGELFF

SEQ ID NO: 358305 - protein, 14 aa, Homo sapiens
  CDR3 for alpha chain variable domain of TCR clone 179153 (TRAV4, TRAJ17)
CLVGDMAAGNKLTF

SEQ ID NO: 358306 - protein, 14 aa, Homo sapiens
  CDR3 for beta chain variable domain of TCR clone 179153 (TRBV4-1, TRBJ2-7)
CASSPVVGGDEQYF

SEQ ID NO: 358307 - protein, 13 aa, Homo sapiens
  CDR3 for alpha chain variable domain of TCR clone 179154 (TRAV13-1, TRAJ43)
FAASKNNNNDMRF

SEQ ID NO: 358308 - protein, 13 aa, Homo sapiens
  CDR3 for beta chain variable domain of TCR clone 179154 (TRBV7-3, TRBJ1-1)
CASSQDWGAEAFF

SEQ ID NO: 358309 - protein, 15 aa, Homo sapiens
  CDR3 for alpha chain variable domain of TCR clone 179155 (TRAV27, TRAJ45)
CAPVDSGGGADGPTF

SEQ ID NO: 358310 - protein, 15 aa, Homo sapiens
  CDR3 for beta chain variable domain of TCR clone 179155 (TRBV23-1, TRBJ1-5)
CASSQSRGQGWGAYI

SEQ ID NO: 358311 - protein, 17 aa, Homo sapiens
  CDR3 for alpha chain variable domain of TCR clone 179156 (TRAV16, TRAJ58)
CITVLSNGETSGSRLTF

SEQ ID NO: 358312 - protein, 17 aa, Homo sapiens
  CDR3 for beta chain variable domain of TCR clone 179156 (TRBV18, TRBJ2-1)
FASSKGLSGGADNEQFF

SEQ ID NO: 358313 - protein, 14 aa, Homo sapiens
  CDR3 for alpha chain variable domain of TCR clone 179157 (TRAV8-1, TRAJ5)
CAVSMDTGRRAITF

SEQ ID NO: 358314 - protein, 15 aa, Homo sapiens
  CDR3 for beta chain variable domain of TCR clone 179157 (TRBV19, TRBJ2-4)
CASRGPRRGENIQYF

SEQ ID NO: 358315 - protein, 19 aa, Homo sapiens
  CDR3 for alpha chain variable domain of TCR clone 179158 (TRAV26-1, TRAJ22)
CCVLLHRWVFSGSAMQLTF

SEQ ID NO: 358316 - protein, 19 aa, Homo sapiens
  CDR3 for beta chain variable domain of TCR clone 179158 (TRBV19, TRBJ2-5)
CASSIGQVTDFFLGETQHF

SEQ ID NO: 358317 - protein, 13 aa, Homo sapiens
  CDR3 for alpha chain variable domain of TCR clone 179159 (TRAV27, TRAJ45)
CRSSGGGADGLTF

SEQ ID NO: 358318 - protein, 14 aa, Homo sapiens
  CDR3 for beta chain variable domain of TCR clone 179159 (TRBV7-6, TRBJ2-7)
CASSLTGTGNEQYF

SEQ ID NO: 358319 - protein, 14 aa, Homo sapiens
  CDR3 for alpha chain variable domain of TCR clone 179160 (TRAV26-1, TRAJ48)
CIVRVGFGNEKLTF

SEQ ID NO: 358320 - protein, 13 aa, Homo sapiens
  CDR3 for beta chain variable domain of TCR clone 179160 (TRBV11-2, TRBJ2-5)
CASSFSSQETQYF

SEQ ID NO: 358321 - protein, 16 aa, Homo sapiens
  CDR3 for alpha chain variable domain of TCR clone 179161 (TRAV17, TRAJ52)
CATGIIGGTSYGKLTF

SEQ ID NO: 358322 - protein, 13 aa, Homo sapiens
  CDR3 for beta chain variable domain of TCR clone 179161 (TRBV7-3, TRBJ1-1)
CASSQDWGAEAFF

SEQ ID NO: 358323 - protein, 16 aa, Homo sapiens
  CDR3 for alpha chain variable domain of TCR clone 179162 (TRAV30, TRAJ24)
CGTEMVDADSWGKFQF

SEQ ID NO: 358324 - protein, 14 aa, Homo sapiens
  CDR3 for beta chain variable domain of TCR clone 179162 (TRBV18, TRBJ2-3)
CASSPRTSTDTQYF

SEQ ID NO: 358325 - protein, 16 aa, Homo sapiens
  CDR3 for alpha chain variable domain of TCR clone 179163 (TRAV29/DV5, TRAJ36)
CAASAGVETGANNLFF

SEQ ID NO: 358326 - protein, 19 aa, Homo sapiens
  CDR3 for beta chain variable domain of TCR clone 179163 (TRBV2, TRBJ2-7)
CASSDDETSGRANDYEQYF

SEQ ID NO: 358327 - protein, 13 aa, Homo sapiens
  CDR3 for alpha chain variable domain of TCR clone 179164 (TRAV12-2, TRAJ50)
CAVIVTSYDKVIF

SEQ ID NO: 358328 - protein, 13 aa, Homo sapiens
  CDR3 for beta chain variable domain of TCR clone 179164 (TRBV7-9, TRBJ1-2)
FASSLKQNYGYTF

SEQ ID NO: 358329 - protein, 13 aa, Homo sapiens
  CDR3 for alpha chain variable domain of TCR clone 179165 (TRAV27, TRAJ16)
CAGACSDGQKLLF

SEQ ID NO: 358330 - protein, 16 aa, Homo sapiens
  CDR3 for beta chain variable domain of TCR clone 179165 (TRBV4-1, TRBJ2-3)
CASSQSTSGAEDTQYF

SEQ ID NO: 358331 - protein, 13 aa, Homo sapiens
  CDR3 for alpha chain variable domain of TCR clone 179166 (TRAV16, TRAJ20)
CALGPSNDYKLSF

SEQ ID NO: 358332 - protein, 14 aa, Homo sapiens
  CDR3 for beta chain variable domain of TCR clone 179166 (TRBV18, TRBJ2-7)
CASSPRGGAYEQYF

SEQ ID NO: 358333 - protein, 13 aa, Homo sapiens
  CDR3 for alpha chain variable domain of TCR clone 179167 (TRAV12-3, TRAJ9)
CAMRNTGGFKTIF

SEQ ID NO: 358334 - protein, 15 aa, Homo sapiens
  CDR3 for beta chain variable domain of TCR clone 179167 (TRBV19, TRBJ1-1)
CASMGFRDVNTEAFF

SEQ ID NO: 358335 - protein, 10 aa, Homo sapiens
  CDR3 for alpha chain variable domain of TCR clone 179168 (TRAV26-1, TRAJ22)
SSGSARQLTF

SEQ ID NO: 358336 - protein, 15 aa, Homo sapiens
  CDR3 for beta chain variable domain of TCR clone 179168 (TRBV4-2, TRBJ1-2)
CASSQRTGGRDGYTF

SEQ ID NO: 358337 - protein, 15 aa, Homo sapiens
  CDR3 for alpha chain variable domain of TCR clone 179169 (TRAV3, TRAJ42)
CAVRGGPGSQGNLIF

SEQ ID NO: 358338 - protein, 14 aa, Homo sapiens
  CDR3 for beta chain variable domain of TCR clone 179169 (TRBV19, TRBJ1-2)
CASSSLFARDVYAF

SEQ ID NO: 358339 - protein, 15 aa, Homo sapiens
  CDR3 for alpha chain variable domain of TCR clone 179170 (TRAV8-3, TRAJ23)
CAVGDRYNQGGKLIF

SEQ ID NO: 358340 - protein, 22 aa, Homo sapiens
  CDR3 for beta chain variable domain of TCR clone 179170 (TRBV29-1, TRBJ2-5)
TVSNMSPEDSSIYLCSAGAQYF

SEQ ID NO: 358341 - protein, 16 aa, Homo sapiens
  CDR3 for alpha chain variable domain of TCR clone 179171 (TRAV1-2, TRAJ10)
CAVRGVLTGGGNKITF

SEQ ID NO: 358342 - protein, 12 aa, Homo sapiens
  CDR3 for beta chain variable domain of TCR clone 179171 (TRBV11-2, TRBJ2-1)
CASSPGNNEQFF

SEQ ID NO: 358343 - protein, 16 aa, Homo sapiens
  CDR3 for alpha chain variable domain of TCR clone 179172 (TRAV3, TRAJ37)
CAVRPHRSGNTGKLIF

SEQ ID NO: 358344 - protein, 11 aa, Homo sapiens
  CDR3 for beta chain variable domain of TCR clone 179172 (TRBV10-3, TRBJ2-7)
CAISEGLEQYF

SEQ ID NO: 358345 - protein, 13 aa, Homo sapiens
  CDR3 for alpha chain variable domain of TCR clone 179173 (TRAV26-2, TRAJ43)
CILRAVNNNDMRF

SEQ ID NO: 358346 - protein, 14 aa, Homo sapiens
  CDR3 for beta chain variable domain of TCR clone 179173 (TRBV5-1, TRBJ2-3)
CASRGQTSTDTQYF

SEQ ID NO: 358347 - protein, 17 aa, Homo sapiens
  CDR3 for alpha chain variable domain of TCR clone 179174 (TRAV3, TRAJ42)
CAVRDRDYGGSQGNLIF

SEQ ID NO: 358348 - protein, 13 aa, Homo sapiens
  CDR3 for beta chain variable domain of TCR clone 179174 (TRBV7-9, TRBJ1-6)
CASSLASLSPLHF

SEQ ID NO: 358349 - protein, 14 aa, Homo sapiens
  CDR3 for alpha chain variable domain of TCR clone 179175 (TRAV12-2, TRAJ40)
CAAKIPSGTYKYIF

SEQ ID NO: 358350 - protein, 17 aa, Homo sapiens
  CDR3 for beta chain variable domain of TCR clone 179175 (TRBV20-1, TRBJ2-1)
CSAFSGTSGSLYNEQFF

SEQ ID NO: 358351 - protein, 11 aa, Homo sapiens
  CDR3 for alpha chain variable domain of TCR clone 179176 (TRAV12-3, TRAJ26)
CAMSHGQNFVF

SEQ ID NO: 358352 - protein, 16 aa, Homo sapiens
  CDR3 for beta chain variable domain of TCR clone 179176 (TRBV10-3, TRBJ2-1)
CAISGVGDGGGGEQFF

SEQ ID NO: 358353 - protein, 15 aa, Homo sapiens
  CDR3 for alpha chain variable domain of TCR clone 179177 (TRAV3, TRAJ5)
CAVRDLDTGRRALNF

SEQ ID NO: 358354 - protein, 14 aa, Homo sapiens
  CDR3 for beta chain variable domain of TCR clone 179177 (TRBV25-1, TRBJ1-4)
CASSGGGQPEKLFF

SEQ ID NO: 358355 - protein, 17 aa, Homo sapiens
  CDR3 for alpha chain variable domain of TCR clone 179178 (TRAV8-4, TRAJ11)
CAVSDRGENSGYSTRTF

SEQ ID NO: 358356 - protein, 14 aa, Homo sapiens
  CDR3 for beta chain variable domain of TCR clone 179178 (TRBV20-1, TRBJ2-1)
CSPNDEASYNEQFF

SEQ ID NO: 358357 - protein, 12 aa, Homo sapiens
  CDR3 for alpha chain variable domain of TCR clone 179179 (TRAV12-3, TRAJ20)
CAMVRGDYKLSF

SEQ ID NO: 358358 - protein, 14 aa, Homo sapiens
  CDR3 for beta chain variable domain of TCR clone 179179 (TRBV18, TRBJ1-1)
CASSQGQGNTEAFF

SEQ ID NO: 358359 - protein, 13 aa, Homo sapiens
  CDR3 for alpha chain variable domain of TCR clone 179180 (TRAV20, TRAJ40)
CAVPFSGTYKYIF

SEQ ID NO: 358360 - protein, 13 aa, Homo sapiens
  CDR3 for beta chain variable domain of TCR clone 179180 (TRBV15, TRBJ2-5)
CATSQIGEETQYI

SEQ ID NO: 358361 - protein, 15 aa, Homo sapiens
  CDR3 for alpha chain variable domain of TCR clone 179181 (TRAV8-1, TRAJ23)
CAVNSHYNQGGKLIF

SEQ ID NO: 358362 - protein, 18 aa, Homo sapiens
  CDR3 for beta chain variable domain of TCR clone 179181 (TRBV18, TRBJ1-3)
CASSPRGGAGPSGNTIYF

SEQ ID NO: 358363 - protein, 11 aa, Homo sapiens
  CDR3 for alpha chain variable domain of TCR clone 179182 (TRAV12-3, TRAJ41)
CAMNALEALNF

SEQ ID NO: 358364 - protein, 16 aa, Homo sapiens
  CDR3 for beta chain variable domain of TCR clone 179182 (TRBV7-8, TRBJ2-3)
CASSTEGQRETDTQYF

SEQ ID NO: 358365 - protein, 14 aa, Homo sapiens
  CDR3 for alpha chain variable domain of TCR clone 179183 (TRAV27, TRAJ22)
CAGVSVLCIRQLTF

SEQ ID NO: 358366 - protein, 17 aa, Homo sapiens
  CDR3 for beta chain variable domain of TCR clone 179183 (TRBV14, TRBJ2-1)
CASSQDRRVTSYNEQFF

SEQ ID NO: 358367 - protein, 12 aa, Homo sapiens
  CDR3 for alpha chain variable domain of TCR clone 179184 (TRAV36/DV7, TRAJ40)
CAVGTGTYKYIF

SEQ ID NO: 358368 - protein, 11 aa, Homo sapiens
  CDR3 for beta chain variable domain of TCR clone 179184 (TRBV11-2, TRBJ1-1)
CASSINTEAFF

SEQ ID NO: 358369 - protein, 14 aa, Homo sapiens
  CDR3 for alpha chain variable domain of TCR clone 179185 (TRAV12-2, TRAJ13)
CAAKKTGGYQKGTF

SEQ ID NO: 358370 - protein, 15 aa, Homo sapiens
  CDR3 for beta chain variable domain of TCR clone 179185 (TRBV27, TRBJ2-1)
CASSNGGGSSNEQFF

SEQ ID NO: 358371 - protein, 14 aa, Homo sapiens
  CDR3 for alpha chain variable domain of TCR clone 179186 (TRAV12-2, TRAJ45)
CAANIGGGADGLTF

SEQ ID NO: 358372 - protein, 13 aa, Homo sapiens
  CDR3 for beta chain variable domain of TCR clone 179186 (TRBV28, TRBJ2-5)
CASSFAGGETQYF

SEQ ID NO: 358373 - protein, 13 aa, Homo sapiens
  CDR3 for alpha chain variable domain of TCR clone 179187 (TRAV26-2, TRAJ43)
CILRAGNKNDMRL

SEQ ID NO: 358374 - protein, 17 aa, Homo sapiens
  CDR3 for beta chain variable domain of TCR clone 179187 (TRBV20-1, TRBJ2-2)
CSASGSGQGGLTGELFF

SEQ ID NO: 358375 - protein, 18 aa, Homo sapiens
  CDR3 for alpha chain variable domain of TCR clone 179188 (TRAV21, TRAJ52)
CAVRPSPAGGTSSGKLTF

SEQ ID NO: 358376 - protein, 14 aa, Homo sapiens
  CDR3 for beta chain variable domain of TCR clone 179188 (TRBV7-2, TRBJ2-1)
CASSLEGGYNEQFF

SEQ ID NO: 358377 - protein, 14 aa, Homo sapiens
  CDR3 for alpha chain variable domain of TCR clone 179189 (TRAV3, TRAJ9)
FAVRGNTGGFKTIF

SEQ ID NO: 358378 - protein, 16 aa, Homo sapiens
  CDR3 for beta chain variable domain of TCR clone 179189 (TRBV7-2, TRBJ2-7)
CASSLGLAGGAYEQYF

SEQ ID NO: 358379 - protein, 13 aa, Homo sapiens
  CDR3 for alpha chain variable domain of TCR clone 179190 (TRAV3, TRAJ26)
CAVSRGYGQNFVF

SEQ ID NO: 358380 - protein, 15 aa, Homo sapiens
  CDR3 for beta chain variable domain of TCR clone 179190 (TRBV2, TRBJ2-2)
CASSRETVGTGELFF

SEQ ID NO: 358381 - protein, 10 aa, Homo sapiens
  CDR3 for alpha chain variable domain of TCR clone 179191 (TRAV36/DV7, TRAJ49)
CALTGNQFDF

SEQ ID NO: 358382 - protein, 14 aa, Homo sapiens
  CDR3 for beta chain variable domain of TCR clone 179191 (TRBV4-2, TRBJ2-5)
CASSQDRGRETQYF

SEQ ID NO: 358383 - protein, 18 aa, Homo sapiens
  CDR3 for alpha chain variable domain of TCR clone 179192 (TRAV26-1, TRAJ52)
CIVRVEGAGGTSYVKLTF

SEQ ID NO: 358384 - protein, 13 aa, Homo sapiens
  CDR3 for beta chain variable domain of TCR clone 179192 (TRBV7-3, TRBJ1-2)
CASSLKRGYGYTF

SEQ ID NO: 358385 - protein, 14 aa, Homo sapiens
  CDR3 for alpha chain variable domain of TCR clone 179193 (TRAV26-1, TRAJ38)
CIADSVGNNRKLIW

SEQ ID NO: 358386 - protein, 13 aa, Homo sapiens
  CDR3 for beta chain variable domain of TCR clone 179193 (TRBV20-1, TRBJ1-1)
CSARGGGNTEAFF

SEQ ID NO: 358387 - protein, 13 aa, Homo sapiens
  CDR3 for alpha chain variable domain of TCR clone 179194 (TRAV8-6, TRAJ15)
CCDFNQAGTALIF

SEQ ID NO: 358388 - protein, 14 aa, Homo sapiens
  CDR3 for beta chain variable domain of TCR clone 179194 (TRBV6-5, TRBJ2-7)
CAASRSGGSYEQYL

SEQ ID NO: 358389 - protein, 12 aa, Homo sapiens
  CDR3 for alpha chain variable domain of TCR clone 179195 (TRAV35, TRAJ47)
CAGREYGNKLVF

SEQ ID NO: 358390 - protein, 13 aa, Homo sapiens
  CDR3 for beta chain variable domain of TCR clone 179195 (TRBV12-5, TRBJ2-3)
CASGDRQSDTQYF

SEQ ID NO: 358391 - protein, 12 aa, Homo sapiens
  CDR3 for alpha chain variable domain of TCR clone 179196 (TRAV12-3, TRAJ20)
CAIVRGDYKLSF

SEQ ID NO: 358392 - protein, 14 aa, Homo sapiens
  CDR3 for beta chain variable domain of TCR clone 179196 (TRBV11-2, TRBJ2-1)
CASTTGQGNNEQFF

SEQ ID NO: 358393 - protein, 12 aa, Homo sapiens
  CDR3 for alpha chain variable domain of TCR clone 179197 (TRAV1-1, TRAJ43)
CAPRVSSDDMRF

SEQ ID NO: 358394 - protein, 15 aa, Homo sapiens
  CDR3 for beta chain variable domain of TCR clone 179197 (TRBV5-1, TRBJ2-7)
CASSLGDFTTYEQYF

SEQ ID NO: 358395 - protein, 14 aa, Homo sapiens
  CDR3 for alpha chain variable domain of TCR clone 179198 (TRAV14/DV4, TRAJ54)
CATISVQGAQKLVF

SEQ ID NO: 358396 - protein, 14 aa, Homo sapiens
  CDR3 for beta chain variable domain of TCR clone 179198 (TRBV20-1, TRBJ2-7)
CSAPELAGVGEQYF

SEQ ID NO: 358397 - protein, 17 aa, Homo sapiens
  CDR3 for alpha chain variable domain of TCR clone 179199 (TRAV3, TRAJ6)
CAVRDGPRAGGGYIPTF

SEQ ID NO: 358398 - protein, 12 aa, Homo sapiens
  CDR3 for beta chain variable domain of TCR clone 179199 (TRBV5-1, TRBJ2-7)
CASSLDSYEQYF

SEQ ID NO: 358399 - protein, 15 aa, Homo sapiens
  CDR3 for alpha chain variable domain of TCR clone 179200 (TRAV26-1, TRAJ42)
CIVRVKGGSQGNLLF

SEQ ID NO: 358400 - protein, 14 aa, Homo sapiens
  CDR3 for beta chain variable domain of TCR clone 179200 (TRBV19, TRBJ2-2)
CATTGHANTGELFF

SEQ ID NO: 358401 - protein, 16 aa, Homo sapiens
  CDR3 for alpha chain variable domain of TCR clone 179201 (TRAV30, TRAJ57)
CGTGSAPQGGSEKLVF

SEQ ID NO: 358402 - protein, 14 aa, Homo sapiens
  CDR3 for beta chain variable domain of TCR clone 179201 (TRBV18, TRBJ1-1)
CASSPGFQGVEAFF

SEQ ID NO: 358403 - protein, 14 aa, Homo sapiens
  CDR3 for alpha chain variable domain of TCR clone 179202 (TRAV12-1, TRAJ42)
CVVIYGGSQGNLIF

SEQ ID NO: 358404 - protein, 17 aa, Homo sapiens
  CDR3 for beta chain variable domain of TCR clone 179202 (TRBV3-1, TRBJ2-6)
CASSPNTGPTGANVLTF

SEQ ID NO: 358405 - protein, 14 aa, Homo sapiens
  CDR3 for alpha chain variable domain of TCR clone 179203 (TRAV36/DV7, TRAJ40)
CAVETTSGTYKYIF

SEQ ID NO: 358406 - protein, 13 aa, Homo sapiens
  CDR3 for beta chain variable domain of TCR clone 179203 (TRBV10-3, TRBJ2-5)
CALTSGAGETQYF

SEQ ID NO: 358407 - protein, 11 aa, Homo sapiens
  CDR3 for alpha chain variable domain of TCR clone 179204 (TRAV17, TRAJ9)
CGFTGGFKTIF

SEQ ID NO: 358408 - protein, 18 aa, Homo sapiens
  CDR3 for beta chain variable domain of TCR clone 179204 (TRBV12-4, TRBJ2-2)
CASSLVAGTRGRTGELIF

SEQ ID NO: 358409 - protein, 13 aa, Homo sapiens
  CDR3 for alpha chain variable domain of TCR clone 179205 (TRAV13-1, TRAJ6)
CAASKGGSYIPTF

SEQ ID NO: 358410 - protein, 14 aa, Homo sapiens
  CDR3 for beta chain variable domain of TCR clone 179205 (TRBV7-2, TRBJ2-1)
CASSLGGGYNEQFF

SEQ ID NO: 358411 - protein, 14 aa, Homo sapiens
  CDR3 for alpha chain variable domain of TCR clone 179206 (TRAV13-2, TRAJ17)
CAENSKAAGNKLTF

SEQ ID NO: 358412 - protein, 15 aa, Homo sapiens
  CDR3 for beta chain variable domain of TCR clone 179206 (TRBV5-1, TRBJ2-1)
CASSPPRAPYNEQFF

SEQ ID NO: 358413 - protein, 13 aa, Homo sapiens
  CDR3 for alpha chain variable domain of TCR clone 179207 (TRAV12-1, TRAJ7)
CVVNMRGNNRLAF

SEQ ID NO: 358414 - protein, 15 aa, Homo sapiens
  CDR3 for beta chain variable domain of TCR clone 179207 (TRBV27, TRBJ2-3)
CASSLGLAATYTQYF

SEQ ID NO: 358415 - protein, 14 aa, Homo sapiens
  CDR3 for alpha chain variable domain of TCR clone 179208 (TRAV12-2, TRAJ13)
CAVKKTGGYQKVTF

SEQ ID NO: 358416 - protein, 15 aa, Homo sapiens
  CDR3 for beta chain variable domain of TCR clone 179208 (TRBV11-3, TRBJ1-1)
CASSLGGPGDTEAFF

SEQ ID NO: 358417 - protein, 17 aa, Homo sapiens
  CDR3 for alpha chain variable domain of TCR clone 179209 (TRAV1-1, TRAJ28)
CAVDPAYSGAGSYQLTF

SEQ ID NO: 358418 - protein, 14 aa, Homo sapiens
  CDR3 for beta chain variable domain of TCR clone 179209 (TRBV19, TRBJ2-1)
CASPTFVLSVEQFF

SEQ ID NO: 358419 - protein, 12 aa, Homo sapiens
  CDR3 for alpha chain variable domain of TCR clone 179210 (TRAV20, TRAJ33)
CAVRGSNYQLIW

SEQ ID NO: 358420 - protein, 13 aa, Homo sapiens
  CDR3 for beta chain variable domain of TCR clone 179210 (TRBV4-3, TRBJ1-1)
CASSPTGNTEAVF

SEQ ID NO: 358421 - protein, 12 aa, Homo sapiens
  CDR3 for alpha chain variable domain of TCR clone 179211 (TRAV2, TRAJ31)
CAVEDNNARLMF

SEQ ID NO: 358422 - protein, 17 aa, Homo sapiens
  CDR3 for beta chain variable domain of TCR clone 179211 (TRBV18, TRBJ1-5)
CASSPTMGQGTNQPQHF

SEQ ID NO: 358423 - protein, 12 aa, Homo sapiens
  CDR3 for alpha chain variable domain of TCR clone 179212 (TRAV21, TRAJ31)
CAVWGNNARLMF

SEQ ID NO: 358424 - protein, 16 aa, Homo sapiens
  CDR3 for beta chain variable domain of TCR clone 179212 (TRBV27, TRBJ2-5)
CASSYGLGGQKETQYF

SEQ ID NO: 358425 - protein, 14 aa, Homo sapiens
  CDR3 for alpha chain variable domain of TCR clone 179213 (TRAV27, TRAJ44)
CAASFTGTASKLTF

SEQ ID NO: 358426 - protein, 15 aa, Homo sapiens
  CDR3 for beta chain variable domain of TCR clone 179213 (TRBV7-8, TRBJ1-1)
CASSLGDSRNTEAFF

SEQ ID NO: 358427 - protein, 12 aa, Homo sapiens
  CDR3 for alpha chain variable domain of TCR clone 179214 (TRAV20, TRAJ56)
CAVTGAKSKLTF

SEQ ID NO: 358428 - protein, 14 aa, Homo sapiens
  CDR3 for beta chain variable domain of TCR clone 179214 (TRBV20-1, TRBJ2-5)
GSALVPGYQETQYF

SEQ ID NO: 358429 - protein, 14 aa, Homo sapiens
  CDR3 for alpha chain variable domain of TCR clone 179215 (TRAV2, TRAJ37)
CAVDFTSNTGKLIF

SEQ ID NO: 358430 - protein, 15 aa, Homo sapiens
  CDR3 for beta chain variable domain of TCR clone 179215 (TRBV20-1, TRBJ1-1)
CSASRGVTGNTEASF

SEQ ID NO: 358431 - protein, 17 aa, Homo sapiens
  CDR3 for alpha chain variable domain of TCR clone 179216 (TRAV8-6, TRAJ58)
CAVSSWVRETSGARLTF

SEQ ID NO: 358432 - protein, 15 aa, Homo sapiens
  CDR3 for beta chain variable domain of TCR clone 179216 (TRBV6-5, TRBJ2-1)
CASSYDAGAGNEQFF

SEQ ID NO: 358433 - protein, 13 aa, Homo sapiens
  CDR3 for alpha chain variable domain of TCR clone 179217 (TRAV26-1, TRAJ33)
CIVRVEGNYQLIW

SEQ ID NO: 358434 - protein, 16 aa, Homo sapiens
  CDR3 for beta chain variable domain of TCR clone 179217 (TRBV15, TRBJ2-7)
CASSRDRGRRRGEQYF

SEQ ID NO: 358435 - protein, 15 aa, Homo sapiens
  CDR3 for alpha chain variable domain of TCR clone 179218 (TRAV16, TRAJ12)
CPKWPLRDSSYKLIF

SEQ ID NO: 358436 - protein, 13 aa, Homo sapiens
  CDR3 for beta chain variable domain of TCR clone 179218 (TRBV4-2, TRBJ1-1)
CASSQAGNTEAFF

SEQ ID NO: 358437 - protein, 12 aa, Homo sapiens
  CDR3 for alpha chain variable domain of TCR clone 179219 (TRAV26-2, TRAJ21)
CILKGNVNKFYF

SEQ ID NO: 358438 - protein, 14 aa, Homo sapiens
  CDR3 for beta chain variable domain of TCR clone 179219 (TRBV7-9, TRBJ1-1)
CASTPLQSYTEAFF

SEQ ID NO: 358439 - protein, 11 aa, Homo sapiens
  CDR3 for alpha chain variable domain of TCR clone 179220 (TRAV17, TRAJ31)
CATSNNARLMF

SEQ ID NO: 358440 - protein, 12 aa, Homo sapiens
  CDR3 for beta chain variable domain of TCR clone 179220 (TRBV19, TRBJ2-1)
CASSQISNEQFF

SEQ ID NO: 358441 - protein, 18 aa, Homo sapiens
  CDR3 for alpha chain variable domain of TCR clone 179221 (TRAV13-1, TRAJ52)
CAASKRSAGGTSYGKLTF

SEQ ID NO: 358442 - protein, 16 aa, Homo sapiens
  CDR3 for beta chain variable domain of TCR clone 179221 (TRBV6-6, TRBJ2-7)
CASRASGRARSYEQYF

SEQ ID NO: 358443 - protein, 14 aa, Homo sapiens
  CDR3 for alpha chain variable domain of TCR clone 179222 (TRAV9-2, TRAJ39)
CALYIYNAVNMLTF

SEQ ID NO: 358444 - protein, 13 aa, Homo sapiens
  CDR3 for beta chain variable domain of TCR clone 179222 (TRBV18, TRBJ1-1)
CASSPGRNTEAFF

SEQ ID NO: 358445 - protein, 10 aa, Homo sapiens
  CDR3 for alpha chain variable domain of TCR clone 179223 (TRAV17, TRAJ52)
SATSYGKLTF

SEQ ID NO: 358446 - protein, 13 aa, Homo sapiens
  CDR3 for beta chain variable domain of TCR clone 179223 (TRBV29-1, TRBJ2-5)
CSVGGTSAETQYV

SEQ ID NO: 358447 - protein, 11 aa, Homo sapiens
  CDR3 for alpha chain variable domain of TCR clone 179224 (TRAV1-1, TRAJ23)
CAVRFGGKLIF

SEQ ID NO: 358448 - protein, 13 aa, Homo sapiens
  CDR3 for beta chain variable domain of TCR clone 179224 (TRBV7-3, TRBJ2-5)
CASSFRGGETQYF

SEQ ID NO: 358449 - protein, 14 aa, Homo sapiens
  CDR3 for alpha chain variable domain of TCR clone 179225 (TRAV26-1, TRAJ52)
CIVKGGTSYGKLTF

SEQ ID NO: 358450 - protein, 16 aa, Homo sapiens
  CDR3 for beta chain variable domain of TCR clone 179225 (TRBV7-8, TRBJ2-6)
CASRVGDSSGANVLTF

SEQ ID NO: 358451 - protein, 12 aa, Homo sapiens
  CDR3 for alpha chain variable domain of TCR clone 179226 (TRAV26-1, TRAJ17)
CIVRSAGNKLTF

SEQ ID NO: 358452 - protein, 15 aa, Homo sapiens
  CDR3 for beta chain variable domain of TCR clone 179226 (TRBV27, TRBJ1-6)
CASSFDRGLGSPLHF

SEQ ID NO: 358453 - protein, 14 aa, Homo sapiens
  CDR3 for alpha chain variable domain of TCR clone 179227 (TRAV1-2, TRAJ16)
CAVNRFSDGQKLLF

SEQ ID NO: 358454 - protein, 15 aa, Homo sapiens
  CDR3 for beta chain variable domain of TCR clone 179227 (TRBV7-9, TRBJ1-6)
CASSSKGRGNSPLHF

SEQ ID NO: 358455 - protein, 20 aa, Homo sapiens
  CDR3 for alpha chain variable domain of TCR clone 179228 (TRAV12-3, TRAJ41)
SLFIRDSQPSDSATPEALNF

SEQ ID NO: 358456 - protein, 13 aa, Homo sapiens
  CDR3 for beta chain variable domain of TCR clone 179228 (TRBV10-3, TRBJ1-2)
CAINADLNYGYTF

SEQ ID NO: 358457 - protein, 11 aa, Homo sapiens
  CDR3 for alpha chain variable domain of TCR clone 179229 (TRAV36/DV7, TRAJ33)
CAVDSNYQLIW

SEQ ID NO: 358458 - protein, 13 aa, Homo sapiens
  CDR3 for beta chain variable domain of TCR clone 179229 (TRBV12-5, TRBJ2-1)
CASGLGRGNEQFF

SEQ ID NO: 358459 - protein, 13 aa, Homo sapiens
  CDR3 for alpha chain variable domain of TCR clone 179230 (TRAV13-1, TRAJ53)
QAGSGGSNYKLTF

SEQ ID NO: 358460 - protein, 12 aa, Homo sapiens
  CDR3 for beta chain variable domain of TCR clone 179230 (TRBV18, TRBJ1-4)
CASSPSREKLFF

SEQ ID NO: 358461 - protein, 14 aa, Homo sapiens
  CDR3 for alpha chain variable domain of TCR clone 179231 (TRAV38-1, TRAJ45)
CASHSGGGDDGLTF

SEQ ID NO: 358462 - protein, 13 aa, Homo sapiens
  CDR3 for beta chain variable domain of TCR clone 179231 (TRBV10-3, TRBJ1-2)
CAISERDGYGYTF

SEQ ID NO: 358463 - protein, 15 aa, Homo sapiens
  CDR3 for alpha chain variable domain of TCR clone 179232 (TRAV3, TRAJ22)
CAVRDRGGSARQLTF

SEQ ID NO: 358464 - protein, 12 aa, Homo sapiens
  CDR3 for beta chain variable domain of TCR clone 179232 (TRBV5-7, TRBJ1-2)
CASSDRIHGYTF

SEQ ID NO: 358465 - protein, 14 aa, Homo sapiens
  CDR3 for alpha chain variable domain of TCR clone 179233 (TRAV1-2, TRAJ16)
CAVNRFSDGQKLLF

SEQ ID NO: 358466 - protein, 16 aa, Homo sapiens
  CDR3 for beta chain variable domain of TCR clone 179233 (TRBV3-1, TRBJ2-5)
CASSPGQFNGFGTQYV

SEQ ID NO: 358467 - protein, 16 aa, Homo sapiens
  CDR3 for alpha chain variable domain of TCR clone 179234 (TRAV36/DV7, TRAJ30)
CAVETYGLDRDDKIIF

SEQ ID NO: 358468 - protein, 16 aa, Homo sapiens
  CDR3 for beta chain variable domain of TCR clone 179234 (TRBV7-9, TRBJ2-1)
CASSDVAGGSYNEQFF

SEQ ID NO: 358469 - protein, 14 aa, Homo sapiens
  CDR3 for alpha chain variable domain of TCR clone 179235 (TRAV1-2, TRAJ16)
CAVNRFSDGQKLLF

SEQ ID NO: 358470 - protein, 14 aa, Homo sapiens
  CDR3 for beta chain variable domain of TCR clone 179235 (TRBV12-5, TRBJ2-1)
CASGLKGSNDEQFF

SEQ ID NO: 358471 - protein, 13 aa, Homo sapiens
  CDR3 for alpha chain variable domain of TCR clone 179236 (TRAV2, TRAJ29)
CAAQNSGNTPLVF

SEQ ID NO: 358472 - protein, 14 aa, Homo sapiens
  CDR3 for beta chain variable domain of TCR clone 179236 (TRBV7-9, TRBJ2-4)
CASSLAVGGNMQYF

SEQ ID NO: 358473 - protein, 12 aa, Homo sapiens
  CDR3 for alpha chain variable domain of TCR clone 179237 (TRAV27, TRAJ41)
CAEGDSGYALNF

SEQ ID NO: 358474 - protein, 14 aa, Homo sapiens
  CDR3 for beta chain variable domain of TCR clone 179237 (TRBV19, TRBJ1-5)
CASSLGTGGQPQHF

SEQ ID NO: 358475 - protein, 18 aa, Homo sapiens
  CDR3 for alpha chain variable domain of TCR clone 179238 (TRAV21, TRAJ52)
CAVRPSPAGGTSYGKLTF

SEQ ID NO: 358476 - protein, 17 aa, Homo sapiens
  CDR3 for beta chain variable domain of TCR clone 179238 (TRBV11-2, TRBJ2-1)
RASSLYPPGVEYNEQFF

SEQ ID NO: 358477 - protein, 16 aa, Homo sapiens
  CDR3 for alpha chain variable domain of TCR clone 179239 (TRAV3, TRAJ37)
CAVRGKGSGNTGKPIF

SEQ ID NO: 358478 - protein, 15 aa, Homo sapiens
  CDR3 for beta chain variable domain of TCR clone 179239 (TRBV5-1, TRBJ2-7)
CASSLNGGPAREQYF

SEQ ID NO: 358479 - protein, 14 aa, Homo sapiens
  CDR3 for alpha chain variable domain of TCR clone 179240 (TRAV3, TRAJ22)
CAVRDYGSARQLTF

SEQ ID NO: 358480 - protein, 13 aa, Homo sapiens
  CDR3 for beta chain variable domain of TCR clone 179240 (TRBV11-2, TRBJ2-5)
CASGHGDKETQYF

SEQ ID NO: 358481 - protein, 13 aa, Homo sapiens
  CDR3 for alpha chain variable domain of TCR clone 179241 (TRAV35, TRAJ53)
CAAQESSNYKLTF

SEQ ID NO: 358482 - protein, 11 aa, Homo sapiens
  CDR3 for beta chain variable domain of TCR clone 179241 (TRBV29-1, TRBJ2-5)
CSEDRTGTQYF

SEQ ID NO: 358483 - protein, 13 aa, Homo sapiens
  CDR3 for alpha chain variable domain of TCR clone 179242 (TRAV12-1, TRAJ49)
CVVILNTGNQFYC

SEQ ID NO: 358484 - protein, 13 aa, Homo sapiens
  CDR3 for beta chain variable domain of TCR clone 179242 (TRBV10-3, TRBJ2-7)
CASKLAVNYEQYF

SEQ ID NO: 358485 - protein, 12 aa, Homo sapiens
  CDR3 for alpha chain variable domain of TCR clone 179243 (TRAV12-3, TRAJ29)
CAAAKGNTPLVF

SEQ ID NO: 358486 - protein, 17 aa, Homo sapiens
  CDR3 for beta chain variable domain of TCR clone 179243 (TRBV7-3, TRBJ2-3)
CASSLMKRMRGADTQYF

SEQ ID NO: 358487 - protein, 10 aa, Homo sapiens
  CDR3 for alpha chain variable domain of TCR clone 179244 (TRAV23/DV6, TRAJ22)
CAASSRGRRF

SEQ ID NO: 358488 - protein, 15 aa, Homo sapiens
  CDR3 for beta chain variable domain of TCR clone 179244 (TRBV10-3, TRBJ2-3)
CAIDTSGRRTDTQYF

SEQ ID NO: 358489 - protein, 15 aa, Homo sapiens
  CDR3 for alpha chain variable domain of TCR clone 179245 (TRAV12-1, TRAJ45)
CVVLSGGGGADGLTF

SEQ ID NO: 358490 - protein, 11 aa, Homo sapiens
  CDR3 for beta chain variable domain of TCR clone 179245 (TRBV7-3, TRBJ2-3)
CASSSSDTQYF

SEQ ID NO: 358491 - protein, 15 aa, Homo sapiens
  CDR3 for alpha chain variable domain of TCR clone 179246 (TRAV16, TRAJ42)
CALRRGGGSQGNLIF

SEQ ID NO: 358492 - protein, 16 aa, Homo sapiens
  CDR3 for beta chain variable domain of TCR clone 179246 (TRBV12-5, TRBJ2-5)
CASGPRTSGNQETQYF

SEQ ID NO: 358493 - protein, 12 aa, Homo sapiens
  CDR3 for alpha chain variable domain of TCR clone 179247 (TRAV20, TRAJ39)
CAVGNAGNMLTF

SEQ ID NO: 358494 - protein, 17 aa, Homo sapiens
  CDR3 for beta chain variable domain of TCR clone 179247 (TRBV4-1, TRBJ2-3)
CASSQGYVSGGTDTQCF

SEQ ID NO: 358495 - protein, 13 aa, Homo sapiens
  CDR3 for alpha chain variable domain of TCR clone 179248 (TRAV13-1, TRAJ49)
CAAMLYTGNQFYF

SEQ ID NO: 358496 - protein, 14 aa, Homo sapiens
  CDR3 for beta chain variable domain of TCR clone 179248 (TRBV6-1, TRBJ1-3)
CASVQGGGGNTIYF

SEQ ID NO: 358497 - protein, 16 aa, Homo sapiens
  CDR3 for alpha chain variable domain of TCR clone 179249 (TRAV17, TRAJ28)
CATDEYSGAGSYQLTF

SEQ ID NO: 358498 - protein, 14 aa, Homo sapiens
  CDR3 for beta chain variable domain of TCR clone 179249 (TRBV18, TRBJ2-7)
CASSPRGGAYEQYF

SEQ ID NO: 358499 - protein, 12 aa, Homo sapiens
  CDR3 for alpha chain variable domain of TCR clone 179250 (TRAV1-1, TRAJ15)
CAVGQAGTALIF

SEQ ID NO: 358500 - protein, 13 aa, Homo sapiens
  CDR3 for beta chain variable domain of TCR clone 179250 (TRBV10-3, TRBJ1-1)
CAIFPEGGTEAFF

SEQ ID NO: 358501 - protein, 17 aa, Homo sapiens
  CDR3 for alpha chain variable domain of TCR clone 179251 (TRAV3, TRAJ4)
CAVRDGTGGYNKLILEQ

SEQ ID NO: 358502 - protein, 13 aa, Homo sapiens
  CDR3 for beta chain variable domain of TCR clone 179251 (TRBV12-5, TRBJ1-2)
CASGVRTGNGYAF

SEQ ID NO: 358503 - protein, 14 aa, Homo sapiens
  CDR3 for alpha chain variable domain of TCR clone 179252 (TRAV12-1, TRAJ34)
CGEPASYNTDKLIF

SEQ ID NO: 358504 - protein, 13 aa, Homo sapiens
  CDR3 for beta chain variable domain of TCR clone 179252 (TRBV7-9, TRBJ2-5)
CASLSPGQETQYF

SEQ ID NO: 358505 - protein, 13 aa, Homo sapiens
  CDR3 for alpha chain variable domain of TCR clone 179253 (TRAV17, TRAJ26)
CATVDNYGQNFVF

SEQ ID NO: 358506 - protein, 15 aa, Homo sapiens
  CDR3 for beta chain variable domain of TCR clone 179253 (TRBV10-3, TRBJ2-1)
CAISDVQDRAYEQFF

SEQ ID NO: 358507 - protein, 11 aa, Homo sapiens
  CDR3 for alpha chain variable domain of TCR clone 179254 (TRAV3, TRAJ21)
CAVGNFNKFYI

SEQ ID NO: 358508 - protein, 16 aa, Homo sapiens
  CDR3 for beta chain variable domain of TCR clone 179254 (TRBV7-6, TRBJ2-1)
CASSAPGPSSYNEQFF

SEQ ID NO: 358509 - protein, 20 aa, Homo sapiens
  CDR3 for alpha chain variable domain of TCR clone 179255 (TRAV21, TRAJ4)
AASQPGDSATLAGGYNKLIF

SEQ ID NO: 358510 - protein, 19 aa, Homo sapiens
  CDR3 for beta chain variable domain of TCR clone 179255 (TRBV18, TRBJ1-3)
FASSPLSRTGMSSGNTIYF

SEQ ID NO: 358511 - protein, 18 aa, Homo sapiens
  CDR3 for alpha chain variable domain of TCR clone 179256 (TRAV21, TRAJ53)
CAVKGGENSGGSNYKLTF

SEQ ID NO: 358512 - protein, 13 aa, Homo sapiens
  CDR3 for beta chain variable domain of TCR clone 179256 (TRBV12-4, TRBJ1-1)
CASSTGTGFEAFF

SEQ ID NO: 358513 - protein, 15 aa, Homo sapiens
  CDR3 for alpha chain variable domain of TCR clone 179257 (TRAV17, TRAJ22)
CATVAPSGSARQLTF

SEQ ID NO: 358514 - protein, 13 aa, Homo sapiens
  CDR3 for beta chain variable domain of TCR clone 179257 (TRBV10-3, TRBJ2-7)
CASKLAVNYEQYF

SEQ ID NO: 358515 - protein, 14 aa, Homo sapiens
  CDR3 for alpha chain variable domain of TCR clone 179258 (TRAV23/DV6, TRAJ22)
CAADPSGSARQPTF

SEQ ID NO: 358516 - protein, 14 aa, Homo sapiens
  CDR3 for beta chain variable domain of TCR clone 179258 (TRBV5-1, TRBJ2-7)
CASSLWGAQDEQYF

SEQ ID NO: 358517 - protein, 13 aa, Homo sapiens
  CDR3 for alpha chain variable domain of TCR clone 179259 (TRAV21, TRAJ20)
CAVGLRVDYKLSF

SEQ ID NO: 358518 - protein, 12 aa, Homo sapiens
  CDR3 for beta chain variable domain of TCR clone 179259 (TRBV2, TRBJ2-7)
CASTYRTDEQYF

SEQ ID NO: 358519 - protein, 15 aa, Homo sapiens
  CDR3 for alpha chain variable domain of TCR clone 179260 (TRAV21, TRAJ37)
CAVRPTLSNTGKLIF

SEQ ID NO: 358520 - protein, 13 aa, Homo sapiens
  CDR3 for beta chain variable domain of TCR clone 179260 (TRBV9, TRBJ2-1)
CASSSDSYNEQFF

SEQ ID NO: 358521 - protein, 13 aa, Homo sapiens
  CDR3 for alpha chain variable domain of TCR clone 179261 (TRAV12-1, TRAJ26)
SATYLYYGQNFVF

SEQ ID NO: 358522 - protein, 15 aa, Homo sapiens
  CDR3 for beta chain variable domain of TCR clone 179261 (TRBV5-1, TRBJ2-6)
CAGSLDPSGANVLTF

SEQ ID NO: 358523 - protein, 16 aa, Homo sapiens
  CDR3 for alpha chain variable domain of TCR clone 179262 (TRAV36/DV7, TRAJ30)
CAVETYGLDRADKIIF

SEQ ID NO: 358524 - protein, 15 aa, Homo sapiens
  CDR3 for beta chain variable domain of TCR clone 179262 (TRBV6-6, TRBJ2-5)
CASSYGKIIQETQYF

SEQ ID NO: 358525 - protein, 15 aa, Homo sapiens
  CDR3 for alpha chain variable domain of TCR clone 179263 (TRAV14/DV4, TRAJ10)
CAMRELTGGGNKLTF

SEQ ID NO: 358526 - protein, 13 aa, Homo sapiens
  CDR3 for beta chain variable domain of TCR clone 179263 (TRBV7-9, TRBJ2-3)
CTSSPGSTDTQYF

SEQ ID NO: 358527 - protein, 11 aa, Homo sapiens
  CDR3 for alpha chain variable domain of TCR clone 179264 (TRAV21, TRAJ34)
CAVTNTDKLIF

SEQ ID NO: 358528 - protein, 16 aa, Homo sapiens
  CDR3 for beta chain variable domain of TCR clone 179264 (TRBV4-2, TRBJ2-3)
CASSQELAGDTDTQYF

SEQ ID NO: 358529 - protein, 15 aa, Homo sapiens
  CDR3 for alpha chain variable domain of TCR clone 179265 (TRAV19, TRAJ9)
CALSEARTGGFKPIF

SEQ ID NO: 358530 - protein, 17 aa, Homo sapiens
  CDR3 for beta chain variable domain of TCR clone 179265 (TRBV28, TRBJ2-5)
CASSTPEGDALQETQYF

SEQ ID NO: 358531 - protein, 10 aa, Homo sapiens
  CDR3 for alpha chain variable domain of TCR clone 179266 (TRAV29/DV5, )
CAASAFRTQI

SEQ ID NO: 358532 - protein, 13 aa, Homo sapiens
  CDR3 for beta chain variable domain of TCR clone 179266 (TRBV27, TRBJ1-1)
CASSLSIGAEAFF

SEQ ID NO: 358533 - protein, 14 aa, Homo sapiens
  CDR3 for alpha chain variable domain of TCR clone 179267 (TRAV26-1, TRAJ38)
CIADNAGNNRKLIW

SEQ ID NO: 358534 - protein, 13 aa, Homo sapiens
  CDR3 for beta chain variable domain of TCR clone 179267 (TRBV20-1, TRBJ1-1)
CSARGGGNTEEFF

SEQ ID NO: 358535 - protein, 14 aa, Homo sapiens
  CDR3 for alpha chain variable domain of TCR clone 179268 (TRAV3, TRAJ6)
CAVRDWGGSYIPTF

SEQ ID NO: 358536 - protein, 15 aa, Homo sapiens
  CDR3 for beta chain variable domain of TCR clone 179268 (TRBV5-1, TRBJ2-1)
CASSPTRAPYNEQFF

SEQ ID NO: 358537 - protein, 14 aa, Homo sapiens
  CDR3 for alpha chain variable domain of TCR clone 179269 (TRAV2, TRAJ37)
CAVDFTSNTGKLIF

SEQ ID NO: 358538 - protein, 14 aa, Homo sapiens
  CDR3 for beta chain variable domain of TCR clone 179269 (TRBV19, TRBJ2-2)
CASSTLHRSGELFF

SEQ ID NO: 358539 - protein, 12 aa, Homo sapiens
  CDR3 for alpha chain variable domain of TCR clone 179270 (TRAV38-2/DV8, TRAJ48)
CALLSGNEKLTF

SEQ ID NO: 358540 - protein, 15 aa, Homo sapiens
  CDR3 for beta chain variable domain of TCR clone 179270 (TRBV6-1, TRBJ2-1)
CPSSELRGQYNEQFF

SEQ ID NO: 358541 - protein, 13 aa, Homo sapiens
  CDR3 for alpha chain variable domain of TCR clone 179271 (TRAV12-3, TRAJ33)
CAMSVNSNYQLLW

SEQ ID NO: 358542 - protein, 15 aa, Homo sapiens
  CDR3 for beta chain variable domain of TCR clone 179271 (TRBV20-1, TRBJ2-7)
CSARDRVSGMDEQYF

SEQ ID NO: 358543 - protein, 11 aa, Homo sapiens
  CDR3 for alpha chain variable domain of TCR clone 179272 (TRAV13-2, TRAJ26)
CAEIPGQTFVF

SEQ ID NO: 358544 - protein, 19 aa, Homo sapiens
  CDR3 for beta chain variable domain of TCR clone 179272 (TRBV19, TRBJ2-2)
CASTRPGLAGGRVTGELFF

SEQ ID NO: 358545 - protein, 13 aa, Homo sapiens
  CDR3 for alpha chain variable domain of TCR clone 179273 (TRAV8-6, TRAJ8)
CAVSNACFQKLVF

SEQ ID NO: 358546 - protein, 15 aa, Homo sapiens
  CDR3 for beta chain variable domain of TCR clone 179273 (TRBV28, TRBJ2-5)
CASSSGRTIQETQYF

SEQ ID NO: 358547 - protein, 13 aa, Homo sapiens
  CDR3 for alpha chain variable domain of TCR clone 179274 (TRAV2, TRAJ13)
CAVESGVYQKVTF

SEQ ID NO: 358548 - protein, 13 aa, Homo sapiens
  CDR3 for beta chain variable domain of TCR clone 179274 (TRBV7-2, TRBJ1-1)
CASNLKGAKVAFF

SEQ ID NO: 358549 - protein, 12 aa, Homo sapiens
  CDR3 for alpha chain variable domain of TCR clone 179275 (TRAV12-3, TRAJ17)
CALTLTGNKLTF

SEQ ID NO: 358550 - protein, 16 aa, Homo sapiens
  CDR3 for beta chain variable domain of TCR clone 179275 (TRBV5-1, TRBJ2-3)
GASSLGLAVYTDTQYF

SEQ ID NO: 358551 - protein, 15 aa, Homo sapiens
  CDR3 for alpha chain variable domain of TCR clone 179276 (TRAV8-6, TRAJ6)
CAVSFTSGGSYIPTF

SEQ ID NO: 358552 - protein, 13 aa, Homo sapiens
  CDR3 for beta chain variable domain of TCR clone 179276 (TRBV7-2, TRBJ2-2)
CASSLAVTGELFF

SEQ ID NO: 358553 - protein, 14 aa, Homo sapiens
  CDR3 for alpha chain variable domain of TCR clone 179277 (TRAV17, TRAJ35)
CATDRPGFGNVLHC

SEQ ID NO: 358554 - protein, 15 aa, Homo sapiens
  CDR3 for beta chain variable domain of TCR clone 179277 (TRBV28, TRBJ2-5)
CASSSGRVIQETLYF

SEQ ID NO: 358555 - protein, 15 aa, Homo sapiens
  CDR3 for alpha chain variable domain of TCR clone 179278 (TRAV12-1, TRAJ44)
CLVFVNTGTASKLTF

SEQ ID NO: 358556 - protein, 16 aa, Homo sapiens
  CDR3 for beta chain variable domain of TCR clone 179278 (TRBV20-1, TRBJ2-5)
CSPGGTSGGYMETQYF

SEQ ID NO: 358557 - protein, 16 aa, Homo sapiens
  CDR3 for alpha chain variable domain of TCR clone 179279 (TRAV30, TRAJ24)
CGTEIVDADSWGKFQF

SEQ ID NO: 358558 - protein, 14 aa, Homo sapiens
  CDR3 for beta chain variable domain of TCR clone 179279 (TRBV5-1, TRBJ2-1)
CASSALWAGNEQFF

SEQ ID NO: 358559 - protein, 13 aa, Homo sapiens
  CDR3 for alpha chain variable domain of TCR clone 179280 (TRAV29/DV5, TRAJ5)
CAASAKGRRALTF

SEQ ID NO: 358560 - protein, 15 aa, Homo sapiens
  CDR3 for beta chain variable domain of TCR clone 179280 (TRBV20-1, TRBJ2-3)
CGAEPLAGHGDTQYF

SEQ ID NO: 358561 - protein, 12 aa, Homo sapiens
  CDR3 for alpha chain variable domain of TCR clone 179281 (TRAV8-3, TRAJ26)
CAGDNYGQNFVF

SEQ ID NO: 358562 - protein, 15 aa, Homo sapiens
  CDR3 for beta chain variable domain of TCR clone 179281 (TRBV7-2, TRBJ2-2)
CASSPTGANTGELFF

SEQ ID NO: 358563 - protein, 12 aa, Homo sapiens
  CDR3 for alpha chain variable domain of TCR clone 179282 (TRAV30, TRAJ39)
CGRGNAGNMLTF

SEQ ID NO: 358564 - protein, 16 aa, Homo sapiens
  CDR3 for beta chain variable domain of TCR clone 179282 (TRBV4-1, TRBJ2-1)
CASSQEAGQGSDEQFF

SEQ ID NO: 358565 - protein, 11 aa, Homo sapiens
  CDR3 for alpha chain variable domain of TCR clone 179283 (TRAV35, TRAJ29)
CAGAGNTPLVF

SEQ ID NO: 358566 - protein, 13 aa, Homo sapiens
  CDR3 for beta chain variable domain of TCR clone 179283 (TRBV12-5, TRBJ2-3)
CASGDRQSDTQYF

SEQ ID NO: 358567 - protein, 17 aa, Homo sapiens
  CDR3 for alpha chain variable domain of TCR clone 179284 (TRAV3, TRAJ42)
CAVRDRDYGGSQGNLIF

SEQ ID NO: 358568 - protein, 16 aa, Homo sapiens
  CDR3 for beta chain variable domain of TCR clone 179284 (TRBV4-1, TRBJ2-3)
CASSQRAGGLTDTQYF

SEQ ID NO: 358569 - protein, 11 aa, Homo sapiens
  CDR3 for alpha chain variable domain of TCR clone 179285 (TRAV17, TRAJ43)
CATPRSNDMRF

SEQ ID NO: 358570 - protein, 15 aa, Homo sapiens
  CDR3 for beta chain variable domain of TCR clone 179285 (TRBV11-2, TRBJ2-1)
CASSLGTSGLNGQFV

SEQ ID NO: 358571 - protein, 10 aa, Homo sapiens
  CDR3 for alpha chain variable domain of TCR clone 179286 (TRAV27, TRAJ58)
SETSGSRLTF

SEQ ID NO: 358572 - protein, 16 aa, Homo sapiens
  CDR3 for beta chain variable domain of TCR clone 179286 (TRBV11-2, TRBJ1-1)
CASSLREGGEHSKAFF

SEQ ID NO: 358573 - protein, 13 aa, Homo sapiens
  CDR3 for alpha chain variable domain of TCR clone 179287 (TRAV12-3, TRAJ52)
CAMSVGGAGGTSY

SEQ ID NO: 358574 - protein, 15 aa, Homo sapiens
  CDR3 for beta chain variable domain of TCR clone 179287 (TRBV27, TRBJ1-6)
CASSFDRGLGSPLHF

SEQ ID NO: 358575 - protein, 14 aa, Homo sapiens
  CDR3 for alpha chain variable domain of TCR clone 179288 (TRAV12-2, TRAJ13)
CAVKKNEGYQKVTF

SEQ ID NO: 358576 - protein, 15 aa, Homo sapiens
  CDR3 for beta chain variable domain of TCR clone 179288 (TRBV27, TRBJ2-1)
CASSNGGGSSNEQFF

SEQ ID NO: 358577 - protein, 10 aa, Homo sapiens
  CDR3 for alpha chain variable domain of TCR clone 179289 (TRAV39, TRAJ30)
CAVEYDKIIF

SEQ ID NO: 358578 - protein, 15 aa, Homo sapiens
  CDR3 for beta chain variable domain of TCR clone 179289 (TRBV28, TRBJ2-5)
CASSPGQGSIETQYF

SEQ ID NO: 358579 - protein, 15 aa, Homo sapiens
  CDR3 for alpha chain variable domain of TCR clone 179290 (TRAV3, TRAJ4)
FAVRDGTGGYNKLIF

SEQ ID NO: 358580 - protein, 10 aa, Homo sapiens
  CDR3 for beta chain variable domain of TCR clone 179290 (TRBV6-3, TRBJ2-2)
GVSNTGELFF

SEQ ID NO: 358581 - protein, 11 aa, Homo sapiens
  CDR3 for alpha chain variable domain of TCR clone 179291 (TRAV8-3, TRAJ18)
CAVGGRQRLNP

SEQ ID NO: 358582 - protein, 17 aa, Homo sapiens
  CDR3 for beta chain variable domain of TCR clone 179291 (TRBV7-8, TRBJ2-6)
CASSAGTGGAGANVLTF

SEQ ID NO: 358583 - protein, 14 aa, Homo sapiens
  CDR3 for alpha chain variable domain of TCR clone 179292 (TRAV26-1, TRAJ45)
CIEVTGGGADGLTF

SEQ ID NO: 358584 - protein, 12 aa, Homo sapiens
  CDR3 for beta chain variable domain of TCR clone 179292 (TRBV7-6, TRBJ1-2)
CSSLVADYGYTF

SEQ ID NO: 358585 - protein, 15 aa, Homo sapiens
  CDR3 for alpha chain variable domain of TCR clone 179293 (TRAV8-3, TRAJ27)
CAVGPSQTNAGKSTF

SEQ ID NO: 358586 - protein, 15 aa, Homo sapiens
  CDR3 for beta chain variable domain of TCR clone 179293 (TRBV7-2, TRBJ2-1)
CASRSGLAGGNEQFF

SEQ ID NO: 358587 - protein, 15 aa, Homo sapiens
  CDR3 for alpha chain variable domain of TCR clone 179294 (TRAV12-3, TRAJ6)
CAMSATTGGSYIPTF

SEQ ID NO: 358588 - protein, 15 aa, Homo sapiens
  CDR3 for beta chain variable domain of TCR clone 179294 (TRBV11-2, TRBJ2-5)
CASSPRSGGLETQYF

SEQ ID NO: 358589 - protein, 14 aa, Homo sapiens
  CDR3 for alpha chain variable domain of TCR clone 179295 (TRAV21, TRAJ37)
CAVKGSSTTGKLIF

SEQ ID NO: 358590 - protein, 14 aa, Homo sapiens
  CDR3 for beta chain variable domain of TCR clone 179295 (TRBV7-2, TRBJ2-1)
CASSRGGARNEQFF

SEQ ID NO: 358591 - protein, 19 aa, Homo sapiens
  CDR3 for alpha chain variable domain of TCR clone 179296 (TRAV1-1, TRAJ35)
CAVRSIGFECAALRVRHSS

SEQ ID NO: 358592 - protein, 14 aa, Homo sapiens
  CDR3 for beta chain variable domain of TCR clone 179296 (TRBV5-7, TRBJ2-7)
CASSGGLSSYEQYF

SEQ ID NO: 358593 - protein, 15 aa, Homo sapiens
  CDR3 for alpha chain variable domain of TCR clone 179297 (TRAV27, TRAJ50)
CAGVGRGTSYDKVIF

SEQ ID NO: 358594 - protein, 14 aa, Homo sapiens
  CDR3 for beta chain variable domain of TCR clone 179297 (TRBV7-2, TRBJ1-1)
CASSFYDLNSEAFF

SEQ ID NO: 358595 - protein, 13 aa, Homo sapiens
  CDR3 for alpha chain variable domain of TCR clone 179298 (TRAV39, TRAJ17)
CAAQFTAGNKLTF

SEQ ID NO: 358596 - protein, 14 aa, Homo sapiens
  CDR3 for beta chain variable domain of TCR clone 179298 (TRBV7-2, TRBJ2-1)
CASSLGVGYNEQYF

SEQ ID NO: 358597 - protein, 12 aa, Homo sapiens
  CDR3 for alpha chain variable domain of TCR clone 179299 (TRAV1-1, TRAJ39)
CAVPEVGNMLTF

SEQ ID NO: 358598 - protein, 12 aa, Homo sapiens
  CDR3 for beta chain variable domain of TCR clone 179299 (TRBV2, TRBJ1-2)
CASSGQTYGYTF

SEQ ID NO: 358599 - protein, 14 aa, Homo sapiens
  CDR3 for alpha chain variable domain of TCR clone 179300 (TRAV4, TRAJ20)
CLVGRRSNDYKLSF

SEQ ID NO: 358600 - protein, 18 aa, Homo sapiens
  CDR3 for beta chain variable domain of TCR clone 179300 (TRBV2, TRBJ2-5)
CASSGDPQGRGAQETQYS

SEQ ID NO: 358601 - protein, 13 aa, Homo sapiens
  CDR3 for alpha chain variable domain of TCR clone 179301 (TRAV21, TRAJ57)
CAVTKGGSEKLVF

SEQ ID NO: 358602 - protein, 15 aa, Homo sapiens
  CDR3 for beta chain variable domain of TCR clone 179301 (TRBV5-1, TRBJ1-1)
CASSSTTGTNTEAFF

SEQ ID NO: 358603 - protein, 14 aa, Homo sapiens
  CDR3 for alpha chain variable domain of TCR clone 179302 (TRAV12-3, TRAJ9)
CAMSPNTGGFKTIF

SEQ ID NO: 358604 - protein, 12 aa, Homo sapiens
  CDR3 for beta chain variable domain of TCR clone 179302 (TRBV18, TRBJ2-7)
CASSTAMGEQYF

SEQ ID NO: 358605 - protein, 17 aa, Homo sapiens
  CDR3 for alpha chain variable domain of TCR clone 179303 (TRAV23/DV6, TRAJ57)
CAASSTLSQGGSEQPVF

SEQ ID NO: 358606 - protein, 14 aa, Homo sapiens
  CDR3 for beta chain variable domain of TCR clone 179303 (TRBV25-1, TRBJ1-1)
CASTHLGGNTEAFF

SEQ ID NO: 358607 - protein, 17 aa, Homo sapiens
  CDR3 for alpha chain variable domain of TCR clone 179304 (TRAV27, TRAJ42)
CAERVICYGGSQGNLIF

SEQ ID NO: 358608 - protein, 14 aa, Homo sapiens
  CDR3 for beta chain variable domain of TCR clone 179304 (TRBV6-6, TRBJ2-3)
CASRLQREADTQYF

SEQ ID NO: 358609 - protein, 14 aa, Homo sapiens
  CDR3 for alpha chain variable domain of TCR clone 179305 (TRAV13-1, TRAJ10)
CAAKEPGGGNKLTF

SEQ ID NO: 358610 - protein, 15 aa, Homo sapiens
  CDR3 for beta chain variable domain of TCR clone 179305 (TRBV6-5, TRBJ1-4)
CASSSVGGAGEKLFF

SEQ ID NO: 358611 - protein, 13 aa, Homo sapiens
  CDR3 for alpha chain variable domain of TCR clone 179306 (TRAV1-2, TRAJ9)
CAALNTGGFKTIF

SEQ ID NO: 358612 - protein, 13 aa, Homo sapiens
  CDR3 for beta chain variable domain of TCR clone 179306 (TRBV20-1, TRBJ1-2)
CSARGRVYGGYTF

SEQ ID NO: 358613 - protein, 15 aa, Homo sapiens
  CDR3 for alpha chain variable domain of TCR clone 179307 (TRAV26-1, TRAJ22)
CIVRVSFWFCKATDL

SEQ ID NO: 358614 - protein, 15 aa, Homo sapiens
  CDR3 for beta chain variable domain of TCR clone 179307 (TRBV7-3, TRBJ2-1)
CASSPTGGGEVEQFF

SEQ ID NO: 358615 - protein, 14 aa, Homo sapiens
  CDR3 for alpha chain variable domain of TCR clone 179308 (TRAV8-3, TRAJ35)
CAVVPQGFGNVLHC

SEQ ID NO: 358616 - protein, 18 aa, Homo sapiens
  CDR3 for beta chain variable domain of TCR clone 179308 (TRBV4-1, TRBJ1-5)
CASSQDPRGQGLNQPQHF

SEQ ID NO: 358617 - protein, 15 aa, Homo sapiens
  CDR3 for alpha chain variable domain of TCR clone 179309 (TRAV12-2, TRAJ53)
CAVNGGGGSNYKLTF

SEQ ID NO: 358618 - protein, 12 aa, Homo sapiens
  CDR3 for beta chain variable domain of TCR clone 179309 (TRBV12-4, TRBJ2-1)
CASSPGRNEQFF

SEQ ID NO: 358619 - protein, 12 aa, Homo sapiens
  CDR3 for alpha chain variable domain of TCR clone 179310 (TRAV16, TRAJ10)
CSRTGGGNKLTF

SEQ ID NO: 358620 - protein, 15 aa, Homo sapiens
  CDR3 for beta chain variable domain of TCR clone 179310 (TRBV6-3, TRBJ2-7)
CASSSLGTFFYEQYF

SEQ ID NO: 358621 - protein, 13 aa, Homo sapiens
  CDR3 for alpha chain variable domain of TCR clone 179311 (TRAV12-3, TRAJ33)
CPMSLNSNYQLIW

SEQ ID NO: 358622 - protein, 13 aa, Homo sapiens
  CDR3 for beta chain variable domain of TCR clone 179311 (TRBV7-2, TRBJ2-2)
CASSLAVTGELFF

SEQ ID NO: 358623 - protein, 16 aa, Homo sapiens
  CDR3 for alpha chain variable domain of TCR clone 179312 (TRAV13-1, TRAJ44)
CAAKATGTASNSPLGL

SEQ ID NO: 358624 - protein, 17 aa, Homo sapiens
  CDR3 for beta chain variable domain of TCR clone 179312 (TRBV7-3, TRBJ2-3)
RASSLMKRMRGADTQYF

SEQ ID NO: 358625 - protein, 14 aa, Homo sapiens
  CDR3 for alpha chain variable domain of TCR clone 179313 (TRAV3, TRAJ21)
CTVRDKYNFNKFYF

SEQ ID NO: 358626 - protein, 14 aa, Homo sapiens
  CDR3 for beta chain variable domain of TCR clone 179313 (TRBV27, TRBJ2-3)
CASRDSPITDTQYF

SEQ ID NO: 358627 - protein, 15 aa, Homo sapiens
  CDR3 for alpha chain variable domain of TCR clone 179314 (TRAV25, TRAJ52)
CAGRPGGTSYGKLTC

SEQ ID NO: 358628 - protein, 12 aa, Homo sapiens
  CDR3 for beta chain variable domain of TCR clone 179314 (TRBV7-8, TRBJ2-7)
CASSLGDREQYF

SEQ ID NO: 358629 - protein, 11 aa, Homo sapiens
  CDR3 for alpha chain variable domain of TCR clone 179315 (TRAV12-1, TRAJ21)
CVVNNFNKFYF

SEQ ID NO: 358630 - protein, 14 aa, Homo sapiens
  CDR3 for beta chain variable domain of TCR clone 179315 (TRBV15, TRBJ1-5)
CATSRKQANQPQHF

SEQ ID NO: 358631 - protein, 13 aa, Homo sapiens
  CDR3 for alpha chain variable domain of TCR clone 179316 (TRAV21, TRAJ20)
CAVSRLGDYKLSF

SEQ ID NO: 358632 - protein, 13 aa, Homo sapiens
  CDR3 for beta chain variable domain of TCR clone 179316 (TRBV7-3, TRBJ1-1)
CASSPAGGLEAFC

SEQ ID NO: 358633 - protein, 15 aa, Homo sapiens
  CDR3 for alpha chain variable domain of TCR clone 179317 (TRAV17, TRAJ4)
CATGTWSGGYNKLIF

SEQ ID NO: 358634 - protein, 15 aa, Homo sapiens
  CDR3 for beta chain variable domain of TCR clone 179317 (TRBV7-9, TRBJ2-7)
CASSLALAEAYEQYF

SEQ ID NO: 358635 - protein, 16 aa, Homo sapiens
  CDR3 for alpha chain variable domain of TCR clone 179318 (TRAV17, TRAJ53)
CATDALSGGSNYKLTF

SEQ ID NO: 358636 - protein, 11 aa, Homo sapiens
  CDR3 for beta chain variable domain of TCR clone 179318 (TRBV5-1, TRBJ2-7)
APSFRGYEQYF

SEQ ID NO: 358637 - protein, 17 aa, Homo sapiens
  CDR3 for alpha chain variable domain of TCR clone 179319 (TRAV17, TRAJ28)
CATDPRRGGAGSYQLTF

SEQ ID NO: 358638 - protein, 12 aa, Homo sapiens
  CDR3 for beta chain variable domain of TCR clone 179319 (TRBV24-1, TRBJ1-1)
CATLYPDTEAFF

SEQ ID NO: 358639 - protein, 11 aa, Homo sapiens
  CDR3 for alpha chain variable domain of TCR clone 179320 (TRAV21, TRAJ34)
CAVTNTDKLIF

SEQ ID NO: 358640 - protein, 16 aa, Homo sapiens
  CDR3 for beta chain variable domain of TCR clone 179320 (TRBV20-1, TRBJ1-4)
CSAPGQGVLTNEKLFF

SEQ ID NO: 358641 - protein, 15 aa, Homo sapiens
  CDR3 for alpha chain variable domain of TCR clone 179321 (TRAV25, TRAJ52)
CAGTSGGTSYGKLTF

SEQ ID NO: 358642 - protein, 14 aa, Homo sapiens
  CDR3 for beta chain variable domain of TCR clone 179321 (TRBV7-8, TRBJ2-3)
CASSLEAGTDTQYF

SEQ ID NO: 358643 - protein, 16 aa, Homo sapiens
  CDR3 for alpha chain variable domain of TCR clone 179322 (TRAV12-2, TRAJ28)
CAVITDSGAGSYNSLS

SEQ ID NO: 358644 - protein, 14 aa, Homo sapiens
  CDR3 for beta chain variable domain of TCR clone 179322 (TRBV25-1, TRBJ1-1)
CASTLLGGNTEAFF

SEQ ID NO: 358645 - protein, 17 aa, Homo sapiens
  CDR3 for alpha chain variable domain of TCR clone 179323 (TRAV3, TRAJ42)
CAVRDRDYGGSQGNRIF

SEQ ID NO: 358646 - protein, 14 aa, Homo sapiens
  CDR3 for beta chain variable domain of TCR clone 179323 (TRBV4-1, TRBJ2-2)
CASSQAVNTGELFF

SEQ ID NO: 358647 - protein, 16 aa, Homo sapiens
  CDR3 for alpha chain variable domain of TCR clone 179324 (TRAV23/DV6, TRAJ9)
CAASIGGNTGGCKTIF

SEQ ID NO: 358648 - protein, 11 aa, Homo sapiens
  CDR3 for beta chain variable domain of TCR clone 179324 (TRBV19, TRBJ1-1)
CASSIGSEAFF

SEQ ID NO: 358649 - protein, 13 aa, Homo sapiens
  CDR3 for alpha chain variable domain of TCR clone 179325 (TRAV20, TRAJ21)
CAVEGYNFNKFYF

SEQ ID NO: 358650 - protein, 14 aa, Homo sapiens
  CDR3 for beta chain variable domain of TCR clone 179325 (TRBV12-5, TRBJ2-5)
CASGSWTHQETQYF

SEQ ID NO: 358651 - protein, 16 aa, Homo sapiens
  CDR3 for alpha chain variable domain of TCR clone 179326 (TRAV30, TRAJ24)
CGTEIVDAGSWGKFQF

SEQ ID NO: 358652 - protein, 14 aa, Homo sapiens
  CDR3 for beta chain variable domain of TCR clone 179326 (TRBV12-5, TRBJ2-5)
CVSGSRTHQETQYF

SEQ ID NO: 358653 - protein, 12 aa, Homo sapiens
  CDR3 for alpha chain variable domain of TCR clone 179327 (TRAV38-1, TRAJ20)
CAFIWNYYKLSF

SEQ ID NO: 358654 - protein, 14 aa, Homo sapiens
  CDR3 for beta chain variable domain of TCR clone 179327 (TRBV27, TRBJ1-1)
CASSPQGKRAEAFF

SEQ ID NO: 358655 - protein, 13 aa, Homo sapiens
  CDR3 for alpha chain variable domain of TCR clone 179328 (TRAV3, TRAJ27)
CAVRPLGAGQPTF

SEQ ID NO: 358656 - protein, 13 aa, Homo sapiens
  CDR3 for beta chain variable domain of TCR clone 179328 (TRBV7-9, TRBJ2-3)
CASSPGSTDTQYF

SEQ ID NO: 358657 - protein, 14 aa, Homo sapiens
  CDR3 for alpha chain variable domain of TCR clone 179329 (TRAV1-2, TRAJ8)
CAVREDTGFHKLVF

SEQ ID NO: 358658 - protein, 17 aa, Homo sapiens
  CDR3 for beta chain variable domain of TCR clone 179329 (TRBV11-2, TRBJ2-1)
CARSLYPPGVEYNEQFF

SEQ ID NO: 358659 - protein, 11 aa, Homo sapiens
  CDR3 for alpha chain variable domain of TCR clone 179330 (TRAV1-1, TRAJ23)
CAVRQGGKLIF

SEQ ID NO: 358660 - protein, 18 aa, Homo sapiens
  CDR3 for beta chain variable domain of TCR clone 179330 (TRBV28, TRBJ2-1)
CASSSTSGRANSYNEQFF

SEQ ID NO: 358661 - protein, 13 aa, Homo sapiens
  CDR3 for alpha chain variable domain of TCR clone 179331 (TRAV21, TRAJ57)
FAVTQGGSEKLVF

SEQ ID NO: 358662 - protein, 16 aa, Homo sapiens
  CDR3 for beta chain variable domain of TCR clone 179331 (TRBV29-1, TRBJ2-7)
CSVEDAEDGMAYEQYF

SEQ ID NO: 358663 - protein, 14 aa, Homo sapiens
  CDR3 for alpha chain variable domain of TCR clone 179332 (TRAV9-2, TRAJ39)
CALYIYNAGSMLTF

SEQ ID NO: 358664 - protein, 17 aa, Homo sapiens
  CDR3 for beta chain variable domain of TCR clone 179332 (TRBV20-1, TRBJ2-2)
CSASGSGQGGLTGELFF

SEQ ID NO: 358665 - protein, 16 aa, Homo sapiens
  CDR3 for alpha chain variable domain of TCR clone 179333 (TRAV26-1, TRAJ22)
CIVRVPSSGSARQLTF

SEQ ID NO: 358666 - protein, 15 aa, Homo sapiens
  CDR3 for beta chain variable domain of TCR clone 179333 (TRBV5-1, TRBJ2-2)
CASSSQGGNTGELFF

SEQ ID NO: 358667 - protein, 12 aa, Homo sapiens
  CDR3 for alpha chain variable domain of TCR clone 179334 (TRAV13-1, TRAJ39)
CAASIWAGNMLT

SEQ ID NO: 358668 - protein, 15 aa, Homo sapiens
  CDR3 for beta chain variable domain of TCR clone 179334 (TRBV7-9, TRBJ1-1)
CASSLLEQGGTEAFF

SEQ ID NO: 358669 - protein, 11 aa, Homo sapiens
  CDR3 for alpha chain variable domain of TCR clone 179335 (TRAV3, TRAJ21)
CAVGNFNTFYF

SEQ ID NO: 358670 - protein, 15 aa, Homo sapiens
  CDR3 for beta chain variable domain of TCR clone 179335 (TRBV5-1, TRBJ2-1)
CASSLVANSYNEQFF

SEQ ID NO: 358671 - protein, 14 aa, Homo sapiens
  CDR3 for alpha chain variable domain of TCR clone 179336 (TRAV1-2, TRAJ8)
CAVREDTGFQELVF

SEQ ID NO: 358672 - protein, 17 aa, Homo sapiens
  CDR3 for beta chain variable domain of TCR clone 179336 (TRBV11-2, TRBJ2-1)
CASSLYPTGVEYNEQFF

SEQ ID NO: 358673 - protein, 11 aa, Homo sapiens
  CDR3 for alpha chain variable domain of TCR clone 179337 (TRAV12-2, TRAJ49)
CAVNTGNQFYF

SEQ ID NO: 358674 - protein, 12 aa, Homo sapiens
  CDR3 for beta chain variable domain of TCR clone 179337 (TRBV12-4, TRBJ2-7)
CASSLGGYEQYF

SEQ ID NO: 358675 - protein, 12 aa, Homo sapiens
  CDR3 for alpha chain variable domain of TCR clone 179338 (TRAV12-3, TRAJ17)
CAMTLTGNKLTF

SEQ ID NO: 358676 - protein, 15 aa, Homo sapiens
  CDR3 for beta chain variable domain of TCR clone 179338 (TRBV2, TRBJ2-1)
CASSVVGSSGNEQFF

SEQ ID NO: 358677 - protein, 13 aa, Homo sapiens
  CDR3 for alpha chain variable domain of TCR clone 179339 (TRAV20, TRAJ37)
CAGCSSNTGKLIF

SEQ ID NO: 358678 - protein, 21 aa, Homo sapiens
  CDR3 for beta chain variable domain of TCR clone 179339 (TRBV4-2, TRBJ2-3)
TCSQKTRPCISVPAAPDTQYF

SEQ ID NO: 358679 - protein, 23 aa, Homo sapiens
  CDR3 for alpha chain variable domain of TCR clone 179340 (TRAV30, TRAJ43)
CTLRPPSSVTQEPTSSALSDMRF

SEQ ID NO: 358680 - protein, 13 aa, Homo sapiens
  CDR3 for beta chain variable domain of TCR clone 179340 (TRBV12-4, TRBJ2-2)
CASSITGSGELFF

SEQ ID NO: 358681 - protein, 11 aa, Homo sapiens
  CDR3 for alpha chain variable domain of TCR clone 179341 (TRAV1-1, TRAJ23)
CAVRQGGKLIF

SEQ ID NO: 358682 - protein, 13 aa, Homo sapiens
  CDR3 for beta chain variable domain of TCR clone 179341 (TRBV7-8, TRBJ2-7)
CARSLTGGREQYF

SEQ ID NO: 358683 - protein, 12 aa, Homo sapiens
  CDR3 for alpha chain variable domain of TCR clone 179342 (TRAV21, TRAJ27)
CAANTNAGKSTF

SEQ ID NO: 358684 - protein, 15 aa, Homo sapiens
  CDR3 for beta chain variable domain of TCR clone 179342 (TRBV29-1, TRBJ1-4)
CSVVGIGDINEELFF

SEQ ID NO: 358685 - protein, 16 aa, Homo sapiens
  CDR3 for alpha chain variable domain of TCR clone 179343 (TRAV3, TRAJ37)
CAVRGKGSGNTGKLIF

SEQ ID NO: 358686 - protein, 13 aa, Homo sapiens
  CDR3 for beta chain variable domain of TCR clone 179343 (TRBV14, TRBJ2-7)
CASSQDRRYEQYC

SEQ ID NO: 358687 - protein, 16 aa, Homo sapiens
  CDR3 for alpha chain variable domain of TCR clone 179344 (TRAV30, TRAJ24)
CGTEIVEADSWGKFQF

SEQ ID NO: 358688 - protein, 15 aa, Homo sapiens
  CDR3 for beta chain variable domain of TCR clone 179344 (TRBV9, TRBJ1-6)
CASSVAGTGDSPLHF

SEQ ID NO: 358689 - protein, 10 aa, Homo sapiens
  CDR3 for alpha chain variable domain of TCR clone 179345 (TRAV30, TRAJ16)
CGTGGQKLLF

SEQ ID NO: 358690 - protein, 17 aa, Homo sapiens
  CDR3 for beta chain variable domain of TCR clone 179345 (TRBV5-5, TRBJ1-2)
CASSLGSLDGQSEGYIF

SEQ ID NO: 358691 - protein, 15 aa, Homo sapiens
  CDR3 for alpha chain variable domain of TCR clone 179346 (TRAV3, TRAJ3)
CAVKDGHSSASKIIF

SEQ ID NO: 358692 - protein, 14 aa, Homo sapiens
  CDR3 for beta chain variable domain of TCR clone 179346 (TRBV28, TRBJ1-4)
CASSFGTFDEKLFF

SEQ ID NO: 358693 - protein, 15 aa, Homo sapiens
  CDR3 for alpha chain variable domain of TCR clone 179347 (TRAV20, TRAJ6)
CAVRLQSGGSYIPTF

SEQ ID NO: 358694 - protein, 15 aa, Homo sapiens
  CDR3 for beta chain variable domain of TCR clone 179347 (TRBV4-1, TRBJ2-7)
CASSQNTGRLYEQYF

SEQ ID NO: 358695 - protein, 12 aa, Homo sapiens
  CDR3 for alpha chain variable domain of TCR clone 179348 (TRAV17, TRAJ12)
CSTLRSSYKFIF

SEQ ID NO: 358696 - protein, 16 aa, Homo sapiens
  CDR3 for beta chain variable domain of TCR clone 179348 (TRBV28, TRBJ2-7)
CASSLFFETGGPEQYF

SEQ ID NO: 358697 - protein, 17 aa, Homo sapiens
  CDR3 for alpha chain variable domain of TCR clone 179349 (TRAV1-2, TRAJ8)
CAVRDPDENTGFQKLVV

SEQ ID NO: 358698 - protein, 16 aa, Homo sapiens
  CDR3 for beta chain variable domain of TCR clone 179349 (TRBV7-9, TRBJ2-2)
CASSGFGGANTGELFS

SEQ ID NO: 358699 - protein, 17 aa, Homo sapiens
  CDR3 for alpha chain variable domain of TCR clone 179350 (TRAV26-1, TRAJ27)
CVVSTPWINTNAGKSTF

SEQ ID NO: 358700 - protein, 16 aa, Homo sapiens
  CDR3 for beta chain variable domain of TCR clone 179350 (TRBV7-9, TRBJ2-1)
CASSLDPGLAIDEQFF

SEQ ID NO: 358701 - protein, 15 aa, Homo sapiens
  CDR3 for alpha chain variable domain of TCR clone 179351 (TRAV27, TRAJ38)
CAARRNAGHNRKLIW

SEQ ID NO: 358702 - protein, 13 aa, Homo sapiens
  CDR3 for beta chain variable domain of TCR clone 179351 (TRBV7-3, TRBJ2-1)
CASSLDSDNEQFF

SEQ ID NO: 358703 - protein, 14 aa, Homo sapiens
  CDR3 for alpha chain variable domain of TCR clone 179352 (TRAV12-2, TRAJ40)
CAVKIPSGTYKYIF

SEQ ID NO: 358704 - protein, 14 aa, Homo sapiens
  CDR3 for beta chain variable domain of TCR clone 179352 (TRBV20-1, TRBJ1-1)
CTAQTRIGGTEDVF

SEQ ID NO: 358705 - protein, 21 aa, Homo sapiens
  CDR3 for alpha chain variable domain of TCR clone 179353 (TRAV8-4, TRAJ47)
HLTKPSAHMSDAAERGNKLVF

SEQ ID NO: 358706 - protein, 14 aa, Homo sapiens
  CDR3 for beta chain variable domain of TCR clone 179353 (TRBV20-1, TRBJ2-7)
CSAKRGRSSYEQYF

SEQ ID NO: 358707 - protein, 12 aa, Homo sapiens
  CDR3 for alpha chain variable domain of TCR clone 179354 (TRAV12-2, TRAJ9)
CRERTGGFKTIF

SEQ ID NO: 358708 - protein, 16 aa, Homo sapiens
  CDR3 for beta chain variable domain of TCR clone 179354 (TRBV7-3, TRBJ2-2)
CASSLKRGTLSGELFF

SEQ ID NO: 358709 - protein, 15 aa, Homo sapiens
  CDR3 for alpha chain variable domain of TCR clone 179355 (TRAV12-1, TRAJ44)
CVADLPTGTASKLTF

SEQ ID NO: 358710 - protein, 13 aa, Homo sapiens
  CDR3 for beta chain variable domain of TCR clone 179355 (TRBV20-1, TRBJ2-5)
CSARGDYPETQYF

SEQ ID NO: 358711 - protein, 12 aa, Homo sapiens
  CDR3 for alpha chain variable domain of TCR clone 179356 (TRAV17, TRAJ12)
CATLRSSYKLIF

SEQ ID NO: 358712 - protein, 16 aa, Homo sapiens
  CDR3 for beta chain variable domain of TCR clone 179356 (TRBV28, TRBJ2-5)
CASSLFFETGGPEQYF

SEQ ID NO: 358713 - protein, 15 aa, Homo sapiens
  CDR3 for alpha chain variable domain of TCR clone 179357 (TRAV34, TRAJ38)
CGADFTPGNNRKMIW

SEQ ID NO: 358714 - protein, 16 aa, Homo sapiens
  CDR3 for beta chain variable domain of TCR clone 179357 (TRBV6-1, TRBJ2-3)
CASSEVIGQGTVTQYF

SEQ ID NO: 358715 - protein, 11 aa, Homo sapiens
  CDR3 for alpha chain variable domain of TCR clone 179358 (TRAV21, TRAJ34)
CAPLDTDKLIF

SEQ ID NO: 358716 - protein, 16 aa, Homo sapiens
  CDR3 for beta chain variable domain of TCR clone 179358 (TRBV5-1, TRBJ2-3)
CASSLAWDRGTDTQYF

SEQ ID NO: 358717 - protein, 10 aa, Homo sapiens
  CDR3 for alpha chain variable domain of TCR clone 179359 (TRAV8-3, TRAJ11)
LNSGYSTLTF

SEQ ID NO: 358718 - protein, 16 aa, Homo sapiens
  CDR3 for beta chain variable domain of TCR clone 179359 (TRBV7-9, TRBJ1-2)
CASSLGFSSGEDGYTF

SEQ ID NO: 358719 - protein, 12 aa, Homo sapiens
  CDR3 for alpha chain variable domain of TCR clone 179360 (TRAV13-1, TRAJ21)
CAAKEGFNKFYF

SEQ ID NO: 358720 - protein, 20 aa, Homo sapiens
  CDR3 for beta chain variable domain of TCR clone 179360 (TRBV7-8, TRBJ2-2)
CASSHLFPGPTIHITGELFC

SEQ ID NO: 358721 - protein, 15 aa, Homo sapiens
  CDR3 for alpha chain variable domain of TCR clone 179361 (TRAV12-1, TRAJ5)
CVVNMLETGRRALTF

SEQ ID NO: 358722 - protein, 16 aa, Homo sapiens
  CDR3 for beta chain variable domain of TCR clone 179361 (TRBV27, TRBJ2-7)
CASSSERRDSAYEQYF

SEQ ID NO: 358723 - protein, 12 aa, Homo sapiens
  CDR3 for alpha chain variable domain of TCR clone 179362 (TRAV12-3, TRAJ17)
CSMTPTGNKLTF

SEQ ID NO: 358724 - protein, 15 aa, Homo sapiens
  CDR3 for beta chain variable domain of TCR clone 179362 (TRBV20-1, TRBJ2-7)
CSARDRVSGMDEQYF

SEQ ID NO: 358725 - protein, 16 aa, Homo sapiens
  CDR3 for alpha chain variable domain of TCR clone 179363 (TRAV26-1, TRAJ48)
CIVRQPPNFGNEKLTF

SEQ ID NO: 358726 - protein, 12 aa, Homo sapiens
  CDR3 for beta chain variable domain of TCR clone 179363 (TRBV19, TRBJ2-1)
CASSRQGAEQFF

SEQ ID NO: 358727 - protein, 16 aa, Homo sapiens
  CDR3 for alpha chain variable domain of TCR clone 179364 (TRAV14/DV4, TRAJ20)
CAVREGRSRDDYKLSF

SEQ ID NO: 358728 - protein, 13 aa, Homo sapiens
  CDR3 for beta chain variable domain of TCR clone 179364 (TRBV7-9, TRBJ1-2)
CASSLKQNYGYTF

SEQ ID NO: 358729 - protein, 13 aa, Homo sapiens
  CDR3 for alpha chain variable domain of TCR clone 179365 (TRAV12-3, TRAJ43)
CAMIRPNNNDMRF

SEQ ID NO: 358730 - protein, 14 aa, Homo sapiens
  CDR3 for beta chain variable domain of TCR clone 179365 (TRBV11-2, TRBJ2-5)
CASSLVGGEETQYF

SEQ ID NO: 358731 - protein, 13 aa, Homo sapiens
  CDR3 for alpha chain variable domain of TCR clone 179366 (TRAV8-1, TRAJ30)
CAVIMNRDDKIIF

SEQ ID NO: 358732 - protein, 14 aa, Homo sapiens
  CDR3 for beta chain variable domain of TCR clone 179366 (TRBV7-2, TRBJ1-6)
CASSLQGAKSPLHF

SEQ ID NO: 358733 - protein, 14 aa, Homo sapiens
  CDR3 for alpha chain variable domain of TCR clone 179367 (TRAV1-1, TRAJ27)
CAVIHNTNAGKSTF

SEQ ID NO: 358734 - protein, 14 aa, Homo sapiens
  CDR3 for beta chain variable domain of TCR clone 179367 (TRBV7-2, TRBJ2-7)
CASRSQGAAYEQYF

SEQ ID NO: 358735 - protein, 14 aa, Homo sapiens
  CDR3 for alpha chain variable domain of TCR clone 179368 (TRAV10, TRAJ39)
CVVSAGGAGNMPTF

SEQ ID NO: 358736 - protein, 16 aa, Homo sapiens
  CDR3 for beta chain variable domain of TCR clone 179368 (TRBV2, TRBJ2-7)
CASSEPWTGPSYEQYF

SEQ ID NO: 358737 - protein, 14 aa, Homo sapiens
  CDR3 for alpha chain variable domain of TCR clone 179369 (TRAV12-2, TRAJ40)
CAVKIPSGTYKYIF

SEQ ID NO: 358738 - protein, 13 aa, Homo sapiens
  CDR3 for beta chain variable domain of TCR clone 179369 (TRBV20-1, TRBJ2-5)
CSAREAFQETQYF

SEQ ID NO: 358739 - protein, 15 aa, Homo sapiens
  CDR3 for alpha chain variable domain of TCR clone 179370 (TRAV8-3, TRAJ48)
CAVGFINFGNEKLTF

SEQ ID NO: 358740 - protein, 17 aa, Homo sapiens
  CDR3 for beta chain variable domain of TCR clone 179370 (TRBV15, TRBJ1-2)
CATSGREIDVVNYGYTF

SEQ ID NO: 358741 - protein, 16 aa, Homo sapiens
  CDR3 for alpha chain variable domain of TCR clone 179371 (TRAV30, TRAJ24)
CGTKIVDADSWGKFKF

SEQ ID NO: 358742 - protein, 14 aa, Homo sapiens
  CDR3 for beta chain variable domain of TCR clone 179371 (TRBV12-5, TRBJ2-5)
CASGSRTHQETQYF

SEQ ID NO: 358743 - protein, 15 aa, Homo sapiens
  CDR3 for alpha chain variable domain of TCR clone 179372 (TRAV26-1, TRAJ29)
CIVKVEGSGNTPLVF

SEQ ID NO: 358744 - protein, 14 aa, Homo sapiens
  CDR3 for beta chain variable domain of TCR clone 179372 (TRBV18, TRBJ2-5)
CASSPGVSQEAQYF

SEQ ID NO: 358745 - protein, 18 aa, Homo sapiens
  CDR3 for alpha chain variable domain of TCR clone 179373 (TRAV26-1, TRAJ23)
CIVRVGLEVWNQGGKLIF

SEQ ID NO: 358746 - protein, 14 aa, Homo sapiens
  CDR3 for beta chain variable domain of TCR clone 179373 (TRBV11-2, TRBJ2-1)
CASSPSRQGGGQFF

SEQ ID NO: 358747 - protein, 12 aa, Homo sapiens
  CDR3 for alpha chain variable domain of TCR clone 179374 (TRAV21, TRAJ31)
CVLAGNNARLMF

SEQ ID NO: 358748 - protein, 16 aa, Homo sapiens
  CDR3 for beta chain variable domain of TCR clone 179374 (TRBV27, TRBJ2-5)
CASSFDPGGTKETQYF

SEQ ID NO: 358749 - protein, 14 aa, Homo sapiens
  CDR3 for alpha chain variable domain of TCR clone 179375 (TRAV1-2, TRAJ8)
CAVREDTGFQKLVF

SEQ ID NO: 358750 - protein, 16 aa, Homo sapiens
  CDR3 for beta chain variable domain of TCR clone 179375 (TRBV20-1, TRBJ2-4)
CSARAILAGQGDIQHF

SEQ ID NO: 358751 - protein, 13 aa, Homo sapiens
  CDR3 for alpha chain variable domain of TCR clone 179376 (TRAV2, TRAJ24)
CDLLLTAGGNSSL

SEQ ID NO: 358752 - protein, 13 aa, Homo sapiens
  CDR3 for beta chain variable domain of TCR clone 179376 (TRBV7-9, TRBJ1-2)
CASSLKQNYGYTF

SEQ ID NO: 358753 - protein, 15 aa, Homo sapiens
  CDR3 for alpha chain variable domain of TCR clone 179377 (TRAV8-2, TRAJ40)
CVVLGTTSGTYKYIF

SEQ ID NO: 358754 - protein, 13 aa, Homo sapiens
  CDR3 for beta chain variable domain of TCR clone 179377 (TRBV24-1, TRBJ2-2)
CATSETNTGELFF

SEQ ID NO: 358755 - protein, 14 aa, Homo sapiens
  CDR3 for alpha chain variable domain of TCR clone 179378 (TRAV2, TRAJ9)
CAVEGRSGGFKTIF

SEQ ID NO: 358756 - protein, 17 aa, Homo sapiens
  CDR3 for beta chain variable domain of TCR clone 179378 (TRBV4-1, TRBJ2-7)
CASSRDPLGVRGGEQYF

SEQ ID NO: 358757 - protein, 16 aa, Homo sapiens
  CDR3 for alpha chain variable domain of TCR clone 179379 (TRAV3, TRAJ37)
CAVRGKGSGNTGKLII

SEQ ID NO: 358758 - protein, 14 aa, Homo sapiens
  CDR3 for beta chain variable domain of TCR clone 179379 (TRBV7-2, TRBJ2-7)
CASSPKTSFYEQYF

SEQ ID NO: 358759 - protein, 14 aa, Homo sapiens
  CDR3 for alpha chain variable domain of TCR clone 179380 (TRAV8-4, TRAJ8)
CAVSLNTGFQKLVF

SEQ ID NO: 358760 - protein, 13 aa, Homo sapiens
  CDR3 for beta chain variable domain of TCR clone 179380 (TRBV7-9, TRBJ2-3)
CASSPGSTDTHYF

SEQ ID NO: 358761 - protein, 16 aa, Homo sapiens
  CDR3 for alpha chain variable domain of TCR clone 179381 (TRAV16, TRAJ4)
CALSRMFSGGYNKLIF

SEQ ID NO: 358762 - protein, 15 aa, Homo sapiens
  CDR3 for beta chain variable domain of TCR clone 179381 (TRBV19, TRBJ1-2)
CASSVGQVLNYGYTF

SEQ ID NO: 358763 - protein, 22 aa, Homo sapiens
  CDR3 for alpha chain variable domain of TCR clone 179382 (TRAV8-6, TRAJ21)
HLTKPSVHISDTAEYFWHKFYF

SEQ ID NO: 358764 - protein, 15 aa, Homo sapiens
  CDR3 for beta chain variable domain of TCR clone 179382 (TRBV12-4, TRBJ2-7)
CASSQTGAISYEQYF

SEQ ID NO: 358765 - protein, 17 aa, Homo sapiens
  CDR3 for alpha chain variable domain of TCR clone 179383 (TRAV3, TRAJ6)
CAVRDGPRAGGSYIPTF

SEQ ID NO: 358766 - protein, 15 aa, Homo sapiens
  CDR3 for beta chain variable domain of TCR clone 179383 (TRBV7-2, TRBJ1-1)
CASSPQGGANTEAFF

SEQ ID NO: 358767 - protein, 10 aa, Homo sapiens
  CDR3 for alpha chain variable domain of TCR clone 179384 (TRAV12-3, TRAJ18)
CAMSAEAQPW

SEQ ID NO: 358768 - protein, 13 aa, Homo sapiens
  CDR3 for beta chain variable domain of TCR clone 179384 (TRBV15, TRBJ1-6)
CATSGGRSSPLHF

SEQ ID NO: 358769 - protein, 14 aa, Homo sapiens
  CDR3 for alpha chain variable domain of TCR clone 179385 (TRAV35, TRAJ41)
YAGQASVRRNALNF

SEQ ID NO: 358770 - protein, 14 aa, Homo sapiens
  CDR3 for beta chain variable domain of TCR clone 179385 (TRBV20-1, TRBJ1-2)
CSASEQGAVYGYTF

SEQ ID NO: 358771 - protein, 14 aa, Homo sapiens
  CDR3 for alpha chain variable domain of TCR clone 179386 (TRAV12-2, TRAJ13)
CAVKKTGGNQKVTF

SEQ ID NO: 358772 - protein, 18 aa, Homo sapiens
  CDR3 for beta chain variable domain of TCR clone 179386 (TRBV11-2, TRBJ2-3)
CASSLGGASRGAPNTQYF

SEQ ID NO: 358773 - protein, 15 aa, Homo sapiens
  CDR3 for alpha chain variable domain of TCR clone 179387 (TRAV12-2, TRAJ9)
CSVNNERTGGFKTIF

SEQ ID NO: 358774 - protein, 14 aa, Homo sapiens
  CDR3 for beta chain variable domain of TCR clone 179387 (TRBV4-1, TRBJ1-4)
CASSQERKNEKLFF

SEQ ID NO: 358775 - protein, 14 aa, Homo sapiens
  CDR3 for alpha chain variable domain of TCR clone 179388 (TRAV25, TRAJ44)
CAVFPTGTASKLTF

SEQ ID NO: 358776 - protein, 15 aa, Homo sapiens
  CDR3 for beta chain variable domain of TCR clone 179388 (TRBV11-2, TRBJ2-1)
CASSLGTSGLNEQFF

SEQ ID NO: 358777 - protein, 12 aa, Homo sapiens
  CDR3 for alpha chain variable domain of TCR clone 179389 (TRAV12-3, TRAJ41)
CAMSYSGYALNF

SEQ ID NO: 358778 - protein, 13 aa, Homo sapiens
  CDR3 for beta chain variable domain of TCR clone 179389 (TRBV7-3, TRBJ2-1)
CASSLDSYKEQFF

SEQ ID NO: 358779 - protein, 15 aa, Homo sapiens
  CDR3 for alpha chain variable domain of TCR clone 179390 (TRAV2, TRAJ22)
CAVPSRGGSARQLTF

SEQ ID NO: 358780 - protein, 16 aa, Homo sapiens
  CDR3 for beta chain variable domain of TCR clone 179390 (TRBV5-5, TRBJ2-3)
CASTIRGTSCPRYAVF

SEQ ID NO: 358781 - protein, 14 aa, Homo sapiens
  CDR3 for alpha chain variable domain of TCR clone 179391 (TRAV12-1, TRAJ22)
CVVTTSGSARQLTF

SEQ ID NO: 358782 - protein, 15 aa, Homo sapiens
  CDR3 for beta chain variable domain of TCR clone 179391 (TRBV20-1, TRBJ2-7)
CSARDRVSGMDEQYF

SEQ ID NO: 358783 - protein, 13 aa, Homo sapiens
  CDR3 for alpha chain variable domain of TCR clone 179392 (TRAV17, TRAJ26)
CATVDNYGQNFVF

SEQ ID NO: 358784 - protein, 13 aa, Homo sapiens
  CDR3 for beta chain variable domain of TCR clone 179392 (TRBV6-1, TRBJ1-1)
CASSRQGNTEAFF

SEQ ID NO: 358785 - protein, 14 aa, Homo sapiens
  CDR3 for alpha chain variable domain of TCR clone 179393 (TRAV12-2, TRAJ40)
CAVKIPSGTYNYIF

SEQ ID NO: 358786 - protein, 14 aa, Homo sapiens
  CDR3 for beta chain variable domain of TCR clone 179393 (TRBV20-1, TRBJ1-1)
CSAQTRTGGTEAFF

SEQ ID NO: 358787 - protein, 14 aa, Homo sapiens
  CDR3 for alpha chain variable domain of TCR clone 179394 (TRAV13-2, TRAJ43)
CAEIPTYNNNDMRF

SEQ ID NO: 358788 - protein, 15 aa, Homo sapiens
  CDR3 for beta chain variable domain of TCR clone 179394 (TRBV7-9, TRBJ2-2)
CASGTLDTFPGELFF

SEQ ID NO: 358789 - protein, 12 aa, Homo sapiens
  CDR3 for alpha chain variable domain of TCR clone 179395 (TRAV21, TRAJ29)
CAVTSGNTPLVF

SEQ ID NO: 358790 - protein, 13 aa, Homo sapiens
  CDR3 for beta chain variable domain of TCR clone 179395 (TRBV4-2, TRBJ1-1)
CACSQAGNTEAFF

SEQ ID NO: 358791 - protein, 13 aa, Homo sapiens
  CDR3 for alpha chain variable domain of TCR clone 179396 (TRAV1-2, TRAJ11)
CAVRDSGYSTLTF

SEQ ID NO: 358792 - protein, 17 aa, Homo sapiens
  CDR3 for beta chain variable domain of TCR clone 179396 (TRBV5-3, TRBJ2-2)
CARSLETGQGDTGELFF

SEQ ID NO: 358793 - protein, 10 aa, Homo sapiens
  CDR3 for alpha chain variable domain of TCR clone 179397 (TRAV12-3, TRAJ49)
CAMNDDQFYF

SEQ ID NO: 358794 - protein, 13 aa, Homo sapiens
  CDR3 for beta chain variable domain of TCR clone 179397 (TRBV12-4, TRBJ1-1)
CASSPGTGFKAFF

SEQ ID NO: 358795 - protein, 14 aa, Homo sapiens
  CDR3 for alpha chain variable domain of TCR clone 179398 (TRAV1-1, TRAJ27)
CAVIYNTNAGKSTF

SEQ ID NO: 358796 - protein, 15 aa, Homo sapiens
  CDR3 for beta chain variable domain of TCR clone 179398 (TRBV7-2, TRBJ2-1)
CASSSGLAGGNKQLF

SEQ ID NO: 358797 - protein, 14 aa, Homo sapiens
  CDR3 for alpha chain variable domain of TCR clone 179399 (TRAV13-1, TRAJ35)
CAASKGGFGNVLHC

SEQ ID NO: 358798 - protein, 15 aa, Homo sapiens
  CDR3 for beta chain variable domain of TCR clone 179399 (TRBV19, TRBJ2-1)
CASSILGEGRNEQFF

SEQ ID NO: 358799 - protein, 18 aa, Homo sapiens
  CDR3 for alpha chain variable domain of TCR clone 179400 (TRAV13-1, TRAJ52)
CAARKRSDGGTSYGKLTF

SEQ ID NO: 358800 - protein, 14 aa, Homo sapiens
  CDR3 for beta chain variable domain of TCR clone 179400 (TRBV7-2, TRBJ2-5)
CASSTGGELKTQYF

SEQ ID NO: 358801 - protein, 13 aa, Homo sapiens
  CDR3 for alpha chain variable domain of TCR clone 179401 (TRAV13-2, TRAJ10)
CAENTGGGNKLTF

SEQ ID NO: 358802 - protein, 15 aa, Homo sapiens
  CDR3 for beta chain variable domain of TCR clone 179401 (TRBV29-1, TRBJ2-7)
CSVEFFDRGSYEQYF

SEQ ID NO: 358803 - protein, 11 aa, Homo sapiens
  CDR3 for alpha chain variable domain of TCR clone 179402 (TRAV3, TRAJ13)
CAVTSYQRVTF

SEQ ID NO: 358804 - protein, 15 aa, Homo sapiens
  CDR3 for beta chain variable domain of TCR clone 179402 (TRBV7-9, TRBJ2-7)
CASSSSGLAVYEQYF

SEQ ID NO: 358805 - protein, 11 aa, Homo sapiens
  CDR3 for alpha chain variable domain of TCR clone 179403 (TRAV12-1, TRAJ43)
CVEHDNNDMRF

SEQ ID NO: 358806 - protein, 17 aa, Homo sapiens
  CDR3 for beta chain variable domain of TCR clone 179403 (TRBV20-1, TRBJ2-1)
CSARDPLAGVWDNEKFF

SEQ ID NO: 358807 - protein, 14 aa, Homo sapiens
  CDR3 for alpha chain variable domain of TCR clone 179404 (TRAV26-2, TRAJ39)
CILRDNNAGNMLTF

SEQ ID NO: 358808 - protein, 13 aa, Homo sapiens
  CDR3 for beta chain variable domain of TCR clone 179404 (TRBV10-3, TRBJ2-7)
CASKLAVNYEQYF

SEQ ID NO: 358809 - protein, 15 aa, Homo sapiens
  CDR3 for alpha chain variable domain of TCR clone 179405 (TRAV13-1, TRAJ44)
CAASRGGGTASKPTF

SEQ ID NO: 358810 - protein, 14 aa, Homo sapiens
  CDR3 for beta chain variable domain of TCR clone 179405 (TRBV11-2, TRBJ1-5)
CASSLDRGRQPQHF

SEQ ID NO: 358811 - protein, 13 aa, Homo sapiens
  CDR3 for alpha chain variable domain of TCR clone 179406 (TRAV20, TRAJ37)
CAGCSSNTGKLIF

SEQ ID NO: 358812 - protein, 15 aa, Homo sapiens
  CDR3 for beta chain variable domain of TCR clone 179406 (TRBV7-9, TRBJ2-2)
CASGPLDTFPGELLF

SEQ ID NO: 358813 - protein, 14 aa, Homo sapiens
  CDR3 for alpha chain variable domain of TCR clone 179407 (TRAV8-3, TRAJ4)
CAVGASGGYNKLIF

SEQ ID NO: 358814 - protein, 14 aa, Homo sapiens
  CDR3 for beta chain variable domain of TCR clone 179407 (TRBV7-2, TRBJ2-7)
CASRSQGAAYEQYF

SEQ ID NO: 358815 - protein, 11 aa, Homo sapiens
  CDR3 for alpha chain variable domain of TCR clone 179408 (TRAV2, TRAJ13)
CASGGYQKVTF

SEQ ID NO: 358816 - protein, 11 aa, Homo sapiens
  CDR3 for beta chain variable domain of TCR clone 179408 (TRBV6-3, TRBJ2-3)
CATGRADTQYF

SEQ ID NO: 358817 - protein, 13 aa, Homo sapiens
  CDR3 for alpha chain variable domain of TCR clone 179409 (TRAV8-3, TRAJ44)
CAVVPGTASKLTF

SEQ ID NO: 358818 - protein, 16 aa, Homo sapiens
  CDR3 for beta chain variable domain of TCR clone 179409 (TRBV4-1, TRBJ1-5)
CASSQGGHTTNQPQHF

SEQ ID NO: 358819 - protein, 11 aa, Homo sapiens
  CDR3 for alpha chain variable domain of TCR clone 179410 (TRAV35, TRAJ30)
CAPGGDDKIIF

SEQ ID NO: 358820 - protein, 12 aa, Homo sapiens
  CDR3 for beta chain variable domain of TCR clone 179410 (TRBV14, TRBJ2-5)
CASSQLKETQYF

SEQ ID NO: 358821 - protein, 14 aa, Homo sapiens
  CDR3 for alpha chain variable domain of TCR clone 179411 (TRAV13-1, TRAJ16)
CAAAYFFRWPEAAL

SEQ ID NO: 358822 - protein, 13 aa, Homo sapiens
  CDR3 for beta chain variable domain of TCR clone 179411 (TRBV7-2, TRBJ1-6)
YASSLVGSSPLHF

SEQ ID NO: 358823 - protein, 16 aa, Homo sapiens
  CDR3 for alpha chain variable domain of TCR clone 179412 (TRAV20, TRAJ53)
CCAGQGSGGSNYKLTF

SEQ ID NO: 358824 - protein, 11 aa, Homo sapiens
  CDR3 for beta chain variable domain of TCR clone 179412 (TRBV18, TRBJ2-5)
CASSPRETQYF

SEQ ID NO: 358825 - protein, 13 aa, Homo sapiens
  CDR3 for alpha chain variable domain of TCR clone 179413 (TRAV20, TRAJ20)
CAVQALNAYKLSF

SEQ ID NO: 358826 - protein, 13 aa, Homo sapiens
  CDR3 for beta chain variable domain of TCR clone 179413 (TRBV7-9, TRBJ1-4)
CASSLPGIEKLFF

SEQ ID NO: 358827 - protein, 12 aa, Homo sapiens
  CDR3 for alpha chain variable domain of TCR clone 179414 (TRAV12-3, TRAJ17)
CAMTLTGNKLTI

SEQ ID NO: 358828 - protein, 14 aa, Homo sapiens
  CDR3 for beta chain variable domain of TCR clone 179414 (TRBV18, TRBJ2-7)
CASSPRGGAYEQYF

SEQ ID NO: 358829 - protein, 13 aa, Homo sapiens
  CDR3 for alpha chain variable domain of TCR clone 179415 (TRAV26-1, TRAJ33)
CIVRVEGNYQLIW

SEQ ID NO: 358830 - protein, 15 aa, Homo sapiens
  CDR3 for beta chain variable domain of TCR clone 179415 (TRBV5-7, TRBJ2-1)
CASSLTGQVYNEQFF

SEQ ID NO: 358831 - protein, 14 aa, Homo sapiens
  CDR3 for alpha chain variable domain of TCR clone 179416 (TRAV12-2, TRAJ17)
CAVLFKAAGNKLTF

SEQ ID NO: 358832 - protein, 13 aa, Homo sapiens
  CDR3 for beta chain variable domain of TCR clone 179416 (TRBV19, TRBJ1-2)
CASSQGQVYGYSF

SEQ ID NO: 358833 - protein, 13 aa, Homo sapiens
  CDR3 for alpha chain variable domain of TCR clone 179417 (TRAV29/DV5, TRAJ33)
CAASVESNYKLIW

SEQ ID NO: 358834 - protein, 14 aa, Homo sapiens
  CDR3 for beta chain variable domain of TCR clone 179417 (TRBV11-2, TRBJ2-5)
CASSRTGGIETQYF

SEQ ID NO: 358835 - protein, 12 aa, Homo sapiens
  CDR3 for alpha chain variable domain of TCR clone 179418 (TRAV13-1, TRAJ43)
CAAGRFNNDMRF

SEQ ID NO: 358836 - protein, 14 aa, Homo sapiens
  CDR3 for beta chain variable domain of TCR clone 179418 (TRBV2, TRBJ2-7)
CASSLTSGGYEQYF

SEQ ID NO: 358837 - protein, 15 aa, Homo sapiens
  CDR3 for alpha chain variable domain of TCR clone 179419 (TRAV17, TRAJ52)
CATEAGGTSYGKLTF

SEQ ID NO: 358838 - protein, 16 aa, Homo sapiens
  CDR3 for beta chain variable domain of TCR clone 179419 (TRBV20-1, TRBJ2-1)
CSAGRPAGGPDNEQFF

SEQ ID NO: 358839 - protein, 13 aa, Homo sapiens
  CDR3 for alpha chain variable domain of TCR clone 179420 (TRAV27, TRAJ45)
CSSSGGGADGLTF

SEQ ID NO: 358840 - protein, 12 aa, Homo sapiens
  CDR3 for beta chain variable domain of TCR clone 179420 (TRBV6-3, TRBJ2-7)
CASSLGRRGLYF

SEQ ID NO: 358841 - protein, 15 aa, Homo sapiens
  CDR3 for alpha chain variable domain of TCR clone 179421 (TRAV21, TRAJ38)
CAVRQDAGNNRKLIW

SEQ ID NO: 358842 - protein, 16 aa, Homo sapiens
  CDR3 for beta chain variable domain of TCR clone 179421 (TRBV4-2, TRBJ1-1)
CASGPLDGGGDTGAFF

SEQ ID NO: 358843 - protein, 16 aa, Homo sapiens
  CDR3 for alpha chain variable domain of TCR clone 179422 (TRAV23/DV6, TRAJ48)
CAASGVVNFGNEKLTF

SEQ ID NO: 358844 - protein, 12 aa, Homo sapiens
  CDR3 for beta chain variable domain of TCR clone 179422 (TRBV18, TRBJ2-1)
CASSSDEDEQFF

SEQ ID NO: 358845 - protein, 16 aa, Homo sapiens
  CDR3 for alpha chain variable domain of TCR clone 179423 (TRAV8-3, TRAJ13)
CAVGAYPSGGYPKVTF

SEQ ID NO: 358846 - protein, 14 aa, Homo sapiens
  CDR3 for beta chain variable domain of TCR clone 179423 (TRBV18, TRBJ2-5)
CASSPRASSETQYF

SEQ ID NO: 358847 - protein, 11 aa, Homo sapiens
  CDR3 for alpha chain variable domain of TCR clone 179424 (TRAV12-2, TRAJ49)
CAVNTGNQCYF

SEQ ID NO: 358848 - protein, 12 aa, Homo sapiens
  CDR3 for beta chain variable domain of TCR clone 179424 (TRBV2, TRBJ2-3)
CASSGRFDTQYF

SEQ ID NO: 358849 - protein, 14 aa, Homo sapiens
  CDR3 for alpha chain variable domain of TCR clone 179425 (TRAV13-1, TRAJ44)
CAAKATGTASKLTF

SEQ ID NO: 358850 - protein, 16 aa, Homo sapiens
  CDR3 for beta chain variable domain of TCR clone 179425 (TRBV7-2, TRBJ1-3)
CASSRLEASSGNTIYF

SEQ ID NO: 358851 - protein, 14 aa, Homo sapiens
  CDR3 for alpha chain variable domain of TCR clone 179426 (TRAV2, TRAJ37)
CAVDFTSNTGKLIF

SEQ ID NO: 358852 - protein, 16 aa, Homo sapiens
  CDR3 for beta chain variable domain of TCR clone 179426 (TRBV20-1, TRBJ2-1)
CSARDLKQGMNNEQFF

SEQ ID NO: 358853 - protein, 15 aa, Homo sapiens
  CDR3 for alpha chain variable domain of TCR clone 179427 (TRAV35, TRAJ52)
CSGPRGGTSYGTLTF

SEQ ID NO: 358854 - protein, 14 aa, Homo sapiens
  CDR3 for beta chain variable domain of TCR clone 179427 (TRBV20-1, TRBJ2-7)
CSAWTALSSYEQYF

SEQ ID NO: 358855 - protein, 14 aa, Homo sapiens
  CDR3 for alpha chain variable domain of TCR clone 179428 (TRAV1-2, TRAJ16)
CAVNRFSDGQKLLF

SEQ ID NO: 358856 - protein, 15 aa, Homo sapiens
  CDR3 for beta chain variable domain of TCR clone 179428 (TRBV19, TRBJ1-5)
CASSIVWADNQPQHV

SEQ ID NO: 358857 - protein, 13 aa, Homo sapiens
  CDR3 for alpha chain variable domain of TCR clone 179429 (TRAV4, TRAJ40)
CLVEGSGTYKNIF

SEQ ID NO: 358858 - protein, 16 aa, Homo sapiens
  CDR3 for beta chain variable domain of TCR clone 179429 (TRBV20-1, TRBJ2-1)
CSASQHLAGDNNEQFF

SEQ ID NO: 358859 - protein, 17 aa, Homo sapiens
  CDR3 for alpha chain variable domain of TCR clone 179430 (TRAV3, TRAJ13)
CAVRDMRRTWGYQKVTF

SEQ ID NO: 358860 - protein, 14 aa, Homo sapiens
  CDR3 for beta chain variable domain of TCR clone 179430 (TRBV5-1, TRBJ2-7)
CASSLTGSGYEQYF

SEQ ID NO: 358861 - protein, 11 aa, Homo sapiens
  CDR3 for alpha chain variable domain of TCR clone 179431 (TRAV13-1, TRAJ43)
CAAHNNKDMRF

SEQ ID NO: 358862 - protein, 15 aa, Homo sapiens
  CDR3 for beta chain variable domain of TCR clone 179431 (TRBV6-1, TRBJ2-2)
CASSRLRGDTGELFF

SEQ ID NO: 358863 - protein, 18 aa, Homo sapiens
  CDR3 for alpha chain variable domain of TCR clone 179432 (TRAV27, TRAJ37)
ASTSVQGSMASNTGKLIF

SEQ ID NO: 358864 - protein, 13 aa, Homo sapiens
  CDR3 for beta chain variable domain of TCR clone 179432 (TRBV19, TRBJ2-1)
CASSIRSSWEQFF

SEQ ID NO: 358865 - protein, 14 aa, Homo sapiens
  CDR3 for alpha chain variable domain of TCR clone 179433 (TRAV12-1, TRAJ3)
CVVNPGSSASKIIF

SEQ ID NO: 358866 - protein, 15 aa, Homo sapiens
  CDR3 for beta chain variable domain of TCR clone 179433 (TRBV5-7, TRBJ1-2)
CAGSSPVQGNYGYTF

SEQ ID NO: 358867 - protein, 13 aa, Homo sapiens
  CDR3 for alpha chain variable domain of TCR clone 179434 (TRAV3, TRAJ36)
CAVRDSGANNLFF

SEQ ID NO: 358868 - protein, 15 aa, Homo sapiens
  CDR3 for beta chain variable domain of TCR clone 179434 (TRBV6-5, TRBJ2-7)
CASSPREGTYNEQYF

SEQ ID NO: 358869 - protein, 16 aa, Homo sapiens
  CDR3 for alpha chain variable domain of TCR clone 179435 (TRAV1-2, TRAJ10)
CAVRGVLTGGGNKLTF

SEQ ID NO: 358870 - protein, 18 aa, Homo sapiens
  CDR3 for beta chain variable domain of TCR clone 179435 (TRBV12-4, TRBJ1-2)
CASSPNPGQAGPYYGYTF

SEQ ID NO: 358871 - protein, 13 aa, Homo sapiens
  CDR3 for alpha chain variable domain of TCR clone 179436 (TRAV8-3, TRAJ48)
CAVVRFVNEKLTF

SEQ ID NO: 358872 - protein, 16 aa, Homo sapiens
  CDR3 for beta chain variable domain of TCR clone 179436 (TRBV20-1, TRBJ2-5)
CSASDFASGIQETQYF

SEQ ID NO: 358873 - protein, 18 aa, Homo sapiens
  CDR3 for alpha chain variable domain of TCR clone 179437 (TRAV17, TRAJ28)
CATDPPRGSGAGSYQLTF

SEQ ID NO: 358874 - protein, 14 aa, Homo sapiens
  CDR3 for beta chain variable domain of TCR clone 179437 (TRBV13, TRBJ2-5)
CASSLGYPQETQYF

SEQ ID NO: 358875 - protein, 16 aa, Homo sapiens
  CDR3 for alpha chain variable domain of TCR clone 179438 (TRAV12-3, TRAJ53)
CAMSPGSGGSKYKLTF

SEQ ID NO: 358876 - protein, 13 aa, Homo sapiens
  CDR3 for beta chain variable domain of TCR clone 179438 (TRBV3-1, TRBJ1-1)
CASSQLQGAEAFF

SEQ ID NO: 358877 - protein, 11 aa, Homo sapiens
  CDR3 for alpha chain variable domain of TCR clone 179439 (TRAV13-1, TRAJ43)
CAAHNNNDMRF

SEQ ID NO: 358878 - protein, 15 aa, Homo sapiens
  CDR3 for beta chain variable domain of TCR clone 179439 (TRBV4-3, TRBJ1-5)
CASSQEAVGGKPQHF

SEQ ID NO: 358879 - protein, 16 aa, Homo sapiens
  CDR3 for alpha chain variable domain of TCR clone 179440 (TRAV3, TRAJ6)
CAVRRTPSGGSYIPTF

SEQ ID NO: 358880 - protein, 13 aa, Homo sapiens
  CDR3 for beta chain variable domain of TCR clone 179440 (TRBV4-2, TRBJ1-1)
CASSQAGNTEAFF

SEQ ID NO: 358881 - protein, 17 aa, Homo sapiens
  CDR3 for alpha chain variable domain of TCR clone 179441 (TRAV4, TRAJ18)
CLVGERSVGSTLGRLYF

SEQ ID NO: 358882 - protein, 16 aa, Homo sapiens
  CDR3 for beta chain variable domain of TCR clone 179441 (TRBV4-3, TRBJ1-1)
CASSPSPGRAAPEAFF

SEQ ID NO: 358883 - protein, 15 aa, Homo sapiens
  CDR3 for alpha chain variable domain of TCR clone 179442 (TRAV12-2, TRAJ53)
CAVNGGGGSNYKLTF

SEQ ID NO: 358884 - protein, 15 aa, Homo sapiens
  CDR3 for beta chain variable domain of TCR clone 179442 (TRBV12-4, TRBJ2-5)
CASSLGGQGRETQYF

SEQ ID NO: 358885 - protein, 13 aa, Homo sapiens
  CDR3 for alpha chain variable domain of TCR clone 179443 (TRAV13-1, TRAJ6)
CAASSGGSYIPTF

SEQ ID NO: 358886 - protein, 14 aa, Homo sapiens
  CDR3 for beta chain variable domain of TCR clone 179443 (TRBV20-1, TRBJ2-4)
CSAGAGGPGNIQYF

SEQ ID NO: 358887 - protein, 12 aa, Homo sapiens
  CDR3 for alpha chain variable domain of TCR clone 179444 (TRAV12-3, TRAJ20)
CAMVRGDYKLSF

SEQ ID NO: 358888 - protein, 14 aa, Homo sapiens
  CDR3 for beta chain variable domain of TCR clone 179444 (TRBV27, TRBJ2-7)
CASATGTERREQYF

SEQ ID NO: 358889 - protein, 14 aa, Homo sapiens
  CDR3 for alpha chain variable domain of TCR clone 179445 (TRAV12-3, TRAJ10)
SHLPLTGGGNKLTF

SEQ ID NO: 358890 - protein, 15 aa, Homo sapiens
  CDR3 for beta chain variable domain of TCR clone 179445 (TRBV19, TRBJ2-7)
CASSPAGSGESLRYF

SEQ ID NO: 358891 - protein, 14 aa, Homo sapiens
  CDR3 for alpha chain variable domain of TCR clone 179446 (TRAV3, TRAJ21)
CALGRGSPNFTLDL

SEQ ID NO: 358892 - protein, 14 aa, Homo sapiens
  CDR3 for beta chain variable domain of TCR clone 179446 (TRBV7-9, TRBJ2-4)
CASSLAMGGNIQYF

SEQ ID NO: 358893 - protein, 15 aa, Homo sapiens
  CDR3 for alpha chain variable domain of TCR clone 179447 (TRAV19, TRAJ9)
CALSEARTGGFKTIF

SEQ ID NO: 358894 - protein, 17 aa, Homo sapiens
  CDR3 for beta chain variable domain of TCR clone 179447 (TRBV28, TRBJ2-5)
CASSTPEGDPLQETHYF

SEQ ID NO: 358895 - protein, 12 aa, Homo sapiens
  CDR3 for alpha chain variable domain of TCR clone 179448 (TRAV21, TRAJ33)
CAKMDSNYQLIW

SEQ ID NO: 358896 - protein, 14 aa, Homo sapiens
  CDR3 for beta chain variable domain of TCR clone 179448 (TRBV2, TRBJ2-7)
CGSSLSSGGYEQYF

SEQ ID NO: 358897 - protein, 14 aa, Homo sapiens
  CDR3 for alpha chain variable domain of TCR clone 179449 (TRAV4, TRAJ9)
CLVGSGTGGFKTIF

SEQ ID NO: 358898 - protein, 14 aa, Homo sapiens
  CDR3 for beta chain variable domain of TCR clone 179449 (TRBV7-2, TRBJ2-4)
CASSLSGGANIQYF

SEQ ID NO: 358899 - protein, 12 aa, Homo sapiens
  CDR3 for alpha chain variable domain of TCR clone 179450 (TRAV12-2, TRAJ10)
WGVTGGGNKLTF

SEQ ID NO: 358900 - protein, 20 aa, Homo sapiens
  CDR3 for beta chain variable domain of TCR clone 179450 (TRBV19, TRBJ2-1)
CASSISRTVTSTRLNNEQIF

SEQ ID NO: 358901 - protein, 13 aa, Homo sapiens
  CDR3 for alpha chain variable domain of TCR clone 179451 (TRAV21, TRAJ45)
CAVMGGGADGFTF

SEQ ID NO: 358902 - protein, 14 aa, Homo sapiens
  CDR3 for beta chain variable domain of TCR clone 179451 (TRBV4-3, TRBJ1-4)
CASSTLQRNEKLFF

SEQ ID NO: 358903 - protein, 13 aa, Homo sapiens
  CDR3 for alpha chain variable domain of TCR clone 179452 (TRAV23/DV6, TRAJ47)
CAASSQYGNKLVF

SEQ ID NO: 358904 - protein, 15 aa, Homo sapiens
  CDR3 for beta chain variable domain of TCR clone 179452 (TRBV7-3, TRBJ2-1)
CASSVDGNSYNEQFF

SEQ ID NO: 358905 - protein, 15 aa, Homo sapiens
  CDR3 for alpha chain variable domain of TCR clone 179453 (TRAV38-2/DV8, TRAJ45)
CAYWDSGGGSDGLTF

SEQ ID NO: 358906 - protein, 13 aa, Homo sapiens
  CDR3 for beta chain variable domain of TCR clone 179453 (TRBV10-3, TRBJ2-7)
CASKLAVNYGQYF

SEQ ID NO: 358907 - protein, 12 aa, Homo sapiens
  CDR3 for alpha chain variable domain of TCR clone 179454 (TRAV23/DV6, TRAJ27)
CAASKSAGKSTF

SEQ ID NO: 358908 - protein, 15 aa, Homo sapiens
  CDR3 for beta chain variable domain of TCR clone 179454 (TRBV11-3, TRBJ2-3)
CASLKDGREGDTQYF

SEQ ID NO: 358909 - protein, 14 aa, Homo sapiens
  CDR3 for alpha chain variable domain of TCR clone 179455 (TRAV12-2, TRAJ13)
CAVKKTGGYQTVTF

SEQ ID NO: 358910 - protein, 17 aa, Homo sapiens
  CDR3 for beta chain variable domain of TCR clone 179455 (TRBV10-3, TRBJ2-7)
CASKLGELRAVLRAGHQ

SEQ ID NO: 358911 - protein, 13 aa, Homo sapiens
  CDR3 for alpha chain variable domain of TCR clone 179456 (TRAV9-2, TRAJ9)
CALSDRGGFKTIF

SEQ ID NO: 358912 - protein, 15 aa, Homo sapiens
  CDR3 for beta chain variable domain of TCR clone 179456 (TRBV6-3, TRBJ2-7)
SASSSPGTVFYEQYF

SEQ ID NO: 358913 - protein, 12 aa, Homo sapiens
  CDR3 for alpha chain variable domain of TCR clone 179457 (TRAV12-1, TRAJ50)
CVGRTSYGKVIF

SEQ ID NO: 358914 - protein, 17 aa, Homo sapiens
  CDR3 for beta chain variable domain of TCR clone 179457 (TRBV28, TRBJ2-5)
CASSTPEGDALQETQYF

SEQ ID NO: 358915 - protein, 14 aa, Homo sapiens
  CDR3 for alpha chain variable domain of TCR clone 179458 (TRAV1-2, TRAJ8)
CAVREDKGFQKLVF

SEQ ID NO: 358916 - protein, 16 aa, Homo sapiens
  CDR3 for beta chain variable domain of TCR clone 179458 (TRBV27, TRBJ2-2)
CASSFRGLVRTGELFF

SEQ ID NO: 358917 - protein, 15 aa, Homo sapiens
  CDR3 for alpha chain variable domain of TCR clone 179459 (TRAV17, TRAJ6)
CATDLPSGGSYIPTF

SEQ ID NO: 358918 - protein, 16 aa, Homo sapiens
  CDR3 for beta chain variable domain of TCR clone 179459 (TRBV4-1, TRBJ2-7)
CASSQNPTGYSYEQYF

SEQ ID NO: 358919 - protein, 19 aa, Homo sapiens
  CDR3 for alpha chain variable domain of TCR clone 179460 (TRAV9-2, TRAJ52)
CALSFSLLSGGTSFGKLTF

SEQ ID NO: 358920 - protein, 14 aa, Homo sapiens
  CDR3 for beta chain variable domain of TCR clone 179460 (TRBV7-6, TRBJ2-7)
CASSLFQDSYEQYF

SEQ ID NO: 358921 - protein, 13 aa, Homo sapiens
  CDR3 for alpha chain variable domain of TCR clone 179461 (TRAV22, TRAJ29)
CAVGGSGNTPLVF

SEQ ID NO: 358922 - protein, 15 aa, Homo sapiens
  CDR3 for beta chain variable domain of TCR clone 179461 (TRBV7-2, TRBJ2-7)
CASSLKGALTYEQYF

SEQ ID NO: 358923 - protein, 14 aa, Homo sapiens
  CDR3 for alpha chain variable domain of TCR clone 179462 (TRAV12-3, TRAJ10)
SHLPLTGGGNKLTF

SEQ ID NO: 358924 - protein, 13 aa, Homo sapiens
  CDR3 for beta chain variable domain of TCR clone 179462 (TRBV7-9, TRBJ2-3)
CASSPGSTETQYF

SEQ ID NO: 358925 - protein, 13 aa, Homo sapiens
  CDR3 for alpha chain variable domain of TCR clone 179463 (TRAV2, TRAJ40)
CAVVTSGTYKYIF

SEQ ID NO: 358926 - protein, 14 aa, Homo sapiens
  CDR3 for beta chain variable domain of TCR clone 179463 (TRBV19, TRBJ2-1)
CASPTCVLSGEQSF

SEQ ID NO: 358927 - protein, 13 aa, Homo sapiens
  CDR3 for alpha chain variable domain of TCR clone 179464 (TRAV20, TRAJ20)
CAVRWVRDYKLSF

SEQ ID NO: 358928 - protein, 16 aa, Homo sapiens
  CDR3 for beta chain variable domain of TCR clone 179464 (TRBV6-5, TRBJ2-7)
CASSPGGREWTYEQYF

SEQ ID NO: 358929 - protein, 16 aa, Homo sapiens
  CDR3 for alpha chain variable domain of TCR clone 179465 (TRAV8-3, TRAJ8)
CAVPRDGNTGFQKLVF

SEQ ID NO: 358930 - protein, 14 aa, Homo sapiens
  CDR3 for beta chain variable domain of TCR clone 179465 (TRBV12-4, TRBJ1-1)
CASSIGTGGTEAFF

SEQ ID NO: 358931 - protein, 18 aa, Homo sapiens
  CDR3 for alpha chain variable domain of TCR clone 179466 (TRAV13-1, TRAJ52)
CAASKRSAGGTSYGKLTF

SEQ ID NO: 358932 - protein, 13 aa, Homo sapiens
  CDR3 for beta chain variable domain of TCR clone 179466 (TRBV12-4, TRBJ1-2)
CASSSGPNYGYTF

SEQ ID NO: 358933 - protein, 11 aa, Homo sapiens
  CDR3 for alpha chain variable domain of TCR clone 179467 (TRAV2, TRAJ13)
CASGGYQKVTF

SEQ ID NO: 358934 - protein, 11 aa, Homo sapiens
  CDR3 for beta chain variable domain of TCR clone 179467 (TRBV23-1, TRBJ2-7)
SSSGTGLEQYF

SEQ ID NO: 358935 - protein, 15 aa, Homo sapiens
  CDR3 for alpha chain variable domain of TCR clone 179468 (TRAV2, TRAJ9)
CAVAALYTGGFKTIF

SEQ ID NO: 358936 - protein, 14 aa, Homo sapiens
  CDR3 for beta chain variable domain of TCR clone 179468 (TRBV7-2, TRBJ2-7)
CASSSISGFSEQYF

SEQ ID NO: 358937 - protein, 15 aa, Homo sapiens
  CDR3 for alpha chain variable domain of TCR clone 179469 (TRAV8-2, TRAJ40)
CVVSDRGPGTYKYIF

SEQ ID NO: 358938 - protein, 17 aa, Homo sapiens
  CDR3 for beta chain variable domain of TCR clone 179469 (TRBV9, TRBJ2-1)
CASSVRSLSGGNNEQFF

SEQ ID NO: 358939 - protein, 15 aa, Homo sapiens
  CDR3 for alpha chain variable domain of TCR clone 179470 (TRAV8-3, TRAJ3)
CAVAHSGSSASKIIF

SEQ ID NO: 358940 - protein, 14 aa, Homo sapiens
  CDR3 for beta chain variable domain of TCR clone 179470 (TRBV7-2, TRBJ2-7)
CASSPKTSVYEQYF

SEQ ID NO: 358941 - protein, 15 aa, Homo sapiens
  CDR3 for alpha chain variable domain of TCR clone 179471 (TRAV26-1, TRAJ29)
CIVRVEGSGDTHLVF

SEQ ID NO: 358942 - protein, 15 aa, Homo sapiens
  CDR3 for beta chain variable domain of TCR clone 179471 (TRBV7-9, TRBJ1-5)
CASSQGHQPNQPQHF

SEQ ID NO: 358943 - protein, 14 aa, Homo sapiens
  CDR3 for alpha chain variable domain of TCR clone 179472 (TRAV21, TRAJ45)
CAVSSGGGADGLTF

SEQ ID NO: 358944 - protein, 14 aa, Homo sapiens
  CDR3 for beta chain variable domain of TCR clone 179472 (TRBV7-2, TRBJ2-5)
CASSLSGGGETQYF

SEQ ID NO: 358945 - protein, 14 aa, Homo sapiens
  CDR3 for alpha chain variable domain of TCR clone 179473 (TRAV1-2, TRAJ8)
CAVREDTGFQKLVF

SEQ ID NO: 358946 - protein, 19 aa, Homo sapiens
  CDR3 for beta chain variable domain of TCR clone 179473 (TRBV6-1, TRBJ2-5)
CASSEQGLAGGLYQETQYF

SEQ ID NO: 358947 - protein, 14 aa, Homo sapiens
  CDR3 for alpha chain variable domain of TCR clone 179474 (TRAV20, TRAJ20)
CAVRRGYSDYKLSF

SEQ ID NO: 358948 - protein, 13 aa, Homo sapiens
  CDR3 for beta chain variable domain of TCR clone 179474 (TRBV19, TRBJ2-5)
CASSETAPETQYF

SEQ ID NO: 358949 - protein, 13 aa, Homo sapiens
  CDR3 for alpha chain variable domain of TCR clone 179475 (TRAV8-4, TRAJ48)
CAVSHFGNEKLTF

SEQ ID NO: 358950 - protein, 15 aa, Homo sapiens
  CDR3 for beta chain variable domain of TCR clone 179475 (TRBV20-1, TRBJ2-7)
CSARKGLAESYEQYF

SEQ ID NO: 358951 - protein, 16 aa, Homo sapiens
  CDR3 for alpha chain variable domain of TCR clone 179476 (TRAV38-2/DV8, TRAJ45)
CAYTTTSGGGADGLTF

SEQ ID NO: 358952 - protein, 14 aa, Homo sapiens
  CDR3 for beta chain variable domain of TCR clone 179476 (TRBV7-9, TRBJ2-2)
CVSSLGHRTGELFF

SEQ ID NO: 358953 - protein, 13 aa, Homo sapiens
  CDR3 for alpha chain variable domain of TCR clone 179477 (TRAV13-1, TRAJ6)
CAARRGGSYIPTF

SEQ ID NO: 358954 - protein, 11 aa, Homo sapiens
  CDR3 for beta chain variable domain of TCR clone 179477 (TRBV10-3, TRBJ2-7)
CAISEGREQYF

SEQ ID NO: 358955 - protein, 13 aa, Homo sapiens
  CDR3 for alpha chain variable domain of TCR clone 179478 (TRAV29/DV5, TRAJ31)
CAASRNNNARLMF

SEQ ID NO: 358956 - protein, 12 aa, Homo sapiens
  CDR3 for beta chain variable domain of TCR clone 179478 (TRBV14, TRBJ2-5)
CASSHLKETQFF

SEQ ID NO: 358957 - protein, 12 aa, Homo sapiens
  CDR3 for alpha chain variable domain of TCR clone 179479 (TRAV1-2, TRAJ26)
CAVRYYGQNFVF

SEQ ID NO: 358958 - protein, 16 aa, Homo sapiens
  CDR3 for beta chain variable domain of TCR clone 179479 (TRBV6-1, TRBJ2-5)
CASSETLDRGAETQYF

SEQ ID NO: 358959 - protein, 16 aa, Homo sapiens
  CDR3 for alpha chain variable domain of TCR clone 179480 (TRAV27, TRAJ53)
CAAPEVSGGSNYKLTF

SEQ ID NO: 358960 - protein, 15 aa, Homo sapiens
  CDR3 for beta chain variable domain of TCR clone 179480 (TRBV20-1, TRBJ1-1)
CSASRGVTGNTEAFF

SEQ ID NO: 358961 - protein, 13 aa, Homo sapiens
  CDR3 for alpha chain variable domain of TCR clone 179481 (TRAV12-1, TRAJ31)
CVVNDNNNARLMF

SEQ ID NO: 358962 - protein, 14 aa, Homo sapiens
  CDR3 for beta chain variable domain of TCR clone 179481 (TRBV7-2, TRBJ2-1)
CASSFGTGYGEQFL

SEQ ID NO: 358963 - protein, 12 aa, Homo sapiens
  CDR3 for alpha chain variable domain of TCR clone 179482 (TRAV25, TRAJ38)
CAGTGNNRKLTW

SEQ ID NO: 358964 - protein, 15 aa, Homo sapiens
  CDR3 for beta chain variable domain of TCR clone 179482 (TRBV25-1, TRBJ1-5)
CASSAGPGGNQPQHF

SEQ ID NO: 358965 - protein, 12 aa, Homo sapiens
  CDR3 for alpha chain variable domain of TCR clone 179483 (TRAV27, TRAJ11)
CAGASGYSTLTF

SEQ ID NO: 358966 - protein, 13 aa, Homo sapiens
  CDR3 for beta chain variable domain of TCR clone 179483 (TRBV10-2, TRBJ2-7)
CASGASGGYEQYF

SEQ ID NO: 358967 - protein, 15 aa, Homo sapiens
  CDR3 for alpha chain variable domain of TCR clone 179484 (TRAV26-1, TRAJ29)
CIARGTNSGNTPLVF

SEQ ID NO: 358968 - protein, 12 aa, Homo sapiens
  CDR3 for beta chain variable domain of TCR clone 179484 (TRBV20-1, TRBJ1-2)
CSASWQGYGYTF

SEQ ID NO: 358969 - protein, 15 aa, Homo sapiens
  CDR3 for alpha chain variable domain of TCR clone 179485 (TRAV8-6, TRAJ11)
CAVNFMNSGYSTLTF

SEQ ID NO: 358970 - protein, 17 aa, Homo sapiens
  CDR3 for beta chain variable domain of TCR clone 179485 (TRBV3-1, TRBJ2-5)
CASSNCGGTSGQETQYF

SEQ ID NO: 358971 - protein, 13 aa, Homo sapiens
  CDR3 for alpha chain variable domain of TCR clone 179486 (TRAV3, TRAJ31)
CAVREGNNARLMF

SEQ ID NO: 358972 - protein, 12 aa, Homo sapiens
  CDR3 for beta chain variable domain of TCR clone 179486 (TRBV7-9, TRBJ1-5)
CASSPQGQPQHF

SEQ ID NO: 358973 - protein, 22 aa, Homo sapiens
  CDR3 for alpha chain variable domain of TCR clone 179487 (TRAV21, TRAJ39)
AASQPGDSATPKGAKAGNMLTF

SEQ ID NO: 358974 - protein, 15 aa, Homo sapiens
  CDR3 for beta chain variable domain of TCR clone 179487 (TRBV11-3, TRBJ2-3)
CASLKDGREGDTQYF

SEQ ID NO: 358975 - protein, 14 aa, Homo sapiens
  CDR3 for alpha chain variable domain of TCR clone 179488 (TRAV8-4, TRAJ9)
CAVRLNTGGFKTIF

SEQ ID NO: 358976 - protein, 15 aa, Homo sapiens
  CDR3 for beta chain variable domain of TCR clone 179488 (TRBV10-2, TRBJ2-6)
CASSEQGTGANVQTF

SEQ ID NO: 358977 - protein, 15 aa, Homo sapiens
  CDR3 for alpha chain variable domain of TCR clone 179489 (TRAV8-3, TRAJ11)
CAVGLLNSGYSTLTF

SEQ ID NO: 358978 - protein, 12 aa, Homo sapiens
  CDR3 for beta chain variable domain of TCR clone 179489 (TRBV24-1, TRBJ2-3)
CATSDSTDTQYF

SEQ ID NO: 358979 - protein, 13 aa, Homo sapiens
  CDR3 for alpha chain variable domain of TCR clone 179490 (TRAV8-1, TRAJ13)
CTVSKGGYQKVTF

SEQ ID NO: 358980 - protein, 18 aa, Homo sapiens
  CDR3 for beta chain variable domain of TCR clone 179490 (TRBV11-2, TRBJ2-7)
CASSWRTVQTGQSYEQYF

SEQ ID NO: 358981 - protein, 16 aa, Homo sapiens
  CDR3 for alpha chain variable domain of TCR clone 179491 (TRAV3, TRAJ18)
CAVRDGRGSTPGGLYF

SEQ ID NO: 358982 - protein, 15 aa, Homo sapiens
  CDR3 for beta chain variable domain of TCR clone 179491 (TRBV7-9, TRBJ1-6)
CASSSPGRGNSPLHF

SEQ ID NO: 358983 - protein, 12 aa, Homo sapiens
  CDR3 for alpha chain variable domain of TCR clone 179492 (TRAV3, TRAJ43)
CAVRDPNNDMRF

SEQ ID NO: 358984 - protein, 14 aa, Homo sapiens
  CDR3 for beta chain variable domain of TCR clone 179492 (TRBV28, TRBJ1-4)
CASSPQGTNEKLFF

SEQ ID NO: 358985 - protein, 14 aa, Homo sapiens
  CDR3 for alpha chain variable domain of TCR clone 179493 (TRAV4, TRAJ12)
CRVGDADSSYKLIF

SEQ ID NO: 358986 - protein, 17 aa, Homo sapiens
  CDR3 for beta chain variable domain of TCR clone 179493 (TRBV13, TRBJ2-3)
CASSLSRVAGGRNTQYF

SEQ ID NO: 358987 - protein, 11 aa, Homo sapiens
  CDR3 for alpha chain variable domain of TCR clone 179494 (TRAV2, TRAJ33)
CAVERNYQLIW

SEQ ID NO: 358988 - protein, 13 aa, Homo sapiens
  CDR3 for beta chain variable domain of TCR clone 179494 (TRBV7-2, TRBJ2-2)
CASSLAVTGELFF

SEQ ID NO: 358989 - protein, 14 aa, Homo sapiens
  CDR3 for alpha chain variable domain of TCR clone 179495 (TRAV26-2, TRAJ38)
CLLYNAGNNRKLIW

SEQ ID NO: 358990 - protein, 14 aa, Homo sapiens
  CDR3 for beta chain variable domain of TCR clone 179495 (TRBV19, TRBJ2-1)
CASPTFVLSGEQFF

SEQ ID NO: 358991 - protein, 15 aa, Homo sapiens
  CDR3 for alpha chain variable domain of TCR clone 179496 (TRAV12-3, TRAJ23)
CAMILIYNQGGKLIF

SEQ ID NO: 358992 - protein, 14 aa, Homo sapiens
  CDR3 for beta chain variable domain of TCR clone 179496 (TRBV19, TRBJ2-1)
CASPTFVLSVEQFF

SEQ ID NO: 358993 - protein, 16 aa, Homo sapiens
  CDR3 for alpha chain variable domain of TCR clone 179497 (TRAV23/DV6, TRAJ52)
CAARPSGGTIYGKLTF

SEQ ID NO: 358994 - protein, 13 aa, Homo sapiens
  CDR3 for beta chain variable domain of TCR clone 179497 (TRBV7-9, TRBJ1-1)
CASSLSGETEAFF

SEQ ID NO: 358995 - protein, 18 aa, Homo sapiens
  CDR3 for alpha chain variable domain of TCR clone 179498 (TRAV16, TRAJ52)
CALSGVDAGGTSYGKRTF

SEQ ID NO: 358996 - protein, 15 aa, Homo sapiens
  CDR3 for beta chain variable domain of TCR clone 179498 (TRBV11-3, TRBJ2-3)
CASSAGTVVTNTQYF

SEQ ID NO: 358997 - protein, 15 aa, Homo sapiens
  CDR3 for alpha chain variable domain of TCR clone 179499 (TRAV2, TRAJ24)
CAVEVLTHSWGKFQF

SEQ ID NO: 358998 - protein, 14 aa, Homo sapiens
  CDR3 for beta chain variable domain of TCR clone 179499 (TRBV19, TRBJ2-1)
CASSMGSGRRSSSS

SEQ ID NO: 358999 - protein, 12 aa, Homo sapiens
  CDR3 for alpha chain variable domain of TCR clone 179500 (TRAV3, TRAJ20)
CAVRDGDYKLSF

SEQ ID NO: 359000 - protein, 14 aa, Homo sapiens
  CDR3 for beta chain variable domain of TCR clone 179500 (TRBV7-7, TRBJ2-7)
CASSLGRGVGEQYF

SEQ ID NO: 359001 - protein, 15 aa, Homo sapiens
  CDR3 for alpha chain variable domain of TCR clone 179501 (TRAV3, TRAJ22)
CAVRDRGGSVRQLTF

SEQ ID NO: 359002 - protein, 18 aa, Homo sapiens
  CDR3 for beta chain variable domain of TCR clone 179501 (TRBV28, TRBJ2-1)
CASSSTSGRANSYNEQFF

SEQ ID NO: 359003 - protein, 14 aa, Homo sapiens
  CDR3 for alpha chain variable domain of TCR clone 179502 (TRAV26-1, TRAJ38)
CIADNAGNNRKMIW

SEQ ID NO: 359004 - protein, 13 aa, Homo sapiens
  CDR3 for beta chain variable domain of TCR clone 179502 (TRBV7-9, TRBJ1-2)
CASSLKQNYGYTF

SEQ ID NO: 359005 - protein, 14 aa, Homo sapiens
  CDR3 for alpha chain variable domain of TCR clone 179503 (TRAV21, TRAJ37)
CAVKGSSNTGKLIF

SEQ ID NO: 359006 - protein, 17 aa, Homo sapiens
  CDR3 for beta chain variable domain of TCR clone 179503 (TRBV6-5, TRBJ2-4)
CASRPTPGQGSKNIQYF

SEQ ID NO: 359007 - protein, 14 aa, Homo sapiens
  CDR3 for alpha chain variable domain of TCR clone 179504 (TRAV12-2, TRAJ13)
CAVKKTGGYQKVTF

SEQ ID NO: 359008 - protein, 13 aa, Homo sapiens
  CDR3 for beta chain variable domain of TCR clone 179504 (TRBV2, TRBJ1-4)
CASNRGTNEKLFF

SEQ ID NO: 359009 - protein, 14 aa, Homo sapiens
  CDR3 for alpha chain variable domain of TCR clone 179505 (TRAV2, TRAJ37)
CAVEDQGNTGKLIF

SEQ ID NO: 359010 - protein, 15 aa, Homo sapiens
  CDR3 for beta chain variable domain of TCR clone 179505 (TRBV6-4, TRBJ2-4)
CASPGTELAKNIQYF

SEQ ID NO: 359011 - protein, 17 aa, Homo sapiens
  CDR3 for alpha chain variable domain of TCR clone 179506 (TRAV3, TRAJ42)
CAVRDTDYGGSQGNLIF

SEQ ID NO: 359012 - protein, 15 aa, Homo sapiens
  CDR3 for beta chain variable domain of TCR clone 179506 (TRBV2, TRBJ2-7)
CASSEGLARSYEQYF

SEQ ID NO: 359013 - protein, 12 aa, Homo sapiens
  CDR3 for alpha chain variable domain of TCR clone 179507 (TRAV8-3, TRAJ41)
CAVALSGYALNF

SEQ ID NO: 359014 - protein, 13 aa, Homo sapiens
  CDR3 for beta chain variable domain of TCR clone 179507 (TRBV7-9, TRBJ1-2)
CASSLKQNYGYTF

SEQ ID NO: 359015 - protein, 20 aa, Homo sapiens
  CDR3 for alpha chain variable domain of TCR clone 179508 (TRAV25, TRAJ21)
TATQTTDVGTYPLSFNKFYF

SEQ ID NO: 359016 - protein, 14 aa, Homo sapiens
  CDR3 for beta chain variable domain of TCR clone 179508 (TRBV19, TRBJ2-1)
CASPTVVLSGEQFF

SEQ ID NO: 359017 - protein, 19 aa, Homo sapiens
  CDR3 for alpha chain variable domain of TCR clone 179509 (TRAV39, TRAJ43)
PCMTSLPPTSVPWANDMRF

SEQ ID NO: 359018 - protein, 19 aa, Homo sapiens
  CDR3 for beta chain variable domain of TCR clone 179509 (TRBV6-3, TRBJ1-2)
CASSYSKGRTGPPNYGYTF

SEQ ID NO: 359019 - protein, 16 aa, Homo sapiens
  CDR3 for alpha chain variable domain of TCR clone 179510 (TRAV3, TRAJ28)
CAVLPRSGAGSYQLTF

SEQ ID NO: 359020 - protein, 14 aa, Homo sapiens
  CDR3 for beta chain variable domain of TCR clone 179510 (TRBV20-1, TRBJ1-2)
CSGRKDGRAYGYTF

SEQ ID NO: 359021 - protein, 14 aa, Homo sapiens
  CDR3 for alpha chain variable domain of TCR clone 179511 (TRAV1-2, TRAJ16)
CAVNRFSDVQKLLF

SEQ ID NO: 359022 - protein, 15 aa, Homo sapiens
  CDR3 for beta chain variable domain of TCR clone 179511 (TRBV7-9, TRBJ1-6)
CASSSPGRGSSPLHF

SEQ ID NO: 359023 - protein, 18 aa, Homo sapiens
  CDR3 for alpha chain variable domain of TCR clone 179512 (TRAV12-3, TRAJ52)
CAMSVGGAGGTSYGKLTF

SEQ ID NO: 359024 - protein, 13 aa, Homo sapiens
  CDR3 for beta chain variable domain of TCR clone 179512 (TRBV27, TRBJ2-3)
CASSLSQGDTQYF

SEQ ID NO: 359025 - protein, 12 aa, Homo sapiens
  CDR3 for alpha chain variable domain of TCR clone 179513 (TRAV16, TRAJ10)
CSRTGGGNKLTF

SEQ ID NO: 359026 - protein, 13 aa, Homo sapiens
  CDR3 for beta chain variable domain of TCR clone 179513 (TRBV28, TRBJ1-5)
CASSLRGNQPQHF

SEQ ID NO: 359027 - protein, 13 aa, Homo sapiens
  CDR3 for alpha chain variable domain of TCR clone 179514 (TRAV1-2, TRAJ9)
CAALNTGGFKTIF

SEQ ID NO: 359028 - protein, 14 aa, Homo sapiens
  CDR3 for beta chain variable domain of TCR clone 179514 (TRBV2, TRBJ2-3)
CASNRGTSTDTQYF

SEQ ID NO: 359029 - protein, 10 aa, Homo sapiens
  CDR3 for alpha chain variable domain of TCR clone 179515 (TRAV12-3, TRAJ49)
GAMNDDQFYF

SEQ ID NO: 359030 - protein, 13 aa, Homo sapiens
  CDR3 for beta chain variable domain of TCR clone 179515 (TRBV12-4, TRBJ1-1)
CASSPGTGFEAFF

SEQ ID NO: 359031 - protein, 22 aa, Homo sapiens
  CDR3 for alpha chain variable domain of TCR clone 179516 (TRAV2, TRAJ9)
CAVEDRSEASKLSLEQEQDYLL

SEQ ID NO: 359032 - protein, 11 aa, Homo sapiens
  CDR3 for beta chain variable domain of TCR clone 179516 (TRBV7-9, TRBJ2-5)
CASSLGETQYF

SEQ ID NO: 359033 - protein, 14 aa, Homo sapiens
  CDR3 for alpha chain variable domain of TCR clone 179517 (TRAV12-3, TRAJ6)
CAMSATGGSYIPTF

SEQ ID NO: 359034 - protein, 15 aa, Homo sapiens
  CDR3 for beta chain variable domain of TCR clone 179517 (TRBV20-1, TRBJ1-1)
CSASWDRFLNTEAFF

SEQ ID NO: 359035 - protein, 14 aa, Homo sapiens
  CDR3 for alpha chain variable domain of TCR clone 179518 (TRAV8-2, TRAJ37)
CVVSISGNTGKLIF

SEQ ID NO: 359036 - protein, 17 aa, Homo sapiens
  CDR3 for beta chain variable domain of TCR clone 179518 (TRBV7-9, TRBJ2-3)
CASSPTVAGDLTDTQDF

SEQ ID NO: 359037 - protein, 16 aa, Homo sapiens
  CDR3 for alpha chain variable domain of TCR clone 179519 (TRAV13-1, TRAJ48)
CAASIFGNFGNEKLTF

SEQ ID NO: 359038 - protein, 14 aa, Homo sapiens
  CDR3 for beta chain variable domain of TCR clone 179519 (TRBV25-1, TRBJ1-1)
CASTHLGGNTEAFF

SEQ ID NO: 359039 - protein, 16 aa, Homo sapiens
  CDR3 for alpha chain variable domain of TCR clone 179520 (TRAV23/DV6, TRAJ9)
CAASIGGNTGGFKTIF

SEQ ID NO: 359040 - protein, 14 aa, Homo sapiens
  CDR3 for beta chain variable domain of TCR clone 179520 (TRBV5-8, TRBJ2-3)
CASSLGQGTDTQYF

SEQ ID NO: 359041 - protein, 12 aa, Homo sapiens
  CDR3 for alpha chain variable domain of TCR clone 179521 (TRAV12-3, TRAJ17)
CAMTLTGTKLTF

SEQ ID NO: 359042 - protein, 15 aa, Homo sapiens
  CDR3 for beta chain variable domain of TCR clone 179521 (TRBV20-1, TRBJ2-7)
CSARDRVTGMDEQYF

SEQ ID NO: 359043 - protein, 16 aa, Homo sapiens
  CDR3 for alpha chain variable domain of TCR clone 179522 (TRAV12-2, TRAJ18)
CAVTTDRGSTLGRLYF

SEQ ID NO: 359044 - protein, 14 aa, Homo sapiens
  CDR3 for beta chain variable domain of TCR clone 179522 (TRBV5-1, TRBJ2-7)
CASSFASGVNEQYF

SEQ ID NO: 359045 - protein, 14 aa, Homo sapiens
  CDR3 for alpha chain variable domain of TCR clone 179523 (TRAV12-3, TRAJ10)
SHLPLTGGGNKLTF

SEQ ID NO: 359046 - protein, 15 aa, Homo sapiens
  CDR3 for beta chain variable domain of TCR clone 179523 (TRBV6-5, TRBJ2-1)
CASSYDAGAGNQQFF

SEQ ID NO: 359047 - protein, 16 aa, Homo sapiens
  CDR3 for alpha chain variable domain of TCR clone 179524 (TRAV2, TRAJ4)
CAVEDRFSGVYNKLIF

SEQ ID NO: 359048 - protein, 16 aa, Homo sapiens
  CDR3 for beta chain variable domain of TCR clone 179524 (TRBV2, TRBJ2-1)
CASSANPRDWQAEQFF

SEQ ID NO: 359049 - protein, 13 aa, Homo sapiens
  CDR3 for alpha chain variable domain of TCR clone 179525 (TRAV12-2, TRAJ20)
WAVYPSNDYKLSF

SEQ ID NO: 359050 - protein, 15 aa, Homo sapiens
  CDR3 for beta chain variable domain of TCR clone 179525 (TRBV27, TRBJ2-5)
CASSLYPRGGETQYF

SEQ ID NO: 359051 - protein, 13 aa, Homo sapiens
  CDR3 for alpha chain variable domain of TCR clone 179526 (TRAV13-2, TRAJ15)
CAEKNQAGTALIF

SEQ ID NO: 359052 - protein, 15 aa, Homo sapiens
  CDR3 for beta chain variable domain of TCR clone 179526 (TRBV29-1, TRBJ2-5)
CSVAPGQGARETQSF

SEQ ID NO: 359053 - protein, 12 aa, Homo sapiens
  CDR3 for alpha chain variable domain of TCR clone 179527 (TRAV21, TRAJ24)
CAVEPGWGKFQF

SEQ ID NO: 359054 - protein, 14 aa, Homo sapiens
  CDR3 for beta chain variable domain of TCR clone 179527 (TRBV25-1, TRBJ1-1)
CASTHLGGNTEAFF

SEQ ID NO: 359055 - protein, 13 aa, Homo sapiens
  CDR3 for alpha chain variable domain of TCR clone 179528 (TRAV14/DV4, TRAJ16)
CAMREGSGQKLLV

SEQ ID NO: 359056 - protein, 15 aa, Homo sapiens
  CDR3 for beta chain variable domain of TCR clone 179528 (TRBV7-9, TRBJ2-7)
CASSLDLDRGYEQYF

SEQ ID NO: 359057 - protein, 14 aa, Homo sapiens
  CDR3 for alpha chain variable domain of TCR clone 179529 (TRAV12-3, TRAJ10)
SHLPLTGGGNKLTF

SEQ ID NO: 359058 - protein, 16 aa, Homo sapiens
  CDR3 for beta chain variable domain of TCR clone 179529 (TRBV2, TRBJ2-3)
CQHRGAPRRWTDTQYF

SEQ ID NO: 359059 - protein, 15 aa, Homo sapiens
  CDR3 for alpha chain variable domain of TCR clone 179530 (TRAV23/DV6, TRAJ18)
CAARYRGSTLGRLYF

SEQ ID NO: 359060 - protein, 12 aa, Homo sapiens
  CDR3 for beta chain variable domain of TCR clone 179530 (TRBV7-9, TRBJ1-1)
CASSLVRGEAFF

SEQ ID NO: 359061 - protein, 14 aa, Homo sapiens
  CDR3 for alpha chain variable domain of TCR clone 179531 (TRAV38-1, TRAJ40)
CALRPTSGTYKYIF

SEQ ID NO: 359062 - protein, 14 aa, Homo sapiens
  CDR3 for beta chain variable domain of TCR clone 179531 (TRBV19, TRBJ1-3)
CASNRGNPGNTIYF

SEQ ID NO: 359063 - protein, 15 aa, Homo sapiens
  CDR3 for alpha chain variable domain of TCR clone 179532 (TRAV26-1, TRAJ22)
CIVRVSLWFCKATDL

SEQ ID NO: 359064 - protein, 14 aa, Homo sapiens
  CDR3 for beta chain variable domain of TCR clone 179532 (TRBV18, TRBJ2-7)
CASSPRGGAYEQYF

SEQ ID NO: 359065 - protein, 13 aa, Homo sapiens
  CDR3 for alpha chain variable domain of TCR clone 179533 (TRAV12-1, TRAJ13)
CVVALLGYPKVTF

SEQ ID NO: 359066 - protein, 13 aa, Homo sapiens
  CDR3 for beta chain variable domain of TCR clone 179533 (TRBV20-1, TRBJ2-5)
CSAILTGQETQYF

SEQ ID NO: 359067 - protein, 12 aa, Homo sapiens
  CDR3 for alpha chain variable domain of TCR clone 179534 (TRAV2, TRAJ10)
CASTGGGNKLTY

SEQ ID NO: 359068 - protein, 14 aa, Homo sapiens
  CDR3 for beta chain variable domain of TCR clone 179534 (TRBV7-2, TRBJ2-2)
CASRGQGAAGELFF

SEQ ID NO: 359069 - protein, 16 aa, Homo sapiens
  CDR3 for alpha chain variable domain of TCR clone 179535 (TRAV23/DV6, TRAJ9)
CAASIGGNTGGFKTIF

SEQ ID NO: 359070 - protein, 12 aa, Homo sapiens
  CDR3 for beta chain variable domain of TCR clone 179535 (TRBV11-2, TRBJ2-1)
CASSVQRERQFF

SEQ ID NO: 359071 - protein, 12 aa, Homo sapiens
  CDR3 for alpha chain variable domain of TCR clone 179536 (TRAV13-1, TRAJ17)
CAARTAGNKLPF

SEQ ID NO: 359072 - protein, 15 aa, Homo sapiens
  CDR3 for beta chain variable domain of TCR clone 179536 (TRBV7-6, TRBJ1-1)
CASSPQGGANTEAFF

SEQ ID NO: 359073 - protein, 15 aa, Homo sapiens
  CDR3 for alpha chain variable domain of TCR clone 179537 (TRAV8-2, TRAJ16)
WVVSDGFSDGQKLLF

SEQ ID NO: 359074 - protein, 15 aa, Homo sapiens
  CDR3 for beta chain variable domain of TCR clone 179537 (TRBV12-4, TRBJ2-5)
CASSPPTGLQETQYF

SEQ ID NO: 359075 - protein, 11 aa, Homo sapiens
  CDR3 for alpha chain variable domain of TCR clone 179538 (TRAV1-2, TRAJ11)
CAVRGYSTLTF

SEQ ID NO: 359076 - protein, 13 aa, Homo sapiens
  CDR3 for beta chain variable domain of TCR clone 179538 (TRBV12-4, TRBJ2-2)
CASSITGYGELFF

SEQ ID NO: 359077 - protein, 17 aa, Homo sapiens
  CDR3 for alpha chain variable domain of TCR clone 179539 (TRAV3, TRAJ6)
CAVRDGSRAGGSYIPTF

SEQ ID NO: 359078 - protein, 11 aa, Homo sapiens
  CDR3 for beta chain variable domain of TCR clone 179539 (TRBV7-8, TRBJ2-7)
CASSLSLEQYF

SEQ ID NO: 359079 - protein, 13 aa, Homo sapiens
  CDR3 for alpha chain variable domain of TCR clone 179540 (TRAV21, TRAJ15)
CAVANQAGTALIF

SEQ ID NO: 359080 - protein, 14 aa, Homo sapiens
  CDR3 for beta chain variable domain of TCR clone 179540 (TRBV7-3, TRBJ1-1)
CASSLKGGNTEAFF

SEQ ID NO: 359081 - protein, 14 aa, Homo sapiens
  CDR3 for alpha chain variable domain of TCR clone 179541 (TRAV14/DV4, TRAJ7)
CAMREAYGNNRLAF

SEQ ID NO: 359082 - protein, 15 aa, Homo sapiens
  CDR3 for beta chain variable domain of TCR clone 179541 (TRBV19, TRBJ2-1)
CASSINREPSHDQFF

SEQ ID NO: 359083 - protein, 14 aa, Homo sapiens
  CDR3 for alpha chain variable domain of TCR clone 179542 (TRAV13-1, TRAJ35)
CAASKGGFGNVLHC

SEQ ID NO: 359084 - protein, 16 aa, Homo sapiens
  CDR3 for beta chain variable domain of TCR clone 179542 (TRBV2, TRBJ2-1)
CASRSPAGGKYNEQFF

SEQ ID NO: 359085 - protein, 14 aa, Homo sapiens
  CDR3 for alpha chain variable domain of TCR clone 179543 (TRAV26-1, TRAJ39)
CIVRGARAVNMLTF

SEQ ID NO: 359086 - protein, 15 aa, Homo sapiens
  CDR3 for beta chain variable domain of TCR clone 179543 (TRBV7-9, TRBJ1-5)
CASSQGHQPSQPQHF

SEQ ID NO: 359087 - protein, 10 aa, Homo sapiens
  CDR3 for alpha chain variable domain of TCR clone 179544 (TRAV20, TRAJ22)
CAAPAGQLTF

SEQ ID NO: 359088 - protein, 14 aa, Homo sapiens
  CDR3 for beta chain variable domain of TCR clone 179544 (TRBV19, TRBJ2-1)
CASSMGSGATEQFF

SEQ ID NO: 359089 - protein, 14 aa, Homo sapiens
  CDR3 for alpha chain variable domain of TCR clone 179545 (TRAV38-1, TRAJ45)
CASHSGGGADGPTF

SEQ ID NO: 359090 - protein, 13 aa, Homo sapiens
  CDR3 for beta chain variable domain of TCR clone 179545 (TRBV10-3, TRBJ1-2)
CAISEQDSYGYTF

SEQ ID NO: 359091 - protein, 17 aa, Homo sapiens
  CDR3 for alpha chain variable domain of TCR clone 179546 (TRAV3, TRAJ6)
CAVRDGPRAGGSYIPTC

SEQ ID NO: 359092 - protein, 18 aa, Homo sapiens
  CDR3 for beta chain variable domain of TCR clone 179546 (TRBV7-9, TRBJ2-7)
CASSLTTSGSRTWYEQYF

SEQ ID NO: 359093 - protein, 17 aa, Homo sapiens
  CDR3 for alpha chain variable domain of TCR clone 179547 (TRAV26-1, TRAJ37)
CIVRVITVSSNTGKLIF

SEQ ID NO: 359094 - protein, 16 aa, Homo sapiens
  CDR3 for beta chain variable domain of TCR clone 179547 (TRBV11-2, TRBJ2-3)
CASSPRGGGAGDTQYF

SEQ ID NO: 359095 - protein, 14 aa, Homo sapiens
  CDR3 for alpha chain variable domain of TCR clone 179548 (TRAV41, TRAJ57)
CAVLLQGGSETLVF

SEQ ID NO: 359096 - protein, 12 aa, Homo sapiens
  CDR3 for beta chain variable domain of TCR clone 179548 (TRBV10-3, TRBJ1-1)
CATMDRPPEAFF

SEQ ID NO: 359097 - protein, 15 aa, Homo sapiens
  CDR3 for alpha chain variable domain of TCR clone 179549 (TRAV25, TRAJ52)
CAGTSGGTSYGKLTY

SEQ ID NO: 359098 - protein, 16 aa, Homo sapiens
  CDR3 for beta chain variable domain of TCR clone 179549 (TRBV15, TRBJ1-2)
CATSRGPRTGGGGYTF

SEQ ID NO: 359099 - protein, 11 aa, Homo sapiens
  CDR3 for alpha chain variable domain of TCR clone 179550 (TRAV12-1, TRAJ43)
CVEYDNKDMRF

SEQ ID NO: 359100 - protein, 15 aa, Homo sapiens
  CDR3 for beta chain variable domain of TCR clone 179550 (TRBV18, TRBJ2-5)
CASSPRASEAETQYF

SEQ ID NO: 359101 - protein, 14 aa, Homo sapiens
  CDR3 for alpha chain variable domain of TCR clone 179551 (TRAV23/DV6, TRAJ49)
CAASTPNPGNQFYF

SEQ ID NO: 359102 - protein, 14 aa, Homo sapiens
  CDR3 for beta chain variable domain of TCR clone 179551 (TRBV18, TRBJ2-3)
CASSETSASDTQYF

SEQ ID NO: 359103 - protein, 12 aa, Homo sapiens
  CDR3 for alpha chain variable domain of TCR clone 179552 (TRAV3, TRAJ26)
CAVRDYGQNFFF

SEQ ID NO: 359104 - protein, 13 aa, Homo sapiens
  CDR3 for beta chain variable domain of TCR clone 179552 (TRBV7-7, TRBJ2-5)
CASSRSGQETQYF

SEQ ID NO: 359105 - protein, 14 aa, Homo sapiens
  CDR3 for alpha chain variable domain of TCR clone 179553 (TRAV26-1, TRAJ39)
CIVRGSRAVNMLTF

SEQ ID NO: 359106 - protein, 15 aa, Homo sapiens
  CDR3 for beta chain variable domain of TCR clone 179553 (TRBV7-9, TRBJ1-5)
CASGQGHQPNQPQHF

SEQ ID NO: 359107 - protein, 15 aa, Homo sapiens
  CDR3 for alpha chain variable domain of TCR clone 179554 (TRAV26-1, TRAJ44)
CIVRANTGTASKLTF

SEQ ID NO: 359108 - protein, 14 aa, Homo sapiens
  CDR3 for beta chain variable domain of TCR clone 179554 (TRBV29-1, TRBJ1-3)
CSVADRVVGNTIYF

SEQ ID NO: 359109 - protein, 14 aa, Homo sapiens
  CDR3 for alpha chain variable domain of TCR clone 179555 (TRAV8-1, TRAJ34)
CAVITTYNTDKLIF

SEQ ID NO: 359110 - protein, 14 aa, Homo sapiens
  CDR3 for beta chain variable domain of TCR clone 179555 (TRBV11-3, TRBJ1-3)
CASSQNGQGNTIYF

SEQ ID NO: 359111 - protein, 17 aa, Homo sapiens
  CDR3 for alpha chain variable domain of TCR clone 179556 (TRAV3, TRAJ6)
CAVRDGARAGGSYIPTF

SEQ ID NO: 359112 - protein, 17 aa, Homo sapiens
  CDR3 for beta chain variable domain of TCR clone 179556 (TRBV27, TRBJ2-6)
CASSLTGFASGANVLTF

SEQ ID NO: 359113 - protein, 14 aa, Homo sapiens
  CDR3 for alpha chain variable domain of TCR clone 179557 (TRAV8-1, TRAJ5)
CAVRTDTGRKALTF

SEQ ID NO: 359114 - protein, 15 aa, Homo sapiens
  CDR3 for beta chain variable domain of TCR clone 179557 (TRBV7-3, TRBJ2-1)
CASSPTGGGEVEQFF

SEQ ID NO: 359115 - protein, 13 aa, Homo sapiens
  CDR3 for alpha chain variable domain of TCR clone 179558 (TRAV30, TRAJ24)
CGTEGNGWGKFQF

SEQ ID NO: 359116 - protein, 17 aa, Homo sapiens
  CDR3 for beta chain variable domain of TCR clone 179558 (TRBV19, TRBJ2-6)
CASSTGQVVSGANVLTF

SEQ ID NO: 359117 - protein, 13 aa, Homo sapiens
  CDR3 for alpha chain variable domain of TCR clone 179559 (TRAV2, TRAJ40)
CAVVTSGTYKYIF

SEQ ID NO: 359118 - protein, 14 aa, Homo sapiens
  CDR3 for beta chain variable domain of TCR clone 179559 (TRBV7-9, TRBJ2-1)
CASSSLVGFGEQFF

SEQ ID NO: 359119 - protein, 16 aa, Homo sapiens
  CDR3 for alpha chain variable domain of TCR clone 179560 (TRAV4, TRAJ9)
CLVGDTNRPGGFKTIF

SEQ ID NO: 359120 - protein, 16 aa, Homo sapiens
  CDR3 for beta chain variable domain of TCR clone 179560 (TRBV18, TRBJ1-1)
CASSPGVGGRGGEAFF

SEQ ID NO: 359121 - protein, 13 aa, Homo sapiens
  CDR3 for alpha chain variable domain of TCR clone 179561 (TRAV8-3, TRAJ43)
CAVGPDNNNDMCF

SEQ ID NO: 359122 - protein, 14 aa, Homo sapiens
  CDR3 for beta chain variable domain of TCR clone 179561 (TRBV19, TRBJ2-1)
CASPTFVLSGEQFF

SEQ ID NO: 359123 - protein, 14 aa, Homo sapiens
  CDR3 for alpha chain variable domain of TCR clone 179562 (TRAV13-1, TRAJ44)
CAAKATGTASKLTF

SEQ ID NO: 359124 - protein, 13 aa, Homo sapiens
  CDR3 for beta chain variable domain of TCR clone 179562 (TRBV7-9, TRBJ1-2)
CASSLKQNYGDTF

SEQ ID NO: 359125 - protein, 18 aa, Homo sapiens
  CDR3 for alpha chain variable domain of TCR clone 179563 (TRAV26-1, TRAJ22)
CIVRVALIFSGSARQLTF

SEQ ID NO: 359126 - protein, 13 aa, Homo sapiens
  CDR3 for beta chain variable domain of TCR clone 179563 (TRBV13, TRBJ2-5)
CASSPEVGETQYF

SEQ ID NO: 359127 - protein, 14 aa, Homo sapiens
  CDR3 for alpha chain variable domain of TCR clone 179564 (TRAV26-2, TRAJ31)
CILILGNNNARPMF

SEQ ID NO: 359128 - protein, 16 aa, Homo sapiens
  CDR3 for beta chain variable domain of TCR clone 179564 (TRBV7-3, TRBJ2-1)
CASSLVSGSSNNEQFF

SEQ ID NO: 359129 - protein, 10 aa, Homo sapiens
  CDR3 for alpha chain variable domain of TCR clone 179565 (TRAV38-1, TRAJ34)
CAFTDDKLIF

SEQ ID NO: 359130 - protein, 15 aa, Homo sapiens
  CDR3 for beta chain variable domain of TCR clone 179565 (TRBV28, TRBJ2-5)
CASSAPRQVQETQYF

SEQ ID NO: 359131 - protein, 11 aa, Homo sapiens
  CDR3 for alpha chain variable domain of TCR clone 179566 (TRAV23/DV6, TRAJ58)
CAARLLRGETS

SEQ ID NO: 359132 - protein, 13 aa, Homo sapiens
  CDR3 for beta chain variable domain of TCR clone 179566 (TRBV20-1, TRBJ1-1)
CSARGGGNTEAFF

SEQ ID NO: 359133 - protein, 12 aa, Homo sapiens
  CDR3 for alpha chain variable domain of TCR clone 179567 (TRAV26-1, TRAJ26)
CIVFIYGQNFVF

SEQ ID NO: 359134 - protein, 17 aa, Homo sapiens
  CDR3 for beta chain variable domain of TCR clone 179567 (TRBV7-8, TRBJ2-6)
CASSAGTGGAGANVLTF

SEQ ID NO: 359135 - protein, 15 aa, Homo sapiens
  CDR3 for alpha chain variable domain of TCR clone 179568 (TRAV12-1, TRAJ36)
CVVNEHQTGANNLFF

SEQ ID NO: 359136 - protein, 12 aa, Homo sapiens
  CDR3 for beta chain variable domain of TCR clone 179568 (TRBV29-1, TRBJ2-3)
CSGTGGADTQYF

SEQ ID NO: 359137 - protein, 14 aa, Homo sapiens
  CDR3 for alpha chain variable domain of TCR clone 179569 (TRAV8-4, TRAJ15)
CAVILNQAGTALIF

SEQ ID NO: 359138 - protein, 12 aa, Homo sapiens
  CDR3 for beta chain variable domain of TCR clone 179569 (TRBV7-9, TRBJ1-6)
GASSASESPLHF

SEQ ID NO: 359139 - protein, 18 aa, Homo sapiens
  CDR3 for alpha chain variable domain of TCR clone 179570 (TRAV8-1, TRAJ5)
CAVKTEQPGRRAGEHLLL

SEQ ID NO: 359140 - protein, 14 aa, Homo sapiens
  CDR3 for beta chain variable domain of TCR clone 179570 (TRBV10-3, TRBJ2-7)
CHQCGTSETYEQYF

SEQ ID NO: 359141 - protein, 16 aa, Homo sapiens
  CDR3 for alpha chain variable domain of TCR clone 179571 (TRAV12-2, TRAJ45)
CAVKRNPGGGADGLTF

SEQ ID NO: 359142 - protein, 14 aa, Homo sapiens
  CDR3 for beta chain variable domain of TCR clone 179571 (TRBV19, TRBJ2-1)
CASPTFVLSGEQFF

SEQ ID NO: 359143 - protein, 16 aa, Homo sapiens
  CDR3 for alpha chain variable domain of TCR clone 179572 (TRAV3, TRAJ37)
CAVRGKGSGNTGKLIF

SEQ ID NO: 359144 - protein, 15 aa, Homo sapiens
  CDR3 for beta chain variable domain of TCR clone 179572 (TRBV13, TRBJ1-2)
CASSLGRQPGYGYTF

SEQ ID NO: 359145 - protein, 15 aa, Homo sapiens
  CDR3 for alpha chain variable domain of TCR clone 179573 (TRAV8-3, TRAJ40)
CAAPSLGSGTYKYIF

SEQ ID NO: 359146 - protein, 12 aa, Homo sapiens
  CDR3 for beta chain variable domain of TCR clone 179573 (TRBV12-4, TRBJ2-3)
CASSTLPDTQYF

SEQ ID NO: 359147 - protein, 14 aa, Homo sapiens
  CDR3 for alpha chain variable domain of TCR clone 179574 (TRAV2, TRAJ9)
CAVEDRSGGFKTIF

SEQ ID NO: 359148 - protein, 12 aa, Homo sapiens
  CDR3 for beta chain variable domain of TCR clone 179574 (TRBV7-3, TRBJ2-5)
CASSSPGGTQYF

SEQ ID NO: 359149 - protein, 14 aa, Homo sapiens
  CDR3 for alpha chain variable domain of TCR clone 179575 (TRAV13-1, TRAJ40)
CAASMTSGTYKYIF

SEQ ID NO: 359150 - protein, 14 aa, Homo sapiens
  CDR3 for beta chain variable domain of TCR clone 179575 (TRBV18, TRBJ2-1)
CASSPQGRFNEQFF

SEQ ID NO: 359151 - protein, 17 aa, Homo sapiens
  CDR3 for alpha chain variable domain of TCR clone 179576 (TRAV3, TRAJ6)
CAVRDGPRAGGSDIPTF

SEQ ID NO: 359152 - protein, 20 aa, Homo sapiens
  CDR3 for beta chain variable domain of TCR clone 179576 (TRBV28, TRBJ2-1)
CASAPIGRSPGLAGGNEQFF

SEQ ID NO: 359153 - protein, 11 aa, Homo sapiens
  CDR3 for alpha chain variable domain of TCR clone 179577 (TRAV3, TRAJ21)
CAVGNHNKFYF

SEQ ID NO: 359154 - protein, 16 aa, Homo sapiens
  CDR3 for beta chain variable domain of TCR clone 179577 (TRBV19, TRBJ2-1)
CASSKAGPSSYNEQFF

SEQ ID NO: 359155 - protein, 13 aa, Homo sapiens
  CDR3 for alpha chain variable domain of TCR clone 179578 (TRAV35, TRAJ48)
CAGHELGNEKLTF

SEQ ID NO: 359156 - protein, 15 aa, Homo sapiens
  CDR3 for beta chain variable domain of TCR clone 179578 (TRBV27, TRBJ2-7)
CASSPQREGQREQYF

SEQ ID NO: 359157 - protein, 13 aa, Homo sapiens
  CDR3 for alpha chain variable domain of TCR clone 179579 (TRAV12-3, TRAJ7)
CAMTPYGNNRLAF

SEQ ID NO: 359158 - protein, 15 aa, Homo sapiens
  CDR3 for beta chain variable domain of TCR clone 179579 (TRBV28, TRBJ1-3)
CASSMSWASGNTIYF

SEQ ID NO: 359159 - protein, 14 aa, Homo sapiens
  CDR3 for alpha chain variable domain of TCR clone 179580 (TRAV2, TRAJ9)
CAVDPNTGSFKTIF

SEQ ID NO: 359160 - protein, 14 aa, Homo sapiens
  CDR3 for beta chain variable domain of TCR clone 179580 (TRBV7-2, TRBJ2-7)
CASSPKTSFYEQYF

SEQ ID NO: 359161 - protein, 16 aa, Homo sapiens
  CDR3 for alpha chain variable domain of TCR clone 179581 (TRAV3, TRAJ37)
CAVRGKGSGNTGKLIF

SEQ ID NO: 359162 - protein, 15 aa, Homo sapiens
  CDR3 for beta chain variable domain of TCR clone 179581 (TRBV7-3, TRBJ2-2)
CASSETGQGTGELCF

SEQ ID NO: 359163 - protein, 16 aa, Homo sapiens
  CDR3 for alpha chain variable domain of TCR clone 179582 (TRAV1-2, TRAJ10)
CAVRGVLTGGGNNLTF

SEQ ID NO: 359164 - protein, 16 aa, Homo sapiens
  CDR3 for beta chain variable domain of TCR clone 179582 (TRBV4-2, TRBJ2-5)
CASSQELVGSQETQYF

SEQ ID NO: 359165 - protein, 11 aa, Homo sapiens
  CDR3 for alpha chain variable domain of TCR clone 179583 (TRAV10, TRAJ11)
CGERERSTLTF

SEQ ID NO: 359166 - protein, 15 aa, Homo sapiens
  CDR3 for beta chain variable domain of TCR clone 179583 (TRBV7-2, TRBJ2-1)
CASSFQADEYNEKFF

SEQ ID NO: 359167 - protein, 12 aa, Homo sapiens
  CDR3 for alpha chain variable domain of TCR clone 179584 (TRAV13-1, TRAJ53)
AASGGSNYKLTF

SEQ ID NO: 359168 - protein, 15 aa, Homo sapiens
  CDR3 for beta chain variable domain of TCR clone 179584 (TRBV5-1, TRBJ2-1)
CASSPPRAPYNEQYF

SEQ ID NO: 359169 - protein, 10 aa, Homo sapiens
  CDR3 for alpha chain variable domain of TCR clone 179585 (TRAV1-2, TRAJ23)
CAAWAGQLIF

SEQ ID NO: 359170 - protein, 14 aa, Homo sapiens
  CDR3 for beta chain variable domain of TCR clone 179585 (TRBV20-1, TRBJ2-7)
CSAKTGTGGYEQYF

SEQ ID NO: 359171 - protein, 15 aa, Homo sapiens
  CDR3 for alpha chain variable domain of TCR clone 179586 (TRAV3, TRAJ4)
CAVRDGTGGYNKLIF

SEQ ID NO: 359172 - protein, 16 aa, Homo sapiens
  CDR3 for beta chain variable domain of TCR clone 179586 (TRBV10-3, TRBJ1-6)
CAISERRGQGNSPLHF

SEQ ID NO: 359173 - protein, 21 aa, Homo sapiens
  CDR3 for alpha chain variable domain of TCR clone 179587 (TRAV26-2, TRAJ42)
CCVLLHPERRGYGGSQGNLIF

SEQ ID NO: 359174 - protein, 16 aa, Homo sapiens
  CDR3 for beta chain variable domain of TCR clone 179587 (TRBV12-4, TRBJ2-7)
CASSLIGGTGTYEQYF

SEQ ID NO: 359175 - protein, 13 aa, Homo sapiens
  CDR3 for alpha chain variable domain of TCR clone 179588 (TRAV1-2, TRAJ9)
CAALNTGGFKTIF

SEQ ID NO: 359176 - protein, 14 aa, Homo sapiens
  CDR3 for beta chain variable domain of TCR clone 179588 (TRBV7-8, TRBJ2-5)
CASSATGGQETQYF

SEQ ID NO: 359177 - protein, 15 aa, Homo sapiens
  CDR3 for alpha chain variable domain of TCR clone 179589 (TRAV34, TRAJ36)
CGAPSRLGGANNLFF

SEQ ID NO: 359178 - protein, 22 aa, Homo sapiens
  CDR3 for beta chain variable domain of TCR clone 179589 (TRBV19, TRBJ2-1)
CASSVRDRVTGTSGRIYNEQFF

SEQ ID NO: 359179 - protein, 11 aa, Homo sapiens
  CDR3 for alpha chain variable domain of TCR clone 179590 (TRAV3, TRAJ21)
CAVGNFNKFYF

SEQ ID NO: 359180 - protein, 13 aa, Homo sapiens
  CDR3 for beta chain variable domain of TCR clone 179590 (TRBV4-2, TRBJ2-3)
CASSQGNTDTQYF

SEQ ID NO: 359181 - protein, 17 aa, Homo sapiens
  CDR3 for alpha chain variable domain of TCR clone 179591 (TRAV13-1, TRAJ31)
CAPRDRLMFGDGTQLVV

SEQ ID NO: 359182 - protein, 16 aa, Homo sapiens
  CDR3 for beta chain variable domain of TCR clone 179591 (TRBV19, TRBJ2-1)
CASSKAGPSSYNEQFF

SEQ ID NO: 359183 - protein, 15 aa, Homo sapiens
  CDR3 for alpha chain variable domain of TCR clone 179592 (TRAV8-2, TRAJ16)
CVVSDGVSDGPKLLF

SEQ ID NO: 359184 - protein, 14 aa, Homo sapiens
  CDR3 for beta chain variable domain of TCR clone 179592 (TRBV7-3, TRBJ1-1)
CASSLGTGYTEAFF

SEQ ID NO: 359185 - protein, 13 aa, Homo sapiens
  CDR3 for alpha chain variable domain of TCR clone 179593 (TRAV12-3, TRAJ33)
CAMSVNSNYQLIW

SEQ ID NO: 359186 - protein, 15 aa, Homo sapiens
  CDR3 for beta chain variable domain of TCR clone 179593 (TRBV19, TRBJ2-7)
CASSFNSGGVWEQYF

SEQ ID NO: 359187 - protein, 14 aa, Homo sapiens
  CDR3 for alpha chain variable domain of TCR clone 179594 (TRAV2, TRAJ9)
CAVEDRSGGFKTIF

SEQ ID NO: 359188 - protein, 15 aa, Homo sapiens
  CDR3 for beta chain variable domain of TCR clone 179594 (TRBV11-3, TRBJ2-7)
CASSLLSGSSYEQYF

SEQ ID NO: 359189 - protein, 11 aa, Homo sapiens
  CDR3 for alpha chain variable domain of TCR clone 179595 (TRAV35, TRAJ30)
CAGERDDKIIF

SEQ ID NO: 359190 - protein, 15 aa, Homo sapiens
  CDR3 for beta chain variable domain of TCR clone 179595 (TRBV7-3, TRBJ2-2)
CASSETGQGTGELFF

SEQ ID NO: 359191 - protein, 17 aa, Homo sapiens
  CDR3 for alpha chain variable domain of TCR clone 179596 (TRAV3, TRAJ42)
CAVRDRDYGGSQGNLIF

SEQ ID NO: 359192 - protein, 16 aa, Homo sapiens
  CDR3 for beta chain variable domain of TCR clone 179596 (TRBV11-2, TRBJ2-3)
CASSSRTSGGAGTQYF

SEQ ID NO: 359193 - protein, 11 aa, Homo sapiens
  CDR3 for alpha chain variable domain of TCR clone 179597 (TRAV13-1, TRAJ26)
FQDNYGQNFVF

SEQ ID NO: 359194 - protein, 13 aa, Homo sapiens
  CDR3 for beta chain variable domain of TCR clone 179597 (TRBV7-9, TRBJ1-2)
CASSLKQNYGYTF

SEQ ID NO: 359195 - protein, 11 aa, Homo sapiens
  CDR3 for alpha chain variable domain of TCR clone 179598 (TRAV2, TRAJ33)
CAVESNYQLIW

SEQ ID NO: 359196 - protein, 16 aa, Homo sapiens
  CDR3 for beta chain variable domain of TCR clone 179598 (TRBV28, TRBJ2-7)
CASSSVTSGRGYEQYF

SEQ ID NO: 359197 - protein, 16 aa, Homo sapiens
  CDR3 for alpha chain variable domain of TCR clone 179599 (TRAV3, TRAJ10)
CAVRDMRAGGGNKLTF

SEQ ID NO: 359198 - protein, 14 aa, Homo sapiens
  CDR3 for beta chain variable domain of TCR clone 179599 (TRBV28, TRBJ2-2)
CASTRRSGDGELVC

SEQ ID NO: 359199 - protein, 13 aa, Homo sapiens
  CDR3 for alpha chain variable domain of TCR clone 179600 (TRAV13-1, TRAJ20)
CAAWVSNDYKLSF

SEQ ID NO: 359200 - protein, 12 aa, Homo sapiens
  CDR3 for beta chain variable domain of TCR clone 179600 (TRBV20-1, TRBJ2-1)
CSARLGTDEQFF

SEQ ID NO: 359201 - protein, 17 aa, Homo sapiens
  CDR3 for alpha chain variable domain of TCR clone 179601 (TRAV13-1, TRAJ31)
CAPRDRPMFGDGTQLVV

SEQ ID NO: 359202 - protein, 12 aa, Homo sapiens
  CDR3 for beta chain variable domain of TCR clone 179601 (TRBV7-9, TRBJ2-7)
CANSLEGYEQYF

SEQ ID NO: 359203 - protein, 14 aa, Homo sapiens
  CDR3 for alpha chain variable domain of TCR clone 179602 (TRAV17, TRAJ57)
CATDPQGGSEKLVF

SEQ ID NO: 359204 - protein, 18 aa, Homo sapiens
  CDR3 for beta chain variable domain of TCR clone 179602 (TRBV6-6, TRBJ1-3)
CASSYSKCDSISGNTIYF

SEQ ID NO: 359205 - protein, 10 aa, Homo sapiens
  CDR3 for alpha chain variable domain of TCR clone 179603 (TRAV12-2, TRAJ22)
CAVNETQLTF

SEQ ID NO: 359206 - protein, 14 aa, Homo sapiens
  CDR3 for beta chain variable domain of TCR clone 179603 (TRBV19, TRBJ2-1)
CASGKSTQYNEQFF

SEQ ID NO: 359207 - protein, 14 aa, Homo sapiens
  CDR3 for alpha chain variable domain of TCR clone 179604 (TRAV12-2, TRAJ44)
CAVNPAGTASKLTF

SEQ ID NO: 359208 - protein, 15 aa, Homo sapiens
  CDR3 for beta chain variable domain of TCR clone 179604 (TRBV20-1, TRBJ1-1)
CSASRGVTGNTEAFF

SEQ ID NO: 359209 - protein, 12 aa, Homo sapiens
  CDR3 for alpha chain variable domain of TCR clone 179605 (TRAV1-1, TRAJ20)
CAVREDDYKLSF

SEQ ID NO: 359210 - protein, 18 aa, Homo sapiens
  CDR3 for beta chain variable domain of TCR clone 179605 (TRBV20-1, TRBJ2-3)
CSASGLAGGPGTTDTQYC

SEQ ID NO: 359211 - protein, 11 aa, Homo sapiens
  CDR3 for alpha chain variable domain of TCR clone 179606 (TRAV4, TRAJ28)
CLVGDNRAETL

SEQ ID NO: 359212 - protein, 17 aa, Homo sapiens
  CDR3 for beta chain variable domain of TCR clone 179606 (TRBV19, TRBJ2-7)
CASSISFYDSYPYEQYF

SEQ ID NO: 359213 - protein, 11 aa, Homo sapiens
  CDR3 for alpha chain variable domain of TCR clone 179607 (TRAV12-1, TRAJ43)
CVEYDNNDMRF

SEQ ID NO: 359214 - protein, 14 aa, Homo sapiens
  CDR3 for beta chain variable domain of TCR clone 179607 (TRBV7-2, TRBJ2-7)
CASSPRDGAYEQYF

SEQ ID NO: 359215 - protein, 10 aa, Homo sapiens
  CDR3 for alpha chain variable domain of TCR clone 179608 (TRAV26-1, TRAJ40)
CIAGTYKYIF

SEQ ID NO: 359216 - protein, 15 aa, Homo sapiens
  CDR3 for beta chain variable domain of TCR clone 179608 (TRBV19, TRBJ2-1)
CAGSSPGVPLGEQFF

SEQ ID NO: 359217 - protein, 13 aa, Homo sapiens
  CDR3 for alpha chain variable domain of TCR clone 179609 (TRAV3, TRAJ33)
CTVRDRSNYQLTW

SEQ ID NO: 359218 - protein, 16 aa, Homo sapiens
  CDR3 for beta chain variable domain of TCR clone 179609 (TRBV4-2, TRBJ2-7)
CASSQDRGTSSYEQYF

SEQ ID NO: 359219 - protein, 14 aa, Homo sapiens
  CDR3 for alpha chain variable domain of TCR clone 179610 (TRAV23/DV6, TRAJ40)
CAASLTSGTYRYIF

SEQ ID NO: 359220 - protein, 12 aa, Homo sapiens
  CDR3 for beta chain variable domain of TCR clone 179610 (TRBV11-2, TRBJ2-2)
CASSLGGGELFF

SEQ ID NO: 359221 - protein, 14 aa, Homo sapiens
  CDR3 for alpha chain variable domain of TCR clone 179611 (TRAV2, TRAJ37)
CAVEDQGNTGKIIF

SEQ ID NO: 359222 - protein, 14 aa, Homo sapiens
  CDR3 for beta chain variable domain of TCR clone 179611 (TRBV18, TRBJ2-1)
CASSPQGRFNEQFF

SEQ ID NO: 359223 - protein, 12 aa, Homo sapiens
  CDR3 for alpha chain variable domain of TCR clone 179612 (TRAV25, TRAJ31)
CAGHLNNARLMF

SEQ ID NO: 359224 - protein, 14 aa, Homo sapiens
  CDR3 for beta chain variable domain of TCR clone 179612 (TRBV25-1, TRBJ1-1)
CASTHLGGNTEAFF

SEQ ID NO: 359225 - protein, 13 aa, Homo sapiens
  CDR3 for alpha chain variable domain of TCR clone 179613 (TRAV29/DV5, TRAJ29)
CAASAAGNTPLVF

SEQ ID NO: 359226 - protein, 14 aa, Homo sapiens
  CDR3 for beta chain variable domain of TCR clone 179613 (TRBV19, TRBJ2-3)
CASSATRGTDTQYF

SEQ ID NO: 359227 - protein, 12 aa, Homo sapiens
  CDR3 for alpha chain variable domain of TCR clone 179614 (TRAV2, TRAJ31)
CAVEDNNARLMF

SEQ ID NO: 359228 - protein, 15 aa, Homo sapiens
  CDR3 for beta chain variable domain of TCR clone 179614 (TRBV7-2, TRBJ2-2)
CASRRPGQNTGELFF

SEQ ID NO: 359229 - protein, 14 aa, Homo sapiens
  CDR3 for alpha chain variable domain of TCR clone 179615 (TRAV35, TRAJ24)
CAGPRRDSWGKLQF

SEQ ID NO: 359230 - protein, 12 aa, Homo sapiens
  CDR3 for beta chain variable domain of TCR clone 179615 (TRBV12-4, TRBJ2-3)
CACSLGQDTQYF

SEQ ID NO: 359231 - protein, 12 aa, Homo sapiens
  CDR3 for alpha chain variable domain of TCR clone 179616 (TRAV13-1, TRAJ53)
AASGGSNNKLTF

SEQ ID NO: 359232 - protein, 15 aa, Homo sapiens
  CDR3 for beta chain variable domain of TCR clone 179616 (TRBV5-1, TRBJ2-1)
CASSTPRAPYNEQFF

SEQ ID NO: 359233 - protein, 13 aa, Homo sapiens
  CDR3 for alpha chain variable domain of TCR clone 179617 (TRAV8-3, TRAJ6)
FAVEKGGSYIPTF

SEQ ID NO: 359234 - protein, 15 aa, Homo sapiens
  CDR3 for beta chain variable domain of TCR clone 179617 (TRBV28, TRBJ2-5)
CASSADRGRGETQYF

SEQ ID NO: 359235 - protein, 14 aa, Homo sapiens
  CDR3 for alpha chain variable domain of TCR clone 179618 (TRAV36/DV7, TRAJ32)
CAVGHVGATNKLIF

SEQ ID NO: 359236 - protein, 16 aa, Homo sapiens
  CDR3 for beta chain variable domain of TCR clone 179618 (TRBV12-4, TRBJ1-4)
CASSLKGSGHGEKLFF

SEQ ID NO: 359237 - protein, 12 aa, Homo sapiens
  CDR3 for alpha chain variable domain of TCR clone 179619 (TRAV26-1, TRAJ36)
CIVSVRADNLFF

SEQ ID NO: 359238 - protein, 13 aa, Homo sapiens
  CDR3 for beta chain variable domain of TCR clone 179619 (TRBV11-2, TRBJ2-5)
CASSRGPSETQYF

SEQ ID NO: 359239 - protein, 14 aa, Homo sapiens
  CDR3 for alpha chain variable domain of TCR clone 179620 (TRAV38-1, TRAJ31)
CAFMKHDNNARLMF

SEQ ID NO: 359240 - protein, 15 aa, Homo sapiens
  CDR3 for beta chain variable domain of TCR clone 179620 (TRBV28, TRBJ2-5)
CASSPGQGSIETQYF

SEQ ID NO: 359241 - protein, 13 aa, Homo sapiens
  CDR3 for alpha chain variable domain of TCR clone 179621 (TRAV26-1, TRAJ48)
CIVRVVGDEKLTF

SEQ ID NO: 359242 - protein, 18 aa, Homo sapiens
  CDR3 for beta chain variable domain of TCR clone 179621 (TRBV4-3, TRBJ1-6)
CASSQETPASSYNSPLNF

SEQ ID NO: 359243 - protein, 14 aa, Homo sapiens
  CDR3 for alpha chain variable domain of TCR clone 179622 (TRAV12-2, TRAJ17)
CAALFKAAGNKLTF

SEQ ID NO: 359244 - protein, 17 aa, Homo sapiens
  CDR3 for beta chain variable domain of TCR clone 179622 (TRBV20-1, TRBJ2-2)
CRASGSGQGGLTGELFF

SEQ ID NO: 359245 - protein, 14 aa, Homo sapiens
  CDR3 for alpha chain variable domain of TCR clone 179623 (TRAV1-2, TRAJ16)
CDVNRFSDGQKPLF

SEQ ID NO: 359246 - protein, 15 aa, Homo sapiens
  CDR3 for beta chain variable domain of TCR clone 179623 (TRBV7-9, TRBJ1-6)
CASSSPGRGNSPLHF

SEQ ID NO: 359247 - protein, 15 aa, Homo sapiens
  CDR3 for alpha chain variable domain of TCR clone 179624 (TRAV8-4, TRAJ3)
CAVTGETLVQQCFQD

SEQ ID NO: 359248 - protein, 16 aa, Homo sapiens
  CDR3 for beta chain variable domain of TCR clone 179624 (TRBV4-2, TRBJ1-1)
CASSQAGFGMNTEAFF

SEQ ID NO: 359249 - protein, 13 aa, Homo sapiens
  CDR3 for alpha chain variable domain of TCR clone 179625 (TRAV26-2, TRAJ43)
FILRAVNNNDMRF

SEQ ID NO: 359250 - protein, 15 aa, Homo sapiens
  CDR3 for beta chain variable domain of TCR clone 179625 (TRBV7-9, TRBJ1-5)
CASSQGHQPNQPQHF

SEQ ID NO: 359251 - protein, 18 aa, Homo sapiens
  CDR3 for alpha chain variable domain of TCR clone 179626 (TRAV21, TRAJ53)
CAVKGGENSGGSNYKLTF

SEQ ID NO: 359252 - protein, 14 aa, Homo sapiens
  CDR3 for beta chain variable domain of TCR clone 179626 (TRBV15, TRBJ2-5)
CATSIGGLGETQYF

SEQ ID NO: 359253 - protein, 13 aa, Homo sapiens
  CDR3 for alpha chain variable domain of TCR clone 179627 (TRAV13-1, TRAJ40)
CAAISPGTYKYIF

SEQ ID NO: 359254 - protein, 14 aa, Homo sapiens
  CDR3 for beta chain variable domain of TCR clone 179627 (TRBV10-2, TRBJ1-5)
CASSSTGRNQPQHF

SEQ ID NO: 359255 - protein, 13 aa, Homo sapiens
  CDR3 for alpha chain variable domain of TCR clone 179628 (TRAV13-2, TRAJ15)
CAEKNQAGTALLF

SEQ ID NO: 359256 - protein, 15 aa, Homo sapiens
  CDR3 for beta chain variable domain of TCR clone 179628 (TRBV29-1, TRBJ2-5)
CSVAPGQGARETQYF

SEQ ID NO: 359257 - protein, 14 aa, Homo sapiens
  CDR3 for alpha chain variable domain of TCR clone 179629 (TRAV12-3, TRAJ10)
SHLPLTGGGNKLTF

SEQ ID NO: 359258 - protein, 14 aa, Homo sapiens
  CDR3 for beta chain variable domain of TCR clone 179629 (TRBV11-2, TRBJ1-3)
CASSPRTGGNTIYF

SEQ ID NO: 359259 - protein, 12 aa, Homo sapiens
  CDR3 for alpha chain variable domain of TCR clone 179630 (TRAV8-3, TRAJ26)
CAGDTYGQNFVF

SEQ ID NO: 359260 - protein, 15 aa, Homo sapiens
  CDR3 for beta chain variable domain of TCR clone 179630 (TRBV5-1, TRBJ2-3)
CASSVTSGSTDTQYF

SEQ ID NO: 359261 - protein, 14 aa, Homo sapiens
  CDR3 for alpha chain variable domain of TCR clone 179631 (TRAV27, TRAJ50)
CAGRRKTSYDKVLF

SEQ ID NO: 359262 - protein, 11 aa, Homo sapiens
  CDR3 for beta chain variable domain of TCR clone 179631 (TRBV12-4, TRBJ2-3)
CASSSVRGRYF

SEQ ID NO: 359263 - protein, 16 aa, Homo sapiens
  CDR3 for alpha chain variable domain of TCR clone 179632 (TRAV4, TRAJ42)
CLVGPIYGGSQGNLIF

SEQ ID NO: 359264 - protein, 13 aa, Homo sapiens
  CDR3 for beta chain variable domain of TCR clone 179632 (TRBV11-2, TRBJ2-7)
CASSPLGSNEQYF

SEQ ID NO: 359265 - protein, 13 aa, Homo sapiens
  CDR3 for alpha chain variable domain of TCR clone 179633 (TRAV21, TRAJ57)
CALIEGGSEKLVF

SEQ ID NO: 359266 - protein, 15 aa, Homo sapiens
  CDR3 for beta chain variable domain of TCR clone 179633 (TRBV10-3, TRBJ2-5)
CAISEFGRGQETQYF

SEQ ID NO: 359267 - protein, 13 aa, Homo sapiens
  CDR3 for alpha chain variable domain of TCR clone 179634 (TRAV21, TRAJ57)
CAVTQGGSATLVF

SEQ ID NO: 359268 - protein, 16 aa, Homo sapiens
  CDR3 for beta chain variable domain of TCR clone 179634 (TRBV29-1, TRBJ2-7)
CSVEDAEDGTAYEQYF

SEQ ID NO: 359269 - protein, 16 aa, Homo sapiens
  CDR3 for alpha chain variable domain of TCR clone 179635 (TRAV27, TRAJ34)
CAGGGVGDYNTDKPIF

SEQ ID NO: 359270 - protein, 15 aa, Homo sapiens
  CDR3 for beta chain variable domain of TCR clone 179635 (TRBV9, TRBJ1-4)
CASSVGGSTNEKLFF

SEQ ID NO: 359271 - protein, 17 aa, Homo sapiens
  CDR3 for alpha chain variable domain of TCR clone 179636 (TRAV14/DV4, TRAJ4)
YAMREASGRGGYNKLIF

SEQ ID NO: 359272 - protein, 14 aa, Homo sapiens
  CDR3 for beta chain variable domain of TCR clone 179636 (TRBV19, TRBJ2-7)
CASSMGQGATEQYF

SEQ ID NO: 359273 - protein, 13 aa, Homo sapiens
  CDR3 for alpha chain variable domain of TCR clone 179637 (TRAV17, TRAJ5)
CALRGTGRRALTF

SEQ ID NO: 359274 - protein, 12 aa, Homo sapiens
  CDR3 for beta chain variable domain of TCR clone 179637 (TRBV7-6, TRBJ2-7)
CASSLDPVEQYF

SEQ ID NO: 359275 - protein, 18 aa, Homo sapiens
  CDR3 for alpha chain variable domain of TCR clone 179638 (TRAV21, TRAJ52)
CAVRPSPAGGTSYGKLTF

SEQ ID NO: 359276 - protein, 17 aa, Homo sapiens
  CDR3 for beta chain variable domain of TCR clone 179638 (TRBV13, TRBJ2-3)
CASSLSRVAGGRNMHYF

SEQ ID NO: 359277 - protein, 18 aa, Homo sapiens
  CDR3 for alpha chain variable domain of TCR clone 179639 (TRAV23/DV6, TRAJ21)
CAASSGGETTSTNFTLDL

SEQ ID NO: 359278 - protein, 11 aa, Homo sapiens
  CDR3 for beta chain variable domain of TCR clone 179639 (TRBV7-8, TRBJ2-7)
CASSLSLEQYF

SEQ ID NO: 359279 - protein, 14 aa, Homo sapiens
  CDR3 for alpha chain variable domain of TCR clone 179640 (TRAV6, TRAJ6)
CALPTSGGSYIPTF

SEQ ID NO: 359280 - protein, 17 aa, Homo sapiens
  CDR3 for beta chain variable domain of TCR clone 179640 (TRBV5-1, TRBJ2-5)
CASSTVALGQNQETQYF

SEQ ID NO: 359281 - protein, 12 aa, Homo sapiens
  CDR3 for alpha chain variable domain of TCR clone 179641 (TRAV12-3, TRAJ17)
CAMTLTGNKLTI

SEQ ID NO: 359282 - protein, 13 aa, Homo sapiens
  CDR3 for beta chain variable domain of TCR clone 179641 (TRBV5-1, TRBJ1-2)
CASSSTGVYGYTF

SEQ ID NO: 359283 - protein, 16 aa, Homo sapiens
  CDR3 for alpha chain variable domain of TCR clone 179642 (TRAV30, TRAJ24)
CGTEIVDADSWGKFQF

SEQ ID NO: 359284 - protein, 12 aa, Homo sapiens
  CDR3 for beta chain variable domain of TCR clone 179642 (TRBV18, TRBJ2-7)
CASSLDSYEQYF

SEQ ID NO: 359285 - protein, 15 aa, Homo sapiens
  CDR3 for alpha chain variable domain of TCR clone 179643 (TRAV2, TRAJ24)
CAVVRLKDSWGKLQF

SEQ ID NO: 359286 - protein, 16 aa, Homo sapiens
  CDR3 for beta chain variable domain of TCR clone 179643 (TRBV7-7, TRBJ2-3)
CASSPGTSGSTGTQYF

SEQ ID NO: 359287 - protein, 13 aa, Homo sapiens
  CDR3 for alpha chain variable domain of TCR clone 179644 (TRAV12-3, TRAJ9)
CAMRNTGGFKTIF

SEQ ID NO: 359288 - protein, 15 aa, Homo sapiens
  CDR3 for beta chain variable domain of TCR clone 179644 (TRBV5-1, TRBJ1-1)
CASSSTTGTNTEAFF

SEQ ID NO: 359289 - protein, 11 aa, Homo sapiens
  CDR3 for alpha chain variable domain of TCR clone 179645 (TRAV3, TRAJ21)
CAMGNFNKFHF

SEQ ID NO: 359290 - protein, 16 aa, Homo sapiens
  CDR3 for beta chain variable domain of TCR clone 179645 (TRBV19, TRBJ2-1)
CASSKAGPSSYNEQFF

SEQ ID NO: 359291 - protein, 17 aa, Homo sapiens
  CDR3 for alpha chain variable domain of TCR clone 179646 (TRAV4, TRAJ18)
CLVGERSVGSTLGRLYF

SEQ ID NO: 359292 - protein, 16 aa, Homo sapiens
  CDR3 for beta chain variable domain of TCR clone 179646 (TRBV15, TRBJ2-3)
CATRLSGGRAPDTQYF

SEQ ID NO: 359293 - protein, 13 aa, Homo sapiens
  CDR3 for alpha chain variable domain of TCR clone 179647 (TRAV17, TRAJ13)
CATDSGGYQKVTF

SEQ ID NO: 359294 - protein, 18 aa, Homo sapiens
  CDR3 for beta chain variable domain of TCR clone 179647 (TRBV7-3, TRBJ2-3)
CASSSTGTYPSSTDTQYF

SEQ ID NO: 359295 - protein, 15 aa, Homo sapiens
  CDR3 for alpha chain variable domain of TCR clone 179648 (TRAV12-2, TRAJ53)
CAVNGGGGSNYKLTF

SEQ ID NO: 359296 - protein, 13 aa, Homo sapiens
  CDR3 for beta chain variable domain of TCR clone 179648 (TRBV7-9, TRBJ2-7)
CASSFAGAYEQYF

SEQ ID NO: 359297 - protein, 12 aa, Homo sapiens
  CDR3 for alpha chain variable domain of TCR clone 179649 (TRAV12-3, TRAJ17)
CAMTLTGNKLTF

SEQ ID NO: 359298 - protein, 15 aa, Homo sapiens
  CDR3 for beta chain variable domain of TCR clone 179649 (TRBV11-2, TRBJ2-1)
CASSLAPRAHNEQFF

SEQ ID NO: 359299 - protein, 13 aa, Homo sapiens
  CDR3 for alpha chain variable domain of TCR clone 179650 (TRAV2, TRAJ15)
CAVSSQAGTALIF

SEQ ID NO: 359300 - protein, 17 aa, Homo sapiens
  CDR3 for beta chain variable domain of TCR clone 179650 (TRBV20-1, TRBJ2-2)
CSASGSGQGGLTGELFF

SEQ ID NO: 359301 - protein, 11 aa, Homo sapiens
  CDR3 for alpha chain variable domain of TCR clone 179651 (TRAV3, TRAJ21)
CAVGNFNRFYF

SEQ ID NO: 359302 - protein, 16 aa, Homo sapiens
  CDR3 for beta chain variable domain of TCR clone 179651 (TRBV19, TRBJ2-1)
CASSNAGPSSYNEQFF

SEQ ID NO: 359303 - protein, 12 aa, Homo sapiens
  CDR3 for alpha chain variable domain of TCR clone 179652 (TRAV9-2, TRAJ36)
CALKKGANNLFF

SEQ ID NO: 359304 - protein, 15 aa, Homo sapiens
  CDR3 for beta chain variable domain of TCR clone 179652 (TRBV5-7, TRBJ1-5)
CASSYGKLWDQPQHF

SEQ ID NO: 359305 - protein, 17 aa, Homo sapiens
  CDR3 for alpha chain variable domain of TCR clone 179653 (TRAV23/DV6, TRAJ57)
CAASSTLSQGGSEQLVF

SEQ ID NO: 359306 - protein, 14 aa, Homo sapiens
  CDR3 for beta chain variable domain of TCR clone 179653 (TRBV7-8, TRBJ2-1)
RASSSQGTYNEQFF

SEQ ID NO: 359307 - protein, 16 aa, Homo sapiens
  CDR3 for alpha chain variable domain of TCR clone 179654 (TRAV30, TRAJ24)
CGTEIVDADSWGKFQF

SEQ ID NO: 359308 - protein, 13 aa, Homo sapiens
  CDR3 for beta chain variable domain of TCR clone 179654 (TRBV7-2, TRBJ1-4)
CASSLAGLEELFF

SEQ ID NO: 359309 - protein, 16 aa, Homo sapiens
  CDR3 for alpha chain variable domain of TCR clone 179655 (TRAV35, TRAJ28)
CAGQRYSGAGSYQLTF

SEQ ID NO: 359310 - protein, 15 aa, Homo sapiens
  CDR3 for beta chain variable domain of TCR clone 179655 (TRBV5-7, TRBJ2-7)
CASSLPGQVFYEQYF

SEQ ID NO: 359311 - protein, 13 aa, Homo sapiens
  CDR3 for alpha chain variable domain of TCR clone 179656 (TRAV2, TRAJ40)
YAVVTSGTYNYIF

SEQ ID NO: 359312 - protein, 15 aa, Homo sapiens
  CDR3 for beta chain variable domain of TCR clone 179656 (TRBV11-3, TRBJ2-3)
CASLKDGREGDTQYF

SEQ ID NO: 359313 - protein, 14 aa, Homo sapiens
  CDR3 for alpha chain variable domain of TCR clone 179657 (TRAV22, TRAJ29)
CAVTRNSGNTPLVF

SEQ ID NO: 359314 - protein, 14 aa, Homo sapiens
  CDR3 for beta chain variable domain of TCR clone 179657 (TRBV7-2, TRBJ2-7)
CASSPKTSFYEQYF

SEQ ID NO: 359315 - protein, 10 aa, Homo sapiens
  CDR3 for alpha chain variable domain of TCR clone 179658 (TRAV36/DV7, TRAJ56)
CAGPAVELPF

SEQ ID NO: 359316 - protein, 13 aa, Homo sapiens
  CDR3 for beta chain variable domain of TCR clone 179658 (TRBV7-9, TRBJ2-7)
CASSFWSSYEQYF

SEQ ID NO: 359317 - protein, 11 aa, Homo sapiens
  CDR3 for alpha chain variable domain of TCR clone 179659 (TRAV1-2, TRAJ31)
CAVNNNARLMV

SEQ ID NO: 359318 - protein, 15 aa, Homo sapiens
  CDR3 for beta chain variable domain of TCR clone 179659 (TRBV28, TRBJ2-1)
CASSIIAGGRSEQFF

SEQ ID NO: 359319 - protein, 13 aa, Homo sapiens
  CDR3 for alpha chain variable domain of TCR clone 179660 (TRAV17, TRAJ35)
CATDYPFGSVLHC

SEQ ID NO: 359320 - protein, 13 aa, Homo sapiens
  CDR3 for beta chain variable domain of TCR clone 179660 (TRBV9, TRBJ1-1)
CASSVGTGTEAFF

SEQ ID NO: 359321 - protein, 18 aa, Homo sapiens
  CDR3 for alpha chain variable domain of TCR clone 179661 (TRAV26-1, TRAJ52)
CIVRVEGAGGPSYGKLTF

SEQ ID NO: 359322 - protein, 13 aa, Homo sapiens
  CDR3 for beta chain variable domain of TCR clone 179661 (TRBV7-3, TRBJ1-2)
CASSLKRGYGYTF

SEQ ID NO: 359323 - protein, 14 aa, Homo sapiens
  CDR3 for alpha chain variable domain of TCR clone 179662 (TRAV20, TRAJ40)
CAVQAVPGTYKYIF

SEQ ID NO: 359324 - protein, 13 aa, Homo sapiens
  CDR3 for beta chain variable domain of TCR clone 179662 (TRBV12-4, TRBJ1-2)
CASSLRQGKGYTF

SEQ ID NO: 359325 - protein, 14 aa, Homo sapiens
  CDR3 for alpha chain variable domain of TCR clone 179663 (TRAV16, TRAJ57)
CALPTQVGSEKLVF

SEQ ID NO: 359326 - protein, 15 aa, Homo sapiens
  CDR3 for beta chain variable domain of TCR clone 179663 (TRBV28, TRBJ1-3)
CASWGGHLSGNTIYF

SEQ ID NO: 359327 - protein, 10 aa, Homo sapiens
  CDR3 for alpha chain variable domain of TCR clone 179664 (TRAV1-2, TRAJ31)
CPFFDARLMF

SEQ ID NO: 359328 - protein, 15 aa, Homo sapiens
  CDR3 for beta chain variable domain of TCR clone 179664 (TRBV4-1, TRBJ1-4)
CASSDTGGTNEKLFF

SEQ ID NO: 359329 - protein, 10 aa, Homo sapiens
  CDR3 for alpha chain variable domain of TCR clone 179665 (TRAV8-4, TRAJ39)
CAVSGNMLTF

SEQ ID NO: 359330 - protein, 14 aa, Homo sapiens
  CDR3 for beta chain variable domain of TCR clone 179665 (TRBV6-9, TRBJ1-5)
CASSYPTWGQPQHF

SEQ ID NO: 359331 - protein, 14 aa, Homo sapiens
  CDR3 for alpha chain variable domain of TCR clone 179666 (TRAV12-3, TRAJ10)
SHLPLTGGGNKLTF

SEQ ID NO: 359332 - protein, 14 aa, Homo sapiens
  CDR3 for beta chain variable domain of TCR clone 179666 (TRBV7-2, TRBJ2-2)
CASSLNSNTGELFF

SEQ ID NO: 359333 - protein, 14 aa, Homo sapiens
  CDR3 for alpha chain variable domain of TCR clone 179667 (TRAV35, TRAJ50)
CACHRKTSYDKVIF

SEQ ID NO: 359334 - protein, 13 aa, Homo sapiens
  CDR3 for beta chain variable domain of TCR clone 179667 (TRBV7-7, TRBJ2-3)
CASSLSRADTQYS

SEQ ID NO: 359335 - protein, 11 aa, Homo sapiens
  CDR3 for alpha chain variable domain of TCR clone 179668 (TRAV13-1, TRAJ34)
CAAGKADKLIF

SEQ ID NO: 359336 - protein, 15 aa, Homo sapiens
  CDR3 for beta chain variable domain of TCR clone 179668 (TRBV5-4, TRBJ2-5)
CASSLAGGAKETQYF

SEQ ID NO: 359337 - protein, 14 aa, Homo sapiens
  CDR3 for alpha chain variable domain of TCR clone 179669 (TRAV16, TRAJ33)
CALSAMDSNYQLIW

SEQ ID NO: 359338 - protein, 16 aa, Homo sapiens
  CDR3 for beta chain variable domain of TCR clone 179669 (TRBV25-1, TRBJ2-7)
CASSELTGGGIYGQYF

SEQ ID NO: 359339 - protein, 16 aa, Homo sapiens
  CDR3 for alpha chain variable domain of TCR clone 179670 (TRAV30, TRAJ24)
CGTEIVDADSWGKFQF

SEQ ID NO: 359340 - protein, 17 aa, Homo sapiens
  CDR3 for beta chain variable domain of TCR clone 179670 (TRBV11-2, TRBJ2-6)
CASSQRDIFSGANVLTF

SEQ ID NO: 359341 - protein, 14 aa, Homo sapiens
  CDR3 for alpha chain variable domain of TCR clone 179671 (TRAV2, TRAJ37)
CAVDFTSNTGKLIF

SEQ ID NO: 359342 - protein, 16 aa, Homo sapiens
  CDR3 for beta chain variable domain of TCR clone 179671 (TRBV5-1, TRBJ2-5)
CASSLSLAGAQETQYF

SEQ ID NO: 359343 - protein, 17 aa, Homo sapiens
  CDR3 for alpha chain variable domain of TCR clone 179672 (TRAV17, TRAJ28)
CATDPRRGGAGRYQPTF

SEQ ID NO: 359344 - protein, 16 aa, Homo sapiens
  CDR3 for beta chain variable domain of TCR clone 179672 (TRBV25-1, TRBJ1-1)
CAGSGDRDRGRIEAFF

SEQ ID NO: 359345 - protein, 11 aa, Homo sapiens
  CDR3 for alpha chain variable domain of TCR clone 179673 (TRAV35, TRAJ34)
CWARNTDKLIF

SEQ ID NO: 359346 - protein, 12 aa, Homo sapiens
  CDR3 for beta chain variable domain of TCR clone 179673 (TRBV12-4, TRBJ2-7)
CASSLGGHEQYF

SEQ ID NO: 359347 - protein, 14 aa, Homo sapiens
  CDR3 for alpha chain variable domain of TCR clone 179674 (TRAV8-3, TRAJ11)
CAVGSNSGYSTLTF

SEQ ID NO: 359348 - protein, 13 aa, Homo sapiens
  CDR3 for beta chain variable domain of TCR clone 179674 (TRBV7-2, TRBJ2-4)
CASSREHANIQYF

SEQ ID NO: 359349 - protein, 13 aa, Homo sapiens
  CDR3 for alpha chain variable domain of TCR clone 179675 (TRAV1-1, TRAJ7)
CAVSPLWEQQTRF

SEQ ID NO: 359350 - protein, 13 aa, Homo sapiens
  CDR3 for beta chain variable domain of TCR clone 179675 (TRBV4-2, TRBJ1-1)
CASSQAGNTEAFF

SEQ ID NO: 359351 - protein, 15 aa, Homo sapiens
  CDR3 for alpha chain variable domain of TCR clone 179676 (TRAV8-3, TRAJ40)
CAAPSLGSGTYRYIF

SEQ ID NO: 359352 - protein, 15 aa, Homo sapiens
  CDR3 for beta chain variable domain of TCR clone 179676 (TRBV28, TRBJ2-5)
CASSPGQGSIETQYF

SEQ ID NO: 359353 - protein, 13 aa, Homo sapiens
  CDR3 for alpha chain variable domain of TCR clone 179677 (TRAV13-1, TRAJ17)
CAASRAAGNKLTF

SEQ ID NO: 359354 - protein, 11 aa, Homo sapiens
  CDR3 for beta chain variable domain of TCR clone 179677 (TRBV6-3, TRBJ2-3)
CATGQADTQYF

SEQ ID NO: 359355 - protein, 13 aa, Homo sapiens
  CDR3 for alpha chain variable domain of TCR clone 179678 (TRAV27, TRAJ6)
RAGGTRGRYIPTF

SEQ ID NO: 359356 - protein, 15 aa, Homo sapiens
  CDR3 for beta chain variable domain of TCR clone 179678 (TRBV5-5, TRBJ2-7)
CASSLAAPLSYEQYF

SEQ ID NO: 359357 - protein, 13 aa, Homo sapiens
  CDR3 for alpha chain variable domain of TCR clone 179679 (TRAV30, TRAJ6)
CGTEAEGSYIPTF

SEQ ID NO: 359358 - protein, 16 aa, Homo sapiens
  CDR3 for beta chain variable domain of TCR clone 179679 (TRBV4-3, TRBJ2-3)
CASSLGLAGEGDTQYF

SEQ ID NO: 359359 - protein, 10 aa, Homo sapiens
  CDR3 for alpha chain variable domain of TCR clone 179680 (TRAV3, TRAJ43)
CAVSADDMRF

SEQ ID NO: 359360 - protein, 15 aa, Homo sapiens
  CDR3 for beta chain variable domain of TCR clone 179680 (TRBV5-1, TRBJ2-3)
CASSVTSGSTDTQYF

SEQ ID NO: 359361 - protein, 12 aa, Homo sapiens
  CDR3 for alpha chain variable domain of TCR clone 179681 (TRAV1-1, TRAJ20)
CAVREDDYKLSF

SEQ ID NO: 359362 - protein, 15 aa, Homo sapiens
  CDR3 for beta chain variable domain of TCR clone 179681 (TRBV5-7, TRBJ2-7)
CASSLPGQVFYEQYV

SEQ ID NO: 359363 - protein, 16 aa, Homo sapiens
  CDR3 for alpha chain variable domain of TCR clone 179682 (TRAV12-2, TRAJ37)
CAVKEKGSSNTGKLIF

SEQ ID NO: 359364 - protein, 14 aa, Homo sapiens
  CDR3 for beta chain variable domain of TCR clone 179682 (TRBV7-6, TRBJ2-3)
CASSLGTVTDTQYF

SEQ ID NO: 359365 - protein, 16 aa, Homo sapiens
  CDR3 for alpha chain variable domain of TCR clone 179683 (TRAV3, TRAJ37)
CAVRGKGSGNTGKIIF

SEQ ID NO: 359366 - protein, 14 aa, Homo sapiens
  CDR3 for beta chain variable domain of TCR clone 179683 (TRBV20-1, TRBJ2-3)
CSARGGTSTDTQYF

SEQ ID NO: 359367 - protein, 15 aa, Homo sapiens
  CDR3 for alpha chain variable domain of TCR clone 179684 (TRAV12-1, TRAJ9)
CVVSFGDTGGFKTIF

SEQ ID NO: 359368 - protein, 15 aa, Homo sapiens
  CDR3 for beta chain variable domain of TCR clone 179684 (TRBV7-3, TRBJ2-1)
CASSPTGGGEVEQFF

SEQ ID NO: 359369 - protein, 14 aa, Homo sapiens
  CDR3 for alpha chain variable domain of TCR clone 179685 (TRAV12-3, TRAJ10)
SHLPLTGGGNKLTF

SEQ ID NO: 359370 - protein, 17 aa, Homo sapiens
  CDR3 for beta chain variable domain of TCR clone 179685 (TRBV6-5, TRBJ2-3)
CASSYGTSLYKSDTQYF

SEQ ID NO: 359371 - protein, 13 aa, Homo sapiens
  CDR3 for alpha chain variable domain of TCR clone 179686 (TRAV23/DV6, TRAJ45)
CAEDRRRCLRTHL

SEQ ID NO: 359372 - protein, 17 aa, Homo sapiens
  CDR3 for beta chain variable domain of TCR clone 179686 (TRBV28, TRBJ2-3)
CASSPTPAGGRVDTQYF

SEQ ID NO: 359373 - protein, 15 aa, Homo sapiens
  CDR3 for alpha chain variable domain of TCR clone 179687 (TRAV26-1, TRAJ56)
CIVRVDNGGNSKLTF

SEQ ID NO: 359374 - protein, 15 aa, Homo sapiens
  CDR3 for beta chain variable domain of TCR clone 179687 (TRBV20-1, TRBJ2-7)
CSARDPTEVGHEQYF

SEQ ID NO: 359375 - protein, 15 aa, Homo sapiens
  CDR3 for alpha chain variable domain of TCR clone 179688 (TRAV3, TRAJ22)
CAVRDRGGAARQLTF

SEQ ID NO: 359376 - protein, 20 aa, Homo sapiens
  CDR3 for beta chain variable domain of TCR clone 179688 (TRBV11-2, TRBJ1-6)
CASSLVFATGGSVHPSTLGT

SEQ ID NO: 359377 - protein, 20 aa, Homo sapiens
  CDR3 for alpha chain variable domain of TCR clone 179689 (TRAV12-3, TRAJ17)
SPVIQPPTSAMTLTGNKLTF

SEQ ID NO: 359378 - protein, 15 aa, Homo sapiens
  CDR3 for beta chain variable domain of TCR clone 179689 (TRBV11-2, TRBJ2-2)
CASSSDRVNAGELFF

SEQ ID NO: 359379 - protein, 12 aa, Homo sapiens
  CDR3 for alpha chain variable domain of TCR clone 179690 (TRAV13-2, TRAJ23)
CAERHRGGKLIF

SEQ ID NO: 359380 - protein, 15 aa, Homo sapiens
  CDR3 for beta chain variable domain of TCR clone 179690 (TRBV6-3, TRBJ2-7)
CARSSPGTVFYEQYF

SEQ ID NO: 359381 - protein, 14 aa, Homo sapiens
  CDR3 for alpha chain variable domain of TCR clone 179691 (TRAV27, TRAJ36)
CAGPPKRGANNPFF

SEQ ID NO: 359382 - protein, 15 aa, Homo sapiens
  CDR3 for beta chain variable domain of TCR clone 179691 (TRBV18, TRBJ2-7)
CASSHASTPNYEQYF

SEQ ID NO: 359383 - protein, 14 aa, Homo sapiens
  CDR3 for alpha chain variable domain of TCR clone 179692 (TRAV16, TRAJ17)
CALSGRAAGNKLTF

SEQ ID NO: 359384 - protein, 16 aa, Homo sapiens
  CDR3 for beta chain variable domain of TCR clone 179692 (TRBV7-3, TRBJ2-2)
CASSLKRGTLSGELFF

SEQ ID NO: 359385 - protein, 14 aa, Homo sapiens
  CDR3 for alpha chain variable domain of TCR clone 179693 (TRAV12-2, TRAJ44)
CAVNPAGNASKLTF

SEQ ID NO: 359386 - protein, 14 aa, Homo sapiens
  CDR3 for beta chain variable domain of TCR clone 179693 (TRBV6-1, TRBJ1-3)
CASVQGGGGNTIYF

SEQ ID NO: 359387 - protein, 15 aa, Homo sapiens
  CDR3 for alpha chain variable domain of TCR clone 179694 (TRAV8-3, TRAJ28)
CAVAYSGAGSYQLTF

SEQ ID NO: 359388 - protein, 14 aa, Homo sapiens
  CDR3 for beta chain variable domain of TCR clone 179694 (TRBV4-1, TRBJ2-2)
CASSQAVNTGELFF

SEQ ID NO: 359389 - protein, 13 aa, Homo sapiens
  CDR3 for alpha chain variable domain of TCR clone 179695 (TRAV3, TRAJ7)
CAVSSYGNNRLAF

SEQ ID NO: 359390 - protein, 12 aa, Homo sapiens
  CDR3 for beta chain variable domain of TCR clone 179695 (TRBV7-9, TRBJ2-7)
CASSLEGYEQYF

SEQ ID NO: 359391 - protein, 17 aa, Homo sapiens
  CDR3 for alpha chain variable domain of TCR clone 179696 (TRAV3, TRAJ6)
CAVRDGPRAGGSYIPTF

SEQ ID NO: 359392 - protein, 16 aa, Homo sapiens
  CDR3 for beta chain variable domain of TCR clone 179696 (TRBV9, TRBJ2-2)
CASSAMGKGNTGELFF

SEQ ID NO: 359393 - protein, 11 aa, Homo sapiens
  CDR3 for alpha chain variable domain of TCR clone 179697 (TRAV8-3, TRAJ49)
CAVNTGNQFYF

SEQ ID NO: 359394 - protein, 12 aa, Homo sapiens
  CDR3 for beta chain variable domain of TCR clone 179697 (TRBV11-2, TRBJ2-7)
CASSPPTDEQYF

SEQ ID NO: 359395 - protein, 12 aa, Homo sapiens
  CDR3 for alpha chain variable domain of TCR clone 179698 (TRAV21, TRAJ11)
CAVRGGNSTLTF

SEQ ID NO: 359396 - protein, 15 aa, Homo sapiens
  CDR3 for beta chain variable domain of TCR clone 179698 (TRBV6-1, TRBJ2-7)
CASSKPIAATTEQYF

SEQ ID NO: 359397 - protein, 12 aa, Homo sapiens
  CDR3 for alpha chain variable domain of TCR clone 179699 (TRAV21, TRAJ37)
CAVRGDTGKLIF

SEQ ID NO: 359398 - protein, 14 aa, Homo sapiens
  CDR3 for beta chain variable domain of TCR clone 179699 (TRBV19, TRBJ2-1)
CASEVTGARNEQFF

SEQ ID NO: 359399 - protein, 14 aa, Homo sapiens
  CDR3 for alpha chain variable domain of TCR clone 179700 (TRAV26-1, TRAJ38)
CIADNAGNNRKLIW

SEQ ID NO: 359400 - protein, 15 aa, Homo sapiens
  CDR3 for beta chain variable domain of TCR clone 179700 (TRBV20-1, TRBJ2-7)
CSARDRVAGMDEQYF

SEQ ID NO: 359401 - protein, 15 aa, Homo sapiens
  CDR3 for alpha chain variable domain of TCR clone 179701 (TRAV12-3, TRAJ27)
CAMRAYNTTAGKSPF

SEQ ID NO: 359402 - protein, 13 aa, Homo sapiens
  CDR3 for beta chain variable domain of TCR clone 179701 (TRBV11-2, TRBJ2-5)
CASSRGPSETQYF

SEQ ID NO: 359403 - protein, 14 aa, Homo sapiens
  CDR3 for alpha chain variable domain of TCR clone 179702 (TRAV3, TRAJ15)
RAVTLNQAGTALIF

SEQ ID NO: 359404 - protein, 17 aa, Homo sapiens
  CDR3 for beta chain variable domain of TCR clone 179702 (TRBV7-8, TRBJ2-7)
CASSFTSGRPPSYEQYF

SEQ ID NO: 359405 - protein, 15 aa, Homo sapiens
  CDR3 for alpha chain variable domain of TCR clone 179703 (TRAV13-1, TRAJ18)
CAASGGGSTLGRLYF

SEQ ID NO: 359406 - protein, 15 aa, Homo sapiens
  CDR3 for beta chain variable domain of TCR clone 179703 (TRBV19, TRBJ2-1)
CASSSPGVPLDEHFF

SEQ ID NO: 359407 - protein, 18 aa, Homo sapiens
  CDR3 for alpha chain variable domain of TCR clone 179704 (TRAV21, TRAJ52)
CAVRPSPAGGTSYGKLTF

SEQ ID NO: 359408 - protein, 12 aa, Homo sapiens
  CDR3 for beta chain variable domain of TCR clone 179704 (TRBV6-5, TRBJ2-3)
CASSDTTDTQYF

SEQ ID NO: 359409 - protein, 14 aa, Homo sapiens
  CDR3 for alpha chain variable domain of TCR clone 179705 (TRAV16, TRAJ42)
CALLAGGSQGNLIF

SEQ ID NO: 359410 - protein, 14 aa, Homo sapiens
  CDR3 for beta chain variable domain of TCR clone 179705 (TRBV10-3, TRBJ2-5)
CAISERDYQETQYF

SEQ ID NO: 359411 - protein, 15 aa, Homo sapiens
  CDR3 for alpha chain variable domain of TCR clone 179706 (TRAV12-3, TRAJ6)
CAMSAASGGSYIPTF

SEQ ID NO: 359412 - protein, 13 aa, Homo sapiens
  CDR3 for beta chain variable domain of TCR clone 179706 (TRBV20-1, TRBJ1-2)
CSASTERIYGYIF

SEQ ID NO: 359413 - protein, 13 aa, Homo sapiens
  CDR3 for alpha chain variable domain of TCR clone 179707 (TRAV17, TRAJ7)
CATDNYGNNRLAF

SEQ ID NO: 359414 - protein, 14 aa, Homo sapiens
  CDR3 for beta chain variable domain of TCR clone 179707 (TRBV4-1, TRBJ2-2)
CASSQAVNTGELFF

SEQ ID NO: 359415 - protein, 16 aa, Homo sapiens
  CDR3 for alpha chain variable domain of TCR clone 179708 (TRAV21, TRAJ17)
CAVRPGEEAAGNKLTF

SEQ ID NO: 359416 - protein, 16 aa, Homo sapiens
  CDR3 for beta chain variable domain of TCR clone 179708 (TRBV2, TRBJ2-7)
CDSSEPWTGPSYEQYF

SEQ ID NO: 359417 - protein, 12 aa, Homo sapiens
  CDR3 for alpha chain variable domain of TCR clone 179709 (TRAV12-1, TRAJ40)
CVVYSGTYKYIF

SEQ ID NO: 359418 - protein, 16 aa, Homo sapiens
  CDR3 for beta chain variable domain of TCR clone 179709 (TRBV18, TRBJ2-7)
CASSPLQSGTHYEQYF

SEQ ID NO: 359419 - protein, 14 aa, Homo sapiens
  CDR3 for alpha chain variable domain of TCR clone 179710 (TRAV17, TRAJ57)
CATDPQGGSEKLVF

SEQ ID NO: 359420 - protein, 18 aa, Homo sapiens
  CDR3 for beta chain variable domain of TCR clone 179710 (TRBV25-1, TRBJ2-1)
CASSESRAGGPGYNEQFV

SEQ ID NO: 359421 - protein, 17 aa, Homo sapiens
  CDR3 for alpha chain variable domain of TCR clone 179711 (TRAV2, TRAJ36)
CAVEDRGNWGKQPLLWD

SEQ ID NO: 359422 - protein, 14 aa, Homo sapiens
  CDR3 for beta chain variable domain of TCR clone 179711 (TRBV7-9, TRBJ2-5)
CASSLDTAQETHYF

SEQ ID NO: 359423 - protein, 17 aa, Homo sapiens
  CDR3 for alpha chain variable domain of TCR clone 179712 (TRAV8-6, TRAJ58)
CAVSSWVGETSGSRLTV

SEQ ID NO: 359424 - protein, 14 aa, Homo sapiens
  CDR3 for beta chain variable domain of TCR clone 179712 (TRBV4-2, TRBJ2-1)
CAGGLDRAYNEQFF

SEQ ID NO: 359425 - protein, 17 aa, Homo sapiens
  CDR3 for alpha chain variable domain of TCR clone 179713 (TRAV4, TRAJ13)
CLVGVQGSSGGYQKVTF

SEQ ID NO: 359426 - protein, 18 aa, Homo sapiens
  CDR3 for beta chain variable domain of TCR clone 179713 (TRBV15, TRBJ2-3)
CATSSAGARSWDTDTQYF

SEQ ID NO: 359427 - protein, 15 aa, Homo sapiens
  CDR3 for alpha chain variable domain of TCR clone 179714 (TRAV20, TRAJ53)
CAVQESGGSNYKLTF

SEQ ID NO: 359428 - protein, 15 aa, Homo sapiens
  CDR3 for beta chain variable domain of TCR clone 179714 (TRBV20-1, TRBJ2-7)
CSARDRVSGMDEQYF

SEQ ID NO: 359429 - protein, 12 aa, Homo sapiens
  CDR3 for alpha chain variable domain of TCR clone 179715 (TRAV20, TRAJ20)
CAVRFNDYKLSF

SEQ ID NO: 359430 - protein, 14 aa, Homo sapiens
  CDR3 for beta chain variable domain of TCR clone 179715 (TRBV20-1, TRBJ2-1)
CSAQIGWSANEQFF

SEQ ID NO: 359431 - protein, 14 aa, Homo sapiens
  CDR3 for alpha chain variable domain of TCR clone 179716 (TRAV13-1, TRAJ35)
CAASKGGFGNVLHC

SEQ ID NO: 359432 - protein, 16 aa, Homo sapiens
  CDR3 for beta chain variable domain of TCR clone 179716 (TRBV18, TRBJ1-3)
CASSLGILNGENTIYF

SEQ ID NO: 359433 - protein, 11 aa, Homo sapiens
  CDR3 for alpha chain variable domain of TCR clone 179717 (TRAV1-2, TRAJ20)
CAVANDYKLSF

SEQ ID NO: 359434 - protein, 14 aa, Homo sapiens
  CDR3 for beta chain variable domain of TCR clone 179717 (TRBV2, TRBJ2-7)
CASSLTSGGYEQYF

SEQ ID NO: 359435 - protein, 13 aa, Homo sapiens
  CDR3 for alpha chain variable domain of TCR clone 179718 (TRAV27, TRAJ6)
CAGGTRGSYIPTF

SEQ ID NO: 359436 - protein, 15 aa, Homo sapiens
  CDR3 for beta chain variable domain of TCR clone 179718 (TRBV19, TRBJ1-6)
CASSTQGAVGSPLHF

SEQ ID NO: 359437 - protein, 15 aa, Homo sapiens
  CDR3 for alpha chain variable domain of TCR clone 179719 (TRAV12-2, TRAJ53)
CRERGGGGSNYKLTF

SEQ ID NO: 359438 - protein, 13 aa, Homo sapiens
  CDR3 for beta chain variable domain of TCR clone 179719 (TRBV12-4, TRBJ1-2)
CASSSGSKDGYTF

SEQ ID NO: 359439 - protein, 10 aa, Homo sapiens
  CDR3 for alpha chain variable domain of TCR clone 179720 (TRAV12-1, TRAJ37)
ARGNTGELIL

SEQ ID NO: 359440 - protein, 15 aa, Homo sapiens
  CDR3 for beta chain variable domain of TCR clone 179720 (TRBV7-2, TRBJ2-3)
CASSLEQGGTDTQYF

SEQ ID NO: 359441 - protein, 10 aa, Homo sapiens
  CDR3 for alpha chain variable domain of TCR clone 179721 (TRAV1-2, TRAJ31)
CAFFDARLMF

SEQ ID NO: 359442 - protein, 11 aa, Homo sapiens
  CDR3 for beta chain variable domain of TCR clone 179721 (TRBV29-1, TRBJ2-5)
CSEDRTGTQYS

SEQ ID NO: 359443 - protein, 17 aa, Homo sapiens
  CDR3 for alpha chain variable domain of TCR clone 179722 (TRAV3, TRAJ6)
CAVRDGPRAGGIYIPPF

SEQ ID NO: 359444 - protein, 14 aa, Homo sapiens
  CDR3 for beta chain variable domain of TCR clone 179722 (TRBV7-2, TRBJ2-7)
CASSPKTSFYEQYF

SEQ ID NO: 359445 - protein, 18 aa, Homo sapiens
  CDR3 for alpha chain variable domain of TCR clone 179723 (TRAV1-2, TRAJ18)
CAVRDMGDIGSTLGRLYF

SEQ ID NO: 359446 - protein, 16 aa, Homo sapiens
  CDR3 for beta chain variable domain of TCR clone 179723 (TRBV29-1, TRBJ1-2)
CSVEANRDIANYGYTF

SEQ ID NO: 359447 - protein, 11 aa, Homo sapiens
  CDR3 for alpha chain variable domain of TCR clone 179724 (TRAV13-2, TRAJ26)
CAEIPGQDFVF

SEQ ID NO: 359448 - protein, 15 aa, Homo sapiens
  CDR3 for beta chain variable domain of TCR clone 179724 (TRBV10-3, TRBJ1-5)
CAISDTGLGGQPQHF

SEQ ID NO: 359449 - protein, 14 aa, Homo sapiens
  CDR3 for alpha chain variable domain of TCR clone 179725 (TRAV4, TRAJ9)
CLVGSGPGGFKTIF

SEQ ID NO: 359450 - protein, 14 aa, Homo sapiens
  CDR3 for beta chain variable domain of TCR clone 179725 (TRBV7-9, TRBJ2-4)
CASSLAMGGNIQYF

SEQ ID NO: 359451 - protein, 14 aa, Homo sapiens
  CDR3 for alpha chain variable domain of TCR clone 179726 (TRAV8-3, TRAJ9)
CAVVYNTGGFKTIF

SEQ ID NO: 359452 - protein, 14 aa, Homo sapiens
  CDR3 for beta chain variable domain of TCR clone 179726 (TRBV7-3, TRBJ2-2)
CASSSGGYTGEQFF

SEQ ID NO: 359453 - protein, 12 aa, Homo sapiens
  CDR3 for alpha chain variable domain of TCR clone 179727 (TRAV12-1, TRAJ34)
CVVAGATDKLIF

SEQ ID NO: 359454 - protein, 12 aa, Homo sapiens
  CDR3 for beta chain variable domain of TCR clone 179727 (TRBV7-9, TRBJ1-1)
CANSLVRGEAFF

SEQ ID NO: 359455 - protein, 19 aa, Homo sapiens
  CDR3 for alpha chain variable domain of TCR clone 179728 (TRAV26-1, TRAJ52)
CIVRAHRNAGGTSYGKLTF

SEQ ID NO: 359456 - protein, 15 aa, Homo sapiens
  CDR3 for beta chain variable domain of TCR clone 179728 (TRBV11-2, TRBJ2-2)
CASSSDRVNAGELFF

SEQ ID NO: 359457 - protein, 14 aa, Homo sapiens
  CDR3 for alpha chain variable domain of TCR clone 179729 (TRAV17, TRAJ8)
CATDLNTCFQKLVF

SEQ ID NO: 359458 - protein, 14 aa, Homo sapiens
  CDR3 for beta chain variable domain of TCR clone 179729 (TRBV25-1, TRBJ1-1)
CASTHLGGNTEAFF

SEQ ID NO: 359459 - protein, 16 aa, Homo sapiens
  CDR3 for alpha chain variable domain of TCR clone 179730 (TRAV30, TRAJ24)
CGTEIVDADSWGKFQF

SEQ ID NO: 359460 - protein, 13 aa, Homo sapiens
  CDR3 for beta chain variable domain of TCR clone 179730 (TRBV7-9, TRBJ1-2)
CASSLKQNYRHTF

SEQ ID NO: 359461 - protein, 19 aa, Homo sapiens
  CDR3 for alpha chain variable domain of TCR clone 179731 (TRAV2, TRAJ32)
TTVLSTPPTQGGATTKLIF

SEQ ID NO: 359462 - protein, 12 aa, Homo sapiens
  CDR3 for beta chain variable domain of TCR clone 179731 (TRBV20-1, TRBJ2-7)
CSAITPTKEQYF

SEQ ID NO: 359463 - protein, 15 aa, Homo sapiens
  CDR3 for alpha chain variable domain of TCR clone 179732 (TRAV38-2/DV8, TRAJ45)
CAYWDSGGGADGLTF

SEQ ID NO: 359464 - protein, 13 aa, Homo sapiens
  CDR3 for beta chain variable domain of TCR clone 179732 (TRBV4-1, TRBJ2-1)
CASSQAGGDEQFF

SEQ ID NO: 359465 - protein, 13 aa, Homo sapiens
  CDR3 for alpha chain variable domain of TCR clone 179733 (TRAV36/DV7, TRAJ54)
CAVDIQGAQKLVF

SEQ ID NO: 359466 - protein, 14 aa, Homo sapiens
  CDR3 for beta chain variable domain of TCR clone 179733 (TRBV19, TRBJ1-6)
CASSTDGWNSPLHF

SEQ ID NO: 359467 - protein, 16 aa, Homo sapiens
  CDR3 for alpha chain variable domain of TCR clone 179734 (TRAV30, TRAJ24)
CGTEIVDADSWGNSSL

SEQ ID NO: 359468 - protein, 14 aa, Homo sapiens
  CDR3 for beta chain variable domain of TCR clone 179734 (TRBV7-8, TRBJ2-3)
CASSLEAGTDTQYF

SEQ ID NO: 359469 - protein, 14 aa, Homo sapiens
  CDR3 for alpha chain variable domain of TCR clone 179735 (TRAV1-2, TRAJ16)
CAVNRFSDGQKLLF

SEQ ID NO: 359470 - protein, 15 aa, Homo sapiens
  CDR3 for beta chain variable domain of TCR clone 179735 (TRBV7-9, TRBJ2-2)
CASGPLDTFSGELFF

SEQ ID NO: 359471 - protein, 14 aa, Homo sapiens
  CDR3 for alpha chain variable domain of TCR clone 179736 (TRAV12-2, TRAJ40)
YAVKIPSGTYKYIF

SEQ ID NO: 359472 - protein, 13 aa, Homo sapiens
  CDR3 for beta chain variable domain of TCR clone 179736 (TRBV20-1, TRBJ1-2)
CSARDRVYGGYTF

SEQ ID NO: 359473 - protein, 15 aa, Homo sapiens
  CDR3 for alpha chain variable domain of TCR clone 179737 (TRAV23/DV6, TRAJ53)
CGASFGGGSNYKLTF

SEQ ID NO: 359474 - protein, 17 aa, Homo sapiens
  CDR3 for beta chain variable domain of TCR clone 179737 (TRBV19, TRBJ1-5)
CASNPNRGPGSNQPQHF

SEQ ID NO: 359475 - protein, 14 aa, Homo sapiens
  CDR3 for alpha chain variable domain of TCR clone 179738 (TRAV21, TRAJ58)
CAVGEETSGPRLTF

SEQ ID NO: 359476 - protein, 14 aa, Homo sapiens
  CDR3 for beta chain variable domain of TCR clone 179738 (TRBV7-2, TRBJ1-1)
CASSFLTGTTEAFF

SEQ ID NO: 359477 - protein, 15 aa, Homo sapiens
  CDR3 for alpha chain variable domain of TCR clone 179739 (TRAV13-1, TRAJ32)
CAASIYGGSTNKLIF

SEQ ID NO: 359478 - protein, 17 aa, Homo sapiens
  CDR3 for beta chain variable domain of TCR clone 179739 (TRBV7-3, TRBJ2-5)
CASSLGSGRSGSETQYF

SEQ ID NO: 359479 - protein, 15 aa, Homo sapiens
  CDR3 for alpha chain variable domain of TCR clone 179740 (TRAV27, TRAJ56)
CAGRDGTGANSKLTF

SEQ ID NO: 359480 - protein, 12 aa, Homo sapiens
  CDR3 for beta chain variable domain of TCR clone 179740 (TRBV7-3, TRBJ1-1)
CQQPGLGAEAFF

SEQ ID NO: 359481 - protein, 14 aa, Homo sapiens
  CDR3 for alpha chain variable domain of TCR clone 179741 (TRAV23/DV6, TRAJ37)
CAASTSSNTGKLIF

SEQ ID NO: 359482 - protein, 14 aa, Homo sapiens
  CDR3 for beta chain variable domain of TCR clone 179741 (TRBV27, TRBJ2-3)
CATWTSGRPWGQYF

SEQ ID NO: 359483 - protein, 14 aa, Homo sapiens
  CDR3 for alpha chain variable domain of TCR clone 179742 (TRAV1-2, TRAJ16)
CAANRFSDGQKLLF

SEQ ID NO: 359484 - protein, 15 aa, Homo sapiens
  CDR3 for beta chain variable domain of TCR clone 179742 (TRBV7-9, TRBJ1-6)
CASSSPGRGNSHLHF

SEQ ID NO: 359485 - protein, 15 aa, Homo sapiens
  CDR3 for alpha chain variable domain of TCR clone 179743 (TRAV17, TRAJ57)
CATGPSQGGSEKLVF

SEQ ID NO: 359486 - protein, 16 aa, Homo sapiens
  CDR3 for beta chain variable domain of TCR clone 179743 (TRBV7-2, TRBJ2-6)
CAILSGVSSGANVLTF

SEQ ID NO: 359487 - protein, 10 aa, Homo sapiens
  CDR3 for alpha chain variable domain of TCR clone 179744 (TRAV12-1, TRAJ37)
ARGNTGQLIF

SEQ ID NO: 359488 - protein, 15 aa, Homo sapiens
  CDR3 for beta chain variable domain of TCR clone 179744 (TRBV7-2, TRBJ2-3)
CASSLEQGGTDTQYF

SEQ ID NO: 359489 - protein, 17 aa, Homo sapiens
  CDR3 for alpha chain variable domain of TCR clone 179745 (TRAV8-4, TRAJ3)
CAVTGENLVQQCFHVNL

SEQ ID NO: 359490 - protein, 16 aa, Homo sapiens
  CDR3 for beta chain variable domain of TCR clone 179745 (TRBV4-2, TRBJ1-1)
CASSQAGFGMNTEAFF

SEQ ID NO: 359491 - protein, 17 aa, Homo sapiens
  CDR3 for alpha chain variable domain of TCR clone 179746 (TRAV1-1, TRAJ15)
CLLLLRCSNQAGTALIF

SEQ ID NO: 359492 - protein, 15 aa, Homo sapiens
  CDR3 for beta chain variable domain of TCR clone 179746 (TRBV27, TRBJ2-3)
CASSLGLAGPDTQYF

SEQ ID NO: 359493 - protein, 17 aa, Homo sapiens
  CDR3 for alpha chain variable domain of TCR clone 179747 (TRAV3, TRAJ42)
CAVRDRDYGGSQGNLIF

SEQ ID NO: 359494 - protein, 17 aa, Homo sapiens
  CDR3 for beta chain variable domain of TCR clone 179747 (TRBV7-9, TRBJ2-3)
CSSSPTVAGDLTDTQYF

SEQ ID NO: 359495 - protein, 10 aa, Homo sapiens
  CDR3 for alpha chain variable domain of TCR clone 179748 (TRAV1-2, TRAJ34)
CAVNTDKLIF

SEQ ID NO: 359496 - protein, 13 aa, Homo sapiens
  CDR3 for beta chain variable domain of TCR clone 179748 (TRBV10-1, TRBJ2-1)
CASSAGPDNEQFL

SEQ ID NO: 359497 - protein, 15 aa, Homo sapiens
  CDR3 for alpha chain variable domain of TCR clone 179749 (TRAV12-3, TRAJ10)
CASYILTGGRNKLTF

SEQ ID NO: 359498 - protein, 15 aa, Homo sapiens
  CDR3 for beta chain variable domain of TCR clone 179749 (TRBV7-2, TRBJ1-6)
CASSLGPDRGMPLHF

SEQ ID NO: 359499 - protein, 16 aa, Homo sapiens
  CDR3 for alpha chain variable domain of TCR clone 179750 (TRAV26-1, TRAJ32)
CIVGTNYGGATNKLIF

SEQ ID NO: 359500 - protein, 14 aa, Homo sapiens
  CDR3 for beta chain variable domain of TCR clone 179750 (TRBV6-1, TRBJ1-3)
CASVQGGCGNTIYF

SEQ ID NO: 359501 - protein, 12 aa, Homo sapiens
  CDR3 for alpha chain variable domain of TCR clone 179751 (TRAV12-3, TRAJ17)
CAMTLTGNQLTF

SEQ ID NO: 359502 - protein, 13 aa, Homo sapiens
  CDR3 for beta chain variable domain of TCR clone 179751 (TRBV20-1, TRBJ2-5)
CSAKGDYQETQYF

SEQ ID NO: 359503 - protein, 14 aa, Homo sapiens
  CDR3 for alpha chain variable domain of TCR clone 179752 (TRAV4, TRAJ17)
CLVGDMAAGNKLTF

SEQ ID NO: 359504 - protein, 14 aa, Homo sapiens
  CDR3 for beta chain variable domain of TCR clone 179752 (TRBV27, TRBJ1-1)
CASSLLSGLSEAFF

SEQ ID NO: 359505 - protein, 12 aa, Homo sapiens
  CDR3 for alpha chain variable domain of TCR clone 179753 (TRAV12-3, TRAJ4)
CAMTGAGTRLAV

SEQ ID NO: 359506 - protein, 13 aa, Homo sapiens
  CDR3 for beta chain variable domain of TCR clone 179753 (TRBV6-1, TRBJ1-1)
CASSRQGNTEAFF

SEQ ID NO: 359507 - protein, 21 aa, Homo sapiens
  CDR3 for alpha chain variable domain of TCR clone 179754 (TRAV21, TRAJ15)
SLVTQPPTSVVANQAGTALIF

SEQ ID NO: 359508 - protein, 14 aa, Homo sapiens
  CDR3 for beta chain variable domain of TCR clone 179754 (TRBV27, TRBJ2-2)
CASSLGAATGELFF

SEQ ID NO: 359509 - protein, 14 aa, Homo sapiens
  CDR3 for alpha chain variable domain of TCR clone 179755 (TRAV13-1, TRAJ9)
CQASALTGGFKTIF

SEQ ID NO: 359510 - protein, 13 aa, Homo sapiens
  CDR3 for beta chain variable domain of TCR clone 179755 (TRBV20-1, TRBJ1-1)
CSAGTVGNTEAFF

SEQ ID NO: 359511 - protein, 15 aa, Homo sapiens
  CDR3 for alpha chain variable domain of TCR clone 179756 (TRAV3, TRAJ13)
CAVRVYSGGYQKVTF

SEQ ID NO: 359512 - protein, 15 aa, Homo sapiens
  CDR3 for beta chain variable domain of TCR clone 179756 (TRBV19, TRBJ1-1)
CASTSGQIQNTEAFF

SEQ ID NO: 359513 - protein, 10 aa, Homo sapiens
  CDR3 for alpha chain variable domain of TCR clone 179757 (TRAV16, TRAJ22)
SAMYLRQLTF

SEQ ID NO: 359514 - protein, 15 aa, Homo sapiens
  CDR3 for beta chain variable domain of TCR clone 179757 (TRBV7-9, TRBJ1-6)
CASSFPGRGNSPLHF

SEQ ID NO: 359515 - protein, 13 aa, Homo sapiens
  CDR3 for alpha chain variable domain of TCR clone 179758 (TRAV36/DV7, TRAJ37)
CAVFSSNTGKLIF

SEQ ID NO: 359516 - protein, 17 aa, Homo sapiens
  CDR3 for beta chain variable domain of TCR clone 179758 (TRBV20-1, TRBJ2-1)
CSASSSGLAGSYNEQFF

SEQ ID NO: 359517 - protein, 13 aa, Homo sapiens
  CDR3 for alpha chain variable domain of TCR clone 179759 (TRAV13-2, TRAJ48)
CAEMDFGNEKLTF

SEQ ID NO: 359518 - protein, 13 aa, Homo sapiens
  CDR3 for beta chain variable domain of TCR clone 179759 (TRBV2, TRBJ1-5)
CATAGPGNQPQHF

SEQ ID NO: 359519 - protein, 15 aa, Homo sapiens
  CDR3 for alpha chain variable domain of TCR clone 179760 (TRAV8-1, TRAJ6)
CAVNANPGGSYIPTF

SEQ ID NO: 359520 - protein, 12 aa, Homo sapiens
  CDR3 for beta chain variable domain of TCR clone 179760 (TRBV5-7, TRBJ2-7)
CASSGQGGEQFF

SEQ ID NO: 359521 - protein, 13 aa, Homo sapiens
  CDR3 for alpha chain variable domain of TCR clone 179761 (TRAV8-3, TRAJ48)
CAVVPFGSEKLTF

SEQ ID NO: 359522 - protein, 14 aa, Homo sapiens
  CDR3 for beta chain variable domain of TCR clone 179761 (TRBV18, TRBJ2-7)
CASSPRGGAYEQYF

SEQ ID NO: 359523 - protein, 12 aa, Homo sapiens
  CDR3 for alpha chain variable domain of TCR clone 179762 (TRAV12-3, TRAJ17)
CAMTLTGNKLTF

SEQ ID NO: 359524 - protein, 13 aa, Homo sapiens
  CDR3 for beta chain variable domain of TCR clone 179762 (TRBV10-3, TRBJ1-1)
CAIIPEGVTEAFF

SEQ ID NO: 359525 - protein, 15 aa, Homo sapiens
  CDR3 for alpha chain variable domain of TCR clone 179763 (TRAV3, TRAJ36)
CAVRASQTGANNLFF

SEQ ID NO: 359526 - protein, 14 aa, Homo sapiens
  CDR3 for beta chain variable domain of TCR clone 179763 (TRBV7-2, TRBJ2-5)
CASSPRGSSETQYF

SEQ ID NO: 359527 - protein, 14 aa, Homo sapiens
  CDR3 for alpha chain variable domain of TCR clone 179764 (TRAV1-2, TRAJ16)
CAVNRFSDGQKLPF

SEQ ID NO: 359528 - protein, 14 aa, Homo sapiens
  CDR3 for beta chain variable domain of TCR clone 179764 (TRBV7-9, TRBJ2-1)
CASSPRDSLYEQFF

SEQ ID NO: 359529 - protein, 14 aa, Homo sapiens
  CDR3 for alpha chain variable domain of TCR clone 179765 (TRAV8-4, TRAJ13)
FAVTLSGGYQKVNF

SEQ ID NO: 359530 - protein, 14 aa, Homo sapiens
  CDR3 for beta chain variable domain of TCR clone 179765 (TRBV7-2, TRBJ1-2)
CASSQTGSTYGYTF

SEQ ID NO: 359531 - protein, 12 aa, Homo sapiens
  CDR3 for alpha chain variable domain of TCR clone 179766 (TRAV13-1, TRAJ21)
CAAKEGVNKFYF

SEQ ID NO: 359532 - protein, 20 aa, Homo sapiens
  CDR3 for beta chain variable domain of TCR clone 179766 (TRBV28, TRBJ2-1)
CASTPIGRSPGLAGGNEQFF

SEQ ID NO: 359533 - protein, 14 aa, Homo sapiens
  CDR3 for alpha chain variable domain of TCR clone 179767 (TRAV8-4, TRAJ48)
CAVSETFENEKLTF

SEQ ID NO: 359534 - protein, 14 aa, Homo sapiens
  CDR3 for beta chain variable domain of TCR clone 179767 (TRBV13, TRBJ2-7)
CASSLKGASYEQYF

SEQ ID NO: 359535 - protein, 13 aa, Homo sapiens
  CDR3 for alpha chain variable domain of TCR clone 179768 (TRAV2, TRAJ40)
CAVVTSGTYKYIF

SEQ ID NO: 359536 - protein, 14 aa, Homo sapiens
  CDR3 for beta chain variable domain of TCR clone 179768 (TRBV19, TRBJ2-1)
CASTTFVSSGEQFF

SEQ ID NO: 359537 - protein, 13 aa, Homo sapiens
  CDR3 for alpha chain variable domain of TCR clone 179769 (TRAV1-2, TRAJ13)
CAVNSGGYQKVTC

SEQ ID NO: 359538 - protein, 14 aa, Homo sapiens
  CDR3 for beta chain variable domain of TCR clone 179769 (TRBV4-1, TRBJ1-5)
CASSPKGDNQPQHF

SEQ ID NO: 359539 - protein, 12 aa, Homo sapiens
  CDR3 for alpha chain variable domain of TCR clone 179770 (TRAV26-2, TRAJ49)
CILTHRGNQFYF

SEQ ID NO: 359540 - protein, 14 aa, Homo sapiens
  CDR3 for beta chain variable domain of TCR clone 179770 (TRBV29-1, TRBJ1-1)
CSGSGTGGVPEAFF

SEQ ID NO: 359541 - protein, 14 aa, Homo sapiens
  CDR3 for alpha chain variable domain of TCR clone 179771 (TRAV12-2, TRAJ13)
CAVKKTRGYQKVTF

SEQ ID NO: 359542 - protein, 16 aa, Homo sapiens
  CDR3 for beta chain variable domain of TCR clone 179771 (TRBV13, TRBJ2-2)
CASSPRTGEHTGELFF

SEQ ID NO: 359543 - protein, 12 aa, Homo sapiens
  CDR3 for alpha chain variable domain of TCR clone 179772 (TRAV4, TRAJ26)
CHVGDYGQNFVF

SEQ ID NO: 359544 - protein, 16 aa, Homo sapiens
  CDR3 for beta chain variable domain of TCR clone 179772 (TRBV7-2, TRBJ1-2)
CASSSNQDRRGHGYTF

SEQ ID NO: 359545 - protein, 15 aa, Homo sapiens
  CDR3 for alpha chain variable domain of TCR clone 179773 (TRAV12-1, TRAJ37)
CVVNIMGGNTGKLVF

SEQ ID NO: 359546 - protein, 12 aa, Homo sapiens
  CDR3 for beta chain variable domain of TCR clone 179773 (TRBV2, TRBJ2-7)
CASSRVGYEQYF

SEQ ID NO: 359547 - protein, 13 aa, Homo sapiens
  CDR3 for alpha chain variable domain of TCR clone 179774 (TRAV2, TRAJ40)
CAVVTSGTYKYIF

SEQ ID NO: 359548 - protein, 18 aa, Homo sapiens
  CDR3 for beta chain variable domain of TCR clone 179774 (TRBV2, TRBJ2-5)
CASSGDPQGRGAQETQYF

SEQ ID NO: 359549 - protein, 11 aa, Homo sapiens
  CDR3 for alpha chain variable domain of TCR clone 179775 (TRAV12-3, TRAJ43)
CAMSVSTDIRF

SEQ ID NO: 359550 - protein, 13 aa, Homo sapiens
  CDR3 for beta chain variable domain of TCR clone 179775 (TRBV20-1, TRBJ1-1)
CSAPLGGGTEAFF

SEQ ID NO: 359551 - protein, 14 aa, Homo sapiens
  CDR3 for alpha chain variable domain of TCR clone 179776 (TRAV1-2, TRAJ17)
CAVRDMTAGTKLTF

SEQ ID NO: 359552 - protein, 15 aa, Homo sapiens
  CDR3 for beta chain variable domain of TCR clone 179776 (TRBV20-1, TRBJ2-7)
CSARDRVSGMDEQYF

SEQ ID NO: 359553 - protein, 13 aa, Homo sapiens
  CDR3 for alpha chain variable domain of TCR clone 179777 (TRAV35, TRAJ42)
CAGFPGSQGNLIF

SEQ ID NO: 359554 - protein, 15 aa, Homo sapiens
  CDR3 for beta chain variable domain of TCR clone 179777 (TRBV29-1, TRBJ2-7)
CSVEFFDRGSYEQYF

SEQ ID NO: 359555 - protein, 13 aa, Homo sapiens
  CDR3 for alpha chain variable domain of TCR clone 179778 (TRAV12-3, TRAJ49)
CATSRNTGNQFYF

SEQ ID NO: 359556 - protein, 16 aa, Homo sapiens
  CDR3 for beta chain variable domain of TCR clone 179778 (TRBV5-8, TRBJ2-2)
CASSLINPGGAGELFF

SEQ ID NO: 359557 - protein, 15 aa, Homo sapiens
  CDR3 for alpha chain variable domain of TCR clone 179779 (TRAV35, TRAJ58)
CAGRRQETSGSRLTF

SEQ ID NO: 359558 - protein, 16 aa, Homo sapiens
  CDR3 for beta chain variable domain of TCR clone 179779 (TRBV29-1, TRBJ2-7)
CSVEDAEDGTAYEQYF

SEQ ID NO: 359559 - protein, 15 aa, Homo sapiens
  CDR3 for alpha chain variable domain of TCR clone 179780 (TRAV1-2, TRAJ13)
CAVRGSSGGYPKVTF

SEQ ID NO: 359560 - protein, 15 aa, Homo sapiens
  CDR3 for beta chain variable domain of TCR clone 179780 (TRBV11-3, TRBJ1-3)
CASSLSGTSGNTIYF

SEQ ID NO: 359561 - protein, 13 aa, Homo sapiens
  CDR3 for alpha chain variable domain of TCR clone 179781 (TRAV23/DV6, TRAJ21)
CAASIGNFNKFYF

SEQ ID NO: 359562 - protein, 17 aa, Homo sapiens
  CDR3 for beta chain variable domain of TCR clone 179781 (TRBV6-5, TRBJ2-1)
CASRKHPRTGGHNEQFF

SEQ ID NO: 359563 - protein, 16 aa, Homo sapiens
  CDR3 for alpha chain variable domain of TCR clone 179782 (TRAV16, TRAJ52)
CALSGVGGTSYGKLTF

SEQ ID NO: 359564 - protein, 17 aa, Homo sapiens
  CDR3 for beta chain variable domain of TCR clone 179782 (TRBV20-1, TRBJ2-7)
CSARDPEGDHREYEQYF

SEQ ID NO: 359565 - protein, 13 aa, Homo sapiens
  CDR3 for alpha chain variable domain of TCR clone 179783 (TRAV12-3, TRAJ57)
CAMVGAGSEKLVF

SEQ ID NO: 359566 - protein, 15 aa, Homo sapiens
  CDR3 for beta chain variable domain of TCR clone 179783 (TRBV7-2, TRBJ1-3)
CASRWGGITGNTIYF

SEQ ID NO: 359567 - protein, 18 aa, Homo sapiens
  CDR3 for alpha chain variable domain of TCR clone 179784 (TRAV21, TRAJ52)
CSVRPSPAGGTSYGRLTF

SEQ ID NO: 359568 - protein, 17 aa, Homo sapiens
  CDR3 for beta chain variable domain of TCR clone 179784 (TRBV13, TRBJ2-3)
CASSLSRVAGGRNTQYF

SEQ ID NO: 359569 - protein, 13 aa, Homo sapiens
  CDR3 for alpha chain variable domain of TCR clone 179785 (TRAV27, TRAJ29)
CAGAHSGNTPLVF

SEQ ID NO: 359570 - protein, 23 aa, Homo sapiens
  CDR3 for beta chain variable domain of TCR clone 179785 (TRBV4-2, TRBJ2-3)
CASSQDPPRASSISGGRGDTQYF

SEQ ID NO: 359571 - protein, 12 aa, Homo sapiens
  CDR3 for alpha chain variable domain of TCR clone 179786 (TRAV1-1, TRAJ39)
CAVPVVGNMLTF

SEQ ID NO: 359572 - protein, 18 aa, Homo sapiens
  CDR3 for beta chain variable domain of TCR clone 179786 (TRBV7-9, TRBJ2-7)
CASSLTTSVSRTWYEQYF

SEQ ID NO: 359573 - protein, 13 aa, Homo sapiens
  CDR3 for alpha chain variable domain of TCR clone 179787 (TRAV20, TRAJ21)
CAVEGYNFNKFYF

SEQ ID NO: 359574 - protein, 14 aa, Homo sapiens
  CDR3 for beta chain variable domain of TCR clone 179787 (TRBV7-2, TRBJ1-2)
CASSSQGAYHGYTF

SEQ ID NO: 359575 - protein, 16 aa, Homo sapiens
  CDR3 for alpha chain variable domain of TCR clone 179788 (TRAV21, TRAJ45)
CAATMYSGGGADGLTF

SEQ ID NO: 359576 - protein, 13 aa, Homo sapiens
  CDR3 for beta chain variable domain of TCR clone 179788 (TRBV4-1, TRBJ2-2)
CASSQENTGEPVF

SEQ ID NO: 359577 - protein, 13 aa, Homo sapiens
  CDR3 for alpha chain variable domain of TCR clone 179789 (TRAV16, TRAJ34)
CITVLSHTDKLIF

SEQ ID NO: 359578 - protein, 14 aa, Homo sapiens
  CDR3 for beta chain variable domain of TCR clone 179789 (TRBV25-1, TRBJ1-1)
CASTHLGGNTEAFF

SEQ ID NO: 359579 - protein, 11 aa, Homo sapiens
  CDR3 for alpha chain variable domain of TCR clone 179790 (TRAV12-3, TRAJ43)
CAMSVSNDMRF

SEQ ID NO: 359580 - protein, 17 aa, Homo sapiens
  CDR3 for beta chain variable domain of TCR clone 179790 (TRBV15, TRBJ1-4)
CATSRYGTGDPNEKLFF

SEQ ID NO: 359581 - protein, 14 aa, Homo sapiens
  CDR3 for alpha chain variable domain of TCR clone 179791 (TRAV2, TRAJ9)
CAVPLNTGGFKTIF

SEQ ID NO: 359582 - protein, 15 aa, Homo sapiens
  CDR3 for beta chain variable domain of TCR clone 179791 (TRBV13, TRBJ1-2)
CASSLGRQPGYGYTF

SEQ ID NO: 359583 - protein, 14 aa, Homo sapiens
  CDR3 for alpha chain variable domain of TCR clone 179792 (TRAV8-3, TRAJ4)
CAVGAAGGYNKLIF

SEQ ID NO: 359584 - protein, 13 aa, Homo sapiens
  CDR3 for beta chain variable domain of TCR clone 179792 (TRBV12-4, TRBJ2-1)
CASRTLGVGEQFF

SEQ ID NO: 359585 - protein, 12 aa, Homo sapiens
  CDR3 for alpha chain variable domain of TCR clone 179793 (TRAV22, TRAJ43)
CAVELNNNDMRF

SEQ ID NO: 359586 - protein, 17 aa, Homo sapiens
  CDR3 for beta chain variable domain of TCR clone 179793 (TRBV13, TRBJ2-3)
CASSLSRVAGGRNTQYF

SEQ ID NO: 359587 - protein, 13 aa, Homo sapiens
  CDR3 for alpha chain variable domain of TCR clone 179794 (TRAV17, TRAJ9)
CATDYTGGFKTIC

SEQ ID NO: 359588 - protein, 14 aa, Homo sapiens
  CDR3 for beta chain variable domain of TCR clone 179794 (TRBV19, TRBJ2-5)
CASSMTGQQETQYF

SEQ ID NO: 359589 - protein, 16 aa, Homo sapiens
  CDR3 for alpha chain variable domain of TCR clone 179795 (TRAV8-3, TRAJ28)
CAVGATLGLGVTNSLS

SEQ ID NO: 359590 - protein, 14 aa, Homo sapiens
  CDR3 for beta chain variable domain of TCR clone 179795 (TRBV7-2, TRBJ2-1)
CASSFGVGYNEQFF

SEQ ID NO: 359591 - protein, 18 aa, Homo sapiens
  CDR3 for alpha chain variable domain of TCR clone 179796 (TRAV12-3, TRAJ52)
CAMSVGGAGGTSYGKLTF

SEQ ID NO: 359592 - protein, 16 aa, Homo sapiens
  CDR3 for beta chain variable domain of TCR clone 179796 (TRBV20-1, TRBJ2-5)
CRPGGTSGGYMETQYF

SEQ ID NO: 359593 - protein, 14 aa, Homo sapiens
  CDR3 for alpha chain variable domain of TCR clone 179797 (TRAV12-2, TRAJ17)
CAVLFKATGNKLTF

SEQ ID NO: 359594 - protein, 14 aa, Homo sapiens
  CDR3 for beta chain variable domain of TCR clone 179797 (TRBV12-5, TRBJ2-5)
CASGSRTHQETQYF

SEQ ID NO: 359595 - protein, 16 aa, Homo sapiens
  CDR3 for alpha chain variable domain of TCR clone 179798 (TRAV12-3, TRAJ10)
CAMKKGITGGGNKLTF

SEQ ID NO: 359596 - protein, 12 aa, Homo sapiens
  CDR3 for beta chain variable domain of TCR clone 179798 (TRBV20-1, TRBJ2-7)
CSAITTTKEQYF

SEQ ID NO: 359597 - protein, 14 aa, Homo sapiens
  CDR3 for alpha chain variable domain of TCR clone 179799 (TRAV20, TRAJ44)
CAVDYTGTASKLTF

SEQ ID NO: 359598 - protein, 14 aa, Homo sapiens
  CDR3 for beta chain variable domain of TCR clone 179799 (TRBV7-6, TRBJ2-3)
CASSLGTVTDTQYF

SEQ ID NO: 359599 - protein, 16 aa, Homo sapiens
  CDR3 for alpha chain variable domain of TCR clone 179800 (TRAV30, TRAJ24)
CGTEIVGADSWGKCQF

SEQ ID NO: 359600 - protein, 15 aa, Homo sapiens
  CDR3 for beta chain variable domain of TCR clone 179800 (TRBV7-9, TRBJ1-4)
CASSARTGGNEKLFF

SEQ ID NO: 359601 - protein, 14 aa, Homo sapiens
  CDR3 for alpha chain variable domain of TCR clone 179801 (TRAV26-1, TRAJ38)
CIADNAGNNRKQIW

SEQ ID NO: 359602 - protein, 14 aa, Homo sapiens
  CDR3 for beta chain variable domain of TCR clone 179801 (TRBV20-1, TRBJ1-1)
CSAQTRIGGTEAFF

SEQ ID NO: 359603 - protein, 12 aa, Homo sapiens
  CDR3 for alpha chain variable domain of TCR clone 179802 (TRAV26-1, TRAJ31)
CIVRNNNARLMF

SEQ ID NO: 359604 - protein, 15 aa, Homo sapiens
  CDR3 for beta chain variable domain of TCR clone 179802 (TRBV20-1, TRBJ2-4)
CSARDLTGGPNIQYV

SEQ ID NO: 359605 - protein, 14 aa, Homo sapiens
  CDR3 for alpha chain variable domain of TCR clone 179803 (TRAV26-1, TRAJ38)
CIADNAGNNRKLIW

SEQ ID NO: 359606 - protein, 19 aa, Homo sapiens
  CDR3 for beta chain variable domain of TCR clone 179803 (TRBV7-2, TRBJ2-3)
CASSFLSRNWGGGTDAQYF

SEQ ID NO: 359607 - protein, 15 aa, Homo sapiens
  CDR3 for alpha chain variable domain of TCR clone 179804 (TRAV3, TRAJ4)
CAVRDGTGGYNKLIF

SEQ ID NO: 359608 - protein, 14 aa, Homo sapiens
  CDR3 for beta chain variable domain of TCR clone 179804 (TRBV7-6, TRBJ2-3)
CASSVAGGTDTQYF

SEQ ID NO: 359609 - protein, 13 aa, Homo sapiens
  CDR3 for alpha chain variable domain of TCR clone 179805 (TRAV36/DV7, TRAJ53)
CALSGGSNNKLTF

SEQ ID NO: 359610 - protein, 13 aa, Homo sapiens
  CDR3 for beta chain variable domain of TCR clone 179805 (TRBV28, TRBJ2-4)
CASSQSSKNSQYF

SEQ ID NO: 359611 - protein, 13 aa, Homo sapiens
  CDR3 for alpha chain variable domain of TCR clone 179806 (TRAV8-3, TRAJ28)
CTVGAVGSYQLTF

SEQ ID NO: 359612 - protein, 13 aa, Homo sapiens
  CDR3 for beta chain variable domain of TCR clone 179806 (TRBV18, TRBJ2-7)
CASQSGGGYEQYF

SEQ ID NO: 359613 - protein, 15 aa, Homo sapiens
  CDR3 for alpha chain variable domain of TCR clone 179807 (TRAV27, TRAJ38)
CAGRFNAGNNRKLIW

SEQ ID NO: 359614 - protein, 13 aa, Homo sapiens
  CDR3 for beta chain variable domain of TCR clone 179807 (TRBV12-5, TRBJ2-3)
CASQNRGTDTQDF

SEQ ID NO: 359615 - protein, 13 aa, Homo sapiens
  CDR3 for alpha chain variable domain of TCR clone 179808 (TRAV1-2, TRAJ34)
CAVRDRDTDTLIF

SEQ ID NO: 359616 - protein, 13 aa, Homo sapiens
  CDR3 for beta chain variable domain of TCR clone 179808 (TRBV29-1, TRBJ2-1)
CSVEGGRVNEQFF

SEQ ID NO: 359617 - protein, 20 aa, Homo sapiens
  CDR3 for alpha chain variable domain of TCR clone 179809 (TRAV21, TRAJ4)
AASQPGDSATLAGGYNKLIF

SEQ ID NO: 359618 - protein, 18 aa, Homo sapiens
  CDR3 for beta chain variable domain of TCR clone 179809 (TRBV6-5, TRBJ2-6)
CASSYSGNMESGANVLTF

SEQ ID NO: 359619 - protein, 14 aa, Homo sapiens
  CDR3 for alpha chain variable domain of TCR clone 179810 (TRAV16, TRAJ42)
CALLAGGSQGNLIF

SEQ ID NO: 359620 - protein, 12 aa, Homo sapiens
  CDR3 for beta chain variable domain of TCR clone 179810 (TRBV28, TRBJ1-6)
CASLSVPGPLHF

SEQ ID NO: 359621 - protein, 12 aa, Homo sapiens
  CDR3 for alpha chain variable domain of TCR clone 179811 (TRAV8-3, TRAJ20)
SAVGGGDYKLSF

SEQ ID NO: 359622 - protein, 14 aa, Homo sapiens
  CDR3 for beta chain variable domain of TCR clone 179811 (TRBV5-1, TRBJ2-7)
CASSRGESLYEQYF

SEQ ID NO: 359623 - protein, 13 aa, Homo sapiens
  CDR3 for alpha chain variable domain of TCR clone 179812 (TRAV8-3, TRAJ4)
WVFYSGGYNRLIF

SEQ ID NO: 359624 - protein, 16 aa, Homo sapiens
  CDR3 for beta chain variable domain of TCR clone 179812 (TRBV7-8, TRBJ2-3)
CASSTEGQRETDTQYF

SEQ ID NO: 359625 - protein, 14 aa, Homo sapiens
  CDR3 for alpha chain variable domain of TCR clone 179813 (TRAV1-2, TRAJ8)
CAVREDTGFQKLVV

SEQ ID NO: 359626 - protein, 15 aa, Homo sapiens
  CDR3 for beta chain variable domain of TCR clone 179813 (TRBV10-2, TRBJ2-6)
CASSEQGTGANALTF

SEQ ID NO: 359627 - protein, 14 aa, Homo sapiens
  CDR3 for alpha chain variable domain of TCR clone 179814 (TRAV34, TRAJ44)
CGADGTGTASKLTF

SEQ ID NO: 359628 - protein, 16 aa, Homo sapiens
  CDR3 for beta chain variable domain of TCR clone 179814 (TRBV7-2, TRBJ1-2)
CASSSNQDRRGHGYTF

SEQ ID NO: 359629 - protein, 14 aa, Homo sapiens
  CDR3 for alpha chain variable domain of TCR clone 179815 (TRAV12-2, TRAJ13)
CAVKKTGGYQKVNF

SEQ ID NO: 359630 - protein, 12 aa, Homo sapiens
  CDR3 for beta chain variable domain of TCR clone 179815 (TRBV29-1, TRBJ1-1)
CSESDGNTEAFF

SEQ ID NO: 359631 - protein, 18 aa, Homo sapiens
  CDR3 for alpha chain variable domain of TCR clone 179816 (TRAV26-2, TRAJ54)
CILRDVEVGIQGAQKLVF

SEQ ID NO: 359632 - protein, 16 aa, Homo sapiens
  CDR3 for beta chain variable domain of TCR clone 179816 (TRBV29-1, TRBJ2-7)
CSVEDAEDGTAYEQYF

SEQ ID NO: 359633 - protein, 11 aa, Homo sapiens
  CDR3 for alpha chain variable domain of TCR clone 179817 (TRAV12-2, TRAJ31)
CAVTRWARLMF

SEQ ID NO: 359634 - protein, 12 aa, Homo sapiens
  CDR3 for beta chain variable domain of TCR clone 179817 (TRBV18, TRBJ2-1)
CASSSDEDEQFF

SEQ ID NO: 359635 - protein, 14 aa, Homo sapiens
  CDR3 for alpha chain variable domain of TCR clone 179818 (TRAV34, TRAJ44)
CGADGTGNASKLTF

SEQ ID NO: 359636 - protein, 12 aa, Homo sapiens
  CDR3 for beta chain variable domain of TCR clone 179818 (TRBV11-2, TRBJ2-2)
CASSLGGGELFF

SEQ ID NO: 359637 - protein, 13 aa, Homo sapiens
  CDR3 for alpha chain variable domain of TCR clone 179819 (TRAV29/DV5, TRAJ31)
CAASKNNNARLMF

SEQ ID NO: 359638 - protein, 14 aa, Homo sapiens
  CDR3 for beta chain variable domain of TCR clone 179819 (TRBV7-9, TRBJ2-2)
CASSLVQDTGELFF

SEQ ID NO: 359639 - protein, 14 aa, Homo sapiens
  CDR3 for alpha chain variable domain of TCR clone 179820 (TRAV1-2, TRAJ16)
CAVNRFSDGQKLLF

SEQ ID NO: 359640 - protein, 16 aa, Homo sapiens
  CDR3 for beta chain variable domain of TCR clone 179820 (TRBV19, TRBJ2-3)
CAGSPEWDRGTDTQYF

SEQ ID NO: 359641 - protein, 11 aa, Homo sapiens
  CDR3 for alpha chain variable domain of TCR clone 179821 (TRAV12-1, TRAJ30)
CVVNGQDKIIF

SEQ ID NO: 359642 - protein, 15 aa, Homo sapiens
  CDR3 for beta chain variable domain of TCR clone 179821 (TRBV5-1, TRBJ2-2)
CASSSQGGNTGELFF

SEQ ID NO: 359643 - protein, 18 aa, Homo sapiens
  CDR3 for alpha chain variable domain of TCR clone 179822 (TRAV21, TRAJ52)
CAVRPSPAGGSSYGKLTF

SEQ ID NO: 359644 - protein, 13 aa, Homo sapiens
  CDR3 for beta chain variable domain of TCR clone 179822 (TRBV10-3, TRBJ2-7)
CASKLAVNYEQYF

SEQ ID NO: 359645 - protein, 12 aa, Homo sapiens
  CDR3 for alpha chain variable domain of TCR clone 179823 (TRAV25, TRAJ20)
CAGSSNDYKFSF

SEQ ID NO: 359646 - protein, 12 aa, Homo sapiens
  CDR3 for beta chain variable domain of TCR clone 179823 (TRBV5-4, TRBJ2-7)
CASSPRTEEQYF

SEQ ID NO: 359647 - protein, 13 aa, Homo sapiens
  CDR3 for alpha chain variable domain of TCR clone 179824 (TRAV35, TRAJ43)
CAGYSYNNNDMRF

SEQ ID NO: 359648 - protein, 15 aa, Homo sapiens
  CDR3 for beta chain variable domain of TCR clone 179824 (TRBV25-1, TRBJ1-4)
CASSKRIATNEKLSF

SEQ ID NO: 359649 - protein, 14 aa, Homo sapiens
  CDR3 for alpha chain variable domain of TCR clone 179825 (TRAV3, TRAJ8)
CALSLNTGFQKLVF

SEQ ID NO: 359650 - protein, 14 aa, Homo sapiens
  CDR3 for beta chain variable domain of TCR clone 179825 (TRBV6-6, TRBJ1-5)
CASVDSGFNQPQHF

SEQ ID NO: 359651 - protein, 14 aa, Homo sapiens
  CDR3 for alpha chain variable domain of TCR clone 179826 (TRAV12-1, TRAJ12)
CVVNGRASSYKLIF

SEQ ID NO: 359652 - protein, 13 aa, Homo sapiens
  CDR3 for beta chain variable domain of TCR clone 179826 (TRBV28, TRBJ2-2)
CASIRESTGELFF

SEQ ID NO: 359653 - protein, 13 aa, Homo sapiens
  CDR3 for alpha chain variable domain of TCR clone 179827 (TRAV36/DV7, TRAJ50)
CAVSKTPYDKVIF

SEQ ID NO: 359654 - protein, 13 aa, Homo sapiens
  CDR3 for beta chain variable domain of TCR clone 179827 (TRBV18, TRBJ2-7)
CASSPGRNYEQYF

SEQ ID NO: 359655 - protein, 13 aa, Homo sapiens
  CDR3 for alpha chain variable domain of TCR clone 179828 (TRAV30, TRAJ6)
CGFIEGGSYIPTF

SEQ ID NO: 359656 - protein, 16 aa, Homo sapiens
  CDR3 for beta chain variable domain of TCR clone 179828 (TRBV29-1, TRBJ2-7)
CSVEVVGTSGSYEQYF

SEQ ID NO: 359657 - protein, 13 aa, Homo sapiens
  CDR3 for alpha chain variable domain of TCR clone 179829 (TRAV29/DV5, TRAJ31)
CAASRTNNARLMF

SEQ ID NO: 359658 - protein, 12 aa, Homo sapiens
  CDR3 for beta chain variable domain of TCR clone 179829 (TRBV14, TRBJ2-5)
CASSQLKETQYF

SEQ ID NO: 359659 - protein, 11 aa, Homo sapiens
  CDR3 for alpha chain variable domain of TCR clone 179830 (TRAV38-1, TRAJ43)
CALYNNNDMRF

SEQ ID NO: 359660 - protein, 14 aa, Homo sapiens
  CDR3 for beta chain variable domain of TCR clone 179830 (TRBV6-5, TRBJ2-7)
CASSYSEGSYEQYF

SEQ ID NO: 359661 - protein, 13 aa, Homo sapiens
  CDR3 for alpha chain variable domain of TCR clone 179831 (TRAV8-2, TRAJ11)
CVVNRSGYSTLTF

SEQ ID NO: 359662 - protein, 14 aa, Homo sapiens
  CDR3 for beta chain variable domain of TCR clone 179831 (TRBV4-3, TRBJ1-2)
YASSLYRGNYGYTF

SEQ ID NO: 359663 - protein, 15 aa, Homo sapiens
  CDR3 for alpha chain variable domain of TCR clone 179832 (TRAV26-1, TRAJ29)
CIVRVEGSGNTPLVF

SEQ ID NO: 359664 - protein, 14 aa, Homo sapiens
  CDR3 for beta chain variable domain of TCR clone 179832 (TRBV6-1, TRBJ1-3)
CASVQGVGGNTIYF

SEQ ID NO: 359665 - protein, 11 aa, Homo sapiens
  CDR3 for alpha chain variable domain of TCR clone 179833 (TRAV12-2, TRAJ31)
CAILNNARLVF

SEQ ID NO: 359666 - protein, 16 aa, Homo sapiens
  CDR3 for beta chain variable domain of TCR clone 179833 (TRBV13, TRBJ2-2)
CASSPRTGEHTGELFF

SEQ ID NO: 359667 - protein, 11 aa, Homo sapiens
  CDR3 for alpha chain variable domain of TCR clone 179834 (TRAV25, TRAJ49)
CAGNTGNQFYF

SEQ ID NO: 359668 - protein, 13 aa, Homo sapiens
  CDR3 for beta chain variable domain of TCR clone 179834 (TRBV4-2, TRBJ1-1)
CASSQAGNTEAFF

SEQ ID NO: 359669 - protein, 22 aa, Homo sapiens
  CDR3 for alpha chain variable domain of TCR clone 179835 (TRAV36/DV7, )
CVANAGNNHIQNPDPAVYQLRD

SEQ ID NO: 359670 - protein, 14 aa, Homo sapiens
  CDR3 for beta chain variable domain of TCR clone 179835 (TRBV7-2, TRBJ2-7)
CASSLRWEVNEQNF

SEQ ID NO: 359671 - protein, 13 aa, Homo sapiens
  CDR3 for alpha chain variable domain of TCR clone 179836 (TRAV20, TRAJ26)
CAVHTSYGQNFVF

SEQ ID NO: 359672 - protein, 16 aa, Homo sapiens
  CDR3 for beta chain variable domain of TCR clone 179836 (TRBV28, TRBJ2-7)
CASSSPQGRDVYEQYF

SEQ ID NO: 359673 - protein, 16 aa, Homo sapiens
  CDR3 for alpha chain variable domain of TCR clone 179837 (TRAV26-1, TRAJ47)
CIVRVVLSQYGNKLGF

SEQ ID NO: 359674 - protein, 16 aa, Homo sapiens
  CDR3 for beta chain variable domain of TCR clone 179837 (TRBV5-1, TRBJ2-1)
CASSFGVSGSYNEQFF

SEQ ID NO: 359675 - protein, 13 aa, Homo sapiens
  CDR3 for alpha chain variable domain of TCR clone 179838 (TRAV12-3, TRAJ7)
CAMSASGNNRLAF

SEQ ID NO: 359676 - protein, 13 aa, Homo sapiens
  CDR3 for beta chain variable domain of TCR clone 179838 (TRBV4-1, TRBJ2-2)
CASSQENTGELFF

SEQ ID NO: 359677 - protein, 22 aa, Homo sapiens
  CDR3 for alpha chain variable domain of TCR clone 179839 (TRAV8-3, TRAJ8)
CAVGPNEHRLSETCIWNWHPTS

SEQ ID NO: 359678 - protein, 14 aa, Homo sapiens
  CDR3 for beta chain variable domain of TCR clone 179839 (TRBV12-5, TRBJ2-5)
CASGSRTHQETQYF

SEQ ID NO: 359679 - protein, 16 aa, Homo sapiens
  CDR3 for alpha chain variable domain of TCR clone 179840 (TRAV30, TRAJ24)
CGTEIVDADSWGKFQF

SEQ ID NO: 359680 - protein, 13 aa, Homo sapiens
  CDR3 for beta chain variable domain of TCR clone 179840 (TRBV12-4, TRBJ2-7)
CASSLSGVYEQYF

SEQ ID NO: 359681 - protein, 15 aa, Homo sapiens
  CDR3 for alpha chain variable domain of TCR clone 179841 (TRAV26-1, TRAJ28)
CIVRVAGAGSYQLTF

SEQ ID NO: 359682 - protein, 19 aa, Homo sapiens
  CDR3 for beta chain variable domain of TCR clone 179841 (TRBV7-3, TRBJ2-7)
CASSLTGVAGGWPAYEQYF

SEQ ID NO: 359683 - protein, 17 aa, Homo sapiens
  CDR3 for alpha chain variable domain of TCR clone 179842 (TRAV3, TRAJ42)
CAVRDRDYGGSQGNLIF

SEQ ID NO: 359684 - protein, 15 aa, Homo sapiens
  CDR3 for beta chain variable domain of TCR clone 179842 (TRBV7-3, TRBJ2-1)
CASSPTGGGEVEQFF

SEQ ID NO: 359685 - protein, 17 aa, Homo sapiens
  CDR3 for alpha chain variable domain of TCR clone 179843 (TRAV26-2, TRAJ42)
CILRDVGYGGSQGNLIF

SEQ ID NO: 359686 - protein, 16 aa, Homo sapiens
  CDR3 for beta chain variable domain of TCR clone 179843 (TRBV2, TRBJ1-3)
CASSRTGGSTGNTIYF

SEQ ID NO: 359687 - protein, 18 aa, Homo sapiens
  CDR3 for alpha chain variable domain of TCR clone 179844 (TRAV21, TRAJ52)
CAVRPSPAGGTSYGKLTF

SEQ ID NO: 359688 - protein, 19 aa, Homo sapiens
  CDR3 for beta chain variable domain of TCR clone 179844 (TRBV11-3, TRBJ2-1)
CASSLGTRKARSSYNEQFF

SEQ ID NO: 359689 - protein, 14 aa, Homo sapiens
  CDR3 for alpha chain variable domain of TCR clone 179845 (TRAV12-1, TRAJ17)
CVVNDKAAGNKLTF

SEQ ID NO: 359690 - protein, 17 aa, Homo sapiens
  CDR3 for beta chain variable domain of TCR clone 179845 (TRBV20-1, TRBJ2-1)
CSASSSGRAGSYNEQFF

SEQ ID NO: 359691 - protein, 14 aa, Homo sapiens
  CDR3 for alpha chain variable domain of TCR clone 179846 (TRAV13-2, TRAJ22)
CADGTLGSARQLTF

SEQ ID NO: 359692 - protein, 15 aa, Homo sapiens
  CDR3 for beta chain variable domain of TCR clone 179846 (TRBV19, TRBJ1-2)
CASSVGQVLNYGYTF

SEQ ID NO: 359693 - protein, 15 aa, Homo sapiens
  CDR3 for alpha chain variable domain of TCR clone 179847 (TRAV3, TRAJ22)
CAVKDRGGSARQLTF

SEQ ID NO: 359694 - protein, 20 aa, Homo sapiens
  CDR3 for beta chain variable domain of TCR clone 179847 (TRBV11-2, TRBJ1-6)
CASSLVFATGGSVHPSTLGT

SEQ ID NO: 359695 - protein, 14 aa, Homo sapiens
  CDR3 for alpha chain variable domain of TCR clone 179848 (TRAV38-1, TRAJ40)
CALRPTSGTYKYIF

SEQ ID NO: 359696 - protein, 15 aa, Homo sapiens
  CDR3 for beta chain variable domain of TCR clone 179848 (TRBV20-1, TRBJ2-1)
CSARGIGGTYNEQFF

SEQ ID NO: 359697 - protein, 14 aa, Homo sapiens
  CDR3 for alpha chain variable domain of TCR clone 179849 (TRAV13-1, TRAJ20)
CAARPGSDDYKLSF

SEQ ID NO: 359698 - protein, 13 aa, Homo sapiens
  CDR3 for beta chain variable domain of TCR clone 179849 (TRBV20-1, TRBJ1-1)
CSAPPGGHTEAFF

SEQ ID NO: 359699 - protein, 15 aa, Homo sapiens
  CDR3 for alpha chain variable domain of TCR clone 179850 (TRAV13-1, TRAJ44)
CAASRNTGTASKLTF

SEQ ID NO: 359700 - protein, 13 aa, Homo sapiens
  CDR3 for beta chain variable domain of TCR clone 179850 (TRBV19, TRBJ2-7)
CASSPRQSYEQYF

SEQ ID NO: 359701 - protein, 11 aa, Homo sapiens
  CDR3 for alpha chain variable domain of TCR clone 179851 (TRAV13-1, TRAJ9)
CAPFGGFKTIF

SEQ ID NO: 359702 - protein, 14 aa, Homo sapiens
  CDR3 for beta chain variable domain of TCR clone 179851 (TRBV27, TRBJ2-1)
CASSSRLAGDEQFV

SEQ ID NO: 359703 - protein, 14 aa, Homo sapiens
  CDR3 for alpha chain variable domain of TCR clone 179852 (TRAV1-2, TRAJ16)
CAVNRFSDGQKLLF

SEQ ID NO: 359704 - protein, 12 aa, Homo sapiens
  CDR3 for beta chain variable domain of TCR clone 179852 (TRBV11-2, TRBJ2-2)
CTSSLGGGELFF

SEQ ID NO: 359705 - protein, 13 aa, Homo sapiens
  CDR3 for alpha chain variable domain of TCR clone 179853 (TRAV21, TRAJ26)
CAVLDNYGQNFVF

SEQ ID NO: 359706 - protein, 16 aa, Homo sapiens
  CDR3 for beta chain variable domain of TCR clone 179853 (TRBV29-1, TRBJ2-2)
WSVETRASGNTGELFF

SEQ ID NO: 359707 - protein, 12 aa, Homo sapiens
  CDR3 for alpha chain variable domain of TCR clone 179854 (TRAV27, TRAJ13)
CAGAGCYQKVTF

SEQ ID NO: 359708 - protein, 15 aa, Homo sapiens
  CDR3 for beta chain variable domain of TCR clone 179854 (TRBV20-1, TRBJ2-6)
CSARDRGPGANVLTF

SEQ ID NO: 359709 - protein, 16 aa, Homo sapiens
  CDR3 for alpha chain variable domain of TCR clone 179855 (TRAV12-3, TRAJ53)
CAMSPGSGGGNYKLTF

SEQ ID NO: 359710 - protein, 17 aa, Homo sapiens
  CDR3 for beta chain variable domain of TCR clone 179855 (TRBV11-3, TRBJ2-1)
CASSLYPPGVEYNEQFF

SEQ ID NO: 359711 - protein, 11 aa, Homo sapiens
  CDR3 for alpha chain variable domain of TCR clone 179856 (TRAV16, TRAJ31)
CALFNTARLMF

SEQ ID NO: 359712 - protein, 15 aa, Homo sapiens
  CDR3 for beta chain variable domain of TCR clone 179856 (TRBV18, TRBJ1-1)
CASSPRQGENTEAFF

SEQ ID NO: 359713 - protein, 13 aa, Homo sapiens
  CDR3 for alpha chain variable domain of TCR clone 179857 (TRAV6, TRAJ3)
CSTGYSSASKIIF

SEQ ID NO: 359714 - protein, 15 aa, Homo sapiens
  CDR3 for beta chain variable domain of TCR clone 179857 (TRBV7-9, TRBJ1-4)
CASSARTGGNEKLFF

SEQ ID NO: 359715 - protein, 13 aa, Homo sapiens
  CDR3 for alpha chain variable domain of TCR clone 179858 (TRAV21, TRAJ27)
CAARPGNAGKSTF

SEQ ID NO: 359716 - protein, 13 aa, Homo sapiens
  CDR3 for beta chain variable domain of TCR clone 179858 (TRBV6-1, TRBJ1-1)
CASSRQGNTEAFF

SEQ ID NO: 359717 - protein, 16 aa, Homo sapiens
  CDR3 for alpha chain variable domain of TCR clone 179859 (TRAV8-3, TRAJ10)
CAVGPILTGGGKKLTF

SEQ ID NO: 359718 - protein, 15 aa, Homo sapiens
  CDR3 for beta chain variable domain of TCR clone 179859 (TRBV7-2, TRBJ2-2)
CASRRPGQNTGELFF

SEQ ID NO: 359719 - protein, 16 aa, Homo sapiens
  CDR3 for alpha chain variable domain of TCR clone 179860 (TRAV8-3, TRAJ44)
CAVGTFMTGTASKLTF

SEQ ID NO: 359720 - protein, 13 aa, Homo sapiens
  CDR3 for beta chain variable domain of TCR clone 179860 (TRBV11-2, TRBJ2-1)
CASSLRLTHEQFF

SEQ ID NO: 359721 - protein, 10 aa, Homo sapiens
  CDR3 for alpha chain variable domain of TCR clone 179861 (TRAV21, TRAJ49)
CAVTVNKFYF

SEQ ID NO: 359722 - protein, 14 aa, Homo sapiens
  CDR3 for beta chain variable domain of TCR clone 179861 (TRBV25-1, TRBJ1-1)
CASTHLGGNTEAFF

SEQ ID NO: 359723 - protein, 11 aa, Homo sapiens
  CDR3 for alpha chain variable domain of TCR clone 179862 (TRAV4, TRAJ31)
CLVGDNARLMF

SEQ ID NO: 359724 - protein, 15 aa, Homo sapiens
  CDR3 for beta chain variable domain of TCR clone 179862 (TRBV9, TRBJ1-6)
CASSVAGTGDSPLHF

SEQ ID NO: 359725 - protein, 13 aa, Homo sapiens
  CDR3 for alpha chain variable domain of TCR clone 179863 (TRAV13-1, TRAJ21)
CAASIYNFNKFYF

SEQ ID NO: 359726 - protein, 16 aa, Homo sapiens
  CDR3 for beta chain variable domain of TCR clone 179863 (TRBV7-2, TRBJ1-4)
CASSLAPGRRDEKLFF

SEQ ID NO: 359727 - protein, 11 aa, Homo sapiens
  CDR3 for alpha chain variable domain of TCR clone 179864 (TRAV3, TRAJ21)
CAVGNFNKFYF

SEQ ID NO: 359728 - protein, 15 aa, Homo sapiens
  CDR3 for beta chain variable domain of TCR clone 179864 (TRBV20-1, TRBJ2-7)
CSSRDRVSGMDEQYF

SEQ ID NO: 359729 - protein, 14 aa, Homo sapiens
  CDR3 for alpha chain variable domain of TCR clone 179865 (TRAV21, TRAJ35)
CAVMPIGFGNVLHC

SEQ ID NO: 359730 - protein, 12 aa, Homo sapiens
  CDR3 for beta chain variable domain of TCR clone 179865 (TRBV7-9, TRBJ2-7)
CASSIKWEELYF

SEQ ID NO: 359731 - protein, 12 aa, Homo sapiens
  CDR3 for alpha chain variable domain of TCR clone 179866 (TRAV12-3, TRAJ17)
CAMTLTGNKLTF

SEQ ID NO: 359732 - protein, 15 aa, Homo sapiens
  CDR3 for beta chain variable domain of TCR clone 179866 (TRBV20-1, TRBJ2-7)
CSARDRFSGLDEQYF

SEQ ID NO: 359733 - protein, 14 aa, Homo sapiens
  CDR3 for alpha chain variable domain of TCR clone 179867 (TRAV2, TRAJ37)
CAVDFTSNTGKLIF

SEQ ID NO: 359734 - protein, 15 aa, Homo sapiens
  CDR3 for beta chain variable domain of TCR clone 179867 (TRBV7-2, TRBJ1-2)
CASSPRAGWNYGYTF

SEQ ID NO: 359735 - protein, 11 aa, Homo sapiens
  CDR3 for alpha chain variable domain of TCR clone 179868 (TRAV3, TRAJ21)
CAVGNFNKFYF

SEQ ID NO: 359736 - protein, 17 aa, Homo sapiens
  CDR3 for beta chain variable domain of TCR clone 179868 (TRBV24-1, TRBJ2-1)
CATRDVSTSGTYNEQFF

SEQ ID NO: 359737 - protein, 16 aa, Homo sapiens
  CDR3 for alpha chain variable domain of TCR clone 179869 (TRAV23/DV6, TRAJ9)
CAASIGGNTGGFKTNF

SEQ ID NO: 359738 - protein, 14 aa, Homo sapiens
  CDR3 for beta chain variable domain of TCR clone 179869 (TRBV11-2, TRBJ2-5)
CASSRTGGIETQYF

SEQ ID NO: 359739 - protein, 16 aa, Homo sapiens
  CDR3 for alpha chain variable domain of TCR clone 179870 (TRAV23/DV6, TRAJ9)
GAASIGGNTGGFKTIF

SEQ ID NO: 359740 - protein, 13 aa, Homo sapiens
  CDR3 for beta chain variable domain of TCR clone 179870 (TRBV10-3, TRBJ2-7)
CASKLAVNYEQYF

SEQ ID NO: 359741 - protein, 14 aa, Homo sapiens
  CDR3 for alpha chain variable domain of TCR clone 179871 (TRAV8-1, TRAJ4)
CAVPFSGGYNKLIF

SEQ ID NO: 359742 - protein, 16 aa, Homo sapiens
  CDR3 for beta chain variable domain of TCR clone 179871 (TRBV6-1, TRBJ1-2)
CASSGAWQGRSHGDTF

SEQ ID NO: 359743 - protein, 14 aa, Homo sapiens
  CDR3 for alpha chain variable domain of TCR clone 179872 (TRAV13-1, TRAJ12)
CAASYMDSSYKLIF

SEQ ID NO: 359744 - protein, 13 aa, Homo sapiens
  CDR3 for beta chain variable domain of TCR clone 179872 (TRBV2, TRBJ2-5)
CASSDGSQETQYF

SEQ ID NO: 359745 - protein, 15 aa, Homo sapiens
  CDR3 for alpha chain variable domain of TCR clone 179873 (TRAV8-4, TRAJ6)
CAVSAPSGGSYIPTF

SEQ ID NO: 359746 - protein, 14 aa, Homo sapiens
  CDR3 for beta chain variable domain of TCR clone 179873 (TRBV7-2, TRBJ2-7)
CASSPKTSFYEQYF

SEQ ID NO: 359747 - protein, 14 aa, Homo sapiens
  CDR3 for alpha chain variable domain of TCR clone 179874 (TRAV12-2, TRAJ40)
CAVKIPSGTYKYIF

SEQ ID NO: 359748 - protein, 11 aa, Homo sapiens
  CDR3 for beta chain variable domain of TCR clone 179874 (TRBV29-1, TRBJ2-5)
CSEDRTGTQHF

SEQ ID NO: 359749 - protein, 14 aa, Homo sapiens
  CDR3 for alpha chain variable domain of TCR clone 179875 (TRAV23/DV6, TRAJ27)
CAASRDTNAGKSTF

SEQ ID NO: 359750 - protein, 16 aa, Homo sapiens
  CDR3 for beta chain variable domain of TCR clone 179875 (TRBV5-1, TRBJ2-7)
CASSLEGLAGLYEQYF

SEQ ID NO: 359751 - protein, 15 aa, Homo sapiens
  CDR3 for alpha chain variable domain of TCR clone 179876 (TRAV8-3, TRAJ27)
CAVGPSKTNAGKSTF

SEQ ID NO: 359752 - protein, 15 aa, Homo sapiens
  CDR3 for beta chain variable domain of TCR clone 179876 (TRBV29-1, TRBJ2-1)
CSGRDRKSSYNEQFF

SEQ ID NO: 359753 - protein, 16 aa, Homo sapiens
  CDR3 for alpha chain variable domain of TCR clone 179877 (TRAV12-3, TRAJ53)
CAMSPGSGGSNDKLTF

SEQ ID NO: 359754 - protein, 16 aa, Homo sapiens
  CDR3 for beta chain variable domain of TCR clone 179877 (TRBV5-1, TRBJ2-3)
CASSLEGGSFADTQYF

SEQ ID NO: 359755 - protein, 14 aa, Homo sapiens
  CDR3 for alpha chain variable domain of TCR clone 179878 (TRAV1-2, TRAJ6)
CAVRDSGGSYIPTF

SEQ ID NO: 359756 - protein, 15 aa, Homo sapiens
  CDR3 for beta chain variable domain of TCR clone 179878 (TRBV20-1, TRBJ2-7)
CSARDRVSGMDEQYF

SEQ ID NO: 359757 - protein, 12 aa, Homo sapiens
  CDR3 for alpha chain variable domain of TCR clone 179879 (TRAV13-2, TRAJ8)
CAPWLGFQKLVF

SEQ ID NO: 359758 - protein, 17 aa, Homo sapiens
  CDR3 for beta chain variable domain of TCR clone 179879 (TRBV13, TRBJ2-3)
CASRLSRVAGGRNTQYF

SEQ ID NO: 359759 - protein, 13 aa, Homo sapiens
  CDR3 for alpha chain variable domain of TCR clone 179880 (TRAV2, TRAJ40)
CAVVTSGTYKYIF

SEQ ID NO: 359760 - protein, 15 aa, Homo sapiens
  CDR3 for beta chain variable domain of TCR clone 179880 (TRBV4-1, TRBJ2-3)
CASGRGQGIPDTQYF

SEQ ID NO: 359761 - protein, 11 aa, Homo sapiens
  CDR3 for alpha chain variable domain of TCR clone 179881 (TRAV13-1, TRAJ15)
CAATPGTALIF

SEQ ID NO: 359762 - protein, 17 aa, Homo sapiens
  CDR3 for beta chain variable domain of TCR clone 179881 (TRBV13, TRBJ2-3)
CASSLSRVAGGRNTQYF

SEQ ID NO: 359763 - protein, 14 aa, Homo sapiens
  CDR3 for alpha chain variable domain of TCR clone 179882 (TRAV1-2, TRAJ16)
CSVNRFSDGQKLLF

SEQ ID NO: 359764 - protein, 14 aa, Homo sapiens
  CDR3 for beta chain variable domain of TCR clone 179882 (TRBV2, TRBJ2-7)
CASSLTSGGYEQYF

SEQ ID NO: 359765 - protein, 14 aa, Homo sapiens
  CDR3 for alpha chain variable domain of TCR clone 179883 (TRAV38-1, TRAJ45)
CASYSGGGADGFTF

SEQ ID NO: 359766 - protein, 20 aa, Homo sapiens
  CDR3 for beta chain variable domain of TCR clone 179883 (TRBV28, TRBJ2-1)
CASTPIGRSPGLAGGNEQFF

SEQ ID NO: 359767 - protein, 13 aa, Homo sapiens
  CDR3 for alpha chain variable domain of TCR clone 179884 (TRAV23/DV6, TRAJ12)
CAPRVDSSYKLIF

SEQ ID NO: 359768 - protein, 14 aa, Homo sapiens
  CDR3 for beta chain variable domain of TCR clone 179884 (TRBV5-5, TRBJ1-5)
CASSGQGVDQPQHF

SEQ ID NO: 359769 - protein, 14 aa, Homo sapiens
  CDR3 for alpha chain variable domain of TCR clone 179885 (TRAV3, TRAJ21)
CAVESQANFNKFYF

SEQ ID NO: 359770 - protein, 12 aa, Homo sapiens
  CDR3 for beta chain variable domain of TCR clone 179885 (TRBV6-3, TRBJ2-7)
CASSRTPYEQYF

SEQ ID NO: 359771 - protein, 14 aa, Homo sapiens
  CDR3 for alpha chain variable domain of TCR clone 179886 (TRAV13-1, TRAJ35)
CAASKGGFGNVLHF

SEQ ID NO: 359772 - protein, 13 aa, Homo sapiens
  CDR3 for beta chain variable domain of TCR clone 179886 (TRBV7-3, TRBJ1-1)
CASSQGWGAEAFF

SEQ ID NO: 359773 - protein, 12 aa, Homo sapiens
  CDR3 for alpha chain variable domain of TCR clone 179887 (TRAV1-1, TRAJ8)
CAGGTGFQKLVF

SEQ ID NO: 359774 - protein, 14 aa, Homo sapiens
  CDR3 for beta chain variable domain of TCR clone 179887 (TRBV11-2, TRBJ2-5)
CASSGHSLQETQYF

SEQ ID NO: 359775 - protein, 14 aa, Homo sapiens
  CDR3 for alpha chain variable domain of TCR clone 179888 (TRAV8-6, TRAJ9)
CAVSSYTGGFKTIF

SEQ ID NO: 359776 - protein, 15 aa, Homo sapiens
  CDR3 for beta chain variable domain of TCR clone 179888 (TRBV9, TRBJ1-6)
CASSVAGTGDSPLHF

SEQ ID NO: 359777 - protein, 19 aa, Homo sapiens
  CDR3 for alpha chain variable domain of TCR clone 179889 (TRAV38-1, TRAJ53)
CAFMKHGLESGGSNNKLKF

SEQ ID NO: 359778 - protein, 13 aa, Homo sapiens
  CDR3 for beta chain variable domain of TCR clone 179889 (TRBV19, TRBJ2-7)
CASSPRQSYEQYF

SEQ ID NO: 359779 - protein, 19 aa, Homo sapiens
  CDR3 for alpha chain variable domain of TCR clone 179890 (TRAV1-1, TRAJ32)
CAVRVDELWWCYKQAHLWY

SEQ ID NO: 359780 - protein, 14 aa, Homo sapiens
  CDR3 for beta chain variable domain of TCR clone 179890 (TRBV11-2, TRBJ2-7)
CASSLGNSLYEQYF

SEQ ID NO: 359781 - protein, 14 aa, Homo sapiens
  CDR3 for alpha chain variable domain of TCR clone 179891 (TRAV23/DV6, TRAJ22)
CAASVSGSARQLTF

SEQ ID NO: 359782 - protein, 16 aa, Homo sapiens
  CDR3 for beta chain variable domain of TCR clone 179891 (TRBV19, TRBJ2-2)
CASSLPGQGLAGELFF

SEQ ID NO: 359783 - protein, 15 aa, Homo sapiens
  CDR3 for alpha chain variable domain of TCR clone 179892 (TRAV3, TRAJ24)
CAVRDKMTAGVNCSL

SEQ ID NO: 359784 - protein, 14 aa, Homo sapiens
  CDR3 for beta chain variable domain of TCR clone 179892 (TRBV7-2, TRBJ2-3)
CASSQTGSSYTQYF

SEQ ID NO: 359785 - protein, 11 aa, Homo sapiens
  CDR3 for alpha chain variable domain of TCR clone 179893 (TRAV12-3, TRAJ43)
CAMSVSNDSRF

SEQ ID NO: 359786 - protein, 13 aa, Homo sapiens
  CDR3 for beta chain variable domain of TCR clone 179893 (TRBV20-1, TRBJ1-1)
CSAPLGGGTEAFF

SEQ ID NO: 359787 - protein, 15 aa, Homo sapiens
  CDR3 for alpha chain variable domain of TCR clone 179894 (TRAV3, TRAJ10)
CCERHEGGGGNKLTF

SEQ ID NO: 359788 - protein, 14 aa, Homo sapiens
  CDR3 for beta chain variable domain of TCR clone 179894 (TRBV25-1, TRBJ1-1)
CASTHLGGNTEAFF

SEQ ID NO: 359789 - protein, 15 aa, Homo sapiens
  CDR3 for alpha chain variable domain of TCR clone 179895 (TRAV12-2, TRAJ53)
CAVEPGPGSNYKLTF

SEQ ID NO: 359790 - protein, 15 aa, Homo sapiens
  CDR3 for beta chain variable domain of TCR clone 179895 (TRBV20-1, TRBJ2-7)
CSARDRVSGMDEQYF

SEQ ID NO: 359791 - protein, 13 aa, Homo sapiens
  CDR3 for alpha chain variable domain of TCR clone 179896 (TRAV26-2, TRAJ57)
CILSRGGSEKLVF

SEQ ID NO: 359792 - protein, 14 aa, Homo sapiens
  CDR3 for beta chain variable domain of TCR clone 179896 (TRBV7-8, TRBJ2-3)
CASSFPDGQDTQYF

SEQ ID NO: 359793 - protein, 12 aa, Homo sapiens
  CDR3 for alpha chain variable domain of TCR clone 179897 (TRAV8-6, TRAJ36)
CAVSDWLGQTTS

SEQ ID NO: 359794 - protein, 11 aa, Homo sapiens
  CDR3 for beta chain variable domain of TCR clone 179897 (TRBV29-1, TRBJ2-5)
CSEDRTGTQHF

SEQ ID NO: 359795 - protein, 14 aa, Homo sapiens
  CDR3 for alpha chain variable domain of TCR clone 179898 (TRAV12-2, TRAJ20)
CAVKKNRNDYKLSF

SEQ ID NO: 359796 - protein, 12 aa, Homo sapiens
  CDR3 for beta chain variable domain of TCR clone 179898 (TRBV11-2, TRBJ2-2)
CASSLGGGELFF

SEQ ID NO: 359797 - protein, 16 aa, Homo sapiens
  CDR3 for alpha chain variable domain of TCR clone 179899 (TRAV16, TRAJ4)
CALSRMFSGGYNKLIF

SEQ ID NO: 359798 - protein, 16 aa, Homo sapiens
  CDR3 for beta chain variable domain of TCR clone 179899 (TRBV4-3, TRBJ2-1)
CASSPALDRGVNEQFF

SEQ ID NO: 359799 - protein, 13 aa, Homo sapiens
  CDR3 for alpha chain variable domain of TCR clone 179900 (TRAV8-1, TRAJ30)
CAVNGRRDDKIIF

SEQ ID NO: 359800 - protein, 15 aa, Homo sapiens
  CDR3 for beta chain variable domain of TCR clone 179900 (TRBV5-7, TRBJ1-5)
CASSYGKLWEQPQHF

SEQ ID NO: 359801 - protein, 10 aa, Homo sapiens
  CDR3 for alpha chain variable domain of TCR clone 179901 (TRAV4, TRAJ15)
CLPFWTALIF

SEQ ID NO: 359802 - protein, 15 aa, Homo sapiens
  CDR3 for beta chain variable domain of TCR clone 179901 (TRBV5-1, TRBJ2-1)
CASSFSGTGYNEQLF

SEQ ID NO: 359803 - protein, 15 aa, Homo sapiens
  CDR3 for alpha chain variable domain of TCR clone 179902 (TRAV3, TRAJ22)
CAVRDRGGSARQLTF

SEQ ID NO: 359804 - protein, 16 aa, Homo sapiens
  CDR3 for beta chain variable domain of TCR clone 179902 (TRBV11-2, TRBJ2-1)
CASALGSYSHHNEQFF

SEQ ID NO: 359805 - protein, 13 aa, Homo sapiens
  CDR3 for alpha chain variable domain of TCR clone 179903 (TRAV21, TRAJ10)
CAVRPAGGNKLTF

SEQ ID NO: 359806 - protein, 14 aa, Homo sapiens
  CDR3 for beta chain variable domain of TCR clone 179903 (TRBV5-4, TRBJ2-7)
CASSADAGSYEQYF

SEQ ID NO: 359807 - protein, 13 aa, Homo sapiens
  CDR3 for alpha chain variable domain of TCR clone 179904 (TRAV21, TRAJ27)
CAARPGHAGKSTF

SEQ ID NO: 359808 - protein, 15 aa, Homo sapiens
  CDR3 for beta chain variable domain of TCR clone 179904 (TRBV2, TRBJ2-3)
CASSDAGGPPDTQYF

SEQ ID NO: 359809 - protein, 12 aa, Homo sapiens
  CDR3 for alpha chain variable domain of TCR clone 179905 (TRAV12-2, TRAJ36)
CAAPRGANNLFF

SEQ ID NO: 359810 - protein, 16 aa, Homo sapiens
  CDR3 for beta chain variable domain of TCR clone 179905 (TRBV19, TRBJ2-1)
CASSKAGPSSYNEQFF

SEQ ID NO: 359811 - protein, 12 aa, Homo sapiens
  CDR3 for alpha chain variable domain of TCR clone 179906 (TRAV12-3, TRAJ17)
CAMTLTGNKLTF

SEQ ID NO: 359812 - protein, 15 aa, Homo sapiens
  CDR3 for beta chain variable domain of TCR clone 179906 (TRBV2, TRBJ2-7)
CASSENRQGKGEQYF

SEQ ID NO: 359813 - protein, 13 aa, Homo sapiens
  CDR3 for alpha chain variable domain of TCR clone 179907 (TRAV2, TRAJ24)
CAVPTDSWGKLQF

SEQ ID NO: 359814 - protein, 17 aa, Homo sapiens
  CDR3 for beta chain variable domain of TCR clone 179907 (TRBV7-8, TRBJ2-6)
CASSAGTGGAGANVLTF

SEQ ID NO: 359815 - protein, 18 aa, Homo sapiens
  CDR3 for alpha chain variable domain of TCR clone 179908 (TRAV21, TRAJ52)
CAVRPSPAGGTRYGKLTF

SEQ ID NO: 359816 - protein, 17 aa, Homo sapiens
  CDR3 for beta chain variable domain of TCR clone 179908 (TRBV5-5, TRBJ1-2)
CASSLGSLDGQSEGYTF

SEQ ID NO: 359817 - protein, 16 aa, Homo sapiens
  CDR3 for alpha chain variable domain of TCR clone 179909 (TRAV30, TRAJ24)
CGTEIVDADSWGKFQC

SEQ ID NO: 359818 - protein, 13 aa, Homo sapiens
  CDR3 for beta chain variable domain of TCR clone 179909 (TRBV11-2, TRBJ1-1)
CASSQDWGAEDFF

SEQ ID NO: 359819 - protein, 15 aa, Homo sapiens
  CDR3 for alpha chain variable domain of TCR clone 179910 (TRAV34, TRAJ38)
CGADFTPGNNRKRIW

SEQ ID NO: 359820 - protein, 14 aa, Homo sapiens
  CDR3 for beta chain variable domain of TCR clone 179910 (TRBV12-5, TRBJ2-5)
CASGSRTHQETQYF

SEQ ID NO: 359821 - protein, 11 aa, Homo sapiens
  CDR3 for alpha chain variable domain of TCR clone 179911 (TRAV1-1, TRAJ23)
CTVRQGGKLIF

SEQ ID NO: 359822 - protein, 20 aa, Homo sapiens
  CDR3 for beta chain variable domain of TCR clone 179911 (TRBV7-8, TRBJ2-2)
CASSQLFPGPTIHITGELFF

SEQ ID NO: 359823 - protein, 15 aa, Homo sapiens
  CDR3 for alpha chain variable domain of TCR clone 179912 (TRAV38-2/DV8, TRAJ28)
CAYRSRGAGSSQLAF

SEQ ID NO: 359824 - protein, 14 aa, Homo sapiens
  CDR3 for beta chain variable domain of TCR clone 179912 (TRBV7-9, TRBJ2-7)
CASSLSQGSYEQYF

SEQ ID NO: 359825 - protein, 14 aa, Homo sapiens
  CDR3 for alpha chain variable domain of TCR clone 179913 (TRAV1-1, TRAJ27)
CAVIYNTNAGKSTF

SEQ ID NO: 359826 - protein, 16 aa, Homo sapiens
  CDR3 for beta chain variable domain of TCR clone 179913 (TRBV7-9, TRBJ2-6)
CASSLKGPLRANVLTF

SEQ ID NO: 359827 - protein, 16 aa, Homo sapiens
  CDR3 for alpha chain variable domain of TCR clone 179914 (TRAV12-3, TRAJ53)
CAMSPGSGGSNYKLTF

SEQ ID NO: 359828 - protein, 14 aa, Homo sapiens
  CDR3 for beta chain variable domain of TCR clone 179914 (TRBV7-6, TRBJ2-3)
CASSVAGGTDTQYF

SEQ ID NO: 359829 - protein, 13 aa, Homo sapiens
  CDR3 for alpha chain variable domain of TCR clone 179915 (TRAV2, TRAJ40)
CAVVTSGTYNYIF

SEQ ID NO: 359830 - protein, 15 aa, Homo sapiens
  CDR3 for beta chain variable domain of TCR clone 179915 (TRBV27, TRBJ2-1)
CASSNGGGSSNEQFF

SEQ ID NO: 359831 - protein, 13 aa, Homo sapiens
  CDR3 for alpha chain variable domain of TCR clone 179916 (TRAV8-3, TRAJ44)
CAVVPGTASKLTF

SEQ ID NO: 359832 - protein, 16 aa, Homo sapiens
  CDR3 for beta chain variable domain of TCR clone 179916 (TRBV20-1, TRBJ2-2)
CSASASGIPGAGELFF

SEQ ID NO: 359833 - protein, 13 aa, Homo sapiens
  CDR3 for alpha chain variable domain of TCR clone 179917 (TRAV12-1, TRAJ26)
SATYPYYGQNFVF

SEQ ID NO: 359834 - protein, 15 aa, Homo sapiens
  CDR3 for beta chain variable domain of TCR clone 179917 (TRBV5-1, TRBJ2-6)
CASSLDPSRANVLTF

SEQ ID NO: 359835 - protein, 12 aa, Homo sapiens
  CDR3 for alpha chain variable domain of TCR clone 179918 (TRAV13-1, TRAJ21)
CAAKEGFNKFYF

SEQ ID NO: 359836 - protein, 14 aa, Homo sapiens
  CDR3 for beta chain variable domain of TCR clone 179918 (TRBV5-4, TRBJ1-1)
CASSLESRRDEAFF

SEQ ID NO: 359837 - protein, 16 aa, Homo sapiens
  CDR3 for alpha chain variable domain of TCR clone 179919 (TRAV3, TRAJ10)
CAVRDMNAGGGHKLTF

SEQ ID NO: 359838 - protein, 15 aa, Homo sapiens
  CDR3 for beta chain variable domain of TCR clone 179919 (TRBV5-1, TRBJ1-2)
CASSLGSVTNYGYTF

SEQ ID NO: 359839 - protein, 15 aa, Homo sapiens
  CDR3 for alpha chain variable domain of TCR clone 179920 (TRAV21, TRAJ10)
CAVRGLTGGGNKLTF

SEQ ID NO: 359840 - protein, 16 aa, Homo sapiens
  CDR3 for beta chain variable domain of TCR clone 179920 (TRBV7-3, TRBJ2-1)
CASSLEGYRSYNEQFF

SEQ ID NO: 359841 - protein, 14 aa, Homo sapiens
  CDR3 for alpha chain variable domain of TCR clone 179921 (TRAV1-2, TRAJ16)
CAVNRFSDGEKLLF

SEQ ID NO: 359842 - protein, 16 aa, Homo sapiens
  CDR3 for beta chain variable domain of TCR clone 179921 (TRBV20-1, TRBJ1-4)
CSAPGQGLLTNEKLFF

SEQ ID NO: 359843 - protein, 16 aa, Homo sapiens
  CDR3 for alpha chain variable domain of TCR clone 179922 (TRAV30, TRAJ24)
CGTEIVDADSWGKFQF

SEQ ID NO: 359844 - protein, 15 aa, Homo sapiens
  CDR3 for beta chain variable domain of TCR clone 179922 (TRBV4-1, TRBJ1-1)
CASSQAPGGTAEAFF

SEQ ID NO: 359845 - protein, 15 aa, Homo sapiens
  CDR3 for alpha chain variable domain of TCR clone 179923 (TRAV26-1, TRAJ29)
CIVRVEGSGNTTLVF

SEQ ID NO: 359846 - protein, 15 aa, Homo sapiens
  CDR3 for beta chain variable domain of TCR clone 179923 (TRBV7-9, TRBJ1-5)
CASSQVHQPNQPQHF

SEQ ID NO: 359847 - protein, 11 aa, Homo sapiens
  CDR3 for alpha chain variable domain of TCR clone 179924 (TRAV17, TRAJ31)
CATDRTARLMF

SEQ ID NO: 359848 - protein, 14 aa, Homo sapiens
  CDR3 for beta chain variable domain of TCR clone 179924 (TRBV4-2, TRBJ2-3)
CAMSQERGTDTQYF

SEQ ID NO: 359849 - protein, 14 aa, Homo sapiens
  CDR3 for alpha chain variable domain of TCR clone 179925 (TRAV17, TRAJ57)
CATDPQGGSEKLVF

SEQ ID NO: 359850 - protein, 15 aa, Homo sapiens
  CDR3 for beta chain variable domain of TCR clone 179925 (TRBV19, TRBJ2-1)
CASSILGEGRNEQFF

SEQ ID NO: 359851 - protein, 14 aa, Homo sapiens
  CDR3 for alpha chain variable domain of TCR clone 179926 (TRAV1-2, TRAJ6)
CAVSLSGGSYIPTF

SEQ ID NO: 359852 - protein, 15 aa, Homo sapiens
  CDR3 for beta chain variable domain of TCR clone 179926 (TRBV28, TRBJ2-7)
CASSPGVRGFYEQYF

SEQ ID NO: 359853 - protein, 15 aa, Homo sapiens
  CDR3 for alpha chain variable domain of TCR clone 179927 (TRAV26-1, TRAJ37)
CIVRVATGNTGKLIF

SEQ ID NO: 359854 - protein, 14 aa, Homo sapiens
  CDR3 for beta chain variable domain of TCR clone 179927 (TRBV7-3, TRBJ2-1)
CASSLAGGTNEQFF

SEQ ID NO: 359855 - protein, 15 aa, Homo sapiens
  CDR3 for alpha chain variable domain of TCR clone 179928 (TRAV13-1, TRAJ17)
CAASIERAAGNKLTF

SEQ ID NO: 359856 - protein, 15 aa, Homo sapiens
  CDR3 for beta chain variable domain of TCR clone 179928 (TRBV6-1, TRBJ2-3)
CASSERGEITNTQYF

SEQ ID NO: 359857 - protein, 14 aa, Homo sapiens
  CDR3 for alpha chain variable domain of TCR clone 179929 (TRAV1-2, TRAJ8)
CAVREDTGFQKLVF

SEQ ID NO: 359858 - protein, 15 aa, Homo sapiens
  CDR3 for beta chain variable domain of TCR clone 179929 (TRBV6-3, TRBJ2-7)
CASSSPGTVFYEQYI

SEQ ID NO: 359859 - protein, 14 aa, Homo sapiens
  CDR3 for alpha chain variable domain of TCR clone 179930 (TRAV16, TRAJ17)
CAPRIKAAGNKLTF

SEQ ID NO: 359860 - protein, 17 aa, Homo sapiens
  CDR3 for beta chain variable domain of TCR clone 179930 (TRBV7-2, TRBJ2-3)
RASSSYSGTRRADTQYF

SEQ ID NO: 359861 - protein, 14 aa, Homo sapiens
  CDR3 for alpha chain variable domain of TCR clone 179931 (TRAV9-2, TRAJ39)
CGLYIYNAGNMLTF

SEQ ID NO: 359862 - protein, 12 aa, Homo sapiens
  CDR3 for beta chain variable domain of TCR clone 179931 (TRBV18, TRBJ2-5)
CASSPSKETQYF

SEQ ID NO: 359863 - protein, 10 aa, Homo sapiens
  CDR3 for alpha chain variable domain of TCR clone 179932 (TRAV12-2, TRAJ52)
RSTSYRKLTF

SEQ ID NO: 359864 - protein, 11 aa, Homo sapiens
  CDR3 for beta chain variable domain of TCR clone 179932 (TRBV11-2, TRBJ2-2)
SASSLPGELFF

SEQ ID NO: 359865 - protein, 13 aa, Homo sapiens
  CDR3 for alpha chain variable domain of TCR clone 179933 (TRAV1-2, TRAJ9)
CAALNTGGFKTIF

SEQ ID NO: 359866 - protein, 13 aa, Homo sapiens
  CDR3 for beta chain variable domain of TCR clone 179933 (TRBV7-9, TRBJ1-2)
CASSLKQNYYYTF

SEQ ID NO: 359867 - protein, 14 aa, Homo sapiens
  CDR3 for alpha chain variable domain of TCR clone 179934 (TRAV12-3, TRAJ13)
CAMKNSGGYQRVTF

SEQ ID NO: 359868 - protein, 17 aa, Homo sapiens
  CDR3 for beta chain variable domain of TCR clone 179934 (TRBV13, TRBJ2-3)
CASSLSRVAGGRNTQYF

SEQ ID NO: 359869 - protein, 15 aa, Homo sapiens
  CDR3 for alpha chain variable domain of TCR clone 179935 (TRAV17, TRAJ57)
CATGPSQGGAEKLVL

SEQ ID NO: 359870 - protein, 14 aa, Homo sapiens
  CDR3 for beta chain variable domain of TCR clone 179935 (TRBV12-5, TRBJ2-5)
CASGSRTHQETQYF

SEQ ID NO: 359871 - protein, 14 aa, Homo sapiens
  CDR3 for alpha chain variable domain of TCR clone 179936 (TRAV2, TRAJ3)
CAVRPYSSASKIIL

SEQ ID NO: 359872 - protein, 17 aa, Homo sapiens
  CDR3 for beta chain variable domain of TCR clone 179936 (TRBV7-6, TRBJ2-5)
CASSSPQAGDPSETQYF

SEQ ID NO: 359873 - protein, 12 aa, Homo sapiens
  CDR3 for alpha chain variable domain of TCR clone 179937 (TRAV13-2, TRAJ8)
CAPWLGFQKLVF

SEQ ID NO: 359874 - protein, 13 aa, Homo sapiens
  CDR3 for beta chain variable domain of TCR clone 179937 (TRBV12-4, TRBJ1-2)
CASTMTSNYSYTF

SEQ ID NO: 359875 - protein, 14 aa, Homo sapiens
  CDR3 for alpha chain variable domain of TCR clone 179938 (TRAV12-3, TRAJ10)
SHLPLTGGGNKLTF

SEQ ID NO: 359876 - protein, 16 aa, Homo sapiens
  CDR3 for beta chain variable domain of TCR clone 179938 (TRBV27, TRBJ2-2)
CASSSSGVANTGELFF

SEQ ID NO: 359877 - protein, 13 aa, Homo sapiens
  CDR3 for alpha chain variable domain of TCR clone 179939 (TRAV38-1, TRAJ42)
CARGGGSQGKLIF

SEQ ID NO: 359878 - protein, 17 aa, Homo sapiens
  CDR3 for beta chain variable domain of TCR clone 179939 (TRBV20-1, TRBJ2-1)
CSARDPLAGVWDNEQFF

SEQ ID NO: 359879 - protein, 16 aa, Homo sapiens
  CDR3 for alpha chain variable domain of TCR clone 179940 (TRAV16, TRAJ4)
CALSGMFSGGDNKLIF

SEQ ID NO: 359880 - protein, 16 aa, Homo sapiens
  CDR3 for beta chain variable domain of TCR clone 179940 (TRBV24-1, TRBJ2-3)
CATSDPGTGATDTQYF

SEQ ID NO: 359881 - protein, 14 aa, Homo sapiens
  CDR3 for alpha chain variable domain of TCR clone 179941 (TRAV12-3, TRAJ33)
CAMSGRDSNYQLIW

SEQ ID NO: 359882 - protein, 15 aa, Homo sapiens
  CDR3 for beta chain variable domain of TCR clone 179941 (TRBV5-1, TRBJ2-7)
CASSLNGGPAREQYF

SEQ ID NO: 359883 - protein, 12 aa, Homo sapiens
  CDR3 for alpha chain variable domain of TCR clone 179942 (TRAV8-4, TRAJ37)
CAKSSNTGKLIF

SEQ ID NO: 359884 - protein, 15 aa, Homo sapiens
  CDR3 for beta chain variable domain of TCR clone 179942 (TRBV20-1, TRBJ1-5)
CSAFKNGQRNQPQHF

SEQ ID NO: 359885 - protein, 12 aa, Homo sapiens
  CDR3 for alpha chain variable domain of TCR clone 179943 (TRAV12-3, TRAJ17)
CARTLTGNKLTF

SEQ ID NO: 359886 - protein, 14 aa, Homo sapiens
  CDR3 for beta chain variable domain of TCR clone 179943 (TRBV4-1, TRBJ2-7)
CASSQDREHVEQYF

SEQ ID NO: 359887 - protein, 10 aa, Homo sapiens
  CDR3 for alpha chain variable domain of TCR clone 179944 (TRAV12-2, TRAJ41)
CAVTGYALNF

SEQ ID NO: 359888 - protein, 16 aa, Homo sapiens
  CDR3 for beta chain variable domain of TCR clone 179944 (TRBV12-4, TRBJ1-5)
CASSRPVGGSNQPQHF

SEQ ID NO: 359889 - protein, 13 aa, Homo sapiens
  CDR3 for alpha chain variable domain of TCR clone 179945 (TRAV23/DV6, TRAJ15)
CAALPAGRNFSDL

SEQ ID NO: 359890 - protein, 14 aa, Homo sapiens
  CDR3 for beta chain variable domain of TCR clone 179945 (TRBV7-9, TRBJ1-2)
CASSRQGANYGYTF

SEQ ID NO: 359891 - protein, 16 aa, Homo sapiens
  CDR3 for alpha chain variable domain of TCR clone 179946 (TRAV30, TRAJ24)
CGTEIVDADSWGKFQF

SEQ ID NO: 359892 - protein, 14 aa, Homo sapiens
  CDR3 for beta chain variable domain of TCR clone 179946 (TRBV18, TRBJ2-7)
CASSPRGGAFEQYF

SEQ ID NO: 359893 - protein, 14 aa, Homo sapiens
  CDR3 for alpha chain variable domain of TCR clone 179947 (TRAV12-3, TRAJ10)
GHLPLTGGGNKLTF

SEQ ID NO: 359894 - protein, 15 aa, Homo sapiens
  CDR3 for beta chain variable domain of TCR clone 179947 (TRBV6-6, TRBJ1-5)
CASSSIQGTNQPQHF

SEQ ID NO: 359895 - protein, 17 aa, Homo sapiens
  CDR3 for alpha chain variable domain of TCR clone 179948 (TRAV3, TRAJ6)
CAMRDGPRAGGSYIPTF

SEQ ID NO: 359896 - protein, 12 aa, Homo sapiens
  CDR3 for beta chain variable domain of TCR clone 179948 (TRBV5-4, TRBJ2-5)
CASSSTRETQYF

SEQ ID NO: 359897 - protein, 10 aa, Homo sapiens
  CDR3 for alpha chain variable domain of TCR clone 179949 (TRAV8-4, TRAJ43)
CAVSADDMRF

SEQ ID NO: 359898 - protein, 13 aa, Homo sapiens
  CDR3 for beta chain variable domain of TCR clone 179949 (TRBV12-4, TRBJ2-5)
CASSTGTEETQYF

SEQ ID NO: 359899 - protein, 14 aa, Homo sapiens
  CDR3 for alpha chain variable domain of TCR clone 179950 (TRAV1-2, TRAJ8)
CAVREDTDFQKLVF

SEQ ID NO: 359900 - protein, 15 aa, Homo sapiens
  CDR3 for beta chain variable domain of TCR clone 179950 (TRBV27, TRBJ2-1)
CASSNGGGSSNEQFF

SEQ ID NO: 359901 - protein, 15 aa, Homo sapiens
  CDR3 for alpha chain variable domain of TCR clone 179951 (TRAV8-4, TRAJ7)
CAVSGGNSGNNRLAF

SEQ ID NO: 359902 - protein, 11 aa, Homo sapiens
  CDR3 for beta chain variable domain of TCR clone 179951 (TRBV20-1, TRBJ2-1)
CSLSSGSEQFF

SEQ ID NO: 359903 - protein, 14 aa, Homo sapiens
  CDR3 for alpha chain variable domain of TCR clone 179952 (TRAV12-2, TRAJ6)
CASKWGGGSYIPTF

SEQ ID NO: 359904 - protein, 14 aa, Homo sapiens
  CDR3 for beta chain variable domain of TCR clone 179952 (TRBV13, TRBJ2-5)
CASSLGPRGETQYF

SEQ ID NO: 359905 - protein, 13 aa, Homo sapiens
  CDR3 for alpha chain variable domain of TCR clone 179953 (TRAV12-3, TRAJ33)
CSMSVNSNYQLIW

SEQ ID NO: 359906 - protein, 14 aa, Homo sapiens
  CDR3 for beta chain variable domain of TCR clone 179953 (TRBV19, TRBJ2-2)
CASSTGQGAGELFF

SEQ ID NO: 359907 - protein, 13 aa, Homo sapiens
  CDR3 for alpha chain variable domain of TCR clone 179954 (TRAV3, TRAJ21)
CAVREPDFNKIYF

SEQ ID NO: 359908 - protein, 13 aa, Homo sapiens
  CDR3 for beta chain variable domain of TCR clone 179954 (TRBV9, TRBJ2-1)
CASSPSGGNEQFF

SEQ ID NO: 359909 - protein, 14 aa, Homo sapiens
  CDR3 for alpha chain variable domain of TCR clone 179955 (TRAV26-1, TRAJ38)
CIADNASNNRKLIW

SEQ ID NO: 359910 - protein, 15 aa, Homo sapiens
  CDR3 for beta chain variable domain of TCR clone 179955 (TRBV20-1, TRBJ2-7)
CSARDRVSGMDEQYF

SEQ ID NO: 359911 - protein, 14 aa, Homo sapiens
  CDR3 for alpha chain variable domain of TCR clone 179956 (TRAV22, TRAJ6)
CAGVGPGGSYIPTF

SEQ ID NO: 359912 - protein, 13 aa, Homo sapiens
  CDR3 for beta chain variable domain of TCR clone 179956 (TRBV7-7, TRBJ2-3)
CASSLSRADTRYF

SEQ ID NO: 359913 - protein, 14 aa, Homo sapiens
  CDR3 for alpha chain variable domain of TCR clone 179957 (TRAV16, TRAJ33)
CALSAMDSNYQLIC

SEQ ID NO: 359914 - protein, 14 aa, Homo sapiens
  CDR3 for beta chain variable domain of TCR clone 179957 (TRBV25-1, TRBJ1-1)
CASTHLGGNTEAFF

SEQ ID NO: 359915 - protein, 14 aa, Homo sapiens
  CDR3 for alpha chain variable domain of TCR clone 179958 (TRAV26-1, TRAJ38)
CIDDNAGNNRKLIW

SEQ ID NO: 359916 - protein, 14 aa, Homo sapiens
  CDR3 for beta chain variable domain of TCR clone 179958 (TRBV6-1, TRBJ1-3)
CASVQGGGGNTIYF

SEQ ID NO: 359917 - protein, 15 aa, Homo sapiens
  CDR3 for alpha chain variable domain of TCR clone 179959 (TRAV40, TRAJ45)
CLLGDLGGGADGLTF

SEQ ID NO: 359918 - protein, 13 aa, Homo sapiens
  CDR3 for beta chain variable domain of TCR clone 179959 (TRBV7-9, TRBJ1-2)
CASSLKQNYGYTV

SEQ ID NO: 359919 - protein, 15 aa, Homo sapiens
  CDR3 for alpha chain variable domain of TCR clone 179960 (TRAV13-1, TRAJ8)
CAASIPNTGFQKLVF

SEQ ID NO: 359920 - protein, 14 aa, Homo sapiens
  CDR3 for beta chain variable domain of TCR clone 179960 (TRBV4-1, TRBJ2-2)
CASSQAVNTGELFF

SEQ ID NO: 359921 - protein, 12 aa, Homo sapiens
  CDR3 for alpha chain variable domain of TCR clone 179961 (TRAV30, TRAJ43)
CGTEERGNDMRF

SEQ ID NO: 359922 - protein, 20 aa, Homo sapiens
  CDR3 for beta chain variable domain of TCR clone 179961 (TRBV28, TRBJ2-1)
CASTPIGRSPGLAGGNEQFF

SEQ ID NO: 359923 - protein, 11 aa, Homo sapiens
  CDR3 for alpha chain variable domain of TCR clone 179962 (TRAV2, TRAJ13)
CASGGYQKVTF

SEQ ID NO: 359924 - protein, 15 aa, Homo sapiens
  CDR3 for beta chain variable domain of TCR clone 179962 (TRBV20-1, TRBJ2-7)
CSTRDRVSGMDEQYF

SEQ ID NO: 359925 - protein, 17 aa, Homo sapiens
  CDR3 for alpha chain variable domain of TCR clone 179963 (TRAV3, TRAJ6)
CAVRYGPRAGGSYIPTF

SEQ ID NO: 359926 - protein, 13 aa, Homo sapiens
  CDR3 for beta chain variable domain of TCR clone 179963 (TRBV20-1, TRBJ2-1)
CSASTGTSNEQFF

SEQ ID NO: 359927 - protein, 14 aa, Homo sapiens
  CDR3 for alpha chain variable domain of TCR clone 179964 (TRAV8-3, TRAJ47)
CAVGAQGYGNKLVF

SEQ ID NO: 359928 - protein, 15 aa, Homo sapiens
  CDR3 for beta chain variable domain of TCR clone 179964 (TRBV7-9, TRBJ1-4)
CASSARTGGNEKLFF

SEQ ID NO: 359929 - protein, 11 aa, Homo sapiens
  CDR3 for alpha chain variable domain of TCR clone 179965 (TRAV3, TRAJ21)
CAVVNFNKFYF

SEQ ID NO: 359930 - protein, 16 aa, Homo sapiens
  CDR3 for beta chain variable domain of TCR clone 179965 (TRBV19, TRBJ2-1)
CASSKAGPSSYNVQFF

SEQ ID NO: 359931 - protein, 14 aa, Homo sapiens
  CDR3 for alpha chain variable domain of TCR clone 179966 (TRAV8-2, TRAJ4)
CVVSPSGGYNKLIF

SEQ ID NO: 359932 - protein, 15 aa, Homo sapiens
  CDR3 for beta chain variable domain of TCR clone 179966 (TRBV6-5, TRBJ1-6)
CASSLGQGFKSPLHF

SEQ ID NO: 359933 - protein, 14 aa, Homo sapiens
  CDR3 for alpha chain variable domain of TCR clone 179967 (TRAV12-2, TRAJ13)
CAVKKTGGYQKVTF

SEQ ID NO: 359934 - protein, 14 aa, Homo sapiens
  CDR3 for beta chain variable domain of TCR clone 179967 (TRBV5-5, TRBJ2-7)
SASSLGQGTYEQYF

SEQ ID NO: 359935 - protein, 10 aa, Homo sapiens
  CDR3 for alpha chain variable domain of TCR clone 179968 (TRAV30, TRAJ48)
CGIGNEKLTF

SEQ ID NO: 359936 - protein, 16 aa, Homo sapiens
  CDR3 for beta chain variable domain of TCR clone 179968 (TRBV27, TRBJ2-1)
SMNVEPGISGDNEQFF

SEQ ID NO: 359937 - protein, 14 aa, Homo sapiens
  CDR3 for alpha chain variable domain of TCR clone 179969 (TRAV8-1, TRAJ5)
CAVRTDTGRRALTF

SEQ ID NO: 359938 - protein, 14 aa, Homo sapiens
  CDR3 for beta chain variable domain of TCR clone 179969 (TRBV7-8, TRBJ2-3)
CASSFPAGQDTQYF

SEQ ID NO: 359939 - protein, 18 aa, Homo sapiens
  CDR3 for alpha chain variable domain of TCR clone 179970 (TRAV21, TRAJ52)
CAVRPSPAGGTSYGKVTF

SEQ ID NO: 359940 - protein, 15 aa, Homo sapiens
  CDR3 for beta chain variable domain of TCR clone 179970 (TRBV9, TRBJ1-6)
CASSVAGTGDSPLHF

SEQ ID NO: 359941 - protein, 11 aa, Homo sapiens
  CDR3 for alpha chain variable domain of TCR clone 179971 (TRAV12-3, TRAJ43)
CAMSVSNDMRF

SEQ ID NO: 359942 - protein, 15 aa, Homo sapiens
  CDR3 for beta chain variable domain of TCR clone 179971 (TRBV5-1, TRBJ2-1)
CAGSPPRAPYNEQFF

SEQ ID NO: 359943 - protein, 18 aa, Homo sapiens
  CDR3 for alpha chain variable domain of TCR clone 179972 (TRAV8-6, TRAJ39)
CAVTPQGLIDNAGNMLTF

SEQ ID NO: 359944 - protein, 14 aa, Homo sapiens
  CDR3 for beta chain variable domain of TCR clone 179972 (TRBV25-1, TRBJ1-1)
CASTHLGGNTEAFF

SEQ ID NO: 359945 - protein, 14 aa, Homo sapiens
  CDR3 for alpha chain variable domain of TCR clone 179973 (TRAV1-2, TRAJ8)
CAVREDTGFQKLVF

SEQ ID NO: 359946 - protein, 17 aa, Homo sapiens
  CDR3 for beta chain variable domain of TCR clone 179973 (TRBV5-1, TRBJ2-5)
CASSLAETSGFQETQYF

SEQ ID NO: 359947 - protein, 13 aa, Homo sapiens
  CDR3 for alpha chain variable domain of TCR clone 179974 (TRAV1-1, TRAJ7)
CAVSPLWEQQTRF

SEQ ID NO: 359948 - protein, 14 aa, Homo sapiens
  CDR3 for beta chain variable domain of TCR clone 179974 (TRBV6-5, TRBJ1-2)
CASSYSGQGGGYTF

SEQ ID NO: 359949 - protein, 15 aa, Homo sapiens
  CDR3 for alpha chain variable domain of TCR clone 179975 (TRAV17, TRAJ34)
CATDPRMVDTDKLIS

SEQ ID NO: 359950 - protein, 12 aa, Homo sapiens
  CDR3 for beta chain variable domain of TCR clone 179975 (TRBV10-2, TRBJ2-3)
CASSEGPGPRYF

SEQ ID NO: 359951 - protein, 14 aa, Homo sapiens
  CDR3 for alpha chain variable domain of TCR clone 179976 (TRAV13-1, TRAJ3)
CEASKSSSASKIIF

SEQ ID NO: 359952 - protein, 13 aa, Homo sapiens
  CDR3 for beta chain variable domain of TCR clone 179976 (TRBV25-1, TRBJ2-5)
CASSESGRETQYF

SEQ ID NO: 359953 - protein, 13 aa, Homo sapiens
  CDR3 for alpha chain variable domain of TCR clone 179977 (TRAV12-3, TRAJ54)
CAMTLQGAQKLVF

SEQ ID NO: 359954 - protein, 19 aa, Homo sapiens
  CDR3 for beta chain variable domain of TCR clone 179977 (TRBV23-1, TRBJ2-3)
TVSLRQQPRSTGSTDTQYF

SEQ ID NO: 359955 - protein, 14 aa, Homo sapiens
  CDR3 for alpha chain variable domain of TCR clone 179978 (TRAV26-1, TRAJ21)
CTVRPPHNFNKFYF

SEQ ID NO: 359956 - protein, 14 aa, Homo sapiens
  CDR3 for beta chain variable domain of TCR clone 179978 (TRBV11-3, TRBJ2-1)
CASSATTSGSIQFF

SEQ ID NO: 359957 - protein, 11 aa, Homo sapiens
  CDR3 for alpha chain variable domain of TCR clone 179979 (TRAV3, TRAJ40)
CAVRDLRNLQI

SEQ ID NO: 359958 - protein, 17 aa, Homo sapiens
  CDR3 for beta chain variable domain of TCR clone 179979 (TRBV7-3, TRBJ2-3)
CASSLMKRMRGADTQYF

SEQ ID NO: 359959 - protein, 15 aa, Homo sapiens
  CDR3 for alpha chain variable domain of TCR clone 179980 (TRAV3, TRAJ4)
CAVRDGTGGDNKLLF

SEQ ID NO: 359960 - protein, 16 aa, Homo sapiens
  CDR3 for beta chain variable domain of TCR clone 179980 (TRBV27, TRBJ2-2)
CASSSSGVSNTGELFF

SEQ ID NO: 359961 - protein, 13 aa, Homo sapiens
  CDR3 for alpha chain variable domain of TCR clone 179981 (TRAV12-3, TRAJ31)
CAMSANNNARLMF

SEQ ID NO: 359962 - protein, 15 aa, Homo sapiens
  CDR3 for beta chain variable domain of TCR clone 179981 (TRBV7-9, TRBJ1-5)
CASSQGHQPNQPQHF

SEQ ID NO: 359963 - protein, 14 aa, Homo sapiens
  CDR3 for alpha chain variable domain of TCR clone 179982 (TRAV12-2, TRAJ24)
CAVTPADSWGKLQF

SEQ ID NO: 359964 - protein, 13 aa, Homo sapiens
  CDR3 for beta chain variable domain of TCR clone 179982 (TRBV5-1, TRBJ1-2)
CASSFQDGYGYTF

SEQ ID NO: 359965 - protein, 14 aa, Homo sapiens
  CDR3 for alpha chain variable domain of TCR clone 179983 (TRAV17, TRAJ22)
CATSPSGSARQLTF

SEQ ID NO: 359966 - protein, 13 aa, Homo sapiens
  CDR3 for beta chain variable domain of TCR clone 179983 (TRBV12-4, TRBJ1-2)
CDSSLRQGKGYTF

SEQ ID NO: 359967 - protein, 13 aa, Homo sapiens
  CDR3 for alpha chain variable domain of TCR clone 179984 (TRAV27, TRAJ41)
CAGEGNSGYALNF

SEQ ID NO: 359968 - protein, 15 aa, Homo sapiens
  CDR3 for beta chain variable domain of TCR clone 179984 (TRBV7-9, TRBJ2-7)
CASSSSGLAVYEQYF

SEQ ID NO: 359969 - protein, 16 aa, Homo sapiens
  CDR3 for alpha chain variable domain of TCR clone 179985 (TRAV13-1, TRAJ8)
CAAFYLLSTGFQKPVF

SEQ ID NO: 359970 - protein, 14 aa, Homo sapiens
  CDR3 for beta chain variable domain of TCR clone 179985 (TRBV29-1, TRBJ2-5)
CSVGPAGGQETQYF

SEQ ID NO: 359971 - protein, 14 aa, Homo sapiens
  CDR3 for alpha chain variable domain of TCR clone 179986 (TRAV13-2, TRAJ17)
CAENSKAAGNELTF

SEQ ID NO: 359972 - protein, 12 aa, Homo sapiens
  CDR3 for beta chain variable domain of TCR clone 179986 (TRBV7-9, TRBJ2-7)
CASSIKREEQYF

SEQ ID NO: 359973 - protein, 22 aa, Homo sapiens
  CDR3 for alpha chain variable domain of TCR clone 179987 (TRAV13-1, TRAJ31)
CAAIVTMPDSCLEMELSWWVIP

SEQ ID NO: 359974 - protein, 11 aa, Homo sapiens
  CDR3 for beta chain variable domain of TCR clone 179987 (TRBV20-1, TRBJ2-7)
CSARTSYEQYF

SEQ ID NO: 359975 - protein, 16 aa, Homo sapiens
  CDR3 for alpha chain variable domain of TCR clone 179988 (TRAV16, TRAJ52)
CALSGVGGTSYGKLTF

SEQ ID NO: 359976 - protein, 14 aa, Homo sapiens
  CDR3 for beta chain variable domain of TCR clone 179988 (TRBV19, TRBJ1-2)
CASSRQGQAYGYTF

SEQ ID NO: 359977 - protein, 12 aa, Homo sapiens
  CDR3 for alpha chain variable domain of TCR clone 179989 (TRAV13-1, TRAJ21)
CAAKAGFNKFYF

SEQ ID NO: 359978 - protein, 15 aa, Homo sapiens
  CDR3 for beta chain variable domain of TCR clone 179989 (TRBV15, TRBJ1-5)
CATSRDPASNQPQHF

SEQ ID NO: 359979 - protein, 12 aa, Homo sapiens
  CDR3 for alpha chain variable domain of TCR clone 179990 (TRAV8-4, TRAJ33)
CAVSEGNYQLIW

SEQ ID NO: 359980 - protein, 13 aa, Homo sapiens
  CDR3 for beta chain variable domain of TCR clone 179990 (TRBV10-3, TRBJ2-7)
CASKLAVNYEQYF

SEQ ID NO: 359981 - protein, 16 aa, Homo sapiens
  CDR3 for alpha chain variable domain of TCR clone 179991 (TRAV8-6, TRAJ28)
CSVTSKPGAGSYQITF

SEQ ID NO: 359982 - protein, 16 aa, Homo sapiens
  CDR3 for beta chain variable domain of TCR clone 179991 (TRBV12-4, TRBJ2-5)
CASSWRPSGDLETQYF

SEQ ID NO: 359983 - protein, 15 aa, Homo sapiens
  CDR3 for alpha chain variable domain of TCR clone 179992 (TRAV14/DV4, TRAJ12)
CAMREERDSSYKLIF

SEQ ID NO: 359984 - protein, 16 aa, Homo sapiens
  CDR3 for beta chain variable domain of TCR clone 179992 (TRBV20-1, TRBJ1-4)
CSAPGQGLLTNEKLFF

SEQ ID NO: 359985 - protein, 15 aa, Homo sapiens
  CDR3 for alpha chain variable domain of TCR clone 179993 (TRAV3, TRAJ22)
CAVRDRGGSARQLTF

SEQ ID NO: 359986 - protein, 15 aa, Homo sapiens
  CDR3 for beta chain variable domain of TCR clone 179993 (TRBV10-3, TRBJ2-2)
CAIRTDREDTGELFF

SEQ ID NO: 359987 - protein, 15 aa, Homo sapiens
  CDR3 for alpha chain variable domain of TCR clone 179994 (TRAV21, TRAJ9)
CAVEAVGLGASKLSF

SEQ ID NO: 359988 - protein, 13 aa, Homo sapiens
  CDR3 for beta chain variable domain of TCR clone 179994 (TRBV12-4, TRBJ1-2)
CASSSGLTVISTF

SEQ ID NO: 359989 - protein, 15 aa, Homo sapiens
  CDR3 for alpha chain variable domain of TCR clone 179995 (TRAV8-3, TRAJ27)
CAVGPSKTNAGKSTF

SEQ ID NO: 359990 - protein, 16 aa, Homo sapiens
  CDR3 for beta chain variable domain of TCR clone 179995 (TRBV13, TRBJ2-2)
CASSPRTGEHTGELFF

SEQ ID NO: 359991 - protein, 13 aa, Homo sapiens
  CDR3 for alpha chain variable domain of TCR clone 179996 (TRAV2, TRAJ40)
CAVVTSGTYKYIF

SEQ ID NO: 359992 - protein, 17 aa, Homo sapiens
  CDR3 for beta chain variable domain of TCR clone 179996 (TRBV7-3, TRBJ2-3)
CASSLMKRMRGADQQYF

SEQ ID NO: 359993 - protein, 14 aa, Homo sapiens
  CDR3 for alpha chain variable domain of TCR clone 179997 (TRAV26-1, TRAJ26)
CIVRVASYGQNFVF

SEQ ID NO: 359994 - protein, 17 aa, Homo sapiens
  CDR3 for beta chain variable domain of TCR clone 179997 (TRBV13, TRBJ2-3)
CASSLSRVAGGRNTQYF

SEQ ID NO: 359995 - protein, 12 aa, Homo sapiens
  CDR3 for alpha chain variable domain of TCR clone 179998 (TRAV13-1, TRAJ21)
CAAKEGFNKFYF

SEQ ID NO: 359996 - protein, 20 aa, Homo sapiens
  CDR3 for beta chain variable domain of TCR clone 179998 (TRBV28, TRBJ2-1)
CASTPIGRSPGLAGGNEQFC

SEQ ID NO: 359997 - protein, 12 aa, Homo sapiens
  CDR3 for alpha chain variable domain of TCR clone 179999 (TRAV29/DV5, TRAJ15)
CTPNQAGTALIF

SEQ ID NO: 359998 - protein, 15 aa, Homo sapiens
  CDR3 for beta chain variable domain of TCR clone 179999 (TRBV11-2, TRBJ2-2)
CASSSDRVNAGELFF

SEQ ID NO: 359999 - protein, 18 aa, Homo sapiens
  CDR3 for alpha chain variable domain of TCR clone 180000 (TRAV13-1, TRAJ52)
RAAKNSNAGGTSYGKLTF

SEQ ID NO: 360000 - protein, 18 aa, Homo sapiens
  CDR3 for beta chain variable domain of TCR clone 180000 (TRBV12-4, TRBJ2-4)
CASSRTGAVEVAKNIQYF

SEQ ID NO: 360001 - protein, 12 aa, Homo sapiens
  CDR3 for alpha chain variable domain of TCR clone 180001 (TRAV12-3, TRAJ20)
CAMVRGDYKLSF

SEQ ID NO: 360002 - protein, 13 aa, Homo sapiens
  CDR3 for beta chain variable domain of TCR clone 180001 (TRBV6-5, TRBJ1-2)
CASSLDTYYGYTF

SEQ ID NO: 360003 - protein, 14 aa, Homo sapiens
  CDR3 for alpha chain variable domain of TCR clone 180002 (TRAV12-2, TRAJ17)
CAVLFKAAGTKLTF

SEQ ID NO: 360004 - protein, 17 aa, Homo sapiens
  CDR3 for beta chain variable domain of TCR clone 180002 (TRBV20-1, TRBJ2-2)
CSARGSGQGGLTGELFF

SEQ ID NO: 360005 - protein, 16 aa, Homo sapiens
  CDR3 for alpha chain variable domain of TCR clone 180003 (TRAV30, TRAJ24)
CGTEIADADRWGKFQF

SEQ ID NO: 360006 - protein, 15 aa, Homo sapiens
  CDR3 for beta chain variable domain of TCR clone 180003 (TRBV5-1, TRBJ1-1)
CASSSTTGTNTEAFF

SEQ ID NO: 360007 - protein, 11 aa, Homo sapiens
  CDR3 for alpha chain variable domain of TCR clone 180004 (TRAV2, TRAJ13)
CASGGYQKVTF

SEQ ID NO: 360008 - protein, 13 aa, Homo sapiens
  CDR3 for beta chain variable domain of TCR clone 180004 (TRBV19, TRBJ1-5)
CASSMRGYQPQHF

SEQ ID NO: 360009 - protein, 16 aa, Homo sapiens
  CDR3 for alpha chain variable domain of TCR clone 180005 (TRAV20, TRAJ22)
CAVQASSSGSARQLTF

SEQ ID NO: 360010 - protein, 13 aa, Homo sapiens
  CDR3 for beta chain variable domain of TCR clone 180005 (TRBV7-2, TRBJ2-5)
CASSQTSVKTQYF

SEQ ID NO: 360011 - protein, 11 aa, Homo sapiens
  CDR3 for alpha chain variable domain of TCR clone 180006 (TRAV3, TRAJ21)
CAVGNSNKFYF

SEQ ID NO: 360012 - protein, 16 aa, Homo sapiens
  CDR3 for beta chain variable domain of TCR clone 180006 (TRBV19, TRBJ2-1)
CASSKAGPRSYNEQFF

SEQ ID NO: 360013 - protein, 15 aa, Homo sapiens
  CDR3 for alpha chain variable domain of TCR clone 180007 (TRAV3, TRAJ22)
CAVRDRGGSARQRTF

SEQ ID NO: 360014 - protein, 15 aa, Homo sapiens
  CDR3 for beta chain variable domain of TCR clone 180007 (TRBV9, TRBJ1-6)
CASSVAGTGDSPLHF

SEQ ID NO: 360015 - protein, 13 aa, Homo sapiens
  CDR3 for alpha chain variable domain of TCR clone 180008 (TRAV13-2, TRAJ22)
CRWDLGFCRQLTF

SEQ ID NO: 360016 - protein, 16 aa, Homo sapiens
  CDR3 for beta chain variable domain of TCR clone 180008 (TRBV19, TRBJ2-1)
CASSSKGTRSYNEQFF

SEQ ID NO: 360017 - protein, 16 aa, Homo sapiens
  CDR3 for alpha chain variable domain of TCR clone 180009 (TRAV1-2, TRAJ10)
CAVRGVLTGGGNKLTF

SEQ ID NO: 360018 - protein, 15 aa, Homo sapiens
  CDR3 for beta chain variable domain of TCR clone 180009 (TRBV28, TRBJ1-5)
CASSRTGGYVQPQHF

SEQ ID NO: 360019 - protein, 14 aa, Homo sapiens
  CDR3 for alpha chain variable domain of TCR clone 180010 (TRAV8-3, TRAJ23)
CAVIIYNQGGKLIF

SEQ ID NO: 360020 - protein, 15 aa, Homo sapiens
  CDR3 for beta chain variable domain of TCR clone 180010 (TRBV18, TRBJ2-1)
CSSSPPSASYNEQFF

SEQ ID NO: 360021 - protein, 21 aa, Homo sapiens
  CDR3 for alpha chain variable domain of TCR clone 180011 (TRAV8-3, )
CAVVTTRIPDIQNPDPAVYQL

SEQ ID NO: 360022 - protein, 14 aa, Homo sapiens
  CDR3 for beta chain variable domain of TCR clone 180011 (TRBV11-2, TRBJ2-7)
CASSPSTTFYEQYF

SEQ ID NO: 360023 - protein, 12 aa, Homo sapiens
  CDR3 for alpha chain variable domain of TCR clone 180012 (TRAV17, TRAJ39)
CATGAAVNMLTF

SEQ ID NO: 360024 - protein, 14 aa, Homo sapiens
  CDR3 for beta chain variable domain of TCR clone 180012 (TRBV7-9, TRBJ1-2)
GASSRQGANYGYTF

SEQ ID NO: 360025 - protein, 10 aa, Homo sapiens
  CDR3 for alpha chain variable domain of TCR clone 180013 (TRAV12-1, TRAJ41)
CVVPELKFRG

SEQ ID NO: 360026 - protein, 12 aa, Homo sapiens
  CDR3 for beta chain variable domain of TCR clone 180013 (TRBV14, TRBJ2-5)
CASSQLKETQYF

SEQ ID NO: 360027 - protein, 13 aa, Homo sapiens
  CDR3 for alpha chain variable domain of TCR clone 180014 (TRAV1-1, TRAJ23)
CAVVANKGGKLIF

SEQ ID NO: 360028 - protein, 16 aa, Homo sapiens
  CDR3 for beta chain variable domain of TCR clone 180014 (TRBV5-5, TRBJ1-2)
CASSPTWGRGLYGYTF

SEQ ID NO: 360029 - protein, 15 aa, Homo sapiens
  CDR3 for alpha chain variable domain of TCR clone 180015 (TRAV20, TRAJ50)
CAVRQMKTSYDKVIF

SEQ ID NO: 360030 - protein, 16 aa, Homo sapiens
  CDR3 for beta chain variable domain of TCR clone 180015 (TRBV15, TRBJ1-2)
CSTSRGPRTGGGGYAF

SEQ ID NO: 360031 - protein, 14 aa, Homo sapiens
  CDR3 for alpha chain variable domain of TCR clone 180016 (TRAV1-2, TRAJ16)
CAVNRFSDGQKLLF

SEQ ID NO: 360032 - protein, 10 aa, Homo sapiens
  CDR3 for beta chain variable domain of TCR clone 180016 (TRBV20-1, TRBJ2-7)
IGSLMDEQYF

SEQ ID NO: 360033 - protein, 12 aa, Homo sapiens
  CDR3 for alpha chain variable domain of TCR clone 180017 (TRAV27, TRAJ41)
CAGRNSGYALNF

SEQ ID NO: 360034 - protein, 13 aa, Homo sapiens
  CDR3 for beta chain variable domain of TCR clone 180017 (TRBV12-4, TRBJ1-1)
CASSPGTGFEAFS

SEQ ID NO: 360035 - protein, 23 aa, Homo sapiens
  CDR3 for alpha chain variable domain of TCR clone 180018 (TRAV26-1, )
CIADNAGDNHIQNPDPAVYQLRD

SEQ ID NO: 360036 - protein, 13 aa, Homo sapiens
  CDR3 for beta chain variable domain of TCR clone 180018 (TRBV10-3, TRBJ2-7)
CASKLAVNYEQYF

SEQ ID NO: 360037 - protein, 14 aa, Homo sapiens
  CDR3 for alpha chain variable domain of TCR clone 180019 (TRAV23/DV6, TRAJ24)
CAASLSDSWGKLQV

SEQ ID NO: 360038 - protein, 15 aa, Homo sapiens
  CDR3 for beta chain variable domain of TCR clone 180019 (TRBV9, TRBJ1-6)
CASSVAGTGDSPLHF

SEQ ID NO: 360039 - protein, 14 aa, Homo sapiens
  CDR3 for alpha chain variable domain of TCR clone 180020 (TRAV14/DV4, TRAJ26)
CAMREGTYGQNFVF

SEQ ID NO: 360040 - protein, 13 aa, Homo sapiens
  CDR3 for beta chain variable domain of TCR clone 180020 (TRBV7-9, TRBJ1-2)
CASSLKQNYGYTF

SEQ ID NO: 360041 - protein, 14 aa, Homo sapiens
  CDR3 for alpha chain variable domain of TCR clone 180021 (TRAV12-1, TRAJ30)
CVVNIGNRDDKIIF

SEQ ID NO: 360042 - protein, 14 aa, Homo sapiens
  CDR3 for beta chain variable domain of TCR clone 180021 (TRBV7-9, TRBJ2-5)
CASSHRPSGETQYF

SEQ ID NO: 360043 - protein, 16 aa, Homo sapiens
  CDR3 for alpha chain variable domain of TCR clone 180022 (TRAV3, TRAJ37)
CAVRGKGSGNPGKLIF

SEQ ID NO: 360044 - protein, 18 aa, Homo sapiens
  CDR3 for beta chain variable domain of TCR clone 180022 (TRBV12-4, TRBJ2-2)
CASSLVAGTRGRTGELFF

SEQ ID NO: 360045 - protein, 11 aa, Homo sapiens
  CDR3 for alpha chain variable domain of TCR clone 180023 (TRAV27, TRAJ40)
SLTPGTYKYIF

SEQ ID NO: 360046 - protein, 13 aa, Homo sapiens
  CDR3 for beta chain variable domain of TCR clone 180023 (TRBV2, TRBJ2-5)
CASGTPYQETQYF

SEQ ID NO: 360047 - protein, 23 aa, Homo sapiens
  CDR3 for alpha chain variable domain of TCR clone 180024 (TRAV21, TRAJ39)
AASQPGDSATHPLLVNAGNMLTF

SEQ ID NO: 360048 - protein, 18 aa, Homo sapiens
  CDR3 for beta chain variable domain of TCR clone 180024 (TRBV7-2, TRBJ2-7)
CASSLSGRGLAGGYEQYF

SEQ ID NO: 360049 - protein, 14 aa, Homo sapiens
  CDR3 for alpha chain variable domain of TCR clone 180025 (TRAV1-2, TRAJ8)
CAVREDTGFQKLVF

SEQ ID NO: 360050 - protein, 12 aa, Homo sapiens
  CDR3 for beta chain variable domain of TCR clone 180025 (TRBV7-2, TRBJ1-5)
CASSLWSQPQHF

SEQ ID NO: 360051 - protein, 17 aa, Homo sapiens
  CDR3 for alpha chain variable domain of TCR clone 180026 (TRAV26-2, TRAJ42)
CILRDVGYGGSQGNLIF

SEQ ID NO: 360052 - protein, 16 aa, Homo sapiens
  CDR3 for beta chain variable domain of TCR clone 180026 (TRBV12-4, TRBJ1-5)
CASSRQVGGSNQPQHF

SEQ ID NO: 360053 - protein, 12 aa, Homo sapiens
  CDR3 for alpha chain variable domain of TCR clone 180027 (TRAV1-2, TRAJ29)
CAVPSGNTPLVF

SEQ ID NO: 360054 - protein, 14 aa, Homo sapiens
  CDR3 for beta chain variable domain of TCR clone 180027 (TRBV18, TRBJ2-5)
CDSSPGVSQETQYF

SEQ ID NO: 360055 - protein, 16 aa, Homo sapiens
  CDR3 for alpha chain variable domain of TCR clone 180028 (TRAV26-1, TRAJ37)
CIVRRDGSGNTGKLIF

SEQ ID NO: 360056 - protein, 17 aa, Homo sapiens
  CDR3 for beta chain variable domain of TCR clone 180028 (TRBV4-1, TRBJ2-7)
CARSRDPLGVRGGEQYF

SEQ ID NO: 360057 - protein, 12 aa, Homo sapiens
  CDR3 for alpha chain variable domain of TCR clone 180029 (TRAV12-3, TRAJ40)
CAMSSGTYKYIF

SEQ ID NO: 360058 - protein, 15 aa, Homo sapiens
  CDR3 for beta chain variable domain of TCR clone 180029 (TRBV7-3, TRBJ2-2)
CASSGTGQGTGELFL

SEQ ID NO: 360059 - protein, 19 aa, Homo sapiens
  CDR3 for alpha chain variable domain of TCR clone 180030 (TRAV3, TRAJ6)
CAVRDRNPSLSGGSYIPPF

SEQ ID NO: 360060 - protein, 15 aa, Homo sapiens
  CDR3 for beta chain variable domain of TCR clone 180030 (TRBV18, TRBJ2-7)
CASSPTFMDSYEQYF

SEQ ID NO: 360061 - protein, 13 aa, Homo sapiens
  CDR3 for alpha chain variable domain of TCR clone 180031 (TRAV20, TRAJ20)
CAVRWVRDYKLSF

SEQ ID NO: 360062 - protein, 14 aa, Homo sapiens
  CDR3 for beta chain variable domain of TCR clone 180031 (TRBV19, TRBJ2-2)
CASTVTANTGELFV

SEQ ID NO: 360063 - protein, 14 aa, Homo sapiens
  CDR3 for alpha chain variable domain of TCR clone 180032 (TRAV17, TRAJ57)
CATDPQGGSEKLVF

SEQ ID NO: 360064 - protein, 12 aa, Homo sapiens
  CDR3 for beta chain variable domain of TCR clone 180032 (TRBV4-1, TRBJ2-1)
CASSQPGQGQFF

SEQ ID NO: 360065 - protein, 13 aa, Homo sapiens
  CDR3 for alpha chain variable domain of TCR clone 180033 (TRAV1-1, TRAJ31)
CASYLNNNARLMF

SEQ ID NO: 360066 - protein, 13 aa, Homo sapiens
  CDR3 for beta chain variable domain of TCR clone 180033 (TRBV15, TRBJ1-6)
CATSGGLNSPLHV

SEQ ID NO: 360067 - protein, 14 aa, Homo sapiens
  CDR3 for alpha chain variable domain of TCR clone 180034 (TRAV14/DV4, TRAJ57)
CAMREEGGSEKLVF

SEQ ID NO: 360068 - protein, 13 aa, Homo sapiens
  CDR3 for beta chain variable domain of TCR clone 180034 (TRBV15, TRBJ1-6)
CATSGGLNSPLHV

SEQ ID NO: 360069 - protein, 16 aa, Homo sapiens
  CDR3 for alpha chain variable domain of TCR clone 180035 (TRAV12-3, TRAJ53)
CAMSVGSGGSNYKLTF

SEQ ID NO: 360070 - protein, 15 aa, Homo sapiens
  CDR3 for beta chain variable domain of TCR clone 180035 (TRBV5-1, TRBJ2-7)
CASSLNGGPAREQYF

SEQ ID NO: 360071 - protein, 15 aa, Homo sapiens
  CDR3 for alpha chain variable domain of TCR clone 180036 (TRAV13-1, TRAJ16)
CAARYQMVRSCSVQG

SEQ ID NO: 360072 - protein, 13 aa, Homo sapiens
  CDR3 for beta chain variable domain of TCR clone 180036 (TRBV4-1, TRBJ2-1)
CASSQAGGDEQFF

SEQ ID NO: 360073 - protein, 15 aa, Homo sapiens
  CDR3 for alpha chain variable domain of TCR clone 180037 (TRAV2, TRAJ9)
CAVAALNTGGFKTIF

SEQ ID NO: 360074 - protein, 14 aa, Homo sapiens
  CDR3 for beta chain variable domain of TCR clone 180037 (TRBV7-8, TRBJ2-5)
CASGATGGQETQYF

SEQ ID NO: 360075 - protein, 16 aa, Homo sapiens
  CDR3 for alpha chain variable domain of TCR clone 180038 (TRAV3, TRAJ37)
CAVRGKGSGNTGKLIF

SEQ ID NO: 360076 - protein, 14 aa, Homo sapiens
  CDR3 for beta chain variable domain of TCR clone 180038 (TRBV25-1, TRBJ1-1)
CASTQLGGNTEAFF

SEQ ID NO: 360077 - protein, 13 aa, Homo sapiens
  CDR3 for alpha chain variable domain of TCR clone 180039 (TRAV26-1, TRAJ34)
CIVRPWITDKLIF

SEQ ID NO: 360078 - protein, 13 aa, Homo sapiens
  CDR3 for beta chain variable domain of TCR clone 180039 (TRBV4-2, TRBJ1-1)
CASSQAGNTEAFF

SEQ ID NO: 360079 - protein, 15 aa, Homo sapiens
  CDR3 for alpha chain variable domain of TCR clone 180040 (TRAV8-4, TRAJ29)
CAVSEDFRGNTPLVF

SEQ ID NO: 360080 - protein, 17 aa, Homo sapiens
  CDR3 for beta chain variable domain of TCR clone 180040 (TRBV13, TRBJ2-3)
CASSLSRVAGGRNTQYF

SEQ ID NO: 360081 - protein, 14 aa, Homo sapiens
  CDR3 for alpha chain variable domain of TCR clone 180041 (TRAV1-2, TRAJ16)
CAVNRLTDGQKLLF

SEQ ID NO: 360082 - protein, 13 aa, Homo sapiens
  CDR3 for beta chain variable domain of TCR clone 180041 (TRBV7-2, TRBJ2-5)
CASSQTSVETQYF

SEQ ID NO: 360083 - protein, 15 aa, Homo sapiens
  CDR3 for alpha chain variable domain of TCR clone 180042 (TRAV27, TRAJ38)
CAARRNAGNNRKLIW

SEQ ID NO: 360084 - protein, 15 aa, Homo sapiens
  CDR3 for beta chain variable domain of TCR clone 180042 (TRBV25-1, TRBJ1-4)
CASSPGDSTNEKLFF

SEQ ID NO: 360085 - protein, 14 aa, Homo sapiens
  CDR3 for alpha chain variable domain of TCR clone 180043 (TRAV23/DV6, TRAJ8)
CAASKNTGFQKLVF

SEQ ID NO: 360086 - protein, 16 aa, Homo sapiens
  CDR3 for beta chain variable domain of TCR clone 180043 (TRBV4-1, TRBJ2-6)
CASSRVGDPGANVLTF

SEQ ID NO: 360087 - protein, 11 aa, Homo sapiens
  CDR3 for alpha chain variable domain of TCR clone 180044 (TRAV3, TRAJ21)
CAVGNFNKFYF

SEQ ID NO: 360088 - protein, 15 aa, Homo sapiens
  CDR3 for beta chain variable domain of TCR clone 180044 (TRBV5-1, TRBJ2-1)
CASSLVANSYNAQFF

SEQ ID NO: 360089 - protein, 10 aa, Homo sapiens
  CDR3 for alpha chain variable domain of TCR clone 180045 (TRAV23/DV6, TRAJ57)
CAASSTLSQG

SEQ ID NO: 360090 - protein, 14 aa, Homo sapiens
  CDR3 for beta chain variable domain of TCR clone 180045 (TRBV19, TRBJ2-7)
CASSIFAGTYEQYF

SEQ ID NO: 360091 - protein, 14 aa, Homo sapiens
  CDR3 for alpha chain variable domain of TCR clone 180046 (TRAV8-2, TRAJ4)
CVVSPSGGYNKLIF

SEQ ID NO: 360092 - protein, 15 aa, Homo sapiens
  CDR3 for beta chain variable domain of TCR clone 180046 (TRBV6-6, TRBJ2-7)
CASSYSYGGSYEQHF

SEQ ID NO: 360093 - protein, 13 aa, Homo sapiens
  CDR3 for alpha chain variable domain of TCR clone 180047 (TRAV1-1, TRAJ9)
CAAKNTGGFKAIF

SEQ ID NO: 360094 - protein, 17 aa, Homo sapiens
  CDR3 for beta chain variable domain of TCR clone 180047 (TRBV7-3, TRBJ2-3)
CASSLMKRMRGADTQYF

SEQ ID NO: 360095 - protein, 13 aa, Homo sapiens
  CDR3 for alpha chain variable domain of TCR clone 180048 (TRAV17, TRAJ31)
CATYENNNARLMF

SEQ ID NO: 360096 - protein, 14 aa, Homo sapiens
  CDR3 for beta chain variable domain of TCR clone 180048 (TRBV11-2, TRBJ2-1)
CASSPSRQGGGQFF

SEQ ID NO: 360097 - protein, 22 aa, Homo sapiens
  CDR3 for alpha chain variable domain of TCR clone 180049 (TRAV12-2, TRAJ53)
SPVIQPPTSLPPILSSKYKLTF

SEQ ID NO: 360098 - protein, 13 aa, Homo sapiens
  CDR3 for beta chain variable domain of TCR clone 180049 (TRBV7-7, TRBJ2-3)
CASSLSRADTQYF

SEQ ID NO: 360099 - protein, 17 aa, Homo sapiens
  CDR3 for alpha chain variable domain of TCR clone 180050 (TRAV3, TRAJ28)
CAVREAYSGAGSYQLTF

SEQ ID NO: 360100 - protein, 16 aa, Homo sapiens
  CDR3 for beta chain variable domain of TCR clone 180050 (TRBV7-3, TRBJ2-1)
CASSLEGYRSYNEQFF

SEQ ID NO: 360101 - protein, 12 aa, Homo sapiens
  CDR3 for alpha chain variable domain of TCR clone 180051 (TRAV23/DV6, TRAJ53)
CAASKLGSGGSN

SEQ ID NO: 360102 - protein, 14 aa, Homo sapiens
  CDR3 for beta chain variable domain of TCR clone 180051 (TRBV6-3, TRBJ1-1)
CDSSYQRRDTEAFF

SEQ ID NO: 360103 - protein, 13 aa, Homo sapiens
  CDR3 for alpha chain variable domain of TCR clone 180052 (TRAV13-1, TRAJ5)
CAASDTGRRALTF

SEQ ID NO: 360104 - protein, 12 aa, Homo sapiens
  CDR3 for beta chain variable domain of TCR clone 180052 (TRBV2, TRBJ2-1)
GRGLPAYNEQFF

SEQ ID NO: 360105 - protein, 12 aa, Homo sapiens
  CDR3 for alpha chain variable domain of TCR clone 180053 (TRAV1-1, TRAJ9)
CAVDTGGFKTIF

SEQ ID NO: 360106 - protein, 17 aa, Homo sapiens
  CDR3 for beta chain variable domain of TCR clone 180053 (TRBV20-1, TRBJ2-2)
CSASGSGQGGLTGELFF

SEQ ID NO: 360107 - protein, 14 aa, Homo sapiens
  CDR3 for alpha chain variable domain of TCR clone 180054 (TRAV13-1, TRAJ45)
CAAIGGGGADGLTF

SEQ ID NO: 360108 - protein, 16 aa, Homo sapiens
  CDR3 for beta chain variable domain of TCR clone 180054 (TRBV7-2, TRBJ1-1)
CASSLGAGGTNTEAFF

SEQ ID NO: 360109 - protein, 23 aa, Homo sapiens
  CDR3 for alpha chain variable domain of TCR clone 180055 (TRAV26-1, TRAJ38)
CIADNAGNNHIQNPDPAVYPLRD

SEQ ID NO: 360110 - protein, 20 aa, Homo sapiens
  CDR3 for beta chain variable domain of TCR clone 180055 (TRBV28, TRBJ2-1)
CASTPIGRSPGLAGGNEQFF

SEQ ID NO: 360111 - protein, 14 aa, Homo sapiens
  CDR3 for alpha chain variable domain of TCR clone 180056 (TRAV23/DV6, TRAJ58)
CAGMRETSGSRLSF

SEQ ID NO: 360112 - protein, 13 aa, Homo sapiens
  CDR3 for beta chain variable domain of TCR clone 180056 (TRBV28, TRBJ2-7)
CASRSSGVYEQYF

SEQ ID NO: 360113 - protein, 15 aa, Homo sapiens
  CDR3 for alpha chain variable domain of TCR clone 180057 (TRAV3, TRAJ3)
CAVRDMSSSASTIIF

SEQ ID NO: 360114 - protein, 15 aa, Homo sapiens
  CDR3 for beta chain variable domain of TCR clone 180057 (TRBV20-1, TRBJ2-7)
CSARDRVSGMDEQYF

SEQ ID NO: 360115 - protein, 14 aa, Homo sapiens
  CDR3 for alpha chain variable domain of TCR clone 180058 (TRAV30, TRAJ33)
CGTVAPRSNYQLIW

SEQ ID NO: 360116 - protein, 16 aa, Homo sapiens
  CDR3 for beta chain variable domain of TCR clone 180058 (TRBV6-1, TRBJ1-1)
CASRDSGRGMNTEAFF

SEQ ID NO: 360117 - protein, 17 aa, Homo sapiens
  CDR3 for alpha chain variable domain of TCR clone 180059 (TRAV1-1, TRAJ32)
CAVRVDELWWCYKQAHL

SEQ ID NO: 360118 - protein, 14 aa, Homo sapiens
  CDR3 for beta chain variable domain of TCR clone 180059 (TRBV12-5, TRBJ2-5)
CASGSRTHQETQYF

SEQ ID NO: 360119 - protein, 11 aa, Homo sapiens
  CDR3 for alpha chain variable domain of TCR clone 180060 (TRAV3, TRAJ21)
CAVGNFNKFYF

SEQ ID NO: 360120 - protein, 14 aa, Homo sapiens
  CDR3 for beta chain variable domain of TCR clone 180060 (TRBV2, TRBJ2-5)
CASSEGSYQETQYF

SEQ ID NO: 360121 - protein, 12 aa, Homo sapiens
  CDR3 for alpha chain variable domain of TCR clone 180061 (TRAV13-2, TRAJ8)
CTPWLGFQKLVF

SEQ ID NO: 360122 - protein, 16 aa, Homo sapiens
  CDR3 for beta chain variable domain of TCR clone 180061 (TRBV20-1, TRBJ1-4)
CSAPGQGLLTNEKLFF

SEQ ID NO: 360123 - protein, 16 aa, Homo sapiens
  CDR3 for alpha chain variable domain of TCR clone 180062 (TRAV16, TRAJ42)
CARKMNYGGSQGNRIF

SEQ ID NO: 360124 - protein, 14 aa, Homo sapiens
  CDR3 for beta chain variable domain of TCR clone 180062 (TRBV14, TRBJ2-3)
CQQPDDRDTDTQYF

SEQ ID NO: 360125 - protein, 14 aa, Homo sapiens
  CDR3 for alpha chain variable domain of TCR clone 180063 (TRAV1-2, TRAJ8)
CAVREDTGFQKLVF

SEQ ID NO: 360126 - protein, 16 aa, Homo sapiens
  CDR3 for beta chain variable domain of TCR clone 180063 (TRBV2, TRBJ1-4)
CASNLLQGATNEKLFF

SEQ ID NO: 360127 - protein, 12 aa, Homo sapiens
  CDR3 for alpha chain variable domain of TCR clone 180064 (TRAV35, TRAJ12)
GRRMDSSYKLIF

SEQ ID NO: 360128 - protein, 14 aa, Homo sapiens
  CDR3 for beta chain variable domain of TCR clone 180064 (TRBV19, TRBJ1-1)
CASSPNRGDTEAFF

SEQ ID NO: 360129 - protein, 10 aa, Homo sapiens
  CDR3 for alpha chain variable domain of TCR clone 180065 (TRAV13-1, TRAJ7)
VIGGNNRLAF

SEQ ID NO: 360130 - protein, 14 aa, Homo sapiens
  CDR3 for beta chain variable domain of TCR clone 180065 (TRBV16, TRBJ1-1)
CASSQAGPNTEAFF

SEQ ID NO: 360131 - protein, 15 aa, Homo sapiens
  CDR3 for alpha chain variable domain of TCR clone 180066 (TRAV8-2, TRAJ40)
CVVSDRGSGTYKYIF

SEQ ID NO: 360132 - protein, 16 aa, Homo sapiens
  CDR3 for beta chain variable domain of TCR clone 180066 (TRBV4-3, TRBJ2-1)
CASGPALDRGVNEQFF

SEQ ID NO: 360133 - protein, 12 aa, Homo sapiens
  CDR3 for alpha chain variable domain of TCR clone 180067 (TRAV12-3, TRAJ42)
CAPGGSQGNLIF

SEQ ID NO: 360134 - protein, 13 aa, Homo sapiens
  CDR3 for beta chain variable domain of TCR clone 180067 (TRBV5-7, TRBJ2-6)
CASTSSGANALTF

SEQ ID NO: 360135 - protein, 11 aa, Homo sapiens
  CDR3 for alpha chain variable domain of TCR clone 180068 (TRAV6, TRAJ39)
CAPDAGNMLTF

SEQ ID NO: 360136 - protein, 12 aa, Homo sapiens
  CDR3 for beta chain variable domain of TCR clone 180068 (TRBV11-2, TRBJ2-1)
CASSPGNNEQFF

SEQ ID NO: 360137 - protein, 12 aa, Homo sapiens
  CDR3 for alpha chain variable domain of TCR clone 180069 (TRAV12-3, TRAJ17)
CAMTLTGNKLTF

SEQ ID NO: 360138 - protein, 14 aa, Homo sapiens
  CDR3 for beta chain variable domain of TCR clone 180069 (TRBV28, TRBJ2-3)
CASSFVQGTDTQYF

SEQ ID NO: 360139 - protein, 13 aa, Homo sapiens
  CDR3 for alpha chain variable domain of TCR clone 180070 (TRAV12-1, TRAJ39)
CVVPQRAGNMLTF

SEQ ID NO: 360140 - protein, 15 aa, Homo sapiens
  CDR3 for beta chain variable domain of TCR clone 180070 (TRBV7-3, TRBJ2-1)
CASSSRSSGRNEQFF

SEQ ID NO: 360141 - protein, 12 aa, Homo sapiens
  CDR3 for alpha chain variable domain of TCR clone 180071 (TRAV13-2, TRAJ23)
CVERHRGGKLIF

SEQ ID NO: 360142 - protein, 16 aa, Homo sapiens
  CDR3 for beta chain variable domain of TCR clone 180071 (TRBV27, TRBJ2-2)
CASSLSGFWVTGELFF

SEQ ID NO: 360143 - protein, 14 aa, Homo sapiens
  CDR3 for alpha chain variable domain of TCR clone 180072 (TRAV13-1, TRAJ35)
CAASKGGFGNVLNC

SEQ ID NO: 360144 - protein, 13 aa, Homo sapiens
  CDR3 for beta chain variable domain of TCR clone 180072 (TRBV7-3, TRBJ1-1)
CASSQDWGAEALF

SEQ ID NO: 360145 - protein, 17 aa, Homo sapiens
  CDR3 for alpha chain variable domain of TCR clone 180073 (TRAV26-2, TRAJ42)
CILRDVGYGGSQGNLIF

SEQ ID NO: 360146 - protein, 19 aa, Homo sapiens
  CDR3 for beta chain variable domain of TCR clone 180073 (TRBV2, TRBJ2-7)
CASSDDETSGRANDYEQYF

SEQ ID NO: 360147 - protein, 18 aa, Homo sapiens
  CDR3 for alpha chain variable domain of TCR clone 180074 (TRAV21, TRAJ52)
CAVRPSPSGGTSYGKLTF

SEQ ID NO: 360148 - protein, 13 aa, Homo sapiens
  CDR3 for beta chain variable domain of TCR clone 180074 (TRBV4-2, TRBJ1-1)
CASSQAGNTEAFF

SEQ ID NO: 360149 - protein, 14 aa, Homo sapiens
  CDR3 for alpha chain variable domain of TCR clone 180075 (TRAV8-4, TRAJ13)
CAVTLSGGYQKVTF

SEQ ID NO: 360150 - protein, 15 aa, Homo sapiens
  CDR3 for beta chain variable domain of TCR clone 180075 (TRBV19, TRBJ2-2)
CQPISRTGATGELFF

SEQ ID NO: 360151 - protein, 15 aa, Homo sapiens
  CDR3 for alpha chain variable domain of TCR clone 180076 (TRAV13-1, TRAJ57)
CAASNTQGGSEKLVF

SEQ ID NO: 360152 - protein, 16 aa, Homo sapiens
  CDR3 for beta chain variable domain of TCR clone 180076 (TRBV19, TRBJ2-1)
CASSKVGPSSYNEQFF

SEQ ID NO: 360153 - protein, 15 aa, Homo sapiens
  CDR3 for alpha chain variable domain of TCR clone 180077 (TRAV12-3, TRAJ6)
CAMSATTGGSYRPTF

SEQ ID NO: 360154 - protein, 16 aa, Homo sapiens
  CDR3 for beta chain variable domain of TCR clone 180077 (TRBV20-1, TRBJ1-2)
CSASMGQGVANYGYTF

SEQ ID NO: 360155 - protein, 14 aa, Homo sapiens
  CDR3 for alpha chain variable domain of TCR clone 180078 (TRAV12-1, TRAJ23)
CVVMIYNQRGKLIF

SEQ ID NO: 360156 - protein, 23 aa, Homo sapiens
  CDR3 for beta chain variable domain of TCR clone 180078 (TRBV7-3, TRBJ1-6)
CASSLTSRDEASDPSAYNSPLHF

SEQ ID NO: 360157 - protein, 11 aa, Homo sapiens
  CDR3 for alpha chain variable domain of TCR clone 180079 (TRAV17, TRAJ9)
CGFTGGSKTIF

SEQ ID NO: 360158 - protein, 14 aa, Homo sapiens
  CDR3 for beta chain variable domain of TCR clone 180079 (TRBV7-9, TRBJ2-2)
CASSLVQDTGELFF

SEQ ID NO: 360159 - protein, 14 aa, Homo sapiens
  CDR3 for alpha chain variable domain of TCR clone 180080 (TRAV12-2, TRAJ40)
CSVKIPSGTYKYIF

SEQ ID NO: 360160 - protein, 13 aa, Homo sapiens
  CDR3 for beta chain variable domain of TCR clone 180080 (TRBV20-1, TRBJ1-3)
CSARVQGRDTIYC

SEQ ID NO: 360161 - protein, 13 aa, Homo sapiens
  CDR3 for alpha chain variable domain of TCR clone 180081 (TRAV22, TRAJ29)
CAVGGSGNTPLVI

SEQ ID NO: 360162 - protein, 13 aa, Homo sapiens
  CDR3 for beta chain variable domain of TCR clone 180081 (TRBV4-2, TRBJ1-1)
CASSQAGNTEAFF

SEQ ID NO: 360163 - protein, 14 aa, Homo sapiens
  CDR3 for alpha chain variable domain of TCR clone 180082 (TRAV17, TRAJ54)
CATDANQGAQQLVF

SEQ ID NO: 360164 - protein, 12 aa, Homo sapiens
  CDR3 for beta chain variable domain of TCR clone 180082 (TRBV7-9, TRBJ2-7)
CASSIKREEQYF

SEQ ID NO: 360165 - protein, 13 aa, Homo sapiens
  CDR3 for alpha chain variable domain of TCR clone 180083 (TRAV9-2, TRAJ53)
CALSGGSNYKLTF

SEQ ID NO: 360166 - protein, 17 aa, Homo sapiens
  CDR3 for beta chain variable domain of TCR clone 180083 (TRBV11-2, TRBJ2-1)
CASSLYPPGVEYNEQFL

SEQ ID NO: 360167 - protein, 13 aa, Homo sapiens
  CDR3 for alpha chain variable domain of TCR clone 180084 (TRAV17, TRAJ9)
CATDYTGGFKTIF

SEQ ID NO: 360168 - protein, 15 aa, Homo sapiens
  CDR3 for beta chain variable domain of TCR clone 180084 (TRBV27, TRBJ1-6)
CASSFDRGLGSPLHL

SEQ ID NO: 360169 - protein, 13 aa, Homo sapiens
  CDR3 for alpha chain variable domain of TCR clone 180085 (TRAV1-2, TRAJ9)
CAVLNTGGFKTIF

SEQ ID NO: 360170 - protein, 17 aa, Homo sapiens
  CDR3 for beta chain variable domain of TCR clone 180085 (TRBV13, TRBJ2-3)
CASSLSRVAGGRNTQDF

SEQ ID NO: 360171 - protein, 13 aa, Homo sapiens
  CDR3 for alpha chain variable domain of TCR clone 180086 (TRAV29/DV5, TRAJ31)
CAASRNNNARLMF

SEQ ID NO: 360172 - protein, 18 aa, Homo sapiens
  CDR3 for beta chain variable domain of TCR clone 180086 (TRBV11-2, TRBJ2-3)
CASSLGGASRGAPNTQYF

SEQ ID NO: 360173 - protein, 14 aa, Homo sapiens
  CDR3 for alpha chain variable domain of TCR clone 180087 (TRAV12-1, TRAJ30)
CVVNIGGRDDKSIF

SEQ ID NO: 360174 - protein, 13 aa, Homo sapiens
  CDR3 for beta chain variable domain of TCR clone 180087 (TRBV11-2, TRBJ2-5)
CASSSTGEETQYF

SEQ ID NO: 360175 - protein, 14 aa, Homo sapiens
  CDR3 for alpha chain variable domain of TCR clone 180088 (TRAV16, TRAJ39)
CALSKNNAGNMLTF

SEQ ID NO: 360176 - protein, 17 aa, Homo sapiens
  CDR3 for beta chain variable domain of TCR clone 180088 (TRBV23-1, TRBJ1-2)
CASSNTGGGLLWLLLRF

SEQ ID NO: 360177 - protein, 14 aa, Homo sapiens
  CDR3 for alpha chain variable domain of TCR clone 180089 (TRAV1-2, TRAJ16)
CAVNQFSDGQKLLF

SEQ ID NO: 360178 - protein, 15 aa, Homo sapiens
  CDR3 for beta chain variable domain of TCR clone 180089 (TRBV7-2, TRBJ2-1)
CASSSGLAGGNEQFF

SEQ ID NO: 360179 - protein, 17 aa, Homo sapiens
  CDR3 for alpha chain variable domain of TCR clone 180090 (TRAV4, )
CLVDIQNPDPAVYQLRD

SEQ ID NO: 360180 - protein, 14 aa, Homo sapiens
  CDR3 for beta chain variable domain of TCR clone 180090 (TRBV20-1, TRBJ1-5)
QSRVGRVVSQPQHF

SEQ ID NO: 360181 - protein, 11 aa, Homo sapiens
  CDR3 for alpha chain variable domain of TCR clone 180091 (TRAV29/DV5, TRAJ33)
CAGVSNYPLIW

SEQ ID NO: 360182 - protein, 16 aa, Homo sapiens
  CDR3 for beta chain variable domain of TCR clone 180091 (TRBV7-9, TRBJ2-3)
CASSPWREVGTDTQYF

SEQ ID NO: 360183 - protein, 16 aa, Homo sapiens
  CDR3 for alpha chain variable domain of TCR clone 180092 (TRAV8-3, TRAJ18)
CAVALDRGSTLGRLYF

SEQ ID NO: 360184 - protein, 14 aa, Homo sapiens
  CDR3 for beta chain variable domain of TCR clone 180092 (TRBV7-6, TRBJ2-3)
CASSVAGGTDTQYF

SEQ ID NO: 360185 - protein, 14 aa, Homo sapiens
  CDR3 for alpha chain variable domain of TCR clone 180093 (TRAV12-3, TRAJ22)
CAMSLFGSARQLTF

SEQ ID NO: 360186 - protein, 11 aa, Homo sapiens
  CDR3 for beta chain variable domain of TCR clone 180093 (TRBV12-4, TRBJ2-2)
CARSSAGELFF

SEQ ID NO: 360187 - protein, 17 aa, Homo sapiens
  CDR3 for alpha chain variable domain of TCR clone 180094 (TRAV13-1, TRAJ52)
CAASSGAGGTSYGKLTF

SEQ ID NO: 360188 - protein, 14 aa, Homo sapiens
  CDR3 for beta chain variable domain of TCR clone 180094 (TRBV6-5, TRBJ1-2)
CASSYDGTGGGYTF

SEQ ID NO: 360189 - protein, 18 aa, Homo sapiens
  CDR3 for alpha chain variable domain of TCR clone 180095 (TRAV13-1, TRAJ52)
CAAKNPNAGGTSYGKLTF

SEQ ID NO: 360190 - protein, 18 aa, Homo sapiens
  CDR3 for beta chain variable domain of TCR clone 180095 (TRBV4-1, TRBJ1-4)
CASSPRTGGAWTNEKLFF

SEQ ID NO: 360191 - protein, 14 aa, Homo sapiens
  CDR3 for alpha chain variable domain of TCR clone 180096 (TRAV8-1, TRAJ5)
CAVRTDTGRRALTF

SEQ ID NO: 360192 - protein, 12 aa, Homo sapiens
  CDR3 for beta chain variable domain of TCR clone 180096 (TRBV11-2, TRBJ2-1)
CASSPVNNEQFF

SEQ ID NO: 360193 - protein, 14 aa, Homo sapiens
  CDR3 for alpha chain variable domain of TCR clone 180097 (TRAV12-1, TRAJ30)
CVVNIGGRDDKIIF

SEQ ID NO: 360194 - protein, 15 aa, Homo sapiens
  CDR3 for beta chain variable domain of TCR clone 180097 (TRBV27, TRBJ2-1)
CASSNGGGSSNEQFF

SEQ ID NO: 360195 - protein, 15 aa, Homo sapiens
  CDR3 for alpha chain variable domain of TCR clone 180098 (TRAV23/DV6, TRAJ28)
CAAKRPGAGSYQLTF

SEQ ID NO: 360196 - protein, 12 aa, Homo sapiens
  CDR3 for beta chain variable domain of TCR clone 180098 (TRBV12-4, TRBJ2-5)
CQQFHFRETQYF

SEQ ID NO: 360197 - protein, 17 aa, Homo sapiens
  CDR3 for alpha chain variable domain of TCR clone 180099 (TRAV13-1, TRAJ52)
CAASSGAGGTSYGKLTF

SEQ ID NO: 360198 - protein, 11 aa, Homo sapiens
  CDR3 for beta chain variable domain of TCR clone 180099 (TRBV12-4, TRBJ2-3)
CASTATDTHYF

SEQ ID NO: 360199 - protein, 14 aa, Homo sapiens
  CDR3 for alpha chain variable domain of TCR clone 180100 (TRAV12-3, TRAJ41)
CAMSAGNSGYALNF

SEQ ID NO: 360200 - protein, 16 aa, Homo sapiens
  CDR3 for beta chain variable domain of TCR clone 180100 (TRBV4-1, TRBJ2-3)
CASSQSTSGAEDTQYF

SEQ ID NO: 360201 - protein, 11 aa, Homo sapiens
  CDR3 for alpha chain variable domain of TCR clone 180101 (TRAV12-1, TRAJ26)
CVVAYGQNFVF

SEQ ID NO: 360202 - protein, 15 aa, Homo sapiens
  CDR3 for beta chain variable domain of TCR clone 180101 (TRBV12-4, TRBJ2-5)
CASSGAGQAQETQYF

SEQ ID NO: 360203 - protein, 15 aa, Homo sapiens
  CDR3 for alpha chain variable domain of TCR clone 180102 (TRAV21, TRAJ53)
CATLNSGGSNYKLTF

SEQ ID NO: 360204 - protein, 13 aa, Homo sapiens
  CDR3 for beta chain variable domain of TCR clone 180102 (TRBV10-2, TRBJ2-3)
CASSESGDHTQYF

SEQ ID NO: 360205 - protein, 14 aa, Homo sapiens
  CDR3 for alpha chain variable domain of TCR clone 180103 (TRAV13-2, TRAJ43)
CAEIPTYNNNEMRF

SEQ ID NO: 360206 - protein, 17 aa, Homo sapiens
  CDR3 for beta chain variable domain of TCR clone 180103 (TRBV13, TRBJ2-3)
CASSLSRVAGGRNTQYF

SEQ ID NO: 360207 - protein, 13 aa, Homo sapiens
  CDR3 for alpha chain variable domain of TCR clone 180104 (TRAV13-2, TRAJ53)
CAENMGSNYKLTF

SEQ ID NO: 360208 - protein, 13 aa, Homo sapiens
  CDR3 for beta chain variable domain of TCR clone 180104 (TRBV4-1, TRBJ2-2)
CASSQGDTGELFF

SEQ ID NO: 360209 - protein, 12 aa, Homo sapiens
  CDR3 for alpha chain variable domain of TCR clone 180105 (TRAV21, TRAJ33)
CAKMDSNYQLIW

SEQ ID NO: 360210 - protein, 13 aa, Homo sapiens
  CDR3 for beta chain variable domain of TCR clone 180105 (TRBV10-2, TRBJ1-1)
CASNDQMNTEAFF

SEQ ID NO: 360211 - protein, 19 aa, Homo sapiens
  CDR3 for alpha chain variable domain of TCR clone 180106 (TRAV13-1, TRAJ52)
CAASPYQNADGTSYGKLTF

SEQ ID NO: 360212 - protein, 14 aa, Homo sapiens
  CDR3 for beta chain variable domain of TCR clone 180106 (TRBV19, TRBJ2-7)
CASTVQGRPYEQYF

SEQ ID NO: 360213 - protein, 20 aa, Homo sapiens
  CDR3 for alpha chain variable domain of TCR clone 180107 (TRAV1-2, TRAJ8)
CAVREDRLSETCIWNWHPTS

SEQ ID NO: 360214 - protein, 16 aa, Homo sapiens
  CDR3 for beta chain variable domain of TCR clone 180107 (TRBV12-4, TRBJ1-5)
CASSRPVGGSNQPQHF

SEQ ID NO: 360215 - protein, 17 aa, Homo sapiens
  CDR3 for alpha chain variable domain of TCR clone 180108 (TRAV3, TRAJ6)
CAVRDGPRVGGSYIPTF

SEQ ID NO: 360216 - protein, 12 aa, Homo sapiens
  CDR3 for beta chain variable domain of TCR clone 180108 (TRBV11-2, TRBJ2-2)
CPSSLGGGELFF

SEQ ID NO: 360217 - protein, 12 aa, Homo sapiens
  CDR3 for alpha chain variable domain of TCR clone 180109 (TRAV13-1, TRAJ27)
CAAHTNAGKSTF

SEQ ID NO: 360218 - protein, 15 aa, Homo sapiens
  CDR3 for beta chain variable domain of TCR clone 180109 (TRBV28, TRBJ2-5)
CASSSGRVIQETQYF

SEQ ID NO: 360219 - protein, 22 aa, Homo sapiens
  CDR3 for alpha chain variable domain of TCR clone 180110 (TRAV27, )
CAARRNAGNNHIQNPDPAVYQL

SEQ ID NO: 360220 - protein, 12 aa, Homo sapiens
  CDR3 for beta chain variable domain of TCR clone 180110 (TRBV11-2, TRBJ2-2)
CASSLGGGELFF

SEQ ID NO: 360221 - protein, 15 aa, Homo sapiens
  CDR3 for alpha chain variable domain of TCR clone 180111 (TRAV12-2, TRAJ53)
CAVNGGGGSNYKLTF

SEQ ID NO: 360222 - protein, 14 aa, Homo sapiens
  CDR3 for beta chain variable domain of TCR clone 180111 (TRBV19, TRBJ2-2)
CASSTLHRSGELFV

SEQ ID NO: 360223 - protein, 14 aa, Homo sapiens
  CDR3 for alpha chain variable domain of TCR clone 180112 (TRAV13-1, TRAJ35)
CAASKGGFGNVLHC

SEQ ID NO: 360224 - protein, 13 aa, Homo sapiens
  CDR3 for beta chain variable domain of TCR clone 180112 (TRBV7-3, TRBJ1-1)
CTSSQDWGAKAFF

SEQ ID NO: 360225 - protein, 14 aa, Homo sapiens
  CDR3 for alpha chain variable domain of TCR clone 180113 (TRAV35, TRAJ33)
CAGSSQDSNYQLIW

SEQ ID NO: 360226 - protein, 15 aa, Homo sapiens
  CDR3 for beta chain variable domain of TCR clone 180113 (TRBV4-1, TRBJ1-1)
CASSQEWGHYTEAFF

SEQ ID NO: 360227 - protein, 14 aa, Homo sapiens
  CDR3 for alpha chain variable domain of TCR clone 180114 (TRAV17, TRAJ15)
CATGPNQARTALIF

SEQ ID NO: 360228 - protein, 15 aa, Homo sapiens
  CDR3 for beta chain variable domain of TCR clone 180114 (TRBV11-2, TRBJ2-2)
CASSSDRVNAGELFF

SEQ ID NO: 360229 - protein, 12 aa, Homo sapiens
  CDR3 for alpha chain variable domain of TCR clone 180115 (TRAV26-1, TRAJ35)
CIGLSFGNVLHC

SEQ ID NO: 360230 - protein, 18 aa, Homo sapiens
  CDR3 for beta chain variable domain of TCR clone 180115 (TRBV7-9, TRBJ2-1)
CASSLAVSGTSGRNEQFF

SEQ ID NO: 360231 - protein, 13 aa, Homo sapiens
  CDR3 for alpha chain variable domain of TCR clone 180116 (TRAV21, TRAJ57)
CAVTQGGFEKLVF

SEQ ID NO: 360232 - protein, 16 aa, Homo sapiens
  CDR3 for beta chain variable domain of TCR clone 180116 (TRBV29-1, TRBJ2-7)
CSVEGAEDGTAYEQYF

SEQ ID NO: 360233 - protein, 14 aa, Homo sapiens
  CDR3 for alpha chain variable domain of TCR clone 180117 (TRAV38-1, TRAJ40)
CALRPTSGTYKYIF

SEQ ID NO: 360234 - protein, 19 aa, Homo sapiens
  CDR3 for beta chain variable domain of TCR clone 180117 (TRBV11-3, TRBJ2-2)
CASSTRPGAKTTNTGELFF

SEQ ID NO: 360235 - protein, 14 aa, Homo sapiens
  CDR3 for alpha chain variable domain of TCR clone 180118 (TRAV1-2, TRAJ16)
CAVNRFSDGQKLLF

SEQ ID NO: 360236 - protein, 15 aa, Homo sapiens
  CDR3 for beta chain variable domain of TCR clone 180118 (TRBV28, TRBJ2-7)
CASSLAGTGVHEQYF

SEQ ID NO: 360237 - protein, 15 aa, Homo sapiens
  CDR3 for alpha chain variable domain of TCR clone 180119 (TRAV21, TRAJ53)
CATLNSGGSNYKLTF

SEQ ID NO: 360238 - protein, 14 aa, Homo sapiens
  CDR3 for beta chain variable domain of TCR clone 180119 (TRBV7-2, TRBJ1-5)
CASSTQGAGQPQHF

SEQ ID NO: 360239 - protein, 17 aa, Homo sapiens
  CDR3 for alpha chain variable domain of TCR clone 180120 (TRAV4, TRAJ18)
CLVGERSVGSTVGRLYF

SEQ ID NO: 360240 - protein, 14 aa, Homo sapiens
  CDR3 for beta chain variable domain of TCR clone 180120 (TRBV6-5, TRBJ1-2)
CASSYDGTGGGYTF

SEQ ID NO: 360241 - protein, 14 aa, Homo sapiens
  CDR3 for alpha chain variable domain of TCR clone 180121 (TRAV8-4, TRAJ17)
CAVSDQAAGNKLTF

SEQ ID NO: 360242 - protein, 14 aa, Homo sapiens
  CDR3 for beta chain variable domain of TCR clone 180121 (TRBV7-2, TRBJ1-2)
CQQLSSGQGLGYTF

SEQ ID NO: 360243 - protein, 13 aa, Homo sapiens
  CDR3 for alpha chain variable domain of TCR clone 180122 (TRAV23/DV6, TRAJ17)
CAAAKAAGSKLTF

SEQ ID NO: 360244 - protein, 16 aa, Homo sapiens
  CDR3 for beta chain variable domain of TCR clone 180122 (TRBV5-1, TRBJ2-2)
CASSSRTGGRTGELFF

SEQ ID NO: 360245 - protein, 16 aa, Homo sapiens
  CDR3 for alpha chain variable domain of TCR clone 180123 (TRAV22, TRAJ45)
CAVERGKRGGADGLTF

SEQ ID NO: 360246 - protein, 13 aa, Homo sapiens
  CDR3 for beta chain variable domain of TCR clone 180123 (TRBV11-1, TRBJ1-1)
CASSLSIGAEAFF

SEQ ID NO: 360247 - protein, 14 aa, Homo sapiens
  CDR3 for alpha chain variable domain of TCR clone 180124 (TRAV12-2, TRAJ13)
CAVKKTGGYQKVTF

SEQ ID NO: 360248 - protein, 19 aa, Homo sapiens
  CDR3 for beta chain variable domain of TCR clone 180124 (TRBV25-1, TRBJ2-2)
CANLVYRVDRGRKTGELFF

SEQ ID NO: 360249 - protein, 14 aa, Homo sapiens
  CDR3 for alpha chain variable domain of TCR clone 180125 (TRAV9-2, TRAJ39)
CALYIYNAGNMLTF

SEQ ID NO: 360250 - protein, 17 aa, Homo sapiens
  CDR3 for beta chain variable domain of TCR clone 180125 (TRBV11-2, TRBJ2-1)
RASSLYPPGVEYDEQFF

SEQ ID NO: 360251 - protein, 16 aa, Homo sapiens
  CDR3 for alpha chain variable domain of TCR clone 180126 (TRAV21, TRAJ37)
CAVRTAGSSNTGKLIF

SEQ ID NO: 360252 - protein, 10 aa, Homo sapiens
  CDR3 for beta chain variable domain of TCR clone 180126 (TRBV7-9, TRBJ2-5)
PSSGRETQYF

SEQ ID NO: 360253 - protein, 14 aa, Homo sapiens
  CDR3 for alpha chain variable domain of TCR clone 180127 (TRAV35, TRAJ13)
CAGSPSGGYQKVTF

SEQ ID NO: 360254 - protein, 17 aa, Homo sapiens
  CDR3 for beta chain variable domain of TCR clone 180127 (TRBV18, TRBJ1-5)
CQLTACRVRQNNQPQHF

SEQ ID NO: 360255 - protein, 13 aa, Homo sapiens
  CDR3 for alpha chain variable domain of TCR clone 180128 (TRAV12-2, TRAJ10)
CAVPTGGGNKLTF

SEQ ID NO: 360256 - protein, 14 aa, Homo sapiens
  CDR3 for beta chain variable domain of TCR clone 180128 (TRBV25-1, TRBJ1-1)
CASTHLGGNTEAFS

SEQ ID NO: 360257 - protein, 23 aa, Homo sapiens
  CDR3 for alpha chain variable domain of TCR clone 180129 (TRAV26-1, TRAJ38)
CIADNAGNNQIQNPDPAVYQLRD

SEQ ID NO: 360258 - protein, 12 aa, Homo sapiens
  CDR3 for beta chain variable domain of TCR clone 180129 (TRBV11-2, TRBJ2-2)
CASSLGGGELFF

SEQ ID NO: 360259 - protein, 13 aa, Homo sapiens
  CDR3 for alpha chain variable domain of TCR clone 180130 (TRAV3, TRAJ27)
CAVRPLGAGKSTF

SEQ ID NO: 360260 - protein, 13 aa, Homo sapiens
  CDR3 for beta chain variable domain of TCR clone 180130 (TRBV7-9, TRBJ2-3)
CASRPGFTDTQYF

SEQ ID NO: 360261 - protein, 12 aa, Homo sapiens
  CDR3 for alpha chain variable domain of TCR clone 180131 (TRAV12-1, TRAJ31)
CVVNRNNARLMF

SEQ ID NO: 360262 - protein, 14 aa, Homo sapiens
  CDR3 for beta chain variable domain of TCR clone 180131 (TRBV20-1, TRBJ2-7)
CSAKRGRSSYEQYF

SEQ ID NO: 360263 - protein, 12 aa, Homo sapiens
  CDR3 for alpha chain variable domain of TCR clone 180132 (TRAV2, TRAJ33)
CAVPDSNYQLIL

SEQ ID NO: 360264 - protein, 15 aa, Homo sapiens
  CDR3 for beta chain variable domain of TCR clone 180132 (TRBV15, TRBJ1-5)
CATSRDPVSNQPQHF

SEQ ID NO: 360265 - protein, 11 aa, Homo sapiens
  CDR3 for alpha chain variable domain of TCR clone 180133 (TRAV2, TRAJ33)
CAVESNYQLIW

SEQ ID NO: 360266 - protein, 15 aa, Homo sapiens
  CDR3 for beta chain variable domain of TCR clone 180133 (TRBV19, TRBJ1-1)
CASTSGQNQNTEAFF

SEQ ID NO: 360267 - protein, 15 aa, Homo sapiens
  CDR3 for alpha chain variable domain of TCR clone 180134 (TRAV12-3, TRAJ6)
CAMSATTGGGYIPTF

SEQ ID NO: 360268 - protein, 16 aa, Homo sapiens
  CDR3 for beta chain variable domain of TCR clone 180134 (TRBV27, TRBJ2-5)
CASSFGPGGTKETQYF

SEQ ID NO: 360269 - protein, 16 aa, Homo sapiens
  CDR3 for alpha chain variable domain of TCR clone 180135 (TRAV17, TRAJ22)
CAPGPISSGSARQLTF

SEQ ID NO: 360270 - protein, 13 aa, Homo sapiens
  CDR3 for beta chain variable domain of TCR clone 180135 (TRBV11-2, TRBJ2-1)
CASSLGLAGGRFF

SEQ ID NO: 360271 - protein, 16 aa, Homo sapiens
  CDR3 for alpha chain variable domain of TCR clone 180136 (TRAV12-1, TRAJ48)
CVVNMVSNFGNEKLTF

SEQ ID NO: 360272 - protein, 17 aa, Homo sapiens
  CDR3 for beta chain variable domain of TCR clone 180136 (TRBV11-2, TRBJ2-6)
CQQLKSFSGHWANVLTF

SEQ ID NO: 360273 - protein, 13 aa, Homo sapiens
  CDR3 for alpha chain variable domain of TCR clone 180137 (TRAV26-1, )
CIVSHRVEGFWNQ

SEQ ID NO: 360274 - protein, 14 aa, Homo sapiens
  CDR3 for beta chain variable domain of TCR clone 180137 (TRBV20-1, TRBJ2-7)
CSAWTALSSYEQYV

SEQ ID NO: 360275 - protein, 14 aa, Homo sapiens
  CDR3 for alpha chain variable domain of TCR clone 180138 (TRAV1-2, TRAJ8)
CAVREDTGCQKLVF

SEQ ID NO: 360276 - protein, 15 aa, Homo sapiens
  CDR3 for beta chain variable domain of TCR clone 180138 (TRBV6-3, TRBJ2-7)
CASSSPGIVFYEQYF

SEQ ID NO: 360277 - protein, 16 aa, Homo sapiens
  CDR3 for alpha chain variable domain of TCR clone 180139 (TRAV8-3, TRAJ8)
CAVPRDGNTGFQKLVC

SEQ ID NO: 360278 - protein, 14 aa, Homo sapiens
  CDR3 for beta chain variable domain of TCR clone 180139 (TRBV28, TRBJ1-1)
CASSESGRGTEAFF

SEQ ID NO: 360279 - protein, 11 aa, Homo sapiens
  CDR3 for alpha chain variable domain of TCR clone 180140 (TRAV1-2, TRAJ31)
CAVNNNARLML

SEQ ID NO: 360280 - protein, 15 aa, Homo sapiens
  CDR3 for beta chain variable domain of TCR clone 180140 (TRBV9, TRBJ1-6)
CASSVAGTGDSPLHF

SEQ ID NO: 360281 - protein, 13 aa, Homo sapiens
  CDR3 for alpha chain variable domain of TCR clone 180141 (TRAV1-1, TRAJ9)
CAAKNTGGFKTIF

SEQ ID NO: 360282 - protein, 16 aa, Homo sapiens
  CDR3 for beta chain variable domain of TCR clone 180141 (TRBV12-4, TRBJ2-7)
CASSLIGGTGTYEQYF

SEQ ID NO: 360283 - protein, 14 aa, Homo sapiens
  CDR3 for alpha chain variable domain of TCR clone 180142 (TRAV3, TRAJ34)
CAVRDINNTDKLIF

SEQ ID NO: 360284 - protein, 15 aa, Homo sapiens
  CDR3 for beta chain variable domain of TCR clone 180142 (TRBV20-1, TRBJ2-7)
CSARDRFSGMDEQYF

SEQ ID NO: 360285 - protein, 13 aa, Homo sapiens
  CDR3 for alpha chain variable domain of TCR clone 180143 (TRAV2, TRAJ40)
CALVTSGTYKYIF

SEQ ID NO: 360286 - protein, 14 aa, Homo sapiens
  CDR3 for beta chain variable domain of TCR clone 180143 (TRBV19, TRBJ2-3)
CASSAPRGTDTQYF

SEQ ID NO: 360287 - protein, 14 aa, Homo sapiens
  CDR3 for alpha chain variable domain of TCR clone 180144 (TRAV23/DV6, TRAJ53)
CAARSGGSNYKLTF

SEQ ID NO: 360288 - protein, 15 aa, Homo sapiens
  CDR3 for beta chain variable domain of TCR clone 180144 (TRBV5-4, TRBJ2-7)
CASSLEWGPSYEQYF

SEQ ID NO: 360289 - protein, 12 aa, Homo sapiens
  CDR3 for alpha chain variable domain of TCR clone 180145 (TRAV8-3, TRAJ26)
CAGDNYGQNFVF

SEQ ID NO: 360290 - protein, 18 aa, Homo sapiens
  CDR3 for beta chain variable domain of TCR clone 180145 (TRBV7-2, TRBJ2-3)
CASSLETSRGRKADTQYF

SEQ ID NO: 360291 - protein, 11 aa, Homo sapiens
  CDR3 for alpha chain variable domain of TCR clone 180146 (TRAV12-3, TRAJ43)
CAMSVSNDMRF

SEQ ID NO: 360292 - protein, 13 aa, Homo sapiens
  CDR3 for beta chain variable domain of TCR clone 180146 (TRBV20-1, TRBJ1-1)
CSASLGGGTEDFF

SEQ ID NO: 360293 - protein, 15 aa, Homo sapiens
  CDR3 for alpha chain variable domain of TCR clone 180147 (TRAV3, TRAJ29)
CAVREFNSGNTPLVF

SEQ ID NO: 360294 - protein, 17 aa, Homo sapiens
  CDR3 for beta chain variable domain of TCR clone 180147 (TRBV11-2, TRBJ2-1)
CASSLYPPGVEYNEQFF

SEQ ID NO: 360295 - protein, 15 aa, Homo sapiens
  CDR3 for alpha chain variable domain of TCR clone 180148 (TRAV4, TRAJ10)
CLVGDGSGGGNKLTC

SEQ ID NO: 360296 - protein, 15 aa, Homo sapiens
  CDR3 for beta chain variable domain of TCR clone 180148 (TRBV27, TRBJ2-3)
CASSSLAGVIDTQYF

SEQ ID NO: 360297 - protein, 15 aa, Homo sapiens
  CDR3 for alpha chain variable domain of TCR clone 180149 (TRAV17, TRAJ42)
CATDHYGGSQGNLIF

SEQ ID NO: 360298 - protein, 15 aa, Homo sapiens
  CDR3 for beta chain variable domain of TCR clone 180149 (TRBV5-1, TRBJ2-2)
CASSSQGGNTGELFC

SEQ ID NO: 360299 - protein, 13 aa, Homo sapiens
  CDR3 for alpha chain variable domain of TCR clone 180150 (TRAV3, TRAJ15)
CAVRDQAGTALIF

SEQ ID NO: 360300 - protein, 15 aa, Homo sapiens
  CDR3 for beta chain variable domain of TCR clone 180150 (TRBV11-1, TRBJ2-7)
CASILNYGASYEQYF

SEQ ID NO: 360301 - protein, 14 aa, Homo sapiens
  CDR3 for alpha chain variable domain of TCR clone 180151 (TRAV26-1, TRAJ39)
CIVRGSRAGNMLTF

SEQ ID NO: 360302 - protein, 17 aa, Homo sapiens
  CDR3 for beta chain variable domain of TCR clone 180151 (TRBV7-2, TRBJ1-4)
CASSFKAGPTTNEKLFF

SEQ ID NO: 360303 - protein, 13 aa, Homo sapiens
  CDR3 for alpha chain variable domain of TCR clone 180152 (TRAV27, TRAJ6)
CAGGTRGSYIPTF

SEQ ID NO: 360304 - protein, 13 aa, Homo sapiens
  CDR3 for beta chain variable domain of TCR clone 180152 (TRBV4-1, TRBJ2-2)
CASSQENTGKLFF

SEQ ID NO: 360305 - protein, 14 aa, Homo sapiens
  CDR3 for alpha chain variable domain of TCR clone 180153 (TRAV12-2, TRAJ53)
CAVKGGGSNYKLTF

SEQ ID NO: 360306 - protein, 14 aa, Homo sapiens
  CDR3 for beta chain variable domain of TCR clone 180153 (TRBV7-7, TRBJ2-2)
CATRQDSDTVELFF

SEQ ID NO: 360307 - protein, 11 aa, Homo sapiens
  CDR3 for alpha chain variable domain of TCR clone 180154 (TRAV12-2, TRAJ31)
CAVTRWARIMF

SEQ ID NO: 360308 - protein, 15 aa, Homo sapiens
  CDR3 for beta chain variable domain of TCR clone 180154 (TRBV19, TRBJ2-7)
CASSIGGGLVNEQYF

SEQ ID NO: 360309 - protein, 17 aa, Homo sapiens
  CDR3 for alpha chain variable domain of TCR clone 180155 (TRAV8-6, TRAJ58)
CAVSSWVGETSGSRLTF

SEQ ID NO: 360310 - protein, 14 aa, Homo sapiens
  CDR3 for beta chain variable domain of TCR clone 180155 (TRBV28, TRBJ1-5)
CASTLGPHNQPQHF

SEQ ID NO: 360311 - protein, 12 aa, Homo sapiens
  CDR3 for alpha chain variable domain of TCR clone 180156 (TRAV17, TRAJ21)
CALRYNFTKFYF

SEQ ID NO: 360312 - protein, 13 aa, Homo sapiens
  CDR3 for beta chain variable domain of TCR clone 180156 (TRBV24-1, TRBJ2-5)
CATSTGGTETQYF

SEQ ID NO: 360313 - protein, 17 aa, Homo sapiens
  CDR3 for alpha chain variable domain of TCR clone 180157 (TRAV3, TRAJ6)
FAVRDGPRAGGSYIPTF

SEQ ID NO: 360314 - protein, 14 aa, Homo sapiens
  CDR3 for beta chain variable domain of TCR clone 180157 (TRBV6-1, TRBJ1-3)
CASVQGGGGNTIYF

SEQ ID NO: 360315 - protein, 10 aa, Homo sapiens
  CDR3 for alpha chain variable domain of TCR clone 180158 (TRAV3, TRAJ30)
CAVREIEIIF

SEQ ID NO: 360316 - protein, 14 aa, Homo sapiens
  CDR3 for beta chain variable domain of TCR clone 180158 (TRBV15, TRBJ2-3)
CATRSGTSRDTQYF

SEQ ID NO: 360317 - protein, 20 aa, Homo sapiens
  CDR3 for alpha chain variable domain of TCR clone 180159 (TRAV17, TRAJ40)
ITASRAADTASYFCASKYIF

SEQ ID NO: 360318 - protein, 17 aa, Homo sapiens
  CDR3 for beta chain variable domain of TCR clone 180159 (TRBV11-2, TRBJ2-4)
CASSFLALGGAGDIQYF

SEQ ID NO: 360319 - protein, 14 aa, Homo sapiens
  CDR3 for alpha chain variable domain of TCR clone 180160 (TRAV3, TRAJ9)
CAVRLNTGGFKTIF

SEQ ID NO: 360320 - protein, 14 aa, Homo sapiens
  CDR3 for beta chain variable domain of TCR clone 180160 (TRBV5-1, TRBJ2-7)
CASSRGESLYEQYF

SEQ ID NO: 360321 - protein, 14 aa, Homo sapiens
  CDR3 for alpha chain variable domain of TCR clone 180161 (TRAV8-4, TRAJ13)
CAVTLSGGYQKVTF

SEQ ID NO: 360322 - protein, 19 aa, Homo sapiens
  CDR3 for beta chain variable domain of TCR clone 180161 (TRBV7-9, TRBJ2-2)
CASRDKLAGGPSDTGELFF

SEQ ID NO: 360323 - protein, 13 aa, Homo sapiens
  CDR3 for alpha chain variable domain of TCR clone 180162 (TRAV20, TRAJ49)
CAVQARTGNEFYF

SEQ ID NO: 360324 - protein, 14 aa, Homo sapiens
  CDR3 for beta chain variable domain of TCR clone 180162 (TRBV7-2, TRBJ2-7)
CASSPKTSFYEQYF

SEQ ID NO: 360325 - protein, 14 aa, Homo sapiens
  CDR3 for alpha chain variable domain of TCR clone 180163 (TRAV12-2, TRAJ45)
CALPERGGADGLTF

SEQ ID NO: 360326 - protein, 16 aa, Homo sapiens
  CDR3 for beta chain variable domain of TCR clone 180163 (TRBV4-1, TRBJ2-5)
CASSHADRAGGETQYF

SEQ ID NO: 360327 - protein, 16 aa, Homo sapiens
  CDR3 for alpha chain variable domain of TCR clone 180164 (TRAV20, TRAJ22)
CAVQASSSGSARQLTF

SEQ ID NO: 360328 - protein, 13 aa, Homo sapiens
  CDR3 for beta chain variable domain of TCR clone 180164 (TRBV7-2, TRBJ2-5)
SASSQTSVETQYF

SEQ ID NO: 360329 - protein, 14 aa, Homo sapiens
  CDR3 for alpha chain variable domain of TCR clone 180165 (TRAV1-2, TRAJ8)
CAVREDTGFQKLVF

SEQ ID NO: 360330 - protein, 13 aa, Homo sapiens
  CDR3 for beta chain variable domain of TCR clone 180165 (TRBV14, TRBJ1-2)
CASSEDGRYGYTF

SEQ ID NO: 360331 - protein, 13 aa, Homo sapiens
  CDR3 for alpha chain variable domain of TCR clone 180166 (TRAV26-2, TRAJ43)
CILRAVNNNDMRF

SEQ ID NO: 360332 - protein, 14 aa, Homo sapiens
  CDR3 for beta chain variable domain of TCR clone 180166 (TRBV20-1, TRBJ1-1)
CSAQTRIGGTEAFV

SEQ ID NO: 360333 - protein, 13 aa, Homo sapiens
  CDR3 for alpha chain variable domain of TCR clone 180167 (TRAV21, TRAJ27)
CAARPGNAGKSTF

SEQ ID NO: 360334 - protein, 15 aa, Homo sapiens
  CDR3 for beta chain variable domain of TCR clone 180167 (TRBV7-2, TRBJ2-1)
CASSSRTSREDEQFF

SEQ ID NO: 360335 - protein, 11 aa, Homo sapiens
  CDR3 for alpha chain variable domain of TCR clone 180168 (TRAV2, TRAJ33)
CAVESNYQLIW

SEQ ID NO: 360336 - protein, 15 aa, Homo sapiens
  CDR3 for beta chain variable domain of TCR clone 180168 (TRBV5-1, TRBJ2-1)
CASSPPRAPYNEQFF

SEQ ID NO: 360337 - protein, 14 aa, Homo sapiens
  CDR3 for alpha chain variable domain of TCR clone 180169 (TRAV10, TRAJ32)
CGEPRGGAINKLIF

SEQ ID NO: 360338 - protein, 14 aa, Homo sapiens
  CDR3 for beta chain variable domain of TCR clone 180169 (TRBV5-4, TRBJ2-2)
CASRLDGGTGKLFF

SEQ ID NO: 360339 - protein, 15 aa, Homo sapiens
  CDR3 for alpha chain variable domain of TCR clone 180170 (TRAV1-2, TRAJ30)
YAVRPHGNRDDKIIF

SEQ ID NO: 360340 - protein, 13 aa, Homo sapiens
  CDR3 for beta chain variable domain of TCR clone 180170 (TRBV4-1, TRBJ2-7)
CASSQGQAYEQYF

SEQ ID NO: 360341 - protein, 12 aa, Homo sapiens
  CDR3 for alpha chain variable domain of TCR clone 180171 (TRAV12-1, TRAJ40)
CVVYSGTYKYIF

SEQ ID NO: 360342 - protein, 14 aa, Homo sapiens
  CDR3 for beta chain variable domain of TCR clone 180171 (TRBV3-1, TRBJ2-7)
CASSPSSGTYEQYF

SEQ ID NO: 360343 - protein, 10 aa, Homo sapiens
  CDR3 for alpha chain variable domain of TCR clone 180172 (TRAV5, TRAJ34)
CAEDTDKLIF

SEQ ID NO: 360344 - protein, 13 aa, Homo sapiens
  CDR3 for beta chain variable domain of TCR clone 180172 (TRBV7-9, TRBJ2-1)
CASSLDVGNEQFF

SEQ ID NO: 360345 - protein, 14 aa, Homo sapiens
  CDR3 for alpha chain variable domain of TCR clone 180173 (TRAV13-1, TRAJ45)
CSAIGGGGADGLTF

SEQ ID NO: 360346 - protein, 14 aa, Homo sapiens
  CDR3 for beta chain variable domain of TCR clone 180173 (TRBV7-2, TRBJ1-1)
CASSFLTGTTEAFF

SEQ ID NO: 360347 - protein, 18 aa, Homo sapiens
  CDR3 for alpha chain variable domain of TCR clone 180174 (TRAV17, TRAJ45)
CATSLDLYSGGGADGLTF

SEQ ID NO: 360348 - protein, 15 aa, Homo sapiens
  CDR3 for beta chain variable domain of TCR clone 180174 (TRBV11-2, TRBJ2-1)
CASSKNRGLIYQQFF

SEQ ID NO: 360349 - protein, 12 aa, Homo sapiens
  CDR3 for alpha chain variable domain of TCR clone 180175 (TRAV21, TRAJ33)
CAKIDSNYQLIW

SEQ ID NO: 360350 - protein, 14 aa, Homo sapiens
  CDR3 for beta chain variable domain of TCR clone 180175 (TRBV2, TRBJ2-7)
CASSRTAGGYEQYF

SEQ ID NO: 360351 - protein, 12 aa, Homo sapiens
  CDR3 for alpha chain variable domain of TCR clone 180176 (TRAV12-1, TRAJ31)
CVSWNNNARLMF

SEQ ID NO: 360352 - protein, 16 aa, Homo sapiens
  CDR3 for beta chain variable domain of TCR clone 180176 (TRBV12-5, TRBJ2-5)
CASGPRTSGNQETQYF

SEQ ID NO: 360353 - protein, 17 aa, Homo sapiens
  CDR3 for alpha chain variable domain of TCR clone 180177 (TRAV3, TRAJ12)
CAVRDGGRMDSSYKLIF

SEQ ID NO: 360354 - protein, 18 aa, Homo sapiens
  CDR3 for beta chain variable domain of TCR clone 180177 (TRBV7-9, TRBJ2-7)
CASSLTTSGSRTWYEQYF

SEQ ID NO: 360355 - protein, 13 aa, Homo sapiens
  CDR3 for alpha chain variable domain of TCR clone 180178 (TRAV13-2, TRAJ13)
CAERPGCYQKVTF

SEQ ID NO: 360356 - protein, 13 aa, Homo sapiens
  CDR3 for beta chain variable domain of TCR clone 180178 (TRBV28, TRBJ1-2)
CAGRDRGNYGYTF

SEQ ID NO: 360357 - protein, 11 aa, Homo sapiens
  CDR3 for alpha chain variable domain of TCR clone 180179 (TRAV2, TRAJ33)
CAVESNYQLIW

SEQ ID NO: 360358 - protein, 13 aa, Homo sapiens
  CDR3 for beta chain variable domain of TCR clone 180179 (TRBV7-7, TRBJ2-5)
CASSRSGQETQYF

SEQ ID NO: 360359 - protein, 15 aa, Homo sapiens
  CDR3 for alpha chain variable domain of TCR clone 180180 (TRAV14/DV4, TRAJ12)
CAMREERDSSYKLIF

SEQ ID NO: 360360 - protein, 16 aa, Homo sapiens
  CDR3 for beta chain variable domain of TCR clone 180180 (TRBV11-2, TRBJ1-2)
CASSLDRGGTNYGYTF

SEQ ID NO: 360361 - protein, 13 aa, Homo sapiens
  CDR3 for alpha chain variable domain of TCR clone 180181 (TRAV27, TRAJ49)
CAPRPYTGTQFCF

SEQ ID NO: 360362 - protein, 16 aa, Homo sapiens
  CDR3 for beta chain variable domain of TCR clone 180181 (TRBV4-1, TRBJ1-2)
CASSQDAGQVLYGYTL

SEQ ID NO: 360363 - protein, 11 aa, Homo sapiens
  CDR3 for alpha chain variable domain of TCR clone 180182 (TRAV12-3, TRAJ43)
CAMSVSNDMRL

SEQ ID NO: 360364 - protein, 15 aa, Homo sapiens
  CDR3 for beta chain variable domain of TCR clone 180182 (TRBV20-1, TRBJ2-7)
CSARDRVSGMDEQYF

SEQ ID NO: 360365 - protein, 16 aa, Homo sapiens
  CDR3 for alpha chain variable domain of TCR clone 180183 (TRAV30, TRAJ24)
YGTEIVDADSWGKFQF

SEQ ID NO: 360366 - protein, 16 aa, Homo sapiens
  CDR3 for beta chain variable domain of TCR clone 180183 (TRBV2, TRBJ1-3)
CASSGGAGRSGNTIYF

SEQ ID NO: 360367 - protein, 17 aa, Homo sapiens
  CDR3 for alpha chain variable domain of TCR clone 180184 (TRAV3, TRAJ6)
CAVSRRSDTGGSYIPTF

SEQ ID NO: 360368 - protein, 18 aa, Homo sapiens
  CDR3 for beta chain variable domain of TCR clone 180184 (TRBV7-2, TRBJ2-3)
CASSLETSRGRKADTQYF

SEQ ID NO: 360369 - protein, 14 aa, Homo sapiens
  CDR3 for alpha chain variable domain of TCR clone 180185 (TRAV38-2/DV8, TRAJ47)
CSYRTLEYGNKLVF

SEQ ID NO: 360370 - protein, 16 aa, Homo sapiens
  CDR3 for beta chain variable domain of TCR clone 180185 (TRBV15, TRBJ2-7)
CATSRDGGIPSYEQYF

SEQ ID NO: 360371 - protein, 14 aa, Homo sapiens
  CDR3 for alpha chain variable domain of TCR clone 180186 (TRAV23/DV6, TRAJ27)
CAASRDTNAGKSTF

SEQ ID NO: 360372 - protein, 14 aa, Homo sapiens
  CDR3 for beta chain variable domain of TCR clone 180186 (TRBV7-6, TRBJ2-3)
CASSLGTVTDTQYF

SEQ ID NO: 360373 - protein, 16 aa, Homo sapiens
  CDR3 for alpha chain variable domain of TCR clone 180187 (TRAV3, TRAJ37)
CAVRVRGSGNTGKLIF

SEQ ID NO: 360374 - protein, 15 aa, Homo sapiens
  CDR3 for beta chain variable domain of TCR clone 180187 (TRBV3-1, TRBJ2-1)
CSSSPRDSGFNEQFF

SEQ ID NO: 360375 - protein, 13 aa, Homo sapiens
  CDR3 for alpha chain variable domain of TCR clone 180188 (TRAV8-4, TRAJ10)
CAAFTGGGNKLTF

SEQ ID NO: 360376 - protein, 15 aa, Homo sapiens
  CDR3 for beta chain variable domain of TCR clone 180188 (TRBV2, TRBJ2-7)
CASSEGLARSYEQYF

SEQ ID NO: 360377 - protein, 16 aa, Homo sapiens
  CDR3 for alpha chain variable domain of TCR clone 180189 (TRAV27, TRAJ48)
TAAQPGDTGLYLPLTF

SEQ ID NO: 360378 - protein, 14 aa, Homo sapiens
  CDR3 for beta chain variable domain of TCR clone 180189 (TRBV7-9, TRBJ2-4)
CASSLAMGGNIQYF

SEQ ID NO: 360379 - protein, 14 aa, Homo sapiens
  CDR3 for alpha chain variable domain of TCR clone 180190 (TRAV1-2, TRAJ8)
CAVREDTGLQKLVF

SEQ ID NO: 360380 - protein, 14 aa, Homo sapiens
  CDR3 for beta chain variable domain of TCR clone 180190 (TRBV12-4, TRBJ1-1)
CASSLGTGGTEAFF

SEQ ID NO: 360381 - protein, 11 aa, Homo sapiens
  CDR3 for alpha chain variable domain of TCR clone 180191 (TRAV27, TRAJ47)
SIVEYGNKLVF

SEQ ID NO: 360382 - protein, 18 aa, Homo sapiens
  CDR3 for beta chain variable domain of TCR clone 180191 (TRBV2, TRBJ2-1)
CASRGLAGGPRTYNEQLF

SEQ ID NO: 360383 - protein, 11 aa, Homo sapiens
  CDR3 for alpha chain variable domain of TCR clone 180192 (TRAV13-1, TRAJ6)
CAEGGSYIPTF

SEQ ID NO: 360384 - protein, 13 aa, Homo sapiens
  CDR3 for beta chain variable domain of TCR clone 180192 (TRBV15, TRBJ1-6)
CATSGGLNSPLHV

SEQ ID NO: 360385 - protein, 13 aa, Homo sapiens
  CDR3 for alpha chain variable domain of TCR clone 180193 (TRAV20, TRAJ31)
CAVQAIGGARLMF

SEQ ID NO: 360386 - protein, 14 aa, Homo sapiens
  CDR3 for beta chain variable domain of TCR clone 180193 (TRBV2, TRBJ1-5)
CASSGTVCNQPQHF

SEQ ID NO: 360387 - protein, 13 aa, Homo sapiens
  CDR3 for alpha chain variable domain of TCR clone 180194 (TRAV21, TRAJ27)
CAARPGNAGKSTF

SEQ ID NO: 360388 - protein, 15 aa, Homo sapiens
  CDR3 for beta chain variable domain of TCR clone 180194 (TRBV9, TRBJ1-6)
CASSVAGTGDSTLHF

SEQ ID NO: 360389 - protein, 14 aa, Homo sapiens
  CDR3 for alpha chain variable domain of TCR clone 180195 (TRAV4, TRAJ6)
CLVGEAGGSYIPTF

SEQ ID NO: 360390 - protein, 16 aa, Homo sapiens
  CDR3 for beta chain variable domain of TCR clone 180195 (TRBV7-6, TRBJ2-1)
CASSLNGGPSYNEQFF

SEQ ID NO: 360391 - protein, 14 aa, Homo sapiens
  CDR3 for alpha chain variable domain of TCR clone 180196 (TRAV6, TRAJ6)
CALPTSGGSYIPTF

SEQ ID NO: 360392 - protein, 15 aa, Homo sapiens
  CDR3 for beta chain variable domain of TCR clone 180196 (TRBV7-2, TRBJ2-3)
CASSLAGAFIDTQYF

SEQ ID NO: 360393 - protein, 14 aa, Homo sapiens
  CDR3 for alpha chain variable domain of TCR clone 180197 (TRAV3, TRAJ7)
CDVREEEREQQTRF

SEQ ID NO: 360394 - protein, 14 aa, Homo sapiens
  CDR3 for beta chain variable domain of TCR clone 180197 (TRBV7-7, TRBJ2-2)
CASSTRASGGELFF

SEQ ID NO: 360395 - protein, 14 aa, Homo sapiens
  CDR3 for alpha chain variable domain of TCR clone 180198 (TRAV13-2, TRAJ43)
CAEIPTYNSNDMRF

SEQ ID NO: 360396 - protein, 15 aa, Homo sapiens
  CDR3 for beta chain variable domain of TCR clone 180198 (TRBV7-9, TRBJ2-2)
CVSGPLDTFPGELFF

SEQ ID NO: 360397 - protein, 14 aa, Homo sapiens
  CDR3 for alpha chain variable domain of TCR clone 180199 (TRAV26-1, TRAJ34)
CIVRESYNTDKLIF

SEQ ID NO: 360398 - protein, 13 aa, Homo sapiens
  CDR3 for beta chain variable domain of TCR clone 180199 (TRBV5-5, TRBJ1-2)
CASSFWRGEDYTF

SEQ ID NO: 360399 - protein, 18 aa, Homo sapiens
  CDR3 for alpha chain variable domain of TCR clone 180200 (TRAV12-2, TRAJ20)
CAVEDIQNPDPAVYQLRD

SEQ ID NO: 360400 - protein, 16 aa, Homo sapiens
  CDR3 for beta chain variable domain of TCR clone 180200 (TRBV6-1, TRBJ1-2)
CASSGAWQGRSHGYTF

SEQ ID NO: 360401 - protein, 12 aa, Homo sapiens
  CDR3 for alpha chain variable domain of TCR clone 180201 (TRAV35, TRAJ39)
LAPNNAGNMLTF

SEQ ID NO: 360402 - protein, 15 aa, Homo sapiens
  CDR3 for beta chain variable domain of TCR clone 180201 (TRBV19, TRBJ2-1)
CASSSPGVPLDEQFF

SEQ ID NO: 360403 - protein, 14 aa, Homo sapiens
  CDR3 for alpha chain variable domain of TCR clone 180202 (TRAV12-3, TRAJ10)
SHLPLTGGGNKLTF

SEQ ID NO: 360404 - protein, 14 aa, Homo sapiens
  CDR3 for beta chain variable domain of TCR clone 180202 (TRBV7-2, TRBJ2-5)
CASSLAGGGETQYF

SEQ ID NO: 360405 - protein, 14 aa, Homo sapiens
  CDR3 for alpha chain variable domain of TCR clone 180203 (TRAV38-2/DV8, TRAJ40)
WAYRRISGTYKYIF

SEQ ID NO: 360406 - protein, 15 aa, Homo sapiens
  CDR3 for beta chain variable domain of TCR clone 180203 (TRBV12-4, TRBJ2-5)
CASSPPTGLQETQYF

SEQ ID NO: 360407 - protein, 15 aa, Homo sapiens
  CDR3 for alpha chain variable domain of TCR clone 180204 (TRAV17, TRAJ40)
CATVSSTSGTYKYIF

SEQ ID NO: 360408 - protein, 12 aa, Homo sapiens
  CDR3 for beta chain variable domain of TCR clone 180204 (TRBV6-1, TRBJ2-1)
CATQKGGGHLFF

SEQ ID NO: 360409 - protein, 16 aa, Homo sapiens
  CDR3 for alpha chain variable domain of TCR clone 180205 (TRAV3, TRAJ3)
CAVRDRAKSSASKIIF

SEQ ID NO: 360410 - protein, 16 aa, Homo sapiens
  CDR3 for beta chain variable domain of TCR clone 180205 (TRBV20-1, TRBJ2-4)
CSATSLAELAKNIQHF

SEQ ID NO: 360411 - protein, 11 aa, Homo sapiens
  CDR3 for alpha chain variable domain of TCR clone 180206 (TRAV17, TRAJ9)
CATTGGFKPIF

SEQ ID NO: 360412 - protein, 15 aa, Homo sapiens
  CDR3 for beta chain variable domain of TCR clone 180206 (TRBV9, TRBJ1-6)
CASSVAGTGDSPLHF

SEQ ID NO: 360413 - protein, 16 aa, Homo sapiens
  CDR3 for alpha chain variable domain of TCR clone 180207 (TRAV30, TRAJ42)
CGTEKNYGGSQGNLIF

SEQ ID NO: 360414 - protein, 14 aa, Homo sapiens
  CDR3 for beta chain variable domain of TCR clone 180207 (TRBV11-3, TRBJ2-7)
CASSPDRNTYEQYF

SEQ ID NO: 360415 - protein, 13 aa, Homo sapiens
  CDR3 for alpha chain variable domain of TCR clone 180208 (TRAV8-4, TRAJ30)
CAVSVNRDDKILF

SEQ ID NO: 360416 - protein, 13 aa, Homo sapiens
  CDR3 for beta chain variable domain of TCR clone 180208 (TRBV3-1, TRBJ2-2)
CASLARGSGELFF

SEQ ID NO: 360417 - protein, 16 aa, Homo sapiens
  CDR3 for alpha chain variable domain of TCR clone 180209 (TRAV1-2, TRAJ10)
CAVRGVLTGGGNKLTF

SEQ ID NO: 360418 - protein, 15 aa, Homo sapiens
  CDR3 for beta chain variable domain of TCR clone 180209 (TRBV7-2, TRBJ1-2)
CASSLAPDRGLGYTF

SEQ ID NO: 360419 - protein, 13 aa, Homo sapiens
  CDR3 for alpha chain variable domain of TCR clone 180210 (TRAV13-2, TRAJ13)
RAERPGGYQKVTF

SEQ ID NO: 360420 - protein, 15 aa, Homo sapiens
  CDR3 for beta chain variable domain of TCR clone 180210 (TRBV11-3, TRBJ2-7)
CASSPGPASSYEQYF

SEQ ID NO: 360421 - protein, 14 aa, Homo sapiens
  CDR3 for alpha chain variable domain of TCR clone 180211 (TRAV26-1, TRAJ29)
CIVRVEPGNTPLVF

SEQ ID NO: 360422 - protein, 13 aa, Homo sapiens
  CDR3 for beta chain variable domain of TCR clone 180211 (TRBV19, TRBJ2-2)
CASSIWSTGELFF

SEQ ID NO: 360423 - protein, 12 aa, Homo sapiens
  CDR3 for alpha chain variable domain of TCR clone 180212 (TRAV20, TRAJ20)
CAVRFNDYKLSF

SEQ ID NO: 360424 - protein, 15 aa, Homo sapiens
  CDR3 for beta chain variable domain of TCR clone 180212 (TRBV28, TRBJ2-1)
CASSGLAEVDNEQFF

SEQ ID NO: 360425 - protein, 11 aa, Homo sapiens
  CDR3 for alpha chain variable domain of TCR clone 180213 (TRAV35, TRAJ34)
CWARNTDKLIF

SEQ ID NO: 360426 - protein, 16 aa, Homo sapiens
  CDR3 for beta chain variable domain of TCR clone 180213 (TRBV5-7, TRBJ2-7)
CASSSPGGRTPYEQYF

SEQ ID NO: 360427 - protein, 14 aa, Homo sapiens
  CDR3 for alpha chain variable domain of TCR clone 180214 (TRAV6, TRAJ39)
CALPNNNAGNMLTF

SEQ ID NO: 360428 - protein, 13 aa, Homo sapiens
  CDR3 for beta chain variable domain of TCR clone 180214 (TRBV11-2, TRBJ2-5)
CASSRGPSETQYF

SEQ ID NO: 360429 - protein, 17 aa, Homo sapiens
  CDR3 for alpha chain variable domain of TCR clone 180215 (TRAV12-2, TRAJ48)
CASNEKLTFGTGPRLTI

SEQ ID NO: 360430 - protein, 15 aa, Homo sapiens
  CDR3 for beta chain variable domain of TCR clone 180215 (TRBV5-1, TRBJ2-1)
CASSQAGYWWNEQFF

SEQ ID NO: 360431 - protein, 12 aa, Homo sapiens
  CDR3 for alpha chain variable domain of TCR clone 180216 (TRAV12-3, TRAJ20)
CAMVRGDYKLSF

SEQ ID NO: 360432 - protein, 16 aa, Homo sapiens
  CDR3 for beta chain variable domain of TCR clone 180216 (TRBV5-1, TRBJ2-3)
CASSLGLAVYTDTQYC

SEQ ID NO: 360433 - protein, 17 aa, Homo sapiens
  CDR3 for alpha chain variable domain of TCR clone 180217 (TRAV3, TRAJ6)
CAVRDGPRAGGSYIPTF

SEQ ID NO: 360434 - protein, 13 aa, Homo sapiens
  CDR3 for beta chain variable domain of TCR clone 180217 (TRBV7-2, TRBJ2-1)
CASSLRLTHEQFF

SEQ ID NO: 360435 - protein, 15 aa, Homo sapiens
  CDR3 for alpha chain variable domain of TCR clone 180218 (TRAV13-1, TRAJ13)
LLYSLLLGGYQKVTF

SEQ ID NO: 360436 - protein, 15 aa, Homo sapiens
  CDR3 for beta chain variable domain of TCR clone 180218 (TRBV7-8, TRBJ2-1)
CASSLADSLYNEQFF

SEQ ID NO: 360437 - protein, 15 aa, Homo sapiens
  CDR3 for alpha chain variable domain of TCR clone 180219 (TRAV16, TRAJ23)
CALSGPYNQGGKLIF

SEQ ID NO: 360438 - protein, 17 aa, Homo sapiens
  CDR3 for beta chain variable domain of TCR clone 180219 (TRBV20-1, TRBJ2-2)
CSASGSGQGGLTGELFF

SEQ ID NO: 360439 - protein, 15 aa, Homo sapiens
  CDR3 for alpha chain variable domain of TCR clone 180220 (TRAV27, TRAJ38)
CAARRNAGNNRKLFW

SEQ ID NO: 360440 - protein, 13 aa, Homo sapiens
  CDR3 for beta chain variable domain of TCR clone 180220 (TRBV12-5, TRBJ2-3)
CASGDRRSDTQYF

SEQ ID NO: 360441 - protein, 11 aa, Homo sapiens
  CDR3 for alpha chain variable domain of TCR clone 180221 (TRAV3, TRAJ21)
CSVGNFNKFYF

SEQ ID NO: 360442 - protein, 12 aa, Homo sapiens
  CDR3 for beta chain variable domain of TCR clone 180221 (TRBV11-2, TRBJ2-5)
CASSLVGETQYF

SEQ ID NO: 360443 - protein, 14 aa, Homo sapiens
  CDR3 for alpha chain variable domain of TCR clone 180222 (TRAV29/DV5, TRAJ22)
CAESATGSARQLTF

SEQ ID NO: 360444 - protein, 14 aa, Homo sapiens
  CDR3 for beta chain variable domain of TCR clone 180222 (TRBV19, TRBJ2-1)
CASSPGLAPNEQFF

SEQ ID NO: 360445 - protein, 14 aa, Homo sapiens
  CDR3 for alpha chain variable domain of TCR clone 180223 (TRAV12-2, TRAJ40)
CAVKSPTGTYNYIF

SEQ ID NO: 360446 - protein, 14 aa, Homo sapiens
  CDR3 for beta chain variable domain of TCR clone 180223 (TRBV20-1, TRBJ1-1)
CSAQTRIGGTEAFF

SEQ ID NO: 360447 - protein, 15 aa, Homo sapiens
  CDR3 for alpha chain variable domain of TCR clone 180224 (TRAV26-1, TRAJ39)
CIVRDGFNAGNMLTF

SEQ ID NO: 360448 - protein, 16 aa, Homo sapiens
  CDR3 for beta chain variable domain of TCR clone 180224 (TRBV29-1, TRBJ2-7)
CSVEVVGTSGSYEQYF

SEQ ID NO: 360449 - protein, 15 aa, Homo sapiens
  CDR3 for alpha chain variable domain of TCR clone 180225 (TRAV8-2, TRAJ16)
CVVSDGFSDVQKLLF

SEQ ID NO: 360450 - protein, 14 aa, Homo sapiens
  CDR3 for beta chain variable domain of TCR clone 180225 (TRBV7-3, TRBJ1-1)
CASSLGTGYTEAFF

SEQ ID NO: 360451 - protein, 12 aa, Homo sapiens
  CDR3 for alpha chain variable domain of TCR clone 180226 (TRAV20, TRAJ37)
CALPSNTGKLIF

SEQ ID NO: 360452 - protein, 14 aa, Homo sapiens
  CDR3 for beta chain variable domain of TCR clone 180226 (TRBV2, TRBJ2-2)
CASSERRFTGELFF

SEQ ID NO: 360453 - protein, 14 aa, Homo sapiens
  CDR3 for alpha chain variable domain of TCR clone 180227 (TRAV17, TRAJ40)
CATALTSGTYNYIF

SEQ ID NO: 360454 - protein, 13 aa, Homo sapiens
  CDR3 for beta chain variable domain of TCR clone 180227 (TRBV27, TRBJ2-1)
CASSSGSYNEQFF

SEQ ID NO: 360455 - protein, 15 aa, Homo sapiens
  CDR3 for alpha chain variable domain of TCR clone 180228 (TRAV8-3, TRAJ27)
CAVGPSKTNAGKSPF

SEQ ID NO: 360456 - protein, 12 aa, Homo sapiens
  CDR3 for beta chain variable domain of TCR clone 180228 (TRBV11-2, TRBJ2-2)
CASSLGGGELFF

SEQ ID NO: 360457 - protein, 14 aa, Homo sapiens
  CDR3 for alpha chain variable domain of TCR clone 180229 (TRAV12-2, TRAJ44)
CAVNPAGTASKLTF

SEQ ID NO: 360458 - protein, 15 aa, Homo sapiens
  CDR3 for beta chain variable domain of TCR clone 180229 (TRBV5-1, TRBJ2-1)
CASSPPRASYNEQFF

SEQ ID NO: 360459 - protein, 18 aa, Homo sapiens
  CDR3 for alpha chain variable domain of TCR clone 180230 (TRAV4, TRAJ20)
CCVLLPRVKGNNDYKLSF

SEQ ID NO: 360460 - protein, 17 aa, Homo sapiens
  CDR3 for beta chain variable domain of TCR clone 180230 (TRBV11-2, TRBJ2-1)
CASSLYPPGVEYNEQFF

SEQ ID NO: 360461 - protein, 13 aa, Homo sapiens
  CDR3 for alpha chain variable domain of TCR clone 180231 (TRAV21, TRAJ20)
CAVGLRVDYKLSF

SEQ ID NO: 360462 - protein, 16 aa, Homo sapiens
  CDR3 for beta chain variable domain of TCR clone 180231 (TRBV4-1, TRBJ2-7)
CASSQEWTSGPLEQYF

SEQ ID NO: 360463 - protein, 16 aa, Homo sapiens
  CDR3 for alpha chain variable domain of TCR clone 180232 (TRAV8-3, TRAJ10)
CAVGPILTGGGNKLTF

SEQ ID NO: 360464 - protein, 16 aa, Homo sapiens
  CDR3 for beta chain variable domain of TCR clone 180232 (TRBV7-8, TRBJ2-5)
CASSSKWLSGQETQYF

SEQ ID NO: 360465 - protein, 14 aa, Homo sapiens
  CDR3 for alpha chain variable domain of TCR clone 180233 (TRAV35, TRAJ22)
CAGLRPGSARQLTF

SEQ ID NO: 360466 - protein, 15 aa, Homo sapiens
  CDR3 for beta chain variable domain of TCR clone 180233 (TRBV20-1, TRBJ1-5)
CSATSDRGLGQPQHF

SEQ ID NO: 360467 - protein, 11 aa, Homo sapiens
  CDR3 for alpha chain variable domain of TCR clone 180234 (TRAV35, TRAJ34)
CAGRNTDKLIF

SEQ ID NO: 360468 - protein, 13 aa, Homo sapiens
  CDR3 for beta chain variable domain of TCR clone 180234 (TRBV19, TRBJ2-7)
CASSIDRTYEQYF

SEQ ID NO: 360469 - protein, 13 aa, Homo sapiens
  CDR3 for alpha chain variable domain of TCR clone 180235 (TRAV27, TRAJ45)
CRSSGGGADGLTF

SEQ ID NO: 360470 - protein, 13 aa, Homo sapiens
  CDR3 for beta chain variable domain of TCR clone 180235 (TRBV11-3, TRBJ1-1)
CASSLALGTEALF

SEQ ID NO: 360471 - protein, 16 aa, Homo sapiens
  CDR3 for alpha chain variable domain of TCR clone 180236 (TRAV3, TRAJ4)
CAVRPSPSGGYNKLIF

SEQ ID NO: 360472 - protein, 12 aa, Homo sapiens
  CDR3 for beta chain variable domain of TCR clone 180236 (TRBV7-9, TRBJ2-7)
CASSQGVYEQSF

SEQ ID NO: 360473 - protein, 12 aa, Homo sapiens
  CDR3 for alpha chain variable domain of TCR clone 180237 (TRAV23/DV6, TRAJ12)
CAAIDLGAMDSS

SEQ ID NO: 360474 - protein, 14 aa, Homo sapiens
  CDR3 for beta chain variable domain of TCR clone 180237 (TRBV20-1, TRBJ2-1)
CSARRGGSYNEQFF

SEQ ID NO: 360475 - protein, 14 aa, Homo sapiens
  CDR3 for alpha chain variable domain of TCR clone 180238 (TRAV1-2, TRAJ16)
CAVNRFSDGQKLLF

SEQ ID NO: 360476 - protein, 17 aa, Homo sapiens
  CDR3 for beta chain variable domain of TCR clone 180238 (TRBV7-9, TRBJ2-1)
CASSLVASFPSYNEQFF

SEQ ID NO: 360477 - protein, 11 aa, Homo sapiens
  CDR3 for alpha chain variable domain of TCR clone 180239 (TRAV29/DV5, TRAJ37)
CATSKTGKLIF

SEQ ID NO: 360478 - protein, 12 aa, Homo sapiens
  CDR3 for beta chain variable domain of TCR clone 180239 (TRBV11-2, TRBJ2-1)
CASSPGNNEQFF

SEQ ID NO: 360479 - protein, 13 aa, Homo sapiens
  CDR3 for alpha chain variable domain of TCR clone 180240 (TRAV12-3, TRAJ40)
CAMSARGTYKYIF

SEQ ID NO: 360480 - protein, 14 aa, Homo sapiens
  CDR3 for beta chain variable domain of TCR clone 180240 (TRBV11-2, TRBJ2-7)
CASSLGAGAYEQYF

SEQ ID NO: 360481 - protein, 14 aa, Homo sapiens
  CDR3 for alpha chain variable domain of TCR clone 180241 (TRAV1-2, TRAJ16)
CAVRSASDGQKLLF

SEQ ID NO: 360482 - protein, 15 aa, Homo sapiens
  CDR3 for beta chain variable domain of TCR clone 180241 (TRBV2, TRBJ2-1)
CASSELAGSYNEQFF

SEQ ID NO: 360483 - protein, 14 aa, Homo sapiens
  CDR3 for alpha chain variable domain of TCR clone 180242 (TRAV9-2, TRAJ39)
CALYIYNAGNMLTF

SEQ ID NO: 360484 - protein, 16 aa, Homo sapiens
  CDR3 for beta chain variable domain of TCR clone 180242 (TRBV11-2, TRBJ2-3)
CASSSRTSGGAGTQYF

SEQ ID NO: 360485 - protein, 14 aa, Homo sapiens
  CDR3 for alpha chain variable domain of TCR clone 180243 (TRAV26-1, TRAJ38)
CIADNAGNNRKPIW

SEQ ID NO: 360486 - protein, 13 aa, Homo sapiens
  CDR3 for beta chain variable domain of TCR clone 180243 (TRBV7-9, TRBJ1-2)
CASSLKQNYGYTF

SEQ ID NO: 360487 - protein, 12 aa, Homo sapiens
  CDR3 for alpha chain variable domain of TCR clone 180244 (TRAV17, TRAJ53)
WAGGGSNYKLTF

SEQ ID NO: 360488 - protein, 16 aa, Homo sapiens
  CDR3 for beta chain variable domain of TCR clone 180244 (TRBV11-2, TRBJ2-3)
CASSFQGRGALDTQYF

SEQ ID NO: 360489 - protein, 15 aa, Homo sapiens
  CDR3 for alpha chain variable domain of TCR clone 180245 (TRAV14/DV4, TRAJ26)
CAMREGQNYGQNFVF

SEQ ID NO: 360490 - protein, 13 aa, Homo sapiens
  CDR3 for beta chain variable domain of TCR clone 180245 (TRBV24-1, TRBJ2-2)
CVTSDWSTGELFF

SEQ ID NO: 360491 - protein, 14 aa, Homo sapiens
  CDR3 for alpha chain variable domain of TCR clone 180246 (TRAV1-2, TRAJ16)
CAVNRFSDGQKLLI

SEQ ID NO: 360492 - protein, 15 aa, Homo sapiens
  CDR3 for beta chain variable domain of TCR clone 180246 (TRBV9, TRBJ1-6)
CDSSVAGTGDSPLYF

SEQ ID NO: 360493 - protein, 18 aa, Homo sapiens
  CDR3 for alpha chain variable domain of TCR clone 180247 (TRAV13-1, TRAJ52)
CAASQRSAGGTSYGKLTF

SEQ ID NO: 360494 - protein, 13 aa, Homo sapiens
  CDR3 for beta chain variable domain of TCR clone 180247 (TRBV12-4, TRBJ1-2)
CASSLRQGKGYTF

SEQ ID NO: 360495 - protein, 12 aa, Homo sapiens
  CDR3 for alpha chain variable domain of TCR clone 180248 (TRAV2, TRAJ15)
CAVASPGTALIF

SEQ ID NO: 360496 - protein, 13 aa, Homo sapiens
  CDR3 for beta chain variable domain of TCR clone 180248 (TRBV7-9, TRBJ1-2)
CASSLKQNYGYTF

SEQ ID NO: 360497 - protein, 12 aa, Homo sapiens
  CDR3 for alpha chain variable domain of TCR clone 180249 (TRAV12-3, TRAJ20)
CAMVRGDYKLSF

SEQ ID NO: 360498 - protein, 14 aa, Homo sapiens
  CDR3 for beta chain variable domain of TCR clone 180249 (TRBV20-1, TRBJ2-7)
CSAISREPSYEQYF

SEQ ID NO: 360499 - protein, 11 aa, Homo sapiens
  CDR3 for alpha chain variable domain of TCR clone 180250 (TRAV21, TRAJ34)
CAVTNTDKLIF

SEQ ID NO: 360500 - protein, 16 aa, Homo sapiens
  CDR3 for beta chain variable domain of TCR clone 180250 (TRBV5-4, TRBJ2-3)
CASQQPGAGGADTQYF

SEQ ID NO: 360501 - protein, 15 aa, Homo sapiens
  CDR3 for alpha chain variable domain of TCR clone 180251 (TRAV27, TRAJ42)
CAGGNYGGSQGNLIF

SEQ ID NO: 360502 - protein, 15 aa, Homo sapiens
  CDR3 for beta chain variable domain of TCR clone 180251 (TRBV9, TRBJ2-1)
CASSLAGSSYNEQFF

SEQ ID NO: 360503 - protein, 17 aa, Homo sapiens
  CDR3 for alpha chain variable domain of TCR clone 180252 (TRAV26-1, TRAJ36)
CIVRPPGDQTGANNLFF

SEQ ID NO: 360504 - protein, 16 aa, Homo sapiens
  CDR3 for beta chain variable domain of TCR clone 180252 (TRBV19, TRBJ2-1)
CASSKVGPSSYNEQFC

SEQ ID NO: 360505 - protein, 18 aa, Homo sapiens
  CDR3 for alpha chain variable domain of TCR clone 180253 (TRAV21, TRAJ52)
CAVRPSPSGGTSYGKLTF

SEQ ID NO: 360506 - protein, 13 aa, Homo sapiens
  CDR3 for beta chain variable domain of TCR clone 180253 (TRBV19, TRBJ1-2)
CASSVPGQDGYTF

SEQ ID NO: 360507 - protein, 13 aa, Homo sapiens
  CDR3 for alpha chain variable domain of TCR clone 180254 (TRAV12-3, TRAJ13)
CAMSSGGYQKVTF

SEQ ID NO: 360508 - protein, 13 aa, Homo sapiens
  CDR3 for beta chain variable domain of TCR clone 180254 (TRBV20-1, TRBJ1-1)
CSATPGGHTEAFF

SEQ ID NO: 360509 - protein, 11 aa, Homo sapiens
  CDR3 for alpha chain variable domain of TCR clone 180255 (TRAV13-1, TRAJ40)
CAVSGTYKYIF

SEQ ID NO: 360510 - protein, 16 aa, Homo sapiens
  CDR3 for beta chain variable domain of TCR clone 180255 (TRBV6-6, TRBJ2-2)
CASSYKPASNTGELFF

SEQ ID NO: 360511 - protein, 12 aa, Homo sapiens
  CDR3 for alpha chain variable domain of TCR clone 180256 (TRAV1-1, TRAJ39)
CAVPVVGNMLTF

SEQ ID NO: 360512 - protein, 14 aa, Homo sapiens
  CDR3 for beta chain variable domain of TCR clone 180256 (TRBV7-8, TRBJ2-5)
CASSATGGQETQYF

SEQ ID NO: 360513 - protein, 15 aa, Homo sapiens
  CDR3 for alpha chain variable domain of TCR clone 180257 (TRAV20, TRAJ50)
CAVRQMKTPYDKVIF

SEQ ID NO: 360514 - protein, 16 aa, Homo sapiens
  CDR3 for beta chain variable domain of TCR clone 180257 (TRBV15, TRBJ1-2)
CATSRGPRTGGGGYTF

SEQ ID NO: 360515 - protein, 16 aa, Homo sapiens
  CDR3 for alpha chain variable domain of TCR clone 180258 (TRAV12-2, TRAJ28)
CAVITDSEAGSYQLTF

SEQ ID NO: 360516 - protein, 14 aa, Homo sapiens
  CDR3 for beta chain variable domain of TCR clone 180258 (TRBV25-1, TRBJ1-1)
CASTHLGGNTEAFF

SEQ ID NO: 360517 - protein, 13 aa, Homo sapiens
  CDR3 for alpha chain variable domain of TCR clone 180259 (TRAV17, TRAJ34)
CATVPYNTDKLIF

SEQ ID NO: 360518 - protein, 14 aa, Homo sapiens
  CDR3 for beta chain variable domain of TCR clone 180259 (TRBV9, TRBJ2-3)
CASSAGGGPDKQYF

SEQ ID NO: 360519 - protein, 14 aa, Homo sapiens
  CDR3 for alpha chain variable domain of TCR clone 180260 (TRAV12-2, TRAJ17)
CAVLFKAAGNKLTF

SEQ ID NO: 360520 - protein, 17 aa, Homo sapiens
  CDR3 for beta chain variable domain of TCR clone 180260 (TRBV4-1, TRBJ1-4)
CASSQEGPRGVEEKLFF

SEQ ID NO: 360521 - protein, 13 aa, Homo sapiens
  CDR3 for alpha chain variable domain of TCR clone 180261 (TRAV2, TRAJ15)
CAVASQAGTAVIF

SEQ ID NO: 360522 - protein, 13 aa, Homo sapiens
  CDR3 for beta chain variable domain of TCR clone 180261 (TRBV20-1, TRBJ1-1)
CSAPLGGGTEAFF

SEQ ID NO: 360523 - protein, 14 aa, Homo sapiens
  CDR3 for alpha chain variable domain of TCR clone 180262 (TRAV13-1, TRAJ44)
CAAKATVTASKLTF

SEQ ID NO: 360524 - protein, 13 aa, Homo sapiens
  CDR3 for beta chain variable domain of TCR clone 180262 (TRBV19, TRBJ1-2)
CSSSQGQVYGYTF

SEQ ID NO: 360525 - protein, 15 aa, Homo sapiens
  CDR3 for alpha chain variable domain of TCR clone 180263 (TRAV12-3, TRAJ53)
CNEPGSGGSNYKLTF

SEQ ID NO: 360526 - protein, 15 aa, Homo sapiens
  CDR3 for beta chain variable domain of TCR clone 180263 (TRBV12-4, TRBJ2-1)
CASSLLATGNNEQFF

SEQ ID NO: 360527 - protein, 15 aa, Homo sapiens
  CDR3 for alpha chain variable domain of TCR clone 180264 (TRAV26-1, TRAJ47)
CIVRVGWGYGNKLVF

SEQ ID NO: 360528 - protein, 12 aa, Homo sapiens
  CDR3 for beta chain variable domain of TCR clone 180264 (TRBV7-2, TRBJ1-6)
CASSLASSPLHF

SEQ ID NO: 360529 - protein, 15 aa, Homo sapiens
  CDR3 for alpha chain variable domain of TCR clone 180265 (TRAV3, TRAJ36)
CAVRASQTGANNLFF

SEQ ID NO: 360530 - protein, 17 aa, Homo sapiens
  CDR3 for beta chain variable domain of TCR clone 180265 (TRBV11-2, TRBJ2-1)
CASSLYPPGVEYNEQFF

SEQ ID NO: 360531 - protein, 14 aa, Homo sapiens
  CDR3 for alpha chain variable domain of TCR clone 180266 (TRAV12-2, TRAJ53)
CAVKGGGSNYKLTF

SEQ ID NO: 360532 - protein, 15 aa, Homo sapiens
  CDR3 for beta chain variable domain of TCR clone 180266 (TRBV7-9, TRBJ1-5)
CASSQGHQPNQPQHF

SEQ ID NO: 360533 - protein, 14 aa, Homo sapiens
  CDR3 for alpha chain variable domain of TCR clone 180267 (TRAV13-1, TRAJ35)
CAASKGGFGNVLHC

SEQ ID NO: 360534 - protein, 12 aa, Homo sapiens
  CDR3 for beta chain variable domain of TCR clone 180267 (TRBV7-8, TRBJ2-1)
CASSLGHNEQFF

SEQ ID NO: 360535 - protein, 15 aa, Homo sapiens
  CDR3 for alpha chain variable domain of TCR clone 180268 (TRAV12-1, TRAJ9)
CVVSFGDPGGFKTIF

SEQ ID NO: 360536 - protein, 13 aa, Homo sapiens
  CDR3 for beta chain variable domain of TCR clone 180268 (TRBV2, TRBJ1-4)
CASSERAGEKLFF

SEQ ID NO: 360537 - protein, 14 aa, Homo sapiens
  CDR3 for alpha chain variable domain of TCR clone 180269 (TRAV20, TRAJ10)
CAVRVEGGGNKLTF

SEQ ID NO: 360538 - protein, 13 aa, Homo sapiens
  CDR3 for beta chain variable domain of TCR clone 180269 (TRBV13, TRBJ2-2)
CASSPGLTGELVF

SEQ ID NO: 360539 - protein, 15 aa, Homo sapiens
  CDR3 for alpha chain variable domain of TCR clone 180270 (TRAV12-1, TRAJ44)
CVVDLPTGTASKLTF

SEQ ID NO: 360540 - protein, 16 aa, Homo sapiens
  CDR3 for beta chain variable domain of TCR clone 180270 (TRBV12-5, TRBJ2-5)
CASGPRTSGNQETQYF

SEQ ID NO: 360541 - protein, 11 aa, Homo sapiens
  CDR3 for alpha chain variable domain of TCR clone 180271 (TRAV16, TRAJ33)
CALHSNYQLIW

SEQ ID NO: 360542 - protein, 13 aa, Homo sapiens
  CDR3 for beta chain variable domain of TCR clone 180271 (TRBV12-5, TRBJ2-3)
CDSGDRQSDTQYF

SEQ ID NO: 360543 - protein, 10 aa, Homo sapiens
  CDR3 for alpha chain variable domain of TCR clone 180272 (TRAV26-1, TRAJ22)
CSGSARQLTF

SEQ ID NO: 360544 - protein, 14 aa, Homo sapiens
  CDR3 for beta chain variable domain of TCR clone 180272 (TRBV4-1, TRBJ2-2)
CASSQAVNTGELLF

SEQ ID NO: 360545 - protein, 15 aa, Homo sapiens
  CDR3 for alpha chain variable domain of TCR clone 180273 (TRAV8-6, TRAJ10)
CAVSDQAGGGNKLTF

SEQ ID NO: 360546 - protein, 14 aa, Homo sapiens
  CDR3 for beta chain variable domain of TCR clone 180273 (TRBV4-1, TRBJ2-2)
CASSQAVNTGGLFF

SEQ ID NO: 360547 - protein, 16 aa, Homo sapiens
  CDR3 for alpha chain variable domain of TCR clone 180274 (TRAV23/DV6, TRAJ48)
CSASGVVNFGTEQLTF

SEQ ID NO: 360548 - protein, 15 aa, Homo sapiens
  CDR3 for beta chain variable domain of TCR clone 180274 (TRBV20-1, TRBJ2-5)
CSAGLAGVSQETQYF

SEQ ID NO: 360549 - protein, 11 aa, Homo sapiens
  CDR3 for alpha chain variable domain of TCR clone 180275 (TRAV12-2, TRAJ47)
CAVNNGNKLVF

SEQ ID NO: 360550 - protein, 15 aa, Homo sapiens
  CDR3 for beta chain variable domain of TCR clone 180275 (TRBV20-1, TRBJ2-1)
CSASSAGSSYNEQFF

SEQ ID NO: 360551 - protein, 12 aa, Homo sapiens
  CDR3 for alpha chain variable domain of TCR clone 180276 (TRAV12-1, TRAJ6)
CVVARIRRKLHT

SEQ ID NO: 360552 - protein, 15 aa, Homo sapiens
  CDR3 for beta chain variable domain of TCR clone 180276 (TRBV7-3, TRBJ2-1)
CASSLKASEYNERFF

SEQ ID NO: 360553 - protein, 14 aa, Homo sapiens
  CDR3 for alpha chain variable domain of TCR clone 180277 (TRAV1-2, TRAJ16)
CAVNRFSDGQKLLF

SEQ ID NO: 360554 - protein, 16 aa, Homo sapiens
  CDR3 for beta chain variable domain of TCR clone 180277 (TRBV15, TRBJ2-7)
CATGRDGGIPSYEQYF

SEQ ID NO: 360555 - protein, 13 aa, Homo sapiens
  CDR3 for alpha chain variable domain of TCR clone 180278 (TRAV3, TRAJ21)
CAVREPDFNKFYF

SEQ ID NO: 360556 - protein, 17 aa, Homo sapiens
  CDR3 for beta chain variable domain of TCR clone 180278 (TRBV7-8, TRBJ2-6)
CASSAGIGGAGANVLTF

SEQ ID NO: 360557 - protein, 16 aa, Homo sapiens
  CDR3 for alpha chain variable domain of TCR clone 180279 (TRAV3, TRAJ40)
CAVRDSIASGTYKYIF

SEQ ID NO: 360558 - protein, 16 aa, Homo sapiens
  CDR3 for beta chain variable domain of TCR clone 180279 (TRBV2, TRBJ2-1)
CASRSPAGGKYNEQFF

SEQ ID NO: 360559 - protein, 16 aa, Homo sapiens
  CDR3 for alpha chain variable domain of TCR clone 180280 (TRAV30, TRAJ24)
CGTEIVATDSWGKFQF

SEQ ID NO: 360560 - protein, 14 aa, Homo sapiens
  CDR3 for beta chain variable domain of TCR clone 180280 (TRBV12-5, TRBJ2-5)
CASGSRTHQETQYF

SEQ ID NO: 360561 - protein, 15 aa, Homo sapiens
  CDR3 for alpha chain variable domain of TCR clone 180281 (TRAV8-3, TRAJ27)
CAVGPSQTNAGKSTF

SEQ ID NO: 360562 - protein, 16 aa, Homo sapiens
  CDR3 for beta chain variable domain of TCR clone 180281 (TRBV6-6, TRBJ2-1)
CASSLLSDSSYNEQFF

SEQ ID NO: 360563 - protein, 13 aa, Homo sapiens
  CDR3 for alpha chain variable domain of TCR clone 180282 (TRAV26-1, TRAJ31)
CTVRVDGNARLMF

SEQ ID NO: 360564 - protein, 17 aa, Homo sapiens
  CDR3 for beta chain variable domain of TCR clone 180282 (TRBV11-2, TRBJ2-1)
CASSLYPPGVEYNEQFF

SEQ ID NO: 360565 - protein, 11 aa, Homo sapiens
  CDR3 for alpha chain variable domain of TCR clone 180283 (TRAV14/DV4, TRAJ34)
ERAAHTDKLIF

SEQ ID NO: 360566 - protein, 14 aa, Homo sapiens
  CDR3 for beta chain variable domain of TCR clone 180283 (TRBV19, TRBJ2-1)
CASPTFVLSGEQFF

SEQ ID NO: 360567 - protein, 10 aa, Homo sapiens
  CDR3 for alpha chain variable domain of TCR clone 180284 (TRAV12-2, TRAJ20)
CAVYLYKLSF

SEQ ID NO: 360568 - protein, 14 aa, Homo sapiens
  CDR3 for beta chain variable domain of TCR clone 180284 (TRBV10-3, TRBJ2-2)
CAISEVSHSGELFS

SEQ ID NO: 360569 - protein, 11 aa, Homo sapiens
  CDR3 for alpha chain variable domain of TCR clone 180285 (TRAV3, TRAJ21)
CSVGNFNKFYF

SEQ ID NO: 360570 - protein, 16 aa, Homo sapiens
  CDR3 for beta chain variable domain of TCR clone 180285 (TRBV19, TRBJ2-1)
RASSKAGPSSYNEQFF

SEQ ID NO: 360571 - protein, 12 aa, Homo sapiens
  CDR3 for alpha chain variable domain of TCR clone 180286 (TRAV17, TRAJ12)
CATLRSSYKLIF

SEQ ID NO: 360572 - protein, 15 aa, Homo sapiens
  CDR3 for beta chain variable domain of TCR clone 180286 (TRBV10-2, TRBJ2-6)
CASSEQGTGANVLTF

SEQ ID NO: 360573 - protein, 14 aa, Homo sapiens
  CDR3 for alpha chain variable domain of TCR clone 180287 (TRAV8-4, TRAJ9)
CAGRINTGGFKTIF

SEQ ID NO: 360574 - protein, 15 aa, Homo sapiens
  CDR3 for beta chain variable domain of TCR clone 180287 (TRBV20-1, TRBJ2-7)
CSARDRVSGMDEQYF

SEQ ID NO: 360575 - protein, 15 aa, Homo sapiens
  CDR3 for alpha chain variable domain of TCR clone 180288 (TRAV12-2, TRAJ53)
CAVNGGGGSNFKLTF

SEQ ID NO: 360576 - protein, 15 aa, Homo sapiens
  CDR3 for beta chain variable domain of TCR clone 180288 (TRBV28, TRBJ2-1)
CASSGLAEVDNEQFF

SEQ ID NO: 360577 - protein, 14 aa, Homo sapiens
  CDR3 for alpha chain variable domain of TCR clone 180289 (TRAV38-1, TRAJ35)
CAFLTIGFGNVLHC

SEQ ID NO: 360578 - protein, 17 aa, Homo sapiens
  CDR3 for beta chain variable domain of TCR clone 180289 (TRBV28, TRBJ1-1)
CASSGDLQTESNTEAFF

SEQ ID NO: 360579 - protein, 13 aa, Homo sapiens
  CDR3 for alpha chain variable domain of TCR clone 180290 (TRAV8-4, TRAJ54)
CAVTGGGAQKLVF

SEQ ID NO: 360580 - protein, 16 aa, Homo sapiens
  CDR3 for beta chain variable domain of TCR clone 180290 (TRBV2, TRBJ2-6)
CASSEVGGAGDNVLTF

SEQ ID NO: 360581 - protein, 15 aa, Homo sapiens
  CDR3 for alpha chain variable domain of TCR clone 180291 (TRAV3, TRAJ22)
CAVRDRVGSARQLTF

SEQ ID NO: 360582 - protein, 18 aa, Homo sapiens
  CDR3 for beta chain variable domain of TCR clone 180291 (TRBV28, TRBJ2-1)
CASSSTSGRANSYNEQFF

SEQ ID NO: 360583 - protein, 13 aa, Homo sapiens
  CDR3 for alpha chain variable domain of TCR clone 180292 (TRAV35, TRAJ43)
CAGYPYNNNDMRF

SEQ ID NO: 360584 - protein, 11 aa, Homo sapiens
  CDR3 for beta chain variable domain of TCR clone 180292 (TRBV7-9, TRBJ2-3)
CACSGPDTQYF

SEQ ID NO: 360585 - protein, 19 aa, Homo sapiens
  CDR3 for alpha chain variable domain of TCR clone 180293 (TRAV26-2, TRAJ28)
CCVLLHPCGIWGWSYQLTF

SEQ ID NO: 360586 - protein, 16 aa, Homo sapiens
  CDR3 for beta chain variable domain of TCR clone 180293 (TRBV4-2, TRBJ1-2)
CASSQEIGGASYGYTF

SEQ ID NO: 360587 - protein, 13 aa, Homo sapiens
  CDR3 for alpha chain variable domain of TCR clone 180294 (TRAV27, TRAJ53)
CAGQGGSNYKLTF

SEQ ID NO: 360588 - protein, 15 aa, Homo sapiens
  CDR3 for beta chain variable domain of TCR clone 180294 (TRBV20-1, TRBJ1-1)
CSASQGVTGNTEAFF

SEQ ID NO: 360589 - protein, 10 aa, Homo sapiens
  CDR3 for alpha chain variable domain of TCR clone 180295 (TRAV12-2, TRAJ41)
CAVTGYALNF

SEQ ID NO: 360590 - protein, 15 aa, Homo sapiens
  CDR3 for beta chain variable domain of TCR clone 180295 (TRBV4-2, TRBJ2-1)
CASSQDVGLAGQQFF

SEQ ID NO: 360591 - protein, 15 aa, Homo sapiens
  CDR3 for alpha chain variable domain of TCR clone 180296 (TRAV27, TRAJ38)
CAARRNAGNNRKLIW

SEQ ID NO: 360592 - protein, 15 aa, Homo sapiens
  CDR3 for beta chain variable domain of TCR clone 180296 (TRBV9, TRBJ1-6)
CASSVAGTGDSPRHF

SEQ ID NO: 360593 - protein, 12 aa, Homo sapiens
  CDR3 for alpha chain variable domain of TCR clone 180297 (TRAV3, TRAJ20)
CAVRDGDYKLSF

SEQ ID NO: 360594 - protein, 15 aa, Homo sapiens
  CDR3 for beta chain variable domain of TCR clone 180297 (TRBV20-1, TRBJ2-7)
CSARDRVSWMDEQYF

SEQ ID NO: 360595 - protein, 12 aa, Homo sapiens
  CDR3 for alpha chain variable domain of TCR clone 180298 (TRAV21, TRAJ33)
CAKMDSNYQLIW

SEQ ID NO: 360596 - protein, 13 aa, Homo sapiens
  CDR3 for beta chain variable domain of TCR clone 180298 (TRBV20-1, TRBJ1-1)
CSAPLGGGTEAFF

SEQ ID NO: 360597 - protein, 14 aa, Homo sapiens
  CDR3 for alpha chain variable domain of TCR clone 180299 (TRAV9-2, TRAJ4)
CALSESGGYNKLIF

SEQ ID NO: 360598 - protein, 16 aa, Homo sapiens
  CDR3 for beta chain variable domain of TCR clone 180299 (TRBV2, TRBJ1-4)
CASNLLQGATNEKLFF

SEQ ID NO: 360599 - protein, 15 aa, Homo sapiens
  CDR3 for alpha chain variable domain of TCR clone 180300 (TRAV2, TRAJ24)
CAVEVLTDSWGKFEF

SEQ ID NO: 360600 - protein, 14 aa, Homo sapiens
  CDR3 for beta chain variable domain of TCR clone 180300 (TRBV19, TRBJ2-1)
CASSMGSGRRSSSS

SEQ ID NO: 360601 - protein, 17 aa, Homo sapiens
  CDR3 for alpha chain variable domain of TCR clone 180301 (TRAV14/DV4, TRAJ4)
CAMREASGRGGYNKLIF

SEQ ID NO: 360602 - protein, 13 aa, Homo sapiens
  CDR3 for beta chain variable domain of TCR clone 180301 (TRBV19, TRBJ1-3)
CASRLSLGNTIYF

SEQ ID NO: 360603 - protein, 14 aa, Homo sapiens
  CDR3 for alpha chain variable domain of TCR clone 180302 (TRAV4, TRAJ17)
CLVGPQAAGNKLTF

SEQ ID NO: 360604 - protein, 14 aa, Homo sapiens
  CDR3 for beta chain variable domain of TCR clone 180302 (TRBV12-5, TRBJ2-5)
CASGSRTHQETQYF

SEQ ID NO: 360605 - protein, 15 aa, Homo sapiens
  CDR3 for alpha chain variable domain of TCR clone 180303 (TRAV1-1, TRAJ4)
CAVRAFSGGYNKLIF

SEQ ID NO: 360606 - protein, 14 aa, Homo sapiens
  CDR3 for beta chain variable domain of TCR clone 180303 (TRBV7-8, TRBJ2-3)
CASSSRDSTDTQYF

SEQ ID NO: 360607 - protein, 15 aa, Homo sapiens
  CDR3 for alpha chain variable domain of TCR clone 180304 (TRAV23/DV6, TRAJ4)
CAASPLRGGYNKLIF

SEQ ID NO: 360608 - protein, 15 aa, Homo sapiens
  CDR3 for beta chain variable domain of TCR clone 180304 (TRBV7-9, TRBJ1-6)
CASSSPGRGNSPLRF

SEQ ID NO: 360609 - protein, 12 aa, Homo sapiens
  CDR3 for alpha chain variable domain of TCR clone 180305 (TRAV2, TRAJ36)
CAGLTGAYNLFF

SEQ ID NO: 360610 - protein, 18 aa, Homo sapiens
  CDR3 for beta chain variable domain of TCR clone 180305 (TRBV19, TRBJ1-1)
CASIIDGGDYTGNTEAFF

SEQ ID NO: 360611 - protein, 14 aa, Homo sapiens
  CDR3 for alpha chain variable domain of TCR clone 180306 (TRAV12-2, TRAJ40)
CAVKIPSGTYKYIF

SEQ ID NO: 360612 - protein, 11 aa, Homo sapiens
  CDR3 for beta chain variable domain of TCR clone 180306 (TRBV11-2, TRBJ2-1)
CQQPGNNEQFF

SEQ ID NO: 360613 - protein, 15 aa, Homo sapiens
  CDR3 for alpha chain variable domain of TCR clone 180307 (TRAV8-3, TRAJ6)
CAVGEDRGGSYIHTF

SEQ ID NO: 360614 - protein, 14 aa, Homo sapiens
  CDR3 for beta chain variable domain of TCR clone 180307 (TRBV27, TRBJ2-2)
CASLRSPPGGELFF

SEQ ID NO: 360615 - protein, 13 aa, Homo sapiens
  CDR3 for alpha chain variable domain of TCR clone 180308 (TRAV27, TRAJ42)
CAGARGSQGNRIF

SEQ ID NO: 360616 - protein, 14 aa, Homo sapiens
  CDR3 for beta chain variable domain of TCR clone 180308 (TRBV20-1, TRBJ1-1)
CSAQTRIGGTEAFF

SEQ ID NO: 360617 - protein, 15 aa, Homo sapiens
  CDR3 for alpha chain variable domain of TCR clone 180309 (TRAV17, TRAJ57)
CATGPSQGGSEKLVF

SEQ ID NO: 360618 - protein, 15 aa, Homo sapiens
  CDR3 for beta chain variable domain of TCR clone 180309 (TRBV6-6, TRBJ2-5)
CASSYGKIIQETQYF

SEQ ID NO: 360619 - protein, 16 aa, Homo sapiens
  CDR3 for alpha chain variable domain of TCR clone 180310 (TRAV3, TRAJ37)
CAVRVRGSGNTGKLIF

SEQ ID NO: 360620 - protein, 11 aa, Homo sapiens
  CDR3 for beta chain variable domain of TCR clone 180310 (TRBV11-2, TRBJ2-2)
CARSLPGELFF

SEQ ID NO: 360621 - protein, 21 aa, Homo sapiens
  CDR3 for alpha chain variable domain of TCR clone 180311 (TRAV8-3, TRAJ32)
CAVEVVLQTGSSLELALCLLS

SEQ ID NO: 360622 - protein, 15 aa, Homo sapiens
  CDR3 for beta chain variable domain of TCR clone 180311 (TRBV7-2, TRBJ2-1)
CASSSRTSREDEQFF

SEQ ID NO: 360623 - protein, 16 aa, Homo sapiens
  CDR3 for alpha chain variable domain of TCR clone 180312 (TRAV16, TRAJ4)
CALSRMFSGGYNKLIF

SEQ ID NO: 360624 - protein, 13 aa, Homo sapiens
  CDR3 for beta chain variable domain of TCR clone 180312 (TRBV7-2, TRBJ2-7)
CASSSPSGSEQYF

SEQ ID NO: 360625 - protein, 12 aa, Homo sapiens
  CDR3 for alpha chain variable domain of TCR clone 180313 (TRAV21, TRAJ11)
CAATSGYSTLTF

SEQ ID NO: 360626 - protein, 15 aa, Homo sapiens
  CDR3 for beta chain variable domain of TCR clone 180313 (TRBV9, TRBJ2-1)
CASSLAGSSYNEQFF

SEQ ID NO: 360627 - protein, 14 aa, Homo sapiens
  CDR3 for alpha chain variable domain of TCR clone 180314 (TRAV4, TRAJ9)
CLVGSGTGGFKTIF

SEQ ID NO: 360628 - protein, 18 aa, Homo sapiens
  CDR3 for beta chain variable domain of TCR clone 180314 (TRBV11-2, TRBJ2-3)
CASSLGGASRGAPNTQYF

SEQ ID NO: 360629 - protein, 13 aa, Homo sapiens
  CDR3 for alpha chain variable domain of TCR clone 180315 (TRAV36/DV7, TRAJ54)
CAVDIQGAQKLVF

SEQ ID NO: 360630 - protein, 14 aa, Homo sapiens
  CDR3 for beta chain variable domain of TCR clone 180315 (TRBV19, TRBJ2-5)
CASSMTGQQETQYF

SEQ ID NO: 360631 - protein, 17 aa, Homo sapiens
  CDR3 for alpha chain variable domain of TCR clone 180316 (TRAV3, TRAJ6)
CAVRDGPRAGGSYIPTF

SEQ ID NO: 360632 - protein, 15 aa, Homo sapiens
  CDR3 for beta chain variable domain of TCR clone 180316 (TRBV5-8, TRBJ2-2)
CASRLDRGATGELFF

SEQ ID NO: 360633 - protein, 13 aa, Homo sapiens
  CDR3 for alpha chain variable domain of TCR clone 180317 (TRAV21, TRAJ27)
CAALNTNAGKSTF

SEQ ID NO: 360634 - protein, 14 aa, Homo sapiens
  CDR3 for beta chain variable domain of TCR clone 180317 (TRBV27, TRBJ1-1)
CASSLLSGLSEPFF

SEQ ID NO: 360635 - protein, 13 aa, Homo sapiens
  CDR3 for alpha chain variable domain of TCR clone 180318 (TRAV12-2, TRAJ50)
CAVIVTSYDKVIF

SEQ ID NO: 360636 - protein, 17 aa, Homo sapiens
  CDR3 for beta chain variable domain of TCR clone 180318 (TRBV7-8, TRBJ2-6)
CASSAGTGGAGANVLTF

SEQ ID NO: 360637 - protein, 16 aa, Homo sapiens
  CDR3 for alpha chain variable domain of TCR clone 180319 (TRAV30, TRAJ24)
CGAEIVDTDSWGKFQF

SEQ ID NO: 360638 - protein, 16 aa, Homo sapiens
  CDR3 for beta chain variable domain of TCR clone 180319 (TRBV2, TRBJ1-3)
CASSGGAGRSGNTIYF

SEQ ID NO: 360639 - protein, 13 aa, Homo sapiens
  CDR3 for alpha chain variable domain of TCR clone 180320 (TRAV16, TRAJ27)
CALRRTNAGKSTF

SEQ ID NO: 360640 - protein, 17 aa, Homo sapiens
  CDR3 for beta chain variable domain of TCR clone 180320 (TRBV20-1, TRBJ2-1)
CSAPPRLAGTRYNEQFF

SEQ ID NO: 360641 - protein, 15 aa, Homo sapiens
  CDR3 for alpha chain variable domain of TCR clone 180321 (TRAV23/DV6, TRAJ57)
CAASSTLSQGGSEEL

SEQ ID NO: 360642 - protein, 14 aa, Homo sapiens
  CDR3 for beta chain variable domain of TCR clone 180321 (TRBV25-1, TRBJ1-1)
CASTHLGGNTEAFF

SEQ ID NO: 360643 - protein, 13 aa, Homo sapiens
  CDR3 for alpha chain variable domain of TCR clone 180322 (TRAV12-3, TRAJ43)
CAMIRPNNNDMRF

SEQ ID NO: 360644 - protein, 15 aa, Homo sapiens
  CDR3 for beta chain variable domain of TCR clone 180322 (TRBV4-1, TRBJ1-4)
CASSDTGGTNEKLFF

SEQ ID NO: 360645 - protein, 11 aa, Homo sapiens
  CDR3 for alpha chain variable domain of TCR clone 180323 (TRAV2, TRAJ37)
IFTSNTGKLIF

SEQ ID NO: 360646 - protein, 15 aa, Homo sapiens
  CDR3 for beta chain variable domain of TCR clone 180323 (TRBV20-1, TRBJ1-1)
CSASRGVTGNTEAFF

SEQ ID NO: 360647 - protein, 12 aa, Homo sapiens
  CDR3 for alpha chain variable domain of TCR clone 180324 (TRAV8-3, TRAJ20)
CAVGANDYKLSF

SEQ ID NO: 360648 - protein, 17 aa, Homo sapiens
  CDR3 for beta chain variable domain of TCR clone 180324 (TRBV7-8, TRBJ1-2)
CASSLRPLQGHLYGYTF

SEQ ID NO: 360649 - protein, 16 aa, Homo sapiens
  CDR3 for alpha chain variable domain of TCR clone 180325 (TRAV16, TRAJ4)
CALSRMFSGGYNKLIF

SEQ ID NO: 360650 - protein, 17 aa, Homo sapiens
  CDR3 for beta chain variable domain of TCR clone 180325 (TRBV27, TRBJ2-6)
CASSLTGFASGANVLTF

SEQ ID NO: 360651 - protein, 13 aa, Homo sapiens
  CDR3 for alpha chain variable domain of TCR clone 180326 (TRAV35, TRAJ42)
CAGFPGSQGNLVF

SEQ ID NO: 360652 - protein, 14 aa, Homo sapiens
  CDR3 for beta chain variable domain of TCR clone 180326 (TRBV19, TRBJ2-1)
CASPTFVLSGEQFF

SEQ ID NO: 360653 - protein, 14 aa, Homo sapiens
  CDR3 for alpha chain variable domain of TCR clone 180327 (TRAV13-1, TRAJ35)
CAASKGGFGNVLHC

SEQ ID NO: 360654 - protein, 13 aa, Homo sapiens
  CDR3 for beta chain variable domain of TCR clone 180327 (TRBV27, TRBJ2-7)
CASSFSQGYEQYF

SEQ ID NO: 360655 - protein, 17 aa, Homo sapiens
  CDR3 for alpha chain variable domain of TCR clone 180328 (TRAV13-1, TRAJ5)
CSNPSLSRDTGRRALTF

SEQ ID NO: 360656 - protein, 16 aa, Homo sapiens
  CDR3 for beta chain variable domain of TCR clone 180328 (TRBV7-9, TRBJ2-1)
CTSSDVAGGSYNEQFF

SEQ ID NO: 360657 - protein, 12 aa, Homo sapiens
  CDR3 for alpha chain variable domain of TCR clone 180329 (TRAV25, TRAJ29)
CAGHSGNTPLVF

SEQ ID NO: 360658 - protein, 11 aa, Homo sapiens
  CDR3 for beta chain variable domain of TCR clone 180329 (TRBV6-3, TRBJ2-3)
CATGQADTQYF

SEQ ID NO: 360659 - protein, 13 aa, Homo sapiens
  CDR3 for alpha chain variable domain of TCR clone 180330 (TRAV35, TRAJ42)
CAGFPGSQGNLIF

SEQ ID NO: 360660 - protein, 13 aa, Homo sapiens
  CDR3 for beta chain variable domain of TCR clone 180330 (TRBV29-1, TRBJ2-1)
FSVEGGRVNEQFF

SEQ ID NO: 360661 - protein, 13 aa, Homo sapiens
  CDR3 for alpha chain variable domain of TCR clone 180331 (TRAV8-4, TRAJ39)
STPPSDACNMLTF

SEQ ID NO: 360662 - protein, 13 aa, Homo sapiens
  CDR3 for beta chain variable domain of TCR clone 180331 (TRBV12-4, TRBJ2-7)
CASSPTETYEQYF

SEQ ID NO: 360663 - protein, 17 aa, Homo sapiens
  CDR3 for alpha chain variable domain of TCR clone 180332 (TRAV17, TRAJ28)
CATDPRRGGAGSYQLTF

SEQ ID NO: 360664 - protein, 15 aa, Homo sapiens
  CDR3 for beta chain variable domain of TCR clone 180332 (TRBV4-1, TRBJ1-4)
CASSDTGGTNEKLFF

SEQ ID NO: 360665 - protein, 14 aa, Homo sapiens
  CDR3 for alpha chain variable domain of TCR clone 180333 (TRAV12-2, TRAJ13)
CAVKKTGGYPKGTF

SEQ ID NO: 360666 - protein, 15 aa, Homo sapiens
  CDR3 for beta chain variable domain of TCR clone 180333 (TRBV27, TRBJ2-1)
CASNNGGGSSNEQFF

SEQ ID NO: 360667 - protein, 14 aa, Homo sapiens
  CDR3 for alpha chain variable domain of TCR clone 180334 (TRAV12-3, TRAJ10)
SHLPLMGGGNKLTF

SEQ ID NO: 360668 - protein, 15 aa, Homo sapiens
  CDR3 for beta chain variable domain of TCR clone 180334 (TRBV7-9, TRBJ1-4)
CASSRTGGFNEKLFF

SEQ ID NO: 360669 - protein, 14 aa, Homo sapiens
  CDR3 for alpha chain variable domain of TCR clone 180335 (TRAV12-2, TRAJ53)
CAVKVGGSNYKLTF

SEQ ID NO: 360670 - protein, 15 aa, Homo sapiens
  CDR3 for beta chain variable domain of TCR clone 180335 (TRBV11-2, TRBJ2-2)
CASSSDRVNAGELFF

SEQ ID NO: 360671 - protein, 14 aa, Homo sapiens
  CDR3 for alpha chain variable domain of TCR clone 180336 (TRAV12-2, TRAJ53)
CRERGGGSHYKLTF

SEQ ID NO: 360672 - protein, 13 aa, Homo sapiens
  CDR3 for beta chain variable domain of TCR clone 180336 (TRBV3-1, TRBJ1-1)
CASSPGVITEAFF

SEQ ID NO: 360673 - protein, 14 aa, Homo sapiens
  CDR3 for alpha chain variable domain of TCR clone 180337 (TRAV12-1, TRAJ23)
CVVIVYNQGGKVIF

SEQ ID NO: 360674 - protein, 15 aa, Homo sapiens
  CDR3 for beta chain variable domain of TCR clone 180337 (TRBV20-1, TRBJ1-5)
CSAKPPGQGPQPQHF

SEQ ID NO: 360675 - protein, 14 aa, Homo sapiens
  CDR3 for alpha chain variable domain of TCR clone 180338 (TRAV12-3, TRAJ52)
CAMKRGTSYGKLTF

SEQ ID NO: 360676 - protein, 12 aa, Homo sapiens
  CDR3 for beta chain variable domain of TCR clone 180338 (TRBV12-4, TRBJ1-1)
CASSPADGGAFF

SEQ ID NO: 360677 - protein, 12 aa, Homo sapiens
  CDR3 for alpha chain variable domain of TCR clone 180339 (TRAV20, TRAJ23)
CAVQAPGGKHIF

SEQ ID NO: 360678 - protein, 14 aa, Homo sapiens
  CDR3 for beta chain variable domain of TCR clone 180339 (TRBV5-4, TRBJ2-1)
FASSLSGSYNEQFF

SEQ ID NO: 360679 - protein, 15 aa, Homo sapiens
  CDR3 for alpha chain variable domain of TCR clone 180340 (TRAV17, TRAJ45)
CATAYSGGGADGITF

SEQ ID NO: 360680 - protein, 11 aa, Homo sapiens
  CDR3 for beta chain variable domain of TCR clone 180340 (TRBV7-8, TRBJ2-7)
CASSLSLEQYF

SEQ ID NO: 360681 - protein, 12 aa, Homo sapiens
  CDR3 for alpha chain variable domain of TCR clone 180341 (TRAV10, TRAJ31)
CVVRAHRARLMF

SEQ ID NO: 360682 - protein, 17 aa, Homo sapiens
  CDR3 for beta chain variable domain of TCR clone 180341 (TRBV11-2, TRBJ2-1)
CASSLYPPGVEYNEQFF

SEQ ID NO: 360683 - protein, 15 aa, Homo sapiens
  CDR3 for alpha chain variable domain of TCR clone 180342 (TRAV26-1, TRAJ44)
CIVRANTGTASKLTF

SEQ ID NO: 360684 - protein, 15 aa, Homo sapiens
  CDR3 for beta chain variable domain of TCR clone 180342 (TRBV29-1, TRBJ2-5)
CSVEGLAVNQETQYF

SEQ ID NO: 360685 - protein, 13 aa, Homo sapiens
  CDR3 for alpha chain variable domain of TCR clone 180343 (TRAV2, TRAJ40)
CAVVTSGTYKYIF

SEQ ID NO: 360686 - protein, 16 aa, Homo sapiens
  CDR3 for beta chain variable domain of TCR clone 180343 (TRBV5-5, TRBJ2-2)
CASSGRREGATGELFF

SEQ ID NO: 360687 - protein, 10 aa, Homo sapiens
  CDR3 for alpha chain variable domain of TCR clone 180344 (TRAV8-4, TRAJ43)
CAVSADDMRF

SEQ ID NO: 360688 - protein, 18 aa, Homo sapiens
  CDR3 for beta chain variable domain of TCR clone 180344 (TRBV27, TRBJ2-1)
CASGNRAVGVGSKNEQFF

SEQ ID NO: 360689 - protein, 16 aa, Homo sapiens
  CDR3 for alpha chain variable domain of TCR clone 180345 (TRAV3, TRAJ10)
CAVRDMNAGGGNKLTF

SEQ ID NO: 360690 - protein, 15 aa, Homo sapiens
  CDR3 for beta chain variable domain of TCR clone 180345 (TRBV5-1, TRBJ1-2)
CASSLGSVTNYGYSF

SEQ ID NO: 360691 - protein, 14 aa, Homo sapiens
  CDR3 for alpha chain variable domain of TCR clone 180346 (TRAV1-2, TRAJ8)
CAVREDTGFQNLVF

SEQ ID NO: 360692 - protein, 14 aa, Homo sapiens
  CDR3 for beta chain variable domain of TCR clone 180346 (TRBV27, TRBJ2-1)
CASRHLGGGKEQFF

SEQ ID NO: 360693 - protein, 14 aa, Homo sapiens
  CDR3 for alpha chain variable domain of TCR clone 180347 (TRAV13-1, TRAJ44)
CAAKATGTASKLTF

SEQ ID NO: 360694 - protein, 17 aa, Homo sapiens
  CDR3 for beta chain variable domain of TCR clone 180347 (TRBV7-3, TRBJ2-3)
RASSLMKRMRGAVTQYF

SEQ ID NO: 360695 - protein, 14 aa, Homo sapiens
  CDR3 for alpha chain variable domain of TCR clone 180348 (TRAV23/DV6, TRAJ24)
CAASLSDSWGKLQF

SEQ ID NO: 360696 - protein, 15 aa, Homo sapiens
  CDR3 for beta chain variable domain of TCR clone 180348 (TRBV9, TRBJ1-6)
CSSSVAGTGDSPLHF

SEQ ID NO: 360697 - protein, 15 aa, Homo sapiens
  CDR3 for alpha chain variable domain of TCR clone 180349 (TRAV17, TRAJ37)
CATDHGSINTGKLIF

SEQ ID NO: 360698 - protein, 14 aa, Homo sapiens
  CDR3 for beta chain variable domain of TCR clone 180349 (TRBV7-2, TRBJ2-3)
CASSRTSGADTQYF

SEQ ID NO: 360699 - protein, 12 aa, Homo sapiens
  CDR3 for alpha chain variable domain of TCR clone 180350 (TRAV23/DV6, TRAJ30)
CAASKGDDKISF

SEQ ID NO: 360700 - protein, 18 aa, Homo sapiens
  CDR3 for beta chain variable domain of TCR clone 180350 (TRBV10-3, TRBJ2-3)
CAISESRVGPMRGDTQYF

SEQ ID NO: 360701 - protein, 14 aa, Homo sapiens
  CDR3 for alpha chain variable domain of TCR clone 180351 (TRAV23/DV6, TRAJ8)
CAASKNTGFQKLVF

SEQ ID NO: 360702 - protein, 15 aa, Homo sapiens
  CDR3 for beta chain variable domain of TCR clone 180351 (TRBV19, TRBJ2-1)
CASSSPGVPLDEQFF

SEQ ID NO: 360703 - protein, 15 aa, Homo sapiens
  CDR3 for alpha chain variable domain of TCR clone 180352 (TRAV27, TRAJ45)
CRSPQSGGGADGLTF

SEQ ID NO: 360704 - protein, 12 aa, Homo sapiens
  CDR3 for beta chain variable domain of TCR clone 180352 (TRBV24-1, TRBJ2-7)
CATRDPGYEQYF

SEQ ID NO: 360705 - protein, 13 aa, Homo sapiens
  CDR3 for alpha chain variable domain of TCR clone 180353 (TRAV13-2, TRAJ48)
YAEVDFGNEKLTF

SEQ ID NO: 360706 - protein, 15 aa, Homo sapiens
  CDR3 for beta chain variable domain of TCR clone 180353 (TRBV7-9, TRBJ1-6)
CASSSPGRGNSPLHF

SEQ ID NO: 360707 - protein, 16 aa, Homo sapiens
  CDR3 for alpha chain variable domain of TCR clone 180354 (TRAV29/DV5, TRAJ36)
CAASAHYQIGANNLFF

SEQ ID NO: 360708 - protein, 16 aa, Homo sapiens
  CDR3 for beta chain variable domain of TCR clone 180354 (TRBV4-2, TRBJ2-3)
CASSQELAGDTDTQYF

SEQ ID NO: 360709 - protein, 19 aa, Homo sapiens
  CDR3 for alpha chain variable domain of TCR clone 180355 (TRAV30, TRAJ52)
CGTEANTNAGGTSHGKLTF

SEQ ID NO: 360710 - protein, 17 aa, Homo sapiens
  CDR3 for beta chain variable domain of TCR clone 180355 (TRBV28, TRBJ2-7)
CASSPLRGRRWKGGQYF

SEQ ID NO: 360711 - protein, 12 aa, Homo sapiens
  CDR3 for alpha chain variable domain of TCR clone 180356 (TRAV27, TRAJ37)
CADSGSTGKLIF

SEQ ID NO: 360712 - protein, 18 aa, Homo sapiens
  CDR3 for beta chain variable domain of TCR clone 180356 (TRBV7-9, TRBJ1-1)
CASSKPWDTMGMNTEAFS

SEQ ID NO: 360713 - protein, 11 aa, Homo sapiens
  CDR3 for alpha chain variable domain of TCR clone 180357 (TRAV3, TRAJ21)
CAVGNFNKFYF

SEQ ID NO: 360714 - protein, 16 aa, Homo sapiens
  CDR3 for beta chain variable domain of TCR clone 180357 (TRBV28, TRBJ2-6)
CASSFRTYSGANVLTF

SEQ ID NO: 360715 - protein, 16 aa, Homo sapiens
  CDR3 for alpha chain variable domain of TCR clone 180358 (TRAV3, TRAJ21)
CAVRAIERGNFNNFYF

SEQ ID NO: 360716 - protein, 13 aa, Homo sapiens
  CDR3 for beta chain variable domain of TCR clone 180358 (TRBV27, TRBJ2-7)
CASSLTTGYEQYF

SEQ ID NO: 360717 - protein, 14 aa, Homo sapiens
  CDR3 for alpha chain variable domain of TCR clone 180359 (TRAV9-2, TRAJ39)
CALYIYNAGNMLTF

SEQ ID NO: 360718 - protein, 15 aa, Homo sapiens
  CDR3 for beta chain variable domain of TCR clone 180359 (TRBV7-9, TRBJ1-5)
CASSQGHQPNQTQHF

SEQ ID NO: 360719 - protein, 15 aa, Homo sapiens
  CDR3 for alpha chain variable domain of TCR clone 180360 (TRAV3, TRAJ47)
CAVRDIGEYGDKLVF

SEQ ID NO: 360720 - protein, 14 aa, Homo sapiens
  CDR3 for beta chain variable domain of TCR clone 180360 (TRBV13, TRBJ2-5)
CASSLERVGETQYF

SEQ ID NO: 360721 - protein, 15 aa, Homo sapiens
  CDR3 for alpha chain variable domain of TCR clone 180361 (TRAV8-3, TRAJ45)
CASSYSGGGADGLTI

SEQ ID NO: 360722 - protein, 13 aa, Homo sapiens
  CDR3 for beta chain variable domain of TCR clone 180361 (TRBV10-3, TRBJ2-7)
CASKLAVNYEQYV

SEQ ID NO: 360723 - protein, 11 aa, Homo sapiens
  CDR3 for alpha chain variable domain of TCR clone 180362 (TRAV3, TRAJ21)
CAVGNFNKFYF

SEQ ID NO: 360724 - protein, 17 aa, Homo sapiens
  CDR3 for beta chain variable domain of TCR clone 180362 (TRBV20-1, TRBJ2-1)
CSASSSGLAGSYNGQFF

SEQ ID NO: 360725 - protein, 12 aa, Homo sapiens
  CDR3 for alpha chain variable domain of TCR clone 180363 (TRAV23/DV6, TRAJ30)
CAASKGDDKIIF

SEQ ID NO: 360726 - protein, 16 aa, Homo sapiens
  CDR3 for beta chain variable domain of TCR clone 180363 (TRBV29-1, TRBJ2-7)
CSVEDAEDGAAYEQYF

SEQ ID NO: 360727 - protein, 14 aa, Homo sapiens
  CDR3 for alpha chain variable domain of TCR clone 180364 (TRAV3, TRAJ34)
CAVRDINNTAKLIF

SEQ ID NO: 360728 - protein, 14 aa, Homo sapiens
  CDR3 for beta chain variable domain of TCR clone 180364 (TRBV7-2, TRBJ2-2)
CASSLGQNTGELFF

SEQ ID NO: 360729 - protein, 14 aa, Homo sapiens
  CDR3 for alpha chain variable domain of TCR clone 180365 (TRAV26-1, TRAJ45)
CIEVKGGGAEGLTF

SEQ ID NO: 360730 - protein, 12 aa, Homo sapiens
  CDR3 for beta chain variable domain of TCR clone 180365 (TRBV12-4, TRBJ2-7)
CASSLGGYEQYF

SEQ ID NO: 360731 - protein, 12 aa, Homo sapiens
  CDR3 for alpha chain variable domain of TCR clone 180366 (TRAV20, TRAJ39)
CAVGNAGNMLTF

SEQ ID NO: 360732 - protein, 13 aa, Homo sapiens
  CDR3 for beta chain variable domain of TCR clone 180366 (TRBV18, TRBJ1-1)
CASSGGRNTEAFF

SEQ ID NO: 360733 - protein, 12 aa, Homo sapiens
  CDR3 for alpha chain variable domain of TCR clone 180367 (TRAV12-3, TRAJ17)
CAMTLTGNKLTF

SEQ ID NO: 360734 - protein, 13 aa, Homo sapiens
  CDR3 for beta chain variable domain of TCR clone 180367 (TRBV7-3, TRBJ1-1)
CARSQDWGAEAFF

SEQ ID NO: 360735 - protein, 14 aa, Homo sapiens
  CDR3 for alpha chain variable domain of TCR clone 180368 (TRAV12-1, TRAJ30)
CVVNIGGRDDKIIF

SEQ ID NO: 360736 - protein, 13 aa, Homo sapiens
  CDR3 for beta chain variable domain of TCR clone 180368 (TRBV12-5, TRBJ2-1)
CASGVCRGNEQFF

SEQ ID NO: 360737 - protein, 23 aa, Homo sapiens
  CDR3 for alpha chain variable domain of TCR clone 180369 (TRAV26-1, TRAJ38)
CIADNAGNNHIQTPDPAVYQLRD

SEQ ID NO: 360738 - protein, 13 aa, Homo sapiens
  CDR3 for beta chain variable domain of TCR clone 180369 (TRBV20-1, TRBJ1-1)
CSARGGGNTEAFF

SEQ ID NO: 360739 - protein, 13 aa, Homo sapiens
  CDR3 for alpha chain variable domain of TCR clone 180370 (TRAV13-1, TRAJ37)
FAARSGNTGKLLS

SEQ ID NO: 360740 - protein, 14 aa, Homo sapiens
  CDR3 for beta chain variable domain of TCR clone 180370 (TRBV12-4, TRBJ2-3)
CASSLGQGTDTQYF

SEQ ID NO: 360741 - protein, 17 aa, Homo sapiens
  CDR3 for alpha chain variable domain of TCR clone 180371 (TRAV13-1, TRAJ52)
CAASSGAGGTSYGKLTF

SEQ ID NO: 360742 - protein, 11 aa, Homo sapiens
  CDR3 for beta chain variable domain of TCR clone 180371 (TRBV11-2, TRBJ2-1)
PPGVEYNEQFF

SEQ ID NO: 360743 - protein, 15 aa, Homo sapiens
  CDR3 for alpha chain variable domain of TCR clone 180372 (TRAV13-1, TRAJ15)
CAASIERQAGTALIF

SEQ ID NO: 360744 - protein, 14 aa, Homo sapiens
  CDR3 for beta chain variable domain of TCR clone 180372 (TRBV11-2, TRBJ2-5)
CASSRTGGIETQYF

SEQ ID NO: 360745 - protein, 16 aa, Homo sapiens
  CDR3 for alpha chain variable domain of TCR clone 180373 (TRAV30, TRAJ24)
CGTEIVDADSWGKFPF

SEQ ID NO: 360746 - protein, 14 aa, Homo sapiens
  CDR3 for beta chain variable domain of TCR clone 180373 (TRBV12-5, TRBJ2-5)
RASGSRTHQETQYF

SEQ ID NO: 360747 - protein, 14 aa, Homo sapiens
  CDR3 for alpha chain variable domain of TCR clone 180374 (TRAV8-3, TRAJ4)
CAGGAAGGYNKLIF

SEQ ID NO: 360748 - protein, 15 aa, Homo sapiens
  CDR3 for beta chain variable domain of TCR clone 180374 (TRBV6-3, TRBJ2-7)
CASSSPGTVFYEQYF

SEQ ID NO: 360749 - protein, 17 aa, Homo sapiens
  CDR3 for alpha chain variable domain of TCR clone 180375 (TRAV4, TRAJ42)
CLVGVLNYGGSQGNLIF

SEQ ID NO: 360750 - protein, 12 aa, Homo sapiens
  CDR3 for beta chain variable domain of TCR clone 180375 (TRBV20-1, TRBJ2-1)
CSAQYKYNEQFF

SEQ ID NO: 360751 - protein, 11 aa, Homo sapiens
  CDR3 for alpha chain variable domain of TCR clone 180376 (TRAV35, TRAJ30)
CAGERGDKIIF

SEQ ID NO: 360752 - protein, 14 aa, Homo sapiens
  CDR3 for beta chain variable domain of TCR clone 180376 (TRBV4-2, TRBJ1-2)
CASSPGGSNYGYTF

SEQ ID NO: 360753 - protein, 14 aa, Homo sapiens
  CDR3 for alpha chain variable domain of TCR clone 180377 (TRAV2, TRAJ42)
CAVVGGGSQGNLIF

SEQ ID NO: 360754 - protein, 12 aa, Homo sapiens
  CDR3 for beta chain variable domain of TCR clone 180377 (TRBV7-9, TRBJ2-7)
CASSLGDREQYF

SEQ ID NO: 360755 - protein, 13 aa, Homo sapiens
  CDR3 for alpha chain variable domain of TCR clone 180378 (TRAV27, TRAJ29)
CAGAHSGNTPLVF

SEQ ID NO: 360756 - protein, 13 aa, Homo sapiens
  CDR3 for beta chain variable domain of TCR clone 180378 (TRBV3-1, TRBJ1-1)
CASSPGVITEAFF

SEQ ID NO: 360757 - protein, 13 aa, Homo sapiens
  CDR3 for alpha chain variable domain of TCR clone 180379 (TRAV2, TRAJ40)
CAVVTSGTYKYIF

SEQ ID NO: 360758 - protein, 15 aa, Homo sapiens
  CDR3 for beta chain variable domain of TCR clone 180379 (TRBV28, TRBJ2-1)
CASSGLAEVDNEQFC

SEQ ID NO: 360759 - protein, 15 aa, Homo sapiens
  CDR3 for alpha chain variable domain of TCR clone 180380 (TRAV26-1, TRAJ37)
CIFRLGSGNTGKLIF

SEQ ID NO: 360760 - protein, 13 aa, Homo sapiens
  CDR3 for beta chain variable domain of TCR clone 180380 (TRBV6-6, TRBJ2-7)
CASSSSGSYEQYF

SEQ ID NO: 360761 - protein, 13 aa, Homo sapiens
  CDR3 for alpha chain variable domain of TCR clone 180381 (TRAV2, TRAJ16)
CAVDDRDGQKLLF

SEQ ID NO: 360762 - protein, 14 aa, Homo sapiens
  CDR3 for beta chain variable domain of TCR clone 180381 (TRBV6-1, TRBJ2-6)
CASQQGAGANVLTF

SEQ ID NO: 360763 - protein, 14 aa, Homo sapiens
  CDR3 for alpha chain variable domain of TCR clone 180382 (TRAV2, TRAJ20)
CAVEDGTNDSKLSF

SEQ ID NO: 360764 - protein, 13 aa, Homo sapiens
  CDR3 for beta chain variable domain of TCR clone 180382 (TRBV7-2, TRBJ1-1)
CASSRNTNTEAFF

SEQ ID NO: 360765 - protein, 16 aa, Homo sapiens
  CDR3 for alpha chain variable domain of TCR clone 180383 (TRAV30, TRAJ24)
GGTEIVDADSWGKFQF

SEQ ID NO: 360766 - protein, 14 aa, Homo sapiens
  CDR3 for beta chain variable domain of TCR clone 180383 (TRBV7-8, TRBJ2-3)
CASSLEAGTDTQYF

SEQ ID NO: 360767 - protein, 23 aa, Homo sapiens
  CDR3 for alpha chain variable domain of TCR clone 180384 (TRAV1-1, TRAJ11)
LLQELQMKDSASYFCAGYSTLTF

SEQ ID NO: 360768 - protein, 15 aa, Homo sapiens
  CDR3 for beta chain variable domain of TCR clone 180384 (TRBV6-5, TRBJ2-1)
CASRGDFGSYNEQFF

SEQ ID NO: 360769 - protein, 16 aa, Homo sapiens
  CDR3 for alpha chain variable domain of TCR clone 180385 (TRAV3, TRAJ10)
CAVRDMRAGGGNNLTF

SEQ ID NO: 360770 - protein, 14 aa, Homo sapiens
  CDR3 for beta chain variable domain of TCR clone 180385 (TRBV6-1, TRBJ1-3)
CASVQGGGGNTIYF

SEQ ID NO: 360771 - protein, 13 aa, Homo sapiens
  CDR3 for alpha chain variable domain of TCR clone 180386 (TRAV17, TRAJ5)
CAPMDTGRRALTF

SEQ ID NO: 360772 - protein, 15 aa, Homo sapiens
  CDR3 for beta chain variable domain of TCR clone 180386 (TRBV6-6, TRBJ2-5)
CASSTGGGLEETQYF

SEQ ID NO: 360773 - protein, 13 aa, Homo sapiens
  CDR3 for alpha chain variable domain of TCR clone 180387 (TRAV26-1, TRAJ35)
CIVSRRVGEMLPC

SEQ ID NO: 360774 - protein, 17 aa, Homo sapiens
  CDR3 for beta chain variable domain of TCR clone 180387 (TRBV7-9, TRBJ2-7)
CASSFDGSRGGAYEQYF

SEQ ID NO: 360775 - protein, 11 aa, Homo sapiens
  CDR3 for alpha chain variable domain of TCR clone 180388 (TRAV13-1, TRAJ39)
CASHAGNMLTF

SEQ ID NO: 360776 - protein, 14 aa, Homo sapiens
  CDR3 for beta chain variable domain of TCR clone 180388 (TRBV7-2, TRBJ1-5)
CASSTQGAGQPQHF

SEQ ID NO: 360777 - protein, 14 aa, Homo sapiens
  CDR3 for alpha chain variable domain of TCR clone 180389 (TRAV13-1, TRAJ13)
CAAIPLVGYQKVTF

SEQ ID NO: 360778 - protein, 12 aa, Homo sapiens
  CDR3 for beta chain variable domain of TCR clone 180389 (TRBV12-4, TRBJ1-2)
CASSFIWLHLRF

SEQ ID NO: 360779 - protein, 14 aa, Homo sapiens
  CDR3 for alpha chain variable domain of TCR clone 180390 (TRAV13-1, TRAJ35)
CAAIKGGFGNVLHC

SEQ ID NO: 360780 - protein, 15 aa, Homo sapiens
  CDR3 for beta chain variable domain of TCR clone 180390 (TRBV28, TRBJ2-1)
CASSGLAEVDNEQFF

SEQ ID NO: 360781 - protein, 16 aa, Homo sapiens
  CDR3 for alpha chain variable domain of TCR clone 180391 (TRAV8-2, TRAJ50)
CVLSDHMKTSYDKVIF

SEQ ID NO: 360782 - protein, 15 aa, Homo sapiens
  CDR3 for beta chain variable domain of TCR clone 180391 (TRBV7-2, TRBJ2-1)
CASSFQADEYNEQFF

SEQ ID NO: 360783 - protein, 15 aa, Homo sapiens
  CDR3 for alpha chain variable domain of TCR clone 180392 (TRAV17, TRAJ57)
CATGPSQGGSEKLVF

SEQ ID NO: 360784 - protein, 14 aa, Homo sapiens
  CDR3 for beta chain variable domain of TCR clone 180392 (TRBV12-5, TRBJ2-5)
CASGSPTHQETQYF

SEQ ID NO: 360785 - protein, 14 aa, Homo sapiens
  CDR3 for alpha chain variable domain of TCR clone 180393 (TRAV2, TRAJ9)
CAVEDRSGGFKTIF

SEQ ID NO: 360786 - protein, 14 aa, Homo sapiens
  CDR3 for beta chain variable domain of TCR clone 180393 (TRBV19, TRBJ2-2)
CASSIAGAFGELFC

SEQ ID NO: 360787 - protein, 11 aa, Homo sapiens
  CDR3 for alpha chain variable domain of TCR clone 180394 (TRAV12-1, TRAJ37)
CVVNTPGKLIF

SEQ ID NO: 360788 - protein, 13 aa, Homo sapiens
  CDR3 for beta chain variable domain of TCR clone 180394 (TRBV12-4, TRBJ1-5)
CASSPDRAQAQHF

SEQ ID NO: 360789 - protein, 12 aa, Homo sapiens
  CDR3 for alpha chain variable domain of TCR clone 180395 (TRAV12-2, TRAJ8)
CAVATGFQKLVF

SEQ ID NO: 360790 - protein, 16 aa, Homo sapiens
  CDR3 for beta chain variable domain of TCR clone 180395 (TRBV19, TRBJ2-2)
CASRSPGTGATGELFF

SEQ ID NO: 360791 - protein, 14 aa, Homo sapiens
  CDR3 for alpha chain variable domain of TCR clone 180396 (TRAV12-3, TRAJ10)
SHLPLTGGGKKLTF

SEQ ID NO: 360792 - protein, 13 aa, Homo sapiens
  CDR3 for beta chain variable domain of TCR clone 180396 (TRBV9, TRBJ2-1)
CASSPSGGNEQFF

SEQ ID NO: 360793 - protein, 11 aa, Homo sapiens
  CDR3 for alpha chain variable domain of TCR clone 180397 (TRAV16, TRAJ33)
CALHSNYQLIW

SEQ ID NO: 360794 - protein, 12 aa, Homo sapiens
  CDR3 for beta chain variable domain of TCR clone 180397 (TRBV11-2, TRBJ2-5)
CASSLGQETQYF

SEQ ID NO: 360795 - protein, 15 aa, Homo sapiens
  CDR3 for alpha chain variable domain of TCR clone 180398 (TRAV8-3, TRAJ6)
CAVGPLGGGSYIPTF

SEQ ID NO: 360796 - protein, 14 aa, Homo sapiens
  CDR3 for beta chain variable domain of TCR clone 180398 (TRBV19, TRBJ2-2)
CASSTGQGAGELFC

SEQ ID NO: 360797 - protein, 12 aa, Homo sapiens
  CDR3 for alpha chain variable domain of TCR clone 180399 (TRAV2, TRAJ34)
CAVERNTDKLIF

SEQ ID NO: 360798 - protein, 12 aa, Homo sapiens
  CDR3 for beta chain variable domain of TCR clone 180399 (TRBV11-2, TRBJ2-2)
CASSLPTGELFF

SEQ ID NO: 360799 - protein, 13 aa, Homo sapiens
  CDR3 for alpha chain variable domain of TCR clone 180400 (TRAV3, TRAJ21)
CAVREPDFNKFYF

SEQ ID NO: 360800 - protein, 15 aa, Homo sapiens
  CDR3 for beta chain variable domain of TCR clone 180400 (TRBV7-9, TRBJ2-7)
CASSLPMGQANEQYF

SEQ ID NO: 360801 - protein, 15 aa, Homo sapiens
  CDR3 for alpha chain variable domain of TCR clone 180401 (TRAV12-2, TRAJ50)
CAVNGLETSYDKVIF

SEQ ID NO: 360802 - protein, 13 aa, Homo sapiens
  CDR3 for beta chain variable domain of TCR clone 180401 (TRBV20-1, TRBJ1-2)
CSARDRVYGGYTF

SEQ ID NO: 360803 - protein, 13 aa, Homo sapiens
  CDR3 for alpha chain variable domain of TCR clone 180402 (TRAV2, TRAJ40)
CAVVTSGTYKYTF

SEQ ID NO: 360804 - protein, 16 aa, Homo sapiens
  CDR3 for beta chain variable domain of TCR clone 180402 (TRBV19, TRBJ2-1)
CASSKAGPSSYNEQFF

SEQ ID NO: 360805 - protein, 13 aa, Homo sapiens
  CDR3 for alpha chain variable domain of TCR clone 180403 (TRAV21, TRAJ57)
CAVIEGGSETLVF

SEQ ID NO: 360806 - protein, 14 aa, Homo sapiens
  CDR3 for beta chain variable domain of TCR clone 180403 (TRBV12-5, TRBJ2-5)
CASGSRTHQETQYF

SEQ ID NO: 360807 - protein, 12 aa, Homo sapiens
  CDR3 for alpha chain variable domain of TCR clone 180404 (TRAV6, TRAJ34)
CALHRGTDKPLF

SEQ ID NO: 360808 - protein, 16 aa, Homo sapiens
  CDR3 for beta chain variable domain of TCR clone 180404 (TRBV3-1, TRBJ2-5)
CASSQDWASGQETQYF

SEQ ID NO: 360809 - protein, 14 aa, Homo sapiens
  CDR3 for alpha chain variable domain of TCR clone 180405 (TRAV13-1, TRAJ35)
CAASKGGLGNVLHC

SEQ ID NO: 360810 - protein, 14 aa, Homo sapiens
  CDR3 for beta chain variable domain of TCR clone 180405 (TRBV4-1, TRBJ2-2)
CASSQAVNTGELFL

SEQ ID NO: 360811 - protein, 15 aa, Homo sapiens
  CDR3 for alpha chain variable domain of TCR clone 180406 (TRAV26-1, TRAJ48)
CIARCSWFGNEKLTF

SEQ ID NO: 360812 - protein, 12 aa, Homo sapiens
  CDR3 for beta chain variable domain of TCR clone 180406 (TRBV19, TRBJ2-5)
CASSISEETQYF

SEQ ID NO: 360813 - protein, 16 aa, Homo sapiens
  CDR3 for alpha chain variable domain of TCR clone 180407 (TRAV35, TRAJ20)
CWADPSSGFNDYKLRF

SEQ ID NO: 360814 - protein, 16 aa, Homo sapiens
  CDR3 for beta chain variable domain of TCR clone 180407 (TRBV4-3, TRBJ1-6)
CASSAQPGGEGSPLHF

SEQ ID NO: 360815 - protein, 13 aa, Homo sapiens
  CDR3 for alpha chain variable domain of TCR clone 180408 (TRAV26-2, TRAJ43)
CILRAVNNHDMRF

SEQ ID NO: 360816 - protein, 14 aa, Homo sapiens
  CDR3 for beta chain variable domain of TCR clone 180408 (TRBV19, TRBJ2-1)
CASPTFVLSGEQFF

SEQ ID NO: 360817 - protein, 13 aa, Homo sapiens
  CDR3 for alpha chain variable domain of TCR clone 180409 (TRAV8-3, TRAJ44)
CAVVPGTASKLTF

SEQ ID NO: 360818 - protein, 14 aa, Homo sapiens
  CDR3 for beta chain variable domain of TCR clone 180409 (TRBV11-2, TRBJ2-3)
CASSRLARTDTQSF

SEQ ID NO: 360819 - protein, 12 aa, Homo sapiens
  CDR3 for alpha chain variable domain of TCR clone 180410 (TRAV8-3, TRAJ26)
CAGGNYGQNFVF

SEQ ID NO: 360820 - protein, 13 aa, Homo sapiens
  CDR3 for beta chain variable domain of TCR clone 180410 (TRBV20-1, TRBJ1-1)
CSAGTVGNTEAFF

SEQ ID NO: 360821 - protein, 13 aa, Homo sapiens
  CDR3 for alpha chain variable domain of TCR clone 180411 (TRAV19, TRAJ57)
CALLQGGSVKLVF

SEQ ID NO: 360822 - protein, 10 aa, Homo sapiens
  CDR3 for beta chain variable domain of TCR clone 180411 (TRBV20-1, TRBJ2-5)
CSARFETQYF

SEQ ID NO: 360823 - protein, 13 aa, Homo sapiens
  CDR3 for alpha chain variable domain of TCR clone 180412 (TRAV16, TRAJ58)
CALSIPSGSRLTF

SEQ ID NO: 360824 - protein, 17 aa, Homo sapiens
  CDR3 for beta chain variable domain of TCR clone 180412 (TRBV20-1, TRBJ2-2)
CSASGSGQGGLTGELFF

SEQ ID NO: 360825 - protein, 17 aa, Homo sapiens
  CDR3 for alpha chain variable domain of TCR clone 180413 (TRAV13-1, TRAJ52)
CAASSGAGGTSYGKLTF

SEQ ID NO: 360826 - protein, 15 aa, Homo sapiens
  CDR3 for beta chain variable domain of TCR clone 180413 (TRBV2, TRBJ2-1)
CASSELAGRYNEPFF

SEQ ID NO: 360827 - protein, 11 aa, Homo sapiens
  CDR3 for alpha chain variable domain of TCR clone 180414 (TRAV20, TRAJ23)
CACNQGGKLIF

SEQ ID NO: 360828 - protein, 15 aa, Homo sapiens
  CDR3 for beta chain variable domain of TCR clone 180414 (TRBV28, TRBJ1-3)
CASSMGWASGNTIYF

SEQ ID NO: 360829 - protein, 14 aa, Homo sapiens
  CDR3 for alpha chain variable domain of TCR clone 180415 (TRAV4, TRAJ11)
CLVGEYSGYSTLTF

SEQ ID NO: 360830 - protein, 18 aa, Homo sapiens
  CDR3 for beta chain variable domain of TCR clone 180415 (TRBV5-1, TRBJ2-7)
CASSSTGGASGYSYEQYF

SEQ ID NO: 360831 - protein, 18 aa, Homo sapiens
  CDR3 for alpha chain variable domain of TCR clone 180416 (TRAV12-1, TRAJ26)
SSVIQPPTSVPYGQNFVF

SEQ ID NO: 360832 - protein, 15 aa, Homo sapiens
  CDR3 for beta chain variable domain of TCR clone 180416 (TRBV7-9, TRBJ2-2)
CASGPLDTFPGELFF

SEQ ID NO: 360833 - protein, 15 aa, Homo sapiens
  CDR3 for alpha chain variable domain of TCR clone 180417 (TRAV26-1, TRAJ29)
CIVRVEGSGNTPLVF

SEQ ID NO: 360834 - protein, 18 aa, Homo sapiens
  CDR3 for beta chain variable domain of TCR clone 180417 (TRBV5-5, TRBJ1-5)
CASSLRQVKESSNQPQHF

SEQ ID NO: 360835 - protein, 15 aa, Homo sapiens
  CDR3 for alpha chain variable domain of TCR clone 180418 (TRAV23/DV6, TRAJ18)
CAARYRGSTLGSLYF

SEQ ID NO: 360836 - protein, 13 aa, Homo sapiens
  CDR3 for beta chain variable domain of TCR clone 180418 (TRBV7-2, TRBJ2-7)
CASSSPGGSEQYF

SEQ ID NO: 360837 - protein, 15 aa, Homo sapiens
  CDR3 for alpha chain variable domain of TCR clone 180419 (TRAV12-3, TRAJ52)
CNGGAGGTSYGKLTF

SEQ ID NO: 360838 - protein, 18 aa, Homo sapiens
  CDR3 for beta chain variable domain of TCR clone 180419 (TRBV11-2, TRBJ2-3)
CASSLGGASRGAPNTQYF

SEQ ID NO: 360839 - protein, 12 aa, Homo sapiens
  CDR3 for alpha chain variable domain of TCR clone 180420 (TRAV12-3, TRAJ17)
CAMTLTGNQLTF

SEQ ID NO: 360840 - protein, 15 aa, Homo sapiens
  CDR3 for beta chain variable domain of TCR clone 180420 (TRBV20-1, TRBJ2-7)
CSARDLVSGMDEQYF

SEQ ID NO: 360841 - protein, 13 aa, Homo sapiens
  CDR3 for alpha chain variable domain of TCR clone 180421 (TRAV13-2, TRAJ13)
CAERPGGYQKVTF

SEQ ID NO: 360842 - protein, 14 aa, Homo sapiens
  CDR3 for beta chain variable domain of TCR clone 180421 (TRBV23-1, TRBJ2-5)
CASSFLRSQENQYI

SEQ ID NO: 360843 - protein, 10 aa, Homo sapiens
  CDR3 for alpha chain variable domain of TCR clone 180422 (TRAV23/DV6, TRAJ20)
CAASPARLQA

SEQ ID NO: 360844 - protein, 18 aa, Homo sapiens
  CDR3 for beta chain variable domain of TCR clone 180422 (TRBV10-3, TRBJ2-3)
CAISESRVGPMRGDTQYF

SEQ ID NO: 360845 - protein, 15 aa, Homo sapiens
  CDR3 for alpha chain variable domain of TCR clone 180423 (TRAV3, TRAJ5)
CAVRDLDTGRRALTF

SEQ ID NO: 360846 - protein, 15 aa, Homo sapiens
  CDR3 for beta chain variable domain of TCR clone 180423 (TRBV11-3, TRBJ2-2)
CASSLGGRPTGELFF

SEQ ID NO: 360847 - protein, 15 aa, Homo sapiens
  CDR3 for alpha chain variable domain of TCR clone 180424 (TRAV3, TRAJ22)
CAVRDRGGSAKHLTF

SEQ ID NO: 360848 - protein, 15 aa, Homo sapiens
  CDR3 for beta chain variable domain of TCR clone 180424 (TRBV11-2, TRBJ1-3)
CASSIWGSYGNTIYF

SEQ ID NO: 360849 - protein, 13 aa, Homo sapiens
  CDR3 for alpha chain variable domain of TCR clone 180425 (TRAV13-1, TRAJ39)
CAASIWAGTMLTF

SEQ ID NO: 360850 - protein, 15 aa, Homo sapiens
  CDR3 for beta chain variable domain of TCR clone 180425 (TRBV7-9, TRBJ1-1)
CASSLLEQGGTEAFF

SEQ ID NO: 360851 - protein, 21 aa, Homo sapiens
  CDR3 for alpha chain variable domain of TCR clone 180426 (TRAV2, TRAJ23)
ILQVREADAAVYYCVGGKLIF

SEQ ID NO: 360852 - protein, 20 aa, Homo sapiens
  CDR3 for beta chain variable domain of TCR clone 180426 (TRBV20-1, TRBJ2-5)
CSARAGLAGRLAGHLETQYF

SEQ ID NO: 360853 - protein, 17 aa, Homo sapiens
  CDR3 for alpha chain variable domain of TCR clone 180427 (TRAV26-1, TRAJ53)
CIVRVDDSGGSNYKLKF

SEQ ID NO: 360854 - protein, 14 aa, Homo sapiens
  CDR3 for beta chain variable domain of TCR clone 180427 (TRBV24-1, TRBJ1-2)
CATSGRGSGAGYTF

SEQ ID NO: 360855 - protein, 16 aa, Homo sapiens
  CDR3 for alpha chain variable domain of TCR clone 180428 (TRAV1-2, TRAJ10)
CAVRGVLTGGGNKLTF

SEQ ID NO: 360856 - protein, 16 aa, Homo sapiens
  CDR3 for beta chain variable domain of TCR clone 180428 (TRBV11-2, TRBJ2-1)
CASSLRLAGVYNEQFF

SEQ ID NO: 360857 - protein, 14 aa, Homo sapiens
  CDR3 for alpha chain variable domain of TCR clone 180429 (TRAV1-1, TRAJ27)
CAVIDNTNAGKSTF

SEQ ID NO: 360858 - protein, 14 aa, Homo sapiens
  CDR3 for beta chain variable domain of TCR clone 180429 (TRBV6-5, TRBJ1-2)
CASSYDGTGGGYTF

SEQ ID NO: 360859 - protein, 13 aa, Homo sapiens
  CDR3 for alpha chain variable domain of TCR clone 180430 (TRAV17, TRAJ9)
CATASTGGFKTIF

SEQ ID NO: 360860 - protein, 15 aa, Homo sapiens
  CDR3 for beta chain variable domain of TCR clone 180430 (TRBV9, TRBJ1-6)
CASSVAGTGDSPLHF

SEQ ID NO: 360861 - protein, 13 aa, Homo sapiens
  CDR3 for alpha chain variable domain of TCR clone 180431 (TRAV21, TRAJ27)
CAARPGNAGKSTF

SEQ ID NO: 360862 - protein, 13 aa, Homo sapiens
  CDR3 for beta chain variable domain of TCR clone 180431 (TRBV7-9, TRBJ1-1)
CASTQGMNTEAFF

SEQ ID NO: 360863 - protein, 15 aa, Homo sapiens
  CDR3 for alpha chain variable domain of TCR clone 180432 (TRAV12-1, TRAJ44)
CVVFVNTGTASKPTF

SEQ ID NO: 360864 - protein, 17 aa, Homo sapiens
  CDR3 for beta chain variable domain of TCR clone 180432 (TRBV7-8, TRBJ2-6)
CASSAGTGGAGANVRTF

SEQ ID NO: 360865 - protein, 14 aa, Homo sapiens
  CDR3 for alpha chain variable domain of TCR clone 180433 (TRAV13-1, TRAJ13)
CAASRVGGYQKVTF

SEQ ID NO: 360866 - protein, 17 aa, Homo sapiens
  CDR3 for beta chain variable domain of TCR clone 180433 (TRBV15, TRBJ1-5)
CATSRAPPGTRNQRQHF

SEQ ID NO: 360867 - protein, 14 aa, Homo sapiens
  CDR3 for alpha chain variable domain of TCR clone 180434 (TRAV2, TRAJ9)
CAVEERSGGFKTIF

SEQ ID NO: 360868 - protein, 16 aa, Homo sapiens
  CDR3 for beta chain variable domain of TCR clone 180434 (TRBV20-1, TRBJ1-4)
CSAPGQGLLTNEKLFF

SEQ ID NO: 360869 - protein, 13 aa, Homo sapiens
  CDR3 for alpha chain variable domain of TCR clone 180435 (TRAV1-1, TRAJ13)
CAVNYGGYQKVTF

SEQ ID NO: 360870 - protein, 12 aa, Homo sapiens
  CDR3 for beta chain variable domain of TCR clone 180435 (TRBV28, TRBJ2-1)
CASSVQINEQFF

SEQ ID NO: 360871 - protein, 12 aa, Homo sapiens
  CDR3 for alpha chain variable domain of TCR clone 180436 (TRAV13-2, TRAJ23)
CAERHRGGKLIF

SEQ ID NO: 360872 - protein, 14 aa, Homo sapiens
  CDR3 for beta chain variable domain of TCR clone 180436 (TRBV7-9, TRBJ2-1)
CASSLVVGADEQFF

SEQ ID NO: 360873 - protein, 15 aa, Homo sapiens
  CDR3 for alpha chain variable domain of TCR clone 180437 (TRAV8-3, TRAJ45)
CASSYSGGGADGLTF

SEQ ID NO: 360874 - protein, 15 aa, Homo sapiens
  CDR3 for beta chain variable domain of TCR clone 180437 (TRBV12-4, TRBJ2-1)
CASSLLATGNNEQFV

SEQ ID NO: 360875 - protein, 13 aa, Homo sapiens
  CDR3 for alpha chain variable domain of TCR clone 180438 (TRAV38-2/DV8, TRAJ34)
CACRWGNTDKLIF

SEQ ID NO: 360876 - protein, 14 aa, Homo sapiens
  CDR3 for beta chain variable domain of TCR clone 180438 (TRBV7-2, TRBJ2-7)
CASSPKTSFYEQYF

SEQ ID NO: 360877 - protein, 13 aa, Homo sapiens
  CDR3 for alpha chain variable domain of TCR clone 180439 (TRAV21, TRAJ20)
CAVGLRVDYKLSF

SEQ ID NO: 360878 - protein, 13 aa, Homo sapiens
  CDR3 for beta chain variable domain of TCR clone 180439 (TRBV6-1, TRBJ2-2)
CGNSGHNTGELFF

SEQ ID NO: 360879 - protein, 14 aa, Homo sapiens
  CDR3 for alpha chain variable domain of TCR clone 180440 (TRAV12-3, TRAJ10)
SHLPLTGGGDKLTF

SEQ ID NO: 360880 - protein, 12 aa, Homo sapiens
  CDR3 for beta chain variable domain of TCR clone 180440 (TRBV14, TRBJ1-1)
CASSQLKGLAFC

SEQ ID NO: 360881 - protein, 16 aa, Homo sapiens
  CDR3 for alpha chain variable domain of TCR clone 180441 (TRAV13-1, TRAJ48)
CAASIFGNFGNEKLTF

SEQ ID NO: 360882 - protein, 13 aa, Homo sapiens
  CDR3 for beta chain variable domain of TCR clone 180441 (TRBV7-7, TRBJ2-3)
CASSLSSADTQYF

SEQ ID NO: 360883 - protein, 13 aa, Homo sapiens
  CDR3 for alpha chain variable domain of TCR clone 180442 (TRAV36/DV7, TRAJ54)
CAVDIQGAQKPVF

SEQ ID NO: 360884 - protein, 14 aa, Homo sapiens
  CDR3 for beta chain variable domain of TCR clone 180442 (TRBV19, TRBJ2-7)
CSSNFRDTFTGMYF

SEQ ID NO: 360885 - protein, 17 aa, Homo sapiens
  CDR3 for alpha chain variable domain of TCR clone 180443 (TRAV3, TRAJ6)
CAVRDGPRAGGRYIPTF

SEQ ID NO: 360886 - protein, 20 aa, Homo sapiens
  CDR3 for beta chain variable domain of TCR clone 180443 (TRBV28, TRBJ2-1)
CASTPIGRSPGLAGGNEQFF

SEQ ID NO: 360887 - protein, 14 aa, Homo sapiens
  CDR3 for alpha chain variable domain of TCR clone 180444 (TRAV13-1, TRAJ40)
CAASMTSGTYKYIF

SEQ ID NO: 360888 - protein, 14 aa, Homo sapiens
  CDR3 for beta chain variable domain of TCR clone 180444 (TRBV7-3, TRBJ2-1)
CQQPDGGREVEQFF

SEQ ID NO: 360889 - protein, 15 aa, Homo sapiens
  CDR3 for alpha chain variable domain of TCR clone 180445 (TRAV17, TRAJ57)
CATGPSQGGSEKLVF

SEQ ID NO: 360890 - protein, 15 aa, Homo sapiens
  CDR3 for beta chain variable domain of TCR clone 180445 (TRBV25-1, TRBJ1-4)
CASSPGDSTKEKLFF

SEQ ID NO: 360891 - protein, 13 aa, Homo sapiens
  CDR3 for alpha chain variable domain of TCR clone 180446 (TRAV13-1, TRAJ39)
CATSIVMQATCSP

SEQ ID NO: 360892 - protein, 15 aa, Homo sapiens
  CDR3 for beta chain variable domain of TCR clone 180446 (TRBV20-1, TRBJ2-2)
CSARGGQGNTGELFF

SEQ ID NO: 360893 - protein, 17 aa, Homo sapiens
  CDR3 for alpha chain variable domain of TCR clone 180447 (TRAV2, TRAJ22)
ILQVREADAAEQRQLTF

SEQ ID NO: 360894 - protein, 13 aa, Homo sapiens
  CDR3 for beta chain variable domain of TCR clone 180447 (TRBV3-1, TRBJ2-3)
CASSQALGDTQYF

SEQ ID NO: 360895 - protein, 11 aa, Homo sapiens
  CDR3 for alpha chain variable domain of TCR clone 180448 (TRAV2, TRAJ33)
CAVESNYQLIW

SEQ ID NO: 360896 - protein, 14 aa, Homo sapiens
  CDR3 for beta chain variable domain of TCR clone 180448 (TRBV7-2, TRBJ2-5)
CASSFTQGQETQYF

SEQ ID NO: 360897 - protein, 12 aa, Homo sapiens
  CDR3 for alpha chain variable domain of TCR clone 180449 (TRAV12-3, TRAJ17)
CAMTLTGTKLTF

SEQ ID NO: 360898 - protein, 15 aa, Homo sapiens
  CDR3 for beta chain variable domain of TCR clone 180449 (TRBV20-1, TRBJ2-7)
CSARDRVSGMDEQNF

SEQ ID NO: 360899 - protein, 15 aa, Homo sapiens
  CDR3 for alpha chain variable domain of TCR clone 180450 (TRAV38-1, TRAJ57)
CAFMDSQGGSEKLVF

SEQ ID NO: 360900 - protein, 16 aa, Homo sapiens
  CDR3 for beta chain variable domain of TCR clone 180450 (TRBV10-3, TRBJ2-1)
YAIRGGGRGDYNEQFF

SEQ ID NO: 360901 - protein, 12 aa, Homo sapiens
  CDR3 for alpha chain variable domain of TCR clone 180451 (TRAV12-3, TRAJ17)
CAMTLTGNKLPF

SEQ ID NO: 360902 - protein, 15 aa, Homo sapiens
  CDR3 for beta chain variable domain of TCR clone 180451 (TRBV20-1, TRBJ2-7)
CSARDRVSGMDEQYC

SEQ ID NO: 360903 - protein, 15 aa, Homo sapiens
  CDR3 for alpha chain variable domain of TCR clone 180452 (TRAV3, TRAJ4)
CAVRDGTGGYNKLIF

SEQ ID NO: 360904 - protein, 13 aa, Homo sapiens
  CDR3 for beta chain variable domain of TCR clone 180452 (TRBV12-5, TRBJ1-2)
CASSVRTGNGYTF

SEQ ID NO: 360905 - protein, 14 aa, Homo sapiens
  CDR3 for alpha chain variable domain of TCR clone 180453 (TRAV13-1, TRAJ9)
CAASALTGGFKTIF

SEQ ID NO: 360906 - protein, 16 aa, Homo sapiens
  CDR3 for beta chain variable domain of TCR clone 180453 (TRBV7-8, TRBJ2-4)
CASSAERTLDKNIQYF

SEQ ID NO: 360907 - protein, 11 aa, Homo sapiens
  CDR3 for alpha chain variable domain of TCR clone 180454 (TRAV12-1, TRAJ3)
CVVSSASKIIF

SEQ ID NO: 360908 - protein, 15 aa, Homo sapiens
  CDR3 for beta chain variable domain of TCR clone 180454 (TRBV7-2, TRBJ1-2)
CASSLVSGGDYGYTF

SEQ ID NO: 360909 - protein, 20 aa, Homo sapiens
  CDR3 for alpha chain variable domain of TCR clone 180455 (TRAV25, TRAJ33)
TAAQTTDVGTARGSNYQLIW

SEQ ID NO: 360910 - protein, 14 aa, Homo sapiens
  CDR3 for beta chain variable domain of TCR clone 180455 (TRBV7-2, TRBJ2-5)
CASSTGGELKTQYF

SEQ ID NO: 360911 - protein, 12 aa, Homo sapiens
  CDR3 for alpha chain variable domain of TCR clone 180456 (TRAV17, TRAJ4)
CATDGGYNKLIF

SEQ ID NO: 360912 - protein, 13 aa, Homo sapiens
  CDR3 for beta chain variable domain of TCR clone 180456 (TRBV29-1, TRBJ2-2)
CSTTGGNAGELFF

SEQ ID NO: 360913 - protein, 15 aa, Homo sapiens
  CDR3 for alpha chain variable domain of TCR clone 180457 (TRAV8-4, TRAJ37)
CAVSRGSGNTGTLIF

SEQ ID NO: 360914 - protein, 15 aa, Homo sapiens
  CDR3 for beta chain variable domain of TCR clone 180457 (TRBV5-1, TRBJ2-7)
CASSLDLTSSYEQYF

SEQ ID NO: 360915 - protein, 15 aa, Homo sapiens
  CDR3 for alpha chain variable domain of TCR clone 180458 (TRAV8-2, TRAJ36)
CVLSENWGKQPLLWD

SEQ ID NO: 360916 - protein, 15 aa, Homo sapiens
  CDR3 for beta chain variable domain of TCR clone 180458 (TRBV20-1, TRBJ2-5)
CSAEGTGGLQETQYF

SEQ ID NO: 360917 - protein, 12 aa, Homo sapiens
  CDR3 for alpha chain variable domain of TCR clone 180459 (TRAV13-1, TRAJ21)
RAAKEGFNKFYF

SEQ ID NO: 360918 - protein, 17 aa, Homo sapiens
  CDR3 for beta chain variable domain of TCR clone 180459 (TRBV19, TRBJ2-7)
CASSISFYDSYPYEQYF

SEQ ID NO: 360919 - protein, 14 aa, Homo sapiens
  CDR3 for alpha chain variable domain of TCR clone 180460 (TRAV26-1, TRAJ45)
CIVRVVGGADGLTF

SEQ ID NO: 360920 - protein, 16 aa, Homo sapiens
  CDR3 for beta chain variable domain of TCR clone 180460 (TRBV7-9, TRBJ1-1)
CASSLTRVRSNTEAFF

SEQ ID NO: 360921 - protein, 14 aa, Homo sapiens
  CDR3 for alpha chain variable domain of TCR clone 180461 (TRAV13-1, TRAJ47)
CAADPGEYGNKLVF

SEQ ID NO: 360922 - protein, 16 aa, Homo sapiens
  CDR3 for beta chain variable domain of TCR clone 180461 (TRBV20-1, TRBJ1-4)
CSAPGQGLLTNEKLFF

SEQ ID NO: 360923 - protein, 20 aa, Homo sapiens
  CDR3 for alpha chain variable domain of TCR clone 180462 (TRAV1-1, TRAJ4)
CLLLLRYEGFLSGGYNKLIF

SEQ ID NO: 360924 - protein, 16 aa, Homo sapiens
  CDR3 for beta chain variable domain of TCR clone 180462 (TRBV28, TRBJ1-4)
CASSPPYGGRSEKLFF

SEQ ID NO: 360925 - protein, 15 aa, Homo sapiens
  CDR3 for alpha chain variable domain of TCR clone 180463 (TRAV26-1, TRAJ28)
CIVRVARAGSYQLTF

SEQ ID NO: 360926 - protein, 19 aa, Homo sapiens
  CDR3 for beta chain variable domain of TCR clone 180463 (TRBV7-3, TRBJ2-7)
CASSLTGVAGGWPSYEQYF

SEQ ID NO: 360927 - protein, 15 aa, Homo sapiens
  CDR3 for alpha chain variable domain of TCR clone 180464 (TRAV38-1, TRAJ37)
CAFIFGSGNTAKLIF

SEQ ID NO: 360928 - protein, 12 aa, Homo sapiens
  CDR3 for beta chain variable domain of TCR clone 180464 (TRBV7-9, TRBJ2-7)
CASSLEGYEQYF

SEQ ID NO: 360929 - protein, 14 aa, Homo sapiens
  CDR3 for alpha chain variable domain of TCR clone 180465 (TRAV29/DV5, TRAJ32)
CAAAYGGATNKLIF

SEQ ID NO: 360930 - protein, 14 aa, Homo sapiens
  CDR3 for beta chain variable domain of TCR clone 180465 (TRBV25-1, TRBJ1-1)
CASTHLGGNTEAFF

SEQ ID NO: 360931 - protein, 13 aa, Homo sapiens
  CDR3 for alpha chain variable domain of TCR clone 180466 (TRAV27, TRAJ58)
CAGFETSGSRLTF

SEQ ID NO: 360932 - protein, 13 aa, Homo sapiens
  CDR3 for beta chain variable domain of TCR clone 180466 (TRBV7-9, TRBJ1-2)
CASSLKQNYGYTF

SEQ ID NO: 360933 - protein, 13 aa, Homo sapiens
  CDR3 for alpha chain variable domain of TCR clone 180467 (TRAV21, TRAJ57)
CAVTQGGSEKLVF

SEQ ID NO: 360934 - protein, 17 aa, Homo sapiens
  CDR3 for beta chain variable domain of TCR clone 180467 (TRBV20-1, TRBJ2-1)
CSARDPLAGVWDNEQFF

SEQ ID NO: 360935 - protein, 13 aa, Homo sapiens
  CDR3 for alpha chain variable domain of TCR clone 180468 (TRAV12-3, TRAJ33)
CAMSVNSNYQLIW

SEQ ID NO: 360936 - protein, 16 aa, Homo sapiens
  CDR3 for beta chain variable domain of TCR clone 180468 (TRBV4-2, TRBJ2-7)
CASSPEGLAISYEQYF

SEQ ID NO: 360937 - protein, 15 aa, Homo sapiens
  CDR3 for alpha chain variable domain of TCR clone 180469 (TRAV29/DV5, TRAJ24)
CAAGGATDSWGKFQF

SEQ ID NO: 360938 - protein, 12 aa, Homo sapiens
  CDR3 for beta chain variable domain of TCR clone 180469 (TRBV11-2, TRBJ2-2)
CASSLPTGELFF

SEQ ID NO: 360939 - protein, 22 aa, Homo sapiens
  CDR3 for alpha chain variable domain of TCR clone 180470 (TRAV27, TRAJ58)
TAAQPGDTSLYLSETSGSRLTF

SEQ ID NO: 360940 - protein, 14 aa, Homo sapiens
  CDR3 for beta chain variable domain of TCR clone 180470 (TRBV25-1, TRBJ1-1)
CASTHLGGNTEAFF

SEQ ID NO: 360941 - protein, 13 aa, Homo sapiens
  CDR3 for alpha chain variable domain of TCR clone 180471 (TRAV1-2, TRAJ9)
CAALNTGGFKTIF

SEQ ID NO: 360942 - protein, 13 aa, Homo sapiens
  CDR3 for beta chain variable domain of TCR clone 180471 (TRBV28, TRBJ1-1)
CASRGGLNTEAFF

SEQ ID NO: 360943 - protein, 14 aa, Homo sapiens
  CDR3 for alpha chain variable domain of TCR clone 180472 (TRAV13-1, TRAJ13)
CAASRVGGYQKVTF

SEQ ID NO: 360944 - protein, 13 aa, Homo sapiens
  CDR3 for beta chain variable domain of TCR clone 180472 (TRBV7-3, TRBJ2-1)
CASSLWPYNEQFF

SEQ ID NO: 360945 - protein, 11 aa, Homo sapiens
  CDR3 for alpha chain variable domain of TCR clone 180473 (TRAV12-3, TRAJ49)
CAANTGNQFHF

SEQ ID NO: 360946 - protein, 12 aa, Homo sapiens
  CDR3 for beta chain variable domain of TCR clone 180473 (TRBV6-3, TRBJ2-7)
CASSEPGFEQYF

SEQ ID NO: 360947 - protein, 14 aa, Homo sapiens
  CDR3 for alpha chain variable domain of TCR clone 180474 (TRAV12-2, TRAJ40)
CAVKIPSGTYKYIF

SEQ ID NO: 360948 - protein, 14 aa, Homo sapiens
  CDR3 for beta chain variable domain of TCR clone 180474 (TRBV7-8, TRBJ2-7)
CASSPRDRVYEQYV

SEQ ID NO: 360949 - protein, 18 aa, Homo sapiens
  CDR3 for alpha chain variable domain of TCR clone 180475 (TRAV21, TRAJ52)
CAVRPSPAGGTSYGKLTF

SEQ ID NO: 360950 - protein, 17 aa, Homo sapiens
  CDR3 for beta chain variable domain of TCR clone 180475 (TRBV5-1, TRBJ2-5)
CASSRLGLAANQETQYF

SEQ ID NO: 360951 - protein, 13 aa, Homo sapiens
  CDR3 for alpha chain variable domain of TCR clone 180476 (TRAV12-2, TRAJ34)
CAVRGYNTDKLIV

SEQ ID NO: 360952 - protein, 15 aa, Homo sapiens
  CDR3 for beta chain variable domain of TCR clone 180476 (TRBV28, TRBJ2-1)
CASRTGAGVIARQFF

SEQ ID NO: 360953 - protein, 15 aa, Homo sapiens
  CDR3 for alpha chain variable domain of TCR clone 180477 (TRAV12-2, TRAJ23)
CAVNTLYNQGGKLIF

SEQ ID NO: 360954 - protein, 12 aa, Homo sapiens
  CDR3 for beta chain variable domain of TCR clone 180477 (TRBV11-2, TRBJ2-2)
CASSLGGGELFF

SEQ ID NO: 360955 - protein, 12 aa, Homo sapiens
  CDR3 for alpha chain variable domain of TCR clone 180478 (TRAV8-3, TRAJ20)
CAVGANDYKLSF

SEQ ID NO: 360956 - protein, 16 aa, Homo sapiens
  CDR3 for beta chain variable domain of TCR clone 180478 (TRBV19, TRBJ2-2)
GASRSPGTGATGELVF

SEQ ID NO: 360957 - protein, 12 aa, Homo sapiens
  CDR3 for alpha chain variable domain of TCR clone 180479 (TRAV13-2, TRAJ8)
CAPWLGFQKLVF

SEQ ID NO: 360958 - protein, 16 aa, Homo sapiens
  CDR3 for beta chain variable domain of TCR clone 180479 (TRBV6-1, TRBJ1-2)
CASSGAWQGRSHGYTF

SEQ ID NO: 360959 - protein, 14 aa, Homo sapiens
  CDR3 for alpha chain variable domain of TCR clone 180480 (TRAV1-2, TRAJ8)
CAVREDTGFQKLVF

SEQ ID NO: 360960 - protein, 13 aa, Homo sapiens
  CDR3 for beta chain variable domain of TCR clone 180480 (TRBV5-5, TRBJ1-2)
CASSFWRGEDYTF

SEQ ID NO: 360961 - protein, 12 aa, Homo sapiens
  CDR3 for alpha chain variable domain of TCR clone 180481 (TRAV13-1, TRAJ21)
CAAKEGFNKFYF

SEQ ID NO: 360962 - protein, 12 aa, Homo sapiens
  CDR3 for beta chain variable domain of TCR clone 180481 (TRBV7-8, TRBJ2-7)
CASSLAGYEQYF

SEQ ID NO: 360963 - protein, 11 aa, Homo sapiens
  CDR3 for alpha chain variable domain of TCR clone 180482 (TRAV21, TRAJ11)
CAVTGYSTLTF

SEQ ID NO: 360964 - protein, 16 aa, Homo sapiens
  CDR3 for beta chain variable domain of TCR clone 180482 (TRBV12-5, TRBJ2-5)
CASGPRTSGNQETQYF

SEQ ID NO: 360965 - protein, 11 aa, Homo sapiens
  CDR3 for alpha chain variable domain of TCR clone 180483 (TRAV23/DV6, TRAJ48)
CAPRWGEKLTF

SEQ ID NO: 360966 - protein, 12 aa, Homo sapiens
  CDR3 for beta chain variable domain of TCR clone 180483 (TRBV7-9, TRBJ1-1)
CASSPSSTEAFF

SEQ ID NO: 360967 - protein, 15 aa, Homo sapiens
  CDR3 for alpha chain variable domain of TCR clone 180484 (TRAV8-3, TRAJ45)
CASSYSGGGADGLTF

SEQ ID NO: 360968 - protein, 14 aa, Homo sapiens
  CDR3 for beta chain variable domain of TCR clone 180484 (TRBV20-1, TRBJ2-7)
CSAKRGRSSYEQYF

SEQ ID NO: 360969 - protein, 13 aa, Homo sapiens
  CDR3 for alpha chain variable domain of TCR clone 180485 (TRAV2, TRAJ40)
CAVVTSGTYKYIF

SEQ ID NO: 360970 - protein, 16 aa, Homo sapiens
  CDR3 for beta chain variable domain of TCR clone 180485 (TRBV19, TRBJ2-2)
CASRSPGTRATGELFF

SEQ ID NO: 360971 - protein, 11 aa, Homo sapiens
  CDR3 for alpha chain variable domain of TCR clone 180486 (TRAV2, TRAJ13)
CASGCYQKVTF

SEQ ID NO: 360972 - protein, 16 aa, Homo sapiens
  CDR3 for beta chain variable domain of TCR clone 180486 (TRBV2, TRBJ2-1)
CASSVGGSLSYNEQFF

SEQ ID NO: 360973 - protein, 15 aa, Homo sapiens
  CDR3 for alpha chain variable domain of TCR clone 180487 (TRAV8-3, TRAJ45)
CASSYSGGGADGLAF

SEQ ID NO: 360974 - protein, 13 aa, Homo sapiens
  CDR3 for beta chain variable domain of TCR clone 180487 (TRBV10-3, TRBJ2-7)
CASKLAVKYEQYF

SEQ ID NO: 360975 - protein, 19 aa, Homo sapiens
  CDR3 for alpha chain variable domain of TCR clone 180488 (TRAV2, TRAJ20)
ILQVREADAADYRDCKLSF

SEQ ID NO: 360976 - protein, 16 aa, Homo sapiens
  CDR3 for beta chain variable domain of TCR clone 180488 (TRBV19, TRBJ2-1)
CASSKAGPSSYNEQFF

SEQ ID NO: 360977 - protein, 14 aa, Homo sapiens
  CDR3 for alpha chain variable domain of TCR clone 180489 (TRAV2, TRAJ3)
CAVPPCSSASKIIF

SEQ ID NO: 360978 - protein, 16 aa, Homo sapiens
  CDR3 for beta chain variable domain of TCR clone 180489 (TRBV19, TRBJ2-1)
CASSTAGPSSYNEQFF

SEQ ID NO: 360979 - protein, 21 aa, Homo sapiens
  CDR3 for alpha chain variable domain of TCR clone 180490 (TRAV8-4, TRAJ47)
HLTKPSAHMTDAAERGNKLVF

SEQ ID NO: 360980 - protein, 14 aa, Homo sapiens
  CDR3 for beta chain variable domain of TCR clone 180490 (TRBV7-9, TRBJ2-1)
CASSPRDSLYEQFF

SEQ ID NO: 360981 - protein, 16 aa, Homo sapiens
  CDR3 for alpha chain variable domain of TCR clone 180491 (TRAV8-3, TRAJ4)
CAVGASGGYNKLILEQ

SEQ ID NO: 360982 - protein, 16 aa, Homo sapiens
  CDR3 for beta chain variable domain of TCR clone 180491 (TRBV4-3, TRBJ2-2)
CASSHLQGSGTGELFF

SEQ ID NO: 360983 - protein, 16 aa, Homo sapiens
  CDR3 for alpha chain variable domain of TCR clone 180492 (TRAV30, TRAJ24)
CGTEIVDADSWGKFQF

SEQ ID NO: 360984 - protein, 15 aa, Homo sapiens
  CDR3 for beta chain variable domain of TCR clone 180492 (TRBV5-1, TRBJ2-1)
CASTGSGRTYNEQFF

SEQ ID NO: 360985 - protein, 10 aa, Homo sapiens
  CDR3 for alpha chain variable domain of TCR clone 180493 (TRAV23/DV6, TRAJ57)
CAASSTLPQG

SEQ ID NO: 360986 - protein, 14 aa, Homo sapiens
  CDR3 for beta chain variable domain of TCR clone 180493 (TRBV25-1, TRBJ1-1)
CASTHLGGNTEAVF

SEQ ID NO: 360987 - protein, 15 aa, Homo sapiens
  CDR3 for alpha chain variable domain of TCR clone 180494 (TRAV13-1, TRAJ32)
CAASIYGGATNKLIF

SEQ ID NO: 360988 - protein, 12 aa, Homo sapiens
  CDR3 for beta chain variable domain of TCR clone 180494 (TRBV7-6, TRBJ2-3)
CASSTGTDTQYL

SEQ ID NO: 360989 - protein, 14 aa, Homo sapiens
  CDR3 for alpha chain variable domain of TCR clone 180495 (TRAV23/DV6, TRAJ4)
CAATFLVGTISLFF

SEQ ID NO: 360990 - protein, 11 aa, Homo sapiens
  CDR3 for beta chain variable domain of TCR clone 180495 (TRBV7-9, TRBJ2-3)
CASSPTDTQYF

SEQ ID NO: 360991 - protein, 13 aa, Homo sapiens
  CDR3 for alpha chain variable domain of TCR clone 180496 (TRAV3, TRAJ27)
CALRPLGACKSTF

SEQ ID NO: 360992 - protein, 13 aa, Homo sapiens
  CDR3 for beta chain variable domain of TCR clone 180496 (TRBV7-9, TRBJ2-3)
CASSPGSTDTQYF

SEQ ID NO: 360993 - protein, 13 aa, Homo sapiens
  CDR3 for alpha chain variable domain of TCR clone 180497 (TRAV20, TRAJ37)
CARCPSNTGKLIF

SEQ ID NO: 360994 - protein, 14 aa, Homo sapiens
  CDR3 for beta chain variable domain of TCR clone 180497 (TRBV20-1, TRBJ2-5)
CSARDGRAGETQYF

SEQ ID NO: 360995 - protein, 11 aa, Homo sapiens
  CDR3 for alpha chain variable domain of TCR clone 180498 (TRAV21, TRAJ48)
CAVDGNEKLTF

SEQ ID NO: 360996 - protein, 13 aa, Homo sapiens
  CDR3 for beta chain variable domain of TCR clone 180498 (TRBV12-4, TRBJ1-2)
CASSLRQGKGYTF

SEQ ID NO: 360997 - protein, 13 aa, Homo sapiens
  CDR3 for alpha chain variable domain of TCR clone 180499 (TRAV14/DV4, TRAJ22)
CAMRDLSARQRTF

SEQ ID NO: 360998 - protein, 18 aa, Homo sapiens
  CDR3 for beta chain variable domain of TCR clone 180499 (TRBV19, TRBJ1-5)
CASSKGQVSIHSNQPQHF

SEQ ID NO: 360999 - protein, 13 aa, Homo sapiens
  CDR3 for alpha chain variable domain of TCR clone 180500 (TRAV26-1, TRAJ23)
CIDLRTRGGKLIF

SEQ ID NO: 361000 - protein, 14 aa, Homo sapiens
  CDR3 for beta chain variable domain of TCR clone 180500 (TRBV2, TRBJ2-7)
CASSRDRSSYEHYF

SEQ ID NO: 361001 - protein, 13 aa, Homo sapiens
  CDR3 for alpha chain variable domain of TCR clone 180501 (TRAV8-3, TRAJ28)
CAVRAVVSYQLTF

SEQ ID NO: 361002 - protein, 15 aa, Homo sapiens
  CDR3 for beta chain variable domain of TCR clone 180501 (TRBV7-9, TRBJ1-5)
CASSQGHQPNQPQHF

SEQ ID NO: 361003 - protein, 12 aa, Homo sapiens
  CDR3 for alpha chain variable domain of TCR clone 180502 (TRAV13-1, TRAJ40)
CAASWATYKYIF

SEQ ID NO: 361004 - protein, 15 aa, Homo sapiens
  CDR3 for beta chain variable domain of TCR clone 180502 (TRBV7-8, TRBJ2-1)
CASSSRLAAYNAQFF

SEQ ID NO: 361005 - protein, 12 aa, Homo sapiens
  CDR3 for alpha chain variable domain of TCR clone 180503 (TRAV13-1, TRAJ21)
CAAFFNFNKFYF

SEQ ID NO: 361006 - protein, 12 aa, Homo sapiens
  CDR3 for beta chain variable domain of TCR clone 180503 (TRBV19, TRBJ2-7)
CASTDRDYEQYF

SEQ ID NO: 361007 - protein, 15 aa, Homo sapiens
  CDR3 for alpha chain variable domain of TCR clone 180504 (TRAV12-2, TRAJ43)
CAFDMRFGAGNRLTV

SEQ ID NO: 361008 - protein, 14 aa, Homo sapiens
  CDR3 for beta chain variable domain of TCR clone 180504 (TRBV20-1, TRBJ2-3)
RTSGGPGTTDTQYF

SEQ ID NO: 361009 - protein, 13 aa, Homo sapiens
  CDR3 for alpha chain variable domain of TCR clone 180505 (TRAV3, TRAJ41)
CAVSSNSGYALNF

SEQ ID NO: 361010 - protein, 13 aa, Homo sapiens
  CDR3 for beta chain variable domain of TCR clone 180505 (TRBV20-1, TRBJ2-2)
CSALSGGAGELFF

SEQ ID NO: 361011 - protein, 22 aa, Homo sapiens
  CDR3 for alpha chain variable domain of TCR clone 180506 (TRAV2, TRAJ38)
CAVEDFPNAGNNHIQNPDPAVY

SEQ ID NO: 361012 - protein, 13 aa, Homo sapiens
  CDR3 for beta chain variable domain of TCR clone 180506 (TRBV13, TRBJ1-4)
CASSSASGEKLFF

SEQ ID NO: 361013 - protein, 12 aa, Homo sapiens
  CDR3 for alpha chain variable domain of TCR clone 180507 (TRAV2, TRAJ9)
CAVVAGGFKTIF

SEQ ID NO: 361014 - protein, 16 aa, Homo sapiens
  CDR3 for beta chain variable domain of TCR clone 180507 (TRBV13, TRBJ2-2)
CASSPRTGENTGELFF

SEQ ID NO: 361015 - protein, 17 aa, Homo sapiens
  CDR3 for alpha chain variable domain of TCR clone 180508 (TRAV3, TRAJ6)
CAVRDGPRAGGSYVPTF

SEQ ID NO: 361016 - protein, 14 aa, Homo sapiens
  CDR3 for beta chain variable domain of TCR clone 180508 (TRBV7-2, TRBJ2-7)
CASSPKTSFYEQYV

SEQ ID NO: 361017 - protein, 11 aa, Homo sapiens
  CDR3 for alpha chain variable domain of TCR clone 180509 (TRAV2, TRAJ33)
CAVDSNYQVIW

SEQ ID NO: 361018 - protein, 13 aa, Homo sapiens
  CDR3 for beta chain variable domain of TCR clone 180509 (TRBV7-2, TRBJ2-7)
CASSSPSGSEQYF

SEQ ID NO: 361019 - protein, 15 aa, Homo sapiens
  CDR3 for alpha chain variable domain of TCR clone 180510 (TRAV8-2, TRAJ40)
CVVLGTTSGTYKYLF

SEQ ID NO: 361020 - protein, 16 aa, Homo sapiens
  CDR3 for beta chain variable domain of TCR clone 180510 (TRBV7-3, TRBJ2-1)
CASSLDGYRSYNEQFF

SEQ ID NO: 361021 - protein, 14 aa, Homo sapiens
  CDR3 for alpha chain variable domain of TCR clone 180511 (TRAV35, TRAJ22)
CAGLRPGSARQLTF

SEQ ID NO: 361022 - protein, 15 aa, Homo sapiens
  CDR3 for beta chain variable domain of TCR clone 180511 (TRBV28, TRBJ2-5)
CASSPGQGSIETQYF

SEQ ID NO: 361023 - protein, 14 aa, Homo sapiens
  CDR3 for alpha chain variable domain of TCR clone 180512 (TRAV38-1, TRAJ45)
CAYYSGGGADGCTF

SEQ ID NO: 361024 - protein, 20 aa, Homo sapiens
  CDR3 for beta chain variable domain of TCR clone 180512 (TRBV28, TRBJ2-1)
CASTPIGRSPGLAGGNEQFF

SEQ ID NO: 361025 - protein, 18 aa, Homo sapiens
  CDR3 for alpha chain variable domain of TCR clone 180513 (TRAV1-1, TRAJ29)
CLLLLRCASNSGNTPLVF

SEQ ID NO: 361026 - protein, 15 aa, Homo sapiens
  CDR3 for beta chain variable domain of TCR clone 180513 (TRBV9, TRBJ1-6)
CASSVAGTGDSPLHF

SEQ ID NO: 361027 - protein, 12 aa, Homo sapiens
  CDR3 for alpha chain variable domain of TCR clone 180514 (TRAV1-1, TRAJ24)
CAVRGSWGKFQF

SEQ ID NO: 361028 - protein, 19 aa, Homo sapiens
  CDR3 for beta chain variable domain of TCR clone 180514 (TRBV25-1, TRBJ2-2)
CAILVYRVDRGRKTGELFF

SEQ ID NO: 361029 - protein, 14 aa, Homo sapiens
  CDR3 for alpha chain variable domain of TCR clone 180515 (TRAV12-2, TRAJ3)
CAVSLYSSASKIIF

SEQ ID NO: 361030 - protein, 17 aa, Homo sapiens
  CDR3 for beta chain variable domain of TCR clone 180515 (TRBV11-2, TRBJ2-1)
CASSLYPPGVEYNEQFF

SEQ ID NO: 361031 - protein, 12 aa, Homo sapiens
  CDR3 for alpha chain variable domain of TCR clone 180516 (TRAV21, TRAJ8)
CALNTGFQKLVF

SEQ ID NO: 361032 - protein, 13 aa, Homo sapiens
  CDR3 for beta chain variable domain of TCR clone 180516 (TRBV6-3, TRBJ2-1)
CASSYDNYNEQFF

SEQ ID NO: 361033 - protein, 14 aa, Homo sapiens
  CDR3 for alpha chain variable domain of TCR clone 180517 (TRAV21, TRAJ35)
CAVMPIGLGNVLNC

SEQ ID NO: 361034 - protein, 12 aa, Homo sapiens
  CDR3 for beta chain variable domain of TCR clone 180517 (TRBV7-9, TRBJ2-7)
CASSIKREEQYF

SEQ ID NO: 361035 - protein, 12 aa, Homo sapiens
  CDR3 for alpha chain variable domain of TCR clone 180518 (TRAV21, TRAJ26)
CAVADYGQNFVF

SEQ ID NO: 361036 - protein, 15 aa, Homo sapiens
  CDR3 for beta chain variable domain of TCR clone 180518 (TRBV11-3, TRBJ2-3)
CASLKDGREGDTQYF

SEQ ID NO: 361037 - protein, 14 aa, Homo sapiens
  CDR3 for alpha chain variable domain of TCR clone 180519 (TRAV8-3, TRAJ4)
CAVGASGGYKKLIF

SEQ ID NO: 361038 - protein, 12 aa, Homo sapiens
  CDR3 for beta chain variable domain of TCR clone 180519 (TRBV19, TRBJ2-7)
CASTSVGSEQYF

SEQ ID NO: 361039 - protein, 12 aa, Homo sapiens
  CDR3 for alpha chain variable domain of TCR clone 180520 (TRAV2, TRAJ9)
CAVGAGGVKTIF

SEQ ID NO: 361040 - protein, 16 aa, Homo sapiens
  CDR3 for beta chain variable domain of TCR clone 180520 (TRBV13, TRBJ2-2)
CGSSPRTGEHTGELFF

SEQ ID NO: 361041 - protein, 11 aa, Homo sapiens
  CDR3 for alpha chain variable domain of TCR clone 180521 (TRAV13-1, TRAJ39)
CASHAGNMLTF

SEQ ID NO: 361042 - protein, 18 aa, Homo sapiens
  CDR3 for beta chain variable domain of TCR clone 180521 (TRBV20-1, TRBJ2-3)
CSASGLAGGPGTTDTQYF

SEQ ID NO: 361043 - protein, 14 aa, Homo sapiens
  CDR3 for alpha chain variable domain of TCR clone 180522 (TRAV14/DV4, TRAJ42)
CPRGSLRSQGNLTF

SEQ ID NO: 361044 - protein, 18 aa, Homo sapiens
  CDR3 for beta chain variable domain of TCR clone 180522 (TRBV20-1, TRBJ2-3)
CSASGLAGGPGTTDTQYF

SEQ ID NO: 361045 - protein, 11 aa, Homo sapiens
  CDR3 for alpha chain variable domain of TCR clone 180523 (TRAV16, TRAJ49)
CSLNTGNQFYF

SEQ ID NO: 361046 - protein, 15 aa, Homo sapiens
  CDR3 for beta chain variable domain of TCR clone 180523 (TRBV9, TRBJ1-6)
CASSVAGTGDSPLHF

SEQ ID NO: 361047 - protein, 14 aa, Homo sapiens
  CDR3 for alpha chain variable domain of TCR clone 180524 (TRAV8-6, TRAJ9)
CAVTLNTGGFKTIF

SEQ ID NO: 361048 - protein, 13 aa, Homo sapiens
  CDR3 for beta chain variable domain of TCR clone 180524 (TRBV27, TRBJ1-1)
CASSLSIGAEAFF

SEQ ID NO: 361049 - protein, 14 aa, Homo sapiens
  CDR3 for alpha chain variable domain of TCR clone 180525 (TRAV12-3, TRAJ10)
SHLPLTGGGNKLTF

SEQ ID NO: 361050 - protein, 16 aa, Homo sapiens
  CDR3 for beta chain variable domain of TCR clone 180525 (TRBV9, TRBJ2-2)
CASSAMGKGNTGELFF

SEQ ID NO: 361051 - protein, 14 aa, Homo sapiens
  CDR3 for alpha chain variable domain of TCR clone 180526 (TRAV12-2, TRAJ8)
CAVKENKGFQKLVF

SEQ ID NO: 361052 - protein, 13 aa, Homo sapiens
  CDR3 for beta chain variable domain of TCR clone 180526 (TRBV18, TRBJ1-2)
CASSASATEGYTF

SEQ ID NO: 361053 - protein, 14 aa, Homo sapiens
  CDR3 for alpha chain variable domain of TCR clone 180527 (TRAV12-1, TRAJ17)
CVVNPTAAGNKLTL

SEQ ID NO: 361054 - protein, 16 aa, Homo sapiens
  CDR3 for beta chain variable domain of TCR clone 180527 (TRBV20-1, TRBJ2-1)
CSATASGYRSYNEQFF

SEQ ID NO: 361055 - protein, 13 aa, Homo sapiens
  CDR3 for alpha chain variable domain of TCR clone 180528 (TRAV2, TRAJ40)
CAVVTSGTYKYIF

SEQ ID NO: 361056 - protein, 13 aa, Homo sapiens
  CDR3 for beta chain variable domain of TCR clone 180528 (TRBV7-9, TRBJ2-5)
CASLPSGRETQYV

SEQ ID NO: 361057 - protein, 11 aa, Homo sapiens
  CDR3 for alpha chain variable domain of TCR clone 180529 (TRAV21, TRAJ34)
CAVTNTDKLIF

SEQ ID NO: 361058 - protein, 12 aa, Homo sapiens
  CDR3 for beta chain variable domain of TCR clone 180529 (TRBV28, TRBJ2-7)
CASTGNHYEQYF

SEQ ID NO: 361059 - protein, 11 aa, Homo sapiens
  CDR3 for alpha chain variable domain of TCR clone 180530 (TRAV3, TRAJ21)
CVVGNLKKFYF

SEQ ID NO: 361060 - protein, 16 aa, Homo sapiens
  CDR3 for beta chain variable domain of TCR clone 180530 (TRBV19, TRBJ2-1)
CASSKAGPSSYNEQFF

SEQ ID NO: 361061 - protein, 13 aa, Homo sapiens
  CDR3 for alpha chain variable domain of TCR clone 180531 (TRAV21, TRAJ27)
CAARPGNAGKSTF

SEQ ID NO: 361062 - protein, 14 aa, Homo sapiens
  CDR3 for beta chain variable domain of TCR clone 180531 (TRBV7-6, TRBJ2-3)
CASSVGRVTDTQYF

SEQ ID NO: 361063 - protein, 11 aa, Homo sapiens
  CDR3 for alpha chain variable domain of TCR clone 180532 (TRAV2, TRAJ37)
CAVDNTGKLIF

SEQ ID NO: 361064 - protein, 15 aa, Homo sapiens
  CDR3 for beta chain variable domain of TCR clone 180532 (TRBV7-3, TRBJ2-2)
CASSETGQGTGELFF

SEQ ID NO: 361065 - protein, 14 aa, Homo sapiens
  CDR3 for alpha chain variable domain of TCR clone 180533 (TRAV12-2, TRAJ6)
CVPLRPGGSYIPAF

SEQ ID NO: 361066 - protein, 15 aa, Homo sapiens
  CDR3 for beta chain variable domain of TCR clone 180533 (TRBV11-3, TRBJ2-7)
CASSPGPASSYEQYF

SEQ ID NO: 361067 - protein, 13 aa, Homo sapiens
  CDR3 for alpha chain variable domain of TCR clone 180534 (TRAV21, TRAJ27)
CAARPGHAGKSTF

SEQ ID NO: 361068 - protein, 14 aa, Homo sapiens
  CDR3 for beta chain variable domain of TCR clone 180534 (TRBV7-6, TRBJ2-3)
CASSSGTVTDTQYF

SEQ ID NO: 361069 - protein, 14 aa, Homo sapiens
  CDR3 for alpha chain variable domain of TCR clone 180535 (TRAV8-3, TRAJ15)
CAVGRHQAGTALIF

SEQ ID NO: 361070 - protein, 14 aa, Homo sapiens
  CDR3 for beta chain variable domain of TCR clone 180535 (TRBV4-2, TRBJ2-3)
CASSPLGQSDTQYF

SEQ ID NO: 361071 - protein, 12 aa, Homo sapiens
  CDR3 for alpha chain variable domain of TCR clone 180536 (TRAV8-3, TRAJ41)
CAVGALGYAINF

SEQ ID NO: 361072 - protein, 11 aa, Homo sapiens
  CDR3 for beta chain variable domain of TCR clone 180536 (TRBV6-3, TRBJ2-3)
CATGQADTQYF

SEQ ID NO: 361073 - protein, 17 aa, Homo sapiens
  CDR3 for alpha chain variable domain of TCR clone 180537 (TRAV3, TRAJ38)
CAVRDCLNAGNNRKLSR

SEQ ID NO: 361074 - protein, 15 aa, Homo sapiens
  CDR3 for beta chain variable domain of TCR clone 180537 (TRBV27, TRBJ2-1)
CASSNGGGTSNEQFF

SEQ ID NO: 361075 - protein, 12 aa, Homo sapiens
  CDR3 for alpha chain variable domain of TCR clone 180538 (TRAV2, TRAJ5)
CAPDTGRRALTF

SEQ ID NO: 361076 - protein, 15 aa, Homo sapiens
  CDR3 for beta chain variable domain of TCR clone 180538 (TRBV10-3, TRBJ2-1)
CAISDVQDRAYEQFF

SEQ ID NO: 361077 - protein, 11 aa, Homo sapiens
  CDR3 for alpha chain variable domain of TCR clone 180539 (TRAV12-2, TRAJ29)
CAVTLRSPLVF

SEQ ID NO: 361078 - protein, 16 aa, Homo sapiens
  CDR3 for beta chain variable domain of TCR clone 180539 (TRBV19, TRBJ1-5)
CASSIDRGGPGQPQHF

SEQ ID NO: 361079 - protein, 13 aa, Homo sapiens
  CDR3 for alpha chain variable domain of TCR clone 180540 (TRAV2, TRAJ29)
CAAGNSGNTPLVF

SEQ ID NO: 361080 - protein, 16 aa, Homo sapiens
  CDR3 for beta chain variable domain of TCR clone 180540 (TRBV7-9, TRBJ1-2)
CASSPGGGAIHYGYTF

SEQ ID NO: 361081 - protein, 14 aa, Homo sapiens
  CDR3 for alpha chain variable domain of TCR clone 180541 (TRAV12-2, TRAJ44)
CAVNPAGTASKLTF

SEQ ID NO: 361082 - protein, 12 aa, Homo sapiens
  CDR3 for beta chain variable domain of TCR clone 180541 (TRBV19, TRBJ2-1)
CASSQISNEQFF

SEQ ID NO: 361083 - protein, 11 aa, Homo sapiens
  CDR3 for alpha chain variable domain of TCR clone 180542 (TRAV12-1, TRAJ21)
CVVNNFNKFYF

SEQ ID NO: 361084 - protein, 15 aa, Homo sapiens
  CDR3 for beta chain variable domain of TCR clone 180542 (TRBV6-6, TRBJ2-7)
CASSYSYGGSYEQYF

SEQ ID NO: 361085 - protein, 14 aa, Homo sapiens
  CDR3 for alpha chain variable domain of TCR clone 180543 (TRAV13-2, TRAJ17)
CAENSKAAGNKLTF

SEQ ID NO: 361086 - protein, 16 aa, Homo sapiens
  CDR3 for beta chain variable domain of TCR clone 180543 (TRBV6-3, TRBJ2-1)
CASSYRRGDSYNEQFF

SEQ ID NO: 361087 - protein, 15 aa, Homo sapiens
  CDR3 for alpha chain variable domain of TCR clone 180544 (TRAV1-2, TRAJ38)
CAVSENAGNNRKLIW

SEQ ID NO: 361088 - protein, 16 aa, Homo sapiens
  CDR3 for beta chain variable domain of TCR clone 180544 (TRBV4-1, TRBJ2-7)
CDSSLTAGQATYEQYF

SEQ ID NO: 361089 - protein, 15 aa, Homo sapiens
  CDR3 for alpha chain variable domain of TCR clone 180545 (TRAV12-3, TRAJ13)
CAMSARSGGYQNVTF

SEQ ID NO: 361090 - protein, 18 aa, Homo sapiens
  CDR3 for beta chain variable domain of TCR clone 180545 (TRBV3-1, TRBJ2-7)
CASSQEGGGRSWHYEQYF

SEQ ID NO: 361091 - protein, 15 aa, Homo sapiens
  CDR3 for alpha chain variable domain of TCR clone 180546 (TRAV8-1, TRAJ6)
CAVNTPPGGSYIPTF

SEQ ID NO: 361092 - protein, 15 aa, Homo sapiens
  CDR3 for beta chain variable domain of TCR clone 180546 (TRBV9, TRBJ2-3)
CASSLEGGLTDTQYC

SEQ ID NO: 361093 - protein, 15 aa, Homo sapiens
  CDR3 for alpha chain variable domain of TCR clone 180547 (TRAV8-3, TRAJ21)
CAVGALPPRGYKFYF

SEQ ID NO: 361094 - protein, 17 aa, Homo sapiens
  CDR3 for beta chain variable domain of TCR clone 180547 (TRBV13, TRBJ2-3)
CASSSLGTSGLTDTQYF

SEQ ID NO: 361095 - protein, 14 aa, Homo sapiens
  CDR3 for alpha chain variable domain of TCR clone 180548 (TRAV12-2, TRAJ5)
CAVNRSTGRRALPF

SEQ ID NO: 361096 - protein, 11 aa, Homo sapiens
  CDR3 for beta chain variable domain of TCR clone 180548 (TRBV29-1, TRBJ2-5)
CSEDRTGTQYF

SEQ ID NO: 361097 - protein, 13 aa, Homo sapiens
  CDR3 for alpha chain variable domain of TCR clone 180549 (TRAV13-2, TRAJ53)
CAENMGGHYKLTF

SEQ ID NO: 361098 - protein, 13 aa, Homo sapiens
  CDR3 for beta chain variable domain of TCR clone 180549 (TRBV4-1, TRBJ2-2)
CASSQENTGELFF

SEQ ID NO: 361099 - protein, 17 aa, Homo sapiens
  CDR3 for alpha chain variable domain of TCR clone 180550 (TRAV3, TRAJ22)
CAVRPFISSGSARQLTF

SEQ ID NO: 361100 - protein, 16 aa, Homo sapiens
  CDR3 for beta chain variable domain of TCR clone 180550 (TRBV7-6, TRBJ2-3)
CASSTLAGGSTDTQYF

SEQ ID NO: 361101 - protein, 16 aa, Homo sapiens
  CDR3 for alpha chain variable domain of TCR clone 180551 (TRAV8-3, TRAJ28)
CAVGATLGLGGTNSLS

SEQ ID NO: 361102 - protein, 14 aa, Homo sapiens
  CDR3 for beta chain variable domain of TCR clone 180551 (TRBV7-2, TRBJ2-1)
CASSLGVGYNEQFF

SEQ ID NO: 361103 - protein, 14 aa, Homo sapiens
  CDR3 for alpha chain variable domain of TCR clone 180552 (TRAV26-1, TRAJ45)
WIEVTGGGADGLTF

SEQ ID NO: 361104 - protein, 19 aa, Homo sapiens
  CDR3 for beta chain variable domain of TCR clone 180552 (TRBV19, TRBJ2-2)
CACTRPGLAGGRVTGELFF

SEQ ID NO: 361105 - protein, 15 aa, Homo sapiens
  CDR3 for alpha chain variable domain of TCR clone 180553 (TRAV3, TRAJ4)
CAVRDGTGGYNKLIF

SEQ ID NO: 361106 - protein, 13 aa, Homo sapiens
  CDR3 for beta chain variable domain of TCR clone 180553 (TRBV12-4, TRBJ1-1)
CASSPGTGFEAFF

SEQ ID NO: 361107 - protein, 15 aa, Homo sapiens
  CDR3 for alpha chain variable domain of TCR clone 180554 (TRAV2, TRAJ32)
CAVANYGGSTNKLIF

SEQ ID NO: 361108 - protein, 15 aa, Homo sapiens
  CDR3 for beta chain variable domain of TCR clone 180554 (TRBV7-7, TRBJ2-5)
CASSQLERAEETQYF

SEQ ID NO: 361109 - protein, 13 aa, Homo sapiens
  CDR3 for alpha chain variable domain of TCR clone 180555 (TRAV36/DV7, TRAJ53)
CALSGGSTYKLTF

SEQ ID NO: 361110 - protein, 13 aa, Homo sapiens
  CDR3 for beta chain variable domain of TCR clone 180555 (TRBV28, TRBJ2-7)
CASSLPSRYEQYF

SEQ ID NO: 361111 - protein, 17 aa, Homo sapiens
  CDR3 for alpha chain variable domain of TCR clone 180556 (TRAV21, TRAJ24)
CAGIRLRSTDSRGKLQV

SEQ ID NO: 361112 - protein, 15 aa, Homo sapiens
  CDR3 for beta chain variable domain of TCR clone 180556 (TRBV7-2, TRBJ2-3)
CASSPRGLSTDTQYF

SEQ ID NO: 361113 - protein, 12 aa, Homo sapiens
  CDR3 for alpha chain variable domain of TCR clone 180557 (TRAV3, TRAJ43)
CAMRDPNNDMRF

SEQ ID NO: 361114 - protein, 15 aa, Homo sapiens
  CDR3 for beta chain variable domain of TCR clone 180557 (TRBV27, TRBJ1-5)
CASSLGTGFDQPQHF

SEQ ID NO: 361115 - protein, 11 aa, Homo sapiens
  CDR3 for alpha chain variable domain of TCR clone 180558 (TRAV2, TRAJ13)
CASGGYQKVTF

SEQ ID NO: 361116 - protein, 16 aa, Homo sapiens
  CDR3 for beta chain variable domain of TCR clone 180558 (TRBV5-1, TRBJ1-6)
CASSLARGTEGTPLHF

SEQ ID NO: 361117 - protein, 12 aa, Homo sapiens
  CDR3 for alpha chain variable domain of TCR clone 180559 (TRAV17, TRAJ4)
CAVSGGCNKLIF

SEQ ID NO: 361118 - protein, 13 aa, Homo sapiens
  CDR3 for beta chain variable domain of TCR clone 180559 (TRBV6-1, TRBJ1-1)
CASSEGWGTEAFF

SEQ ID NO: 361119 - protein, 16 aa, Homo sapiens
  CDR3 for alpha chain variable domain of TCR clone 180560 (TRAV3, TRAJ37)
CAVRPHGSGNTGKLIF

SEQ ID NO: 361120 - protein, 11 aa, Homo sapiens
  CDR3 for beta chain variable domain of TCR clone 180560 (TRBV10-3, TRBJ2-7)
CSISEGLEQYF

SEQ ID NO: 361121 - protein, 18 aa, Homo sapiens
  CDR3 for alpha chain variable domain of TCR clone 180561 (TRAV21, TRAJ52)
CAVRPSRAGGTSYGKLTF

SEQ ID NO: 361122 - protein, 13 aa, Homo sapiens
  CDR3 for beta chain variable domain of TCR clone 180561 (TRBV7-3, TRBJ1-1)
CASSQDWGAEAFF

SEQ ID NO: 361123 - protein, 12 aa, Homo sapiens
  CDR3 for alpha chain variable domain of TCR clone 180562 (TRAV20, TRAJ54)
CAVQEGAQKLVF

SEQ ID NO: 361124 - protein, 14 aa, Homo sapiens
  CDR3 for beta chain variable domain of TCR clone 180562 (TRBV19, TRBJ2-1)
CASPTFVLSGEQFF

SEQ ID NO: 361125 - protein, 16 aa, Homo sapiens
  CDR3 for alpha chain variable domain of TCR clone 180563 (TRAV12-2, TRAJ10)
CAVSRVLTGGGNKLTF

SEQ ID NO: 361126 - protein, 15 aa, Homo sapiens
  CDR3 for beta chain variable domain of TCR clone 180563 (TRBV28, TRBJ2-3)
CASAFQGVSADTQYF

SEQ ID NO: 361127 - protein, 15 aa, Homo sapiens
  CDR3 for alpha chain variable domain of TCR clone 180564 (TRAV12-3, TRAJ6)
CAMSAATGGRYIPTF

SEQ ID NO: 361128 - protein, 15 aa, Homo sapiens
  CDR3 for beta chain variable domain of TCR clone 180564 (TRBV4-1, TRBJ1-2)
CASSQGQGAAYGYTF

SEQ ID NO: 361129 - protein, 14 aa, Homo sapiens
  CDR3 for alpha chain variable domain of TCR clone 180565 (TRAV1-2, TRAJ16)
CAVNRFSDGKKLLF

SEQ ID NO: 361130 - protein, 13 aa, Homo sapiens
  CDR3 for beta chain variable domain of TCR clone 180565 (TRBV7-9, TRBJ1-2)
CASSLKQNYGYTC

SEQ ID NO: 361131 - protein, 13 aa, Homo sapiens
  CDR3 for alpha chain variable domain of TCR clone 180566 (TRAV13-2, TRAJ8)
CAFMNTGFQKLVF

SEQ ID NO: 361132 - protein, 14 aa, Homo sapiens
  CDR3 for beta chain variable domain of TCR clone 180566 (TRBV12-5, TRBJ2-5)
CASGSRTHQETQYF

SEQ ID NO: 361133 - protein, 15 aa, Homo sapiens
  CDR3 for alpha chain variable domain of TCR clone 180567 (TRAV20, TRAJ53)
CAVQASGGSNYKLTF

SEQ ID NO: 361134 - protein, 15 aa, Homo sapiens
  CDR3 for beta chain variable domain of TCR clone 180567 (TRBV9, TRBJ2-1)
CASSLAGSSYNEPFF

SEQ ID NO: 361135 - protein, 13 aa, Homo sapiens
  CDR3 for alpha chain variable domain of TCR clone 180568 (TRAV39, TRAJ58)
CAGEETSGSRLTF

SEQ ID NO: 361136 - protein, 13 aa, Homo sapiens
  CDR3 for beta chain variable domain of TCR clone 180568 (TRBV15, TRBJ2-7)
CATSTTGHYEQCF

SEQ ID NO: 361137 - protein, 12 aa, Homo sapiens
  CDR3 for alpha chain variable domain of TCR clone 180569 (TRAV8-3, TRAJ26)
CAGDNYGQNFVF

SEQ ID NO: 361138 - protein, 17 aa, Homo sapiens
  CDR3 for beta chain variable domain of TCR clone 180569 (TRBV4-2, TRBJ1-1)
CASSQVATGGMNTEAFF

SEQ ID NO: 361139 - protein, 12 aa, Homo sapiens
  CDR3 for alpha chain variable domain of TCR clone 180570 (TRAV3, TRAJ20)
CAVRDPDYKLRC

SEQ ID NO: 361140 - protein, 13 aa, Homo sapiens
  CDR3 for beta chain variable domain of TCR clone 180570 (TRBV9, TRBJ2-1)
CASSVGQGGEQFF

SEQ ID NO: 361141 - protein, 16 aa, Homo sapiens
  CDR3 for alpha chain variable domain of TCR clone 180571 (TRAV4, TRAJ37)
CLVGWFGSSNTGKLIF

SEQ ID NO: 361142 - protein, 20 aa, Homo sapiens
  CDR3 for beta chain variable domain of TCR clone 180571 (TRBV7-8, TRBJ2-2)
CASSHLFPGPTIHITGELFF

SEQ ID NO: 361143 - protein, 13 aa, Homo sapiens
  CDR3 for alpha chain variable domain of TCR clone 180572 (TRAV1-1, TRAJ31)
CASYLNNNARLMF

SEQ ID NO: 361144 - protein, 14 aa, Homo sapiens
  CDR3 for beta chain variable domain of TCR clone 180572 (TRBV18, TRBJ2-3)
CASSGLADTVTQYF

SEQ ID NO: 361145 - protein, 11 aa, Homo sapiens
  CDR3 for alpha chain variable domain of TCR clone 180573 (TRAV2, TRAJ33)
CAVESNYKLIW

SEQ ID NO: 361146 - protein, 15 aa, Homo sapiens
  CDR3 for beta chain variable domain of TCR clone 180573 (TRBV19, TRBJ1-1)
CASTPGQIQNTEAFF

SEQ ID NO: 361147 - protein, 11 aa, Homo sapiens
  CDR3 for alpha chain variable domain of TCR clone 180574 (TRAV4, TRAJ31)
CLVGDNARLIF

SEQ ID NO: 361148 - protein, 13 aa, Homo sapiens
  CDR3 for beta chain variable domain of TCR clone 180574 (TRBV5-1, TRBJ2-1)
CASSLGSYNEQFF

SEQ ID NO: 361149 - protein, 13 aa, Homo sapiens
  CDR3 for alpha chain variable domain of TCR clone 180575 (TRAV8-6, TRAJ16)
CAVSSPDVQKLLF

SEQ ID NO: 361150 - protein, 16 aa, Homo sapiens
  CDR3 for beta chain variable domain of TCR clone 180575 (TRBV5-7, TRBJ2-3)
CASSSLGGAITDTQYF

SEQ ID NO: 361151 - protein, 15 aa, Homo sapiens
  CDR3 for alpha chain variable domain of TCR clone 180576 (TRAV21, TRAJ40)
CAVRPQTSGTYKYIF

SEQ ID NO: 361152 - protein, 13 aa, Homo sapiens
  CDR3 for beta chain variable domain of TCR clone 180576 (TRBV7-2, TRBJ1-1)
CASNLKGAKVAFF

SEQ ID NO: 361153 - protein, 13 aa, Homo sapiens
  CDR3 for alpha chain variable domain of TCR clone 180577 (TRAV12-3, TRAJ7)
CAMTPYGNNRLAF

SEQ ID NO: 361154 - protein, 15 aa, Homo sapiens
  CDR3 for beta chain variable domain of TCR clone 180577 (TRBV27, TRBJ1-6)
CASSFDRGLGSPLHL

SEQ ID NO: 361155 - protein, 15 aa, Homo sapiens
  CDR3 for alpha chain variable domain of TCR clone 180578 (TRAV23/DV6, TRAJ13)
CAAWPGGGSYQKVTF

SEQ ID NO: 361156 - protein, 17 aa, Homo sapiens
  CDR3 for beta chain variable domain of TCR clone 180578 (TRBV19, TRBJ2-7)
CASSISFYDSYPYEQYF

SEQ ID NO: 361157 - protein, 13 aa, Homo sapiens
  CDR3 for alpha chain variable domain of TCR clone 180579 (TRAV17, TRAJ26)
CATVDSYGKNFVF

SEQ ID NO: 361158 - protein, 16 aa, Homo sapiens
  CDR3 for beta chain variable domain of TCR clone 180579 (TRBV2, TRBJ2-1)
CASSVGGSLSYNEQFF

SEQ ID NO: 361159 - protein, 13 aa, Homo sapiens
  CDR3 for alpha chain variable domain of TCR clone 180580 (TRAV17, TRAJ5)
CAPMDTGRRALTF

SEQ ID NO: 361160 - protein, 15 aa, Homo sapiens
  CDR3 for beta chain variable domain of TCR clone 180580 (TRBV2, TRBJ2-1)
CASSELAGSYNEQFF

SEQ ID NO: 361161 - protein, 12 aa, Homo sapiens
  CDR3 for alpha chain variable domain of TCR clone 180581 (TRAV20, TRAJ23)
CAVHNQGGKLIF

SEQ ID NO: 361162 - protein, 15 aa, Homo sapiens
  CDR3 for beta chain variable domain of TCR clone 180581 (TRBV19, TRBJ2-1)
CASSSPGVPLDEQFF

SEQ ID NO: 361163 - protein, 14 aa, Homo sapiens
  CDR3 for alpha chain variable domain of TCR clone 180582 (TRAV1-2, TRAJ8)
CAVREDTGFQKLVF

SEQ ID NO: 361164 - protein, 12 aa, Homo sapiens
  CDR3 for beta chain variable domain of TCR clone 180582 (TRBV27, TRBJ2-2)
CASRLLTGELFF

SEQ ID NO: 361165 - protein, 12 aa, Homo sapiens
  CDR3 for alpha chain variable domain of TCR clone 180583 (TRAV13-2, TRAJ23)
CAERHRGGKLIF

SEQ ID NO: 361166 - protein, 14 aa, Homo sapiens
  CDR3 for beta chain variable domain of TCR clone 180583 (TRBV11-2, TRBJ2-5)
CASSRTGGIETQYF

SEQ ID NO: 361167 - protein, 13 aa, Homo sapiens
  CDR3 for alpha chain variable domain of TCR clone 180584 (TRAV17, TRAJ37)
CATDPGNTGKLIF

SEQ ID NO: 361168 - protein, 14 aa, Homo sapiens
  CDR3 for beta chain variable domain of TCR clone 180584 (TRBV10-3, TRBJ1-6)
CAISVDGDESPLHF

SEQ ID NO: 361169 - protein, 13 aa, Homo sapiens
  CDR3 for alpha chain variable domain of TCR clone 180585 (TRAV12-3, TRAJ33)
CAMSVNSNYRLIW

SEQ ID NO: 361170 - protein, 13 aa, Homo sapiens
  CDR3 for beta chain variable domain of TCR clone 180585 (TRBV7-2, TRBJ2-2)
YASSLAVTGELFF

SEQ ID NO: 361171 - protein, 11 aa, Homo sapiens
  CDR3 for alpha chain variable domain of TCR clone 180586 (TRAV35, TRAJ30)
CAGPGDDKIIF

SEQ ID NO: 361172 - protein, 12 aa, Homo sapiens
  CDR3 for beta chain variable domain of TCR clone 180586 (TRBV27, TRBJ2-1)
CASRGFYDEQFF

SEQ ID NO: 361173 - protein, 11 aa, Homo sapiens
  CDR3 for alpha chain variable domain of TCR clone 180587 (TRAV23/DV6, TRAJ58)
CAARLLRGETS

SEQ ID NO: 361174 - protein, 13 aa, Homo sapiens
  CDR3 for beta chain variable domain of TCR clone 180587 (TRBV11-2, TRBJ2-7)
CASSPLGSYEQYF

SEQ ID NO: 361175 - protein, 15 aa, Homo sapiens
  CDR3 for alpha chain variable domain of TCR clone 180588 (TRAV4, TRAJ39)
CLVGPNNNAGNMLTF

SEQ ID NO: 361176 - protein, 12 aa, Homo sapiens
  CDR3 for beta chain variable domain of TCR clone 180588 (TRBV14, TRBJ1-1)
CASSQLKGLAFF

SEQ ID NO: 361177 - protein, 15 aa, Homo sapiens
  CDR3 for alpha chain variable domain of TCR clone 180589 (TRAV13-1, TRAJ39)
CAASPLNNAGNMLTF

SEQ ID NO: 361178 - protein, 16 aa, Homo sapiens
  CDR3 for beta chain variable domain of TCR clone 180589 (TRBV12-4, TRBJ2-5)
CASSFFVRGRQETQYF

SEQ ID NO: 361179 - protein, 16 aa, Homo sapiens
  CDR3 for alpha chain variable domain of TCR clone 180590 (TRAV4, TRAJ22)
CLVGDLYSGSARQLTF

SEQ ID NO: 361180 - protein, 12 aa, Homo sapiens
  CDR3 for beta chain variable domain of TCR clone 180590 (TRBV12-4, TRBJ1-3)
CASSFSGNTIYF

SEQ ID NO: 361181 - protein, 12 aa, Homo sapiens
  CDR3 for alpha chain variable domain of TCR clone 180591 (TRAV21, TRAJ13)
PGPSGGYQKVTF

SEQ ID NO: 361182 - protein, 13 aa, Homo sapiens
  CDR3 for beta chain variable domain of TCR clone 180591 (TRBV7-9, TRBJ1-2)
CASSLKQNYGYIF

SEQ ID NO: 361183 - protein, 13 aa, Homo sapiens
  CDR3 for alpha chain variable domain of TCR clone 180592 (TRAV12-1, TRAJ6)
CVVFSGGSYIPTF

SEQ ID NO: 361184 - protein, 12 aa, Homo sapiens
  CDR3 for beta chain variable domain of TCR clone 180592 (TRBV11-2, TRBJ2-2)
CASSLGGGELFF

SEQ ID NO: 361185 - protein, 16 aa, Homo sapiens
  CDR3 for alpha chain variable domain of TCR clone 180593 (TRAV30, TRAJ24)
CGTEIVDADSWGKFQF

SEQ ID NO: 361186 - protein, 17 aa, Homo sapiens
  CDR3 for beta chain variable domain of TCR clone 180593 (TRBV20-1, TRBJ2-2)
CSASGSGQGGVTGELFF

SEQ ID NO: 361187 - protein, 14 aa, Homo sapiens
  CDR3 for alpha chain variable domain of TCR clone 180594 (TRAV1-2, TRAJ8)
CTVREDTGFQKLVF

SEQ ID NO: 361188 - protein, 18 aa, Homo sapiens
  CDR3 for beta chain variable domain of TCR clone 180594 (TRBV28, TRBJ2-1)
CASSSTSGRANSYNEQFF

SEQ ID NO: 361189 - protein, 15 aa, Homo sapiens
  CDR3 for alpha chain variable domain of TCR clone 180595 (TRAV38-2/DV8, TRAJ45)
CAYWDSGVGADGLTF

SEQ ID NO: 361190 - protein, 16 aa, Homo sapiens
  CDR3 for beta chain variable domain of TCR clone 180595 (TRBV19, TRBJ1-1)
CASSPTRFWPGTEAFF

SEQ ID NO: 361191 - protein, 13 aa, Homo sapiens
  CDR3 for alpha chain variable domain of TCR clone 180596 (TRAV21, TRAJ20)
CAVGVFADYKLSF

SEQ ID NO: 361192 - protein, 14 aa, Homo sapiens
  CDR3 for beta chain variable domain of TCR clone 180596 (TRBV4-3, TRBJ1-4)
CASSLSSGNEKLFF

SEQ ID NO: 361193 - protein, 15 aa, Homo sapiens
  CDR3 for alpha chain variable domain of TCR clone 180597 (TRAV26-1, TRAJ44)
CIVRIGTGTASTLTF

SEQ ID NO: 361194 - protein, 15 aa, Homo sapiens
  CDR3 for beta chain variable domain of TCR clone 180597 (TRBV7-6, TRBJ2-1)
CASSSLAGEGKEQFF

SEQ ID NO: 361195 - protein, 11 aa, Homo sapiens
  CDR3 for alpha chain variable domain of TCR clone 180598 (TRAV35, TRAJ39)
GLNNAGNMLTF

SEQ ID NO: 361196 - protein, 14 aa, Homo sapiens
  CDR3 for beta chain variable domain of TCR clone 180598 (TRBV18, TRBJ2-7)
CASSPRGGAYEQYF

SEQ ID NO: 361197 - protein, 14 aa, Homo sapiens
  CDR3 for alpha chain variable domain of TCR clone 180599 (TRAV12-2, TRAJ13)
CAVKKTGGYPKVTF

SEQ ID NO: 361198 - protein, 15 aa, Homo sapiens
  CDR3 for beta chain variable domain of TCR clone 180599 (TRBV6-3, TRBJ2-7)
CASSSPGTVFYEQYF

SEQ ID NO: 361199 - protein, 12 aa, Homo sapiens
  CDR3 for alpha chain variable domain of TCR clone 180600 (TRAV2, TRAJ10)
CASTGGGNKLTF

SEQ ID NO: 361200 - protein, 14 aa, Homo sapiens
  CDR3 for beta chain variable domain of TCR clone 180600 (TRBV7-2, TRBJ2-2)
CASRGQGAAGEMFF

SEQ ID NO: 361201 - protein, 13 aa, Homo sapiens
  CDR3 for alpha chain variable domain of TCR clone 180601 (TRAV30, TRAJ24)
CGTVTDSWGRLQF

SEQ ID NO: 361202 - protein, 15 aa, Homo sapiens
  CDR3 for beta chain variable domain of TCR clone 180601 (TRBV20-1, TRBJ2-7)
CSARDRVSGMDEQYF

SEQ ID NO: 361203 - protein, 14 aa, Homo sapiens
  CDR3 for alpha chain variable domain of TCR clone 180602 (TRAV26-1, TRAJ26)
CIVRVASYGQNFVF

SEQ ID NO: 361204 - protein, 15 aa, Homo sapiens
  CDR3 for beta chain variable domain of TCR clone 180602 (TRBV7-2, TRBJ2-1)
CASTHGTGIYNEQFF

SEQ ID NO: 361205 - protein, 11 aa, Homo sapiens
  CDR3 for alpha chain variable domain of TCR clone 180603 (TRAV6, TRAJ31)
CSLRDNARLMF

SEQ ID NO: 361206 - protein, 12 aa, Homo sapiens
  CDR3 for beta chain variable domain of TCR clone 180603 (TRBV11-2, TRBJ2-2)
CASSLGGGELFF

SEQ ID NO: 361207 - protein, 14 aa, Homo sapiens
  CDR3 for alpha chain variable domain of TCR clone 180604 (TRAV12-2, TRAJ10)
SHLPLTGGGNKLTF

SEQ ID NO: 361208 - protein, 12 aa, Homo sapiens
  CDR3 for beta chain variable domain of TCR clone 180604 (TRBV14, TRBJ2-7)
CASSSLKGEQYF

SEQ ID NO: 361209 - protein, 12 aa, Homo sapiens
  CDR3 for alpha chain variable domain of TCR clone 180605 (TRAV8-3, TRAJ26)
CAGDNYGQNFVF

SEQ ID NO: 361210 - protein, 15 aa, Homo sapiens
  CDR3 for beta chain variable domain of TCR clone 180605 (TRBV6-1, TRBJ2-6)
CASSSRPSGANVLTF

SEQ ID NO: 361211 - protein, 14 aa, Homo sapiens
  CDR3 for alpha chain variable domain of TCR clone 180606 (TRAV13-1, TRAJ35)
CSASKGGFGNVLHC

SEQ ID NO: 361212 - protein, 16 aa, Homo sapiens
  CDR3 for beta chain variable domain of TCR clone 180606 (TRBV13, TRBJ2-2)
CASSPRTGEHTGELFF

SEQ ID NO: 361213 - protein, 15 aa, Homo sapiens
  CDR3 for alpha chain variable domain of TCR clone 180607 (TRAV12-1, TRAJ41)
CVVNSRTGSGYALNF

SEQ ID NO: 361214 - protein, 13 aa, Homo sapiens
  CDR3 for beta chain variable domain of TCR clone 180607 (TRBV11-2, TRBJ2-2)
CASSLQNTGELFF

SEQ ID NO: 361215 - protein, 11 aa, Homo sapiens
  CDR3 for alpha chain variable domain of TCR clone 180608 (TRAV2, TRAJ40)
CAVEGTYKYIF

SEQ ID NO: 361216 - protein, 13 aa, Homo sapiens
  CDR3 for beta chain variable domain of TCR clone 180608 (TRBV12-4, TRBJ1-5)
CASSPDRAQPQHF

SEQ ID NO: 361217 - protein, 12 aa, Homo sapiens
  CDR3 for alpha chain variable domain of TCR clone 180609 (TRAV1-2, TRAJ42)
CVAGGSPGKLIF

SEQ ID NO: 361218 - protein, 14 aa, Homo sapiens
  CDR3 for beta chain variable domain of TCR clone 180609 (TRBV5-4, TRBJ2-5)
CASSLVRGQETQYF

SEQ ID NO: 361219 - protein, 11 aa, Homo sapiens
  CDR3 for alpha chain variable domain of TCR clone 180610 (TRAV21, TRAJ48)
CAVDGNENLTF

SEQ ID NO: 361220 - protein, 16 aa, Homo sapiens
  CDR3 for beta chain variable domain of TCR clone 180610 (TRBV19, TRBJ2-1)
CASSSKGTRSYNEQFF

SEQ ID NO: 361221 - protein, 14 aa, Homo sapiens
  CDR3 for alpha chain variable domain of TCR clone 180611 (TRAV13-1, TRAJ44)
CAAKATGTASKLTL

SEQ ID NO: 361222 - protein, 17 aa, Homo sapiens
  CDR3 for beta chain variable domain of TCR clone 180611 (TRBV7-3, TRBJ2-3)
CASSLMKRMRGADTRYF

SEQ ID NO: 361223 - protein, 16 aa, Homo sapiens
  CDR3 for alpha chain variable domain of TCR clone 180612 (TRAV3, TRAJ21)
CAVRVIERGNFNKFYF

SEQ ID NO: 361224 - protein, 13 aa, Homo sapiens
  CDR3 for beta chain variable domain of TCR clone 180612 (TRBV4-2, TRBJ1-1)
CASSQAGNTEAFF

SEQ ID NO: 361225 - protein, 14 aa, Homo sapiens
  CDR3 for alpha chain variable domain of TCR clone 180613 (TRAV17, TRAJ57)
CATDPQGGSEKLVF

SEQ ID NO: 361226 - protein, 14 aa, Homo sapiens
  CDR3 for beta chain variable domain of TCR clone 180613 (TRBV5-8, TRBJ2-3)
CASSVGQGTDTQYF

SEQ ID NO: 361227 - protein, 16 aa, Homo sapiens
  CDR3 for alpha chain variable domain of TCR clone 180614 (TRAV14/DV4, TRAJ54)
CAMREGRIQGAQKLVF

SEQ ID NO: 361228 - protein, 15 aa, Homo sapiens
  CDR3 for beta chain variable domain of TCR clone 180614 (TRBV5-1, TRBJ2-5)
CASNFKGGDQETQYF

SEQ ID NO: 361229 - protein, 13 aa, Homo sapiens
  CDR3 for alpha chain variable domain of TCR clone 180615 (TRAV30, TRAJ34)
CGTVGYNTDKIIF

SEQ ID NO: 361230 - protein, 16 aa, Homo sapiens
  CDR3 for beta chain variable domain of TCR clone 180615 (TRBV7-9, TRBJ1-2)
CASSLGFSSGEDGYTF

SEQ ID NO: 361231 - protein, 12 aa, Homo sapiens
  CDR3 for alpha chain variable domain of TCR clone 180616 (TRAV13-1, TRAJ49)
CAASIWGNQFYF

SEQ ID NO: 361232 - protein, 14 aa, Homo sapiens
  CDR3 for beta chain variable domain of TCR clone 180616 (TRBV12-4, TRBJ1-1)
CASSLDGLNTEEFF

SEQ ID NO: 361233 - protein, 10 aa, Homo sapiens
  CDR3 for alpha chain variable domain of TCR clone 180617 (TRAV12-2, TRAJ43)
CAVKVLSMRF

SEQ ID NO: 361234 - protein, 13 aa, Homo sapiens
  CDR3 for beta chain variable domain of TCR clone 180617 (TRBV12-5, TRBJ2-3)
RASGDRQSDTQYF

SEQ ID NO: 361235 - protein, 17 aa, Homo sapiens
  CDR3 for alpha chain variable domain of TCR clone 180618 (TRAV22, TRAJ53)
CAVEFSNSGGSNYKLTF

SEQ ID NO: 361236 - protein, 14 aa, Homo sapiens
  CDR3 for beta chain variable domain of TCR clone 180618 (TRBV7-2, TRBJ2-7)
CASSPKTSFYEQYF

SEQ ID NO: 361237 - protein, 14 aa, Homo sapiens
  CDR3 for alpha chain variable domain of TCR clone 180619 (TRAV12-2, TRAJ17)
CAVLFKAAGNKLTF

SEQ ID NO: 361238 - protein, 13 aa, Homo sapiens
  CDR3 for beta chain variable domain of TCR clone 180619 (TRBV20-1, TRBJ2-7)
CSADPGATYEQYF

SEQ ID NO: 361239 - protein, 14 aa, Homo sapiens
  CDR3 for alpha chain variable domain of TCR clone 180620 (TRAV1-2, TRAJ16)
CAVNRFSDGQKMLF

SEQ ID NO: 361240 - protein, 14 aa, Homo sapiens
  CDR3 for beta chain variable domain of TCR clone 180620 (TRBV25-1, TRBJ1-1)
CASTHLGGNTEAFF

SEQ ID NO: 361241 - protein, 12 aa, Homo sapiens
  CDR3 for alpha chain variable domain of TCR clone 180621 (TRAV2, TRAJ33)
CAFMDSNYQLIW

SEQ ID NO: 361242 - protein, 17 aa, Homo sapiens
  CDR3 for beta chain variable domain of TCR clone 180621 (TRBV7-8, TRBJ2-6)
CASSAGTGGAGANVLTF

SEQ ID NO: 361243 - protein, 15 aa, Homo sapiens
  CDR3 for alpha chain variable domain of TCR clone 180622 (TRAV12-2, TRAJ53)
CAVNGGGGSNYKLTF

SEQ ID NO: 361244 - protein, 11 aa, Homo sapiens
  CDR3 for beta chain variable domain of TCR clone 180622 (TRBV11-2, TRBJ2-2)
CASNLPGELFF

SEQ ID NO: 361245 - protein, 13 aa, Homo sapiens
  CDR3 for alpha chain variable domain of TCR clone 180623 (TRAV21, TRAJ45)
CAVKGGGADGLTF

SEQ ID NO: 361246 - protein, 13 aa, Homo sapiens
  CDR3 for beta chain variable domain of TCR clone 180623 (TRBV20-1, TRBJ2-5)
CSASRPGGETQYF

SEQ ID NO: 361247 - protein, 13 aa, Homo sapiens
  CDR3 for alpha chain variable domain of TCR clone 180624 (TRAV27, TRAJ41)
CAGERNSGYALTF

SEQ ID NO: 361248 - protein, 14 aa, Homo sapiens
  CDR3 for beta chain variable domain of TCR clone 180624 (TRBV7-2, TRBJ1-1)
CASSFLTGTTEAFF

SEQ ID NO: 361249 - protein, 13 aa, Homo sapiens
  CDR3 for alpha chain variable domain of TCR clone 180625 (TRAV2, TRAJ40)
CAVVTSGTYKYIF

SEQ ID NO: 361250 - protein, 15 aa, Homo sapiens
  CDR3 for beta chain variable domain of TCR clone 180625 (TRBV11-3, TRBJ2-3)
CASPKGGREGDTQYF

SEQ ID NO: 361251 - protein, 19 aa, Homo sapiens
  CDR3 for alpha chain variable domain of TCR clone 180626 (TRAV2, TRAJ20)
ILQVREADAAVYRDCKLSF

SEQ ID NO: 361252 - protein, 12 aa, Homo sapiens
  CDR3 for beta chain variable domain of TCR clone 180626 (TRBV11-2, TRBJ2-2)
CVSSLGGGELFF

SEQ ID NO: 361253 - protein, 15 aa, Homo sapiens
  CDR3 for alpha chain variable domain of TCR clone 180627 (TRAV3, TRAJ23)
CAVRDRGNQGGKLIF

SEQ ID NO: 361254 - protein, 12 aa, Homo sapiens
  CDR3 for beta chain variable domain of TCR clone 180627 (TRBV19, TRBJ1-5)
CASSIAQQPQHF

SEQ ID NO: 361255 - protein, 14 aa, Homo sapiens
  CDR3 for alpha chain variable domain of TCR clone 180628 (TRAV2, TRAJ3)
CAVRPYSSASKIIF

SEQ ID NO: 361256 - protein, 15 aa, Homo sapiens
  CDR3 for beta chain variable domain of TCR clone 180628 (TRBV6-3, TRBJ2-7)
CASSSPGTVFYEQYF

SEQ ID NO: 361257 - protein, 14 aa, Homo sapiens
  CDR3 for alpha chain variable domain of TCR clone 180629 (TRAV25, TRAJ27)
CAGPGNTNAGKSPF

SEQ ID NO: 361258 - protein, 16 aa, Homo sapiens
  CDR3 for beta chain variable domain of TCR clone 180629 (TRBV4-1, TRBJ2-6)
CASSQDGGPGANVLTF

SEQ ID NO: 361259 - protein, 13 aa, Homo sapiens
  CDR3 for alpha chain variable domain of TCR clone 180630 (TRAV12-2, TRAJ30)
CAVNLNRDDKIIF

SEQ ID NO: 361260 - protein, 15 aa, Homo sapiens
  CDR3 for beta chain variable domain of TCR clone 180630 (TRBV11-2, TRBJ1-1)
CASSSRSSLLLSLDK

SEQ ID NO: 361261 - protein, 12 aa, Homo sapiens
  CDR3 for alpha chain variable domain of TCR clone 180631 (TRAV16, TRAJ10)
CSRTGGGNKLTF

SEQ ID NO: 361262 - protein, 14 aa, Homo sapiens
  CDR3 for beta chain variable domain of TCR clone 180631 (TRBV19, TRBJ2-1)
CASPTFVLGGEQFF

SEQ ID NO: 361263 - protein, 15 aa, Homo sapiens
  CDR3 for alpha chain variable domain of TCR clone 180632 (TRAV26-1, TRAJ29)
CIVRVEGSGNTPLVF

SEQ ID NO: 361264 - protein, 15 aa, Homo sapiens
  CDR3 for beta chain variable domain of TCR clone 180632 (TRBV12-4, TRBJ1-1)
CQQQDRVVVNTEAFF

SEQ ID NO: 361265 - protein, 14 aa, Homo sapiens
  CDR3 for alpha chain variable domain of TCR clone 180633 (TRAV1-2, TRAJ16)
CAVNRVSDGQKLLF

SEQ ID NO: 361266 - protein, 17 aa, Homo sapiens
  CDR3 for beta chain variable domain of TCR clone 180633 (TRBV11-3, TRBJ2-3)
CASSLGLTGGGTDTQYF

SEQ ID NO: 361267 - protein, 13 aa, Homo sapiens
  CDR3 for alpha chain variable domain of TCR clone 180634 (TRAV8-3, TRAJ36)
CAVGATGATNHFF

SEQ ID NO: 361268 - protein, 13 aa, Homo sapiens
  CDR3 for beta chain variable domain of TCR clone 180634 (TRBV12-4, TRBJ1-2)
CASSLRQGKGYTF

SEQ ID NO: 361269 - protein, 19 aa, Homo sapiens
  CDR3 for alpha chain variable domain of TCR clone 180635 (TRAV26-1, TRAJ52)
CIVRAHRNAGGTSYGKLTF

SEQ ID NO: 361270 - protein, 14 aa, Homo sapiens
  CDR3 for beta chain variable domain of TCR clone 180635 (TRBV19, TRBJ2-3)
CASSAPRGTDTQYF

SEQ ID NO: 361271 - protein, 17 aa, Homo sapiens
  CDR3 for alpha chain variable domain of TCR clone 180636 (TRAV12-2, TRAJ36)
CAVKDNIFFGTGTRLTV

SEQ ID NO: 361272 - protein, 15 aa, Homo sapiens
  CDR3 for beta chain variable domain of TCR clone 180636 (TRBV28, TRBJ2-2)
CASTVAGANTGELFF

SEQ ID NO: 361273 - protein, 12 aa, Homo sapiens
  CDR3 for alpha chain variable domain of TCR clone 180637 (TRAV1-2, TRAJ33)
CAALASNYQLIW

SEQ ID NO: 361274 - protein, 15 aa, Homo sapiens
  CDR3 for beta chain variable domain of TCR clone 180637 (TRBV27, TRBJ2-1)
CASSNGGGSSNEQFF

SEQ ID NO: 361275 - protein, 13 aa, Homo sapiens
  CDR3 for alpha chain variable domain of TCR clone 180638 (TRAV13-1, TRAJ39)
CSKYSNAGNMLTF

SEQ ID NO: 361276 - protein, 17 aa, Homo sapiens
  CDR3 for beta chain variable domain of TCR clone 180638 (TRBV7-7, TRBJ1-1)
CASIGDRPNLGVTEDFF

SEQ ID NO: 361277 - protein, 14 aa, Homo sapiens
  CDR3 for alpha chain variable domain of TCR clone 180639 (TRAV1-2, TRAJ8)
CAVREDTGFQKLVF

SEQ ID NO: 361278 - protein, 15 aa, Homo sapiens
  CDR3 for beta chain variable domain of TCR clone 180639 (TRBV7-9, TRBJ2-2)
CASGPLDTCPGELFF

SEQ ID NO: 361279 - protein, 14 aa, Homo sapiens
  CDR3 for alpha chain variable domain of TCR clone 180640 (TRAV12-1, TRAJ17)
CVVNYKAAGNKLTF

SEQ ID NO: 361280 - protein, 19 aa, Homo sapiens
  CDR3 for beta chain variable domain of TCR clone 180640 (TRBV7-9, TRBJ2-1)
CASSHSRGALLRSYNEQFF

SEQ ID NO: 361281 - protein, 14 aa, Homo sapiens
  CDR3 for alpha chain variable domain of TCR clone 180641 (TRAV16, TRAJ33)
CALSAMDSKYQLIW

SEQ ID NO: 361282 - protein, 17 aa, Homo sapiens
  CDR3 for beta chain variable domain of TCR clone 180641 (TRBV25-1, TRBJ2-7)
CASSDARVVFSSYEQYF

SEQ ID NO: 361283 - protein, 14 aa, Homo sapiens
  CDR3 for alpha chain variable domain of TCR clone 180642 (TRAV12-2, TRAJ5)
CAVNRSTGRRALTF

SEQ ID NO: 361284 - protein, 14 aa, Homo sapiens
  CDR3 for beta chain variable domain of TCR clone 180642 (TRBV18, TRBJ2-5)
CASSPGASQETQYF

SEQ ID NO: 361285 - protein, 14 aa, Homo sapiens
  CDR3 for alpha chain variable domain of TCR clone 180643 (TRAV1-2, TRAJ8)
CAVREDTGCQKLVF

SEQ ID NO: 361286 - protein, 14 aa, Homo sapiens
  CDR3 for beta chain variable domain of TCR clone 180643 (TRBV25-1, TRBJ1-1)
CASTHLGGNTEAFF

SEQ ID NO: 361287 - protein, 16 aa, Homo sapiens
  CDR3 for alpha chain variable domain of TCR clone 180644 (TRAV14/DV4, TRAJ45)
CAMREGERGGADGLTF

SEQ ID NO: 361288 - protein, 12 aa, Homo sapiens
  CDR3 for beta chain variable domain of TCR clone 180644 (TRBV12-4, TRBJ1-1)
CASSLVDTEAFF

SEQ ID NO: 361289 - protein, 13 aa, Homo sapiens
  CDR3 for alpha chain variable domain of TCR clone 180645 (TRAV12-1, TRAJ44)
CVVNAGTASKLTF

SEQ ID NO: 361290 - protein, 15 aa, Homo sapiens
  CDR3 for beta chain variable domain of TCR clone 180645 (TRBV20-1, TRBJ2-7)
CSARDRVSGMDEQYF

SEQ ID NO: 361291 - protein, 14 aa, Homo sapiens
  CDR3 for alpha chain variable domain of TCR clone 180646 (TRAV12-3, TRAJ10)
SHLPLTGGGNKLTF

SEQ ID NO: 361292 - protein, 12 aa, Homo sapiens
  CDR3 for beta chain variable domain of TCR clone 180646 (TRBV7-9, TRBJ1-1)
CASSLGDTEAFF

SEQ ID NO: 361293 - protein, 14 aa, Homo sapiens
  CDR3 for alpha chain variable domain of TCR clone 180647 (TRAV8-3, TRAJ17)
CAGGAQTAGNKLTF

SEQ ID NO: 361294 - protein, 11 aa, Homo sapiens
  CDR3 for beta chain variable domain of TCR clone 180647 (TRBV29-1, TRBJ1-4)
CSVSSGEKLFF

SEQ ID NO: 361295 - protein, 10 aa, Homo sapiens
  CDR3 for alpha chain variable domain of TCR clone 180648 (TRAV13-2, TRAJ40)
CAKGKYIFGT

SEQ ID NO: 361296 - protein, 13 aa, Homo sapiens
  CDR3 for beta chain variable domain of TCR clone 180648 (TRBV24-1, TRBJ2-2)
CATSDWSTGELFF

SEQ ID NO: 361297 - protein, 12 aa, Homo sapiens
  CDR3 for alpha chain variable domain of TCR clone 180649 (TRAV26-2, TRAJ21)
CILKGNFNKFYF

SEQ ID NO: 361298 - protein, 15 aa, Homo sapiens
  CDR3 for beta chain variable domain of TCR clone 180649 (TRBV5-7, TRBJ2-2)
CASSLASSNTGELFF

SEQ ID NO: 361299 - protein, 15 aa, Homo sapiens
  CDR3 for alpha chain variable domain of TCR clone 180650 (TRAV12-2, TRAJ20)
CAVKGGFGAGTPVTV

SEQ ID NO: 361300 - protein, 13 aa, Homo sapiens
  CDR3 for beta chain variable domain of TCR clone 180650 (TRBV12-4, TRBJ2-7)
CASSPGQLYEQYF

SEQ ID NO: 361301 - protein, 15 aa, Homo sapiens
  CDR3 for alpha chain variable domain of TCR clone 180651 (TRAV12-3, TRAJ13)
CAMSARSGGYQKVTF

SEQ ID NO: 361302 - protein, 12 aa, Homo sapiens
  CDR3 for beta chain variable domain of TCR clone 180651 (TRBV4-2, TRBJ2-5)
CASGGAQETQYF

SEQ ID NO: 361303 - protein, 13 aa, Homo sapiens
  CDR3 for alpha chain variable domain of TCR clone 180652 (TRAV26-1, TRAJ9)
CIASYTGGFKTIF

SEQ ID NO: 361304 - protein, 15 aa, Homo sapiens
  CDR3 for beta chain variable domain of TCR clone 180652 (TRBV7-2, TRBJ1-3)
CASSPQGGSGNTIYF

SEQ ID NO: 361305 - protein, 16 aa, Homo sapiens
  CDR3 for alpha chain variable domain of TCR clone 180653 (TRAV2, TRAJ13)
CAARILGVTRKLPLEL

SEQ ID NO: 361306 - protein, 11 aa, Homo sapiens
  CDR3 for beta chain variable domain of TCR clone 180653 (TRBV7-8, TRBJ2-7)
CASSLSLEQYF

SEQ ID NO: 361307 - protein, 16 aa, Homo sapiens
  CDR3 for alpha chain variable domain of TCR clone 180654 (TRAV26-1, TRAJ23)
CIVRPAIYSQGGKLIF

SEQ ID NO: 361308 - protein, 15 aa, Homo sapiens
  CDR3 for beta chain variable domain of TCR clone 180654 (TRBV20-1, TRBJ2-3)
CSARPSGFYTDTQYF

SEQ ID NO: 361309 - protein, 12 aa, Homo sapiens
  CDR3 for alpha chain variable domain of TCR clone 180655 (TRAV2, TRAJ9)
CAVGAGGFKTIF

SEQ ID NO: 361310 - protein, 12 aa, Homo sapiens
  CDR3 for beta chain variable domain of TCR clone 180655 (TRBV7-8, TRBJ2-3)
CASSLWDEAQYF

SEQ ID NO: 361311 - protein, 18 aa, Homo sapiens
  CDR3 for alpha chain variable domain of TCR clone 180656 (TRAV9-2, TRAJ13)
CQTQRCTEPSGGYQKVTF

SEQ ID NO: 361312 - protein, 18 aa, Homo sapiens
  CDR3 for beta chain variable domain of TCR clone 180656 (TRBV5-7, TRBJ2-5)
CASRSSGGGDPVLRARHA

SEQ ID NO: 361313 - protein, 14 aa, Homo sapiens
  CDR3 for alpha chain variable domain of TCR clone 180657 (TRAV8-3, TRAJ11)
CVVSEKSGYSTLTF

SEQ ID NO: 361314 - protein, 16 aa, Homo sapiens
  CDR3 for beta chain variable domain of TCR clone 180657 (TRBV28, TRBJ2-1)
CASSSPEYPRDNEQFF

SEQ ID NO: 361315 - protein, 15 aa, Homo sapiens
  CDR3 for alpha chain variable domain of TCR clone 180658 (TRAV12-1, TRAJ44)
CVADLPTGTASKLTF

SEQ ID NO: 361316 - protein, 13 aa, Homo sapiens
  CDR3 for beta chain variable domain of TCR clone 180658 (TRBV7-9, TRBJ1-2)
CASSLEQNYGYTF

SEQ ID NO: 361317 - protein, 12 aa, Homo sapiens
  CDR3 for alpha chain variable domain of TCR clone 180659 (TRAV26-1, TRAJ36)
FIVRVRADNLFF

SEQ ID NO: 361318 - protein, 13 aa, Homo sapiens
  CDR3 for beta chain variable domain of TCR clone 180659 (TRBV11-2, TRBJ2-5)
CASSRGPSETQYF

SEQ ID NO: 361319 - protein, 11 aa, Homo sapiens
  CDR3 for alpha chain variable domain of TCR clone 180660 (TRAV21, TRAJ34)
CAVTNTDKLIF

SEQ ID NO: 361320 - protein, 15 aa, Homo sapiens
  CDR3 for beta chain variable domain of TCR clone 180660 (TRBV19, TRBJ1-2)
CASSVGQVLNYGYTF

SEQ ID NO: 361321 - protein, 19 aa, Homo sapiens
  CDR3 for alpha chain variable domain of TCR clone 180661 (TRAV16, TRAJ22)
KKPFAQEEDSAMYLRHLTF

SEQ ID NO: 361322 - protein, 15 aa, Homo sapiens
  CDR3 for beta chain variable domain of TCR clone 180661 (TRBV7-9, TRBJ1-6)
CASSSPGRGNSPLHF

SEQ ID NO: 361323 - protein, 14 aa, Homo sapiens
  CDR3 for alpha chain variable domain of TCR clone 180662 (TRAV12-2, TRAJ17)
CAVLFKAAGNKLTF

SEQ ID NO: 361324 - protein, 13 aa, Homo sapiens
  CDR3 for beta chain variable domain of TCR clone 180662 (TRBV10-3, TRBJ1-2)
CAISERDSYGYTF

SEQ ID NO: 361325 - protein, 14 aa, Homo sapiens
  CDR3 for alpha chain variable domain of TCR clone 180663 (TRAV2, TRAJ9)
CAVEDRSGGFKTIF

SEQ ID NO: 361326 - protein, 16 aa, Homo sapiens
  CDR3 for beta chain variable domain of TCR clone 180663 (TRBV27, TRBJ2-2)
CASSSSGVSNTGELFF

SEQ ID NO: 361327 - protein, 10 aa, Homo sapiens
  CDR3 for alpha chain variable domain of TCR clone 180664 (TRAV1-2, TRAJ18)
CAVRGEAQPR

SEQ ID NO: 361328 - protein, 19 aa, Homo sapiens
  CDR3 for beta chain variable domain of TCR clone 180664 (TRBV6-3, TRBJ1-2)
CASSYSRGRTGPPNYGYTF

SEQ ID NO: 361329 - protein, 14 aa, Homo sapiens
  CDR3 for alpha chain variable domain of TCR clone 180665 (TRAV39, TRAJ42)
CAVDITRSQGNLIF

SEQ ID NO: 361330 - protein, 15 aa, Homo sapiens
  CDR3 for beta chain variable domain of TCR clone 180665 (TRBV27, TRBJ2-7)
CASSLFGTGLDEQYF

SEQ ID NO: 361331 - protein, 18 aa, Homo sapiens
  CDR3 for alpha chain variable domain of TCR clone 180666 (TRAV17, TRAJ45)
CATSLDLYSVGGADGLTF

SEQ ID NO: 361332 - protein, 13 aa, Homo sapiens
  CDR3 for beta chain variable domain of TCR clone 180666 (TRBV10-3, TRBJ2-7)
CASKLAVNYEQYF

SEQ ID NO: 361333 - protein, 15 aa, Homo sapiens
  CDR3 for alpha chain variable domain of TCR clone 180667 (TRAV35, TRAJ33)
CAGQPPRYSNYQLIW

SEQ ID NO: 361334 - protein, 17 aa, Homo sapiens
  CDR3 for beta chain variable domain of TCR clone 180667 (TRBV19, TRBJ2-7)
CASSISFYDSYPYEQYF

SEQ ID NO: 361335 - protein, 14 aa, Homo sapiens
  CDR3 for alpha chain variable domain of TCR clone 180668 (TRAV3, TRAJ9)
CAVRLNTGGFKTIF

SEQ ID NO: 361336 - protein, 12 aa, Homo sapiens
  CDR3 for beta chain variable domain of TCR clone 180668 (TRBV12-4, TRBJ2-7)
CASSLGGYEQYF

SEQ ID NO: 361337 - protein, 14 aa, Homo sapiens
  CDR3 for alpha chain variable domain of TCR clone 180669 (TRAV1-2, TRAJ6)
CAVSLSGGSYIPTF

SEQ ID NO: 361338 - protein, 15 aa, Homo sapiens
  CDR3 for beta chain variable domain of TCR clone 180669 (TRBV28, TRBJ2-7)
CASSPGGRGFYEQNF

SEQ ID NO: 361339 - protein, 14 aa, Homo sapiens
  CDR3 for alpha chain variable domain of TCR clone 180670 (TRAV26-1, TRAJ5)
CIVRARLNRRALTF

SEQ ID NO: 361340 - protein, 17 aa, Homo sapiens
  CDR3 for beta chain variable domain of TCR clone 180670 (TRBV29-1, TRBJ2-3)
CSVEVLAGETSTDTQYF

SEQ ID NO: 361341 - protein, 12 aa, Homo sapiens
  CDR3 for alpha chain variable domain of TCR clone 180671 (TRAV17, TRAJ12)
CATLRSSYKLIF

SEQ ID NO: 361342 - protein, 16 aa, Homo sapiens
  CDR3 for beta chain variable domain of TCR clone 180671 (TRBV28, TRBJ2-7)
CASSLFFETGGTEQYL

SEQ ID NO: 361343 - protein, 14 aa, Homo sapiens
  CDR3 for alpha chain variable domain of TCR clone 180672 (TRAV2, TRAJ22)
CAVGRGGSARQLTF

SEQ ID NO: 361344 - protein, 12 aa, Homo sapiens
  CDR3 for beta chain variable domain of TCR clone 180672 (TRBV19, TRBJ2-1)
CASSMQDTEKFF

SEQ ID NO: 361345 - protein, 11 aa, Homo sapiens
  CDR3 for alpha chain variable domain of TCR clone 180673 (TRAV2, TRAJ13)
CASGGYQKVTF

SEQ ID NO: 361346 - protein, 16 aa, Homo sapiens
  CDR3 for beta chain variable domain of TCR clone 180673 (TRBV10-3, TRBJ2-1)
CATSGVGDGGGGEQFF

SEQ ID NO: 361347 - protein, 15 aa, Homo sapiens
  CDR3 for alpha chain variable domain of TCR clone 180674 (TRAV25, TRAJ52)
CAGTSGGTSYGKMTC

SEQ ID NO: 361348 - protein, 15 aa, Homo sapiens
  CDR3 for beta chain variable domain of TCR clone 180674 (TRBV24-1, TRBJ2-1)
CATSGSGGFYNEQFF

SEQ ID NO: 361349 - protein, 13 aa, Homo sapiens
  CDR3 for alpha chain variable domain of TCR clone 180675 (TRAV12-1, TRAJ16)
CVVNGPDGQKLLF

SEQ ID NO: 361350 - protein, 13 aa, Homo sapiens
  CDR3 for beta chain variable domain of TCR clone 180675 (TRBV2, TRBJ1-1)
CARNPTGGCHSFF

SEQ ID NO: 361351 - protein, 14 aa, Homo sapiens
  CDR3 for alpha chain variable domain of TCR clone 180676 (TRAV8-3, TRAJ4)
CAVGAAGGYNKLIF

SEQ ID NO: 361352 - protein, 14 aa, Homo sapiens
  CDR3 for beta chain variable domain of TCR clone 180676 (TRBV20-1, TRBJ2-1)
CSAHPGLPYNEQFF

SEQ ID NO: 361353 - protein, 10 aa, Homo sapiens
  CDR3 for alpha chain variable domain of TCR clone 180677 (TRAV8-4, TRAJ43)
CAVSADDMRF

SEQ ID NO: 361354 - protein, 15 aa, Homo sapiens
  CDR3 for beta chain variable domain of TCR clone 180677 (TRBV5-1, TRBJ2-3)
CPSSVTSGSTDTQYF

SEQ ID NO: 361355 - protein, 13 aa, Homo sapiens
  CDR3 for alpha chain variable domain of TCR clone 180678 (TRAV12-2, TRAJ13)
CAVTAGGYQKVTF

SEQ ID NO: 361356 - protein, 15 aa, Homo sapiens
  CDR3 for beta chain variable domain of TCR clone 180678 (TRBV7-2, TRBJ1-2)
FASSLVSGGDYGYTF

SEQ ID NO: 361357 - protein, 13 aa, Homo sapiens
  CDR3 for alpha chain variable domain of TCR clone 180679 (TRAV1-2, TRAJ9)
CAALNTRGFKTIF

SEQ ID NO: 361358 - protein, 13 aa, Homo sapiens
  CDR3 for beta chain variable domain of TCR clone 180679 (TRBV12-4, TRBJ1-5)
CASSPDRAQPQHF

SEQ ID NO: 361359 - protein, 11 aa, Homo sapiens
  CDR3 for alpha chain variable domain of TCR clone 180680 (TRAV17, TRAJ31)
CATSHTARLMF

SEQ ID NO: 361360 - protein, 16 aa, Homo sapiens
  CDR3 for beta chain variable domain of TCR clone 180680 (TRBV7-8, TRBJ2-4)
CASSAERTLAKNIQYF

SEQ ID NO: 361361 - protein, 12 aa, Homo sapiens
  CDR3 for alpha chain variable domain of TCR clone 180681 (TRAV30, TRAJ39)
CGRGNAGNMLTF

SEQ ID NO: 361362 - protein, 14 aa, Homo sapiens
  CDR3 for beta chain variable domain of TCR clone 180681 (TRBV7-2, TRBJ1-1)
CASSFLTGTTEAFF

SEQ ID NO: 361363 - protein, 14 aa, Homo sapiens
  CDR3 for alpha chain variable domain of TCR clone 180682 (TRAV2, TRAJ9)
CAMEDRSGGFKTIF

SEQ ID NO: 361364 - protein, 13 aa, Homo sapiens
  CDR3 for beta chain variable domain of TCR clone 180682 (TRBV7-9, TRBJ1-2)
CASSLKQNYGYTF

SEQ ID NO: 361365 - protein, 14 aa, Homo sapiens
  CDR3 for alpha chain variable domain of TCR clone 180683 (TRAV23/DV6, TRAJ4)
CAANLSGGYNKLIF

SEQ ID NO: 361366 - protein, 11 aa, Homo sapiens
  CDR3 for beta chain variable domain of TCR clone 180683 (TRBV7-9, TRBJ2-3)
YASSPTDTQYF

SEQ ID NO: 361367 - protein, 17 aa, Homo sapiens
  CDR3 for alpha chain variable domain of TCR clone 180684 (TRAV26-1, TRAJ21)
CVAKGKFYFGSGSKLNV

SEQ ID NO: 361368 - protein, 15 aa, Homo sapiens
  CDR3 for beta chain variable domain of TCR clone 180684 (TRBV7-2, TRBJ2-1)
CASSSGLAGGNEQFF

SEQ ID NO: 361369 - protein, 14 aa, Homo sapiens
  CDR3 for alpha chain variable domain of TCR clone 180685 (TRAV12-3, TRAJ10)
SHLPLTGGGNKLTF

SEQ ID NO: 361370 - protein, 14 aa, Homo sapiens
  CDR3 for beta chain variable domain of TCR clone 180685 (TRBV18, TRBJ2-5)
CASSPPGHQETQYF

SEQ ID NO: 361371 - protein, 21 aa, Homo sapiens
  CDR3 for alpha chain variable domain of TCR clone 180686 (TRAV25, TRAJ47)
TATQTTDVGTYFWEYGNKLVF

SEQ ID NO: 361372 - protein, 15 aa, Homo sapiens
  CDR3 for beta chain variable domain of TCR clone 180686 (TRBV7-9, TRBJ2-2)
CASGPLDTFPGELFF

SEQ ID NO: 361373 - protein, 14 aa, Homo sapiens
  CDR3 for alpha chain variable domain of TCR clone 180687 (TRAV38-1, TRAJ40)
CALRPTSGTYKYIF

SEQ ID NO: 361374 - protein, 14 aa, Homo sapiens
  CDR3 for beta chain variable domain of TCR clone 180687 (TRBV25-1, TRBJ1-1)
CAITHLGGNTEAFF

SEQ ID NO: 361375 - protein, 12 aa, Homo sapiens
  CDR3 for alpha chain variable domain of TCR clone 180688 (TRAV13-2, TRAJ23)
CAERHRGGKLIF

SEQ ID NO: 361376 - protein, 15 aa, Homo sapiens
  CDR3 for beta chain variable domain of TCR clone 180688 (TRBV9, TRBJ1-6)
CASSVAGTGDAPLHF

SEQ ID NO: 361377 - protein, 11 aa, Homo sapiens
  CDR3 for alpha chain variable domain of TCR clone 180689 (TRAV13-2, TRAJ39)
CAENAGNMLTF

SEQ ID NO: 361378 - protein, 15 aa, Homo sapiens
  CDR3 for beta chain variable domain of TCR clone 180689 (TRBV7-9, TRBJ2-2)
CASRRTGGRTGELFF

SEQ ID NO: 361379 - protein, 16 aa, Homo sapiens
  CDR3 for alpha chain variable domain of TCR clone 180690 (TRAV2, TRAJ26)
CAAANPRDNYGQNFVF

SEQ ID NO: 361380 - protein, 17 aa, Homo sapiens
  CDR3 for beta chain variable domain of TCR clone 180690 (TRBV20-1, TRBJ2-2)
CSASGSGQGGLTGELFF

SEQ ID NO: 361381 - protein, 15 aa, Homo sapiens
  CDR3 for alpha chain variable domain of TCR clone 180691 (TRAV3, TRAJ12)
CAVRDIRDSSYKLIF

SEQ ID NO: 361382 - protein, 16 aa, Homo sapiens
  CDR3 for beta chain variable domain of TCR clone 180691 (TRBV7-9, TRBJ1-2)
CASSLGFSSGEDGYTF

SEQ ID NO: 361383 - protein, 15 aa, Homo sapiens
  CDR3 for alpha chain variable domain of TCR clone 180692 (TRAV26-1, TRAJ44)
CIVRIGTGTASKLTF

SEQ ID NO: 361384 - protein, 15 aa, Homo sapiens
  CDR3 for beta chain variable domain of TCR clone 180692 (TRBV6-5, TRBJ1-2)
CASSYSQAFNYGYTF

SEQ ID NO: 361385 - protein, 12 aa, Homo sapiens
  CDR3 for alpha chain variable domain of TCR clone 180693 (TRAV8-3, TRAJ20)
CAVGANDYKLSF

SEQ ID NO: 361386 - protein, 17 aa, Homo sapiens
  CDR3 for beta chain variable domain of TCR clone 180693 (TRBV13, TRBJ2-3)
CASSLSRVAGWRNTQYF

SEQ ID NO: 361387 - protein, 15 aa, Homo sapiens
  CDR3 for alpha chain variable domain of TCR clone 180694 (TRAV17, TRAJ57)
CATGPSQGGSEKLVF

SEQ ID NO: 361388 - protein, 14 aa, Homo sapiens
  CDR3 for beta chain variable domain of TCR clone 180694 (TRBV12-5, TRBJ2-5)
CASGSRTHQETRYF

SEQ ID NO: 361389 - protein, 11 aa, Homo sapiens
  CDR3 for alpha chain variable domain of TCR clone 180695 (TRAV12-2, TRAJ39)
CAVNNMLTFGG

SEQ ID NO: 361390 - protein, 14 aa, Homo sapiens
  CDR3 for beta chain variable domain of TCR clone 180695 (TRBV25-1, TRBJ1-1)
CASTHLGGNTEAFF

SEQ ID NO: 361391 - protein, 13 aa, Homo sapiens
  CDR3 for alpha chain variable domain of TCR clone 180696 (TRAV29/DV5, TRAJ31)
CAASRNNNARLMF

SEQ ID NO: 361392 - protein, 16 aa, Homo sapiens
  CDR3 for beta chain variable domain of TCR clone 180696 (TRBV27, TRBJ2-2)
CASSFRGLVRTGELFF

SEQ ID NO: 361393 - protein, 14 aa, Homo sapiens
  CDR3 for alpha chain variable domain of TCR clone 180697 (TRAV1-2, TRAJ16)
CAVNRFSDGQKLLF

SEQ ID NO: 361394 - protein, 14 aa, Homo sapiens
  CDR3 for beta chain variable domain of TCR clone 180697 (TRBV28, TRBJ2-5)
CASSRLAGGETQYF

SEQ ID NO: 361395 - protein, 15 aa, Homo sapiens
  CDR3 for alpha chain variable domain of TCR clone 180698 (TRAV8-3, TRAJ27)
CAVGPSKTNAGKSTF

SEQ ID NO: 361396 - protein, 19 aa, Homo sapiens
  CDR3 for beta chain variable domain of TCR clone 180698 (TRBV25-1, TRBJ2-2)
CAILVYRVDRGRKTGELFF

SEQ ID NO: 361397 - protein, 14 aa, Homo sapiens
  CDR3 for alpha chain variable domain of TCR clone 180699 (TRAV12-3, TRAJ6)
CAMSATGGSSIPTF

SEQ ID NO: 361398 - protein, 16 aa, Homo sapiens
  CDR3 for beta chain variable domain of TCR clone 180699 (TRBV4-2, TRBJ2-1)
CASSPRAGQGANEQFF

SEQ ID NO: 361399 - protein, 16 aa, Homo sapiens
  CDR3 for alpha chain variable domain of TCR clone 180700 (TRAV26-1, TRAJ37)
CIVRGDGSGNTGKLIF

SEQ ID NO: 361400 - protein, 15 aa, Homo sapiens
  CDR3 for beta chain variable domain of TCR clone 180700 (TRBV7-3, TRBJ2-1)
CGSSPTGGGEVEQFF

SEQ ID NO: 361401 - protein, 13 aa, Homo sapiens
  CDR3 for alpha chain variable domain of TCR clone 180701 (TRAV12-1, TRAJ49)
CVVTPFTGNQFSF

SEQ ID NO: 361402 - protein, 13 aa, Homo sapiens
  CDR3 for beta chain variable domain of TCR clone 180701 (TRBV20-1, TRBJ1-1)
CSARGGANTEAFF

SEQ ID NO: 361403 - protein, 15 aa, Homo sapiens
  CDR3 for alpha chain variable domain of TCR clone 180702 (TRAV12-1, TRAJ44)
CVVFVNTGTASKLTF

SEQ ID NO: 361404 - protein, 15 aa, Homo sapiens
  CDR3 for beta chain variable domain of TCR clone 180702 (TRBV20-1, TRBJ2-5)
CSAEGTGGLQETQYF

SEQ ID NO: 361405 - protein, 13 aa, Homo sapiens
  CDR3 for alpha chain variable domain of TCR clone 180703 (TRAV9-2, TRAJ9)
CALSDRGGFKTSF

SEQ ID NO: 361406 - protein, 14 aa, Homo sapiens
  CDR3 for beta chain variable domain of TCR clone 180703 (TRBV20-1, TRBJ2-2)
CSAPDTANTGELFF

SEQ ID NO: 361407 - protein, 13 aa, Homo sapiens
  CDR3 for alpha chain variable domain of TCR clone 180704 (TRAV6, TRAJ45)
SPFSGGGADGLTF

SEQ ID NO: 361408 - protein, 17 aa, Homo sapiens
  CDR3 for beta chain variable domain of TCR clone 180704 (TRBV7-3, TRBJ2-5)
CASSLGSGRSGSETQYF

SEQ ID NO: 361409 - protein, 14 aa, Homo sapiens
  CDR3 for alpha chain variable domain of TCR clone 180705 (TRAV13-1, TRAJ44)
CAAKATGTASKLTL

SEQ ID NO: 361410 - protein, 16 aa, Homo sapiens
  CDR3 for beta chain variable domain of TCR clone 180705 (TRBV7-9, TRBJ2-6)
CASSLKGPLRANVLTF

SEQ ID NO: 361411 - protein, 14 aa, Homo sapiens
  CDR3 for alpha chain variable domain of TCR clone 180706 (TRAV12-2, TRAJ40)
CAVKIPSGTYKYIF

SEQ ID NO: 361412 - protein, 17 aa, Homo sapiens
  CDR3 for beta chain variable domain of TCR clone 180706 (TRBV7-8, TRBJ2-6)
CASSAETGGAGANVLTF

SEQ ID NO: 361413 - protein, 16 aa, Homo sapiens
  CDR3 for alpha chain variable domain of TCR clone 180707 (TRAV8-3, TRAJ28)
CAVPPQRGAGSYQLTF

SEQ ID NO: 361414 - protein, 13 aa, Homo sapiens
  CDR3 for beta chain variable domain of TCR clone 180707 (TRBV7-6, TRBJ2-3)
CASCLRSDNTQYF

SEQ ID NO: 361415 - protein, 12 aa, Homo sapiens
  CDR3 for alpha chain variable domain of TCR clone 180708 (TRAV17, TRAJ47)
CATDFDGNKLDF

SEQ ID NO: 361416 - protein, 13 aa, Homo sapiens
  CDR3 for beta chain variable domain of TCR clone 180708 (TRBV4-2, TRBJ1-1)
CASSQAGNTEAFF

SEQ ID NO: 361417 - protein, 12 aa, Homo sapiens
  CDR3 for alpha chain variable domain of TCR clone 180709 (TRAV12-3, TRAJ20)
CAMVRGDYKLSF

SEQ ID NO: 361418 - protein, 12 aa, Homo sapiens
  CDR3 for beta chain variable domain of TCR clone 180709 (TRBV11-2, TRBJ2-2)
CASSLPTGELFF

SEQ ID NO: 361419 - protein, 14 aa, Homo sapiens
  CDR3 for alpha chain variable domain of TCR clone 180710 (TRAV21, TRAJ58)
CAVRRGRSGSRLTF

SEQ ID NO: 361420 - protein, 13 aa, Homo sapiens
  CDR3 for beta chain variable domain of TCR clone 180710 (TRBV7-2, TRBJ1-6)
CASSLKFDSPLHC

SEQ ID NO: 361421 - protein, 14 aa, Homo sapiens
  CDR3 for alpha chain variable domain of TCR clone 180711 (TRAV12-2, TRAJ44)
CAVNPAGTASKLTF

SEQ ID NO: 361422 - protein, 14 aa, Homo sapiens
  CDR3 for beta chain variable domain of TCR clone 180711 (TRBV25-1, TRBJ1-1)
CASTHLGGNTEAFF

SEQ ID NO: 361423 - protein, 14 aa, Homo sapiens
  CDR3 for alpha chain variable domain of TCR clone 180712 (TRAV35, TRAJ33)
CWPRGRDSNYQLIW

SEQ ID NO: 361424 - protein, 15 aa, Homo sapiens
  CDR3 for beta chain variable domain of TCR clone 180712 (TRBV20-1, TRBJ2-2)
SAVPRTPRTPGSCFF

SEQ ID NO: 361425 - protein, 14 aa, Homo sapiens
  CDR3 for alpha chain variable domain of TCR clone 180713 (TRAV8-3, TRAJ39)
CAVGANNAGNMLTF

SEQ ID NO: 361426 - protein, 16 aa, Homo sapiens
  CDR3 for beta chain variable domain of TCR clone 180713 (TRBV19, TRBJ2-2)
CASRSPGTGATGELFF

SEQ ID NO: 361427 - protein, 15 aa, Homo sapiens
  CDR3 for alpha chain variable domain of TCR clone 180714 (TRAV3, TRAJ4)
CAVRDGTGGYNKLIF

SEQ ID NO: 361428 - protein, 15 aa, Homo sapiens
  CDR3 for beta chain variable domain of TCR clone 180714 (TRBV7-9, TRBJ2-7)
CASSLALAEAYEQYF

SEQ ID NO: 361429 - protein, 15 aa, Homo sapiens
  CDR3 for alpha chain variable domain of TCR clone 180715 (TRAV3, TRAJ5)
CAVSDRKTGRRALTF

SEQ ID NO: 361430 - protein, 15 aa, Homo sapiens
  CDR3 for beta chain variable domain of TCR clone 180715 (TRBV7-9, TRBJ2-2)
CASGPLDTFPGELFF

SEQ ID NO: 361431 - protein, 13 aa, Homo sapiens
  CDR3 for alpha chain variable domain of TCR clone 180716 (TRAV35, TRAJ44)
CAGLSGTASKLTF

SEQ ID NO: 361432 - protein, 17 aa, Homo sapiens
  CDR3 for beta chain variable domain of TCR clone 180716 (TRBV7-8, TRBJ1-2)
CASSLRPLQGHLSGYTF

SEQ ID NO: 361433 - protein, 15 aa, Homo sapiens
  CDR3 for alpha chain variable domain of TCR clone 180717 (TRAV8-3, TRAJ11)
CAVGLLNSGYSTLTF

SEQ ID NO: 361434 - protein, 15 aa, Homo sapiens
  CDR3 for beta chain variable domain of TCR clone 180717 (TRBV13, TRBJ2-1)
CASSLLSGLNNEHFF

SEQ ID NO: 361435 - protein, 14 aa, Homo sapiens
  CDR3 for alpha chain variable domain of TCR clone 180718 (TRAV13-2, TRAJ5)
CAEKGPTGRRALTF

SEQ ID NO: 361436 - protein, 16 aa, Homo sapiens
  CDR3 for beta chain variable domain of TCR clone 180718 (TRBV9, TRBJ2-2)
CASSMVAGANTGELFF

SEQ ID NO: 361437 - protein, 17 aa, Homo sapiens
  CDR3 for alpha chain variable domain of TCR clone 180719 (TRAV3, TRAJ6)
CAVREGPRAGGSYIPTF

SEQ ID NO: 361438 - protein, 14 aa, Homo sapiens
  CDR3 for beta chain variable domain of TCR clone 180719 (TRBV7-2, TRBJ2-7)
CASSPKTSVYEQYF

SEQ ID NO: 361439 - protein, 14 aa, Homo sapiens
  CDR3 for alpha chain variable domain of TCR clone 180720 (TRAV1-2, TRAJ16)
CAVNRFSDGQKLLF

SEQ ID NO: 361440 - protein, 14 aa, Homo sapiens
  CDR3 for beta chain variable domain of TCR clone 180720 (TRBV5-7, TRBJ2-3)
CASSYFGQVHTQYF

SEQ ID NO: 361441 - protein, 14 aa, Homo sapiens
  CDR3 for alpha chain variable domain of TCR clone 180721 (TRAV13-1, TRAJ5)
CAASPDTGRRALTF

SEQ ID NO: 361442 - protein, 16 aa, Homo sapiens
  CDR3 for beta chain variable domain of TCR clone 180721 (TRBV7-6, TRBJ2-1)
CASSAPGPSSYNEQFF

SEQ ID NO: 361443 - protein, 16 aa, Homo sapiens
  CDR3 for alpha chain variable domain of TCR clone 180722 (TRAV25, TRAJ52)
CAGPRAGGTSYGKLTC

SEQ ID NO: 361444 - protein, 15 aa, Homo sapiens
  CDR3 for beta chain variable domain of TCR clone 180722 (TRBV10-3, TRBJ2-2)
CAIYTGGTGTGELFF

SEQ ID NO: 361445 - protein, 14 aa, Homo sapiens
  CDR3 for alpha chain variable domain of TCR clone 180723 (TRAV13-1, TRAJ44)
CAAKATGTASKLIF

SEQ ID NO: 361446 - protein, 17 aa, Homo sapiens
  CDR3 for beta chain variable domain of TCR clone 180723 (TRBV7-3, TRBJ2-3)
CASSLMKRMRGADTQYF

SEQ ID NO: 361447 - protein, 14 aa, Homo sapiens
  CDR3 for alpha chain variable domain of TCR clone 180724 (TRAV1-2, TRAJ8)
CAVREDTGFQKLVF

SEQ ID NO: 361448 - protein, 13 aa, Homo sapiens
  CDR3 for beta chain variable domain of TCR clone 180724 (TRBV27, TRBJ2-3)
CASSLSRTDTQYF

SEQ ID NO: 361449 - protein, 14 aa, Homo sapiens
  CDR3 for alpha chain variable domain of TCR clone 180725 (TRAV12-2, TRAJ13)
CAVKKTRGYQEVTF

SEQ ID NO: 361450 - protein, 15 aa, Homo sapiens
  CDR3 for beta chain variable domain of TCR clone 180725 (TRBV27, TRBJ2-1)
CASSNGGGSSNEQFF

SEQ ID NO: 361451 - protein, 13 aa, Homo sapiens
  CDR3 for alpha chain variable domain of TCR clone 180726 (TRAV8-3, TRAJ43)
CAVVPYNNNDMRF

SEQ ID NO: 361452 - protein, 16 aa, Homo sapiens
  CDR3 for beta chain variable domain of TCR clone 180726 (TRBV20-1, TRBJ2-3)
CSGEAGLAGGQDTQYF

SEQ ID NO: 361453 - protein, 13 aa, Homo sapiens
  CDR3 for alpha chain variable domain of TCR clone 180727 (TRAV12-1, TRAJ40)
CVVPTSGTYKYIF

SEQ ID NO: 361454 - protein, 12 aa, Homo sapiens
  CDR3 for beta chain variable domain of TCR clone 180727 (TRBV7-8, TRBJ2-7)
CASSLGDREQYF

SEQ ID NO: 361455 - protein, 13 aa, Homo sapiens
  CDR3 for alpha chain variable domain of TCR clone 180728 (TRAV2, TRAJ40)
CAVVTSGTYKYIF

SEQ ID NO: 361456 - protein, 14 aa, Homo sapiens
  CDR3 for beta chain variable domain of TCR clone 180728 (TRBV19, TRBJ2-1)
CAGPTFVLSSEQFF

SEQ ID NO: 361457 - protein, 12 aa, Homo sapiens
  CDR3 for alpha chain variable domain of TCR clone 180729 (TRAV3, TRAJ20)
CAVRDPDYKPSF

SEQ ID NO: 361458 - protein, 15 aa, Homo sapiens
  CDR3 for beta chain variable domain of TCR clone 180729 (TRBV7-9, TRBJ2-7)
CASSLPMGQANEQYF

SEQ ID NO: 361459 - protein, 14 aa, Homo sapiens
  CDR3 for alpha chain variable domain of TCR clone 180730 (TRAV13-1, TRAJ35)
CAASKGGFGNALHC

SEQ ID NO: 361460 - protein, 13 aa, Homo sapiens
  CDR3 for beta chain variable domain of TCR clone 180730 (TRBV7-3, TRBJ1-1)
CASSQDWGAEAFF

SEQ ID NO: 361461 - protein, 11 aa, Homo sapiens
  CDR3 for alpha chain variable domain of TCR clone 180731 (TRAV1-2, TRAJ40)
CAVPGTYKYVF

SEQ ID NO: 361462 - protein, 15 aa, Homo sapiens
  CDR3 for beta chain variable domain of TCR clone 180731 (TRBV5-7, TRBJ1-5)
CASSYGKLWDQPQHF

SEQ ID NO: 361463 - protein, 10 aa, Homo sapiens
  CDR3 for alpha chain variable domain of TCR clone 180732 (TRAV12-3, TRAJ43)
CAMSASDMRF

SEQ ID NO: 361464 - protein, 14 aa, Homo sapiens
  CDR3 for beta chain variable domain of TCR clone 180732 (TRBV7-9, TRBJ2-5)
CASSPAQDQETQYF

SEQ ID NO: 361465 - protein, 14 aa, Homo sapiens
  CDR3 for alpha chain variable domain of TCR clone 180733 (TRAV26-1, TRAJ38)
CIADNAGNNRTLIL

SEQ ID NO: 361466 - protein, 14 aa, Homo sapiens
  CDR3 for beta chain variable domain of TCR clone 180733 (TRBV11-2, TRBJ2-5)
CASSRTGGIETQYF

SEQ ID NO: 361467 - protein, 19 aa, Homo sapiens
  CDR3 for alpha chain variable domain of TCR clone 180734 (TRAV38-1, TRAJ53)
WAFMKHGLESGGSNYKLTF

SEQ ID NO: 361468 - protein, 13 aa, Homo sapiens
  CDR3 for beta chain variable domain of TCR clone 180734 (TRBV19, TRBJ2-7)
CASSPRQSYEQYF

SEQ ID NO: 361469 - protein, 13 aa, Homo sapiens
  CDR3 for alpha chain variable domain of TCR clone 180735 (TRAV12-1, TRAJ29)
CVVNGPGNTPLVF

SEQ ID NO: 361470 - protein, 15 aa, Homo sapiens
  CDR3 for beta chain variable domain of TCR clone 180735 (TRBV6-1, TRBJ2-7)
CASSESMGDFYEQYF

SEQ ID NO: 361471 - protein, 11 aa, Homo sapiens
  CDR3 for alpha chain variable domain of TCR clone 180736 (TRAV12-1, TRAJ30)
CVVNGQDKIIF

SEQ ID NO: 361472 - protein, 12 aa, Homo sapiens
  CDR3 for beta chain variable domain of TCR clone 180736 (TRBV27, TRBJ2-2)
CVSKLFTGELFF

SEQ ID NO: 361473 - protein, 15 aa, Homo sapiens
  CDR3 for alpha chain variable domain of TCR clone 180737 (TRAV3, TRAJ22)
CAVRDRVGSARQLTF

SEQ ID NO: 361474 - protein, 13 aa, Homo sapiens
  CDR3 for beta chain variable domain of TCR clone 180737 (TRBV12-4, TRBJ1-2)
CASSLRQGKGYTF

SEQ ID NO: 361475 - protein, 14 aa, Homo sapiens
  CDR3 for alpha chain variable domain of TCR clone 180738 (TRAV12-2, TRAJ13)
CAVTKTGGYQKVTF

SEQ ID NO: 361476 - protein, 15 aa, Homo sapiens
  CDR3 for beta chain variable domain of TCR clone 180738 (TRBV28, TRBJ2-2)
CASRLQGVGTGELFF

SEQ ID NO: 361477 - protein, 10 aa, Homo sapiens
  CDR3 for alpha chain variable domain of TCR clone 180739 (TRAV23/DV6, TRAJ31)
CARGGARLML

SEQ ID NO: 361478 - protein, 14 aa, Homo sapiens
  CDR3 for beta chain variable domain of TCR clone 180739 (TRBV7-8, TRBJ1-2)
CASSPDSLPYGYTF

SEQ ID NO: 361479 - protein, 14 aa, Homo sapiens
  CDR3 for alpha chain variable domain of TCR clone 180740 (TRAV12-2, TRAJ13)
CAVKKTGGYQKVTF

SEQ ID NO: 361480 - protein, 17 aa, Homo sapiens
  CDR3 for beta chain variable domain of TCR clone 180740 (TRBV10-3, TRBJ1-1)
CAISESGTGGGTTEAFF

SEQ ID NO: 361481 - protein, 10 aa, Homo sapiens
  CDR3 for alpha chain variable domain of TCR clone 180741 (TRAV27, TRAJ43)
CAGANNDMRF

SEQ ID NO: 361482 - protein, 15 aa, Homo sapiens
  CDR3 for beta chain variable domain of TCR clone 180741 (TRBV5-1, TRBJ2-4)
CASSLGGGGSYIQYF

SEQ ID NO: 361483 - protein, 13 aa, Homo sapiens
  CDR3 for alpha chain variable domain of TCR clone 180742 (TRAV3, TRAJ21)
CAVREPDVNKFYF

SEQ ID NO: 361484 - protein, 14 aa, Homo sapiens
  CDR3 for beta chain variable domain of TCR clone 180742 (TRBV7-3, TRBJ1-1)
CASSLGTGYTEAFF

SEQ ID NO: 361485 - protein, 14 aa, Homo sapiens
  CDR3 for alpha chain variable domain of TCR clone 180743 (TRAV1-1, TRAJ28)
WAAPSGAGSYQLTF

SEQ ID NO: 361486 - protein, 15 aa, Homo sapiens
  CDR3 for beta chain variable domain of TCR clone 180743 (TRBV7-2, TRBJ1-2)
CASSLVSGGDYGYTF

SEQ ID NO: 361487 - protein, 12 aa, Homo sapiens
  CDR3 for alpha chain variable domain of TCR clone 180744 (TRAV12-1, TRAJ40)
CVVYSGTYKYIF

SEQ ID NO: 361488 - protein, 15 aa, Homo sapiens
  CDR3 for beta chain variable domain of TCR clone 180744 (TRBV6-4, TRBJ2-1)
CASSDSTGGYNGQFF

SEQ ID NO: 361489 - protein, 16 aa, Homo sapiens
  CDR3 for alpha chain variable domain of TCR clone 180745 (TRAV21, TRAJ17)
CAVRPGEEAAGNKLTF

SEQ ID NO: 361490 - protein, 16 aa, Homo sapiens
  CDR3 for beta chain variable domain of TCR clone 180745 (TRBV4-1, TRBJ2-7)
CASSQEWTSGPLEQYF

SEQ ID NO: 361491 - protein, 14 aa, Homo sapiens
  CDR3 for alpha chain variable domain of TCR clone 180746 (TRAV1-2, TRAJ16)
CAVNRFSDGQKLLF

SEQ ID NO: 361492 - protein, 12 aa, Homo sapiens
  CDR3 for beta chain variable domain of TCR clone 180746 (TRBV4-1, TRBJ2-1)
CASSQPGQGQFF

SEQ ID NO: 361493 - protein, 16 aa, Homo sapiens
  CDR3 for alpha chain variable domain of TCR clone 180747 (TRAV12-2, TRAJ45)
CAVKRNPGGGADGLTF

SEQ ID NO: 361494 - protein, 12 aa, Homo sapiens
  CDR3 for beta chain variable domain of TCR clone 180747 (TRBV6-1, TRBJ2-5)
CASSGGRETQYF

SEQ ID NO: 361495 - protein, 11 aa, Homo sapiens
  CDR3 for alpha chain variable domain of TCR clone 180748 (TRAV26-1, TRAJ37)
CIVRVGRKLIF

SEQ ID NO: 361496 - protein, 13 aa, Homo sapiens
  CDR3 for beta chain variable domain of TCR clone 180748 (TRBV7-7, TRBJ2-2)
CASSLTSAGELFF

SEQ ID NO: 361497 - protein, 14 aa, Homo sapiens
  CDR3 for alpha chain variable domain of TCR clone 180749 (TRAV8-6, TRAJ49)
CAVSVRYTGNQFYF

SEQ ID NO: 361498 - protein, 19 aa, Homo sapiens
  CDR3 for beta chain variable domain of TCR clone 180749 (TRBV28, TRBJ2-1)
CASSFSVRGSGRTRYEQFF

SEQ ID NO: 361499 - protein, 15 aa, Homo sapiens
  CDR3 for alpha chain variable domain of TCR clone 180750 (TRAV3, TRAJ22)
CAVRDRGGSARQLTF

SEQ ID NO: 361500 - protein, 16 aa, Homo sapiens
  CDR3 for beta chain variable domain of TCR clone 180750 (TRBV19, TRBJ2-2)
CASRSPGTGATGELFF

SEQ ID NO: 361501 - protein, 15 aa, Homo sapiens
  CDR3 for alpha chain variable domain of TCR clone 180751 (TRAV17, TRAJ37)
CATDHGSSNTGKLIF

SEQ ID NO: 361502 - protein, 14 aa, Homo sapiens
  CDR3 for beta chain variable domain of TCR clone 180751 (TRBV7-2, TRBJ2-3)
CASSRTSVADTQYF

SEQ ID NO: 361503 - protein, 18 aa, Homo sapiens
  CDR3 for alpha chain variable domain of TCR clone 180752 (TRAV29/DV5, TRAJ52)
CSAGFRGAGGTSYVKLTF

SEQ ID NO: 361504 - protein, 16 aa, Homo sapiens
  CDR3 for beta chain variable domain of TCR clone 180752 (TRBV7-3, TRBJ2-2)
CASSLKRGTLSGELFF

SEQ ID NO: 361505 - protein, 14 aa, Homo sapiens
  CDR3 for alpha chain variable domain of TCR clone 180753 (TRAV12-2, TRAJ53)
CAVKGGGSNYKLTF

SEQ ID NO: 361506 - protein, 15 aa, Homo sapiens
  CDR3 for beta chain variable domain of TCR clone 180753 (TRBV10-3, TRBJ2-3)
CAISLTSGGTHTQYF

SEQ ID NO: 361507 - protein, 15 aa, Homo sapiens
  CDR3 for alpha chain variable domain of TCR clone 180754 (TRAV8-3, TRAJ45)
CASSYSGGGADGLTF

SEQ ID NO: 361508 - protein, 18 aa, Homo sapiens
  CDR3 for beta chain variable domain of TCR clone 180754 (TRBV18, TRBJ1-3)
CAGSPRGGAGPSGNTIYF

SEQ ID NO: 361509 - protein, 14 aa, Homo sapiens
  CDR3 for alpha chain variable domain of TCR clone 180755 (TRAV12-1, TRAJ26)
CVVKGSNYGQNFVF

SEQ ID NO: 361510 - protein, 13 aa, Homo sapiens
  CDR3 for beta chain variable domain of TCR clone 180755 (TRBV29-1, TRBJ2-1)
CSVEGGRVNEQFF

SEQ ID NO: 361511 - protein, 16 aa, Homo sapiens
  CDR3 for alpha chain variable domain of TCR clone 180756 (TRAV12-3, TRAJ53)
CAMSPGSGGSNYKLTF

SEQ ID NO: 361512 - protein, 13 aa, Homo sapiens
  CDR3 for beta chain variable domain of TCR clone 180756 (TRBV19, TRBJ1-2)
CASSVPGQGGYTF

SEQ ID NO: 361513 - protein, 16 aa, Homo sapiens
  CDR3 for alpha chain variable domain of TCR clone 180757 (TRAV26-1, TRAJ23)
CIVRPHGNNQGGTLIF

SEQ ID NO: 361514 - protein, 17 aa, Homo sapiens
  CDR3 for beta chain variable domain of TCR clone 180757 (TRBV6-1, TRBJ2-1)
CASSEGGSGRGRNEQFF

SEQ ID NO: 361515 - protein, 14 aa, Homo sapiens
  CDR3 for alpha chain variable domain of TCR clone 180758 (TRAV12-1, TRAJ38)
CVVNERGNNRKLIW

SEQ ID NO: 361516 - protein, 19 aa, Homo sapiens
  CDR3 for beta chain variable domain of TCR clone 180758 (TRBV7-9, TRBJ2-1)
CASSHNRGALLRSYNEQFF

SEQ ID NO: 361517 - protein, 15 aa, Homo sapiens
  CDR3 for alpha chain variable domain of TCR clone 180759 (TRAV3, TRAJ22)
RAVRDRGGSARQLTF

SEQ ID NO: 361518 - protein, 14 aa, Homo sapiens
  CDR3 for beta chain variable domain of TCR clone 180759 (TRBV18, TRBJ2-5)
CASSPGVSQETQYF

SEQ ID NO: 361519 - protein, 16 aa, Homo sapiens
  CDR3 for alpha chain variable domain of TCR clone 180760 (TRAV3, TRAJ10)
CAVRDMRAGGGNKITF

SEQ ID NO: 361520 - protein, 17 aa, Homo sapiens
  CDR3 for beta chain variable domain of TCR clone 180760 (TRBV28, TRBJ2-5)
CASSTPEGDALQETQYF

SEQ ID NO: 361521 - protein, 13 aa, Homo sapiens
  CDR3 for alpha chain variable domain of TCR clone 180761 (TRAV8-3, TRAJ48)
CAVVLFGNEKLTF

SEQ ID NO: 361522 - protein, 12 aa, Homo sapiens
  CDR3 for beta chain variable domain of TCR clone 180761 (TRBV11-2, TRBJ2-2)
CASSLGGGELFL

SEQ ID NO: 361523 - protein, 14 aa, Homo sapiens
  CDR3 for alpha chain variable domain of TCR clone 180762 (TRAV3, TRAJ22)
CAVRDYVSAMQLTF

SEQ ID NO: 361524 - protein, 13 aa, Homo sapiens
  CDR3 for beta chain variable domain of TCR clone 180762 (TRBV11-2, TRBJ2-5)
CASGHGAKETQYF

SEQ ID NO: 361525 - protein, 13 aa, Homo sapiens
  CDR3 for alpha chain variable domain of TCR clone 180763 (TRAV13-1, TRAJ5)
CAARVTGRRALPF

SEQ ID NO: 361526 - protein, 15 aa, Homo sapiens
  CDR3 for beta chain variable domain of TCR clone 180763 (TRBV28, TRBJ2-7)
CASSPGGRGFYEQYF

SEQ ID NO: 361527 - protein, 13 aa, Homo sapiens
  CDR3 for alpha chain variable domain of TCR clone 180764 (TRAV20, TRAJ45)
CAVKKRRCRRTHL

SEQ ID NO: 361528 - protein, 14 aa, Homo sapiens
  CDR3 for beta chain variable domain of TCR clone 180764 (TRBV15, TRBJ2-5)
CATSRGGLGETQYF

SEQ ID NO: 361529 - protein, 13 aa, Homo sapiens
  CDR3 for alpha chain variable domain of TCR clone 180765 (TRAV13-1, TRAJ29)
CAASIGFNTPLVF

SEQ ID NO: 361530 - protein, 15 aa, Homo sapiens
  CDR3 for beta chain variable domain of TCR clone 180765 (TRBV6-1, TRBJ2-5)
CASSEFPLMGETQYF

SEQ ID NO: 361531 - protein, 13 aa, Homo sapiens
  CDR3 for alpha chain variable domain of TCR clone 180766 (TRAV27, TRAJ27)
CAGPDTNAGKSTF

SEQ ID NO: 361532 - protein, 15 aa, Homo sapiens
  CDR3 for beta chain variable domain of TCR clone 180766 (TRBV11-2, TRBJ2-1)
CASSLGTSGLNEQFF

SEQ ID NO: 361533 - protein, 14 aa, Homo sapiens
  CDR3 for alpha chain variable domain of TCR clone 180767 (TRAV26-1, TRAJ38)
CIADDAGNNRKLIW

SEQ ID NO: 361534 - protein, 14 aa, Homo sapiens
  CDR3 for beta chain variable domain of TCR clone 180767 (TRBV4-1, TRBJ2-2)
CASSQAVNTGELFF

SEQ ID NO: 361535 - protein, 14 aa, Homo sapiens
  CDR3 for alpha chain variable domain of TCR clone 180768 (TRAV1-2, TRAJ8)
CAVREDTGSQKLVF

SEQ ID NO: 361536 - protein, 14 aa, Homo sapiens
  CDR3 for beta chain variable domain of TCR clone 180768 (TRBV7-6, TRBJ2-3)
CASSLGTVTDKQYF

SEQ ID NO: 361537 - protein, 16 aa, Homo sapiens
  CDR3 for alpha chain variable domain of TCR clone 180769 (TRAV3, TRAJ32)
CAVRENYGGATNKLIF

SEQ ID NO: 361538 - protein, 12 aa, Homo sapiens
  CDR3 for beta chain variable domain of TCR clone 180769 (TRBV20-1, TRBJ1-2)
CSVAPEGYGYTF

SEQ ID NO: 361539 - protein, 15 aa, Homo sapiens
  CDR3 for alpha chain variable domain of TCR clone 180770 (TRAV21, TRAJ32)
CAAAPYGGATNKLIF

SEQ ID NO: 361540 - protein, 15 aa, Homo sapiens
  CDR3 for beta chain variable domain of TCR clone 180770 (TRBV6-5, TRBJ2-3)
CASTKRGDLTDTQYF

SEQ ID NO: 361541 - protein, 12 aa, Homo sapiens
  CDR3 for alpha chain variable domain of TCR clone 180771 (TRAV13-1, TRAJ21)
CAAKEGVNKFYF

SEQ ID NO: 361542 - protein, 14 aa, Homo sapiens
  CDR3 for beta chain variable domain of TCR clone 180771 (TRBV7-2, TRBJ2-7)
CASSPKTSFYEQYF

SEQ ID NO: 361543 - protein, 14 aa, Homo sapiens
  CDR3 for alpha chain variable domain of TCR clone 180772 (TRAV1-2, TRAJ16)
CAVNRFSDGQKLLF

SEQ ID NO: 361544 - protein, 15 aa, Homo sapiens
  CDR3 for beta chain variable domain of TCR clone 180772 (TRBV5-4, TRBJ2-1)
CASSREGLPYNEQFF

SEQ ID NO: 361545 - protein, 17 aa, Homo sapiens
  CDR3 for alpha chain variable domain of TCR clone 180773 (TRAV13-1, TRAJ52)
CAAGRNAGGTSYGKLTF

SEQ ID NO: 361546 - protein, 12 aa, Homo sapiens
  CDR3 for beta chain variable domain of TCR clone 180773 (TRBV5-1, TRBJ2-3)
CASSLAADTHFF

SEQ ID NO: 361547 - protein, 10 aa, Homo sapiens
  CDR3 for alpha chain variable domain of TCR clone 180774 (TRAV1-2, TRAJ31)
CAFFDARLMF

SEQ ID NO: 361548 - protein, 15 aa, Homo sapiens
  CDR3 for beta chain variable domain of TCR clone 180774 (TRBV10-3, TRBJ2-3)
CAISLTSGGTDTQYF

SEQ ID NO: 361549 - protein, 15 aa, Homo sapiens
  CDR3 for alpha chain variable domain of TCR clone 180775 (TRAV27, TRAJ38)
CAARRNAGNNRKLIW

SEQ ID NO: 361550 - protein, 14 aa, Homo sapiens
  CDR3 for beta chain variable domain of TCR clone 180775 (TRBV9, TRBJ2-7)
CASSIGVGSYEQYF

SEQ ID NO: 361551 - protein, 12 aa, Homo sapiens
  CDR3 for alpha chain variable domain of TCR clone 180776 (TRAV12-2, TRAJ33)
CAVGDSNYQLIW

SEQ ID NO: 361552 - protein, 13 aa, Homo sapiens
  CDR3 for beta chain variable domain of TCR clone 180776 (TRBV6-1, TRBJ1-2)
CASSALEGYGYTF

SEQ ID NO: 361553 - protein, 14 aa, Homo sapiens
  CDR3 for alpha chain variable domain of TCR clone 180777 (TRAV8-4, TRAJ38)
CARLNAGNNRKLLW

SEQ ID NO: 361554 - protein, 12 aa, Homo sapiens
  CDR3 for beta chain variable domain of TCR clone 180777 (TRBV6-1, TRBJ2-7)
CASSEPLYEQYF

SEQ ID NO: 361555 - protein, 14 aa, Homo sapiens
  CDR3 for alpha chain variable domain of TCR clone 180778 (TRAV12-2, TRAJ53)
CAVKGGGSNYKLTF

SEQ ID NO: 361556 - protein, 15 aa, Homo sapiens
  CDR3 for beta chain variable domain of TCR clone 180778 (TRBV10-3, TRBJ2-3)
CAISLTSGGTDTQYL

SEQ ID NO: 361557 - protein, 12 aa, Homo sapiens
  CDR3 for alpha chain variable domain of TCR clone 180779 (TRAV1-1, TRAJ8)
CAGGTGFQKLVF

SEQ ID NO: 361558 - protein, 15 aa, Homo sapiens
  CDR3 for beta chain variable domain of TCR clone 180779 (TRBV7-9, IGHJ2)
CASSRTGGFNENLFF

SEQ ID NO: 361559 - protein, 16 aa, Homo sapiens
  CDR3 for alpha chain variable domain of TCR clone 180780 (TRAV16, TRAJ42)
CALSGYYGGSQGNLIF

SEQ ID NO: 361560 - protein, 15 aa, Homo sapiens
  CDR3 for beta chain variable domain of TCR clone 180780 (TRBV3-1, TRBJ2-5)
CASSPPTGLQETQYF

SEQ ID NO: 361561 - protein, 14 aa, Homo sapiens
  CDR3 for alpha chain variable domain of TCR clone 180781 (TRAV35, TRAJ22)
CAGLRPGSARQLTF

SEQ ID NO: 361562 - protein, 12 aa, Homo sapiens
  CDR3 for beta chain variable domain of TCR clone 180781 (TRBV7-9, TRBJ2-7)
CASSFGSYEQYF

SEQ ID NO: 361563 - protein, 14 aa, Homo sapiens
  CDR3 for alpha chain variable domain of TCR clone 180782 (TRAV17, TRAJ11)
RATDTSRGYSTLTF

SEQ ID NO: 361564 - protein, 13 aa, Homo sapiens
  CDR3 for beta chain variable domain of TCR clone 180782 (TRBV15, TRBJ1-6)
CATSGGLNSPLHF

SEQ ID NO: 361565 - protein, 14 aa, Homo sapiens
  CDR3 for alpha chain variable domain of TCR clone 180783 (TRAV38-1, TRAJ40)
CALRPTSGTYKYIF

SEQ ID NO: 361566 - protein, 14 aa, Homo sapiens
  CDR3 for beta chain variable domain of TCR clone 180783 (TRBV4-2, TRBJ2-5)
CASSQERGPRTQYF

SEQ ID NO: 361567 - protein, 16 aa, Homo sapiens
  CDR3 for alpha chain variable domain of TCR clone 180784 (TRAV17, TRAJ29)
LTPVLRTHSGNTPLVF

SEQ ID NO: 361568 - protein, 13 aa, Homo sapiens
  CDR3 for beta chain variable domain of TCR clone 180784 (TRBV5-7, TRBJ2-6)
CASTSSGANVLTF

SEQ ID NO: 361569 - protein, 15 aa, Homo sapiens
  CDR3 for alpha chain variable domain of TCR clone 180785 (TRAV13-1, TRAJ32)
CAASIYGGATNKLIF

SEQ ID NO: 361570 - protein, 14 aa, Homo sapiens
  CDR3 for beta chain variable domain of TCR clone 180785 (TRBV20-1, TRBJ1-1)
CSAQTRIGGTEAFF

SEQ ID NO: 361571 - protein, 14 aa, Homo sapiens
  CDR3 for alpha chain variable domain of TCR clone 180786 (TRAV38-1, TRAJ40)
CALRPTSGTYKYIF

SEQ ID NO: 361572 - protein, 14 aa, Homo sapiens
  CDR3 for beta chain variable domain of TCR clone 180786 (TRBV25-1, TRBJ1-1)
CASTHLGGNTEVFF

SEQ ID NO: 361573 - protein, 13 aa, Homo sapiens
  CDR3 for alpha chain variable domain of TCR clone 180787 (TRAV2, TRAJ40)
CAVVTSGTYKYIF

SEQ ID NO: 361574 - protein, 16 aa, Homo sapiens
  CDR3 for beta chain variable domain of TCR clone 180787 (TRBV29-1, TRBJ1-2)
CSVEANRDIANYGEAF

SEQ ID NO: 361575 - protein, 16 aa, Homo sapiens
  CDR3 for alpha chain variable domain of TCR clone 180788 (TRAV3, TRAJ18)
CAVRDGRGSTLGRLYF

SEQ ID NO: 361576 - protein, 10 aa, Homo sapiens
  CDR3 for beta chain variable domain of TCR clone 180788 (TRBV24-1, TRBJ2-2)
CATSEADLER

SEQ ID NO: 361577 - protein, 14 aa, Homo sapiens
  CDR3 for alpha chain variable domain of TCR clone 180789 (TRAV8-6, TRAJ5)
CAVSGKAGRRALTF

SEQ ID NO: 361578 - protein, 13 aa, Homo sapiens
  CDR3 for beta chain variable domain of TCR clone 180789 (TRBV12-4, TRBJ2-5)
CAGSPTGQETQYF

SEQ ID NO: 361579 - protein, 12 aa, Homo sapiens
  CDR3 for alpha chain variable domain of TCR clone 180790 (TRAV27, TRAJ48)
CAGARGNEKLTF

SEQ ID NO: 361580 - protein, 16 aa, Homo sapiens
  CDR3 for beta chain variable domain of TCR clone 180790 (TRBV12-4, TRBJ2-7)
CASSLIGGTGTYEQYF

SEQ ID NO: 361581 - protein, 18 aa, Homo sapiens
  CDR3 for alpha chain variable domain of TCR clone 180791 (TRAV29/DV5, TRAJ26)
CSVLLCSKRKPEGQNFVF

SEQ ID NO: 361582 - protein, 17 aa, Homo sapiens
  CDR3 for beta chain variable domain of TCR clone 180791 (TRBV20-1, TRBJ2-2)
CSASGSGQGALTGELFF

SEQ ID NO: 361583 - protein, 14 aa, Homo sapiens
  CDR3 for alpha chain variable domain of TCR clone 180792 (TRAV17, TRAJ57)
CATDPQGGSEKLVF

SEQ ID NO: 361584 - protein, 15 aa, Homo sapiens
  CDR3 for beta chain variable domain of TCR clone 180792 (TRBV20-1, TRBJ2-7)
CSAREGRDSLYEQYF

SEQ ID NO: 361585 - protein, 15 aa, Homo sapiens
  CDR3 for alpha chain variable domain of TCR clone 180793 (TRAV26-1, TRAJ39)
CIVRVVGDAGNMLTF

SEQ ID NO: 361586 - protein, 15 aa, Homo sapiens
  CDR3 for beta chain variable domain of TCR clone 180793 (TRBV19, TRBJ2-1)
CASSLETSGYNEQFF

SEQ ID NO: 361587 - protein, 13 aa, Homo sapiens
  CDR3 for alpha chain variable domain of TCR clone 180794 (TRAV8-6, TRAJ50)
CAVIKTSYYKVIF

SEQ ID NO: 361588 - protein, 13 aa, Homo sapiens
  CDR3 for beta chain variable domain of TCR clone 180794 (TRBV4-2, TRBJ1-1)
CASSQAGNTEAFF

SEQ ID NO: 361589 - protein, 10 aa, Homo sapiens
  CDR3 for alpha chain variable domain of TCR clone 180795 (TRAV8-4, TRAJ43)
RAVSADDMRF

SEQ ID NO: 361590 - protein, 15 aa, Homo sapiens
  CDR3 for beta chain variable domain of TCR clone 180795 (TRBV5-1, TRBJ2-3)
CASSVTSGSTDTQYF

SEQ ID NO: 361591 - protein, 12 aa, Homo sapiens
  CDR3 for alpha chain variable domain of TCR clone 180796 (TRAV13-1, TRAJ21)
CAAFFNFNKFYF

SEQ ID NO: 361592 - protein, 13 aa, Homo sapiens
  CDR3 for beta chain variable domain of TCR clone 180796 (TRBV19, TRBJ2-7)
CASRKAGGSEQYF

SEQ ID NO: 361593 - protein, 12 aa, Homo sapiens
  CDR3 for alpha chain variable domain of TCR clone 180797 (TRAV2, TRAJ5)
CALDTGRRALTF

SEQ ID NO: 361594 - protein, 15 aa, Homo sapiens
  CDR3 for beta chain variable domain of TCR clone 180797 (TRBV10-3, TRBJ2-1)
CAISDVQDRAYEQFV

SEQ ID NO: 361595 - protein, 18 aa, Homo sapiens
  CDR3 for alpha chain variable domain of TCR clone 180798 (TRAV13-1, TRAJ52)
CAADFPNAGGTSYGKLTF

SEQ ID NO: 361596 - protein, 15 aa, Homo sapiens
  CDR3 for beta chain variable domain of TCR clone 180798 (TRBV5-1, TRBJ2-1)
CASSPPRAPYNEQFF

SEQ ID NO: 361597 - protein, 16 aa, Homo sapiens
  CDR3 for alpha chain variable domain of TCR clone 180799 (TRAV12-3, TRAJ53)
CAMSPGSGGSNYKLKF

SEQ ID NO: 361598 - protein, 11 aa, Homo sapiens
  CDR3 for beta chain variable domain of TCR clone 180799 (TRBV29-1, TRBJ2-5)
CGEDRTGTQYF

SEQ ID NO: 361599 - protein, 19 aa, Homo sapiens
  CDR3 for alpha chain variable domain of TCR clone 180800 (TRAV8-3, TRAJ8)
LSPSVLWDPMNTGFQKLVF

SEQ ID NO: 361600 - protein, 14 aa, Homo sapiens
  CDR3 for beta chain variable domain of TCR clone 180800 (TRBV4-1, TRBJ2-2)
CASSQAVNTGELFF

SEQ ID NO: 361601 - protein, 12 aa, Homo sapiens
  CDR3 for alpha chain variable domain of TCR clone 180801 (TRAV8-2, TRAJ6)
CVVSKGSYIPTF

SEQ ID NO: 361602 - protein, 18 aa, Homo sapiens
  CDR3 for beta chain variable domain of TCR clone 180801 (TRBV4-1, TRBJ2-3)
CASSQGGGSGGATDTQYF

SEQ ID NO: 361603 - protein, 13 aa, Homo sapiens
  CDR3 for alpha chain variable domain of TCR clone 180802 (TRAV12-2, TRAJ37)
CAGGSANTGKLIF

SEQ ID NO: 361604 - protein, 14 aa, Homo sapiens
  CDR3 for beta chain variable domain of TCR clone 180802 (TRBV6-1, TRBJ2-6)
CASQQGAGANVLTF

SEQ ID NO: 361605 - protein, 14 aa, Homo sapiens
  CDR3 for alpha chain variable domain of TCR clone 180803 (TRAV16, TRAJ8)
CALLLNTGFQELVF

SEQ ID NO: 361606 - protein, 15 aa, Homo sapiens
  CDR3 for beta chain variable domain of TCR clone 180803 (TRBV7-7, TRBJ2-2)
CATSKLAKNTGELFF

SEQ ID NO: 361607 - protein, 11 aa, Homo sapiens
  CDR3 for alpha chain variable domain of TCR clone 180804 (TRAV1-2, TRAJ20)
CAVANDYKLSF

SEQ ID NO: 361608 - protein, 13 aa, Homo sapiens
  CDR3 for beta chain variable domain of TCR clone 180804 (TRBV7-9, TRBJ2-5)
CASTPVGQETQYF

SEQ ID NO: 361609 - protein, 20 aa, Homo sapiens
  CDR3 for alpha chain variable domain of TCR clone 180805 (TRAV25, TRAJ21)
TATQTTGVGTYPLSFNKFYF

SEQ ID NO: 361610 - protein, 17 aa, Homo sapiens
  CDR3 for beta chain variable domain of TCR clone 180805 (TRBV11-2, TRBJ2-1)
CASSLYPPGVEYNEQFF

SEQ ID NO: 361611 - protein, 13 aa, Homo sapiens
  CDR3 for alpha chain variable domain of TCR clone 180806 (TRAV38-1, TRAJ39)
CAFAYNNAGNISP

SEQ ID NO: 361612 - protein, 15 aa, Homo sapiens
  CDR3 for beta chain variable domain of TCR clone 180806 (TRBV19, TRBJ2-6)
CASSIGPSGANVLTF

SEQ ID NO: 361613 - protein, 13 aa, Homo sapiens
  CDR3 for alpha chain variable domain of TCR clone 180807 (TRAV27, TRAJ39)
CAGETPAGNMLTF

SEQ ID NO: 361614 - protein, 13 aa, Homo sapiens
  CDR3 for beta chain variable domain of TCR clone 180807 (TRBV4-1, TRBJ2-4)
CASSQVGIDIQYF

SEQ ID NO: 361615 - protein, 15 aa, Homo sapiens
  CDR3 for alpha chain variable domain of TCR clone 180808 (TRAV3, TRAJ30)
CAVRDEYGRDDKIIF

SEQ ID NO: 361616 - protein, 20 aa, Homo sapiens
  CDR3 for beta chain variable domain of TCR clone 180808 (TRBV5-1, TRBJ2-5)
CASSLANHRGRETSTSGQAR

SEQ ID NO: 361617 - protein, 15 aa, Homo sapiens
  CDR3 for alpha chain variable domain of TCR clone 180809 (TRAV23/DV6, TRAJ18)
CAARYRGSTLGRLYF

SEQ ID NO: 361618 - protein, 13 aa, Homo sapiens
  CDR3 for beta chain variable domain of TCR clone 180809 (TRBV7-2, TRBJ2-7)
CASSSHSGSEQYF

SEQ ID NO: 361619 - protein, 14 aa, Homo sapiens
  CDR3 for alpha chain variable domain of TCR clone 180810 (TRAV12-1, TRAJ38)
CVVHNAGKNRKLIW

SEQ ID NO: 361620 - protein, 13 aa, Homo sapiens
  CDR3 for beta chain variable domain of TCR clone 180810 (TRBV19, TRBJ2-1)
CATSRGVYNEQFF

SEQ ID NO: 361621 - protein, 12 aa, Homo sapiens
  CDR3 for alpha chain variable domain of TCR clone 180811 (TRAV21, TRAJ29)
CAVTSGNTPLVF

SEQ ID NO: 361622 - protein, 16 aa, Homo sapiens
  CDR3 for beta chain variable domain of TCR clone 180811 (TRBV7-3, TRBJ2-2)
CASSLKRGTLSGELFF

SEQ ID NO: 361623 - protein, 12 aa, Homo sapiens
  CDR3 for alpha chain variable domain of TCR clone 180812 (TRAV26-1, TRAJ39)
CIVRVEGNMLTF

SEQ ID NO: 361624 - protein, 13 aa, Homo sapiens
  CDR3 for beta chain variable domain of TCR clone 180812 (TRBV7-9, TRBJ1-2)
CASSLKQNYGYTF

SEQ ID NO: 361625 - protein, 14 aa, Homo sapiens
  CDR3 for alpha chain variable domain of TCR clone 180813 (TRAV1-2, TRAJ8)
CAVREDTGFQKLVF

SEQ ID NO: 361626 - protein, 16 aa, Homo sapiens
  CDR3 for beta chain variable domain of TCR clone 180813 (TRBV7-3, TRBJ2-2)
CASSLKRGTLSWELFF

SEQ ID NO: 361627 - protein, 13 aa, Homo sapiens
  CDR3 for alpha chain variable domain of TCR clone 180814 (TRAV21, TRAJ11)
CAVPNSGYSTLTF

SEQ ID NO: 361628 - protein, 14 aa, Homo sapiens
  CDR3 for beta chain variable domain of TCR clone 180814 (TRBV9, TRBJ2-7)
CASSVGVGSYEQYF

SEQ ID NO: 361629 - protein, 14 aa, Homo sapiens
  CDR3 for alpha chain variable domain of TCR clone 180815 (TRAV2, TRAJ37)
CAVDFTSNTGTLIF

SEQ ID NO: 361630 - protein, 14 aa, Homo sapiens
  CDR3 for beta chain variable domain of TCR clone 180815 (TRBV20-1, TRBJ2-7)
CSAPELAGVGEQYF

SEQ ID NO: 361631 - protein, 15 aa, Homo sapiens
  CDR3 for alpha chain variable domain of TCR clone 180816 (TRAV13-1, TRAJ48)
CAASTGGFGNGKLTF

SEQ ID NO: 361632 - protein, 14 aa, Homo sapiens
  CDR3 for beta chain variable domain of TCR clone 180816 (TRBV24-1, TRBJ2-2)
CATGGLGNTGELFF

SEQ ID NO: 361633 - protein, 15 aa, Homo sapiens
  CDR3 for alpha chain variable domain of TCR clone 180817 (TRAV12-3, TRAJ47)
CAMSALVEYGNKLVF

SEQ ID NO: 361634 - protein, 15 aa, Homo sapiens
  CDR3 for beta chain variable domain of TCR clone 180817 (TRBV24-1, TRBJ2-1)
CATRTSGGQYNEQFF

SEQ ID NO: 361635 - protein, 12 aa, Homo sapiens
  CDR3 for alpha chain variable domain of TCR clone 180818 (TRAV13-1, TRAJ3)
CAATGVQQCFQD

SEQ ID NO: 361636 - protein, 14 aa, Homo sapiens
  CDR3 for beta chain variable domain of TCR clone 180818 (TRBV7-2, TRBJ1-1)
CASRDWTRGTEAFF

SEQ ID NO: 361637 - protein, 17 aa, Homo sapiens
  CDR3 for alpha chain variable domain of TCR clone 180819 (TRAV13-1, TRAJ28)
CAASPPYSGAGSYPLTF

SEQ ID NO: 361638 - protein, 15 aa, Homo sapiens
  CDR3 for beta chain variable domain of TCR clone 180819 (TRBV6-3, TRBJ2-2)
CASSFLATLTGELFF

SEQ ID NO: 361639 - protein, 12 aa, Homo sapiens
  CDR3 for alpha chain variable domain of TCR clone 180820 (TRAV1-1, TRAJ43)
CAPRVSSNGMRF

SEQ ID NO: 361640 - protein, 15 aa, Homo sapiens
  CDR3 for beta chain variable domain of TCR clone 180820 (TRBV5-1, TRBJ2-7)
CASSLGDFTTYEQYF

SEQ ID NO: 361641 - protein, 14 aa, Homo sapiens
  CDR3 for alpha chain variable domain of TCR clone 180821 (TRAV13-1, TRAJ31)
CAASSRPNNSRLMF

SEQ ID NO: 361642 - protein, 15 aa, Homo sapiens
  CDR3 for beta chain variable domain of TCR clone 180821 (TRBV4-2, TRBJ2-4)
CASSPLGAAKNIQYF

SEQ ID NO: 361643 - protein, 13 aa, Homo sapiens
  CDR3 for alpha chain variable domain of TCR clone 180822 (TRAV12-1, TRAJ42)
CGGVGGSQENLTF

SEQ ID NO: 361644 - protein, 13 aa, Homo sapiens
  CDR3 for beta chain variable domain of TCR clone 180822 (TRBV10-3, TRBJ1-1)
CAIIPEGGTEAFF

SEQ ID NO: 361645 - protein, 12 aa, Homo sapiens
  CDR3 for alpha chain variable domain of TCR clone 180823 (TRAV27, TRAJ35)
CAGADFGNVLHC

SEQ ID NO: 361646 - protein, 15 aa, Homo sapiens
  CDR3 for beta chain variable domain of TCR clone 180823 (TRBV4-1, TRBJ1-2)
CASSLSTGQGYGYTF

SEQ ID NO: 361647 - protein, 14 aa, Homo sapiens
  CDR3 for alpha chain variable domain of TCR clone 180824 (TRAV12-2, TRAJ17)
CAVLFKAAGNKLTF

SEQ ID NO: 361648 - protein, 14 aa, Homo sapiens
  CDR3 for beta chain variable domain of TCR clone 180824 (TRBV15, TRBJ1-2)
CATSIDFDRVGYTF

SEQ ID NO: 361649 - protein, 13 aa, Homo sapiens
  CDR3 for alpha chain variable domain of TCR clone 180825 (TRAV23/DV6, TRAJ24)
CAASEASWGKLQF

SEQ ID NO: 361650 - protein, 12 aa, Homo sapiens
  CDR3 for beta chain variable domain of TCR clone 180825 (TRBV5-1, TRBJ2-7)
CASSDSTYEQYF

SEQ ID NO: 361651 - protein, 11 aa, Homo sapiens
  CDR3 for alpha chain variable domain of TCR clone 180826 (TRAV35, TRAJ30)
CSGPGDDKIIF

SEQ ID NO: 361652 - protein, 14 aa, Homo sapiens
  CDR3 for beta chain variable domain of TCR clone 180826 (TRBV7-2, TRBJ2-7)
CASSLPPGQGPQYF

SEQ ID NO: 361653 - protein, 12 aa, Homo sapiens
  CDR3 for alpha chain variable domain of TCR clone 180827 (TRAV26-1, TRAJ13)
CIVSKGYQKVTF

SEQ ID NO: 361654 - protein, 16 aa, Homo sapiens
  CDR3 for beta chain variable domain of TCR clone 180827 (TRBV27, TRBJ2-1)
CASSLSKGFGLDEQFF

SEQ ID NO: 361655 - protein, 16 aa, Homo sapiens
  CDR3 for alpha chain variable domain of TCR clone 180828 (TRAV17, TRAJ52)
CATDPMGGTSYGKLTF

SEQ ID NO: 361656 - protein, 12 aa, Homo sapiens
  CDR3 for beta chain variable domain of TCR clone 180828 (TRBV19, TRBJ2-7)
CASTSGTYEQYF

SEQ ID NO: 361657 - protein, 13 aa, Homo sapiens
  CDR3 for alpha chain variable domain of TCR clone 180829 (TRAV3, TRAJ20)
CCEAFCNDYKLSF

SEQ ID NO: 361658 - protein, 17 aa, Homo sapiens
  CDR3 for beta chain variable domain of TCR clone 180829 (TRBV7-3, TRBJ2-3)
CASSLMKRMRGADTQYF

SEQ ID NO: 361659 - protein, 15 aa, Homo sapiens
  CDR3 for alpha chain variable domain of TCR clone 180830 (TRAV25, TRAJ52)
CAGRPGGTSYGKLTF

SEQ ID NO: 361660 - protein, 15 aa, Homo sapiens
  CDR3 for beta chain variable domain of TCR clone 180830 (TRBV2, TRBJ2-5)
CASTRDGGPQETQYF

SEQ ID NO: 361661 - protein, 14 aa, Homo sapiens
  CDR3 for alpha chain variable domain of TCR clone 180831 (TRAV1-2, TRAJ8)
CSVREDTGFQKLVF

SEQ ID NO: 361662 - protein, 13 aa, Homo sapiens
  CDR3 for beta chain variable domain of TCR clone 180831 (TRBV7-3, TRBJ1-1)
CASSQDWGAEAFF

SEQ ID NO: 361663 - protein, 12 aa, Homo sapiens
  CDR3 for alpha chain variable domain of TCR clone 180832 (TRAV1-2, TRAJ33)
CAALDSNYQVIW

SEQ ID NO: 361664 - protein, 16 aa, Homo sapiens
  CDR3 for beta chain variable domain of TCR clone 180832 (TRBV6-4, TRBJ1-2)
CASSDAVGDPNYGYTF

SEQ ID NO: 361665 - protein, 12 aa, Homo sapiens
  CDR3 for alpha chain variable domain of TCR clone 180833 (TRAV8-3, TRAJ20)
CAVGANDYKLSF

SEQ ID NO: 361666 - protein, 15 aa, Homo sapiens
  CDR3 for beta chain variable domain of TCR clone 180833 (TRBV11-2, TRBJ2-1)
CASSSPSTRYNEQFF

SEQ ID NO: 361667 - protein, 14 aa, Homo sapiens
  CDR3 for alpha chain variable domain of TCR clone 180834 (TRAV8-3, TRAJ9)
CAVVYNTGGFKTIF

SEQ ID NO: 361668 - protein, 17 aa, Homo sapiens
  CDR3 for beta chain variable domain of TCR clone 180834 (TRBV19, TRBJ2-3)
CASSIDPAGGGTDTQYF

SEQ ID NO: 361669 - protein, 12 aa, Homo sapiens
  CDR3 for alpha chain variable domain of TCR clone 180835 (TRAV21, TRAJ12)
CAVMDSSYKLIF

SEQ ID NO: 361670 - protein, 16 aa, Homo sapiens
  CDR3 for beta chain variable domain of TCR clone 180835 (TRBV7-9, TRBJ2-5)
CASRPEIGTRKETQYF

SEQ ID NO: 361671 - protein, 16 aa, Homo sapiens
  CDR3 for alpha chain variable domain of TCR clone 180836 (TRAV12-3, TRAJ53)
CAMSPGSGGSNYKLTF

SEQ ID NO: 361672 - protein, 14 aa, Homo sapiens
  CDR3 for beta chain variable domain of TCR clone 180836 (TRBV4-2, TRBJ2-1)
GASGLDRAYNEQFF

SEQ ID NO: 361673 - protein, 17 aa, Homo sapiens
  CDR3 for alpha chain variable domain of TCR clone 180837 (TRAV3, TRAJ42)
CAVRDRDYGGSQGNLIF

SEQ ID NO: 361674 - protein, 17 aa, Homo sapiens
  CDR3 for beta chain variable domain of TCR clone 180837 (TRBV20-1, TRBJ1-5)
CSASLSPGQGGNQPQHF

SEQ ID NO: 361675 - protein, 15 aa, Homo sapiens
  CDR3 for alpha chain variable domain of TCR clone 180838 (TRAV29/DV5, TRAJ24)
CAASGATDSWGKVHF

SEQ ID NO: 361676 - protein, 12 aa, Homo sapiens
  CDR3 for beta chain variable domain of TCR clone 180838 (TRBV11-2, TRBJ2-2)
CASSLPTGELFF

SEQ ID NO: 361677 - protein, 12 aa, Homo sapiens
  CDR3 for alpha chain variable domain of TCR clone 180839 (TRAV8-3, TRAJ26)
CAVDNYGQNFVF

SEQ ID NO: 361678 - protein, 16 aa, Homo sapiens
  CDR3 for beta chain variable domain of TCR clone 180839 (TRBV20-1, TRBJ1-4)
CSAPGQGLLTNEKLFF

SEQ ID NO: 361679 - protein, 23 aa, Homo sapiens
  CDR3 for alpha chain variable domain of TCR clone 180840 (TRAV12-2, TRAJ43)
SLLIRDSQPSDSAPYLCAFDMRF

SEQ ID NO: 361680 - protein, 17 aa, Homo sapiens
  CDR3 for beta chain variable domain of TCR clone 180840 (TRBV13, TRBJ2-3)
CASSLSRVAGGRNTQYF

SEQ ID NO: 361681 - protein, 15 aa, Homo sapiens
  CDR3 for alpha chain variable domain of TCR clone 180841 (TRAV8-3, TRAJ21)
CAVGALHPRGYKFYF

SEQ ID NO: 361682 - protein, 18 aa, Homo sapiens
  CDR3 for beta chain variable domain of TCR clone 180841 (TRBV25-1, TRBJ1-2)
CASSGLQNGQGLIFGYTF

SEQ ID NO: 361683 - protein, 10 aa, Homo sapiens
  CDR3 for alpha chain variable domain of TCR clone 180842 (TRAV12-3, TRAJ49)
CAMNDDQFYF

SEQ ID NO: 361684 - protein, 13 aa, Homo sapiens
  CDR3 for beta chain variable domain of TCR clone 180842 (TRBV12-4, TRBJ1-1)
CASSPGTGFEPFF

SEQ ID NO: 361685 - protein, 14 aa, Homo sapiens
  CDR3 for alpha chain variable domain of TCR clone 180843 (TRAV12-2, TRAJ13)
CAVKKTVGYQKVTF

SEQ ID NO: 361686 - protein, 23 aa, Homo sapiens
  CDR3 for beta chain variable domain of TCR clone 180843 (TRBV4-2, TRBJ2-3)
CASSQDPPRASSISGGRGDTQYF

SEQ ID NO: 361687 - protein, 12 aa, Homo sapiens
  CDR3 for alpha chain variable domain of TCR clone 180844 (TRAV1-2, TRAJ29)
CAVPSGNTPLVF

SEQ ID NO: 361688 - protein, 12 aa, Homo sapiens
  CDR3 for beta chain variable domain of TCR clone 180844 (TRBV12-4, TRBJ2-7)
CASSLGGYEQCF

SEQ ID NO: 361689 - protein, 14 aa, Homo sapiens
  CDR3 for alpha chain variable domain of TCR clone 180845 (TRAV26-1, TRAJ38)
CIVVGAGNNRKLIW

SEQ ID NO: 361690 - protein, 12 aa, Homo sapiens
  CDR3 for beta chain variable domain of TCR clone 180845 (TRBV5-1, TRBJ2-5)
CASSWDQENQYF

SEQ ID NO: 361691 - protein, 15 aa, Homo sapiens
  CDR3 for alpha chain variable domain of TCR clone 180846 (TRAV29/DV5, TRAJ53)
CAASASGGSNYKLTF

SEQ ID NO: 361692 - protein, 15 aa, Homo sapiens
  CDR3 for beta chain variable domain of TCR clone 180846 (TRBV7-2, TRBJ2-1)
CASTHGTGIYNEQFF

SEQ ID NO: 361693 - protein, 14 aa, Homo sapiens
  CDR3 for alpha chain variable domain of TCR clone 180847 (TRAV1-2, TRAJ8)
CAVREDTGFQKLVF

SEQ ID NO: 361694 - protein, 13 aa, Homo sapiens
  CDR3 for beta chain variable domain of TCR clone 180847 (TRBV6-1, TRBJ2-7)
CAGSRDREYEQCF

SEQ ID NO: 361695 - protein, 15 aa, Homo sapiens
  CDR3 for alpha chain variable domain of TCR clone 180848 (TRAV12-3, TRAJ5)
CAMSGLGTGRRALTF

SEQ ID NO: 361696 - protein, 16 aa, Homo sapiens
  CDR3 for beta chain variable domain of TCR clone 180848 (TRBV20-1, TRBJ2-3)
CSARLHSAGAIDTQYC

SEQ ID NO: 361697 - protein, 16 aa, Homo sapiens
  CDR3 for alpha chain variable domain of TCR clone 180849 (TRAV4, TRAJ8)
CLVGDSGNTGFKKLEF

SEQ ID NO: 361698 - protein, 15 aa, Homo sapiens
  CDR3 for beta chain variable domain of TCR clone 180849 (TRBV15, TRBJ1-2)
CATSRVRASGSGYTF

SEQ ID NO: 361699 - protein, 10 aa, Homo sapiens
  CDR3 for alpha chain variable domain of TCR clone 180850 (TRAV12-3, TRAJ49)
CAMNDDQFYF

SEQ ID NO: 361700 - protein, 10 aa, Homo sapiens
  CDR3 for beta chain variable domain of TCR clone 180850 (TRBV12-4, TRBJ2-2)
CASSLGVRHT

SEQ ID NO: 361701 - protein, 13 aa, Homo sapiens
  CDR3 for alpha chain variable domain of TCR clone 180851 (TRAV30, TRAJ24)
CGTVTDSWGKLQI

SEQ ID NO: 361702 - protein, 15 aa, Homo sapiens
  CDR3 for beta chain variable domain of TCR clone 180851 (TRBV4-1, TRBJ2-1)
CASSQDPGNYNEQFF

SEQ ID NO: 361703 - protein, 13 aa, Homo sapiens
  CDR3 for alpha chain variable domain of TCR clone 180852 (TRAV12-2, TRAJ9)
CAVLETGGFKTIF

SEQ ID NO: 361704 - protein, 15 aa, Homo sapiens
  CDR3 for beta chain variable domain of TCR clone 180852 (TRBV5-7, TRBJ2-1)
CASSFLAGVGNEQFF

SEQ ID NO: 361705 - protein, 12 aa, Homo sapiens
  CDR3 for alpha chain variable domain of TCR clone 180853 (TRAV21, TRAJ23)
CAVMLQGGKLFF

SEQ ID NO: 361706 - protein, 14 aa, Homo sapiens
  CDR3 for beta chain variable domain of TCR clone 180853 (TRBV7-9, TRBJ1-4)
CAITEGEANEKLFF

SEQ ID NO: 361707 - protein, 14 aa, Homo sapiens
  CDR3 for alpha chain variable domain of TCR clone 180854 (TRAV12-2, TRAJ11)
CAVEGGSGYSTLTF

SEQ ID NO: 361708 - protein, 12 aa, Homo sapiens
  CDR3 for beta chain variable domain of TCR clone 180854 (TRBV7-2, TRBJ1-6)
CASSLSSSPLHF

SEQ ID NO: 361709 - protein, 14 aa, Homo sapiens
  CDR3 for alpha chain variable domain of TCR clone 180855 (TRAV12-2, TRAJ13)
CAVKKTGGYQKVTF

SEQ ID NO: 361710 - protein, 14 aa, Homo sapiens
  CDR3 for beta chain variable domain of TCR clone 180855 (TRBV12-5, TRBJ2-5)
CASGSRTHQETLYF

SEQ ID NO: 361711 - protein, 14 aa, Homo sapiens
  CDR3 for alpha chain variable domain of TCR clone 180856 (TRAV12-2, TRAJ17)
CSVLFNAAGHKLTF

SEQ ID NO: 361712 - protein, 17 aa, Homo sapiens
  CDR3 for beta chain variable domain of TCR clone 180856 (TRBV20-1, TRBJ2-2)
CSASGSGQGGLTGELFF

SEQ ID NO: 361713 - protein, 15 aa, Homo sapiens
  CDR3 for alpha chain variable domain of TCR clone 180857 (TRAV13-1, TRAJ52)
CALRTGGTSYGKLTF

SEQ ID NO: 361714 - protein, 14 aa, Homo sapiens
  CDR3 for beta chain variable domain of TCR clone 180857 (TRBV20-1, TRBJ2-5)
CSASDSGSRETQYF

SEQ ID NO: 361715 - protein, 15 aa, Homo sapiens
  CDR3 for alpha chain variable domain of TCR clone 180858 (TRAV26-1, TRAJ28)
CIVRVAGAGSYQLTF

SEQ ID NO: 361716 - protein, 21 aa, Homo sapiens
  CDR3 for beta chain variable domain of TCR clone 180858 (TRBV7-3, TRBJ2-7)
CASSLTGVAGGWPSYESTSGR

SEQ ID NO: 361717 - protein, 13 aa, Homo sapiens
  CDR3 for alpha chain variable domain of TCR clone 180859 (TRAV12-1, TRAJ16)
CVVNGPDGQKLPF

SEQ ID NO: 361718 - protein, 13 aa, Homo sapiens
  CDR3 for beta chain variable domain of TCR clone 180859 (TRBV2, TRBJ1-1)
CARNPTGGFHASF

SEQ ID NO: 361719 - protein, 13 aa, Homo sapiens
  CDR3 for alpha chain variable domain of TCR clone 180860 (TRAV13-2, TRAJ48)
CAEMDFGNEKLTF

SEQ ID NO: 361720 - protein, 14 aa, Homo sapiens
  CDR3 for beta chain variable domain of TCR clone 180860 (TRBV5-8, TRBJ2-3)
CASSLGQGTDTQYF

SEQ ID NO: 361721 - protein, 13 aa, Homo sapiens
  CDR3 for alpha chain variable domain of TCR clone 180861 (TRAV8-1, TRAJ34)
CAVRPYNTDKLIF

SEQ ID NO: 361722 - protein, 13 aa, Homo sapiens
  CDR3 for beta chain variable domain of TCR clone 180861 (TRBV7-9, TRBJ1-2)
CASSLKQNYGYTF

SEQ ID NO: 361723 - protein, 16 aa, Homo sapiens
  CDR3 for alpha chain variable domain of TCR clone 180862 (TRAV12-1, TRAJ4)
CVVRRLPAGGYNKLIF

SEQ ID NO: 361724 - protein, 15 aa, Homo sapiens
  CDR3 for beta chain variable domain of TCR clone 180862 (TRBV9, TRBJ1-6)
CASSVAGTGDSPLHC

SEQ ID NO: 361725 - protein, 13 aa, Homo sapiens
  CDR3 for alpha chain variable domain of TCR clone 180863 (TRAV1-2, TRAJ11)
CAVRREGYSTLTF

SEQ ID NO: 361726 - protein, 15 aa, Homo sapiens
  CDR3 for beta chain variable domain of TCR clone 180863 (TRBV20-1, TRBJ2-7)
CSARDRVSGMDEQYF

SEQ ID NO: 361727 - protein, 15 aa, Homo sapiens
  CDR3 for alpha chain variable domain of TCR clone 180864 (TRAV27, TRAJ38)
CAARRNAGNIRKLIW

SEQ ID NO: 361728 - protein, 13 aa, Homo sapiens
  CDR3 for beta chain variable domain of TCR clone 180864 (TRBV12-5, TRBJ2-3)
CASGDRQSDTQYF

SEQ ID NO: 361729 - protein, 14 aa, Homo sapiens
  CDR3 for alpha chain variable domain of TCR clone 180865 (TRAV16, TRAJ44)
CSLSTTGTASKLTF

SEQ ID NO: 361730 - protein, 15 aa, Homo sapiens
  CDR3 for beta chain variable domain of TCR clone 180865 (TRBV20-1, TRBJ2-7)
CSARDRVSGMDEQYF

SEQ ID NO: 361731 - protein, 16 aa, Homo sapiens
  CDR3 for alpha chain variable domain of TCR clone 180866 (TRAV16, TRAJ52)
CALSAAGGTSYGKLIF

SEQ ID NO: 361732 - protein, 17 aa, Homo sapiens
  CDR3 for beta chain variable domain of TCR clone 180866 (TRBV11-2, TRBJ2-1)
CASSLYPPGVEYNEQFF

SEQ ID NO: 361733 - protein, 12 aa, Homo sapiens
  CDR3 for alpha chain variable domain of TCR clone 180867 (TRAV12-3, TRAJ17)
CAMTLTGNKLTF

SEQ ID NO: 361734 - protein, 15 aa, Homo sapiens
  CDR3 for beta chain variable domain of TCR clone 180867 (TRBV29-1, TRBJ2-6)
CSCTGGRSGANVLTF

SEQ ID NO: 361735 - protein, 18 aa, Homo sapiens
  CDR3 for alpha chain variable domain of TCR clone 180868 (TRAV21, TRAJ53)
CAVKGGENSGGSNYKLTF

SEQ ID NO: 361736 - protein, 15 aa, Homo sapiens
  CDR3 for beta chain variable domain of TCR clone 180868 (TRBV5-1, TRBJ2-1)
CASSPPRAPYNEQFF

SEQ ID NO: 361737 - protein, 13 aa, Homo sapiens
  CDR3 for alpha chain variable domain of TCR clone 180869 (TRAV29/DV5, TRAJ49)
CAASTNTGNQFYF

SEQ ID NO: 361738 - protein, 15 aa, Homo sapiens
  CDR3 for beta chain variable domain of TCR clone 180869 (TRBV20-1, TRBJ2-7)
CSAESGTSGAYEQYF

SEQ ID NO: 361739 - protein, 16 aa, Homo sapiens
  CDR3 for alpha chain variable domain of TCR clone 180870 (TRAV21, TRAJ45)
CAVSWGSGGGADGLTF

SEQ ID NO: 361740 - protein, 14 aa, Homo sapiens
  CDR3 for beta chain variable domain of TCR clone 180870 (TRBV4-2, TRBJ1-2)
CASSPGGSNYGYTS

SEQ ID NO: 361741 - protein, 11 aa, Homo sapiens
  CDR3 for alpha chain variable domain of TCR clone 180871 (TRAV21, TRAJ39)
LLVNAGNMLTF

SEQ ID NO: 361742 - protein, 16 aa, Homo sapiens
  CDR3 for beta chain variable domain of TCR clone 180871 (TRBV24-1, TRBJ2-3)
CATSDPGTGATDTQYF

SEQ ID NO: 361743 - protein, 16 aa, Homo sapiens
  CDR3 for alpha chain variable domain of TCR clone 180872 (TRAV27, TRAJ52)
CAGAPACGTSYGKLTF

SEQ ID NO: 361744 - protein, 12 aa, Homo sapiens
  CDR3 for beta chain variable domain of TCR clone 180872 (TRBV27, TRBJ2-1)
CASRGFYNEQFF

SEQ ID NO: 361745 - protein, 13 aa, Homo sapiens
  CDR3 for alpha chain variable domain of TCR clone 180873 (TRAV20, TRAJ37)
CAGGSSNTGKLIF

SEQ ID NO: 361746 - protein, 13 aa, Homo sapiens
  CDR3 for beta chain variable domain of TCR clone 180873 (TRBV7-9, TRBJ2-5)
CASLSPGQETQYF

SEQ ID NO: 361747 - protein, 13 aa, Homo sapiens
  CDR3 for alpha chain variable domain of TCR clone 180874 (TRAV29/DV5, TRAJ29)
CAASAAGNTPLVF

SEQ ID NO: 361748 - protein, 17 aa, Homo sapiens
  CDR3 for beta chain variable domain of TCR clone 180874 (TRBV7-3, TRBJ2-3)
CASSLMKRMRGADTQYF

SEQ ID NO: 361749 - protein, 20 aa, Homo sapiens
  CDR3 for alpha chain variable domain of TCR clone 180875 (TRAV26-1, TRAJ42)
CCVLLRRQNYYGGSQGNLIF

SEQ ID NO: 361750 - protein, 16 aa, Homo sapiens
  CDR3 for beta chain variable domain of TCR clone 180875 (TRBV7-3, TRBJ2-2)
CASSLKRGTLSGELFF

SEQ ID NO: 361751 - protein, 11 aa, Homo sapiens
  CDR3 for alpha chain variable domain of TCR clone 180876 (TRAV3, TRAJ17)
PRGAAGNKLTF

SEQ ID NO: 361752 - protein, 14 aa, Homo sapiens
  CDR3 for beta chain variable domain of TCR clone 180876 (TRBV11-2, TRBJ2-5)
CARRPLAGRETQYF

SEQ ID NO: 361753 - protein, 14 aa, Homo sapiens
  CDR3 for alpha chain variable domain of TCR clone 180877 (TRAV9-2, TRAJ39)
CALYIYNAGNMLTF

SEQ ID NO: 361754 - protein, 15 aa, Homo sapiens
  CDR3 for beta chain variable domain of TCR clone 180877 (TRBV28, TRBJ2-2)
CASRLQGVGTGELFF

SEQ ID NO: 361755 - protein, 15 aa, Homo sapiens
  CDR3 for alpha chain variable domain of TCR clone 180878 (TRAV1-2, TRAJ13)
CAVRGSSGGYQKVTF

SEQ ID NO: 361756 - protein, 15 aa, Homo sapiens
  CDR3 for beta chain variable domain of TCR clone 180878 (TRBV11-3, TRBJ1-3)
CASSLSGTSGNTMYF

SEQ ID NO: 361757 - protein, 16 aa, Homo sapiens
  CDR3 for alpha chain variable domain of TCR clone 180879 (TRAV12-1, TRAJ45)
CVVIRYSGGGADGLTF

SEQ ID NO: 361758 - protein, 15 aa, Homo sapiens
  CDR3 for beta chain variable domain of TCR clone 180879 (TRBV7-9, TRBJ1-4)
CASSARTGGNEKLFF

SEQ ID NO: 361759 - protein, 22 aa, Homo sapiens
  CDR3 for alpha chain variable domain of TCR clone 180880 (TRAV27, TRAJ38)
CAGRFNAGNNHIQNPDPAGYQL

SEQ ID NO: 361760 - protein, 13 aa, Homo sapiens
  CDR3 for beta chain variable domain of TCR clone 180880 (TRBV20-1, TRBJ1-1)
CSARGGGNTEAFF

SEQ ID NO: 361761 - protein, 14 aa, Homo sapiens
  CDR3 for alpha chain variable domain of TCR clone 180881 (TRAV1-2, TRAJ16)
CAVNRFSDGTKLLF

SEQ ID NO: 361762 - protein, 14 aa, Homo sapiens
  CDR3 for beta chain variable domain of TCR clone 180881 (TRBV7-3, TRBJ1-1)
CASSLKGGNTEAFF

SEQ ID NO: 361763 - protein, 14 aa, Homo sapiens
  CDR3 for alpha chain variable domain of TCR clone 180882 (TRAV17, TRAJ6)
CATPAMGGSYIPTF

SEQ ID NO: 361764 - protein, 12 aa, Homo sapiens
  CDR3 for beta chain variable domain of TCR clone 180882 (TRBV11-2, TRBJ2-2)
CASSLGGGELFF

SEQ ID NO: 361765 - protein, 14 aa, Homo sapiens
  CDR3 for alpha chain variable domain of TCR clone 180883 (TRAV12-2, TRAJ4)
CAVSTSGGYNKLIF

SEQ ID NO: 361766 - protein, 14 aa, Homo sapiens
  CDR3 for beta chain variable domain of TCR clone 180883 (TRBV6-1, TRBJ2-7)
CASSERQTTGEQYF

SEQ ID NO: 361767 - protein, 14 aa, Homo sapiens
  CDR3 for alpha chain variable domain of TCR clone 180884 (TRAV2, TRAJ9)
CAVEDRSGGFKTIF

SEQ ID NO: 361768 - protein, 12 aa, Homo sapiens
  CDR3 for beta chain variable domain of TCR clone 180884 (TRBV7-9, TRBJ2-7)
CASSLEGYEHYF

SEQ ID NO: 361769 - protein, 18 aa, Homo sapiens
  CDR3 for alpha chain variable domain of TCR clone 180885 (TRAV3, TRAJ17)
CAVRARRGGRSCRQQANF

SEQ ID NO: 361770 - protein, 14 aa, Homo sapiens
  CDR3 for beta chain variable domain of TCR clone 180885 (TRBV4-1, TRBJ2-2)
CASSQAVNTEELFF

SEQ ID NO: 361771 - protein, 14 aa, Homo sapiens
  CDR3 for alpha chain variable domain of TCR clone 180886 (TRAV29/DV5, TRAJ45)
CAPYSGGGADGLTF

SEQ ID NO: 361772 - protein, 13 aa, Homo sapiens
  CDR3 for beta chain variable domain of TCR clone 180886 (TRBV4-1, TRBJ2-2)
CASSQENTGELFF

SEQ ID NO: 361773 - protein, 11 aa, Homo sapiens
  CDR3 for alpha chain variable domain of TCR clone 180887 (TRAV1-2, TRAJ20)
CAVSNDYKPSF

SEQ ID NO: 361774 - protein, 13 aa, Homo sapiens
  CDR3 for beta chain variable domain of TCR clone 180887 (TRBV7-9, TRBJ1-2)
CASSLKQNYGYTF

SEQ ID NO: 361775 - protein, 14 aa, Homo sapiens
  CDR3 for alpha chain variable domain of TCR clone 180888 (TRAV12-3, TRAJ9)
CAMSPNTGGFKTIF

SEQ ID NO: 361776 - protein, 12 aa, Homo sapiens
  CDR3 for beta chain variable domain of TCR clone 180888 (TRBV19, TRBJ1-5)
CASSIAQKPQHF

SEQ ID NO: 361777 - protein, 15 aa, Homo sapiens
  CDR3 for alpha chain variable domain of TCR clone 180889 (TRAV25, TRAJ53)
CAATGGGGSNYKLTF

SEQ ID NO: 361778 - protein, 11 aa, Homo sapiens
  CDR3 for beta chain variable domain of TCR clone 180889 (TRBV11-3, TRBJ2-2)
CAGSSGGELFF

SEQ ID NO: 361779 - protein, 16 aa, Homo sapiens
  CDR3 for alpha chain variable domain of TCR clone 180890 (TRAV30, TRAJ24)
CGTGIVDADSWGKFQF

SEQ ID NO: 361780 - protein, 17 aa, Homo sapiens
  CDR3 for beta chain variable domain of TCR clone 180890 (TRBV11-2, TRBJ2-3)
CQQLRGGLAGAPNTQYF

SEQ ID NO: 361781 - protein, 16 aa, Homo sapiens
  CDR3 for alpha chain variable domain of TCR clone 180891 (TRAV3, TRAJ37)
CAVRPHGSGNTGKLIF

SEQ ID NO: 361782 - protein, 14 aa, Homo sapiens
  CDR3 for beta chain variable domain of TCR clone 180891 (TRBV28, TRBJ2-1)
CASSLVAPYNEQFF

SEQ ID NO: 361783 - protein, 14 aa, Homo sapiens
  CDR3 for alpha chain variable domain of TCR clone 180892 (TRAV17, TRAJ4)
CATAPLGGFNKLIF

SEQ ID NO: 361784 - protein, 13 aa, Homo sapiens
  CDR3 for beta chain variable domain of TCR clone 180892 (TRBV12-4, TRBJ1-3)
CASSLASGNTIYF

SEQ ID NO: 361785 - protein, 11 aa, Homo sapiens
  CDR3 for alpha chain variable domain of TCR clone 180893 (TRAV12-3, TRAJ43)
CAMSVSNDMRF

SEQ ID NO: 361786 - protein, 13 aa, Homo sapiens
  CDR3 for beta chain variable domain of TCR clone 180893 (TRBV20-1, TRBJ1-1)
CSAPLGGGPEAFF

SEQ ID NO: 361787 - protein, 16 aa, Homo sapiens
  CDR3 for alpha chain variable domain of TCR clone 180894 (TRAV30, TRAJ24)
CGTEIVDADSWGKFQF

SEQ ID NO: 361788 - protein, 18 aa, Homo sapiens
  CDR3 for beta chain variable domain of TCR clone 180894 (TRBV11-2, TRBJ2-6)
CASSFNPFLGTGANVLTF

SEQ ID NO: 361789 - protein, 15 aa, Homo sapiens
  CDR3 for alpha chain variable domain of TCR clone 180895 (TRAV3, TRAJ41)
CAVRDARNSGYALNF

SEQ ID NO: 361790 - protein, 13 aa, Homo sapiens
  CDR3 for beta chain variable domain of TCR clone 180895 (TRBV4-1, TRBJ1-1)
CASSQLGTGEAFF

SEQ ID NO: 361791 - protein, 12 aa, Homo sapiens
  CDR3 for alpha chain variable domain of TCR clone 180896 (TRAV21, TRAJ31)
CVLAGNNARLML

SEQ ID NO: 361792 - protein, 16 aa, Homo sapiens
  CDR3 for beta chain variable domain of TCR clone 180896 (TRBV27, TRBJ2-5)
CASSCGPGGTKETQYF

SEQ ID NO: 361793 - protein, 13 aa, Homo sapiens
  CDR3 for alpha chain variable domain of TCR clone 180897 (TRAV12-2, TRAJ37)
CAGGSGNTGKLIF

SEQ ID NO: 361794 - protein, 17 aa, Homo sapiens
  CDR3 for beta chain variable domain of TCR clone 180897 (TRBV11-2, TRBJ2-1)
CASSLYPPGVEYNAQFF

SEQ ID NO: 361795 - protein, 15 aa, Homo sapiens
  CDR3 for alpha chain variable domain of TCR clone 180898 (TRAV3, TRAJ5)
CAVRDRKTGRRALTF

SEQ ID NO: 361796 - protein, 15 aa, Homo sapiens
  CDR3 for beta chain variable domain of TCR clone 180898 (TRBV7-8, TRBJ2-1)
CASSLADSLYYEQFF

SEQ ID NO: 361797 - protein, 13 aa, Homo sapiens
  CDR3 for alpha chain variable domain of TCR clone 180899 (TRAV12-3, TRAJ43)
CTMIRPNKNDMRF

SEQ ID NO: 361798 - protein, 12 aa, Homo sapiens
  CDR3 for beta chain variable domain of TCR clone 180899 (TRBV11-2, TRBJ2-5)
CASSLGQETQYF

SEQ ID NO: 361799 - protein, 18 aa, Homo sapiens
  CDR3 for alpha chain variable domain of TCR clone 180900 (TRAV26-1, TRAJ34)
CCVLLPRQSRVYTDKLIF

SEQ ID NO: 361800 - protein, 16 aa, Homo sapiens
  CDR3 for beta chain variable domain of TCR clone 180900 (TRBV7-3, TRBJ2-2)
CASSLKRGTLSGELFF

SEQ ID NO: 361801 - protein, 14 aa, Homo sapiens
  CDR3 for alpha chain variable domain of TCR clone 180901 (TRAV12-1, TRAJ15)
CLPPANQAGTALIF

SEQ ID NO: 361802 - protein, 14 aa, Homo sapiens
  CDR3 for beta chain variable domain of TCR clone 180901 (TRBV4-1, TRBJ2-7)
CASSPVAGGDEQYF

SEQ ID NO: 361803 - protein, 14 aa, Homo sapiens
  CDR3 for alpha chain variable domain of TCR clone 180902 (TRAV23/DV6, TRAJ11)
CAASLESGYSTLTF

SEQ ID NO: 361804 - protein, 13 aa, Homo sapiens
  CDR3 for beta chain variable domain of TCR clone 180902 (TRBV4-1, TRBJ2-7)
CASSLTRGETQYF

SEQ ID NO: 361805 - protein, 13 aa, Homo sapiens
  CDR3 for alpha chain variable domain of TCR clone 180903 (TRAV17, TRAJ5)
CAPMDTGRRALTF

SEQ ID NO: 361806 - protein, 18 aa, Homo sapiens
  CDR3 for beta chain variable domain of TCR clone 180903 (TRBV7-9, TRBJ2-7)
CASSLTTSGSRTWYEQYF

SEQ ID NO: 361807 - protein, 10 aa, Homo sapiens
  CDR3 for alpha chain variable domain of TCR clone 180904 (TRAV29/DV5, TRAJ54)
LIQGAQNLVF

SEQ ID NO: 361808 - protein, 18 aa, Homo sapiens
  CDR3 for beta chain variable domain of TCR clone 180904 (TRBV3-1, TRBJ1-2)
CASSQDVIGWNGDYGYTF

SEQ ID NO: 361809 - protein, 15 aa, Homo sapiens
  CDR3 for alpha chain variable domain of TCR clone 180905 (TRAV17, TRAJ57)
CATGPSQGGSEKLVF

SEQ ID NO: 361810 - protein, 13 aa, Homo sapiens
  CDR3 for beta chain variable domain of TCR clone 180905 (TRBV27, TRBJ1-4)
CTSSLMGDEKLFF

SEQ ID NO: 361811 - protein, 15 aa, Homo sapiens
  CDR3 for alpha chain variable domain of TCR clone 180906 (TRAV14/DV4, TRAJ12)
CAMREERDSSYKLIF

SEQ ID NO: 361812 - protein, 15 aa, Homo sapiens
  CDR3 for beta chain variable domain of TCR clone 180906 (TRBV5-1, TRBJ2-1)
CASSPPRAPYNEQFF

SEQ ID NO: 361813 - protein, 12 aa, Homo sapiens
  CDR3 for alpha chain variable domain of TCR clone 180907 (TRAV2, TRAJ9)
CAVGAGGFKTIS

SEQ ID NO: 361814 - protein, 16 aa, Homo sapiens
  CDR3 for beta chain variable domain of TCR clone 180907 (TRBV7-3, TRBJ2-2)
CASSLKRGTLSGELFF

SEQ ID NO: 361815 - protein, 13 aa, Homo sapiens
  CDR3 for alpha chain variable domain of TCR clone 180908 (TRAV21, TRAJ11)
CAVPKSGYSTLTF

SEQ ID NO: 361816 - protein, 13 aa, Homo sapiens
  CDR3 for beta chain variable domain of TCR clone 180908 (TRBV3-1, TRBJ2-7)
CASSLRDGYEQYF

SEQ ID NO: 361817 - protein, 13 aa, Homo sapiens
  CDR3 for alpha chain variable domain of TCR clone 180909 (TRAV8-4, TRAJ30)
CAGSGNRDDKIIF

SEQ ID NO: 361818 - protein, 13 aa, Homo sapiens
  CDR3 for beta chain variable domain of TCR clone 180909 (TRBV3-1, TRBJ2-2)
CASLARGSGELFF

SEQ ID NO: 361819 - protein, 15 aa, Homo sapiens
  CDR3 for alpha chain variable domain of TCR clone 180910 (TRAV35, TRAJ50)
WAGQLRKTSYDKGIF

SEQ ID NO: 361820 - protein, 12 aa, Homo sapiens
  CDR3 for beta chain variable domain of TCR clone 180910 (TRBV5-1, TRBJ2-5)
CASSLGLETQYF

SEQ ID NO: 361821 - protein, 15 aa, Homo sapiens
  CDR3 for alpha chain variable domain of TCR clone 180911 (TRAV8-3, TRAJ45)
CASSYSGGGAAGLTF

SEQ ID NO: 361822 - protein, 15 aa, Homo sapiens
  CDR3 for beta chain variable domain of TCR clone 180911 (TRBV20-1, TRBJ2-7)
CSARDRVSGMDEQYF

SEQ ID NO: 361823 - protein, 14 aa, Homo sapiens
  CDR3 for alpha chain variable domain of TCR clone 180912 (TRAV12-2, TRAJ32)
CAHPESGATNKLIF

SEQ ID NO: 361824 - protein, 14 aa, Homo sapiens
  CDR3 for beta chain variable domain of TCR clone 180912 (TRBV4-2, TRBJ2-3)
YASRETRAPGMKYF

SEQ ID NO: 361825 - protein, 16 aa, Homo sapiens
  CDR3 for alpha chain variable domain of TCR clone 180913 (TRAV12-2, TRAJ32)
CAVNLGQGGATNKLIF

SEQ ID NO: 361826 - protein, 13 aa, Homo sapiens
  CDR3 for beta chain variable domain of TCR clone 180913 (TRBV9, TRBJ2-1)
CASSVGQGGEQFF

SEQ ID NO: 361827 - protein, 16 aa, Homo sapiens
  CDR3 for alpha chain variable domain of TCR clone 180914 (TRAV36/DV7, TRAJ30)
CAVETYGLDRDDKIIF

SEQ ID NO: 361828 - protein, 15 aa, Homo sapiens
  CDR3 for beta chain variable domain of TCR clone 180914 (TRBV9, TRBJ1-6)
CASSVAGTGDSPLHF

SEQ ID NO: 361829 - protein, 14 aa, Homo sapiens
  CDR3 for alpha chain variable domain of TCR clone 180915 (TRAV12-3, TRAJ10)
SHLPLTGGGNKLTF

SEQ ID NO: 361830 - protein, 12 aa, Homo sapiens
  CDR3 for beta chain variable domain of TCR clone 180915 (TRBV12-4, TRBJ2-1)
CASSKDRRWQFF

SEQ ID NO: 361831 - protein, 12 aa, Homo sapiens
  CDR3 for alpha chain variable domain of TCR clone 180916 (TRAV13-1, TRAJ47)
CAASEGGNKLVF

SEQ ID NO: 361832 - protein, 13 aa, Homo sapiens
  CDR3 for beta chain variable domain of TCR clone 180916 (TRBV12-5, TRBJ2-3)
CASGDRQSDTQYF

SEQ ID NO: 361833 - protein, 16 aa, Homo sapiens
  CDR3 for alpha chain variable domain of TCR clone 180917 (TRAV4, TRAJ18)
CCVLLIRGSTLGRLYF

SEQ ID NO: 361834 - protein, 12 aa, Homo sapiens
  CDR3 for beta chain variable domain of TCR clone 180917 (TRBV6-3, TRBJ2-7)
CASRLTPYEQYF

SEQ ID NO: 361835 - protein, 15 aa, Homo sapiens
  CDR3 for alpha chain variable domain of TCR clone 180918 (TRAV2, TRAJ37)
CAVVVRSGNTGKLIF

SEQ ID NO: 361836 - protein, 14 aa, Homo sapiens
  CDR3 for beta chain variable domain of TCR clone 180918 (TRBV19, TRBJ2-7)
CASSMGQGAIEQYF

SEQ ID NO: 361837 - protein, 16 aa, Homo sapiens
  CDR3 for alpha chain variable domain of TCR clone 180919 (TRAV3, TRAJ32)
CAVRDMGGGATHKLIF

SEQ ID NO: 361838 - protein, 11 aa, Homo sapiens
  CDR3 for beta chain variable domain of TCR clone 180919 (TRBV12-4, TRBJ2-1)
CASSRLNEQFF

SEQ ID NO: 361839 - protein, 15 aa, Homo sapiens
  CDR3 for alpha chain variable domain of TCR clone 180920 (TRAV21, TRAJ24)
CAARSSTDSWGKLQF

SEQ ID NO: 361840 - protein, 13 aa, Homo sapiens
  CDR3 for beta chain variable domain of TCR clone 180920 (TRBV10-1, TRBJ1-2)
CASSEASGYGYTF

SEQ ID NO: 361841 - protein, 15 aa, Homo sapiens
  CDR3 for alpha chain variable domain of TCR clone 180921 (TRAV13-2, TRAJ53)
CAETVSGGSNYKLTF

SEQ ID NO: 361842 - protein, 11 aa, Homo sapiens
  CDR3 for beta chain variable domain of TCR clone 180921 (TRBV12-4, TRBJ2-3)
CASTATDTQYF

SEQ ID NO: 361843 - protein, 12 aa, Homo sapiens
  CDR3 for alpha chain variable domain of TCR clone 180922 (TRAV16, TRAJ26)
CALRSYGHNFVF

SEQ ID NO: 361844 - protein, 14 aa, Homo sapiens
  CDR3 for beta chain variable domain of TCR clone 180922 (TRBV10-3, TRBJ2-1)
CAISSDLAYNEQFF

SEQ ID NO: 361845 - protein, 18 aa, Homo sapiens
  CDR3 for alpha chain variable domain of TCR clone 180923 (TRAV21, TRAJ52)
CAVRPSPAGGTSYGKLTF

SEQ ID NO: 361846 - protein, 18 aa, Homo sapiens
  CDR3 for beta chain variable domain of TCR clone 180923 (TRBV5-5, TRBJ1-5)
CASSLRQVKGSSNQAQHF

SEQ ID NO: 361847 - protein, 15 aa, Homo sapiens
  CDR3 for alpha chain variable domain of TCR clone 180924 (TRAV17, TRAJ57)
CATGPSQGGSEKLVF

SEQ ID NO: 361848 - protein, 15 aa, Homo sapiens
  CDR3 for beta chain variable domain of TCR clone 180924 (TRBV4-1, TRBJ2-7)
CASSQNTGRLYEQYF

SEQ ID NO: 361849 - protein, 10 aa, Homo sapiens
  CDR3 for alpha chain variable domain of TCR clone 180925 (TRAV5, TRAJ34)
CAEDTDTLIF

SEQ ID NO: 361850 - protein, 12 aa, Homo sapiens
  CDR3 for beta chain variable domain of TCR clone 180925 (TRBV11-2, TRBJ2-2)
CASSLGGGELFF

SEQ ID NO: 361851 - protein, 12 aa, Homo sapiens
  CDR3 for alpha chain variable domain of TCR clone 180926 (TRAV35, TRAJ40)
CAGRAGTYKYIF

SEQ ID NO: 361852 - protein, 14 aa, Homo sapiens
  CDR3 for beta chain variable domain of TCR clone 180926 (TRBV7-2, TRBJ1-3)
CASSRGGTGNTIHF

SEQ ID NO: 361853 - protein, 14 aa, Homo sapiens
  CDR3 for alpha chain variable domain of TCR clone 180927 (TRAV12-1, TRAJ9)
CVVTLNTGGFKTIF

SEQ ID NO: 361854 - protein, 16 aa, Homo sapiens
  CDR3 for beta chain variable domain of TCR clone 180927 (TRBV29-1, TRBJ2-5)
SAARTERGPVLRARHA

SEQ ID NO: 361855 - protein, 18 aa, Homo sapiens
  CDR3 for alpha chain variable domain of TCR clone 180928 (TRAV26-2, TRAJ45)
CILRLWGYSGGGADGLTF

SEQ ID NO: 361856 - protein, 17 aa, Homo sapiens
  CDR3 for beta chain variable domain of TCR clone 180928 (TRBV28, TRBJ2-3)
CASSPTPAGGRVDRQDF

SEQ ID NO: 361857 - protein, 17 aa, Homo sapiens
  CDR3 for alpha chain variable domain of TCR clone 180929 (TRAV2, TRAJ22)
ILQVREADAAEQRQLTF

SEQ ID NO: 361858 - protein, 16 aa, Homo sapiens
  CDR3 for beta chain variable domain of TCR clone 180929 (TRBV2, TRBJ2-5)
CASSETQCVGEETQYF

SEQ ID NO: 361859 - protein, 14 aa, Homo sapiens
  CDR3 for alpha chain variable domain of TCR clone 180930 (TRAV2, TRAJ9)
CAVEDRSVGFKTIF

SEQ ID NO: 361860 - protein, 13 aa, Homo sapiens
  CDR3 for beta chain variable domain of TCR clone 180930 (TRBV19, TRBJ1-2)
CASSVPGQDGYTF

SEQ ID NO: 361861 - protein, 14 aa, Homo sapiens
  CDR3 for alpha chain variable domain of TCR clone 180931 (TRAV12-2, TRAJ13)
CAVKKTGGYQKVTF

SEQ ID NO: 361862 - protein, 18 aa, Homo sapiens
  CDR3 for beta chain variable domain of TCR clone 180931 (TRBV10-3, TRBJ2-1)
CTSVPSVSLRGGVDEQFF

SEQ ID NO: 361863 - protein, 11 aa, Homo sapiens
  CDR3 for alpha chain variable domain of TCR clone 180932 (TRAV1-2, TRAJ40)
YAVPGTYKYIF

SEQ ID NO: 361864 - protein, 16 aa, Homo sapiens
  CDR3 for beta chain variable domain of TCR clone 180932 (TRBV7-3, TRBJ2-2)
CASSLKRGTLSGELFF

SEQ ID NO: 361865 - protein, 14 aa, Homo sapiens
  CDR3 for alpha chain variable domain of TCR clone 180933 (TRAV13-1, TRAJ44)
CAAKATGTASKLTF

SEQ ID NO: 361866 - protein, 17 aa, Homo sapiens
  CDR3 for beta chain variable domain of TCR clone 180933 (TRBV7-3, TRBJ2-3)
RASSLKKRMRGADTQYF

SEQ ID NO: 361867 - protein, 16 aa, Homo sapiens
  CDR3 for alpha chain variable domain of TCR clone 180934 (TRAV4, TRAJ9)
CLVGDPNRPGGFKTIF

SEQ ID NO: 361868 - protein, 13 aa, Homo sapiens
  CDR3 for beta chain variable domain of TCR clone 180934 (TRBV28, TRBJ2-5)
CASSFAGGETQYF

SEQ ID NO: 361869 - protein, 14 aa, Homo sapiens
  CDR3 for alpha chain variable domain of TCR clone 180935 (TRAV25, TRAJ35)
CARRMEGVGNVLHC

SEQ ID NO: 361870 - protein, 13 aa, Homo sapiens
  CDR3 for beta chain variable domain of TCR clone 180935 (TRBV7-2, TRBJ1-4)
CASSLAGLKKLFF

SEQ ID NO: 361871 - protein, 15 aa, Homo sapiens
  CDR3 for alpha chain variable domain of TCR clone 180936 (TRAV12-1, TRAJ44)
CVVNINTDTASKLTF

SEQ ID NO: 361872 - protein, 16 aa, Homo sapiens
  CDR3 for beta chain variable domain of TCR clone 180936 (TRBV12-5, TRBJ2-5)
CASGPRTSGNQETQYF

SEQ ID NO: 361873 - protein, 16 aa, Homo sapiens
  CDR3 for alpha chain variable domain of TCR clone 180937 (TRAV3, TRAJ27)
CAVRDPQGTNAGKSTF

SEQ ID NO: 361874 - protein, 12 aa, Homo sapiens
  CDR3 for beta chain variable domain of TCR clone 180937 (TRBV11-2, TRBJ2-2)
CASSLGGGELFF

SEQ ID NO: 361875 - protein, 17 aa, Homo sapiens
  CDR3 for alpha chain variable domain of TCR clone 180938 (TRAV13-1, TRAJ5)
CSNPSLSRDTGRRALTF

SEQ ID NO: 361876 - protein, 12 aa, Homo sapiens
  CDR3 for beta chain variable domain of TCR clone 180938 (TRBV11-2, TRBJ2-2)
CASSLGGGELFF

SEQ ID NO: 361877 - protein, 11 aa, Homo sapiens
  CDR3 for alpha chain variable domain of TCR clone 180939 (TRAV1-2, TRAJ20)
CPVSNDYKLSF

SEQ ID NO: 361878 - protein, 16 aa, Homo sapiens
  CDR3 for beta chain variable domain of TCR clone 180939 (TRBV29-1, TRBJ2-6)
CSVEDITYSGANVLTF

SEQ ID NO: 361879 - protein, 13 aa, Homo sapiens
  CDR3 for alpha chain variable domain of TCR clone 180940 (TRAV2, TRAJ13)
CAVESGGYQKGTF

SEQ ID NO: 361880 - protein, 13 aa, Homo sapiens
  CDR3 for beta chain variable domain of TCR clone 180940 (TRBV28, TRBJ2-5)
CASSFAGGETRYF

SEQ ID NO: 361881 - protein, 14 aa, Homo sapiens
  CDR3 for alpha chain variable domain of TCR clone 180941 (TRAV8-4, TRAJ17)
CAESEGAVGNKLTF

SEQ ID NO: 361882 - protein, 13 aa, Homo sapiens
  CDR3 for beta chain variable domain of TCR clone 180941 (TRBV19, TRBJ2-1)
CASSMYRVNEQFF

SEQ ID NO: 361883 - protein, 15 aa, Homo sapiens
  CDR3 for alpha chain variable domain of TCR clone 180942 (TRAV12-1, TRAJ44)
CVADLPTGTAIKLTF

SEQ ID NO: 361884 - protein, 13 aa, Homo sapiens
  CDR3 for beta chain variable domain of TCR clone 180942 (TRBV6-5, TRBJ2-5)
CASSPQGGETQYF

SEQ ID NO: 361885 - protein, 15 aa, Homo sapiens
  CDR3 for alpha chain variable domain of TCR clone 180943 (TRAV12-3, TRAJ6)
CAMSPASGGSYIPTF

SEQ ID NO: 361886 - protein, 17 aa, Homo sapiens
  CDR3 for beta chain variable domain of TCR clone 180943 (TRBV19, TRBJ2-6)
CASSTGQVFSGANVLTF

SEQ ID NO: 361887 - protein, 14 aa, Homo sapiens
  CDR3 for alpha chain variable domain of TCR clone 180944 (TRAV12-1, TRAJ23)
CVVIVYNQGGKLSF

SEQ ID NO: 361888 - protein, 13 aa, Homo sapiens
  CDR3 for beta chain variable domain of TCR clone 180944 (TRBV11-2, TRBJ2-5)
CASSFSSQETQYF

SEQ ID NO: 361889 - protein, 14 aa, Homo sapiens
  CDR3 for alpha chain variable domain of TCR clone 180945 (TRAV8-6, TRAJ5)
WAVSVDTGRRALTF

SEQ ID NO: 361890 - protein, 11 aa, Homo sapiens
  CDR3 for beta chain variable domain of TCR clone 180945 (TRBV7-3, TRBJ2-5)
CASSLSETQYF

SEQ ID NO: 361891 - protein, 12 aa, Homo sapiens
  CDR3 for alpha chain variable domain of TCR clone 180946 (TRAV12-2, TRAJ53)
CAVNGGEVATIN

SEQ ID NO: 361892 - protein, 17 aa, Homo sapiens
  CDR3 for beta chain variable domain of TCR clone 180946 (TRBV7-3, TRBJ2-3)
CASSLMKRMRGADTQYF

SEQ ID NO: 361893 - protein, 17 aa, Homo sapiens
  CDR3 for alpha chain variable domain of TCR clone 180947 (TRAV1-1, TRAJ32)
CAVRVDELWWCYKQSHL

SEQ ID NO: 361894 - protein, 12 aa, Homo sapiens
  CDR3 for beta chain variable domain of TCR clone 180947 (TRBV7-8, TRBJ2-1)
CASSLGHNEQFF

SEQ ID NO: 361895 - protein, 13 aa, Homo sapiens
  CDR3 for alpha chain variable domain of TCR clone 180948 (TRAV29/DV5, TRAJ40)
CAAVWSPGYKYIF

SEQ ID NO: 361896 - protein, 16 aa, Homo sapiens
  CDR3 for beta chain variable domain of TCR clone 180948 (TRBV9, TRBJ2-1)
CASSVGGGGNYNEQFF

SEQ ID NO: 361897 - protein, 17 aa, Homo sapiens
  CDR3 for alpha chain variable domain of TCR clone 180949 (TRAV3, TRAJ6)
CAVRDGPRAGGSYIHTF

SEQ ID NO: 361898 - protein, 18 aa, Homo sapiens
  CDR3 for beta chain variable domain of TCR clone 180949 (TRBV7-9, TRBJ2-7)
CASGLTTSGSRTWYEQYF

SEQ ID NO: 361899 - protein, 14 aa, Homo sapiens
  CDR3 for alpha chain variable domain of TCR clone 180950 (TRAV1-2, TRAJ16)
CAVNPFSDGQKLLF

SEQ ID NO: 361900 - protein, 13 aa, Homo sapiens
  CDR3 for beta chain variable domain of TCR clone 180950 (TRBV29-1, TRBJ1-1)
CSVGDSRNTEAFF

SEQ ID NO: 361901 - protein, 13 aa, Homo sapiens
  CDR3 for alpha chain variable domain of TCR clone 180951 (TRAV2, TRAJ3)
CAVEDSSASKIIF

SEQ ID NO: 361902 - protein, 14 aa, Homo sapiens
  CDR3 for beta chain variable domain of TCR clone 180951 (TRBV7-2, TRBJ2-7)
CASRSQGAAYEQYF

SEQ ID NO: 361903 - protein, 17 aa, Homo sapiens
  CDR3 for alpha chain variable domain of TCR clone 180952 (TRAV38-2/DV8, TRAJ28)
CAYRFAYSGAGSYQLTL

SEQ ID NO: 361904 - protein, 13 aa, Homo sapiens
  CDR3 for beta chain variable domain of TCR clone 180952 (TRBV7-3, TRBJ1-1)
CASSQDWGAEAFF

SEQ ID NO: 361905 - protein, 17 aa, Homo sapiens
  CDR3 for alpha chain variable domain of TCR clone 180953 (TRAV26-1, TRAJ53)
CIVRVDDSGGSNYKLTF

SEQ ID NO: 361906 - protein, 15 aa, Homo sapiens
  CDR3 for beta chain variable domain of TCR clone 180953 (TRBV20-1, TRBJ2-7)
CSARVPAAYFYEPYF

SEQ ID NO: 361907 - protein, 15 aa, Homo sapiens
  CDR3 for alpha chain variable domain of TCR clone 180954 (TRAV21, TRAJ37)
CAVRPTLSNTGKLIF

SEQ ID NO: 361908 - protein, 15 aa, Homo sapiens
  CDR3 for beta chain variable domain of TCR clone 180954 (TRBV7-2, TRBJ2-2)
CASRRPGQNTGELFF

SEQ ID NO: 361909 - protein, 15 aa, Homo sapiens
  CDR3 for alpha chain variable domain of TCR clone 180955 (TRAV12-1, TRAJ33)
CVVNMADRSNYQLIW

SEQ ID NO: 361910 - protein, 15 aa, Homo sapiens
  CDR3 for beta chain variable domain of TCR clone 180955 (TRBV11-2, TRBJ1-2)
CASSLEGVQRNGYTF

SEQ ID NO: 361911 - protein, 12 aa, Homo sapiens
  CDR3 for alpha chain variable domain of TCR clone 180956 (TRAV27, TRAJ13)
CAGAGGYQKVTF

SEQ ID NO: 361912 - protein, 15 aa, Homo sapiens
  CDR3 for beta chain variable domain of TCR clone 180956 (TRBV20-1, TRBJ2-6)
CRARDRGPGANVLAF

SEQ ID NO: 361913 - protein, 14 aa, Homo sapiens
  CDR3 for alpha chain variable domain of TCR clone 180957 (TRAV1-2, TRAJ16)
CAVNRFSDGQKLLF

SEQ ID NO: 361914 - protein, 15 aa, Homo sapiens
  CDR3 for beta chain variable domain of TCR clone 180957 (TRBV20-1, TRBJ1-1)
CSASRGVTGNTEAVF

SEQ ID NO: 361915 - protein, 12 aa, Homo sapiens
  CDR3 for alpha chain variable domain of TCR clone 180958 (TRAV9-2, TRAJ26)
WALRGYGQNFVF

SEQ ID NO: 361916 - protein, 12 aa, Homo sapiens
  CDR3 for beta chain variable domain of TCR clone 180958 (TRBV29-1, TRBJ2-3)
CSVTGGADTQYF

SEQ ID NO: 361917 - protein, 14 aa, Homo sapiens
  CDR3 for alpha chain variable domain of TCR clone 180959 (TRAV9-2, TRAJ39)
CALYIYNAGNMLTF

SEQ ID NO: 361918 - protein, 12 aa, Homo sapiens
  CDR3 for beta chain variable domain of TCR clone 180959 (TRBV2, TRBJ2-7)
CASSRVGYEQYF

SEQ ID NO: 361919 - protein, 15 aa, Homo sapiens
  CDR3 for alpha chain variable domain of TCR clone 180960 (TRAV14/DV4, TRAJ47)
CAMREAMEYGNKLVF

SEQ ID NO: 361920 - protein, 14 aa, Homo sapiens
  CDR3 for beta chain variable domain of TCR clone 180960 (TRBV20-1, TRBJ1-3)
CSASPTGAGNTIYF

SEQ ID NO: 361921 - protein, 13 aa, Homo sapiens
  CDR3 for alpha chain variable domain of TCR clone 180961 (TRAV13-1, TRAJ33)
CAASRAGNYQLIW

SEQ ID NO: 361922 - protein, 13 aa, Homo sapiens
  CDR3 for beta chain variable domain of TCR clone 180961 (TRBV14, TRBJ2-7)
CASSQDRRYEQYF

SEQ ID NO: 361923 - protein, 14 aa, Homo sapiens
  CDR3 for alpha chain variable domain of TCR clone 180962 (TRAV1-2, TRAJ16)
CAVNRFSDGQKLLF

SEQ ID NO: 361924 - protein, 13 aa, Homo sapiens
  CDR3 for beta chain variable domain of TCR clone 180962 (TRBV6-1, TRBJ1-2)
CASSAREGYGYTF

SEQ ID NO: 361925 - protein, 13 aa, Homo sapiens
  CDR3 for alpha chain variable domain of TCR clone 180963 (TRAV20, TRAJ48)
CAVHLFGNEKLTF

SEQ ID NO: 361926 - protein, 17 aa, Homo sapiens
  CDR3 for beta chain variable domain of TCR clone 180963 (TRBV7-8, TRBJ2-6)
CASSAGTGGAGANVLTF

SEQ ID NO: 361927 - protein, 15 aa, Homo sapiens
  CDR3 for alpha chain variable domain of TCR clone 180964 (TRAV12-1, TRAJ23)
CGERSRCNQGGKLIF

SEQ ID NO: 361928 - protein, 14 aa, Homo sapiens
  CDR3 for beta chain variable domain of TCR clone 180964 (TRBV19, TRBJ2-2)
CASSTLHRSGELFF

SEQ ID NO: 361929 - protein, 19 aa, Homo sapiens
  CDR3 for alpha chain variable domain of TCR clone 180965 (TRAV4, TRAJ13)
CIVGVQGSSGGTRKLPLEL

SEQ ID NO: 361930 - protein, 18 aa, Homo sapiens
  CDR3 for beta chain variable domain of TCR clone 180965 (TRBV15, TRBJ2-3)
CATSRDGARSWDTDTQYF

SEQ ID NO: 361931 - protein, 13 aa, Homo sapiens
  CDR3 for alpha chain variable domain of TCR clone 180966 (TRAV3, TRAJ41)
CAVSSNSGYALNF

SEQ ID NO: 361932 - protein, 13 aa, Homo sapiens
  CDR3 for beta chain variable domain of TCR clone 180966 (TRBV2, TRBJ1-6)
CADSGSYNSPLHF

SEQ ID NO: 361933 - protein, 13 aa, Homo sapiens
  CDR3 for alpha chain variable domain of TCR clone 180967 (TRAV26-2, TRAJ43)
CILGAVNNNDMRF

SEQ ID NO: 361934 - protein, 15 aa, Homo sapiens
  CDR3 for beta chain variable domain of TCR clone 180967 (TRBV7-2, TRBJ2-1)
CASTHETGIYNEQFF

SEQ ID NO: 361935 - protein, 16 aa, Homo sapiens
  CDR3 for alpha chain variable domain of TCR clone 180968 (TRAV13-1, TRAJ10)
CAASSHFTGGGNKLTF

SEQ ID NO: 361936 - protein, 15 aa, Homo sapiens
  CDR3 for beta chain variable domain of TCR clone 180968 (TRBV7-9, TRBJ1-6)
CASSSPGRGKSPLHF

SEQ ID NO: 361937 - protein, 14 aa, Homo sapiens
  CDR3 for alpha chain variable domain of TCR clone 180969 (TRAV8-3, TRAJ39)
CAVGANNAGNMLPF

SEQ ID NO: 361938 - protein, 16 aa, Homo sapiens
  CDR3 for beta chain variable domain of TCR clone 180969 (TRBV12-5, TRBJ2-5)
CASGPRTSGNQETQYF

SEQ ID NO: 361939 - protein, 11 aa, Homo sapiens
  CDR3 for alpha chain variable domain of TCR clone 180970 (TRAV2, TRAJ13)
CSSGGYQKVTF

SEQ ID NO: 361940 - protein, 16 aa, Homo sapiens
  CDR3 for beta chain variable domain of TCR clone 180970 (TRBV19, TRBJ2-1)
CASSMGGGSSYNEQFF

SEQ ID NO: 361941 - protein, 11 aa, Homo sapiens
  CDR3 for alpha chain variable domain of TCR clone 180971 (TRAV3, TRAJ21)
CAVGNFNKFYF

SEQ ID NO: 361942 - protein, 14 aa, Homo sapiens
  CDR3 for beta chain variable domain of TCR clone 180971 (TRBV11-2, TRBJ2-7)
CASSLELEGYEQYF

SEQ ID NO: 361943 - protein, 15 aa, Homo sapiens
  CDR3 for alpha chain variable domain of TCR clone 180972 (TRAV25, TRAJ10)
CAGPLLTGGGNKLTF

SEQ ID NO: 361944 - protein, 17 aa, Homo sapiens
  CDR3 for beta chain variable domain of TCR clone 180972 (TRBV7-3, TRBJ2-3)
CASSLMKRMRGADTQYF

SEQ ID NO: 361945 - protein, 15 aa, Homo sapiens
  CDR3 for alpha chain variable domain of TCR clone 180973 (TRAV1-2, TRAJ30)
CAVRPHGNRDDMIIF

SEQ ID NO: 361946 - protein, 13 aa, Homo sapiens
  CDR3 for beta chain variable domain of TCR clone 180973 (TRBV4-1, TRBJ2-7)
CASSQGQAYEQYF

SEQ ID NO: 361947 - protein, 14 aa, Homo sapiens
  CDR3 for alpha chain variable domain of TCR clone 180974 (TRAV13-2, TRAJ17)
CAENSKAAGNKLTF

SEQ ID NO: 361948 - protein, 16 aa, Homo sapiens
  CDR3 for beta chain variable domain of TCR clone 180974 (TRBV12-5, TRBJ2-5)
CASGPRTSGNQETQYF

SEQ ID NO: 361949 - protein, 12 aa, Homo sapiens
  CDR3 for alpha chain variable domain of TCR clone 180975 (TRAV2, TRAJ33)
CAVEDSNYQLIW

SEQ ID NO: 361950 - protein, 17 aa, Homo sapiens
  CDR3 for beta chain variable domain of TCR clone 180975 (TRBV13, TRBJ2-3)
CASSLSRVAGGRNTQYF

SEQ ID NO: 361951 - protein, 18 aa, Homo sapiens
  CDR3 for alpha chain variable domain of TCR clone 180976 (TRAV21, TRAJ52)
CAVRPSPAGGTSYGKLTF

SEQ ID NO: 361952 - protein, 12 aa, Homo sapiens
  CDR3 for beta chain variable domain of TCR clone 180976 (TRBV5-7, TRBJ1-2)
CASSDRIHGYTF

SEQ ID NO: 361953 - protein, 12 aa, Homo sapiens
  CDR3 for alpha chain variable domain of TCR clone 180977 (TRAV17, TRAJ20)
CATYSNDYKLSF

SEQ ID NO: 361954 - protein, 11 aa, Homo sapiens
  CDR3 for beta chain variable domain of TCR clone 180977 (TRBV4-1, TRBJ2-2)
CASEHTGELFL

SEQ ID NO: 361955 - protein, 15 aa, Homo sapiens
  CDR3 for alpha chain variable domain of TCR clone 180978 (TRAV8-3, TRAJ45)
CASSYSGGGADGLTF

SEQ ID NO: 361956 - protein, 13 aa, Homo sapiens
  CDR3 for beta chain variable domain of TCR clone 180978 (TRBV10-3, TRBJ2-7)
CASKLTVNYKQYF

SEQ ID NO: 361957 - protein, 11 aa, Homo sapiens
  CDR3 for alpha chain variable domain of TCR clone 180979 (TRAV23/DV6, TRAJ9)
CFHTGGFKTIF

SEQ ID NO: 361958 - protein, 15 aa, Homo sapiens
  CDR3 for beta chain variable domain of TCR clone 180979 (TRBV27, TRBJ2-1)
CASSNGGGSSNEQFF

SEQ ID NO: 361959 - protein, 14 aa, Homo sapiens
  CDR3 for alpha chain variable domain of TCR clone 180980 (TRAV12-3, TRAJ42)
CAMNYGVSQGNLIF

SEQ ID NO: 361960 - protein, 15 aa, Homo sapiens
  CDR3 for beta chain variable domain of TCR clone 180980 (TRBV5-7, TRBJ1-5)
CASSYGKLWDQPQHF

SEQ ID NO: 361961 - protein, 15 aa, Homo sapiens
  CDR3 for alpha chain variable domain of TCR clone 180981 (TRAV13-2, TRAJ16)
CAENDRFSDGQKLLF

SEQ ID NO: 361962 - protein, 13 aa, Homo sapiens
  CDR3 for beta chain variable domain of TCR clone 180981 (TRBV20-1, TRBJ1-1)
CSAGTVGNTEAFF

SEQ ID NO: 361963 - protein, 12 aa, Homo sapiens
  CDR3 for alpha chain variable domain of TCR clone 180982 (TRAV1-2, TRAJ33)
FAALDSNYQLIW

SEQ ID NO: 361964 - protein, 14 aa, Homo sapiens
  CDR3 for beta chain variable domain of TCR clone 180982 (TRBV19, TRBJ2-3)
CASSAPRGTDTQYF

SEQ ID NO: 361965 - protein, 13 aa, Homo sapiens
  CDR3 for alpha chain variable domain of TCR clone 180983 (TRAV29/DV5, TRAJ31)
CAASRNNNARLMF

SEQ ID NO: 361966 - protein, 14 aa, Homo sapiens
  CDR3 for beta chain variable domain of TCR clone 180983 (TRBV20-1, TRBJ2-5)
CSAHRQGLWETQYF

SEQ ID NO: 361967 - protein, 13 aa, Homo sapiens
  CDR3 for alpha chain variable domain of TCR clone 180984 (TRAV8-6, TRAJ13)
CAGRDGGYQKVTF

SEQ ID NO: 361968 - protein, 15 aa, Homo sapiens
  CDR3 for beta chain variable domain of TCR clone 180984 (TRBV7-9, TRBJ2-2)
CASRPEGTSTGELFF

SEQ ID NO: 361969 - protein, 12 aa, Homo sapiens
  CDR3 for alpha chain variable domain of TCR clone 180985 (TRAV13-1, TRAJ21)
CAAKEGFNKFYF

SEQ ID NO: 361970 - protein, 11 aa, Homo sapiens
  CDR3 for beta chain variable domain of TCR clone 180985 (TRBV11-2, TRBJ1-1)
CASSINTEAFF

SEQ ID NO: 361971 - protein, 14 aa, Homo sapiens
  CDR3 for alpha chain variable domain of TCR clone 180986 (TRAV8-3, TRAJ4)
CAVGAAGGYNKLIF

SEQ ID NO: 361972 - protein, 17 aa, Homo sapiens
  CDR3 for beta chain variable domain of TCR clone 180986 (TRBV20-1, TRBJ2-1)
CSAPPRLAGTRYNEQFF

SEQ ID NO: 361973 - protein, 14 aa, Homo sapiens
  CDR3 for alpha chain variable domain of TCR clone 180987 (TRAV12-2, TRAJ6)
YASKWGGGSYLPTF

SEQ ID NO: 361974 - protein, 13 aa, Homo sapiens
  CDR3 for beta chain variable domain of TCR clone 180987 (TRBV2, TRBJ1-1)
CASSEGGNTEAFF

SEQ ID NO: 361975 - protein, 13 aa, Homo sapiens
  CDR3 for alpha chain variable domain of TCR clone 180988 (TRAV21, TRAJ20)
CAVGLRVDYKLSF

SEQ ID NO: 361976 - protein, 12 aa, Homo sapiens
  CDR3 for beta chain variable domain of TCR clone 180988 (TRBV5-5, TRBJ2-5)
CASSYFGETQYF

SEQ ID NO: 361977 - protein, 17 aa, Homo sapiens
  CDR3 for alpha chain variable domain of TCR clone 180989 (TRAV26-1, TRAJ27)
CIVSTPWLNTNAGKSTF

SEQ ID NO: 361978 - protein, 16 aa, Homo sapiens
  CDR3 for beta chain variable domain of TCR clone 180989 (TRBV7-9, TRBJ2-1)
CASSLDPGLAIDEQFF

SEQ ID NO: 361979 - protein, 15 aa, Homo sapiens
  CDR3 for alpha chain variable domain of TCR clone 180990 (TRAV25, TRAJ52)
CAGRHGGTSYGKLTF

SEQ ID NO: 361980 - protein, 17 aa, Homo sapiens
  CDR3 for beta chain variable domain of TCR clone 180990 (TRBV7-8, TRBJ2-6)
CASSAGTGGAGANDLTF

SEQ ID NO: 361981 - protein, 17 aa, Homo sapiens
  CDR3 for alpha chain variable domain of TCR clone 180991 (TRAV12-2, TRAJ52)
CAVNPYAGDTSYGKLTF

SEQ ID NO: 361982 - protein, 16 aa, Homo sapiens
  CDR3 for beta chain variable domain of TCR clone 180991 (TRBV5-5, TRBJ2-2)
CASSGRREGATGELFF

SEQ ID NO: 361983 - protein, 12 aa, Homo sapiens
  CDR3 for alpha chain variable domain of TCR clone 180992 (TRAV21, TRAJ27)
CAPPGNAVKSTF

SEQ ID NO: 361984 - protein, 13 aa, Homo sapiens
  CDR3 for beta chain variable domain of TCR clone 180992 (TRBV2, TRBJ1-1)
CARNPTGGFHAFF

SEQ ID NO: 361985 - protein, 16 aa, Homo sapiens
  CDR3 for alpha chain variable domain of TCR clone 180993 (TRAV12-3, TRAJ53)
CAMSLGSGGSNYKLTF

SEQ ID NO: 361986 - protein, 12 aa, Homo sapiens
  CDR3 for beta chain variable domain of TCR clone 180993 (TRBV11-2, TRBJ2-2)
CASSLGGGELFF

SEQ ID NO: 361987 - protein, 13 aa, Homo sapiens
  CDR3 for alpha chain variable domain of TCR clone 180994 (TRAV8-3, TRAJ48)
CAVVPFGYEKLTF

SEQ ID NO: 361988 - protein, 14 aa, Homo sapiens
  CDR3 for beta chain variable domain of TCR clone 180994 (TRBV18, TRBJ2-7)
CASSPRGGAYEQYF

SEQ ID NO: 361989 - protein, 14 aa, Homo sapiens
  CDR3 for alpha chain variable domain of TCR clone 180995 (TRAV13-1, TRAJ48)
CAASTDFGNEKLTF

SEQ ID NO: 361990 - protein, 15 aa, Homo sapiens
  CDR3 for beta chain variable domain of TCR clone 180995 (TRBV7-2, TRBJ2-2)
CASSETGQGTGELFF

SEQ ID NO: 361991 - protein, 15 aa, Homo sapiens
  CDR3 for alpha chain variable domain of TCR clone 180996 (TRAV3, TRAJ17)
CAVRDTGAAGNKLTF

SEQ ID NO: 361992 - protein, 14 aa, Homo sapiens
  CDR3 for beta chain variable domain of TCR clone 180996 (TRBV6-3, TRBJ1-1)
YASSNLHPGAEAFF

SEQ ID NO: 361993 - protein, 13 aa, Homo sapiens
  CDR3 for alpha chain variable domain of TCR clone 180997 (TRAV26-1, TRAJ35)
CIVSRRVGEMLHC

SEQ ID NO: 361994 - protein, 17 aa, Homo sapiens
  CDR3 for beta chain variable domain of TCR clone 180997 (TRBV7-9, TRBJ2-7)
CASSFDGSRGRAYEQYF

SEQ ID NO: 361995 - protein, 16 aa, Homo sapiens
  CDR3 for alpha chain variable domain of TCR clone 180998 (TRAV38-2/DV8, TRAJ45)
CAYTTSSGGGADGLTF

SEQ ID NO: 361996 - protein, 14 aa, Homo sapiens
  CDR3 for beta chain variable domain of TCR clone 180998 (TRBV7-9, TRBJ2-2)
CASSLGHRTGELFF

SEQ ID NO: 361997 - protein, 14 aa, Homo sapiens
  CDR3 for alpha chain variable domain of TCR clone 180999 (TRAV12-2, TRAJ13)
CAVKKTWGYQKVTF

SEQ ID NO: 361998 - protein, 16 aa, Homo sapiens
  CDR3 for beta chain variable domain of TCR clone 180999 (TRBV4-2, TRBJ2-4)
CASSQELRRAKNIQYF

SEQ ID NO: 361999 - protein, 14 aa, Homo sapiens
  CDR3 for alpha chain variable domain of TCR clone 181000 (TRAV17, TRAJ6)
CATNPAGGSYIPTF

SEQ ID NO: 362000 - protein, 15 aa, Homo sapiens
  CDR3 for beta chain variable domain of TCR clone 181000 (TRBV2, TRBJ2-5)
CASSGTVAAGENQYF

SEQ ID NO: 362001 - protein, 14 aa, Homo sapiens
  CDR3 for alpha chain variable domain of TCR clone 181001 (TRAV12-2, TRAJ17)
CAVLFKAAGNKLTF

SEQ ID NO: 362002 - protein, 14 aa, Homo sapiens
  CDR3 for beta chain variable domain of TCR clone 181001 (TRBV11-3, TRBJ2-3)
CASSLVTTTDTQYF

SEQ ID NO: 362003 - protein, 13 aa, Homo sapiens
  CDR3 for alpha chain variable domain of TCR clone 181002 (TRAV30, TRAJ29)
CGTEDSGNTPLVF

SEQ ID NO: 362004 - protein, 16 aa, Homo sapiens
  CDR3 for beta chain variable domain of TCR clone 181002 (TRBV19, TRBJ2-1)
CASSKAGPSSYNEQFF

SEQ ID NO: 362005 - protein, 14 aa, Homo sapiens
  CDR3 for alpha chain variable domain of TCR clone 181003 (TRAV16, TRAJ15)
CALSGPQAGTALIF

SEQ ID NO: 362006 - protein, 17 aa, Homo sapiens
  CDR3 for beta chain variable domain of TCR clone 181003 (TRBV7-8, TRBJ2-6)
CASSAETGGAGANVLTF

SEQ ID NO: 362007 - protein, 15 aa, Homo sapiens
  CDR3 for alpha chain variable domain of TCR clone 181004 (TRAV17, TRAJ40)
CASKYIFVTGTRLKV

SEQ ID NO: 362008 - protein, 17 aa, Homo sapiens
  CDR3 for beta chain variable domain of TCR clone 181004 (TRBV11-2, TRBJ2-4)
CASSFLALGGAGDIQYF

SEQ ID NO: 362009 - protein, 15 aa, Homo sapiens
  CDR3 for alpha chain variable domain of TCR clone 181005 (TRAV13-1, TRAJ5)
CAVYIWDTGRRALTF

SEQ ID NO: 362010 - protein, 16 aa, Homo sapiens
  CDR3 for beta chain variable domain of TCR clone 181005 (TRBV12-4, TRBJ2-1)
CASTEQGMDRSNEQFF

SEQ ID NO: 362011 - protein, 13 aa, Homo sapiens
  CDR3 for alpha chain variable domain of TCR clone 181006 (TRAV1-1, TRAJ7)
RAVRDHGNNRLAF

SEQ ID NO: 362012 - protein, 20 aa, Homo sapiens
  CDR3 for beta chain variable domain of TCR clone 181006 (TRBV28, TRBJ2-3)
CASSLGVRSTSGRSTDTQYF

SEQ ID NO: 362013 - protein, 13 aa, Homo sapiens
  CDR3 for alpha chain variable domain of TCR clone 181007 (TRAV38-1, TRAJ49)
CAFMKYTGNQFYF

SEQ ID NO: 362014 - protein, 15 aa, Homo sapiens
  CDR3 for beta chain variable domain of TCR clone 181007 (TRBV5-1, TRBJ1-1)
FAPAASYGGGGEAFF

SEQ ID NO: 362015 - protein, 13 aa, Homo sapiens
  CDR3 for alpha chain variable domain of TCR clone 181008 (TRAV35, TRAJ40)
CAGQLSGTYKYIF

SEQ ID NO: 362016 - protein, 14 aa, Homo sapiens
  CDR3 for beta chain variable domain of TCR clone 181008 (TRBV3-1, TRBJ2-5)
CASSLQLAGETQYL

SEQ ID NO: 362017 - protein, 17 aa, Homo sapiens
  CDR3 for alpha chain variable domain of TCR clone 181009 (TRAV13-1, TRAJ52)
CAASAGAGGTSYGKLTF

SEQ ID NO: 362018 - protein, 15 aa, Homo sapiens
  CDR3 for beta chain variable domain of TCR clone 181009 (TRBV2, TRBJ2-1)
CASSEPAGSYNEQFF

SEQ ID NO: 362019 - protein, 17 aa, Homo sapiens
  CDR3 for alpha chain variable domain of TCR clone 181010 (TRAV13-1, TRAJ31)
CAPRDRLMFGDGTQLVV

SEQ ID NO: 362020 - protein, 12 aa, Homo sapiens
  CDR3 for beta chain variable domain of TCR clone 181010 (TRBV7-9, TRBJ2-7)
CASSLEGYELYF

SEQ ID NO: 362021 - protein, 12 aa, Homo sapiens
  CDR3 for alpha chain variable domain of TCR clone 181011 (TRAV22, TRAJ36)
CAVGTGANNLFF

SEQ ID NO: 362022 - protein, 15 aa, Homo sapiens
  CDR3 for beta chain variable domain of TCR clone 181011 (TRBV18, TRBJ2-7)
CASSPLQGRTYEQYF

SEQ ID NO: 362023 - protein, 12 aa, Homo sapiens
  CDR3 for alpha chain variable domain of TCR clone 181012 (TRAV12-3, TRAJ17)
CAMTLTGNKLTF

SEQ ID NO: 362024 - protein, 15 aa, Homo sapiens
  CDR3 for beta chain variable domain of TCR clone 181012 (TRBV19, TRBJ2-3)
CASSIVRGEGREQFF

SEQ ID NO: 362025 - protein, 13 aa, Homo sapiens
  CDR3 for alpha chain variable domain of TCR clone 181013 (TRAV1-2, TRAJ12)
CAVSMDSSYKLIF

SEQ ID NO: 362026 - protein, 15 aa, Homo sapiens
  CDR3 for beta chain variable domain of TCR clone 181013 (TRBV27, TRBJ2-5)
CASSLIPSGGETQYS

SEQ ID NO: 362027 - protein, 14 aa, Homo sapiens
  CDR3 for alpha chain variable domain of TCR clone 181014 (TRAV29/DV5, TRAJ36)
CAARRKTGANNLFF

SEQ ID NO: 362028 - protein, 13 aa, Homo sapiens
  CDR3 for beta chain variable domain of TCR clone 181014 (TRBV7-9, TRBJ2-5)
CASLSPGQETQYF

SEQ ID NO: 362029 - protein, 14 aa, Homo sapiens
  CDR3 for alpha chain variable domain of TCR clone 181015 (TRAV8-4, TRAJ22)
CAVSPQGSARQLTF

SEQ ID NO: 362030 - protein, 15 aa, Homo sapiens
  CDR3 for beta chain variable domain of TCR clone 181015 (TRBV19, TRBJ2-2)
CASRGPGSDTGELFF

SEQ ID NO: 362031 - protein, 13 aa, Homo sapiens
  CDR3 for alpha chain variable domain of TCR clone 181016 (TRAV3, TRAJ27)
CAVSPLGAGKSTV

SEQ ID NO: 362032 - protein, 13 aa, Homo sapiens
  CDR3 for beta chain variable domain of TCR clone 181016 (TRBV7-9, TRBJ2-3)
CASSPGSTDTQYF

SEQ ID NO: 362033 - protein, 14 aa, Homo sapiens
  CDR3 for alpha chain variable domain of TCR clone 181017 (TRAV38-1, TRAJ40)
CALRTTSGTYKYIF

SEQ ID NO: 362034 - protein, 14 aa, Homo sapiens
  CDR3 for beta chain variable domain of TCR clone 181017 (TRBV19, TRBJ2-1)
CASPTFVLSGEQFF

SEQ ID NO: 362035 - protein, 11 aa, Homo sapiens
  CDR3 for alpha chain variable domain of TCR clone 181018 (TRAV2, TRAJ13)
CPSGGYQKVTF

SEQ ID NO: 362036 - protein, 12 aa, Homo sapiens
  CDR3 for beta chain variable domain of TCR clone 181018 (TRBV19, TRBJ1-4)
CASKDWPGGLFF

SEQ ID NO: 362037 - protein, 15 aa, Homo sapiens
  CDR3 for alpha chain variable domain of TCR clone 181019 (TRAV8-4, TRAJ9)
CAVSDLEGGGFKTIF

SEQ ID NO: 362038 - protein, 13 aa, Homo sapiens
  CDR3 for beta chain variable domain of TCR clone 181019 (TRBV7-9, TRBJ1-2)
CASSLKQNYGYTF

SEQ ID NO: 362039 - protein, 13 aa, Homo sapiens
  CDR3 for alpha chain variable domain of TCR clone 181020 (TRAV8-3, TRAJ36)
CAVGATGANNLFF

SEQ ID NO: 362040 - protein, 12 aa, Homo sapiens
  CDR3 for beta chain variable domain of TCR clone 181020 (TRBV18, TRBJ1-1)
CASSPGGTEAFF

SEQ ID NO: 362041 - protein, 12 aa, Homo sapiens
  CDR3 for alpha chain variable domain of TCR clone 181021 (TRAV8-3, TRAJ26)
CAGANYGQHFVF

SEQ ID NO: 362042 - protein, 17 aa, Homo sapiens
  CDR3 for beta chain variable domain of TCR clone 181021 (TRBV7-8, TRBJ2-6)
CASSAGTGGAGANVLTF

SEQ ID NO: 362043 - protein, 14 aa, Homo sapiens
  CDR3 for alpha chain variable domain of TCR clone 181022 (TRAV8-4, TRAJ17)
CCGSIKAAGNKLTF

SEQ ID NO: 362044 - protein, 13 aa, Homo sapiens
  CDR3 for beta chain variable domain of TCR clone 181022 (TRBV11-2, TRBJ2-5)
CASSSTGEETQYF

SEQ ID NO: 362045 - protein, 12 aa, Homo sapiens
  CDR3 for alpha chain variable domain of TCR clone 181023 (TRAV13-1, TRAJ42)
VTYGGSQGNLIF

SEQ ID NO: 362046 - protein, 12 aa, Homo sapiens
  CDR3 for beta chain variable domain of TCR clone 181023 (TRBV7-9, TRBJ2-7)
CASSLEGYEQYF

SEQ ID NO: 362047 - protein, 13 aa, Homo sapiens
  CDR3 for alpha chain variable domain of TCR clone 181024 (TRAV20, TRAJ42)
CAVQGGSQGNLIF

SEQ ID NO: 362048 - protein, 16 aa, Homo sapiens
  CDR3 for beta chain variable domain of TCR clone 181024 (TRBV19, TRBJ2-1)
CASSKAGPSSYNEQFF

SEQ ID NO: 362049 - protein, 16 aa, Homo sapiens
  CDR3 for alpha chain variable domain of TCR clone 181025 (TRAV39, TRAJ17)
CAVDIQRSTAGNKLTF

SEQ ID NO: 362050 - protein, 16 aa, Homo sapiens
  CDR3 for beta chain variable domain of TCR clone 181025 (TRBV18, TRBJ2-1)
CASSPTGASGGNEQFF

SEQ ID NO: 362051 - protein, 13 aa, Homo sapiens
  CDR3 for alpha chain variable domain of TCR clone 181026 (TRAV13-2, TRAJ48)
CAEMDFGNEKLTF

SEQ ID NO: 362052 - protein, 13 aa, Homo sapiens
  CDR3 for beta chain variable domain of TCR clone 181026 (TRBV7-2, TRBJ2-2)
CASSLAVTGELFF

SEQ ID NO: 362053 - protein, 15 aa, Homo sapiens
  CDR3 for alpha chain variable domain of TCR clone 181027 (TRAV3, TRAJ29)
CAVRAWNSGNTPLVF

SEQ ID NO: 362054 - protein, 14 aa, Homo sapiens
  CDR3 for beta chain variable domain of TCR clone 181027 (TRBV6-1, TRBJ2-2)
CASTWQGNTGELFF

SEQ ID NO: 362055 - protein, 15 aa, Homo sapiens
  CDR3 for alpha chain variable domain of TCR clone 181028 (TRAV8-3, TRAJ15)
CAVGAPNKAGTALIF

SEQ ID NO: 362056 - protein, 14 aa, Homo sapiens
  CDR3 for beta chain variable domain of TCR clone 181028 (TRBV20-1, TRBJ2-1)
CSANDEASYNEQFF

SEQ ID NO: 362057 - protein, 20 aa, Homo sapiens
  CDR3 for alpha chain variable domain of TCR clone 181029 (TRAV26-2, TRAJ29)
CILRDRSSTQRNSGNTPFVF

SEQ ID NO: 362058 - protein, 18 aa, Homo sapiens
  CDR3 for beta chain variable domain of TCR clone 181029 (TRBV12-4, TRBJ2-2)
CASSLVAGTRGRTGELFF

SEQ ID NO: 362059 - protein, 13 aa, Homo sapiens
  CDR3 for alpha chain variable domain of TCR clone 181030 (TRAV12-1, TRAJ6)
CVVFPGGSYIPTF

SEQ ID NO: 362060 - protein, 14 aa, Homo sapiens
  CDR3 for beta chain variable domain of TCR clone 181030 (TRBV20-1, TRBJ1-3)
CSASPTGAGNTIHF

SEQ ID NO: 362061 - protein, 14 aa, Homo sapiens
  CDR3 for alpha chain variable domain of TCR clone 181031 (TRAV9-2, TRAJ39)
CALYIYNTGNMLTF

SEQ ID NO: 362062 - protein, 15 aa, Homo sapiens
  CDR3 for beta chain variable domain of TCR clone 181031 (TRBV27, TRBJ1-6)
CASSFDRGLGSPLHF

SEQ ID NO: 362063 - protein, 20 aa, Homo sapiens
  CDR3 for alpha chain variable domain of TCR clone 181032 (TRAV12-3, TRAJ37)
CALVRVWQHRQTNLWARDNF

SEQ ID NO: 362064 - protein, 13 aa, Homo sapiens
  CDR3 for beta chain variable domain of TCR clone 181032 (TRBV25-1, TRBJ1-2)
CASSEAGASGYTF

SEQ ID NO: 362065 - protein, 11 aa, Homo sapiens
  CDR3 for alpha chain variable domain of TCR clone 181033 (TRAV12-2, TRAJ29)
CAVTLRSPLVF

SEQ ID NO: 362066 - protein, 16 aa, Homo sapiens
  CDR3 for beta chain variable domain of TCR clone 181033 (TRBV5-1, TRBJ2-2)
CASSLGGTGCTGELFF

SEQ ID NO: 362067 - protein, 14 aa, Homo sapiens
  CDR3 for alpha chain variable domain of TCR clone 181034 (TRAV17, TRAJ22)
CATSLSGSARQLTF

SEQ ID NO: 362068 - protein, 15 aa, Homo sapiens
  CDR3 for beta chain variable domain of TCR clone 181034 (TRBV4-1, TRBJ2-5)
CASRQWDLYQETQYF

SEQ ID NO: 362069 - protein, 14 aa, Homo sapiens
  CDR3 for alpha chain variable domain of TCR clone 181035 (TRAV17, TRAJ57)
CATDSQGGSEKLVF

SEQ ID NO: 362070 - protein, 15 aa, Homo sapiens
  CDR3 for beta chain variable domain of TCR clone 181035 (TRBV5-1, TRBJ2-7)
CASSLDLTSSYEQYF

SEQ ID NO: 362071 - protein, 15 aa, Homo sapiens
  CDR3 for alpha chain variable domain of TCR clone 181036 (TRAV26-2, TRAJ26)
CILRDFDNYGQNFVF

SEQ ID NO: 362072 - protein, 14 aa, Homo sapiens
  CDR3 for beta chain variable domain of TCR clone 181036 (TRBV29-1, TRBJ2-5)
CSCWTPSAGETQYF

SEQ ID NO: 362073 - protein, 21 aa, Homo sapiens
  CDR3 for alpha chain variable domain of TCR clone 181037 (TRAV25, TRAJ7)
TATQTTDVGTYFCPGNNRLAF

SEQ ID NO: 362074 - protein, 13 aa, Homo sapiens
  CDR3 for beta chain variable domain of TCR clone 181037 (TRBV4-1, TRBJ2-2)
CASSQENTGELFF

SEQ ID NO: 362075 - protein, 11 aa, Homo sapiens
  CDR3 for alpha chain variable domain of TCR clone 181038 (TRAV13-2, TRAJ20)
CADSNDYKLSF

SEQ ID NO: 362076 - protein, 12 aa, Homo sapiens
  CDR3 for beta chain variable domain of TCR clone 181038 (TRBV11-2, TRBJ2-2)
CGSSLGGGELFF

SEQ ID NO: 362077 - protein, 16 aa, Homo sapiens
  CDR3 for alpha chain variable domain of TCR clone 181039 (TRAV26-1, TRAJ37)
CIVRGDGSGNTGQPIF

SEQ ID NO: 362078 - protein, 17 aa, Homo sapiens
  CDR3 for beta chain variable domain of TCR clone 181039 (TRBV4-1, TRBJ2-7)
CASSRDPLGVRGGEQYF

SEQ ID NO: 362079 - protein, 13 aa, Homo sapiens
  CDR3 for alpha chain variable domain of TCR clone 181040 (TRAV13-1, TRAJ39)
CSKNSNAGNMLTF

SEQ ID NO: 362080 - protein, 13 aa, Homo sapiens
  CDR3 for beta chain variable domain of TCR clone 181040 (TRBV20-1, TRBJ1-1)
CSARGGGNTEAFF

SEQ ID NO: 362081 - protein, 15 aa, Homo sapiens
  CDR3 for alpha chain variable domain of TCR clone 181041 (TRAV13-1, TRAJ17)
CAASIERAAGNKLTF

SEQ ID NO: 362082 - protein, 13 aa, Homo sapiens
  CDR3 for beta chain variable domain of TCR clone 181041 (TRBV4-2, TRBJ1-1)
CASSQAGNTEAFF

SEQ ID NO: 362083 - protein, 16 aa, Homo sapiens
  CDR3 for alpha chain variable domain of TCR clone 181042 (TRAV3, TRAJ18)
CAVRDGRGPTRGRRYF

SEQ ID NO: 362084 - protein, 15 aa, Homo sapiens
  CDR3 for beta chain variable domain of TCR clone 181042 (TRBV7-9, TRBJ1-6)
CASSSPGRGNSPLHF

SEQ ID NO: 362085 - protein, 10 aa, Homo sapiens
  CDR3 for alpha chain variable domain of TCR clone 181043 (TRAV4, TRAJ30)
CGWGDDKIIF

SEQ ID NO: 362086 - protein, 14 aa, Homo sapiens
  CDR3 for beta chain variable domain of TCR clone 181043 (TRBV12-4, TRBJ1-1)
CASSFTITNTEAFF

SEQ ID NO: 362087 - protein, 16 aa, Homo sapiens
  CDR3 for alpha chain variable domain of TCR clone 181044 (TRAV3, TRAJ22)
CAVRDMGSGSARQLTF

SEQ ID NO: 362088 - protein, 13 aa, Homo sapiens
  CDR3 for beta chain variable domain of TCR clone 181044 (TRBV10-3, TRBJ2-7)
CASKLAVNYEQYF

SEQ ID NO: 362089 - protein, 12 aa, Homo sapiens
  CDR3 for alpha chain variable domain of TCR clone 181045 (TRAV13-2, TRAJ8)
CAPWLGFQKLVF

SEQ ID NO: 362090 - protein, 13 aa, Homo sapiens
  CDR3 for beta chain variable domain of TCR clone 181045 (TRBV20-1, TRBJ1-2)
CSARGQTLEGYTF

SEQ ID NO: 362091 - protein, 14 aa, Homo sapiens
  CDR3 for alpha chain variable domain of TCR clone 181046 (TRAV12-2, TRAJ43)
CVVNGRSNNNDMRF

SEQ ID NO: 362092 - protein, 13 aa, Homo sapiens
  CDR3 for beta chain variable domain of TCR clone 181046 (TRBV27, TRBJ1-1)
CASSLSIGAEAFF

SEQ ID NO: 362093 - protein, 17 aa, Homo sapiens
  CDR3 for alpha chain variable domain of TCR clone 181047 (TRAV3, TRAJ38)
CAVRDCLNAGNNRKLIW

SEQ ID NO: 362094 - protein, 13 aa, Homo sapiens
  CDR3 for beta chain variable domain of TCR clone 181047 (TRBV7-9, TRBJ1-1)
CASSLVSASEAFF

SEQ ID NO: 362095 - protein, 14 aa, Homo sapiens
  CDR3 for alpha chain variable domain of TCR clone 181048 (TRAV21, TRAJ35)
CAVMPIGFGNVLHC

SEQ ID NO: 362096 - protein, 13 aa, Homo sapiens
  CDR3 for beta chain variable domain of TCR clone 181048 (TRBV4-2, TRBJ1-1)
CASSQAGNTEAFF

SEQ ID NO: 362097 - protein, 17 aa, Homo sapiens
  CDR3 for alpha chain variable domain of TCR clone 181049 (TRAV3, TRAJ42)
CAVRDRDYVGSQGNLIF

SEQ ID NO: 362098 - protein, 17 aa, Homo sapiens
  CDR3 for beta chain variable domain of TCR clone 181049 (TRBV6-6, TRBJ2-7)
CASSYSYGVPTSSTSGR

SEQ ID NO: 362099 - protein, 13 aa, Homo sapiens
  CDR3 for alpha chain variable domain of TCR clone 181050 (TRAV13-2, TRAJ48)
CAEMDFGNEKLTF

SEQ ID NO: 362100 - protein, 12 aa, Homo sapiens
  CDR3 for beta chain variable domain of TCR clone 181050 (TRBV19, TRBJ2-7)
CASTSGTYEQYF

SEQ ID NO: 362101 - protein, 14 aa, Homo sapiens
  CDR3 for alpha chain variable domain of TCR clone 181051 (TRAV13-1, TRAJ39)
CAASEGNAGNMLTF

SEQ ID NO: 362102 - protein, 13 aa, Homo sapiens
  CDR3 for beta chain variable domain of TCR clone 181051 (TRBV19, TRBJ2-7)
CASSPRQSYEQYF

SEQ ID NO: 362103 - protein, 13 aa, Homo sapiens
  CDR3 for alpha chain variable domain of TCR clone 181052 (TRAV2, TRAJ29)
CAAQNSGNTPLVF

SEQ ID NO: 362104 - protein, 14 aa, Homo sapiens
  CDR3 for beta chain variable domain of TCR clone 181052 (TRBV7-9, TRBJ2-3)
CASSPSGRAGTQYF

SEQ ID NO: 362105 - protein, 13 aa, Homo sapiens
  CDR3 for alpha chain variable domain of TCR clone 181053 (TRAV13-1, TRAJ39)
CAASIWAVNMLTF

SEQ ID NO: 362106 - protein, 15 aa, Homo sapiens
  CDR3 for beta chain variable domain of TCR clone 181053 (TRBV7-9, TRBJ1-1)
CASSLLEQGGTEAFF

SEQ ID NO: 362107 - protein, 11 aa, Homo sapiens
  CDR3 for alpha chain variable domain of TCR clone 181054 (TRAV21, TRAJ31)
CAVRNNARLMF

SEQ ID NO: 362108 - protein, 16 aa, Homo sapiens
  CDR3 for beta chain variable domain of TCR clone 181054 (TRBV28, TRBJ1-5)
CASSFRGGYSNQPQHF

SEQ ID NO: 362109 - protein, 12 aa, Homo sapiens
  CDR3 for alpha chain variable domain of TCR clone 181055 (TRAV8-3, TRAJ20)
CAVGANDYKLSF

SEQ ID NO: 362110 - protein, 17 aa, Homo sapiens
  CDR3 for beta chain variable domain of TCR clone 181055 (TRBV19, TRBJ2-2)
CASSIEGAGPNTGELFF

SEQ ID NO: 362111 - protein, 14 aa, Homo sapiens
  CDR3 for alpha chain variable domain of TCR clone 181056 (TRAV16, TRAJ44)
CALSTTGTASKLTF

SEQ ID NO: 362112 - protein, 13 aa, Homo sapiens
  CDR3 for beta chain variable domain of TCR clone 181056 (TRBV12-4, TRBJ1-2)
CASSLRQGKGYTF

SEQ ID NO: 362113 - protein, 13 aa, Homo sapiens
  CDR3 for alpha chain variable domain of TCR clone 181057 (TRAV13-1, TRAJ39)
CSKYSNAGNMLTF

SEQ ID NO: 362114 - protein, 16 aa, Homo sapiens
  CDR3 for beta chain variable domain of TCR clone 181057 (TRBV7-2, TRBJ2-3)
CASSLVAIYSTDTQYF

SEQ ID NO: 362115 - protein, 11 aa, Homo sapiens
  CDR3 for alpha chain variable domain of TCR clone 181058 (TRAV29/DV5, TRAJ49)
CAAVPGNQFYF

SEQ ID NO: 362116 - protein, 12 aa, Homo sapiens
  CDR3 for beta chain variable domain of TCR clone 181058 (TRBV29-1, TRBJ2-3)
CSVTGGADTQYF

SEQ ID NO: 362117 - protein, 16 aa, Homo sapiens
  CDR3 for alpha chain variable domain of TCR clone 181059 (TRAV1-2, TRAJ10)
CAVRGVLTGGGNKLTF

SEQ ID NO: 362118 - protein, 12 aa, Homo sapiens
  CDR3 for beta chain variable domain of TCR clone 181059 (TRBV4-2, TRBJ2-2)
CASSHLPGELFF

SEQ ID NO: 362119 - protein, 15 aa, Homo sapiens
  CDR3 for alpha chain variable domain of TCR clone 181060 (TRAV30, TRAJ32)
CGTEILGGATNELIF

SEQ ID NO: 362120 - protein, 13 aa, Homo sapiens
  CDR3 for beta chain variable domain of TCR clone 181060 (TRBV6-3, TRBJ2-7)
CASSFSGGYEQYF

SEQ ID NO: 362121 - protein, 15 aa, Homo sapiens
  CDR3 for alpha chain variable domain of TCR clone 181061 (TRAV41, TRAJ45)
CSASYSGGGADGLTF

SEQ ID NO: 362122 - protein, 14 aa, Homo sapiens
  CDR3 for beta chain variable domain of TCR clone 181061 (TRBV27, TRBJ2-2)
CASRPGVTTGELFF

SEQ ID NO: 362123 - protein, 14 aa, Homo sapiens
  CDR3 for alpha chain variable domain of TCR clone 181062 (TRAV3, TRAJ40)
CAVRDRRGTYKYIF

SEQ ID NO: 362124 - protein, 13 aa, Homo sapiens
  CDR3 for beta chain variable domain of TCR clone 181062 (TRBV7-9, TRBJ1-2)
CASSLKQNYGYTF

SEQ ID NO: 362125 - protein, 14 aa, Homo sapiens
  CDR3 for alpha chain variable domain of TCR clone 181063 (TRAV26-1, TRAJ49)
CIVRHSNTGNQFYF

SEQ ID NO: 362126 - protein, 15 aa, Homo sapiens
  CDR3 for beta chain variable domain of TCR clone 181063 (TRBV19, TRBJ1-1)
CASMGFRDVNTEAFF

SEQ ID NO: 362127 - protein, 15 aa, Homo sapiens
  CDR3 for alpha chain variable domain of TCR clone 181064 (TRAV23/DV6, TRAJ18)
CSARYRGPTLGRLYF

SEQ ID NO: 362128 - protein, 13 aa, Homo sapiens
  CDR3 for beta chain variable domain of TCR clone 181064 (TRBV7-2, TRBJ2-7)
CASSSPSGSEQYF

SEQ ID NO: 362129 - protein, 15 aa, Homo sapiens
  CDR3 for alpha chain variable domain of TCR clone 181065 (TRAV12-2, TRAJ43)
CAFDMRFGAGTRLTV

SEQ ID NO: 362130 - protein, 17 aa, Homo sapiens
  CDR3 for beta chain variable domain of TCR clone 181065 (TRBV13, TRBJ2-3)
CASSLCRVAGGRNTQYF

SEQ ID NO: 362131 - protein, 14 aa, Homo sapiens
  CDR3 for alpha chain variable domain of TCR clone 181066 (TRAV23/DV6, TRAJ8)
CAASKATGFQKLIF

SEQ ID NO: 362132 - protein, 15 aa, Homo sapiens
  CDR3 for beta chain variable domain of TCR clone 181066 (TRBV28, TRBJ2-3)
CASSPDRQGTNTQYF

SEQ ID NO: 362133 - protein, 14 aa, Homo sapiens
  CDR3 for alpha chain variable domain of TCR clone 181067 (TRAV13-1, TRAJ35)
CAASKGGFGNVLHC

SEQ ID NO: 362134 - protein, 14 aa, Homo sapiens
  CDR3 for beta chain variable domain of TCR clone 181067 (TRBV7-8, TRBJ2-3)
CASSFPDRQDTQYF

SEQ ID NO: 362135 - protein, 15 aa, Homo sapiens
  CDR3 for alpha chain variable domain of TCR clone 181068 (TRAV16, TRAJ17)
CALSGNKAAGNKLTF

SEQ ID NO: 362136 - protein, 16 aa, Homo sapiens
  CDR3 for beta chain variable domain of TCR clone 181068 (TRBV7-6, TRBJ1-6)
CASSSLPAGEYSPHHF

SEQ ID NO: 362137 - protein, 15 aa, Homo sapiens
  CDR3 for alpha chain variable domain of TCR clone 181069 (TRAV20, TRAJ53)
CAVQAIGGSNYKLTF

SEQ ID NO: 362138 - protein, 12 aa, Homo sapiens
  CDR3 for beta chain variable domain of TCR clone 181069 (TRBV7-6, TRBJ2-5)
CASSLSQETQYF

SEQ ID NO: 362139 - protein, 13 aa, Homo sapiens
  CDR3 for alpha chain variable domain of TCR clone 181070 (TRAV3, TRAJ15)
CAVRDQAGTALIF

SEQ ID NO: 362140 - protein, 15 aa, Homo sapiens
  CDR3 for beta chain variable domain of TCR clone 181070 (TRBV10-2, TRBJ2-6)
CASSEQGTGANVLTF

SEQ ID NO: 362141 - protein, 17 aa, Homo sapiens
  CDR3 for alpha chain variable domain of TCR clone 181071 (TRAV13-1, TRAJ28)
CAASPPYSGSGSYQLTF

SEQ ID NO: 362142 - protein, 15 aa, Homo sapiens
  CDR3 for beta chain variable domain of TCR clone 181071 (TRBV6-3, TRBJ2-2)
CASSFLATLTGELFF

SEQ ID NO: 362143 - protein, 12 aa, Homo sapiens
  CDR3 for alpha chain variable domain of TCR clone 181072 (TRAV12-3, TRAJ17)
CAMTLTGNKLTF

SEQ ID NO: 362144 - protein, 12 aa, Homo sapiens
  CDR3 for beta chain variable domain of TCR clone 181072 (TRBV7-9, TRBJ1-1)
CASSPSSTEAFF

SEQ ID NO: 362145 - protein, 13 aa, Homo sapiens
  CDR3 for alpha chain variable domain of TCR clone 181073 (TRAV12-3, TRAJ40)
CAMSDSGTNKYIF

SEQ ID NO: 362146 - protein, 14 aa, Homo sapiens
  CDR3 for beta chain variable domain of TCR clone 181073 (TRBV7-2, TRBJ1-5)
CASSTQGAGQPQHF

SEQ ID NO: 362147 - protein, 12 aa, Homo sapiens
  CDR3 for alpha chain variable domain of TCR clone 181074 (TRAV12-3, TRAJ29)
CAVTSGNTPLVF

SEQ ID NO: 362148 - protein, 13 aa, Homo sapiens
  CDR3 for beta chain variable domain of TCR clone 181074 (TRBV7-7, TRBJ2-2)
CASSLTSAGELFF

SEQ ID NO: 362149 - protein, 14 aa, Homo sapiens
  CDR3 for alpha chain variable domain of TCR clone 181075 (TRAV16, TRAJ33)
CALSAMDSNYQLIW

SEQ ID NO: 362150 - protein, 13 aa, Homo sapiens
  CDR3 for beta chain variable domain of TCR clone 181075 (TRBV24-1, TRBJ2-2)
CATAEPNTGELFF

SEQ ID NO: 362151 - protein, 13 aa, Homo sapiens
  CDR3 for alpha chain variable domain of TCR clone 181076 (TRAV27, TRAJ16)
CAGACSDGQKLLF

SEQ ID NO: 362152 - protein, 14 aa, Homo sapiens
  CDR3 for beta chain variable domain of TCR clone 181076 (TRBV7-7, TRBJ2-2)
CASSRDRSTGELFF

SEQ ID NO: 362153 - protein, 14 aa, Homo sapiens
  CDR3 for alpha chain variable domain of TCR clone 181077 (TRAV21, TRAJ45)
CAVSSGGGADGLTF

SEQ ID NO: 362154 - protein, 15 aa, Homo sapiens
  CDR3 for beta chain variable domain of TCR clone 181077 (TRBV20-1, TRBJ2-7)
CSARDRVSGMDEQYF

SEQ ID NO: 362155 - protein, 15 aa, Homo sapiens
  CDR3 for alpha chain variable domain of TCR clone 181078 (TRAV16, TRAJ53)
CALIDSGGSNYKLTF

SEQ ID NO: 362156 - protein, 15 aa, Homo sapiens
  CDR3 for beta chain variable domain of TCR clone 181078 (TRBV7-2, TRBJ1-2)
CGSSPRAGWNYGYTF

SEQ ID NO: 362157 - protein, 14 aa, Homo sapiens
  CDR3 for alpha chain variable domain of TCR clone 181079 (TRAV1-2, TRAJ16)
CAVNRFSDGKKLLF

SEQ ID NO: 362158 - protein, 14 aa, Homo sapiens
  CDR3 for beta chain variable domain of TCR clone 181079 (TRBV20-1, TRBJ2-7)
CSAKRGRSSYEQYF

SEQ ID NO: 362159 - protein, 15 aa, Homo sapiens
  CDR3 for alpha chain variable domain of TCR clone 181080 (TRAV3, TRAJ22)
CAVRDRGGSARQLTF

SEQ ID NO: 362160 - protein, 12 aa, Homo sapiens
  CDR3 for beta chain variable domain of TCR clone 181080 (TRBV19, TRBJ2-2)
CASSITPWELFF

SEQ ID NO: 362161 - protein, 18 aa, Homo sapiens
  CDR3 for alpha chain variable domain of TCR clone 181081 (TRAV12-3, TRAJ52)
CAMSVGGAGGTSYGKLTL

SEQ ID NO: 362162 - protein, 14 aa, Homo sapiens
  CDR3 for beta chain variable domain of TCR clone 181081 (TRBV7-2, TRBJ2-7)
CASRSQGAAYEQYF

SEQ ID NO: 362163 - protein, 12 aa, Homo sapiens
  CDR3 for alpha chain variable domain of TCR clone 181082 (TRAV16, TRAJ49)
CALLTPVTSSIL

SEQ ID NO: 362164 - protein, 19 aa, Homo sapiens
  CDR3 for beta chain variable domain of TCR clone 181082 (TRBV25-1, TRBJ2-2)
CAILVYRVDRGRKTGELFF

SEQ ID NO: 362165 - protein, 13 aa, Homo sapiens
  CDR3 for alpha chain variable domain of TCR clone 181083 (TRAV22, TRAJ29)
FSVGGSGNTPLVF

SEQ ID NO: 362166 - protein, 13 aa, Homo sapiens
  CDR3 for beta chain variable domain of TCR clone 181083 (TRBV19, TRBJ2-7)
CASRKAGGSEQYF

SEQ ID NO: 362167 - protein, 14 aa, Homo sapiens
  CDR3 for alpha chain variable domain of TCR clone 181084 (TRAV12-3, TRAJ10)
SHLPLTGGGNKLTF

SEQ ID NO: 362168 - protein, 14 aa, Homo sapiens
  CDR3 for beta chain variable domain of TCR clone 181084 (TRBV7-3, TRBJ2-3)
CASSPSARTDTQYF

SEQ ID NO: 362169 - protein, 16 aa, Homo sapiens
  CDR3 for alpha chain variable domain of TCR clone 181085 (TRAV3, TRAJ10)
CAVRDMRAGGGNKLTL

SEQ ID NO: 362170 - protein, 14 aa, Homo sapiens
  CDR3 for beta chain variable domain of TCR clone 181085 (TRBV11-2, TRBJ2-7)
CASSSTGEGYEQYF

SEQ ID NO: 362171 - protein, 14 aa, Homo sapiens
  CDR3 for alpha chain variable domain of TCR clone 181086 (TRAV12-1, TRAJ12)
CVVTRMDSSYKLIF

SEQ ID NO: 362172 - protein, 15 aa, Homo sapiens
  CDR3 for beta chain variable domain of TCR clone 181086 (TRBV20-1, TRBJ2-7)
CSASDRVSGMDEQYF

SEQ ID NO: 362173 - protein, 12 aa, Homo sapiens
  CDR3 for alpha chain variable domain of TCR clone 181087 (TRAV2, TRAJ34)
CAVERNTDKLIL

SEQ ID NO: 362174 - protein, 15 aa, Homo sapiens
  CDR3 for beta chain variable domain of TCR clone 181087 (TRBV7-2, TRBJ2-5)
CASSFLRGGEETQYF

SEQ ID NO: 362175 - protein, 13 aa, Homo sapiens
  CDR3 for alpha chain variable domain of TCR clone 181088 (TRAV3, TRAJ21)
CAVREPDFNKFYF

SEQ ID NO: 362176 - protein, 13 aa, Homo sapiens
  CDR3 for beta chain variable domain of TCR clone 181088 (TRBV9, TRBJ2-1)
CASSPYGGNEQFF

SEQ ID NO: 362177 - protein, 14 aa, Homo sapiens
  CDR3 for alpha chain variable domain of TCR clone 181089 (TRAV29/DV5, TRAJ32)
CAAAYGGATNKLIF

SEQ ID NO: 362178 - protein, 15 aa, Homo sapiens
  CDR3 for beta chain variable domain of TCR clone 181089 (TRBV27, TRBJ2-7)
CASSTAGTRSYEQYF

SEQ ID NO: 362179 - protein, 18 aa, Homo sapiens
  CDR3 for alpha chain variable domain of TCR clone 181090 (TRAV21, TRAJ52)
CAVSPSPAGGTSYGKLTF

SEQ ID NO: 362180 - protein, 17 aa, Homo sapiens
  CDR3 for beta chain variable domain of TCR clone 181090 (TRBV13, TRBJ2-3)
CASSLSGVAGGRNTQYF

SEQ ID NO: 362181 - protein, 13 aa, Homo sapiens
  CDR3 for alpha chain variable domain of TCR clone 181091 (TRAV17, TRAJ5)
CAPMDTGSRALTF

SEQ ID NO: 362182 - protein, 11 aa, Homo sapiens
  CDR3 for beta chain variable domain of TCR clone 181091 (TRBV19, TRBJ1-1)
CASSIGSEAFF

SEQ ID NO: 362183 - protein, 17 aa, Homo sapiens
  CDR3 for alpha chain variable domain of TCR clone 181092 (TRAV3, TRAJ6)
CAVRDGPRAGGSYILTF

SEQ ID NO: 362184 - protein, 20 aa, Homo sapiens
  CDR3 for beta chain variable domain of TCR clone 181092 (TRBV28, TRBJ2-1)
CASTPTGRSPGLAGGNEQFF

SEQ ID NO: 362185 - protein, 14 aa, Homo sapiens
  CDR3 for alpha chain variable domain of TCR clone 181093 (TRAV13-1, TRAJ40)
CAASMTSGTYKYIF

SEQ ID NO: 362186 - protein, 18 aa, Homo sapiens
  CDR3 for beta chain variable domain of TCR clone 181093 (TRBV12-4, TRBJ2-2)
CASSLVAGTRGRTGELFF

SEQ ID NO: 362187 - protein, 14 aa, Homo sapiens
  CDR3 for alpha chain variable domain of TCR clone 181094 (TRAV1-2, TRAJ16)
CAVNRFSDGQKLLF

SEQ ID NO: 362188 - protein, 17 aa, Homo sapiens
  CDR3 for beta chain variable domain of TCR clone 181094 (TRBV7-3, TRBJ2-3)
CASSLMKRMRGADAQYF

SEQ ID NO: 362189 - protein, 13 aa, Homo sapiens
  CDR3 for alpha chain variable domain of TCR clone 181095 (TRAV2, TRAJ40)
CAVVTSGTYKYIF

SEQ ID NO: 362190 - protein, 15 aa, Homo sapiens
  CDR3 for beta chain variable domain of TCR clone 181095 (TRBV11-3, TRBJ2-3)
GASLKDGREGDTQYF

SEQ ID NO: 362191 - protein, 15 aa, Homo sapiens
  CDR3 for alpha chain variable domain of TCR clone 181096 (TRAV27, TRAJ22)
CAGAHLKGSARQLTF

SEQ ID NO: 362192 - protein, 16 aa, Homo sapiens
  CDR3 for beta chain variable domain of TCR clone 181096 (TRBV19, TRBJ2-2)
CASTLGASGAPGELFF

SEQ ID NO: 362193 - protein, 19 aa, Homo sapiens
  CDR3 for alpha chain variable domain of TCR clone 181097 (TRAV26-1, TRAJ28)
FIVRVAHAYSGAVSYQLTF

SEQ ID NO: 362194 - protein, 17 aa, Homo sapiens
  CDR3 for beta chain variable domain of TCR clone 181097 (TRBV4-1, TRBJ1-4)
CASSQEGPRGVEEKLFF

SEQ ID NO: 362195 - protein, 14 aa, Homo sapiens
  CDR3 for alpha chain variable domain of TCR clone 181098 (TRAV1-2, TRAJ8)
CAVSEDTGFQKLVF

SEQ ID NO: 362196 - protein, 16 aa, Homo sapiens
  CDR3 for beta chain variable domain of TCR clone 181098 (TRBV29-1, TRBJ2-7)
CSVEVVGTSGSYEQYF

SEQ ID NO: 362197 - protein, 14 aa, Homo sapiens
  CDR3 for alpha chain variable domain of TCR clone 181099 (TRAV2, TRAJ12)
CAVDAMESSYKLIF

SEQ ID NO: 362198 - protein, 13 aa, Homo sapiens
  CDR3 for beta chain variable domain of TCR clone 181099 (TRBV19, TRBJ2-1)
CASKVGAGGEQFF

SEQ ID NO: 362199 - protein, 13 aa, Homo sapiens
  CDR3 for alpha chain variable domain of TCR clone 181100 (TRAV3, TRAJ3)
CAVRALGASKIIF

SEQ ID NO: 362200 - protein, 18 aa, Homo sapiens
  CDR3 for beta chain variable domain of TCR clone 181100 (TRBV12-4, TRBJ2-5)
CASSPSGGRDPVLRSRHA

SEQ ID NO: 362201 - protein, 15 aa, Homo sapiens
  CDR3 for alpha chain variable domain of TCR clone 181101 (TRAV10, TRAJ34)
CVVSGKHRQAHLWNW

SEQ ID NO: 362202 - protein, 14 aa, Homo sapiens
  CDR3 for beta chain variable domain of TCR clone 181101 (TRBV19, TRBJ2-1)
CASPTFVSSGEQFF

SEQ ID NO: 362203 - protein, 10 aa, Homo sapiens
  CDR3 for alpha chain variable domain of TCR clone 181102 (TRAV38-2/DV8, TRAJ40)
CASGTCKYIF

SEQ ID NO: 362204 - protein, 14 aa, Homo sapiens
  CDR3 for beta chain variable domain of TCR clone 181102 (TRBV7-9, TRBJ2-1)
CASSPRDSLYEQFF

SEQ ID NO: 362205 - protein, 12 aa, Homo sapiens
  CDR3 for alpha chain variable domain of TCR clone 181103 (TRAV2, TRAJ3)
CAVRSSASKIIF

SEQ ID NO: 362206 - protein, 12 aa, Homo sapiens
  CDR3 for beta chain variable domain of TCR clone 181103 (TRBV7-8, TRBJ2-7)
CASSLGDREQYF

SEQ ID NO: 362207 - protein, 16 aa, Homo sapiens
  CDR3 for alpha chain variable domain of TCR clone 181104 (TRAV21, TRAJ37)
CAVRTAGSSNTGKLIF

SEQ ID NO: 362208 - protein, 13 aa, Homo sapiens
  CDR3 for beta chain variable domain of TCR clone 181104 (TRBV7-9, TRBJ2-3)
CASSPGSTDTQYF

SEQ ID NO: 362209 - protein, 14 aa, Homo sapiens
  CDR3 for alpha chain variable domain of TCR clone 181105 (TRAV12-2, TRAJ24)
CAVTPADSGGKWQF

SEQ ID NO: 362210 - protein, 12 aa, Homo sapiens
  CDR3 for beta chain variable domain of TCR clone 181105 (TRBV3-1, TRBJ2-1)
CASSQGSSGQFF

SEQ ID NO: 362211 - protein, 16 aa, Homo sapiens
  CDR3 for alpha chain variable domain of TCR clone 181106 (TRAV38-2/DV8, TRAJ10)
CAYTNILTGGGNKLTF

SEQ ID NO: 362212 - protein, 12 aa, Homo sapiens
  CDR3 for beta chain variable domain of TCR clone 181106 (TRBV11-2, TRBJ2-2)
CASSLPTGELFF

SEQ ID NO: 362213 - protein, 14 aa, Homo sapiens
  CDR3 for alpha chain variable domain of TCR clone 181107 (TRAV13-1, TRAJ10)
CAAKEPGGGNKLTF

SEQ ID NO: 362214 - protein, 11 aa, Homo sapiens
  CDR3 for beta chain variable domain of TCR clone 181107 (TRBV29-1, TRBJ1-1)
CSVEVGTRTFF

SEQ ID NO: 362215 - protein, 15 aa, Homo sapiens
  CDR3 for alpha chain variable domain of TCR clone 181108 (TRAV12-1, TRAJ42)
CVVLNYGGSQGNLIF

SEQ ID NO: 362216 - protein, 15 aa, Homo sapiens
  CDR3 for beta chain variable domain of TCR clone 181108 (TRBV4-3, TRBJ2-3)
CASSPSLLSADTQYF

SEQ ID NO: 362217 - protein, 14 aa, Homo sapiens
  CDR3 for alpha chain variable domain of TCR clone 181109 (TRAV20, TRAJ56)
CAVQFGGANSKLTF

SEQ ID NO: 362218 - protein, 14 aa, Homo sapiens
  CDR3 for beta chain variable domain of TCR clone 181109 (TRBV7-2, TRBJ1-1)
CASSFVTGTSEASF

SEQ ID NO: 362219 - protein, 14 aa, Homo sapiens
  CDR3 for alpha chain variable domain of TCR clone 181110 (TRAV3, TRAJ17)
CAVRDAAAGNKLTF

SEQ ID NO: 362220 - protein, 13 aa, Homo sapiens
  CDR3 for beta chain variable domain of TCR clone 181110 (TRBV6-3, TRBJ2-7)
CASSTDLAGEQYF

SEQ ID NO: 362221 - protein, 12 aa, Homo sapiens
  CDR3 for alpha chain variable domain of TCR clone 181111 (TRAV35, TRAJ30)
CAGQLADDKIIF

SEQ ID NO: 362222 - protein, 17 aa, Homo sapiens
  CDR3 for beta chain variable domain of TCR clone 181111 (TRBV4-2, TRBJ2-5)
CASSSGRWRNFQETQYF

SEQ ID NO: 362223 - protein, 14 aa, Homo sapiens
  CDR3 for alpha chain variable domain of TCR clone 181112 (TRAV1-2, TRAJ16)
CAVNRFSEGQKLLF

SEQ ID NO: 362224 - protein, 15 aa, Homo sapiens
  CDR3 for beta chain variable domain of TCR clone 181112 (TRBV7-2, TRBJ2-1)
CASSSGLAGGNEQFF

SEQ ID NO: 362225 - protein, 14 aa, Homo sapiens
  CDR3 for alpha chain variable domain of TCR clone 181113 (TRAV12-1, TRAJ17)
CVVNYKAAGNKLTF

SEQ ID NO: 362226 - protein, 16 aa, Homo sapiens
  CDR3 for beta chain variable domain of TCR clone 181113 (TRBV19, TRBJ2-2)
CASRSPGTGATGELFF

SEQ ID NO: 362227 - protein, 15 aa, Homo sapiens
  CDR3 for alpha chain variable domain of TCR clone 181114 (TRAV8-3, TRAJ45)
CASSYSGGGADGLTF

SEQ ID NO: 362228 - protein, 11 aa, Homo sapiens
  CDR3 for beta chain variable domain of TCR clone 181114 (TRBV12-4, TRBJ2-7)
CQQFRGYEQYF

SEQ ID NO: 362229 - protein, 14 aa, Homo sapiens
  CDR3 for alpha chain variable domain of TCR clone 181115 (TRAV26-1, TRAJ34)
CIVRVAYNTDKLIF

SEQ ID NO: 362230 - protein, 15 aa, Homo sapiens
  CDR3 for beta chain variable domain of TCR clone 181115 (TRBV27, TRBJ2-5)
CASSLYPRGGETQYF

SEQ ID NO: 362231 - protein, 13 aa, Homo sapiens
  CDR3 for alpha chain variable domain of TCR clone 181116 (TRAV21, TRAJ27)
CAARPGHAGNSTF

SEQ ID NO: 362232 - protein, 14 aa, Homo sapiens
  CDR3 for beta chain variable domain of TCR clone 181116 (TRBV7-6, TRBJ2-3)
CASSLGTVTDTQYF

SEQ ID NO: 362233 - protein, 17 aa, Homo sapiens
  CDR3 for alpha chain variable domain of TCR clone 181117 (TRAV27, TRAJ52)
CAGAGWAVGTSYGKLTF

SEQ ID NO: 362234 - protein, 16 aa, Homo sapiens
  CDR3 for beta chain variable domain of TCR clone 181117 (TRBV19, TRBJ2-1)
CASSKAGPSSYNEQFF

SEQ ID NO: 362235 - protein, 15 aa, Homo sapiens
  CDR3 for alpha chain variable domain of TCR clone 181118 (TRAV26-2, TRAJ13)
CILRDLSGGHQKVTF

SEQ ID NO: 362236 - protein, 11 aa, Homo sapiens
  CDR3 for beta chain variable domain of TCR clone 181118 (TRBV7-9, TRBJ2-3)
CASSYTDTQYF

SEQ ID NO: 362237 - protein, 14 aa, Homo sapiens
  CDR3 for alpha chain variable domain of TCR clone 181119 (TRAV1-2, TRAJ16)
CAVNRFSDGRKLLF

SEQ ID NO: 362238 - protein, 15 aa, Homo sapiens
  CDR3 for beta chain variable domain of TCR clone 181119 (TRBV20-1, TRBJ2-7)
CSARDRVSGMDEQYF

SEQ ID NO: 362239 - protein, 14 aa, Homo sapiens
  CDR3 for alpha chain variable domain of TCR clone 181120 (TRAV12-1, TRAJ17)
CVVNYKAAGTKLTF

SEQ ID NO: 362240 - protein, 17 aa, Homo sapiens
  CDR3 for beta chain variable domain of TCR clone 181120 (TRBV20-1, TRBJ2-1)
CSASSSGLARSYNEHFF

SEQ ID NO: 362241 - protein, 16 aa, Homo sapiens
  CDR3 for alpha chain variable domain of TCR clone 181121 (TRAV30, TRAJ32)
CGTESSYGGATNKLIF

SEQ ID NO: 362242 - protein, 13 aa, Homo sapiens
  CDR3 for beta chain variable domain of TCR clone 181121 (TRBV12-5, TRBJ2-3)
CASGDRRSDTQYF

SEQ ID NO: 362243 - protein, 12 aa, Homo sapiens
  CDR3 for alpha chain variable domain of TCR clone 181122 (TRAV12-3, TRAJ5)
CAMDTGRRAFTF

SEQ ID NO: 362244 - protein, 13 aa, Homo sapiens
  CDR3 for beta chain variable domain of TCR clone 181122 (TRBV7-7, TRBJ2-2)
CASSLTSAGELFF

SEQ ID NO: 362245 - protein, 12 aa, Homo sapiens
  CDR3 for alpha chain variable domain of TCR clone 181123 (TRAV23/DV6, TRAJ30)
CAASKGDNKIIF

SEQ ID NO: 362246 - protein, 18 aa, Homo sapiens
  CDR3 for beta chain variable domain of TCR clone 181123 (TRBV10-3, TRBJ2-3)
CAISESRVGPMRGDTQYF

SEQ ID NO: 362247 - protein, 11 aa, Homo sapiens
  CDR3 for alpha chain variable domain of TCR clone 181124 (TRAV2, TRAJ21)
CAVFNFNKFYF

SEQ ID NO: 362248 - protein, 14 aa, Homo sapiens
  CDR3 for beta chain variable domain of TCR clone 181124 (TRBV6-1, TRBJ1-3)
CASVEGGGGNTIYF

SEQ ID NO: 362249 - protein, 12 aa, Homo sapiens
  CDR3 for alpha chain variable domain of TCR clone 181125 (TRAV36/DV7, TRAJ37)
CACYGNTGKLIF

SEQ ID NO: 362250 - protein, 13 aa, Homo sapiens
  CDR3 for beta chain variable domain of TCR clone 181125 (TRBV10-3, TRBJ2-7)
CASKLAVNHEQYF

SEQ ID NO: 362251 - protein, 15 aa, Homo sapiens
  CDR3 for alpha chain variable domain of TCR clone 181126 (TRAV35, TRAJ58)
CAGRRQETSGSRLTF

SEQ ID NO: 362252 - protein, 11 aa, Homo sapiens
  CDR3 for beta chain variable domain of TCR clone 181126 (TRBV11-2, TRBJ1-1)
CASSRNTEAFF

SEQ ID NO: 362253 - protein, 13 aa, Homo sapiens
  CDR3 for alpha chain variable domain of TCR clone 181127 (TRAV17, TRAJ39)
CATGNNAGNMLTF

SEQ ID NO: 362254 - protein, 13 aa, Homo sapiens
  CDR3 for beta chain variable domain of TCR clone 181127 (TRBV19, TRBJ2-7)
CASSMGLSYEQYF

SEQ ID NO: 362255 - protein, 15 aa, Homo sapiens
  CDR3 for alpha chain variable domain of TCR clone 181128 (TRAV14/DV4, TRAJ10)
CAMRELTGGGNKLTF

SEQ ID NO: 362256 - protein, 18 aa, Homo sapiens
  CDR3 for beta chain variable domain of TCR clone 181128 (TRBV7-9, TRBJ2-7)
CASSLTTSGSRKWYEQYF

SEQ ID NO: 362257 - protein, 12 aa, Homo sapiens
  CDR3 for alpha chain variable domain of TCR clone 181129 (TRAV25, TRAJ29)
CAGPRGNTPLVF

SEQ ID NO: 362258 - protein, 16 aa, Homo sapiens
  CDR3 for beta chain variable domain of TCR clone 181129 (TRBV19, TRBJ2-1)
CASSKAGPSSYNEQFF

SEQ ID NO: 362259 - protein, 15 aa, Homo sapiens
  CDR3 for alpha chain variable domain of TCR clone 181130 (TRAV38-2/DV8, TRAJ28)
CAYRTSGAGSYQLTF

SEQ ID NO: 362260 - protein, 13 aa, Homo sapiens
  CDR3 for beta chain variable domain of TCR clone 181130 (TRBV2, TRBJ2-3)
CASILAGGQGQYF

SEQ ID NO: 362261 - protein, 18 aa, Homo sapiens
  CDR3 for alpha chain variable domain of TCR clone 181131 (TRAV8-6, TRAJ36)
CAVSDGLRDWGKHPLLWD

SEQ ID NO: 362262 - protein, 16 aa, Homo sapiens
  CDR3 for beta chain variable domain of TCR clone 181131 (TRBV28, TRBJ2-1)
CASSSPEYPRDNEQFF

SEQ ID NO: 362263 - protein, 13 aa, Homo sapiens
  CDR3 for alpha chain variable domain of TCR clone 181132 (TRAV20, TRAJ37)
CAGCSSNTGKLIF

SEQ ID NO: 362264 - protein, 16 aa, Homo sapiens
  CDR3 for beta chain variable domain of TCR clone 181132 (TRBV11-2, TRBJ2-7)
CASSLAPTGVNYEQYF

SEQ ID NO: 362265 - protein, 14 aa, Homo sapiens
  CDR3 for alpha chain variable domain of TCR clone 181133 (TRAV8-2, TRAJ45)
CVASAGGGADGLTF

SEQ ID NO: 362266 - protein, 12 aa, Homo sapiens
  CDR3 for beta chain variable domain of TCR clone 181133 (TRBV12-4, TRBJ2-1)
CASSLVRVEQFF

SEQ ID NO: 362267 - protein, 11 aa, Homo sapiens
  CDR3 for alpha chain variable domain of TCR clone 181134 (TRAV21, TRAJ7)
CAAYGNNTLAF

SEQ ID NO: 362268 - protein, 14 aa, Homo sapiens
  CDR3 for beta chain variable domain of TCR clone 181134 (TRBV4-1, TRBJ2-7)
CASSRTGVAFEQYF

SEQ ID NO: 362269 - protein, 20 aa, Homo sapiens
  CDR3 for alpha chain variable domain of TCR clone 181135 (TRAV27, TRAJ41)
CAVRTQIPDIQNPDPAVSQL

SEQ ID NO: 362270 - protein, 16 aa, Homo sapiens
  CDR3 for beta chain variable domain of TCR clone 181135 (TRBV5-1, TRBJ2-3)
CASSLGLAVYTDTQYF

SEQ ID NO: 362271 - protein, 15 aa, Homo sapiens
  CDR3 for alpha chain variable domain of TCR clone 181136 (TRAV8-4, TRAJ15)
CAVSDPVQAGNALIF

SEQ ID NO: 362272 - protein, 14 aa, Homo sapiens
  CDR3 for beta chain variable domain of TCR clone 181136 (TRBV7-2, TRBJ1-3)
CASSLSRSGNTIYF

SEQ ID NO: 362273 - protein, 12 aa, Homo sapiens
  CDR3 for alpha chain variable domain of TCR clone 181137 (TRAV12-3, TRAJ17)
CAMTLTGNKLTF

SEQ ID NO: 362274 - protein, 16 aa, Homo sapiens
  CDR3 for beta chain variable domain of TCR clone 181137 (TRBV7-8, TRBJ2-3)
CASSTEGQRETDTQYF

SEQ ID NO: 362275 - protein, 14 aa, Homo sapiens
  CDR3 for alpha chain variable domain of TCR clone 181138 (TRAV12-2, TRAJ17)
CAVLFKAAGNKLTF

SEQ ID NO: 362276 - protein, 15 aa, Homo sapiens
  CDR3 for beta chain variable domain of TCR clone 181138 (TRBV7-3, TRBJ2-1)
CASSPGGGAYNEQFF

SEQ ID NO: 362277 - protein, 12 aa, Homo sapiens
  CDR3 for alpha chain variable domain of TCR clone 181139 (TRAV13-2, TRAJ23)
CAERHRGGKLIL

SEQ ID NO: 362278 - protein, 16 aa, Homo sapiens
  CDR3 for beta chain variable domain of TCR clone 181139 (TRBV7-2, TRBJ2-6)
CAILSGVSSGANVLTF

SEQ ID NO: 362279 - protein, 16 aa, Homo sapiens
  CDR3 for alpha chain variable domain of TCR clone 181140 (TRAV8-6, TRAJ28)
CAVTSKPGAGSYQLTF

SEQ ID NO: 362280 - protein, 16 aa, Homo sapiens
  CDR3 for beta chain variable domain of TCR clone 181140 (TRBV12-4, TRBJ2-5)
RASSWRPSGDLETQYF

SEQ ID NO: 362281 - protein, 16 aa, Homo sapiens
  CDR3 for alpha chain variable domain of TCR clone 181141 (TRAV30, TRAJ24)
CGTEIVDADSWGKFQF

SEQ ID NO: 362282 - protein, 13 aa, Homo sapiens
  CDR3 for beta chain variable domain of TCR clone 181141 (TRBV11-2, TRBJ2-1)
CASSSEAYNEQFF

SEQ ID NO: 362283 - protein, 12 aa, Homo sapiens
  CDR3 for alpha chain variable domain of TCR clone 181142 (TRAV30, TRAJ43)
CGTEERGNVMRF

SEQ ID NO: 362284 - protein, 13 aa, Homo sapiens
  CDR3 for beta chain variable domain of TCR clone 181142 (TRBV27, TRBJ2-7)
CASSFSQGYEQYF

SEQ ID NO: 362285 - protein, 14 aa, Homo sapiens
  CDR3 for alpha chain variable domain of TCR clone 181143 (TRAV12-2, TRAJ53)
CAVKGGGSNYKLTF

SEQ ID NO: 362286 - protein, 15 aa, Homo sapiens
  CDR3 for beta chain variable domain of TCR clone 181143 (TRBV11-2, TRBJ2-2)
CASSLDTGNTGELFF

SEQ ID NO: 362287 - protein, 15 aa, Homo sapiens
  CDR3 for alpha chain variable domain of TCR clone 181144 (TRAV26-1, TRAJ44)
CIVRANTGTASKLTF

SEQ ID NO: 362288 - protein, 16 aa, Homo sapiens
  CDR3 for beta chain variable domain of TCR clone 181144 (TRBV7-7, TRBJ2-1)
RASSLASGTSYNKQFF

SEQ ID NO: 362289 - protein, 13 aa, Homo sapiens
  CDR3 for alpha chain variable domain of TCR clone 181145 (TRAV27, TRAJ41)
CAGEGNAGYALNF

SEQ ID NO: 362290 - protein, 13 aa, Homo sapiens
  CDR3 for beta chain variable domain of TCR clone 181145 (TRBV27, TRBJ2-7)
CASSFVSSYEQYF

SEQ ID NO: 362291 - protein, 14 aa, Homo sapiens
  CDR3 for alpha chain variable domain of TCR clone 181146 (TRAV8-3, TRAJ10)
CAVGNAGGGNKLTF

SEQ ID NO: 362292 - protein, 14 aa, Homo sapiens
  CDR3 for beta chain variable domain of TCR clone 181146 (TRBV4-1, TRBJ2-2)
CASSQAVNTGKLFF

SEQ ID NO: 362293 - protein, 12 aa, Homo sapiens
  CDR3 for alpha chain variable domain of TCR clone 181147 (TRAV16, TRAJ10)
CPRTGGGNKLTF

SEQ ID NO: 362294 - protein, 19 aa, Homo sapiens
  CDR3 for beta chain variable domain of TCR clone 181147 (TRBV25-1, TRBJ2-2)
CAILVYRVDRGRKTGELFF

SEQ ID NO: 362295 - protein, 15 aa, Homo sapiens
  CDR3 for alpha chain variable domain of TCR clone 181148 (TRAV8-3, TRAJ15)
CAVRAPNQAGTALIF

SEQ ID NO: 362296 - protein, 14 aa, Homo sapiens
  CDR3 for beta chain variable domain of TCR clone 181148 (TRBV20-1, TRBJ2-1)
CSPNDEASYNEQFF

SEQ ID NO: 362297 - protein, 12 aa, Homo sapiens
  CDR3 for alpha chain variable domain of TCR clone 181149 (TRAV29/DV5, TRAJ34)
CAASGNTAKLIF

SEQ ID NO: 362298 - protein, 15 aa, Homo sapiens
  CDR3 for beta chain variable domain of TCR clone 181149 (TRBV6-1, TRBJ2-5)
CASSEGWGIQETQYF

SEQ ID NO: 362299 - protein, 14 aa, Homo sapiens
  CDR3 for alpha chain variable domain of TCR clone 181150 (TRAV12-2, TRAJ24)
CVVTPADSWGKLQF

SEQ ID NO: 362300 - protein, 13 aa, Homo sapiens
  CDR3 for beta chain variable domain of TCR clone 181150 (TRBV6-4, TRBJ1-5)
CASSADLNQPQHF

SEQ ID NO: 362301 - protein, 14 aa, Homo sapiens
  CDR3 for alpha chain variable domain of TCR clone 181151 (TRAV1-2, TRAJ8)
FAVREDTGFQKPVF

SEQ ID NO: 362302 - protein, 15 aa, Homo sapiens
  CDR3 for beta chain variable domain of TCR clone 181151 (TRBV6-3, TRBJ2-7)
CASSSPGTVFYEQYF

SEQ ID NO: 362303 - protein, 14 aa, Homo sapiens
  CDR3 for alpha chain variable domain of TCR clone 181152 (TRAV3, TRAJ17)
CAVRDAAAGNKLTF

SEQ ID NO: 362304 - protein, 15 aa, Homo sapiens
  CDR3 for beta chain variable domain of TCR clone 181152 (TRBV9, TRBJ1-6)
CASSVAGTGDSRLHF

SEQ ID NO: 362305 - protein, 14 aa, Homo sapiens
  CDR3 for alpha chain variable domain of TCR clone 181153 (TRAV30, TRAJ26)
CGTEIFSYGQNFVF

SEQ ID NO: 362306 - protein, 13 aa, Homo sapiens
  CDR3 for beta chain variable domain of TCR clone 181153 (TRBV7-3, TRBJ1-1)
CASSQDWGAEAFF

SEQ ID NO: 362307 - protein, 14 aa, Homo sapiens
  CDR3 for alpha chain variable domain of TCR clone 181154 (TRAV8-3, TRAJ17)
CAVGAQTAGNKLTF

SEQ ID NO: 362308 - protein, 11 aa, Homo sapiens
  CDR3 for beta chain variable domain of TCR clone 181154 (TRBV29-1, TRBJ1-4)
CSVSSGEKLLF

SEQ ID NO: 362309 - protein, 16 aa, Homo sapiens
  CDR3 for alpha chain variable domain of TCR clone 181155 (TRAV12-2, TRAJ32)
CAVNLGQGGATNKLIF

SEQ ID NO: 362310 - protein, 15 aa, Homo sapiens
  CDR3 for beta chain variable domain of TCR clone 181155 (TRBV7-3, TRBJ2-2)
CASSETGQGTGELFF

SEQ ID NO: 362311 - protein, 13 aa, Homo sapiens
  CDR3 for alpha chain variable domain of TCR clone 181156 (TRAV26-2, TRAJ54)
CLPRVGGAQKLVF

SEQ ID NO: 362312 - protein, 16 aa, Homo sapiens
  CDR3 for beta chain variable domain of TCR clone 181156 (TRBV4-1, TRBJ1-1)
CASSSMSERPNTEAFF

SEQ ID NO: 362313 - protein, 17 aa, Homo sapiens
  CDR3 for alpha chain variable domain of TCR clone 181157 (TRAV3, TRAJ6)
CAVRDGPRSGGSYIPTF

SEQ ID NO: 362314 - protein, 12 aa, Homo sapiens
  CDR3 for beta chain variable domain of TCR clone 181157 (TRBV11-2, TRBJ2-1)
CASSPGNNEQFF

SEQ ID NO: 362315 - protein, 13 aa, Homo sapiens
  CDR3 for alpha chain variable domain of TCR clone 181158 (TRAV17, TRAJ5)
CAPMDTGRRALTF

SEQ ID NO: 362316 - protein, 16 aa, Homo sapiens
  CDR3 for beta chain variable domain of TCR clone 181158 (TRBV28, TRBJ2-7)
CASSLFFETGGPEQYF

SEQ ID NO: 362317 - protein, 17 aa, Homo sapiens
  CDR3 for alpha chain variable domain of TCR clone 181159 (TRAV3, TRAJ6)
CAVRDGPRPGGSYIPTF

SEQ ID NO: 362318 - protein, 16 aa, Homo sapiens
  CDR3 for beta chain variable domain of TCR clone 181159 (TRBV12-4, TRBJ2-7)
CASSLIGGTGTYEQYF

SEQ ID NO: 362319 - protein, 21 aa, Homo sapiens
  CDR3 for alpha chain variable domain of TCR clone 181160 (TRAV12-1, TRAJ41)
CVVPELKFRVCTQLRQRHLTV

SEQ ID NO: 362320 - protein, 12 aa, Homo sapiens
  CDR3 for beta chain variable domain of TCR clone 181160 (TRBV14, TRBJ2-5)
CASSQLKETQYF

SEQ ID NO: 362321 - protein, 12 aa, Homo sapiens
  CDR3 for alpha chain variable domain of TCR clone 181161 (TRAV13-1, TRAJ48)
CAANFGNEKLTF

SEQ ID NO: 362322 - protein, 15 aa, Homo sapiens
  CDR3 for beta chain variable domain of TCR clone 181161 (TRBV11-2, TRBJ2-2)
CASSSDRVNAGELFF

SEQ ID NO: 362323 - protein, 14 aa, Homo sapiens
  CDR3 for alpha chain variable domain of TCR clone 181162 (TRAV12-2, TRAJ13)
CAVKKTGGYQKVTF

SEQ ID NO: 362324 - protein, 16 aa, Homo sapiens
  CDR3 for beta chain variable domain of TCR clone 181162 (TRBV5-1, TRBJ1-1)
CAGSSGGNSLNTEAFF

SEQ ID NO: 362325 - protein, 10 aa, Homo sapiens
  CDR3 for alpha chain variable domain of TCR clone 181163 (TRAV23/DV6, TRAJ57)
CAASSTLSQG

SEQ ID NO: 362326 - protein, 15 aa, Homo sapiens
  CDR3 for beta chain variable domain of TCR clone 181163 (TRBV6-1, TRBJ2-3)
CASSERGGITDTQYF

SEQ ID NO: 362327 - protein, 14 aa, Homo sapiens
  CDR3 for alpha chain variable domain of TCR clone 181164 (TRAV17, TRAJ17)
CATDYRAAGNKLTF

SEQ ID NO: 362328 - protein, 14 aa, Homo sapiens
  CDR3 for beta chain variable domain of TCR clone 181164 (TRBV19, TRBJ1-5)
CASSIGGGGQPQHF

SEQ ID NO: 362329 - protein, 15 aa, Homo sapiens
  CDR3 for alpha chain variable domain of TCR clone 181165 (TRAV3, TRAJ4)
CAVRDRTGGYNKLIL

SEQ ID NO: 362330 - protein, 16 aa, Homo sapiens
  CDR3 for beta chain variable domain of TCR clone 181165 (TRBV27, TRBJ2-2)
CASSSSGVSNTGELFF

SEQ ID NO: 362331 - protein, 16 aa, Homo sapiens
  CDR3 for alpha chain variable domain of TCR clone 181166 (TRAV3, TRAJ10)
CAVRDMNAGGGNKLTF

SEQ ID NO: 362332 - protein, 16 aa, Homo sapiens
  CDR3 for beta chain variable domain of TCR clone 181166 (TRBV6-3, TRBJ1-2)
CANSYSRRASNYGYTF

SEQ ID NO: 362333 - protein, 16 aa, Homo sapiens
  CDR3 for alpha chain variable domain of TCR clone 181167 (TRAV21, TRAJ37)
CAVRPRGPRNTGKLIF

SEQ ID NO: 362334 - protein, 13 aa, Homo sapiens
  CDR3 for beta chain variable domain of TCR clone 181167 (TRBV7-9, TRBJ2-5)
CAILSPGQETQYF

SEQ ID NO: 362335 - protein, 13 aa, Homo sapiens
  CDR3 for alpha chain variable domain of TCR clone 181168 (TRAV12-1, TRAJ6)
CVVCPGGSYIPTF

SEQ ID NO: 362336 - protein, 14 aa, Homo sapiens
  CDR3 for beta chain variable domain of TCR clone 181168 (TRBV20-1, TRBJ1-3)
CSASPTGAGNTIYF

SEQ ID NO: 362337 - protein, 13 aa, Homo sapiens
  CDR3 for alpha chain variable domain of TCR clone 181169 (TRAV20, TRAJ21)
CAVEGYNFNKFYF

SEQ ID NO: 362338 - protein, 12 aa, Homo sapiens
  CDR3 for beta chain variable domain of TCR clone 181169 (TRBV5-4, TRBJ1-1)
CASSFGQTEAFF

SEQ ID NO: 362339 - protein, 11 aa, Homo sapiens
  CDR3 for alpha chain variable domain of TCR clone 181170 (TRAV4, TRAJ31)
CLVGDNARLMF

SEQ ID NO: 362340 - protein, 16 aa, Homo sapiens
  CDR3 for beta chain variable domain of TCR clone 181170 (TRBV7-2, TRBJ2-5)
CASSAKWLSGQETQYF

SEQ ID NO: 362341 - protein, 15 aa, Homo sapiens
  CDR3 for alpha chain variable domain of TCR clone 181171 (TRAV16, TRAJ17)
CALSGQEAAGNKLTF

SEQ ID NO: 362342 - protein, 15 aa, Homo sapiens
  CDR3 for beta chain variable domain of TCR clone 181171 (TRBV12-4, TRBJ1-5)
CASTQGTGPLKPQHF

SEQ ID NO: 362343 - protein, 14 aa, Homo sapiens
  CDR3 for alpha chain variable domain of TCR clone 181172 (TRAV12-2, TRAJ40)
CAVKIPPGTYKYIF

SEQ ID NO: 362344 - protein, 13 aa, Homo sapiens
  CDR3 for beta chain variable domain of TCR clone 181172 (TRBV12-4, TRBJ2-7)
CASSPTETYEQYF

SEQ ID NO: 362345 - protein, 15 aa, Homo sapiens
  CDR3 for alpha chain variable domain of TCR clone 181173 (TRAV27, TRAJ38)
CAARRNAGNNRKLVG

SEQ ID NO: 362346 - protein, 13 aa, Homo sapiens
  CDR3 for beta chain variable domain of TCR clone 181173 (TRBV12-5, TRBJ2-3)
CASGDRQSDTRYL

SEQ ID NO: 362347 - protein, 12 aa, Homo sapiens
  CDR3 for alpha chain variable domain of TCR clone 181174 (TRAV12-1, TRAJ40)
CMVYSGTYKYIF

SEQ ID NO: 362348 - protein, 13 aa, Homo sapiens
  CDR3 for beta chain variable domain of TCR clone 181174 (TRBV29-1, TRBJ2-1)
CSVEGGRVNEQFF

SEQ ID NO: 362349 - protein, 15 aa, Homo sapiens
  CDR3 for alpha chain variable domain of TCR clone 181175 (TRAV20, TRAJ4)
CAVQAFSGGYNKLIF

SEQ ID NO: 362350 - protein, 14 aa, Homo sapiens
  CDR3 for beta chain variable domain of TCR clone 181175 (TRBV7-6, TRBJ2-3)
CASNSGGDANTQYF

SEQ ID NO: 362351 - protein, 15 aa, Homo sapiens
  CDR3 for alpha chain variable domain of TCR clone 181176 (TRAV12-1, TRAJ4)
CVVTPWMGGYNKRIF

SEQ ID NO: 362352 - protein, 18 aa, Homo sapiens
  CDR3 for beta chain variable domain of TCR clone 181176 (TRBV11-2, TRBJ2-3)
CASSVRTSGSKKTDTQYF

SEQ ID NO: 362353 - protein, 14 aa, Homo sapiens
  CDR3 for alpha chain variable domain of TCR clone 181177 (TRAV12-1, TRAJ3)
CGAARYTSASKIIF

SEQ ID NO: 362354 - protein, 15 aa, Homo sapiens
  CDR3 for beta chain variable domain of TCR clone 181177 (TRBV7-2, TRBJ2-6)
CASSREGSGANVLTF

SEQ ID NO: 362355 - protein, 14 aa, Homo sapiens
  CDR3 for alpha chain variable domain of TCR clone 181178 (TRAV13-1, TRAJ44)
CAAKATGTASKLTL

SEQ ID NO: 362356 - protein, 16 aa, Homo sapiens
  CDR3 for beta chain variable domain of TCR clone 181178 (TRBV7-9, TRBJ2-6)
CASSLKGPLRASVLTF

SEQ ID NO: 362357 - protein, 12 aa, Homo sapiens
  CDR3 for alpha chain variable domain of TCR clone 181179 (TRAV23/DV6, TRAJ17)
CARGSCRQQDNF

SEQ ID NO: 362358 - protein, 14 aa, Homo sapiens
  CDR3 for beta chain variable domain of TCR clone 181179 (TRBV7-2, TRBJ1-2)
CASSQTGSTYGYTF

SEQ ID NO: 362359 - protein, 14 aa, Homo sapiens
  CDR3 for alpha chain variable domain of TCR clone 181180 (TRAV8-4, TRAJ34)
CAVSDPGDTDKLIF

SEQ ID NO: 362360 - protein, 14 aa, Homo sapiens
  CDR3 for beta chain variable domain of TCR clone 181180 (TRBV11-2, TRBJ2-3)
CASSRLASTDTQYF

SEQ ID NO: 362361 - protein, 15 aa, Homo sapiens
  CDR3 for alpha chain variable domain of TCR clone 181181 (TRAV8-3, TRAJ27)
CAVGPSKTNAGKSTF

SEQ ID NO: 362362 - protein, 15 aa, Homo sapiens
  CDR3 for beta chain variable domain of TCR clone 181181 (TRBV7-2, TRBJ2-1)
CASSSGLAGGNEQFF

SEQ ID NO: 362363 - protein, 19 aa, Homo sapiens
  CDR3 for alpha chain variable domain of TCR clone 181182 (TRAV1-2, TRAJ26)
CLLPLCCERPDNYGQNFVF

SEQ ID NO: 362364 - protein, 15 aa, Homo sapiens
  CDR3 for beta chain variable domain of TCR clone 181182 (TRBV7-2, TRBJ2-1)
CASSLASVRVNEQFF

SEQ ID NO: 362365 - protein, 17 aa, Homo sapiens
  CDR3 for alpha chain variable domain of TCR clone 181183 (TRAV26-1, TRAJ37)
CIVRVITVSSNTGKLIF

SEQ ID NO: 362366 - protein, 15 aa, Homo sapiens
  CDR3 for beta chain variable domain of TCR clone 181183 (TRBV6-6, TRBJ2-7)
CASSYSYGGSYEQYF

SEQ ID NO: 362367 - protein, 13 aa, Homo sapiens
  CDR3 for alpha chain variable domain of TCR clone 181184 (TRAV12-3, TRAJ40)
CAMSARGTYKYIL

SEQ ID NO: 362368 - protein, 16 aa, Homo sapiens
  CDR3 for beta chain variable domain of TCR clone 181184 (TRBV20-1, TRBJ2-3)
CSGEAGLAGGQDTQYF

SEQ ID NO: 362369 - protein, 16 aa, Homo sapiens
  CDR3 for alpha chain variable domain of TCR clone 181185 (TRAV17, TRAJ22)
CATGPISSGSARQLTF

SEQ ID NO: 362370 - protein, 18 aa, Homo sapiens
  CDR3 for beta chain variable domain of TCR clone 181185 (TRBV11-2, TRBJ2-3)
CASSLGGASRGAPNTQYF

SEQ ID NO: 362371 - protein, 12 aa, Homo sapiens
  CDR3 for alpha chain variable domain of TCR clone 181186 (TRAV12-3, TRAJ17)
CAMTLTGNKLTF

SEQ ID NO: 362372 - protein, 15 aa, Homo sapiens
  CDR3 for beta chain variable domain of TCR clone 181186 (TRBV20-1, TRBJ2-1)
CSARERVSGMDEQYF

SEQ ID NO: 362373 - protein, 15 aa, Homo sapiens
  CDR3 for alpha chain variable domain of TCR clone 181187 (TRAV2, TRAJ13)
CATPSYSGGYQKVTF

SEQ ID NO: 362374 - protein, 15 aa, Homo sapiens
  CDR3 for beta chain variable domain of TCR clone 181187 (TRBV20-1, TRBJ2-7)
CSAESGTSGAYEQYF

SEQ ID NO: 362375 - protein, 13 aa, Homo sapiens
  CDR3 for alpha chain variable domain of TCR clone 181188 (TRAV12-2, TRAJ40)
CAVKRTGTYKYIF

SEQ ID NO: 362376 - protein, 14 aa, Homo sapiens
  CDR3 for beta chain variable domain of TCR clone 181188 (TRBV11-2, TRBJ1-2)
CASSLGTANYGYTF

SEQ ID NO: 362377 - protein, 21 aa, Homo sapiens
  CDR3 for alpha chain variable domain of TCR clone 181189 (TRAV3, TRAJ9)
CAFWNTGGFKTILEQEQDYLL

SEQ ID NO: 362378 - protein, 17 aa, Homo sapiens
  CDR3 for beta chain variable domain of TCR clone 181189 (TRBV7-8, TRBJ2-6)
CASSAGTGGAGANVLTF

SEQ ID NO: 362379 - protein, 15 aa, Homo sapiens
  CDR3 for alpha chain variable domain of TCR clone 181190 (TRAV21, TRAJ40)
CAVRPQTSGTYKYIF

SEQ ID NO: 362380 - protein, 20 aa, Homo sapiens
  CDR3 for beta chain variable domain of TCR clone 181190 (TRBV7-8, TRBJ2-2)
CASSHLFPGPTIHITGELFF

SEQ ID NO: 362381 - protein, 12 aa, Homo sapiens
  CDR3 for alpha chain variable domain of TCR clone 181191 (TRAV12-1, TRAJ40)
CGVPSGTYKYIF

SEQ ID NO: 362382 - protein, 15 aa, Homo sapiens
  CDR3 for beta chain variable domain of TCR clone 181191 (TRBV12-4, TRBJ2-1)
CASSPLSGRNSEQFF

SEQ ID NO: 362383 - protein, 13 aa, Homo sapiens
  CDR3 for alpha chain variable domain of TCR clone 181192 (TRAV12-2, TRAJ18)
CAVRGSTLGRLYF

SEQ ID NO: 362384 - protein, 18 aa, Homo sapiens
  CDR3 for beta chain variable domain of TCR clone 181192 (TRBV27, TRBJ2-3)
CASSFSGTSGRGTDTQYF

SEQ ID NO: 362385 - protein, 15 aa, Homo sapiens
  CDR3 for alpha chain variable domain of TCR clone 181193 (TRAV4, TRAJ39)
CLVGPNNNAGNMLTF

SEQ ID NO: 362386 - protein, 13 aa, Homo sapiens
  CDR3 for beta chain variable domain of TCR clone 181193 (TRBV19, TRBJ2-1)
CQSDFRLSGEQFF

SEQ ID NO: 362387 - protein, 16 aa, Homo sapiens
  CDR3 for alpha chain variable domain of TCR clone 181194 (TRAV29/DV5, TRAJ36)
CAASAGVETGANNLFF

SEQ ID NO: 362388 - protein, 15 aa, Homo sapiens
  CDR3 for beta chain variable domain of TCR clone 181194 (TRBV7-3, TRBJ2-7)
CASSLNAQGAYEQYF

SEQ ID NO: 362389 - protein, 10 aa, Homo sapiens
  CDR3 for alpha chain variable domain of TCR clone 181195 (TRAV16, TRAJ39)
CSSAGNMLTF

SEQ ID NO: 362390 - protein, 14 aa, Homo sapiens
  CDR3 for beta chain variable domain of TCR clone 181195 (TRBV27, TRBJ1-4)
CASSLDGGWEKLFC

SEQ ID NO: 362391 - protein, 16 aa, Homo sapiens
  CDR3 for alpha chain variable domain of TCR clone 181196 (TRAV23/DV6, TRAJ9)
CAASIGGNTGGFKTIF

SEQ ID NO: 362392 - protein, 14 aa, Homo sapiens
  CDR3 for beta chain variable domain of TCR clone 181196 (TRBV9, TRBJ2-7)
CASSVGAGSYEQYF

SEQ ID NO: 362393 - protein, 10 aa, Homo sapiens
  CDR3 for alpha chain variable domain of TCR clone 181197 (TRAV12-1, TRAJ20)
CVVNPRKLSF

SEQ ID NO: 362394 - protein, 14 aa, Homo sapiens
  CDR3 for beta chain variable domain of TCR clone 181197 (TRBV19, TRBJ2-1)
CASPTFVLSGEQFF

SEQ ID NO: 362395 - protein, 16 aa, Homo sapiens
  CDR3 for alpha chain variable domain of TCR clone 181198 (TRAV30, TRAJ24)
CGTEIVDADSWGEFQF

SEQ ID NO: 362396 - protein, 13 aa, Homo sapiens
  CDR3 for beta chain variable domain of TCR clone 181198 (TRBV7-9, TRBJ1-2)
CASSLKQNYGYTF

SEQ ID NO: 362397 - protein, 15 aa, Homo sapiens
  CDR3 for alpha chain variable domain of TCR clone 181199 (TRAV17, TRAJ57)
CATGLSQGGSEKLVF

SEQ ID NO: 362398 - protein, 17 aa, Homo sapiens
  CDR3 for beta chain variable domain of TCR clone 181199 (TRBV20-1, TRBJ2-1)
CSASSSGLAGSYNEQFF

SEQ ID NO: 362399 - protein, 12 aa, Homo sapiens
  CDR3 for alpha chain variable domain of TCR clone 181200 (TRAV13-2, TRAJ23)
CAERHRGGKLIF

SEQ ID NO: 362400 - protein, 15 aa, Homo sapiens
  CDR3 for beta chain variable domain of TCR clone 181200 (TRBV7-8, TRBJ1-3)
CASSPRGKDGNTIYF

SEQ ID NO: 362401 - protein, 17 aa, Homo sapiens
  CDR3 for alpha chain variable domain of TCR clone 181201 (TRAV3, TRAJ42)
CAVRDRDYGGSQGNRIF

SEQ ID NO: 362402 - protein, 12 aa, Homo sapiens
  CDR3 for beta chain variable domain of TCR clone 181201 (TRBV11-2, TRBJ2-2)
CASSLGGGELFF

SEQ ID NO: 362403 - protein, 16 aa, Homo sapiens
  CDR3 for alpha chain variable domain of TCR clone 181202 (TRAV26-1, TRAJ31)
CIVRPPVSNNNARLMF

SEQ ID NO: 362404 - protein, 11 aa, Homo sapiens
  CDR3 for beta chain variable domain of TCR clone 181202 (TRBV7-8, TRBJ2-7)
CPSSLSREQYF

SEQ ID NO: 362405 - protein, 13 aa, Homo sapiens
  CDR3 for alpha chain variable domain of TCR clone 181203 (TRAV17, TRAJ9)
CATAITGGFKTIF

SEQ ID NO: 362406 - protein, 15 aa, Homo sapiens
  CDR3 for beta chain variable domain of TCR clone 181203 (TRBV15, TRBJ2-1)
CHQQKPSGGYNEQFV

SEQ ID NO: 362407 - protein, 16 aa, Homo sapiens
  CDR3 for alpha chain variable domain of TCR clone 181204 (TRAV3, TRAJ5)
CAVRNLMDTCRRALTF

SEQ ID NO: 362408 - protein, 17 aa, Homo sapiens
  CDR3 for beta chain variable domain of TCR clone 181204 (TRBV28, TRBJ2-5)
CASSRQGGLAGAETQYF

SEQ ID NO: 362409 - protein, 16 aa, Homo sapiens
  CDR3 for alpha chain variable domain of TCR clone 181205 (TRAV12-2, TRAJ32)
CAVNLGQGGATNKLIF

SEQ ID NO: 362410 - protein, 15 aa, Homo sapiens
  CDR3 for beta chain variable domain of TCR clone 181205 (TRBV27, TRBJ2-1)
CASSNGGGSSNEQFL

SEQ ID NO: 362411 - protein, 17 aa, Homo sapiens
  CDR3 for alpha chain variable domain of TCR clone 181206 (TRAV27, TRAJ42)
CAERVIDYGGSQGNLIF

SEQ ID NO: 362412 - protein, 14 aa, Homo sapiens
  CDR3 for beta chain variable domain of TCR clone 181206 (TRBV6-6, TRBJ2-3)
CASRLQREADTQYF

SEQ ID NO: 362413 - protein, 14 aa, Homo sapiens
  CDR3 for alpha chain variable domain of TCR clone 181207 (TRAV12-2, TRAJ6)
CASKWGGGSYIPTF

SEQ ID NO: 362414 - protein, 11 aa, Homo sapiens
  CDR3 for beta chain variable domain of TCR clone 181207 (TRBV12-4, TRBJ2-3)
CASTATDTQYF

SEQ ID NO: 362415 - protein, 13 aa, Homo sapiens
  CDR3 for alpha chain variable domain of TCR clone 181208 (TRAV8-1, TRAJ30)
CAVTMKRDDKIIF

SEQ ID NO: 362416 - protein, 14 aa, Homo sapiens
  CDR3 for beta chain variable domain of TCR clone 181208 (TRBV7-2, TRBJ1-6)
CASSLQGANSPLHF

SEQ ID NO: 362417 - protein, 13 aa, Homo sapiens
  CDR3 for alpha chain variable domain of TCR clone 181209 (TRAV36/DV7, TRAJ34)
CAVGEVNTDKLIF

SEQ ID NO: 362418 - protein, 14 aa, Homo sapiens
  CDR3 for beta chain variable domain of TCR clone 181209 (TRBV12-4, TRBJ1-1)
CASSPFRPGTEAFF

SEQ ID NO: 362419 - protein, 14 aa, Homo sapiens
  CDR3 for alpha chain variable domain of TCR clone 181210 (TRAV3, TRAJ8)
CAALMNTGFQKLVF

SEQ ID NO: 362420 - protein, 15 aa, Homo sapiens
  CDR3 for beta chain variable domain of TCR clone 181210 (TRBV28, TRBJ2-5)
CASSLGLGNQKTQYF

SEQ ID NO: 362421 - protein, 13 aa, Homo sapiens
  CDR3 for alpha chain variable domain of TCR clone 181211 (TRAV13-2, TRAJ13)
CAERPGGYQKVTF

SEQ ID NO: 362422 - protein, 17 aa, Homo sapiens
  CDR3 for beta chain variable domain of TCR clone 181211 (TRBV11-2, TRBJ2-1)
CASILYPPGVEYNEQFF

SEQ ID NO: 362423 - protein, 16 aa, Homo sapiens
  CDR3 for alpha chain variable domain of TCR clone 181212 (TRAV30, TRAJ24)
CGTEIVDADSWGKFHF

SEQ ID NO: 362424 - protein, 17 aa, Homo sapiens
  CDR3 for beta chain variable domain of TCR clone 181212 (TRBV13, TRBJ2-3)
CASSLSRVAGGRNTQYF

SEQ ID NO: 362425 - protein, 15 aa, Homo sapiens
  CDR3 for alpha chain variable domain of TCR clone 181213 (TRAV16, TRAJ17)
CALSGNKAAGNKLTF

SEQ ID NO: 362426 - protein, 16 aa, Homo sapiens
  CDR3 for beta chain variable domain of TCR clone 181213 (TRBV7-6, TRBJ1-6)
CASSSPPAGEYSTLHF

SEQ ID NO: 362427 - protein, 16 aa, Homo sapiens
  CDR3 for alpha chain variable domain of TCR clone 181214 (TRAV3, TRAJ37)
CAVRGKGSGNTGKLTF

SEQ ID NO: 362428 - protein, 13 aa, Homo sapiens
  CDR3 for beta chain variable domain of TCR clone 181214 (TRBV19, TRBJ1-2)
CASSVPGQDGYTF

SEQ ID NO: 362429 - protein, 10 aa, Homo sapiens
  CDR3 for alpha chain variable domain of TCR clone 181215 (TRAV23/DV6, TRAJ57)
CAASSTLSHG

SEQ ID NO: 362430 - protein, 14 aa, Homo sapiens
  CDR3 for beta chain variable domain of TCR clone 181215 (TRBV25-1, TRBJ1-1)
CASTHLGGNTEAFF

SEQ ID NO: 362431 - protein, 16 aa, Homo sapiens
  CDR3 for alpha chain variable domain of TCR clone 181216 (TRAV21, )
CAVRQDAGNNHIQNPD

SEQ ID NO: 362432 - protein, 16 aa, Homo sapiens
  CDR3 for beta chain variable domain of TCR clone 181216 (TRBV4-2, TRBJ1-1)
CASRPPDGGGDTEAFF

SEQ ID NO: 362433 - protein, 16 aa, Homo sapiens
  CDR3 for alpha chain variable domain of TCR clone 181217 (TRAV20, TRAJ22)
CAVQASSSGSASQLTF

SEQ ID NO: 362434 - protein, 16 aa, Homo sapiens
  CDR3 for beta chain variable domain of TCR clone 181217 (TRBV20-1, TRBJ1-5)
CSASRGTGYSNQPQHF

SEQ ID NO: 362435 - protein, 16 aa, Homo sapiens
  CDR3 for alpha chain variable domain of TCR clone 181218 (TRAV30, TRAJ57)
CGTGWAPPGGSEKLVF

SEQ ID NO: 362436 - protein, 14 aa, Homo sapiens
  CDR3 for beta chain variable domain of TCR clone 181218 (TRBV18, TRBJ1-1)
CASSPGFQGVEAFF

SEQ ID NO: 362437 - protein, 16 aa, Homo sapiens
  CDR3 for alpha chain variable domain of TCR clone 181219 (TRAV12-1, TRAJ12)
CVVNTLLMDSSYKLIF

SEQ ID NO: 362438 - protein, 13 aa, Homo sapiens
  CDR3 for beta chain variable domain of TCR clone 181219 (TRBV18, TRBJ2-3)
CASSTGRTDTQYF

SEQ ID NO: 362439 - protein, 10 aa, Homo sapiens
  CDR3 for alpha chain variable domain of TCR clone 181220 (TRAV1-2, TRAJ31)
CAFFDARLIF

SEQ ID NO: 362440 - protein, 15 aa, Homo sapiens
  CDR3 for beta chain variable domain of TCR clone 181220 (TRBV4-1, TRBJ1-4)
CASSDTGGTNEKLFF

SEQ ID NO: 362441 - protein, 11 aa, Homo sapiens
  CDR3 for alpha chain variable domain of TCR clone 181221 (TRAV21, TRAJ11)
CAVNGYSTLTF

SEQ ID NO: 362442 - protein, 11 aa, Homo sapiens
  CDR3 for beta chain variable domain of TCR clone 181221 (TRBV19, TRAJ59)
CESSIGSEDLF

SEQ ID NO: 362443 - protein, 12 aa, Homo sapiens
  CDR3 for alpha chain variable domain of TCR clone 181222 (TRAV12-3, TRAJ40)
YAMSSGTYKYIF

SEQ ID NO: 362444 - protein, 15 aa, Homo sapiens
  CDR3 for beta chain variable domain of TCR clone 181222 (TRBV7-3, TRBJ2-2)
CASSETGQGTGELFF

SEQ ID NO: 362445 - protein, 22 aa, Homo sapiens
  CDR3 for alpha chain variable domain of TCR clone 181223 (TRAV30, TRAJ48)
TASQLSYSGTYFGGIGNEKLTF

SEQ ID NO: 362446 - protein, 16 aa, Homo sapiens
  CDR3 for beta chain variable domain of TCR clone 181223 (TRBV19, TRBJ2-1)
CASSKAGPSSYNEQFF

SEQ ID NO: 362447 - protein, 16 aa, Homo sapiens
  CDR3 for alpha chain variable domain of TCR clone 181224 (TRAV17, TRAJ52)
CATSNAGGTSYGKLTC

SEQ ID NO: 362448 - protein, 13 aa, Homo sapiens
  CDR3 for beta chain variable domain of TCR clone 181224 (TRBV27, TRBJ1-6)
CASSLVLVSPLHF

SEQ ID NO: 362449 - protein, 13 aa, Homo sapiens
  CDR3 for alpha chain variable domain of TCR clone 181225 (TRAV13-1, TRAJ9)
CAASGTGGFKTIF

SEQ ID NO: 362450 - protein, 15 aa, Homo sapiens
  CDR3 for beta chain variable domain of TCR clone 181225 (TRBV7-9, TRBJ1-5)
CASSQGHQPNQPQHF

SEQ ID NO: 362451 - protein, 15 aa, Homo sapiens
  CDR3 for alpha chain variable domain of TCR clone 181226 (TRAV26-1, TRAJ29)
CIVRVEGSGKTPLVF

SEQ ID NO: 362452 - protein, 15 aa, Homo sapiens
  CDR3 for beta chain variable domain of TCR clone 181226 (TRBV7-9, TRBJ1-5)
CASSQGHQPNQHQHF

SEQ ID NO: 362453 - protein, 14 aa, Homo sapiens
  CDR3 for alpha chain variable domain of TCR clone 181227 (TRAV1-2, TRAJ16)
CAVNRFSDGQTLLF

SEQ ID NO: 362454 - protein, 14 aa, Homo sapiens
  CDR3 for beta chain variable domain of TCR clone 181227 (TRBV20-1, TRBJ1-1)
CSAQTRIGGTEAFF

SEQ ID NO: 362455 - protein, 15 aa, Homo sapiens
  CDR3 for alpha chain variable domain of TCR clone 181228 (TRAV8-3, TRAJ27)
CAVGPSMTNAGKSTF

SEQ ID NO: 362456 - protein, 12 aa, Homo sapiens
  CDR3 for beta chain variable domain of TCR clone 181228 (TRBV11-2, TRBJ2-2)
CASSLGGGELFF

SEQ ID NO: 362457 - protein, 13 aa, Homo sapiens
  CDR3 for alpha chain variable domain of TCR clone 181229 (TRAV12-2, TRAJ20)
CAVYPSNDYKLSL

SEQ ID NO: 362458 - protein, 15 aa, Homo sapiens
  CDR3 for beta chain variable domain of TCR clone 181229 (TRBV18, TRBJ1-2)
CASSPGDGLGYGYTF

SEQ ID NO: 362459 - protein, 15 aa, Homo sapiens
  CDR3 for alpha chain variable domain of TCR clone 181230 (TRAV20, TRAJ16)
CAVQIRFSDGQKLLF

SEQ ID NO: 362460 - protein, 18 aa, Homo sapiens
  CDR3 for beta chain variable domain of TCR clone 181230 (TRBV20-1, TRBJ2-3)
CSASGLAGGPGTTDTQYF

SEQ ID NO: 362461 - protein, 18 aa, Homo sapiens
  CDR3 for alpha chain variable domain of TCR clone 181231 (TRAV13-1, TRAJ52)
CAAKNPNAGGTSYGKLTF

SEQ ID NO: 362462 - protein, 14 aa, Homo sapiens
  CDR3 for beta chain variable domain of TCR clone 181231 (TRBV5-1, TRBJ2-2)
CASSLGGGSGELFF

SEQ ID NO: 362463 - protein, 13 aa, Homo sapiens
  CDR3 for alpha chain variable domain of TCR clone 181232 (TRAV13-2, TRAJ53)
FAENMGGNYKLTF

SEQ ID NO: 362464 - protein, 13 aa, Homo sapiens
  CDR3 for beta chain variable domain of TCR clone 181232 (TRBV4-1, TRBJ2-2)
CASSQENTGELFF

SEQ ID NO: 362465 - protein, 15 aa, Homo sapiens
  CDR3 for alpha chain variable domain of TCR clone 181233 (TRAV8-3, TRAJ45)
CASSYSGGGADGLTF

SEQ ID NO: 362466 - protein, 15 aa, Homo sapiens
  CDR3 for beta chain variable domain of TCR clone 181233 (TRBV11-2, TRBJ2-1)
CASSKNRGLIYEQFF

SEQ ID NO: 362467 - protein, 11 aa, Homo sapiens
  CDR3 for alpha chain variable domain of TCR clone 181234 (TRAV10, TRAJ3)
YPGRGASKIIF

SEQ ID NO: 362468 - protein, 16 aa, Homo sapiens
  CDR3 for beta chain variable domain of TCR clone 181234 (TRBV7-9, TRBJ2-1)
CASSDVAGGSYNEQFF

SEQ ID NO: 362469 - protein, 17 aa, Homo sapiens
  CDR3 for alpha chain variable domain of TCR clone 181235 (TRAV36/DV7, TRAJ52)
CAVAQRAGGTSYGKLTF

SEQ ID NO: 362470 - protein, 14 aa, Homo sapiens
  CDR3 for beta chain variable domain of TCR clone 181235 (TRBV7-3, TRBJ1-1)
CASSLGTGYTEAFF

SEQ ID NO: 362471 - protein, 14 aa, Homo sapiens
  CDR3 for alpha chain variable domain of TCR clone 181236 (TRAV12-3, TRAJ22)
CAMSLFGSARQLTF

SEQ ID NO: 362472 - protein, 14 aa, Homo sapiens
  CDR3 for beta chain variable domain of TCR clone 181236 (TRBV7-2, TRBJ2-7)
CASSPKNSFYEQYF

SEQ ID NO: 362473 - protein, 14 aa, Homo sapiens
  CDR3 for alpha chain variable domain of TCR clone 181237 (TRAV1-2, TRAJ8)
CAVREDTGFEELVF

SEQ ID NO: 362474 - protein, 16 aa, Homo sapiens
  CDR3 for beta chain variable domain of TCR clone 181237 (TRBV7-3, TRBJ2-2)
CASSLKRGTLSGELFF

SEQ ID NO: 362475 - protein, 13 aa, Homo sapiens
  CDR3 for alpha chain variable domain of TCR clone 181238 (TRAV38-2/DV8, TRAJ34)
CAYRNYNTDKLIF

SEQ ID NO: 362476 - protein, 15 aa, Homo sapiens
  CDR3 for beta chain variable domain of TCR clone 181238 (TRBV20-1, TRBJ2-5)
RSAGGTGGLQETQYF

SEQ ID NO: 362477 - protein, 16 aa, Homo sapiens
  CDR3 for alpha chain variable domain of TCR clone 181239 (TRAV1-2, TRAJ10)
CSVRGVLRGGGNKLTF

SEQ ID NO: 362478 - protein, 12 aa, Homo sapiens
  CDR3 for beta chain variable domain of TCR clone 181239 (TRBV7-8, TRBJ2-7)
CASSLGDREQYF

SEQ ID NO: 362479 - protein, 12 aa, Homo sapiens
  CDR3 for alpha chain variable domain of TCR clone 181240 (TRAV25, TRAJ20)
CAGRSNDYKLSF

SEQ ID NO: 362480 - protein, 15 aa, Homo sapiens
  CDR3 for beta chain variable domain of TCR clone 181240 (TRBV7-6, TRBJ2-7)
CASSGRRDTFGEQYF

SEQ ID NO: 362481 - protein, 12 aa, Homo sapiens
  CDR3 for alpha chain variable domain of TCR clone 181241 (TRAV8-3, TRAJ43)
CAVGAGNNDMRF

SEQ ID NO: 362482 - protein, 12 aa, Homo sapiens
  CDR3 for beta chain variable domain of TCR clone 181241 (TRBV19, TRBJ2-3)
CATTSSTDTQYF

SEQ ID NO: 362483 - protein, 12 aa, Homo sapiens
  CDR3 for alpha chain variable domain of TCR clone 181242 (TRAV26-2, TRAJ21)
CILQGNFNKFYF

SEQ ID NO: 362484 - protein, 14 aa, Homo sapiens
  CDR3 for beta chain variable domain of TCR clone 181242 (TRBV7-9, TRBJ1-1)
CASTTLQSCTEAFF

SEQ ID NO: 362485 - protein, 18 aa, Homo sapiens
  CDR3 for alpha chain variable domain of TCR clone 181243 (TRAV21, TRAJ52)
CAVRPSPAGGTSYGKLTF

SEQ ID NO: 362486 - protein, 14 aa, Homo sapiens
  CDR3 for beta chain variable domain of TCR clone 181243 (TRBV20-1, TRBJ2-1)
CSPNDEASYNEQFF

SEQ ID NO: 362487 - protein, 12 aa, Homo sapiens
  CDR3 for alpha chain variable domain of TCR clone 181244 (TRAV12-1, TRAJ40)
CVVYSGTYKYIF

SEQ ID NO: 362488 - protein, 15 aa, Homo sapiens
  CDR3 for beta chain variable domain of TCR clone 181244 (TRBV11-2, TRBJ2-1)
CASSSPSTRYNEQFF

SEQ ID NO: 362489 - protein, 17 aa, Homo sapiens
  CDR3 for alpha chain variable domain of TCR clone 181245 (TRAV8-6, TRAJ58)
CAVSSWVGETSGSRLTF

SEQ ID NO: 362490 - protein, 11 aa, Homo sapiens
  CDR3 for beta chain variable domain of TCR clone 181245 (TRBV27, TRBJ2-7)
CASSLGYEQYF

SEQ ID NO: 362491 - protein, 23 aa, Homo sapiens
  CDR3 for alpha chain variable domain of TCR clone 181246 (TRAV26-1, TRAJ38)
CIAANAGNNHIQNPDPAVYPLRD

SEQ ID NO: 362492 - protein, 13 aa, Homo sapiens
  CDR3 for beta chain variable domain of TCR clone 181246 (TRBV20-1, TRBJ1-1)
CSARGGGNTEAFF

SEQ ID NO: 362493 - protein, 13 aa, Homo sapiens
  CDR3 for alpha chain variable domain of TCR clone 181247 (TRAV12-2, TRAJ50)
CAVIVTSYDKVIF

SEQ ID NO: 362494 - protein, 12 aa, Homo sapiens
  CDR3 for beta chain variable domain of TCR clone 181247 (TRBV20-1, TRBJ2-5)
CSAREGHETQYF

SEQ ID NO: 362495 - protein, 15 aa, Homo sapiens
  CDR3 for alpha chain variable domain of TCR clone 181248 (TRAV12-1, TRAJ10)
CGADILTGGGNKLTF

SEQ ID NO: 362496 - protein, 16 aa, Homo sapiens
  CDR3 for beta chain variable domain of TCR clone 181248 (TRBV20-1, TRBJ2-1)
FSARSTSESSYNEQFF

SEQ ID NO: 362497 - protein, 18 aa, Homo sapiens
  CDR3 for alpha chain variable domain of TCR clone 181249 (TRAV13-1, TRAJ52)
CAAKNPNAGGTSYAKLTF

SEQ ID NO: 362498 - protein, 14 aa, Homo sapiens
  CDR3 for beta chain variable domain of TCR clone 181249 (TRBV4-1, TRBJ2-2)
CASSQAVNTGELFF

SEQ ID NO: 362499 - protein, 23 aa, Homo sapiens
  CDR3 for alpha chain variable domain of TCR clone 181250 (TRAV26-1, TRAJ38)
CIADNAGNNHIQNPYPAVYQLRD

SEQ ID NO: 362500 - protein, 16 aa, Homo sapiens
  CDR3 for beta chain variable domain of TCR clone 181250 (TRBV19, TRBJ2-2)
CASRSPGTGATGELFF

SEQ ID NO: 362501 - protein, 15 aa, Homo sapiens
  CDR3 for alpha chain variable domain of TCR clone 181251 (TRAV14/DV4, TRAJ10)
CAMRELTGGGNKLTF

SEQ ID NO: 362502 - protein, 18 aa, Homo sapiens
  CDR3 for beta chain variable domain of TCR clone 181251 (TRBV7-9, TRBJ2-7)
CASSLTTSGSRTWYDQYF

SEQ ID NO: 362503 - protein, 15 aa, Homo sapiens
  CDR3 for alpha chain variable domain of TCR clone 181252 (TRAV21, TRAJ18)
CAVRDRGSTLGRLYF

SEQ ID NO: 362504 - protein, 16 aa, Homo sapiens
  CDR3 for beta chain variable domain of TCR clone 181252 (TRBV4-2, TRBJ2-1)
CASSHDDNPEGAQEFF

SEQ ID NO: 362505 - protein, 14 aa, Homo sapiens
  CDR3 for alpha chain variable domain of TCR clone 181253 (TRAV27, TRAJ22)
CAGLPSGSARQLTF

SEQ ID NO: 362506 - protein, 12 aa, Homo sapiens
  CDR3 for beta chain variable domain of TCR clone 181253 (TRBV12-4, TRBJ2-7)
CASSLGGYEQYF

SEQ ID NO: 362507 - protein, 11 aa, Homo sapiens
  CDR3 for alpha chain variable domain of TCR clone 181254 (TRAV2, TRAJ13)
CASGGYQKVIF

SEQ ID NO: 362508 - protein, 13 aa, Homo sapiens
  CDR3 for beta chain variable domain of TCR clone 181254 (TRBV24-1, TRBJ2-2)
CATSDWSTGELFF

SEQ ID NO: 362509 - protein, 15 aa, Homo sapiens
  CDR3 for alpha chain variable domain of TCR clone 181255 (TRAV13-1, TRAJ44)
CAASRGGGTASKFTF

SEQ ID NO: 362510 - protein, 14 aa, Homo sapiens
  CDR3 for beta chain variable domain of TCR clone 181255 (TRBV7-2, TRBJ2-5)
CASSPRGSSETQYF

SEQ ID NO: 362511 - protein, 14 aa, Homo sapiens
  CDR3 for alpha chain variable domain of TCR clone 181256 (TRAV12-2, TRAJ45)
CAVYSGGGADGLTF

SEQ ID NO: 362512 - protein, 19 aa, Homo sapiens
  CDR3 for beta chain variable domain of TCR clone 181256 (TRBV7-2, TRBJ2-3)
CASSFLSRNWGGGTDKQYF

SEQ ID NO: 362513 - protein, 16 aa, Homo sapiens
  CDR3 for alpha chain variable domain of TCR clone 181257 (TRAV30, TRAJ24)
CGTEIADADSWGKFQF

SEQ ID NO: 362514 - protein, 16 aa, Homo sapiens
  CDR3 for beta chain variable domain of TCR clone 181257 (TRBV4-1, TRBJ2-7)
CASSQEGTASSYEKYF

SEQ ID NO: 362515 - protein, 13 aa, Homo sapiens
  CDR3 for alpha chain variable domain of TCR clone 181258 (TRAV29/DV5, TRAJ49)
CAASTNTGNQFNF

SEQ ID NO: 362516 - protein, 13 aa, Homo sapiens
  CDR3 for beta chain variable domain of TCR clone 181258 (TRBV7-2, TRBJ1-4)
CASSLTGLEKLFF

SEQ ID NO: 362517 - protein, 13 aa, Homo sapiens
  CDR3 for alpha chain variable domain of TCR clone 181259 (TRAV25, TRAJ35)
CAGGGGFGNVLHC

SEQ ID NO: 362518 - protein, 14 aa, Homo sapiens
  CDR3 for beta chain variable domain of TCR clone 181259 (TRBV6-1, TRBJ2-1)
CASAGGAIKNEQLF

SEQ ID NO: 362519 - protein, 16 aa, Homo sapiens
  CDR3 for alpha chain variable domain of TCR clone 181260 (TRAV3, TRAJ10)
CAVIDMRAGGGNKLTF

SEQ ID NO: 362520 - protein, 19 aa, Homo sapiens
  CDR3 for beta chain variable domain of TCR clone 181260 (TRBV6-3, TRBJ1-2)
CASSYSKGRTGPPNYGYTF

SEQ ID NO: 362521 - protein, 14 aa, Homo sapiens
  CDR3 for alpha chain variable domain of TCR clone 181261 (TRAV1-2, TRAJ16)
CAVNRFSDGQKLLF

SEQ ID NO: 362522 - protein, 15 aa, Homo sapiens
  CDR3 for beta chain variable domain of TCR clone 181261 (TRBV5-8, TRBJ1-1)
CASSFSGTSLKGAVF

SEQ ID NO: 362523 - protein, 13 aa, Homo sapiens
  CDR3 for alpha chain variable domain of TCR clone 181262 (TRAV8-2, TRAJ15)
CVVSGPGRNCSDL

SEQ ID NO: 362524 - protein, 14 aa, Homo sapiens
  CDR3 for beta chain variable domain of TCR clone 181262 (TRBV6-5, TRBJ1-2)
CASSREAPSYGYTF

SEQ ID NO: 362525 - protein, 11 aa, Homo sapiens
  CDR3 for alpha chain variable domain of TCR clone 181263 (TRAV38-2/DV8, TRAJ31)
CVLRDNARLMF

SEQ ID NO: 362526 - protein, 16 aa, Homo sapiens
  CDR3 for beta chain variable domain of TCR clone 181263 (TRBV29-1, TRBJ2-2)
CSVEGLAGAITGELFF

SEQ ID NO: 362527 - protein, 11 aa, Homo sapiens
  CDR3 for alpha chain variable domain of TCR clone 181264 (TRAV12-1, TRAJ21)
CVVNNFNKFYF

SEQ ID NO: 362528 - protein, 14 aa, Homo sapiens
  CDR3 for beta chain variable domain of TCR clone 181264 (TRBV15, TRBJ1-5)
CDTSREQSNQPQHF

SEQ ID NO: 362529 - protein, 15 aa, Homo sapiens
  CDR3 for alpha chain variable domain of TCR clone 181265 (TRAV26-2, TRAJ21)
CILSNTTSTNFTLDL

SEQ ID NO: 362530 - protein, 16 aa, Homo sapiens
  CDR3 for beta chain variable domain of TCR clone 181265 (TRBV4-2, TRBJ2-6)
CASSQARSSGANVLAF

SEQ ID NO: 362531 - protein, 14 aa, Homo sapiens
  CDR3 for alpha chain variable domain of TCR clone 181266 (TRAV1-2, TRAJ16)
CAVNRFSDGQKLLF

SEQ ID NO: 362532 - protein, 14 aa, Homo sapiens
  CDR3 for beta chain variable domain of TCR clone 181266 (TRBV7-2, TRBJ2-3)
CASSSGISTDTQYF

SEQ ID NO: 362533 - protein, 15 aa, Homo sapiens
  CDR3 for alpha chain variable domain of TCR clone 181267 (TRAV20, TRAJ23)
CAVPAVRNQGGKLIF

SEQ ID NO: 362534 - protein, 16 aa, Homo sapiens
  CDR3 for beta chain variable domain of TCR clone 181267 (TRBV27, TRBJ2-7)
CASSKQGRGWAYEQFF

SEQ ID NO: 362535 - protein, 19 aa, Homo sapiens
  CDR3 for alpha chain variable domain of TCR clone 181268 (TRAV13-1, TRAJ52)
CAASPYQNAGGTSYGKLTF

SEQ ID NO: 362536 - protein, 15 aa, Homo sapiens
  CDR3 for beta chain variable domain of TCR clone 181268 (TRBV10-3, TRBJ2-3)
CAISLTSGGTDTQYF

SEQ ID NO: 362537 - protein, 13 aa, Homo sapiens
  CDR3 for alpha chain variable domain of TCR clone 181269 (TRAV8-4, TRAJ9)
CAVSDTGGFKTIF

SEQ ID NO: 362538 - protein, 19 aa, Homo sapiens
  CDR3 for beta chain variable domain of TCR clone 181269 (TRBV11-3, TRBJ2-2)
CASSTRPGAKTTNTGELFF

SEQ ID NO: 362539 - protein, 14 aa, Homo sapiens
  CDR3 for alpha chain variable domain of TCR clone 181270 (TRAV8-3, TRAJ4)
CAVGAAGGYNKLIF

SEQ ID NO: 362540 - protein, 15 aa, Homo sapiens
  CDR3 for beta chain variable domain of TCR clone 181270 (TRBV7-8, TRBJ1-1)
CASSLGDSRYTEAFF

SEQ ID NO: 362541 - protein, 16 aa, Homo sapiens
  CDR3 for alpha chain variable domain of TCR clone 181271 (TRAV23/DV6, TRAJ9)
CAASIGGNTGGFKTIF

SEQ ID NO: 362542 - protein, 16 aa, Homo sapiens
  CDR3 for beta chain variable domain of TCR clone 181271 (TRBV24-1, TRBJ2-3)
CATSDRRQDLTDTQYF

SEQ ID NO: 362543 - protein, 16 aa, Homo sapiens
  CDR3 for alpha chain variable domain of TCR clone 181272 (TRAV8-6, TRAJ28)
CAVTSKPGAGRYQFTF

SEQ ID NO: 362544 - protein, 16 aa, Homo sapiens
  CDR3 for beta chain variable domain of TCR clone 181272 (TRBV12-4, TRBJ2-5)
CASSWRPSGDLETQYF

SEQ ID NO: 362545 - protein, 14 aa, Homo sapiens
  CDR3 for alpha chain variable domain of TCR clone 181273 (TRAV12-3, TRAJ33)
CAMSVPGSNYQLIC

SEQ ID NO: 362546 - protein, 12 aa, Homo sapiens
  CDR3 for beta chain variable domain of TCR clone 181273 (TRBV7-8, TRBJ2-7)
CASSLGDRERYF

SEQ ID NO: 362547 - protein, 14 aa, Homo sapiens
  CDR3 for alpha chain variable domain of TCR clone 181274 (TRAV8-3, TRAJ4)
CAVGAAGGYNKLIF

SEQ ID NO: 362548 - protein, 14 aa, Homo sapiens
  CDR3 for beta chain variable domain of TCR clone 181274 (TRBV7-2, TRBJ1-5)
CASSTQGAGQPQHF

SEQ ID NO: 362549 - protein, 10 aa, Homo sapiens
  CDR3 for alpha chain variable domain of TCR clone 181275 (TRAV30, TRAJ48)
CGIGNEKLTF

SEQ ID NO: 362550 - protein, 15 aa, Homo sapiens
  CDR3 for beta chain variable domain of TCR clone 181275 (TRBV28, TRBJ2-5)
CASSPPWSSQETQYF

SEQ ID NO: 362551 - protein, 10 aa, Homo sapiens
  CDR3 for alpha chain variable domain of TCR clone 181276 (TRAV27, TRAJ58)
SETSGSRLTF

SEQ ID NO: 362552 - protein, 13 aa, Homo sapiens
  CDR3 for beta chain variable domain of TCR clone 181276 (TRBV4-2, TRBJ1-1)
CSSSQAGNTEAFF

SEQ ID NO: 362553 - protein, 15 aa, Homo sapiens
  CDR3 for alpha chain variable domain of TCR clone 181277 (TRAV13-1, TRAJ44)
CAASRGGGTASKLTF

SEQ ID NO: 362554 - protein, 13 aa, Homo sapiens
  CDR3 for beta chain variable domain of TCR clone 181277 (TRBV12-4, TRBJ1-1)
CASSPGTGFEAFF

SEQ ID NO: 362555 - protein, 14 aa, Homo sapiens
  CDR3 for alpha chain variable domain of TCR clone 181278 (TRAV6, TRAJ37)
CALVALATQANQSL

SEQ ID NO: 362556 - protein, 16 aa, Homo sapiens
  CDR3 for beta chain variable domain of TCR clone 181278 (TRBV3-1, TRBJ2-7)
CASSQGATGVAYEQYF

SEQ ID NO: 362557 - protein, 15 aa, Homo sapiens
  CDR3 for alpha chain variable domain of TCR clone 181279 (TRAV3, TRAJ30)
CAVRDEYGRDDQIIF

SEQ ID NO: 362558 - protein, 16 aa, Homo sapiens
  CDR3 for beta chain variable domain of TCR clone 181279 (TRBV5-1, TRBJ2-5)
CASSLANHRGRETQYF

SEQ ID NO: 362559 - protein, 16 aa, Homo sapiens
  CDR3 for alpha chain variable domain of TCR clone 181280 (TRAV12-2, TRAJ18)
FAVTTDRGSTLGRLYF

SEQ ID NO: 362560 - protein, 14 aa, Homo sapiens
  CDR3 for beta chain variable domain of TCR clone 181280 (TRBV4-2, TRBJ1-5)
CASSQDSINQPQHF

SEQ ID NO: 362561 - protein, 15 aa, Homo sapiens
  CDR3 for alpha chain variable domain of TCR clone 181281 (TRAV23/DV6, TRAJ30)
FAASSQESRDDKIIF

SEQ ID NO: 362562 - protein, 17 aa, Homo sapiens
  CDR3 for beta chain variable domain of TCR clone 181281 (TRBV4-3, TRBJ2-1)
CASSQFSSGRASGEQFF

SEQ ID NO: 362563 - protein, 14 aa, Homo sapiens
  CDR3 for alpha chain variable domain of TCR clone 181282 (TRAV12-1, TRAJ17)
CVVNYKAAGNKLTF

SEQ ID NO: 362564 - protein, 15 aa, Homo sapiens
  CDR3 for beta chain variable domain of TCR clone 181282 (TRBV20-1, TRBJ2-7)
CTARDRVSGMDEQYF

SEQ ID NO: 362565 - protein, 16 aa, Homo sapiens
  CDR3 for alpha chain variable domain of TCR clone 181283 (TRAV3, TRAJ37)
CAVRGKGSGNTGKLIF

SEQ ID NO: 362566 - protein, 15 aa, Homo sapiens
  CDR3 for beta chain variable domain of TCR clone 181283 (TRBV7-7, TRBJ2-1)
CASSRGGASYNEQFF

SEQ ID NO: 362567 - protein, 15 aa, Homo sapiens
  CDR3 for alpha chain variable domain of TCR clone 181284 (TRAV12-2, TRAJ43)
CAFDMRFGAGTRLTV

SEQ ID NO: 362568 - protein, 14 aa, Homo sapiens
  CDR3 for beta chain variable domain of TCR clone 181284 (TRBV7-9, TRBJ2-7)
CASSLSQGSYEQYF

SEQ ID NO: 362569 - protein, 13 aa, Homo sapiens
  CDR3 for alpha chain variable domain of TCR clone 181285 (TRAV13-1, TRAJ6)
CAASSGGSSIPTF

SEQ ID NO: 362570 - protein, 15 aa, Homo sapiens
  CDR3 for beta chain variable domain of TCR clone 181285 (TRBV12-4, TRBJ2-5)
CASSPPTGLQETQYF

SEQ ID NO: 362571 - protein, 14 aa, Homo sapiens
  CDR3 for alpha chain variable domain of TCR clone 181286 (TRAV16, TRAJ42)
CALLAGGSQGNLIF

SEQ ID NO: 362572 - protein, 13 aa, Homo sapiens
  CDR3 for beta chain variable domain of TCR clone 181286 (TRBV7-9, TRBJ1-2)
CASSLKQYYGYTF

SEQ ID NO: 362573 - protein, 14 aa, Homo sapiens
  CDR3 for alpha chain variable domain of TCR clone 181287 (TRAV23/DV6, TRAJ11)
CAALIGGGYSTLNF

SEQ ID NO: 362574 - protein, 13 aa, Homo sapiens
  CDR3 for beta chain variable domain of TCR clone 181287 (TRBV11-3, TRBJ1-1)
CASSLGGNTEAFF

SEQ ID NO: 362575 - protein, 14 aa, Homo sapiens
  CDR3 for alpha chain variable domain of TCR clone 181288 (TRAV8-6, TRAJ12)
CAVKAADSSYKLIF

SEQ ID NO: 362576 - protein, 15 aa, Homo sapiens
  CDR3 for beta chain variable domain of TCR clone 181288 (TRBV5-1, TRBJ2-5)
CAISLGLAEQETQYF

SEQ ID NO: 362577 - protein, 11 aa, Homo sapiens
  CDR3 for alpha chain variable domain of TCR clone 181289 (TRAV1-1, TRAJ23)
CAVREGGKLIF

SEQ ID NO: 362578 - protein, 20 aa, Homo sapiens
  CDR3 for beta chain variable domain of TCR clone 181289 (TRBV7-8, TRBJ2-2)
CASSHLFPGPTIHITGELSF

SEQ ID NO: 362579 - protein, 15 aa, Homo sapiens
  CDR3 for alpha chain variable domain of TCR clone 181290 (TRAV12-2, TRAJ50)
CAVNGLETSYEKVIF

SEQ ID NO: 362580 - protein, 16 aa, Homo sapiens
  CDR3 for beta chain variable domain of TCR clone 181290 (TRBV5-4, TRBJ2-3)
CASQQPGAGGADTQYF

SEQ ID NO: 362581 - protein, 15 aa, Homo sapiens
  CDR3 for alpha chain variable domain of TCR clone 181291 (TRAV8-3, TRAJ11)
CAVGLLNSGYSTLTF

SEQ ID NO: 362582 - protein, 16 aa, Homo sapiens
  CDR3 for beta chain variable domain of TCR clone 181291 (TRBV7-9, TRBJ1-2)
CASSLGCSSGEDGYSF

SEQ ID NO: 362583 - protein, 17 aa, Homo sapiens
  CDR3 for alpha chain variable domain of TCR clone 181292 (TRAV8-4, TRAJ11)
CAVSDRGENLGYSTLTF

SEQ ID NO: 362584 - protein, 14 aa, Homo sapiens
  CDR3 for beta chain variable domain of TCR clone 181292 (TRBV20-1, TRBJ2-1)
CSPNDEASYNEQFF

SEQ ID NO: 362585 - protein, 14 aa, Homo sapiens
  CDR3 for alpha chain variable domain of TCR clone 181293 (TRAV1-1, TRAJ23)
CAVSIYNQGGKLIF

SEQ ID NO: 362586 - protein, 15 aa, Homo sapiens
  CDR3 for beta chain variable domain of TCR clone 181293 (TRBV9, TRBJ1-6)
CASSVAGTEDSPLHF

SEQ ID NO: 362587 - protein, 15 aa, Homo sapiens
  CDR3 for alpha chain variable domain of TCR clone 181294 (TRAV2, TRAJ13)
CATPSYSGGYQKVTF

SEQ ID NO: 362588 - protein, 13 aa, Homo sapiens
  CDR3 for beta chain variable domain of TCR clone 181294 (TRBV7-3, TRBJ2-5)
CASSFRGGETQYF

SEQ ID NO: 362589 - protein, 14 aa, Homo sapiens
  CDR3 for alpha chain variable domain of TCR clone 181295 (TRAV23/DV6, TRAJ4)
CAAPSSGGYNKLIF

SEQ ID NO: 362590 - protein, 17 aa, Homo sapiens
  CDR3 for beta chain variable domain of TCR clone 181295 (TRBV20-1, TRBJ2-2)
CSASGSGQGGLTGELFF

SEQ ID NO: 362591 - protein, 16 aa, Homo sapiens
  CDR3 for alpha chain variable domain of TCR clone 181296 (TRAV12-3, TRAJ53)
CAMSPGSGGSNYKLTI

SEQ ID NO: 362592 - protein, 12 aa, Homo sapiens
  CDR3 for beta chain variable domain of TCR clone 181296 (TRBV7-8, TRBJ2-7)
CASSLGDREQYF

SEQ ID NO: 362593 - protein, 14 aa, Homo sapiens
  CDR3 for alpha chain variable domain of TCR clone 181297 (TRAV3, TRAJ22)
CAVRDYGSARQLTF

SEQ ID NO: 362594 - protein, 15 aa, Homo sapiens
  CDR3 for beta chain variable domain of TCR clone 181297 (TRBV7-9, TRBJ1-4)
CASSARTGGNEKLFF

SEQ ID NO: 362595 - protein, 15 aa, Homo sapiens
  CDR3 for alpha chain variable domain of TCR clone 181298 (TRAV17, TRAJ10)
CATDASGGRGNKLTF

SEQ ID NO: 362596 - protein, 14 aa, Homo sapiens
  CDR3 for beta chain variable domain of TCR clone 181298 (TRBV20-1, TRBJ2-5)
CSVPYRGRAETQYF

SEQ ID NO: 362597 - protein, 14 aa, Homo sapiens
  CDR3 for alpha chain variable domain of TCR clone 181299 (TRAV2, TRAJ9)
CAVEDRSGGFKTIF

SEQ ID NO: 362598 - protein, 16 aa, Homo sapiens
  CDR3 for beta chain variable domain of TCR clone 181299 (TRBV4-2, TRBJ2-1)
CASSQGEGRTVNEQFF

SEQ ID NO: 362599 - protein, 13 aa, Homo sapiens
  CDR3 for alpha chain variable domain of TCR clone 181300 (TRAV17, TRAJ9)
CATDGTGGFKTIF

SEQ ID NO: 362600 - protein, 19 aa, Homo sapiens
  CDR3 for beta chain variable domain of TCR clone 181300 (TRBV18, TRBJ1-3)
CASSPLSRTGMSSGNTIYF

SEQ ID NO: 362601 - protein, 14 aa, Homo sapiens
  CDR3 for alpha chain variable domain of TCR clone 181301 (TRAV12-2, TRAJ17)
CAALFKAAGNKLTF

SEQ ID NO: 362602 - protein, 12 aa, Homo sapiens
  CDR3 for beta chain variable domain of TCR clone 181301 (TRBV11-2, TRBJ2-2)
CASSLGGGELFF

SEQ ID NO: 362603 - protein, 14 aa, Homo sapiens
  CDR3 for alpha chain variable domain of TCR clone 181302 (TRAV12-3, TRAJ20)
CAMSARRGDYKLTF

SEQ ID NO: 362604 - protein, 14 aa, Homo sapiens
  CDR3 for beta chain variable domain of TCR clone 181302 (TRBV7-3, TRBJ2-3)
CASSPSARTDTQYF

SEQ ID NO: 362605 - protein, 13 aa, Homo sapiens
  CDR3 for alpha chain variable domain of TCR clone 181303 (TRAV3, TRAJ27)
CAVRPLGAGKSTF

SEQ ID NO: 362606 - protein, 13 aa, Homo sapiens
  CDR3 for beta chain variable domain of TCR clone 181303 (TRBV12-4, TRBJ1-2)
CASTMTSNYGYTF

SEQ ID NO: 362607 - protein, 23 aa, Homo sapiens
  CDR3 for alpha chain variable domain of TCR clone 181304 (TRAV30, TRAJ43)
CTLRPPSSVTQEPTSAALSDMRF

SEQ ID NO: 362608 - protein, 14 aa, Homo sapiens
  CDR3 for beta chain variable domain of TCR clone 181304 (TRBV18, TRBJ2-5)
CASSPGVSQETQYF

SEQ ID NO: 362609 - protein, 14 aa, Homo sapiens
  CDR3 for alpha chain variable domain of TCR clone 181305 (TRAV9-2, TRAJ39)
CALYIYNAGNMLTF

SEQ ID NO: 362610 - protein, 14 aa, Homo sapiens
  CDR3 for beta chain variable domain of TCR clone 181305 (TRBV18, TRBJ1-2)
CASSPDRVVYGYTF

SEQ ID NO: 362611 - protein, 13 aa, Homo sapiens
  CDR3 for alpha chain variable domain of TCR clone 181306 (TRAV2, TRAJ9)
CAVSGTGGFKTIF

SEQ ID NO: 362612 - protein, 13 aa, Homo sapiens
  CDR3 for beta chain variable domain of TCR clone 181306 (TRBV20-1, TRBJ2-7)
CSATHTSGYEQYF

SEQ ID NO: 362613 - protein, 11 aa, Homo sapiens
  CDR3 for alpha chain variable domain of TCR clone 181307 (TRAV13-1, TRAJ43)
CAAHSNNDMRF

SEQ ID NO: 362614 - protein, 15 aa, Homo sapiens
  CDR3 for beta chain variable domain of TCR clone 181307 (TRBV6-1, TRBJ2-2)
CASSRLRGDTGELFF

SEQ ID NO: 362615 - protein, 16 aa, Homo sapiens
  CDR3 for alpha chain variable domain of TCR clone 181308 (TRAV12-3, TRAJ53)
CAMSPGSGSSNYKLTF

SEQ ID NO: 362616 - protein, 14 aa, Homo sapiens
  CDR3 for beta chain variable domain of TCR clone 181308 (TRBV7-2, TRBJ1-1)
CASSFLTGTTEAFF

SEQ ID NO: 362617 - protein, 16 aa, Homo sapiens
  CDR3 for alpha chain variable domain of TCR clone 181309 (TRAV2, TRAJ4)
CAVEDRFSGGYNKLIF

SEQ ID NO: 362618 - protein, 13 aa, Homo sapiens
  CDR3 for beta chain variable domain of TCR clone 181309 (TRBV7-7, TRBJ2-5)
FASSRSGQETQYF

SEQ ID NO: 362619 - protein, 14 aa, Homo sapiens
  CDR3 for alpha chain variable domain of TCR clone 181310 (TRAV23/DV6, TRAJ11)
CAALIGGGYSALTF

SEQ ID NO: 362620 - protein, 14 aa, Homo sapiens
  CDR3 for beta chain variable domain of TCR clone 181310 (TRBV25-1, TRBJ1-1)
CASTHLGGNTEAFF

SEQ ID NO: 362621 - protein, 14 aa, Homo sapiens
  CDR3 for alpha chain variable domain of TCR clone 181311 (TRAV29/DV5, TRAJ20)
CAATIRANDYKLSF

SEQ ID NO: 362622 - protein, 15 aa, Homo sapiens
  CDR3 for beta chain variable domain of TCR clone 181311 (TRBV20-1, TRBJ2-1)
CSASSAGSSYNEQFF

SEQ ID NO: 362623 - protein, 19 aa, Homo sapiens
  CDR3 for alpha chain variable domain of TCR clone 181312 (TRAV2, )
CAVEEDIQNPDPAVYQLRD

SEQ ID NO: 362624 - protein, 14 aa, Homo sapiens
  CDR3 for beta chain variable domain of TCR clone 181312 (TRBV19, TRBJ1-2)
CTSNPGQAPYGYTF

SEQ ID NO: 362625 - protein, 15 aa, Homo sapiens
  CDR3 for alpha chain variable domain of TCR clone 181313 (TRAV26-1, TRAJ44)
CIVRIGTGTASKLTF

SEQ ID NO: 362626 - protein, 13 aa, Homo sapiens
  CDR3 for beta chain variable domain of TCR clone 181313 (TRBV3-1, TRBJ1-1)
CASSPGVITEAFF

SEQ ID NO: 362627 - protein, 15 aa, Homo sapiens
  CDR3 for alpha chain variable domain of TCR clone 181314 (TRAV12-3, TRAJ42)
CAMSGHGGSQGNLIF

SEQ ID NO: 362628 - protein, 15 aa, Homo sapiens
  CDR3 for beta chain variable domain of TCR clone 181314 (TRBV5-1, TRBJ2-4)
CASSLGGGGSYMQYF

SEQ ID NO: 362629 - protein, 16 aa, Homo sapiens
  CDR3 for alpha chain variable domain of TCR clone 181315 (TRAV3, TRAJ10)
CAVRDMRAGGGNKLTF

SEQ ID NO: 362630 - protein, 16 aa, Homo sapiens
  CDR3 for beta chain variable domain of TCR clone 181315 (TRBV7-2, TRBJ1-4)
CASSLAPGRRDEKLFF

SEQ ID NO: 362631 - protein, 13 aa, Homo sapiens
  CDR3 for alpha chain variable domain of TCR clone 181316 (TRAV26-2, TRAJ43)
CILRAVNNNDMRF

SEQ ID NO: 362632 - protein, 15 aa, Homo sapiens
  CDR3 for beta chain variable domain of TCR clone 181316 (TRBV7-2, TRBJ2-1)
CASTHGRGIYNEQFF

SEQ ID NO: 362633 - protein, 17 aa, Homo sapiens
  CDR3 for alpha chain variable domain of TCR clone 181317 (TRAV8-6, TRAJ58)
CAVSSWVGETSGSRLTF

SEQ ID NO: 362634 - protein, 15 aa, Homo sapiens
  CDR3 for beta chain variable domain of TCR clone 181317 (TRBV7-3, TRBJ2-1)
CASSPTGGGEGEQFF

SEQ ID NO: 362635 - protein, 13 aa, Homo sapiens
  CDR3 for alpha chain variable domain of TCR clone 181318 (TRAV26-1, TRAJ8)
CIVRSTGFQKLVF

SEQ ID NO: 362636 - protein, 15 aa, Homo sapiens
  CDR3 for beta chain variable domain of TCR clone 181318 (TRBV4-1, TRBJ2-5)
CASSQWDLYQETQYF

SEQ ID NO: 362637 - protein, 11 aa, Homo sapiens
  CDR3 for alpha chain variable domain of TCR clone 181319 (TRAV21, TRAJ48)
CAVDGNEKLTF

SEQ ID NO: 362638 - protein, 15 aa, Homo sapiens
  CDR3 for beta chain variable domain of TCR clone 181319 (TRBV7-9, TRBJ2-7)
CASSLALAEAYEQYF

SEQ ID NO: 362639 - protein, 15 aa, Homo sapiens
  CDR3 for alpha chain variable domain of TCR clone 181320 (TRAV38-2/DV8, TRAJ45)
CAYWDSGGGADGLTF

SEQ ID NO: 362640 - protein, 13 aa, Homo sapiens
  CDR3 for beta chain variable domain of TCR clone 181320 (TRBV7-2, TRBJ2-7)
CASSSPSGSEQYF

SEQ ID NO: 362641 - protein, 14 aa, Homo sapiens
  CDR3 for alpha chain variable domain of TCR clone 181321 (TRAV12-2, TRAJ13)
CAVKKTGGYQKVTF

SEQ ID NO: 362642 - protein, 11 aa, Homo sapiens
  CDR3 for beta chain variable domain of TCR clone 181321 (TRBV11-2, TRBJ2-2)
CASSLPGDLFF

SEQ ID NO: 362643 - protein, 14 aa, Homo sapiens
  CDR3 for alpha chain variable domain of TCR clone 181322 (TRAV8-3, TRAJ7)
CAAIELYGNNGLAF

SEQ ID NO: 362644 - protein, 15 aa, Homo sapiens
  CDR3 for beta chain variable domain of TCR clone 181322 (TRBV3-1, TRBJ2-1)
CASSTGDTNYNEQLF

SEQ ID NO: 362645 - protein, 14 aa, Homo sapiens
  CDR3 for alpha chain variable domain of TCR clone 181323 (TRAV12-1, TRAJ22)
CVVPYRGAARQLTF

SEQ ID NO: 362646 - protein, 15 aa, Homo sapiens
  CDR3 for beta chain variable domain of TCR clone 181323 (TRBV12-4, TRBJ2-1)
CASSLGTSAVNEQFF

SEQ ID NO: 362647 - protein, 13 aa, Homo sapiens
  CDR3 for alpha chain variable domain of TCR clone 181324 (TRAV13-1, TRAJ5)
CAAEHTGTRALTF

SEQ ID NO: 362648 - protein, 13 aa, Homo sapiens
  CDR3 for beta chain variable domain of TCR clone 181324 (TRBV2, TRBJ1-4)
CASNRGTNEKLFF

SEQ ID NO: 362649 - protein, 12 aa, Homo sapiens
  CDR3 for alpha chain variable domain of TCR clone 181325 (TRAV12-3, TRAJ17)
CAMTLTGNKLNF

SEQ ID NO: 362650 - protein, 14 aa, Homo sapiens
  CDR3 for beta chain variable domain of TCR clone 181325 (TRBV18, TRBJ2-7)
CASSPRGGAYEQYF

SEQ ID NO: 362651 - protein, 16 aa, Homo sapiens
  CDR3 for alpha chain variable domain of TCR clone 181326 (TRAV30, TRAJ24)
CGTEIVDADSWGKFQF

SEQ ID NO: 362652 - protein, 14 aa, Homo sapiens
  CDR3 for beta chain variable domain of TCR clone 181326 (TRBV9, TRBJ2-4)
CASSASGTSGFQYF

SEQ ID NO: 362653 - protein, 13 aa, Homo sapiens
  CDR3 for alpha chain variable domain of TCR clone 181327 (TRAV2, TRAJ40)
CAVVTSGTYKYIF

SEQ ID NO: 362654 - protein, 15 aa, Homo sapiens
  CDR3 for beta chain variable domain of TCR clone 181327 (TRBV7-2, TRBJ2-3)
CASSLASARTDTQYF

SEQ ID NO: 362655 - protein, 14 aa, Homo sapiens
  CDR3 for alpha chain variable domain of TCR clone 181328 (TRAV12-3, TRAJ54)
FAMRIIQGAQKLVF

SEQ ID NO: 362656 - protein, 16 aa, Homo sapiens
  CDR3 for beta chain variable domain of TCR clone 181328 (TRBV28, TRBJ2-1)
CASRVPASGRIGEQFF

SEQ ID NO: 362657 - protein, 14 aa, Homo sapiens
  CDR3 for alpha chain variable domain of TCR clone 181329 (TRAV30, TRAJ26)
CGTEIVSYGQNFVF

SEQ ID NO: 362658 - protein, 13 aa, Homo sapiens
  CDR3 for beta chain variable domain of TCR clone 181329 (TRBV24-1, TRBJ2-2)
CATIDWSTGELFF

SEQ ID NO: 362659 - protein, 17 aa, Homo sapiens
  CDR3 for alpha chain variable domain of TCR clone 181330 (TRAV3, TRAJ6)
CAVRDGSRAGGSYIPTF

SEQ ID NO: 362660 - protein, 16 aa, Homo sapiens
  CDR3 for beta chain variable domain of TCR clone 181330 (TRBV4-3, TRBJ2-1)
CASSPALDRGVNEQFF

SEQ ID NO: 362661 - protein, 13 aa, Homo sapiens
  CDR3 for alpha chain variable domain of TCR clone 181331 (TRAV22, TRAJ29)
CAVGGSGNITLVF

SEQ ID NO: 362662 - protein, 13 aa, Homo sapiens
  CDR3 for beta chain variable domain of TCR clone 181331 (TRBV4-2, TRBJ1-1)
CASSQAGNTEAFF

SEQ ID NO: 362663 - protein, 15 aa, Homo sapiens
  CDR3 for alpha chain variable domain of TCR clone 181332 (TRAV13-1, TRAJ44)
CAASRGGGTASKLTF

SEQ ID NO: 362664 - protein, 14 aa, Homo sapiens
  CDR3 for beta chain variable domain of TCR clone 181332 (TRBV15, TRBJ2-3)
CATRSGTSTDTQYF

SEQ ID NO: 362665 - protein, 15 aa, Homo sapiens
  CDR3 for alpha chain variable domain of TCR clone 181333 (TRAV17, TRAJ56)
CATEPFNGANSKLTF

SEQ ID NO: 362666 - protein, 15 aa, Homo sapiens
  CDR3 for beta chain variable domain of TCR clone 181333 (TRBV28, TRBJ1-5)
CASSRTGGYVQPQHF

SEQ ID NO: 362667 - protein, 10 aa, Homo sapiens
  CDR3 for alpha chain variable domain of TCR clone 181334 (TRAV12-3, TRAJ49)
CAMNDDQFYF

SEQ ID NO: 362668 - protein, 14 aa, Homo sapiens
  CDR3 for beta chain variable domain of TCR clone 181334 (TRBV2, TRBJ2-1)
CASRTGSSYNEQFF

SEQ ID NO: 362669 - protein, 15 aa, Homo sapiens
  CDR3 for alpha chain variable domain of TCR clone 181335 (TRAV17, TRAJ56)
CATDANTGSNSKLTF

SEQ ID NO: 362670 - protein, 12 aa, Homo sapiens
  CDR3 for beta chain variable domain of TCR clone 181335 (TRBV7-8, TRBJ2-7)
CASSLGDREQYF

SEQ ID NO: 362671 - protein, 12 aa, Homo sapiens
  CDR3 for alpha chain variable domain of TCR clone 181336 (TRAV12-1, TRAJ8)
CVVNTGFQKLVF

SEQ ID NO: 362672 - protein, 12 aa, Homo sapiens
  CDR3 for beta chain variable domain of TCR clone 181336 (TRBV7-8, TRBJ2-7)
CASSLGDREQYF

SEQ ID NO: 362673 - protein, 11 aa, Homo sapiens
  CDR3 for alpha chain variable domain of TCR clone 181337 (TRAV21, TRAJ34)
CAHYNTDKLIF

SEQ ID NO: 362674 - protein, 16 aa, Homo sapiens
  CDR3 for beta chain variable domain of TCR clone 181337 (TRBV10-2, TRBJ1-1)
CASGEFGEGASSEAFF

SEQ ID NO: 362675 - protein, 14 aa, Homo sapiens
  CDR3 for alpha chain variable domain of TCR clone 181338 (TRAV26-1, TRAJ39)
CIVRGSRAGNMLTF

SEQ ID NO: 362676 - protein, 15 aa, Homo sapiens
  CDR3 for beta chain variable domain of TCR clone 181338 (TRBV7-9, TRBJ1-5)
CASSQGHLPNQPQHF

SEQ ID NO: 362677 - protein, 11 aa, Homo sapiens
  CDR3 for alpha chain variable domain of TCR clone 181339 (TRAV3, TRAJ21)
CAVGNFNKFYF

SEQ ID NO: 362678 - protein, 16 aa, Homo sapiens
  CDR3 for beta chain variable domain of TCR clone 181339 (TRBV7-8, TRBJ2-1)
CASSLVGGGPYNEQFF

SEQ ID NO: 362679 - protein, 13 aa, Homo sapiens
  CDR3 for alpha chain variable domain of TCR clone 181340 (TRAV20, TRAJ26)
CAVPTSYGQNFVF

SEQ ID NO: 362680 - protein, 16 aa, Homo sapiens
  CDR3 for beta chain variable domain of TCR clone 181340 (TRBV28, TRBJ2-7)
CASSSHQGRDVYEQYF

SEQ ID NO: 362681 - protein, 16 aa, Homo sapiens
  CDR3 for alpha chain variable domain of TCR clone 181341 (TRAV17, TRAJ36)
CATASLNWGKQPLLWD

SEQ ID NO: 362682 - protein, 13 aa, Homo sapiens
  CDR3 for beta chain variable domain of TCR clone 181341 (TRBV4-1, TRBJ1-1)
CASSQLGTGEAFF

SEQ ID NO: 362683 - protein, 16 aa, Homo sapiens
  CDR3 for alpha chain variable domain of TCR clone 181342 (TRAV23/DV6, TRAJ52)
CAASMNGGTSYGKLPF

SEQ ID NO: 362684 - protein, 16 aa, Homo sapiens
  CDR3 for beta chain variable domain of TCR clone 181342 (TRBV27, TRBJ2-2)
CASSFRGLVRTGELFF

SEQ ID NO: 362685 - protein, 12 aa, Homo sapiens
  CDR3 for alpha chain variable domain of TCR clone 181343 (TRAV29/DV5, TRAJ41)
CAASDSGYALNF

SEQ ID NO: 362686 - protein, 12 aa, Homo sapiens
  CDR3 for beta chain variable domain of TCR clone 181343 (TRBV12-4, TRBJ2-7)
CASSLGGYEQYF

SEQ ID NO: 362687 - protein, 14 aa, Homo sapiens
  CDR3 for alpha chain variable domain of TCR clone 181344 (TRAV9-2, TRAJ39)
CALYIYNAGNMLTF

SEQ ID NO: 362688 - protein, 11 aa, Homo sapiens
  CDR3 for beta chain variable domain of TCR clone 181344 (TRBV6-3, TRBJ2-3)
CATGQADMQYF

SEQ ID NO: 362689 - protein, 15 aa, Homo sapiens
  CDR3 for alpha chain variable domain of TCR clone 181345 (TRAV2, TRAJ9)
CAVEDRGTGGFKTFF

SEQ ID NO: 362690 - protein, 16 aa, Homo sapiens
  CDR3 for beta chain variable domain of TCR clone 181345 (TRBV24-1, TRBJ2-3)
CATSDPGTGATDTQYF

SEQ ID NO: 362691 - protein, 14 aa, Homo sapiens
  CDR3 for alpha chain variable domain of TCR clone 181346 (TRAV17, TRAJ39)
CATDPVRAGNMLTF

SEQ ID NO: 362692 - protein, 15 aa, Homo sapiens
  CDR3 for beta chain variable domain of TCR clone 181346 (TRBV13, TRBJ1-5)
CASSFEQGGVQPQHF

SEQ ID NO: 362693 - protein, 22 aa, Homo sapiens
  CDR3 for alpha chain variable domain of TCR clone 181347 (TRAV1-1, TRAJ38)
CASNAGNNHIQNPDPAVYQLRD

SEQ ID NO: 362694 - protein, 16 aa, Homo sapiens
  CDR3 for beta chain variable domain of TCR clone 181347 (TRBV7-9, TRBJ1-2)
CASSLGFSSGEDGYTF

SEQ ID NO: 362695 - protein, 14 aa, Homo sapiens
  CDR3 for alpha chain variable domain of TCR clone 181348 (TRAV13-1, TRAJ44)
CAAKATGTASKLTF

SEQ ID NO: 362696 - protein, 14 aa, Homo sapiens
  CDR3 for beta chain variable domain of TCR clone 181348 (TRBV4-1, TRBJ2-5)
CASSQYRDQETQYF

SEQ ID NO: 362697 - protein, 13 aa, Homo sapiens
  CDR3 for alpha chain variable domain of TCR clone 181349 (TRAV1-2, TRAJ9)
CAALNTGGFKTIF

SEQ ID NO: 362698 - protein, 14 aa, Homo sapiens
  CDR3 for beta chain variable domain of TCR clone 181349 (TRBV13, TRBJ2-7)
CASSGLAGLYEQYF

SEQ ID NO: 362699 - protein, 14 aa, Homo sapiens
  CDR3 for alpha chain variable domain of TCR clone 181350 (TRAV12-2, TRAJ13)
CAVKKTGGYQKVTF

SEQ ID NO: 362700 - protein, 17 aa, Homo sapiens
  CDR3 for beta chain variable domain of TCR clone 181350 (TRBV24-1, TRBJ2-5)
CATSDATSGDPQETQYF

SEQ ID NO: 362701 - protein, 13 aa, Homo sapiens
  CDR3 for alpha chain variable domain of TCR clone 181351 (TRAV12-3, TRAJ57)
CAMVGAGSEKRVF

SEQ ID NO: 362702 - protein, 15 aa, Homo sapiens
  CDR3 for beta chain variable domain of TCR clone 181351 (TRBV7-2, TRBJ1-3)
CASSWGGITGNTIYF

SEQ ID NO: 362703 - protein, 18 aa, Homo sapiens
  CDR3 for alpha chain variable domain of TCR clone 181352 (TRAV13-1, TRAJ52)
CAAKNPNAGGTSYGKLTF

SEQ ID NO: 362704 - protein, 15 aa, Homo sapiens
  CDR3 for beta chain variable domain of TCR clone 181352 (TRBV27, TRBJ2-7)
CASSKAGRGGYEQYF

SEQ ID NO: 362705 - protein, 23 aa, Homo sapiens
  CDR3 for alpha chain variable domain of TCR clone 181353 (TRAV3, TRAJ38)
CAVRDCLNAGNNHIQNPDPAVSQ

SEQ ID NO: 362706 - protein, 14 aa, Homo sapiens
  CDR3 for beta chain variable domain of TCR clone 181353 (TRBV5-5, TRBJ1-5)
CASSGQGVDQPQHF

SEQ ID NO: 362707 - protein, 17 aa, Homo sapiens
  CDR3 for alpha chain variable domain of TCR clone 181354 (TRAV3, TRAJ42)
CAVRDRDYGGSQGNLIF

SEQ ID NO: 362708 - protein, 15 aa, Homo sapiens
  CDR3 for beta chain variable domain of TCR clone 181354 (TRBV6-5, TRBJ2-1)
CASSYDAGAGNVQFF

SEQ ID NO: 362709 - protein, 12 aa, Homo sapiens
  CDR3 for alpha chain variable domain of TCR clone 181355 (TRAV17, TRAJ4)
CAVSGGYNKLIF

SEQ ID NO: 362710 - protein, 13 aa, Homo sapiens
  CDR3 for beta chain variable domain of TCR clone 181355 (TRBV6-1, TRBJ1-1)
CTSSEGWGTEAFF

SEQ ID NO: 362711 - protein, 15 aa, Homo sapiens
  CDR3 for alpha chain variable domain of TCR clone 181356 (TRAV12-2, TRAJ43)
CAFDMSFGAGTRLIV

SEQ ID NO: 362712 - protein, 18 aa, Homo sapiens
  CDR3 for beta chain variable domain of TCR clone 181356 (TRBV20-1, TRBJ2-3)
CSASGLAGGPGTTDTQYF

SEQ ID NO: 362713 - protein, 11 aa, Homo sapiens
  CDR3 for alpha chain variable domain of TCR clone 181357 (TRAV2, TRAJ13)
CASGGYQKVTF

SEQ ID NO: 362714 - protein, 14 aa, Homo sapiens
  CDR3 for beta chain variable domain of TCR clone 181357 (TRBV7-8, TRBJ1-2)
CASSPDSLSYSYTF

SEQ ID NO: 362715 - protein, 14 aa, Homo sapiens
  CDR3 for alpha chain variable domain of TCR clone 181358 (TRAV13-1, TRAJ12)
CAASYMNSSYKLIF

SEQ ID NO: 362716 - protein, 13 aa, Homo sapiens
  CDR3 for beta chain variable domain of TCR clone 181358 (TRBV2, TRBJ2-5)
CASSDGSQETQYF

SEQ ID NO: 362717 - protein, 14 aa, Homo sapiens
  CDR3 for alpha chain variable domain of TCR clone 181359 (TRAV9-2, TRAJ39)
CALYIYNEGNMLTF

SEQ ID NO: 362718 - protein, 16 aa, Homo sapiens
  CDR3 for beta chain variable domain of TCR clone 181359 (TRBV19, TRBJ2-1)
CASSKAGPSSYNEQFF

SEQ ID NO: 362719 - protein, 14 aa, Homo sapiens
  CDR3 for alpha chain variable domain of TCR clone 181360 (TRAV1-2, TRAJ16)
CAVNRFSDGQKLLF

SEQ ID NO: 362720 - protein, 14 aa, Homo sapiens
  CDR3 for beta chain variable domain of TCR clone 181360 (TRBV5-1, TRBJ2-4)
CASSPQGGQNIQYF

SEQ ID NO: 362721 - protein, 23 aa, Homo sapiens
  CDR3 for alpha chain variable domain of TCR clone 181361 (TRAV30, TRAJ43)
CTLRPPSSVTQGPTSAALSDMRF

SEQ ID NO: 362722 - protein, 16 aa, Homo sapiens
  CDR3 for beta chain variable domain of TCR clone 181361 (TRBV5-1, TRBJ2-2)
CASSLWDTTNTGELFF

SEQ ID NO: 362723 - protein, 12 aa, Homo sapiens
  CDR3 for alpha chain variable domain of TCR clone 181362 (TRAV12-2, TRAJ8)
CAVNTGFQKLVF

SEQ ID NO: 362724 - protein, 18 aa, Homo sapiens
  CDR3 for beta chain variable domain of TCR clone 181362 (TRBV18, TRBJ1-3)
CASSPRGGAGPSGNTMYF

SEQ ID NO: 362725 - protein, 13 aa, Homo sapiens
  CDR3 for alpha chain variable domain of TCR clone 181363 (TRAV27, TRAJ6)
CAGGTRGGYIPTF

SEQ ID NO: 362726 - protein, 14 aa, Homo sapiens
  CDR3 for beta chain variable domain of TCR clone 181363 (TRBV6-3, TRBJ1-1)
CASSYQRRDTEAVF

SEQ ID NO: 362727 - protein, 14 aa, Homo sapiens
  CDR3 for alpha chain variable domain of TCR clone 181364 (TRAV17, TRAJ20)
CATLSGSNDFKLSF

SEQ ID NO: 362728 - protein, 14 aa, Homo sapiens
  CDR3 for beta chain variable domain of TCR clone 181364 (TRBV20-1, TRBJ1-1)
CSAQTRIGGTEAFF

SEQ ID NO: 362729 - protein, 13 aa, Homo sapiens
  CDR3 for alpha chain variable domain of TCR clone 181365 (TRAV8-1, TRAJ30)
CAVIMNRDDKIIF

SEQ ID NO: 362730 - protein, 15 aa, Homo sapiens
  CDR3 for beta chain variable domain of TCR clone 181365 (TRBV19, TRBJ2-3)
CASKPGTTSTDTQYF

SEQ ID NO: 362731 - protein, 12 aa, Homo sapiens
  CDR3 for alpha chain variable domain of TCR clone 181366 (TRAV12-3, TRAJ40)
CAMSSGTYKYIF

SEQ ID NO: 362732 - protein, 15 aa, Homo sapiens
  CDR3 for beta chain variable domain of TCR clone 181366 (TRBV7-3, TRBJ2-2)
CARSETGQGTGELFF

SEQ ID NO: 362733 - protein, 14 aa, Homo sapiens
  CDR3 for alpha chain variable domain of TCR clone 181367 (TRAV2, TRAJ23)
CAVIIYNPGGKLIF

SEQ ID NO: 362734 - protein, 13 aa, Homo sapiens
  CDR3 for beta chain variable domain of TCR clone 181367 (TRBV20-1, TRBJ2-3)
CSATSGGAGTQYF

SEQ ID NO: 362735 - protein, 17 aa, Homo sapiens
  CDR3 for alpha chain variable domain of TCR clone 181368 (TRAV3, TRAJ6)
CAVRDGPRGGGSHIPTF

SEQ ID NO: 362736 - protein, 16 aa, Homo sapiens
  CDR3 for beta chain variable domain of TCR clone 181368 (TRBV28, TRBJ2-1)
CASSSRVRDSYNEQFF

SEQ ID NO: 362737 - protein, 12 aa, Homo sapiens
  CDR3 for alpha chain variable domain of TCR clone 181369 (TRAV13-2, TRAJ23)
CAERHRGGKLIF

SEQ ID NO: 362738 - protein, 13 aa, Homo sapiens
  CDR3 for beta chain variable domain of TCR clone 181369 (TRBV12-4, TRBJ1-2)
CASSLRQGKGYSF

SEQ ID NO: 362739 - protein, 13 aa, Homo sapiens
  CDR3 for alpha chain variable domain of TCR clone 181370 (TRAV12-3, TRAJ13)
CAMSSGGYQKVTF

SEQ ID NO: 362740 - protein, 13 aa, Homo sapiens
  CDR3 for beta chain variable domain of TCR clone 181370 (TRBV20-1, TRBJ1-1)
CSAPPGGHTEAFC

SEQ ID NO: 362741 - protein, 12 aa, Homo sapiens
  CDR3 for alpha chain variable domain of TCR clone 181371 (TRAV16, TRAJ10)
CSRTGGGNKLTF

SEQ ID NO: 362742 - protein, 13 aa, Homo sapiens
  CDR3 for beta chain variable domain of TCR clone 181371 (TRBV25-1, TRBJ1-6)
CASHPRGDSPLHF

SEQ ID NO: 362743 - protein, 14 aa, Homo sapiens
  CDR3 for alpha chain variable domain of TCR clone 181372 (TRAV12-3, TRAJ10)
SHLPMTGGGNKLTF

SEQ ID NO: 362744 - protein, 15 aa, Homo sapiens
  CDR3 for beta chain variable domain of TCR clone 181372 (TRBV11-2, TRBJ1-3)
CASSLDGTVGNTIYF

SEQ ID NO: 362745 - protein, 10 aa, Homo sapiens
  CDR3 for alpha chain variable domain of TCR clone 181373 (TRAV25, TRAJ34)
CAENTDKPIF

SEQ ID NO: 362746 - protein, 14 aa, Homo sapiens
  CDR3 for beta chain variable domain of TCR clone 181373 (TRBV15, TRBJ2-3)
CATRSGTSTDTQYF

SEQ ID NO: 362747 - protein, 18 aa, Homo sapiens
  CDR3 for alpha chain variable domain of TCR clone 181374 (TRAV29/DV5, TRAJ26)
CSVLLCSKRKPEGQNFVF

SEQ ID NO: 362748 - protein, 17 aa, Homo sapiens
  CDR3 for beta chain variable domain of TCR clone 181374 (TRBV20-1, TRBJ2-2)
CSASGSGQGGLPGELFF

SEQ ID NO: 362749 - protein, 11 aa, Homo sapiens
  CDR3 for alpha chain variable domain of TCR clone 181375 (TRAV2, TRAJ13)
CASGGYQTVTF

SEQ ID NO: 362750 - protein, 13 aa, Homo sapiens
  CDR3 for beta chain variable domain of TCR clone 181375 (TRBV20-1, TRBJ1-1)
CSARVGGNTEAFF

SEQ ID NO: 362751 - protein, 13 aa, Homo sapiens
  CDR3 for alpha chain variable domain of TCR clone 181376 (TRAV2, TRAJ40)
CAVVTSGTYKYIF

SEQ ID NO: 362752 - protein, 13 aa, Homo sapiens
  CDR3 for beta chain variable domain of TCR clone 181376 (TRBV10-3, TRBJ1-2)
CAISERDSYDYTF

SEQ ID NO: 362753 - protein, 18 aa, Homo sapiens
  CDR3 for alpha chain variable domain of TCR clone 181377 (TRAV26-1, TRAJ52)
CIVRVEGAGGTSYGKLTF

SEQ ID NO: 362754 - protein, 13 aa, Homo sapiens
  CDR3 for beta chain variable domain of TCR clone 181377 (TRBV7-3, TRBJ1-2)
CASGLKRGYGYTF

SEQ ID NO: 362755 - protein, 14 aa, Homo sapiens
  CDR3 for alpha chain variable domain of TCR clone 181378 (TRAV8-4, TRAJ13)
CAVTLSGGYQKVTF

SEQ ID NO: 362756 - protein, 14 aa, Homo sapiens
  CDR3 for beta chain variable domain of TCR clone 181378 (TRBV7-3, TRBJ2-1)
CASSLAGGTNEQFF

SEQ ID NO: 362757 - protein, 18 aa, Homo sapiens
  CDR3 for alpha chain variable domain of TCR clone 181379 (TRAV9-2, TRAJ52)
CALSRHNAGGTSYGKLTF

SEQ ID NO: 362758 - protein, 11 aa, Homo sapiens
  CDR3 for beta chain variable domain of TCR clone 181379 (TRBV12-4, TRBJ2-3)
CASTATDTQYF

SEQ ID NO: 362759 - protein, 12 aa, Homo sapiens
  CDR3 for alpha chain variable domain of TCR clone 181380 (TRAV12-1, TRAJ31)
CVSWNNNARLMF

SEQ ID NO: 362760 - protein, 15 aa, Homo sapiens
  CDR3 for beta chain variable domain of TCR clone 181380 (TRBV7-2, TRBJ1-5)
CASSRDRGQDKPQHF

SEQ ID NO: 362761 - protein, 16 aa, Homo sapiens
  CDR3 for alpha chain variable domain of TCR clone 181381 (TRAV30, TRAJ24)
CGTEIVDADSWGTFQF

SEQ ID NO: 362762 - protein, 15 aa, Homo sapiens
  CDR3 for beta chain variable domain of TCR clone 181381 (TRBV5-1, TRBJ1-1)
CASSLAPRGNTEAFF

SEQ ID NO: 362763 - protein, 21 aa, Homo sapiens
  CDR3 for alpha chain variable domain of TCR clone 181382 (TRAV2, TRAJ26)
CAGSPGRLWSEFCLCSRNQIV

SEQ ID NO: 362764 - protein, 16 aa, Homo sapiens
  CDR3 for beta chain variable domain of TCR clone 181382 (TRBV13, TRBJ2-2)
CASSPRTGEHTGELFF

SEQ ID NO: 362765 - protein, 15 aa, Homo sapiens
  CDR3 for alpha chain variable domain of TCR clone 181383 (TRAV8-6, TRAJ48)
CCEPRFNFGNEKLTF

SEQ ID NO: 362766 - protein, 14 aa, Homo sapiens
  CDR3 for beta chain variable domain of TCR clone 181383 (TRBV7-9, TRBJ2-2)
CASSGLADTGELFF

SEQ ID NO: 362767 - protein, 12 aa, Homo sapiens
  CDR3 for alpha chain variable domain of TCR clone 181384 (TRAV29/DV5, TRAJ49)
CAATDTGNQFYF

SEQ ID NO: 362768 - protein, 12 aa, Homo sapiens
  CDR3 for beta chain variable domain of TCR clone 181384 (TRBV12-4, TRBJ2-7)
CASSLRGYEQYF

SEQ ID NO: 362769 - protein, 11 aa, Homo sapiens
  CDR3 for alpha chain variable domain of TCR clone 181385 (TRAV2, TRAJ13)
CASGAYQKVTF

SEQ ID NO: 362770 - protein, 16 aa, Homo sapiens
  CDR3 for beta chain variable domain of TCR clone 181385 (TRBV11-2, TRBJ2-7)
CASSPLAGGPRYEQYF

SEQ ID NO: 362771 - protein, 16 aa, Homo sapiens
  CDR3 for alpha chain variable domain of TCR clone 181386 (TRAV12-2, TRAJ10)
CAVSRVLTGGGSKLTF

SEQ ID NO: 362772 - protein, 12 aa, Homo sapiens
  CDR3 for beta chain variable domain of TCR clone 181386 (TRBV28, TRBJ2-7)
CASSFSSYEQYF

SEQ ID NO: 362773 - protein, 13 aa, Homo sapiens
  CDR3 for alpha chain variable domain of TCR clone 181387 (TRAV21, TRAJ27)
CAARPGNAGKSTF

SEQ ID NO: 362774 - protein, 13 aa, Homo sapiens
  CDR3 for beta chain variable domain of TCR clone 181387 (TRBV7-3, TRBJ2-7)
CASSQAGWYEQYF

SEQ ID NO: 362775 - protein, 10 aa, Homo sapiens
  CDR3 for alpha chain variable domain of TCR clone 181388 (TRAV12-1, TRAJ23)
CVVSGGKLIF

SEQ ID NO: 362776 - protein, 15 aa, Homo sapiens
  CDR3 for beta chain variable domain of TCR clone 181388 (TRBV6-5, TRBJ2-1)
CASSSISSFYNEQFF

SEQ ID NO: 362777 - protein, 14 aa, Homo sapiens
  CDR3 for alpha chain variable domain of TCR clone 181389 (TRAV8-4, TRAJ9)
CAVRINTGCFETIF

SEQ ID NO: 362778 - protein, 15 aa, Homo sapiens
  CDR3 for beta chain variable domain of TCR clone 181389 (TRBV10-2, TRBJ2-6)
CASSEQGTEANVLTC

SEQ ID NO: 362779 - protein, 12 aa, Homo sapiens
  CDR3 for alpha chain variable domain of TCR clone 181390 (TRAV12-3, TRAJ17)
CAMTLTGNKLTF

SEQ ID NO: 362780 - protein, 15 aa, Homo sapiens
  CDR3 for beta chain variable domain of TCR clone 181390 (TRBV7-8, TRBJ2-3)
CASSPRTGSTDTQYF

SEQ ID NO: 362781 - protein, 14 aa, Homo sapiens
  CDR3 for alpha chain variable domain of TCR clone 181391 (TRAV12-2, TRAJ17)
CAALFKAAGNKLTF

SEQ ID NO: 362782 - protein, 13 aa, Homo sapiens
  CDR3 for beta chain variable domain of TCR clone 181391 (TRBV10-2, TRBJ2-3)
CASSESGDHTQYF

SEQ ID NO: 362783 - protein, 12 aa, Homo sapiens
  CDR3 for alpha chain variable domain of TCR clone 181392 (TRAV27, TRAJ58)
CAGARDTSRLTF

SEQ ID NO: 362784 - protein, 13 aa, Homo sapiens
  CDR3 for beta chain variable domain of TCR clone 181392 (TRBV14, TRBJ2-7)
CASSQDRRYEQYF

SEQ ID NO: 362785 - protein, 13 aa, Homo sapiens
  CDR3 for alpha chain variable domain of TCR clone 181393 (TRAV2, TRAJ40)
CAVVTSGTYKYIF

SEQ ID NO: 362786 - protein, 14 aa, Homo sapiens
  CDR3 for beta chain variable domain of TCR clone 181393 (TRBV19, TRBJ2-1)
CASPTLVLGGEQFF

SEQ ID NO: 362787 - protein, 11 aa, Homo sapiens
  CDR3 for alpha chain variable domain of TCR clone 181394 (TRAV4, TRAJ23)
CLVAPGGKLIF

SEQ ID NO: 362788 - protein, 15 aa, Homo sapiens
  CDR3 for beta chain variable domain of TCR clone 181394 (TRBV7-9, TRBJ1-6)
CASSSQGRGNSPLHF

SEQ ID NO: 362789 - protein, 16 aa, Homo sapiens
  CDR3 for alpha chain variable domain of TCR clone 181395 (TRAV3, TRAJ37)
CAVRGKGSVNTGKLIF

SEQ ID NO: 362790 - protein, 16 aa, Homo sapiens
  CDR3 for beta chain variable domain of TCR clone 181395 (TRBV12-5, TRBJ2-5)
CASGPRTSGSQETQYF

SEQ ID NO: 362791 - protein, 14 aa, Homo sapiens
  CDR3 for alpha chain variable domain of TCR clone 181396 (TRAV13-1, TRAJ44)
CAAKATGTASKTTF

SEQ ID NO: 362792 - protein, 14 aa, Homo sapiens
  CDR3 for beta chain variable domain of TCR clone 181396 (TRBV7-8, TRBJ2-3)
CASSLEAGTDTQYF

SEQ ID NO: 362793 - protein, 15 aa, Homo sapiens
  CDR3 for alpha chain variable domain of TCR clone 181397 (TRAV2, TRAJ15)
CAVEDRGQAGTALIF

SEQ ID NO: 362794 - protein, 16 aa, Homo sapiens
  CDR3 for beta chain variable domain of TCR clone 181397 (TRBV12-4, TRBJ1-4)
CASSLATGPRNEKLFF

SEQ ID NO: 362795 - protein, 10 aa, Homo sapiens
  CDR3 for alpha chain variable domain of TCR clone 181398 (TRAV12-1, TRAJ37)
ARGNTVKLIF

SEQ ID NO: 362796 - protein, 15 aa, Homo sapiens
  CDR3 for beta chain variable domain of TCR clone 181398 (TRBV7-2, TRBJ2-3)
CASSLEQGGTDTQYF

SEQ ID NO: 362797 - protein, 13 aa, Homo sapiens
  CDR3 for alpha chain variable domain of TCR clone 181399 (TRAV3, TRAJ29)
CAVRDIIDTPLVF

SEQ ID NO: 362798 - protein, 14 aa, Homo sapiens
  CDR3 for beta chain variable domain of TCR clone 181399 (TRBV7-8, TRBJ2-3)
CASSLEAGTDTQYF

SEQ ID NO: 362799 - protein, 15 aa, Homo sapiens
  CDR3 for alpha chain variable domain of TCR clone 181400 (TRAV2, TRAJ45)
CAVDGTGGRADGLTF

SEQ ID NO: 362800 - protein, 16 aa, Homo sapiens
  CDR3 for beta chain variable domain of TCR clone 181400 (TRBV6-5, TRBJ2-1)
CASSYSLSGGYNEQFF

SEQ ID NO: 362801 - protein, 14 aa, Homo sapiens
  CDR3 for alpha chain variable domain of TCR clone 181401 (TRAV1-2, TRAJ16)
CAVNRFSDGQKLLF

SEQ ID NO: 362802 - protein, 16 aa, Homo sapiens
  CDR3 for beta chain variable domain of TCR clone 181401 (TRBV28, TRBJ2-4)
CANSLIQGSLGNIQYF

SEQ ID NO: 362803 - protein, 12 aa, Homo sapiens
  CDR3 for alpha chain variable domain of TCR clone 181402 (TRAV13-1, TRAJ17)
CAARTAGNKLTF

SEQ ID NO: 362804 - protein, 14 aa, Homo sapiens
  CDR3 for beta chain variable domain of TCR clone 181402 (TRBV7-6, TRBJ1-1)
CQQPQGGANTEAFF

SEQ ID NO: 362805 - protein, 17 aa, Homo sapiens
  CDR3 for alpha chain variable domain of TCR clone 181403 (TRAV3, TRAJ6)
CAVRGGARAGGSYIPTF

SEQ ID NO: 362806 - protein, 14 aa, Homo sapiens
  CDR3 for beta chain variable domain of TCR clone 181403 (TRBV7-2, TRBJ2-7)
CASSPKTSFYEQYF

SEQ ID NO: 362807 - protein, 14 aa, Homo sapiens
  CDR3 for alpha chain variable domain of TCR clone 181404 (TRAV12-3, TRAJ9)
CAMSPNTGGFKTIF

SEQ ID NO: 362808 - protein, 12 aa, Homo sapiens
  CDR3 for beta chain variable domain of TCR clone 181404 (TRBV19, TRBJ1-5)
CASSIAQQPQYF

SEQ ID NO: 362809 - protein, 15 aa, Homo sapiens
  CDR3 for alpha chain variable domain of TCR clone 181405 (TRAV13-1, TRAJ18)
CAASGGGSTLGRLYF

SEQ ID NO: 362810 - protein, 13 aa, Homo sapiens
  CDR3 for beta chain variable domain of TCR clone 181405 (TRBV18, TRBJ2-1)
CASGLASNNESSS

SEQ ID NO: 362811 - protein, 15 aa, Homo sapiens
  CDR3 for alpha chain variable domain of TCR clone 181406 (TRAV3, TRAJ8)
CAVRKGGTGFQKLVF

SEQ ID NO: 362812 - protein, 15 aa, Homo sapiens
  CDR3 for beta chain variable domain of TCR clone 181406 (TRBV24-1, TRBJ2-7)
CATSDIIRGPYEQYF

SEQ ID NO: 362813 - protein, 13 aa, Homo sapiens
  CDR3 for alpha chain variable domain of TCR clone 181407 (TRAV13-2, TRAJ13)
CADRPGGYQKVTF

SEQ ID NO: 362814 - protein, 16 aa, Homo sapiens
  CDR3 for beta chain variable domain of TCR clone 181407 (TRBV18, TRBJ2-5)
CASSPPSSGGAKTQYF

SEQ ID NO: 362815 - protein, 15 aa, Homo sapiens
  CDR3 for alpha chain variable domain of TCR clone 181408 (TRAV3, TRAJ22)
CAVRDRGGPARQMTF

SEQ ID NO: 362816 - protein, 13 aa, Homo sapiens
  CDR3 for beta chain variable domain of TCR clone 181408 (TRBV2, TRBJ1-5)
CATAGPGNQPQHF

SEQ ID NO: 362817 - protein, 13 aa, Homo sapiens
  CDR3 for alpha chain variable domain of TCR clone 181409 (TRAV36/DV7, TRAJ54)
CAVLIQGSQKLVF

SEQ ID NO: 362818 - protein, 13 aa, Homo sapiens
  CDR3 for beta chain variable domain of TCR clone 181409 (TRBV29-1, TRBJ2-4)
CSVGEGTKNIQYF

SEQ ID NO: 362819 - protein, 14 aa, Homo sapiens
  CDR3 for alpha chain variable domain of TCR clone 181410 (TRAV26-1, TRAJ38)
CIADNAGNNRKLIW

SEQ ID NO: 362820 - protein, 14 aa, Homo sapiens
  CDR3 for beta chain variable domain of TCR clone 181410 (TRBV7-2, TRBJ2-2)
CASSSDGHTGELFF

SEQ ID NO: 362821 - protein, 10 aa, Homo sapiens
  CDR3 for alpha chain variable domain of TCR clone 181411 (TRAV16, TRAJ22)
SAMYLRQLTF

SEQ ID NO: 362822 - protein, 20 aa, Homo sapiens
  CDR3 for beta chain variable domain of TCR clone 181411 (TRBV7-8, TRBJ2-2)
CASSHLFPGPTIHITGELFF

SEQ ID NO: 362823 - protein, 14 aa, Homo sapiens
  CDR3 for alpha chain variable domain of TCR clone 181412 (TRAV35, TRAJ40)
CAGSTTSRTYKYIF

SEQ ID NO: 362824 - protein, 13 aa, Homo sapiens
  CDR3 for beta chain variable domain of TCR clone 181412 (TRBV20-1, TRBJ1-6)
CSAPLGVGSPLHF

SEQ ID NO: 362825 - protein, 16 aa, Homo sapiens
  CDR3 for alpha chain variable domain of TCR clone 181413 (TRAV30, TRAJ24)
CGTEIVDADSWGKLQF

SEQ ID NO: 362826 - protein, 14 aa, Homo sapiens
  CDR3 for beta chain variable domain of TCR clone 181413 (TRBV12-5, TRBJ2-5)
CARGSRTHQETQYF

SEQ ID NO: 362827 - protein, 17 aa, Homo sapiens
  CDR3 for alpha chain variable domain of TCR clone 181414 (TRAV27, TRAJ26)
CAGARAPLDNYGQNFVF

SEQ ID NO: 362828 - protein, 13 aa, Homo sapiens
  CDR3 for beta chain variable domain of TCR clone 181414 (TRBV7-9, TRBJ2-2)
CASSLDPTGELFF

SEQ ID NO: 362829 - protein, 10 aa, Homo sapiens
  CDR3 for alpha chain variable domain of TCR clone 181415 (TRAV8-1, TRAJ43)
CAVNVDDMRF

SEQ ID NO: 362830 - protein, 15 aa, Homo sapiens
  CDR3 for beta chain variable domain of TCR clone 181415 (TRBV11-3, TRBJ2-7)
CASRPGPASSYEQYF

SEQ ID NO: 362831 - protein, 12 aa, Homo sapiens
  CDR3 for alpha chain variable domain of TCR clone 181416 (TRAV17, TRAJ57)
CATDARSEKLGF

SEQ ID NO: 362832 - protein, 18 aa, Homo sapiens
  CDR3 for beta chain variable domain of TCR clone 181416 (TRBV3-1, TRBJ1-1)
CASRPKGNHGQCDAEAFF

SEQ ID NO: 362833 - protein, 14 aa, Homo sapiens
  CDR3 for alpha chain variable domain of TCR clone 181417 (TRAV12-2, TRAJ17)
CAVLFKAAGNKLTF

SEQ ID NO: 362834 - protein, 17 aa, Homo sapiens
  CDR3 for beta chain variable domain of TCR clone 181417 (TRBV25-1, TRBJ2-7)
CASSDARVVFSSYEQYF

SEQ ID NO: 362835 - protein, 14 aa, Homo sapiens
  CDR3 for alpha chain variable domain of TCR clone 181418 (TRAV2, TRAJ37)
CAVDFTSNTGKLIF

SEQ ID NO: 362836 - protein, 13 aa, Homo sapiens
  CDR3 for beta chain variable domain of TCR clone 181418 (TRBV5-1, TRBJ2-2)
CASIVARTGELFF

SEQ ID NO: 362837 - protein, 15 aa, Homo sapiens
  CDR3 for alpha chain variable domain of TCR clone 181419 (TRAV3, TRAJ5)
CAVRDLDTGRRALTF

SEQ ID NO: 362838 - protein, 13 aa, Homo sapiens
  CDR3 for beta chain variable domain of TCR clone 181419 (TRBV12-4, TRBJ1-5)
CASRSRGNQPQHF

SEQ ID NO: 362839 - protein, 12 aa, Homo sapiens
  CDR3 for alpha chain variable domain of TCR clone 181420 (TRAV1-1, TRAJ20)
CAVREDDYKLSF

SEQ ID NO: 362840 - protein, 18 aa, Homo sapiens
  CDR3 for beta chain variable domain of TCR clone 181420 (TRBV20-1, TRBJ2-3)
CSASGLAGGRGTTDTQYF

SEQ ID NO: 362841 - protein, 13 aa, Homo sapiens
  CDR3 for alpha chain variable domain of TCR clone 181421 (TRAV8-3, TRAJ44)
CAVVPGTASKLTF

SEQ ID NO: 362842 - protein, 14 aa, Homo sapiens
  CDR3 for beta chain variable domain of TCR clone 181421 (TRBV5-1, TRBJ2-3)
CASSRGQGGGTQYF

SEQ ID NO: 362843 - protein, 12 aa, Homo sapiens
  CDR3 for alpha chain variable domain of TCR clone 181422 (TRAV35, TRAJ31)
CAAASINARLMF

SEQ ID NO: 362844 - protein, 14 aa, Homo sapiens
  CDR3 for beta chain variable domain of TCR clone 181422 (TRBV2, TRBJ2-2)
CASSLFGGNGELFF

SEQ ID NO: 362845 - protein, 13 aa, Homo sapiens
  CDR3 for alpha chain variable domain of TCR clone 181423 (TRAV16, TRAJ37)
CALRGSNTDKLIF

SEQ ID NO: 362846 - protein, 15 aa, Homo sapiens
  CDR3 for beta chain variable domain of TCR clone 181423 (TRBV20-1, TRBJ2-1)
CSARGRGLSYNEQFF

SEQ ID NO: 362847 - protein, 14 aa, Homo sapiens
  CDR3 for alpha chain variable domain of TCR clone 181424 (TRAV30, TRAJ26)
CGTEIVSYGQNFVF

SEQ ID NO: 362848 - protein, 20 aa, Homo sapiens
  CDR3 for beta chain variable domain of TCR clone 181424 (TRBV7-8, TRBJ2-2)
CASSHLFPGPTIHITGELFF

SEQ ID NO: 362849 - protein, 14 aa, Homo sapiens
  CDR3 for alpha chain variable domain of TCR clone 181425 (TRAV12-2, TRAJ40)
CAAKIPSGTYTYIF

SEQ ID NO: 362850 - protein, 14 aa, Homo sapiens
  CDR3 for beta chain variable domain of TCR clone 181425 (TRBV20-1, TRBJ1-1)
CSAQTRIGGTEAFF

SEQ ID NO: 362851 - protein, 18 aa, Homo sapiens
  CDR3 for alpha chain variable domain of TCR clone 181426 (TRAV13-1, TRAJ52)
CAASKRSAGGTSYGKLTF

SEQ ID NO: 362852 - protein, 17 aa, Homo sapiens
  CDR3 for beta chain variable domain of TCR clone 181426 (TRBV29-1, TRBJ2-3)
CSVEVLAGETSTDTQYF

SEQ ID NO: 362853 - protein, 12 aa, Homo sapiens
  CDR3 for alpha chain variable domain of TCR clone 181427 (TRAV26-1, TRAJ36)
CIVRVRADNLFF

SEQ ID NO: 362854 - protein, 13 aa, Homo sapiens
  CDR3 for beta chain variable domain of TCR clone 181427 (TRBV11-2, TRBJ2-5)
CASSQGPSETQYF

SEQ ID NO: 362855 - protein, 13 aa, Homo sapiens
  CDR3 for alpha chain variable domain of TCR clone 181428 (TRAV35, TRAJ42)
CAGFSGSQGNLIF

SEQ ID NO: 362856 - protein, 14 aa, Homo sapiens
  CDR3 for beta chain variable domain of TCR clone 181428 (TRBV19, TRBJ2-1)
CASPTFVLSGEQFF

SEQ ID NO: 362857 - protein, 16 aa, Homo sapiens
  CDR3 for alpha chain variable domain of TCR clone 181429 (TRAV3, TRAJ18)
CAVRDGRGSTLGRLYF

SEQ ID NO: 362858 - protein, 14 aa, Homo sapiens
  CDR3 for beta chain variable domain of TCR clone 181429 (TRBV25-1, TRBJ1-1)
CASTHLGGNTEAFF

SEQ ID NO: 362859 - protein, 13 aa, Homo sapiens
  CDR3 for alpha chain variable domain of TCR clone 181430 (TRAV8-4, TRAJ31)
CAVSDSGNARLMF

SEQ ID NO: 362860 - protein, 15 aa, Homo sapiens
  CDR3 for beta chain variable domain of TCR clone 181430 (TRBV7-9, TRBJ1-4)
CASSARTGGNEKLFF

SEQ ID NO: 362861 - protein, 13 aa, Homo sapiens
  CDR3 for alpha chain variable domain of TCR clone 181431 (TRAV12-1, TRAJ3)
CVVNPRGASKIIF

SEQ ID NO: 362862 - protein, 13 aa, Homo sapiens
  CDR3 for beta chain variable domain of TCR clone 181431 (TRBV28, TRBJ1-5)
CASSDGGNQPQHF

SEQ ID NO: 362863 - protein, 15 aa, Homo sapiens
  CDR3 for alpha chain variable domain of TCR clone 181432 (TRAV38-1, TRAJ37)
CAFIFGSGNTGKLIF

SEQ ID NO: 362864 - protein, 12 aa, Homo sapiens
  CDR3 for beta chain variable domain of TCR clone 181432 (TRBV7-9, TRBJ2-7)
CAISLEGYEQYF

SEQ ID NO: 362865 - protein, 14 aa, Homo sapiens
  CDR3 for alpha chain variable domain of TCR clone 181433 (TRAV12-2, TRAJ17)
CAVNIKAAGNKLTF

SEQ ID NO: 362866 - protein, 16 aa, Homo sapiens
  CDR3 for beta chain variable domain of TCR clone 181433 (TRBV20-1, TRBJ2-6)
CSASSQGYDGANYLTF

SEQ ID NO: 362867 - protein, 13 aa, Homo sapiens
  CDR3 for alpha chain variable domain of TCR clone 181434 (TRAV3, TRAJ21)
CAVREPALNKFYF

SEQ ID NO: 362868 - protein, 18 aa, Homo sapiens
  CDR3 for beta chain variable domain of TCR clone 181434 (TRBV20-1, TRBJ2-6)
CSAETTPTHGSGANVLTF

SEQ ID NO: 362869 - protein, 17 aa, Homo sapiens
  CDR3 for alpha chain variable domain of TCR clone 181435 (TRAV3, TRAJ6)
CAVRDGSRAGGSYIPTF

SEQ ID NO: 362870 - protein, 13 aa, Homo sapiens
  CDR3 for beta chain variable domain of TCR clone 181435 (TRBV7-9, TRBJ2-3)
CASSPGSTDTQYF

SEQ ID NO: 362871 - protein, 11 aa, Homo sapiens
  CDR3 for alpha chain variable domain of TCR clone 181436 (TRAV23/DV6, TRAJ18)
CADGALGRLYF

SEQ ID NO: 362872 - protein, 12 aa, Homo sapiens
  CDR3 for beta chain variable domain of TCR clone 181436 (TRBV6-1, TRBJ2-1)
CATYGLNNEQFF

SEQ ID NO: 362873 - protein, 15 aa, Homo sapiens
  CDR3 for alpha chain variable domain of TCR clone 181437 (TRAV14/DV4, TRAJ10)
CAMRELKGGGNKLNF

SEQ ID NO: 362874 - protein, 18 aa, Homo sapiens
  CDR3 for beta chain variable domain of TCR clone 181437 (TRBV7-9, TRBJ2-7)
CASSLTTSGSRTWYEQYF

SEQ ID NO: 362875 - protein, 15 aa, Homo sapiens
  CDR3 for alpha chain variable domain of TCR clone 181438 (TRAV29/DV5, TRAJ42)
CAAKTDGGSQGNLIF

SEQ ID NO: 362876 - protein, 15 aa, Homo sapiens
  CDR3 for beta chain variable domain of TCR clone 181438 (TRBV7-3, TRBJ2-1)
CASSPTGGGEVEQFF

SEQ ID NO: 362877 - protein, 14 aa, Homo sapiens
  CDR3 for alpha chain variable domain of TCR clone 181439 (TRAV12-1, TRAJ17)
CAVLFKAAGNKLTF

SEQ ID NO: 362878 - protein, 14 aa, Homo sapiens
  CDR3 for beta chain variable domain of TCR clone 181439 (TRBV7-8, TRBJ2-5)
CASSATGGQETQYF

SEQ ID NO: 362879 - protein, 14 aa, Homo sapiens
  CDR3 for alpha chain variable domain of TCR clone 181440 (TRAV23/DV6, TRAJ8)
CAASKATGFQKLVF

SEQ ID NO: 362880 - protein, 15 aa, Homo sapiens
  CDR3 for beta chain variable domain of TCR clone 181440 (TRBV28, TRBJ2-3)
CASSPDLQGANTQYF

SEQ ID NO: 362881 - protein, 14 aa, Homo sapiens
  CDR3 for alpha chain variable domain of TCR clone 181441 (TRAV26-2, TRAJ31)
CILIPGNNNARLLF

SEQ ID NO: 362882 - protein, 16 aa, Homo sapiens
  CDR3 for beta chain variable domain of TCR clone 181441 (TRBV7-3, TRBJ2-1)
CASSLVSGSSNNEQFF

SEQ ID NO: 362883 - protein, 14 aa, Homo sapiens
  CDR3 for alpha chain variable domain of TCR clone 181442 (TRAV13-1, TRAJ26)
CAASSAHYGQHFVF

SEQ ID NO: 362884 - protein, 17 aa, Homo sapiens
  CDR3 for beta chain variable domain of TCR clone 181442 (TRBV25-1, TRBJ2-5)
CASSRRGGRGGQETQYF

SEQ ID NO: 362885 - protein, 14 aa, Homo sapiens
  CDR3 for alpha chain variable domain of TCR clone 181443 (TRAV12-2, TRAJ24)
CAVTPADSWGKLQF

SEQ ID NO: 362886 - protein, 13 aa, Homo sapiens
  CDR3 for beta chain variable domain of TCR clone 181443 (TRBV27, TRBJ1-1)
CASSLSIGAKAFF

SEQ ID NO: 362887 - protein, 16 aa, Homo sapiens
  CDR3 for alpha chain variable domain of TCR clone 181444 (TRAV30, TRAJ24)
CGTESVDADSWGKFQF

SEQ ID NO: 362888 - protein, 18 aa, Homo sapiens
  CDR3 for beta chain variable domain of TCR clone 181444 (TRBV20-1, TRBJ2-6)
CSAETTPTHGSGANVLTF

SEQ ID NO: 362889 - protein, 10 aa, Homo sapiens
  CDR3 for alpha chain variable domain of TCR clone 181445 (TRAV23/DV6, TRAJ57)
CAASSTLSQG

SEQ ID NO: 362890 - protein, 13 aa, Homo sapiens
  CDR3 for beta chain variable domain of TCR clone 181445 (TRBV10-3, TRBJ1-2)
CAISERDSYGYTF

SEQ ID NO: 362891 - protein, 12 aa, Homo sapiens
  CDR3 for alpha chain variable domain of TCR clone 181446 (TRAV30, TRAJ20)
CGTEINDYKLSF

SEQ ID NO: 362892 - protein, 15 aa, Homo sapiens
  CDR3 for beta chain variable domain of TCR clone 181446 (TRBV9, TRBJ2-7)
CASSAVPIPGYEQYF

SEQ ID NO: 362893 - protein, 13 aa, Homo sapiens
  CDR3 for alpha chain variable domain of TCR clone 181447 (TRAV8-6, TRAJ21)
CAVSPSSLNKFYF

SEQ ID NO: 362894 - protein, 14 aa, Homo sapiens
  CDR3 for beta chain variable domain of TCR clone 181447 (TRBV7-9, TRBJ2-5)
CASSLDTAQETQDF

SEQ ID NO: 362895 - protein, 15 aa, Homo sapiens
  CDR3 for alpha chain variable domain of TCR clone 181448 (TRAV23/DV6, TRAJ37)
CAAGEGTGNTGKLIF

SEQ ID NO: 362896 - protein, 17 aa, Homo sapiens
  CDR3 for beta chain variable domain of TCR clone 181448 (TRBV20-1, TRBJ2-7)
CSATRAGGVAGVEEQYF

SEQ ID NO: 362897 - protein, 14 aa, Homo sapiens
  CDR3 for alpha chain variable domain of TCR clone 181449 (TRAV12-3, TRAJ10)
SHLPLTGGGNKLSF

SEQ ID NO: 362898 - protein, 15 aa, Homo sapiens
  CDR3 for beta chain variable domain of TCR clone 181449 (TRBV4-1, TRBJ1-4)
CASSDTGGTNEKLFF

SEQ ID NO: 362899 - protein, 11 aa, Homo sapiens
  CDR3 for alpha chain variable domain of TCR clone 181450 (TRAV27, TRAJ39)
CAGERRQHAHL

SEQ ID NO: 362900 - protein, 14 aa, Homo sapiens
  CDR3 for beta chain variable domain of TCR clone 181450 (TRBV15, TRBJ2-7)
CATSPDRGVYEQYF

SEQ ID NO: 362901 - protein, 15 aa, Homo sapiens
  CDR3 for alpha chain variable domain of TCR clone 181451 (TRAV8-4, TRAJ6)
CAVSDPSGGSYIPTF

SEQ ID NO: 362902 - protein, 15 aa, Homo sapiens
  CDR3 for beta chain variable domain of TCR clone 181451 (TRBV2, TRBJ2-1)
CASSEARSAYNEQFF

SEQ ID NO: 362903 - protein, 15 aa, Homo sapiens
  CDR3 for alpha chain variable domain of TCR clone 181452 (TRAV19, TRAJ9)
CALSLPDTGGFKTIF

SEQ ID NO: 362904 - protein, 17 aa, Homo sapiens
  CDR3 for beta chain variable domain of TCR clone 181452 (TRBV20-1, TRBJ2-1)
CSARDPLAGVWDNEHFF

SEQ ID NO: 362905 - protein, 16 aa, Homo sapiens
  CDR3 for alpha chain variable domain of TCR clone 181453 (TRAV26-1, TRAJ23)
CIVRVHPYNEGGKLIF

SEQ ID NO: 362906 - protein, 15 aa, Homo sapiens
  CDR3 for beta chain variable domain of TCR clone 181453 (TRBV5-7, TRBJ2-7)
CASSPYFEGSYEQYF

SEQ ID NO: 362907 - protein, 13 aa, Homo sapiens
  CDR3 for alpha chain variable domain of TCR clone 181454 (TRAV35, TRAJ37)
CAGSSGNTGKLLF

SEQ ID NO: 362908 - protein, 16 aa, Homo sapiens
  CDR3 for beta chain variable domain of TCR clone 181454 (TRBV10-3, TRBJ2-1)
CAISLTSGNSYNEQFF

SEQ ID NO: 362909 - protein, 12 aa, Homo sapiens
  CDR3 for alpha chain variable domain of TCR clone 181455 (TRAV1-2, TRAJ33)
CDALDSNYQLIW

SEQ ID NO: 362910 - protein, 14 aa, Homo sapiens
  CDR3 for beta chain variable domain of TCR clone 181455 (TRBV20-1, TRBJ2-1)
CSAQIGGSANEQFF

SEQ ID NO: 362911 - protein, 14 aa, Homo sapiens
  CDR3 for alpha chain variable domain of TCR clone 181456 (TRAV12-2, TRAJ40)
CAVKIPSGSYKYIF

SEQ ID NO: 362912 - protein, 13 aa, Homo sapiens
  CDR3 for beta chain variable domain of TCR clone 181456 (TRBV7-2, TRBJ2-5)
CASSQTSVETQYF

SEQ ID NO: 362913 - protein, 15 aa, Homo sapiens
  CDR3 for alpha chain variable domain of TCR clone 181457 (TRAV21, TRAJ24)
CAARSSTDSWGKLQF

SEQ ID NO: 362914 - protein, 17 aa, Homo sapiens
  CDR3 for beta chain variable domain of TCR clone 181457 (TRBV4-1, TRBJ2-7)
CASSRDPLGVRGGEQYF

SEQ ID NO: 362915 - protein, 14 aa, Homo sapiens
  CDR3 for alpha chain variable domain of TCR clone 181458 (TRAV16, TRAJ48)
CALTPGFGNEKLTF

SEQ ID NO: 362916 - protein, 14 aa, Homo sapiens
  CDR3 for beta chain variable domain of TCR clone 181458 (TRBV7-2, TRBJ2-7)
CASSSISGFSEHYF

SEQ ID NO: 362917 - protein, 14 aa, Homo sapiens
  CDR3 for alpha chain variable domain of TCR clone 181459 (TRAV8-1, TRAJ9)
CAVNAWTGGFKTIF

SEQ ID NO: 362918 - protein, 18 aa, Homo sapiens
  CDR3 for beta chain variable domain of TCR clone 181459 (TRBV20-1, TRBJ2-6)
CSAETTPTHGSGANVLTF

SEQ ID NO: 362919 - protein, 13 aa, Homo sapiens
  CDR3 for alpha chain variable domain of TCR clone 181460 (TRAV38-2/DV8, TRAJ34)
CAYRNYNTDKLIF

SEQ ID NO: 362920 - protein, 15 aa, Homo sapiens
  CDR3 for beta chain variable domain of TCR clone 181460 (TRBV11-2, TRBJ1-6)
CASSLDPWAVSPLHF

SEQ ID NO: 362921 - protein, 11 aa, Homo sapiens
  CDR3 for alpha chain variable domain of TCR clone 181461 (TRAV3, TRAJ21)
CAVGNFNKFYF

SEQ ID NO: 362922 - protein, 16 aa, Homo sapiens
  CDR3 for beta chain variable domain of TCR clone 181461 (TRBV19, TRBJ2-1)
CASSKAGPSPCNEQFF

SEQ ID NO: 362923 - protein, 15 aa, Homo sapiens
  CDR3 for alpha chain variable domain of TCR clone 181462 (TRAV25, TRAJ52)
CAGRPGGTSYGKLTF

SEQ ID NO: 362924 - protein, 16 aa, Homo sapiens
  CDR3 for beta chain variable domain of TCR clone 181462 (TRBV10-3, TRBJ2-1)
CAISGVGDGGGGEQFF

SEQ ID NO: 362925 - protein, 15 aa, Homo sapiens
  CDR3 for alpha chain variable domain of TCR clone 181463 (TRAV12-3, TRAJ6)
CAMSATTGGSYIPTF

SEQ ID NO: 362926 - protein, 14 aa, Homo sapiens
  CDR3 for beta chain variable domain of TCR clone 181463 (TRBV7-3, TRBJ2-2)
CASSSGGYTGELFF

SEQ ID NO: 362927 - protein, 12 aa, Homo sapiens
  CDR3 for alpha chain variable domain of TCR clone 181464 (TRAV12-3, TRAJ17)
CAMTLIGNKLTS

SEQ ID NO: 362928 - protein, 15 aa, Homo sapiens
  CDR3 for beta chain variable domain of TCR clone 181464 (TRBV20-1, TRBJ2-7)
CSARDRVSGMDEQYF

SEQ ID NO: 362929 - protein, 15 aa, Homo sapiens
  CDR3 for alpha chain variable domain of TCR clone 181465 (TRAV1-1, TRAJ20)
CAVRDNVANDYKLSF

SEQ ID NO: 362930 - protein, 13 aa, Homo sapiens
  CDR3 for beta chain variable domain of TCR clone 181465 (TRBV4-1, TRBJ2-2)
CASSQENTGELFS

SEQ ID NO: 362931 - protein, 13 aa, Homo sapiens
  CDR3 for alpha chain variable domain of TCR clone 181466 (TRAV25, TRAJ47)
CAGRREYGNKLVF

SEQ ID NO: 362932 - protein, 17 aa, Homo sapiens
  CDR3 for beta chain variable domain of TCR clone 181466 (TRBV7-8, TRBJ2-5)
CASSLASGGRFQETQYF

SEQ ID NO: 362933 - protein, 12 aa, Homo sapiens
  CDR3 for alpha chain variable domain of TCR clone 181467 (TRAV41, TRAJ58)
CAVETSGSRLTF

SEQ ID NO: 362934 - protein, 17 aa, Homo sapiens
  CDR3 for beta chain variable domain of TCR clone 181467 (TRBV4-1, TRBJ2-7)
CASSRDPLGVRGGEQYF

SEQ ID NO: 362935 - protein, 22 aa, Homo sapiens
  CDR3 for alpha chain variable domain of TCR clone 181468 (TRAV8-3, TRAJ32)
CAVELVLQTSSSLELALCLLSS

SEQ ID NO: 362936 - protein, 12 aa, Homo sapiens
  CDR3 for beta chain variable domain of TCR clone 181468 (TRBV7-8, TRBJ2-7)
CASSLGDREQYF

SEQ ID NO: 362937 - protein, 12 aa, Homo sapiens
  CDR3 for alpha chain variable domain of TCR clone 181469 (TRAV9-2, TRAJ57)
CALRSGSEKPVF

SEQ ID NO: 362938 - protein, 15 aa, Homo sapiens
  CDR3 for beta chain variable domain of TCR clone 181469 (TRBV15, TRBJ1-1)
CATSLQGGRNTEAFF

SEQ ID NO: 362939 - protein, 15 aa, Homo sapiens
  CDR3 for alpha chain variable domain of TCR clone 181470 (TRAV12-1, TRAJ45)
CVVLSGGGGADGLTF

SEQ ID NO: 362940 - protein, 14 aa, Homo sapiens
  CDR3 for beta chain variable domain of TCR clone 181470 (TRBV11-2, TRBJ2-5)
CTSSRTGGIETQYF

SEQ ID NO: 362941 - protein, 20 aa, Homo sapiens
  CDR3 for alpha chain variable domain of TCR clone 181471 (TRAV8-3, TRAJ45)
LSTSVLWGSYSGGGADGLTF

SEQ ID NO: 362942 - protein, 11 aa, Homo sapiens
  CDR3 for beta chain variable domain of TCR clone 181471 (TRBV20-1, TRBJ2-5)
CSADRAETPYF

SEQ ID NO: 362943 - protein, 12 aa, Homo sapiens
  CDR3 for alpha chain variable domain of TCR clone 181472 (TRAV25, TRAJ17)
CAGEAAGNKLTF

SEQ ID NO: 362944 - protein, 14 aa, Homo sapiens
  CDR3 for beta chain variable domain of TCR clone 181472 (TRBV5-1, TRBJ2-1)
CASSALWACNEQFF

SEQ ID NO: 362945 - protein, 10 aa, Homo sapiens
  CDR3 for alpha chain variable domain of TCR clone 181473 (TRAV26-1, TRAJ22)
CIAGSRQLTF

SEQ ID NO: 362946 - protein, 12 aa, Homo sapiens
  CDR3 for beta chain variable domain of TCR clone 181473 (TRBV11-2, TRBJ2-1)
CASSPGNNEQFF

SEQ ID NO: 362947 - protein, 12 aa, Homo sapiens
  CDR3 for alpha chain variable domain of TCR clone 181474 (TRAV29/DV5, TRAJ49)
CAATDTVTSSIL

SEQ ID NO: 362948 - protein, 13 aa, Homo sapiens
  CDR3 for beta chain variable domain of TCR clone 181474 (TRBV27, TRBJ1-1)
CASSLSIGAEAFF

SEQ ID NO: 362949 - protein, 11 aa, Homo sapiens
  CDR3 for alpha chain variable domain of TCR clone 181475 (TRAV2, TRAJ13)
CASGGYQKVTF

SEQ ID NO: 362950 - protein, 17 aa, Homo sapiens
  CDR3 for beta chain variable domain of TCR clone 181475 (TRBV18, TRBJ1-5)
CQLTTCRVRQKNQPQHF

SEQ ID NO: 362951 - protein, 15 aa, Homo sapiens
  CDR3 for alpha chain variable domain of TCR clone 181476 (TRAV8-3, TRAJ45)
CASSYSGGGSDGVTF

SEQ ID NO: 362952 - protein, 13 aa, Homo sapiens
  CDR3 for beta chain variable domain of TCR clone 181476 (TRBV10-3, TRBJ2-7)
CASKLAVNYEQYF

SEQ ID NO: 362953 - protein, 18 aa, Homo sapiens
  CDR3 for alpha chain variable domain of TCR clone 181477 (TRAV14/DV4, TRAJ15)
CAMREFPPTGQAGTALTF

SEQ ID NO: 362954 - protein, 12 aa, Homo sapiens
  CDR3 for beta chain variable domain of TCR clone 181477 (TRBV5-5, TRBJ2-5)
CASSYFGETQYF

SEQ ID NO: 362955 - protein, 15 aa, Homo sapiens
  CDR3 for alpha chain variable domain of TCR clone 181478 (TRAV35, TRAJ58)
CAGRRQETSGSKLTF

SEQ ID NO: 362956 - protein, 11 aa, Homo sapiens
  CDR3 for beta chain variable domain of TCR clone 181478 (TRBV11-2, TRBJ1-1)
CASSINTEAFF

SEQ ID NO: 362957 - protein, 15 aa, Homo sapiens
  CDR3 for alpha chain variable domain of TCR clone 181479 (TRAV17, TRAJ57)
CATGPSQGGSEKLVF

SEQ ID NO: 362958 - protein, 14 aa, Homo sapiens
  CDR3 for beta chain variable domain of TCR clone 181479 (TRBV12-5, TRBJ2-5)
CASGSRTHQETQYL

SEQ ID NO: 362959 - protein, 12 aa, Homo sapiens
  CDR3 for alpha chain variable domain of TCR clone 181480 (TRAV13-1, TRAJ21)
CAAKEVFNKFYF

SEQ ID NO: 362960 - protein, 13 aa, Homo sapiens
  CDR3 for beta chain variable domain of TCR clone 181480 (TRBV19, TRBJ1-2)
CASSVPGQDGYTF

SEQ ID NO: 362961 - protein, 16 aa, Homo sapiens
  CDR3 for alpha chain variable domain of TCR clone 181481 (TRAV8-4, TRAJ27)
CAVKEGGFTNAGKSTF

SEQ ID NO: 362962 - protein, 12 aa, Homo sapiens
  CDR3 for beta chain variable domain of TCR clone 181481 (TRBV7-8, TRBJ2-7)
CASSLGDREQYF

SEQ ID NO: 362963 - protein, 14 aa, Homo sapiens
  CDR3 for alpha chain variable domain of TCR clone 181482 (TRAV1-2, TRAJ16)
CAVNRFSDGQKLLF

SEQ ID NO: 362964 - protein, 15 aa, Homo sapiens
  CDR3 for beta chain variable domain of TCR clone 181482 (TRBV27, TRBJ2-3)
CASSLGLAGPDTQYF

SEQ ID NO: 362965 - protein, 12 aa, Homo sapiens
  CDR3 for alpha chain variable domain of TCR clone 181483 (TRAV3, TRAJ27)
CAVRDKAGKSTF

SEQ ID NO: 362966 - protein, 14 aa, Homo sapiens
  CDR3 for beta chain variable domain of TCR clone 181483 (TRBV5-1, TRBJ1-2)
CASSVDSTNYCYTF

SEQ ID NO: 362967 - protein, 18 aa, Homo sapiens
  CDR3 for alpha chain variable domain of TCR clone 181484 (TRAV3, TRAJ17)
CAVRARRGGRSCRQQANF

SEQ ID NO: 362968 - protein, 14 aa, Homo sapiens
  CDR3 for beta chain variable domain of TCR clone 181484 (TRBV4-1, TRBJ2-2)
CASSRAVNTGELFF

SEQ ID NO: 362969 - protein, 13 aa, Homo sapiens
  CDR3 for alpha chain variable domain of TCR clone 181485 (TRAV20, TRAJ3)
CARRYSSASKIIF

SEQ ID NO: 362970 - protein, 12 aa, Homo sapiens
  CDR3 for beta chain variable domain of TCR clone 181485 (TRBV28, TRBJ2-1)
CASSFRGNEQSF

SEQ ID NO: 362971 - protein, 13 aa, Homo sapiens
  CDR3 for alpha chain variable domain of TCR clone 181486 (TRAV2, TRAJ13)
CAVESGGYQKVTF

SEQ ID NO: 362972 - protein, 16 aa, Homo sapiens
  CDR3 for beta chain variable domain of TCR clone 181486 (TRBV7-2, TRBJ1-1)
CASRPLDGGGDTEAFF

SEQ ID NO: 362973 - protein, 13 aa, Homo sapiens
  CDR3 for alpha chain variable domain of TCR clone 181487 (TRAV24, TRAJ13)
CAFDSGGYQKVTF

SEQ ID NO: 362974 - protein, 14 aa, Homo sapiens
  CDR3 for beta chain variable domain of TCR clone 181487 (TRBV5-4, TRBJ2-1)
CASSVDQGLNEQFF

SEQ ID NO: 362975 - protein, 17 aa, Homo sapiens
  CDR3 for alpha chain variable domain of TCR clone 181488 (TRAV3, TRAJ6)
CAVRDGTRAGGSYIPTF

SEQ ID NO: 362976 - protein, 12 aa, Homo sapiens
  CDR3 for beta chain variable domain of TCR clone 181488 (TRBV11-2, TRBJ2-2)
CASSLGGGELFF

SEQ ID NO: 362977 - protein, 13 aa, Homo sapiens
  CDR3 for alpha chain variable domain of TCR clone 181489 (TRAV8-4, TRAJ48)
CTVSLFGNEKLTF

SEQ ID NO: 362978 - protein, 15 aa, Homo sapiens
  CDR3 for beta chain variable domain of TCR clone 181489 (TRBV20-1, TRBJ2-7)
CSARKGLAESYEQYF

SEQ ID NO: 362979 - protein, 14 aa, Homo sapiens
  CDR3 for alpha chain variable domain of TCR clone 181490 (TRAV20, TRAJ56)
CAVQFGGANSKLTF

SEQ ID NO: 362980 - protein, 16 aa, Homo sapiens
  CDR3 for beta chain variable domain of TCR clone 181490 (TRBV19, TRBJ2-1)
CASSKTGPSSYNEQFF

SEQ ID NO: 362981 - protein, 20 aa, Homo sapiens
  CDR3 for alpha chain variable domain of TCR clone 181491 (TRAV1-1, TRAJ39)
CLLLLRCESSAYNAGNMLTF

SEQ ID NO: 362982 - protein, 13 aa, Homo sapiens
  CDR3 for beta chain variable domain of TCR clone 181491 (TRBV12-4, TRBJ1-5)
CASSPERAQPQHF

SEQ ID NO: 362983 - protein, 11 aa, Homo sapiens
  CDR3 for alpha chain variable domain of TCR clone 181492 (TRAV8-4, TRAJ34)
CTESWTDKLIF

SEQ ID NO: 362984 - protein, 17 aa, Homo sapiens
  CDR3 for beta chain variable domain of TCR clone 181492 (TRBV7-3, TRBJ2-2)
CASSLSGTSGGTGELFF

SEQ ID NO: 362985 - protein, 12 aa, Homo sapiens
  CDR3 for alpha chain variable domain of TCR clone 181493 (TRAV8-1, TRAJ6)
CASSGGSYIPTF

SEQ ID NO: 362986 - protein, 12 aa, Homo sapiens
  CDR3 for beta chain variable domain of TCR clone 181493 (TRBV19, TRBJ1-1)
CASMNRYPEAFF

SEQ ID NO: 362987 - protein, 16 aa, Homo sapiens
  CDR3 for alpha chain variable domain of TCR clone 181494 (TRAV3, TRAJ37)
CAVRPHCSGNTGKLIF

SEQ ID NO: 362988 - protein, 15 aa, Homo sapiens
  CDR3 for beta chain variable domain of TCR clone 181494 (TRBV6-3, TRBJ2-2)
CASSFLATLTGELFF

SEQ ID NO: 362989 - protein, 15 aa, Homo sapiens
  CDR3 for alpha chain variable domain of TCR clone 181495 (TRAV12-1, TRAJ41)
CVVNGASNSGYALNF

SEQ ID NO: 362990 - protein, 15 aa, Homo sapiens
  CDR3 for beta chain variable domain of TCR clone 181495 (TRBV7-2, TRBJ1-5)
CASSSTGVDIQPQHF

SEQ ID NO: 362991 - protein, 13 aa, Homo sapiens
  CDR3 for alpha chain variable domain of TCR clone 181496 (TRAV38-2/DV8, TRAJ34)
CAYRTWNTDKHIF

SEQ ID NO: 362992 - protein, 13 aa, Homo sapiens
  CDR3 for beta chain variable domain of TCR clone 181496 (TRBV7-2, TRBJ2-2)
CASSLAVTGELFF

SEQ ID NO: 362993 - protein, 15 aa, Homo sapiens
  CDR3 for alpha chain variable domain of TCR clone 181497 (TRAV12-3, TRAJ48)
CAMNAKNFGNETLTF

SEQ ID NO: 362994 - protein, 14 aa, Homo sapiens
  CDR3 for beta chain variable domain of TCR clone 181497 (TRBV2, TRBJ1-6)
CASSESRNNSPLHF

SEQ ID NO: 362995 - protein, 18 aa, Homo sapiens
  CDR3 for alpha chain variable domain of TCR clone 181498 (TRAV26-1, TRAJ37)
CIVRVDMHGSSNTGKLIF

SEQ ID NO: 362996 - protein, 13 aa, Homo sapiens
  CDR3 for beta chain variable domain of TCR clone 181498 (TRBV7-2, TRBJ2-7)
CASSSPSGSEQYF

SEQ ID NO: 362997 - protein, 15 aa, Homo sapiens
  CDR3 for alpha chain variable domain of TCR clone 181499 (TRAV26-1, TRAJ29)
CIVKVEGSGNKPLVF

SEQ ID NO: 362998 - protein, 14 aa, Homo sapiens
  CDR3 for beta chain variable domain of TCR clone 181499 (TRBV18, TRBJ2-5)
CASSPGVSQETQYF

SEQ ID NO: 362999 - protein, 15 aa, Homo sapiens
  CDR3 for alpha chain variable domain of TCR clone 181500 (TRAV3, TRAJ22)
CAVRDWGGSARQLTF

SEQ ID NO: 363000 - protein, 13 aa, Homo sapiens
  CDR3 for beta chain variable domain of TCR clone 181500 (TRBV7-3, TRBJ2-1)
CASSPVAYNEQFF

SEQ ID NO: 363001 - protein, 14 aa, Homo sapiens
  CDR3 for alpha chain variable domain of TCR clone 181501 (TRAV8-3, TRAJ39)
CAVGANNAGNILTF

SEQ ID NO: 363002 - protein, 15 aa, Homo sapiens
  CDR3 for beta chain variable domain of TCR clone 181501 (TRBV4-3, TRBJ1-1)
CASSQELGRGTEAFF

SEQ ID NO: 363003 - protein, 20 aa, Homo sapiens
  CDR3 for alpha chain variable domain of TCR clone 181502 (TRAV1-2, TRAJ8)
CAERGHRLSETCIWNWHPTS

SEQ ID NO: 363004 - protein, 14 aa, Homo sapiens
  CDR3 for beta chain variable domain of TCR clone 181502 (TRBV2, TRBJ2-5)
CASKRDGTTETQYF

SEQ ID NO: 363005 - protein, 16 aa, Homo sapiens
  CDR3 for alpha chain variable domain of TCR clone 181503 (TRAV17, TRAJ22)
CATGPISSGSARQLTF

SEQ ID NO: 363006 - protein, 13 aa, Homo sapiens
  CDR3 for beta chain variable domain of TCR clone 181503 (TRBV5-4, TRBJ1-1)
CASSFQVNTEAFF

SEQ ID NO: 363007 - protein, 13 aa, Homo sapiens
  CDR3 for alpha chain variable domain of TCR clone 181504 (TRAV1-2, TRAJ9)
CAALNTGGFKTIF

SEQ ID NO: 363008 - protein, 13 aa, Homo sapiens
  CDR3 for beta chain variable domain of TCR clone 181504 (TRBV12-4, TRBJ1-2)
CASSLDSNYGYTF

SEQ ID NO: 363009 - protein, 14 aa, Homo sapiens
  CDR3 for alpha chain variable domain of TCR clone 181505 (TRAV1-2, TRAJ8)
CAVREDTGFHKLVF

SEQ ID NO: 363010 - protein, 15 aa, Homo sapiens
  CDR3 for beta chain variable domain of TCR clone 181505 (TRBV6-3, TRBJ2-7)
CASSSLGTVFYEQYF

SEQ ID NO: 363011 - protein, 14 aa, Homo sapiens
  CDR3 for alpha chain variable domain of TCR clone 181506 (TRAV2, TRAJ37)
CAVDFTSNTGKLIF

SEQ ID NO: 363012 - protein, 14 aa, Homo sapiens
  CDR3 for beta chain variable domain of TCR clone 181506 (TRBV20-1, TRBJ1-1)
SASRGVTGNTEAFF

SEQ ID NO: 363013 - protein, 14 aa, Homo sapiens
  CDR3 for alpha chain variable domain of TCR clone 181507 (TRAV1-2, TRAJ16)
CAVNRFSDGHKLLF

SEQ ID NO: 363014 - protein, 14 aa, Homo sapiens
  CDR3 for beta chain variable domain of TCR clone 181507 (TRBV7-8, TRBJ2-3)
CASSLEAGTDTQYF

SEQ ID NO: 363015 - protein, 12 aa, Homo sapiens
  CDR3 for alpha chain variable domain of TCR clone 181508 (TRAV13-1, TRAJ21)
CAAKEGFNKFYF

SEQ ID NO: 363016 - protein, 14 aa, Homo sapiens
  CDR3 for beta chain variable domain of TCR clone 181508 (TRBV7-8, TRBJ1-5)
CASSLGAFNQPQHF

SEQ ID NO: 363017 - protein, 12 aa, Homo sapiens
  CDR3 for alpha chain variable domain of TCR clone 181509 (TRAV13-1, TRAJ21)
CAAKEGFNKFYF

SEQ ID NO: 363018 - protein, 17 aa, Homo sapiens
  CDR3 for beta chain variable domain of TCR clone 181509 (TRBV20-1, TRBJ2-1)
CSASSSWLAGSYNEQFF

SEQ ID NO: 363019 - protein, 13 aa, Homo sapiens
  CDR3 for alpha chain variable domain of TCR clone 181510 (TRAV2, TRAJ38)
CAYGAVNNRKLIW

SEQ ID NO: 363020 - protein, 13 aa, Homo sapiens
  CDR3 for beta chain variable domain of TCR clone 181510 (TRBV6-1, TRBJ1-6)
CASSSSWDSPLHF

SEQ ID NO: 363021 - protein, 15 aa, Homo sapiens
  CDR3 for alpha chain variable domain of TCR clone 181511 (TRAV8-3, TRAJ11)
CAVGLLNSGYSTLTF

SEQ ID NO: 363022 - protein, 16 aa, Homo sapiens
  CDR3 for beta chain variable domain of TCR clone 181511 (TRBV7-9, TRBJ1-2)
CASSLDFSSGEDGYTF

SEQ ID NO: 363023 - protein, 18 aa, Homo sapiens
  CDR3 for alpha chain variable domain of TCR clone 181512 (TRAV26-1, TRAJ52)
CIVRVAGAGGTSYGKLTF

SEQ ID NO: 363024 - protein, 13 aa, Homo sapiens
  CDR3 for beta chain variable domain of TCR clone 181512 (TRBV7-8, TRBJ1-2)
CASSAQSYYGDSF

SEQ ID NO: 363025 - protein, 14 aa, Homo sapiens
  CDR3 for alpha chain variable domain of TCR clone 181513 (TRAV12-3, TRAJ10)
SHLPLTVGGNKLTF

SEQ ID NO: 363026 - protein, 13 aa, Homo sapiens
  CDR3 for beta chain variable domain of TCR clone 181513 (TRBV7-7, TRBJ2-5)
CASSRSGQETQYF

SEQ ID NO: 363027 - protein, 15 aa, Homo sapiens
  CDR3 for alpha chain variable domain of TCR clone 181514 (TRAV30, TRAJ32)
CGTESLGGATNKLIF

SEQ ID NO: 363028 - protein, 17 aa, Homo sapiens
  CDR3 for beta chain variable domain of TCR clone 181514 (TRBV5-4, TRBJ2-1)
CASSSAGGRGPYNEQFF

SEQ ID NO: 363029 - protein, 14 aa, Homo sapiens
  CDR3 for alpha chain variable domain of TCR clone 181515 (TRAV1-2, TRAJ8)
CAVREDTGFQKLVF

SEQ ID NO: 363030 - protein, 16 aa, Homo sapiens
  CDR3 for beta chain variable domain of TCR clone 181515 (TRBV7-6, TRBJ2-6)
CASSLPGLAGANVLTF

SEQ ID NO: 363031 - protein, 14 aa, Homo sapiens
  CDR3 for alpha chain variable domain of TCR clone 181516 (TRAV8-4, TRAJ48)
CAVSETFGNEKLTF

SEQ ID NO: 363032 - protein, 13 aa, Homo sapiens
  CDR3 for beta chain variable domain of TCR clone 181516 (TRBV27, TRBJ1-4)
CASSLMGDEKLFF

SEQ ID NO: 363033 - protein, 15 aa, Homo sapiens
  CDR3 for alpha chain variable domain of TCR clone 181517 (TRAV12-2, TRAJ56)
CAVNPFTGANSKLTF

SEQ ID NO: 363034 - protein, 15 aa, Homo sapiens
  CDR3 for beta chain variable domain of TCR clone 181517 (TRBV5-1, TRBJ2-7)
CASSLNGGPAREQYF

SEQ ID NO: 363035 - protein, 13 aa, Homo sapiens
  CDR3 for alpha chain variable domain of TCR clone 181518 (TRAV21, TRAJ45)
CAEMGGGADGLTF

SEQ ID NO: 363036 - protein, 14 aa, Homo sapiens
  CDR3 for beta chain variable domain of TCR clone 181518 (TRBV4-3, TRBJ1-4)
CASSPLQRNEKLFF

SEQ ID NO: 363037 - protein, 14 aa, Homo sapiens
  CDR3 for alpha chain variable domain of TCR clone 181519 (TRAV8-3, TRAJ9)
CAVGERTGGFKTIF

SEQ ID NO: 363038 - protein, 17 aa, Homo sapiens
  CDR3 for beta chain variable domain of TCR clone 181519 (TRBV24-1, TRBJ2-1)
CATSDVSTSGTYNEQFF

SEQ ID NO: 363039 - protein, 14 aa, Homo sapiens
  CDR3 for alpha chain variable domain of TCR clone 181520 (TRAV12-3, TRAJ33)
CAMSAGDSNYQLIW

SEQ ID NO: 363040 - protein, 14 aa, Homo sapiens
  CDR3 for beta chain variable domain of TCR clone 181520 (TRBV12-5, TRBJ2-5)
CASGSRTHQETQYF

SEQ ID NO: 363041 - protein, 12 aa, Homo sapiens
  CDR3 for alpha chain variable domain of TCR clone 181521 (TRAV13-2, TRAJ23)
CAERHRGGKLIF

SEQ ID NO: 363042 - protein, 14 aa, Homo sapiens
  CDR3 for beta chain variable domain of TCR clone 181521 (TRBV10-2, TRBJ2-2)
CASSERSNTGELFF

SEQ ID NO: 363043 - protein, 13 aa, Homo sapiens
  CDR3 for alpha chain variable domain of TCR clone 181522 (TRAV12-3, TRAJ43)
CAMIRPNNNDMRF

SEQ ID NO: 363044 - protein, 15 aa, Homo sapiens
  CDR3 for beta chain variable domain of TCR clone 181522 (TRBV2, TRBJ2-3)
CASSDFEKATDTQYF

SEQ ID NO: 363045 - protein, 18 aa, Homo sapiens
  CDR3 for alpha chain variable domain of TCR clone 181523 (TRAV29/DV5, TRAJ52)
CAAGFRGSGGTSYGKLTF

SEQ ID NO: 363046 - protein, 16 aa, Homo sapiens
  CDR3 for beta chain variable domain of TCR clone 181523 (TRBV7-3, TRBJ2-2)
CASSLKRGTLSGELLF

SEQ ID NO: 363047 - protein, 11 aa, Homo sapiens
  CDR3 for alpha chain variable domain of TCR clone 181524 (TRAV26-1, TRAJ37)
FIVRVGRKLIF

SEQ ID NO: 363048 - protein, 15 aa, Homo sapiens
  CDR3 for beta chain variable domain of TCR clone 181524 (TRBV24-1, TRBJ2-4)
CATSDPRDRANIQYF

SEQ ID NO: 363049 - protein, 12 aa, Homo sapiens
  CDR3 for alpha chain variable domain of TCR clone 181525 (TRAV12-3, TRAJ20)
CAMVRGDYKLSF

SEQ ID NO: 363050 - protein, 14 aa, Homo sapiens
  CDR3 for beta chain variable domain of TCR clone 181525 (TRBV7-9, TRBJ2-5)
CASSLAFGQETQYF

SEQ ID NO: 363051 - protein, 14 aa, Homo sapiens
  CDR3 for alpha chain variable domain of TCR clone 181526 (TRAV21, TRAJ58)
CAVRRGRSGSRLTF

SEQ ID NO: 363052 - protein, 13 aa, Homo sapiens
  CDR3 for beta chain variable domain of TCR clone 181526 (TRBV7-2, TRBJ1-6)
CASSLEFDSPLNF

SEQ ID NO: 363053 - protein, 17 aa, Homo sapiens
  CDR3 for alpha chain variable domain of TCR clone 181527 (TRAV3, TRAJ6)
FAVRDGPRAGGSYIPTF

SEQ ID NO: 363054 - protein, 15 aa, Homo sapiens
  CDR3 for beta chain variable domain of TCR clone 181527 (TRBV7-2, TRBJ2-3)
CASSFEGPPGDTQYF

SEQ ID NO: 363055 - protein, 16 aa, Homo sapiens
  CDR3 for alpha chain variable domain of TCR clone 181528 (TRAV12-2, TRAJ40)
CAVIRGGTSGTYKYIF

SEQ ID NO: 363056 - protein, 14 aa, Homo sapiens
  CDR3 for beta chain variable domain of TCR clone 181528 (TRBV20-1, TRBJ2-5)
CSARDGRAGETQCF

SEQ ID NO: 363057 - protein, 15 aa, Homo sapiens
  CDR3 for alpha chain variable domain of TCR clone 181529 (TRAV40, TRAJ48)
CLLFISNFGNEKLTF

SEQ ID NO: 363058 - protein, 20 aa, Homo sapiens
  CDR3 for beta chain variable domain of TCR clone 181529 (TRBV7-8, TRBJ2-2)
CASSHLFPGPTIHITGELFF

SEQ ID NO: 363059 - protein, 17 aa, Homo sapiens
  CDR3 for alpha chain variable domain of TCR clone 181530 (TRAV12-2, TRAJ4)
CAGNVRPVSGGYNKLIF

SEQ ID NO: 363060 - protein, 17 aa, Homo sapiens
  CDR3 for beta chain variable domain of TCR clone 181530 (TRBV6-3, TRBJ2-1)
CASSYSSGTRGLDEQFF

SEQ ID NO: 363061 - protein, 16 aa, Homo sapiens
  CDR3 for alpha chain variable domain of TCR clone 181531 (TRAV30, TRAJ24)
CGTEIVDADSWGKFQF

SEQ ID NO: 363062 - protein, 15 aa, Homo sapiens
  CDR3 for beta chain variable domain of TCR clone 181531 (TRBV9, TRBJ1-6)
CASSVAGTGDSPLLF

SEQ ID NO: 363063 - protein, 17 aa, Homo sapiens
  CDR3 for alpha chain variable domain of TCR clone 181532 (TRAV3, TRAJ6)
CAARDGPRAGGSYIPTF

SEQ ID NO: 363064 - protein, 12 aa, Homo sapiens
  CDR3 for beta chain variable domain of TCR clone 181532 (TRBV5-4, TRBJ2-5)
CASSSTRETQYF

SEQ ID NO: 363065 - protein, 12 aa, Homo sapiens
  CDR3 for alpha chain variable domain of TCR clone 181533 (TRAV3, TRAJ43)
CAVRDPNNDMRF

SEQ ID NO: 363066 - protein, 15 aa, Homo sapiens
  CDR3 for beta chain variable domain of TCR clone 181533 (TRBV19, TRBJ1-2)
CASSVGQVLNYGYTF

SEQ ID NO: 363067 - protein, 17 aa, Homo sapiens
  CDR3 for alpha chain variable domain of TCR clone 181534 (TRAV26-1, TRAJ58)
CIVRVGAEETSGSRLTF

SEQ ID NO: 363068 - protein, 12 aa, Homo sapiens
  CDR3 for beta chain variable domain of TCR clone 181534 (TRBV11-2, TRBJ2-2)
CASSLGGGELFF

SEQ ID NO: 363069 - protein, 13 aa, Homo sapiens
  CDR3 for alpha chain variable domain of TCR clone 181535 (TRAV38-1, TRAJ42)
CARWGGSQGNLIF

SEQ ID NO: 363070 - protein, 13 aa, Homo sapiens
  CDR3 for beta chain variable domain of TCR clone 181535 (TRBV7-2, TRBJ2-7)
CASSSPSGSEQYF

SEQ ID NO: 363071 - protein, 11 aa, Homo sapiens
  CDR3 for alpha chain variable domain of TCR clone 181536 (TRAV4, TRAJ31)
CLVGDNPRLMF

SEQ ID NO: 363072 - protein, 16 aa, Homo sapiens
  CDR3 for beta chain variable domain of TCR clone 181536 (TRBV7-2, TRBJ2-5)
CASSSKWLSGQETQYF

SEQ ID NO: 363073 - protein, 23 aa, Homo sapiens
  CDR3 for alpha chain variable domain of TCR clone 181537 (TRAV26-1, TRAJ38)
CIADNAGNNHIHNPDPAVYQLRD

SEQ ID NO: 363074 - protein, 17 aa, Homo sapiens
  CDR3 for beta chain variable domain of TCR clone 181537 (TRBV11-2, TRBJ2-6)
CASSQRDIFSGANVLTF

SEQ ID NO: 363075 - protein, 14 aa, Homo sapiens
  CDR3 for alpha chain variable domain of TCR clone 181538 (TRAV23/DV6, TRAJ37)
CAASTFSNTGKLLF

SEQ ID NO: 363076 - protein, 15 aa, Homo sapiens
  CDR3 for beta chain variable domain of TCR clone 181538 (TRBV7-9, TRBJ2-7)
CASSPGGGLTYEQYF

SEQ ID NO: 363077 - protein, 15 aa, Homo sapiens
  CDR3 for alpha chain variable domain of TCR clone 181539 (TRAV13-1, TRAJ8)
CAASIPNTGFQKLDF

SEQ ID NO: 363078 - protein, 13 aa, Homo sapiens
  CDR3 for beta chain variable domain of TCR clone 181539 (TRBV5-4, TRBJ1-1)
CASSVQVNTEAFF

SEQ ID NO: 363079 - protein, 13 aa, Homo sapiens
  CDR3 for alpha chain variable domain of TCR clone 181540 (TRAV8-3, TRAJ6)
CAVEKGGSYIPTF

SEQ ID NO: 363080 - protein, 14 aa, Homo sapiens
  CDR3 for beta chain variable domain of TCR clone 181540 (TRBV7-2, TRBJ2-7)
CASGSQGAAYEQYF

SEQ ID NO: 363081 - protein, 14 aa, Homo sapiens
  CDR3 for alpha chain variable domain of TCR clone 181541 (TRAV13-2, TRAJ43)
CAEIPTYNNNEIRF

SEQ ID NO: 363082 - protein, 15 aa, Homo sapiens
  CDR3 for beta chain variable domain of TCR clone 181541 (TRBV7-9, TRBJ2-2)
CASGPLDTFPGELFF

SEQ ID NO: 363083 - protein, 14 aa, Homo sapiens
  CDR3 for alpha chain variable domain of TCR clone 181542 (TRAV12-1, TRAJ17)
CVVNYKDAGNKLTF

SEQ ID NO: 363084 - protein, 16 aa, Homo sapiens
  CDR3 for beta chain variable domain of TCR clone 181542 (TRBV7-3, TRBJ2-2)
CASSLKRGTLSGELFF

SEQ ID NO: 363085 - protein, 12 aa, Homo sapiens
  CDR3 for alpha chain variable domain of TCR clone 181543 (TRAV35, TRAJ30)
CAGFNRDDKIIF

SEQ ID NO: 363086 - protein, 15 aa, Homo sapiens
  CDR3 for beta chain variable domain of TCR clone 181543 (TRBV18, TRBJ2-3)
CASSPLAGETDTQYF

SEQ ID NO: 363087 - protein, 11 aa, Homo sapiens
  CDR3 for alpha chain variable domain of TCR clone 181544 (TRAV12-3, TRAJ17)
CNDAYRNKLTF

SEQ ID NO: 363088 - protein, 13 aa, Homo sapiens
  CDR3 for beta chain variable domain of TCR clone 181544 (TRBV10-3, TRBJ2-7)
CASKLAVNYEQYF

SEQ ID NO: 363089 - protein, 11 aa, Homo sapiens
  CDR3 for alpha chain variable domain of TCR clone 181545 (TRAV2, TRAJ33)
CAVDSNYQLLW

SEQ ID NO: 363090 - protein, 15 aa, Homo sapiens
  CDR3 for beta chain variable domain of TCR clone 181545 (TRBV19, TRBJ1-1)
CASTSGQIQNTEAFF

SEQ ID NO: 363091 - protein, 15 aa, Homo sapiens
  CDR3 for alpha chain variable domain of TCR clone 181546 (TRAV26-1, TRAJ29)
CIVRVEGTGNTPLVF

SEQ ID NO: 363092 - protein, 15 aa, Homo sapiens
  CDR3 for beta chain variable domain of TCR clone 181546 (TRBV7-9, TRBJ1-5)
CAGSQGHQPNQPQHF

SEQ ID NO: 363093 - protein, 13 aa, Homo sapiens
  CDR3 for alpha chain variable domain of TCR clone 181547 (TRAV8-3, TRAJ44)
CAVVPGTASKLTF

SEQ ID NO: 363094 - protein, 13 aa, Homo sapiens
  CDR3 for beta chain variable domain of TCR clone 181547 (TRBV11-2, TRBJ2-3)
CSSRLARTDTQYF

SEQ ID NO: 363095 - protein, 14 aa, Homo sapiens
  CDR3 for alpha chain variable domain of TCR clone 181548 (TRAV35, TRAJ33)
CAGSSKDSNYQLIW

SEQ ID NO: 363096 - protein, 15 aa, Homo sapiens
  CDR3 for beta chain variable domain of TCR clone 181548 (TRBV12-4, TRBJ2-5)
CASSPPTGLQETQYF

SEQ ID NO: 363097 - protein, 16 aa, Homo sapiens
  CDR3 for alpha chain variable domain of TCR clone 181549 (TRAV8-3, TRAJ10)
CAVGPILTGGGNKLTF

SEQ ID NO: 363098 - protein, 16 aa, Homo sapiens
  CDR3 for beta chain variable domain of TCR clone 181549 (TRBV9, TRBJ2-2)
CASSAMGKGNTGELFF

SEQ ID NO: 363099 - protein, 13 aa, Homo sapiens
  CDR3 for alpha chain variable domain of TCR clone 181550 (TRAV21, TRAJ27)
CAARPCNAGKSTF

SEQ ID NO: 363100 - protein, 14 aa, Homo sapiens
  CDR3 for beta chain variable domain of TCR clone 181550 (TRBV5-4, TRBJ1-1)
CASSLDSRRDEAFF

SEQ ID NO: 363101 - protein, 18 aa, Homo sapiens
  CDR3 for alpha chain variable domain of TCR clone 181551 (TRAV13-1, TRAJ52)
CAAKNPNAGGTSYGKLTF

SEQ ID NO: 363102 - protein, 13 aa, Homo sapiens
  CDR3 for beta chain variable domain of TCR clone 181551 (TRBV20-1, TRBJ2-3)
CSADQGVSDTQYF

SEQ ID NO: 363103 - protein, 13 aa, Homo sapiens
  CDR3 for alpha chain variable domain of TCR clone 181552 (TRAV21, TRAJ27)
CAALTPMQANQPL

SEQ ID NO: 363104 - protein, 14 aa, Homo sapiens
  CDR3 for beta chain variable domain of TCR clone 181552 (TRBV19, TRBJ2-1)
CASSMGSGRRSSSS

SEQ ID NO: 363105 - protein, 17 aa, Homo sapiens
  CDR3 for alpha chain variable domain of TCR clone 181553 (TRAV3, TRAJ6)
CAVRGGPWAGGSYIPTF

SEQ ID NO: 363106 - protein, 14 aa, Homo sapiens
  CDR3 for beta chain variable domain of TCR clone 181553 (TRBV7-2, TRBJ2-7)
CASSPKTSFYEQYF

SEQ ID NO: 363107 - protein, 11 aa, Homo sapiens
  CDR3 for alpha chain variable domain of TCR clone 181554 (TRAV14/DV4, )
CAMREISRTLT

SEQ ID NO: 363108 - protein, 14 aa, Homo sapiens
  CDR3 for beta chain variable domain of TCR clone 181554 (TRBV2, TRBJ2-1)
CASSDMAYYNEQFF

SEQ ID NO: 363109 - protein, 14 aa, Homo sapiens
  CDR3 for alpha chain variable domain of TCR clone 181555 (TRAV38-1, TRAJ54)
CAFLRIQGAQKLVF

SEQ ID NO: 363110 - protein, 14 aa, Homo sapiens
  CDR3 for beta chain variable domain of TCR clone 181555 (TRBV23-1, TRBJ2-5)
CASSFLRSQETQYF

SEQ ID NO: 363111 - protein, 15 aa, Homo sapiens
  CDR3 for alpha chain variable domain of TCR clone 181556 (TRAV16, TRAJ12)
CSKWPLRDSSYKLIF

SEQ ID NO: 363112 - protein, 15 aa, Homo sapiens
  CDR3 for beta chain variable domain of TCR clone 181556 (TRBV28, TRBJ1-3)
CASSMGWASGNTIYF

SEQ ID NO: 363113 - protein, 12 aa, Homo sapiens
  CDR3 for alpha chain variable domain of TCR clone 181557 (TRAV12-3, TRAJ17)
CAMTLTGNKLTF

SEQ ID NO: 363114 - protein, 11 aa, Homo sapiens
  CDR3 for beta chain variable domain of TCR clone 181557 (TRBV29-1, TRBJ2-5)
CSEDRTGNQYF

SEQ ID NO: 363115 - protein, 10 aa, Homo sapiens
  CDR3 for alpha chain variable domain of TCR clone 181558 (TRAV1-2, TRAJ20)
CACNDYKPSF

SEQ ID NO: 363116 - protein, 16 aa, Homo sapiens
  CDR3 for beta chain variable domain of TCR clone 181558 (TRBV20-1, TRBJ2-1)
CSARDQKQGMNNEQFF

SEQ ID NO: 363117 - protein, 14 aa, Homo sapiens
  CDR3 for alpha chain variable domain of TCR clone 181559 (TRAV13-1, TRAJ20)
CAARPGANDYKLSF

SEQ ID NO: 363118 - protein, 14 aa, Homo sapiens
  CDR3 for beta chain variable domain of TCR clone 181559 (TRBV11-3, TRBJ1-6)
CASSFSGGDSPLHF

SEQ ID NO: 363119 - protein, 16 aa, Homo sapiens
  CDR3 for alpha chain variable domain of TCR clone 181560 (TRAV30, TRAJ24)
CGTEIEDADSWGKFQF

SEQ ID NO: 363120 - protein, 14 aa, Homo sapiens
  CDR3 for beta chain variable domain of TCR clone 181560 (TRBV7-6, TRBJ2-3)
CASSLGTVTDTQYF

SEQ ID NO: 363121 - protein, 13 aa, Homo sapiens
  CDR3 for alpha chain variable domain of TCR clone 181561 (TRAV21, TRAJ49)
CAVRQSTGNQFYF

SEQ ID NO: 363122 - protein, 13 aa, Homo sapiens
  CDR3 for beta chain variable domain of TCR clone 181561 (TRBV6-6, TRBJ1-5)
CASRAYHDQPQHF

SEQ ID NO: 363123 - protein, 12 aa, Homo sapiens
  CDR3 for alpha chain variable domain of TCR clone 181562 (TRAV2, TRAJ5)
CALDTGRRALTF

SEQ ID NO: 363124 - protein, 15 aa, Homo sapiens
  CDR3 for beta chain variable domain of TCR clone 181562 (TRBV10-3, TRBJ2-7)
CAISDVQDRAYEQFF

SEQ ID NO: 363125 - protein, 12 aa, Homo sapiens
  CDR3 for alpha chain variable domain of TCR clone 181563 (TRAV12-2, TRAJ43)
CAVNVNNNDMRF

SEQ ID NO: 363126 - protein, 12 aa, Homo sapiens
  CDR3 for beta chain variable domain of TCR clone 181563 (TRBV18, TRBJ2-1)
CASSSDEDEQFF

SEQ ID NO: 363127 - protein, 14 aa, Homo sapiens
  CDR3 for alpha chain variable domain of TCR clone 181564 (TRAV1-2, TRAJ8)
CAVREDTGFEKLVF

SEQ ID NO: 363128 - protein, 16 aa, Homo sapiens
  CDR3 for beta chain variable domain of TCR clone 181564 (TRBV4-1, TRBJ2-3)
CASSQSTSGAEDTQYF

SEQ ID NO: 363129 - protein, 16 aa, Homo sapiens
  CDR3 for alpha chain variable domain of TCR clone 181565 (TRAV3, TRAJ37)
CAVGVRGSGNTGKLIF

SEQ ID NO: 363130 - protein, 16 aa, Homo sapiens
  CDR3 for beta chain variable domain of TCR clone 181565 (TRBV11-2, TRBJ2-7)
CASSPTTGGVSYEQDF

SEQ ID NO: 363131 - protein, 16 aa, Homo sapiens
  CDR3 for alpha chain variable domain of TCR clone 181566 (TRAV3, TRAJ18)
CAVRDGRGSTLGRLAF

SEQ ID NO: 363132 - protein, 15 aa, Homo sapiens
  CDR3 for beta chain variable domain of TCR clone 181566 (TRBV7-9, TRBJ1-6)
CASSSPGRGNSPLHF

SEQ ID NO: 363133 - protein, 13 aa, Homo sapiens
  CDR3 for alpha chain variable domain of TCR clone 181567 (TRAV17, TRAJ9)
CATAITGGFKTIF

SEQ ID NO: 363134 - protein, 16 aa, Homo sapiens
  CDR3 for beta chain variable domain of TCR clone 181567 (TRBV15, TRBJ2-1)
CATSRNLAGGYNEQLF

SEQ ID NO: 363135 - protein, 11 aa, Homo sapiens
  CDR3 for alpha chain variable domain of TCR clone 181568 (TRAV1-2, TRAJ20)
CAVANDYKLSF

SEQ ID NO: 363136 - protein, 15 aa, Homo sapiens
  CDR3 for beta chain variable domain of TCR clone 181568 (TRBV10-3, TRBJ2-1)
CAIRNGTSGHNEQFF

SEQ ID NO: 363137 - protein, 15 aa, Homo sapiens
  CDR3 for alpha chain variable domain of TCR clone 181569 (TRAV23/DV6, TRAJ18)
CAARYRGSTLGRLYF

SEQ ID NO: 363138 - protein, 18 aa, Homo sapiens
  CDR3 for beta chain variable domain of TCR clone 181569 (TRBV7-6, TRBJ2-1)
CASSPRTSGMSSYNEQFF

SEQ ID NO: 363139 - protein, 14 aa, Homo sapiens
  CDR3 for alpha chain variable domain of TCR clone 181570 (TRAV2, TRAJ9)
CAVEDRSGGFKTIF

SEQ ID NO: 363140 - protein, 16 aa, Homo sapiens
  CDR3 for beta chain variable domain of TCR clone 181570 (TRBV9, TRBJ2-2)
CQQRRGTGYGHRELFF

SEQ ID NO: 363141 - protein, 13 aa, Homo sapiens
  CDR3 for alpha chain variable domain of TCR clone 181571 (TRAV2, TRAJ40)
CAVVTSGTYKYIF

SEQ ID NO: 363142 - protein, 15 aa, Homo sapiens
  CDR3 for beta chain variable domain of TCR clone 181571 (TRBV19, TRBJ2-1)
CASSSPGVPLDEQFF

SEQ ID NO: 363143 - protein, 14 aa, Homo sapiens
  CDR3 for alpha chain variable domain of TCR clone 181572 (TRAV17, TRAJ22)
CATSPSGSARQLTF

SEQ ID NO: 363144 - protein, 18 aa, Homo sapiens
  CDR3 for beta chain variable domain of TCR clone 181572 (TRBV10-3, TRBJ2-3)
CAISESRVGPMRGDTQYF

SEQ ID NO: 363145 - protein, 13 aa, Homo sapiens
  CDR3 for alpha chain variable domain of TCR clone 181573 (TRAV35, TRAJ48)
CSGHEFGNEKLTF

SEQ ID NO: 363146 - protein, 13 aa, Homo sapiens
  CDR3 for beta chain variable domain of TCR clone 181573 (TRBV7-2, TRBJ1-6)
CASSLVGSSPLHF

SEQ ID NO: 363147 - protein, 10 aa, Homo sapiens
  CDR3 for alpha chain variable domain of TCR clone 181574 (TRAV21, TRAJ13)
CAGGYQKVTF

SEQ ID NO: 363148 - protein, 16 aa, Homo sapiens
  CDR3 for beta chain variable domain of TCR clone 181574 (TRBV7-2, TRBJ1-4)
CASSPVGRFDREKLFF

SEQ ID NO: 363149 - protein, 14 aa, Homo sapiens
  CDR3 for alpha chain variable domain of TCR clone 181575 (TRAV13-2, TRAJ10)
CAENITGGGNKLTF

SEQ ID NO: 363150 - protein, 19 aa, Homo sapiens
  CDR3 for beta chain variable domain of TCR clone 181575 (TRBV25-1, TRBJ2-2)
CAILVYRVDRGRKTGELFF

SEQ ID NO: 363151 - protein, 12 aa, Homo sapiens
  CDR3 for alpha chain variable domain of TCR clone 181576 (TRAV13-2, TRAJ23)
CAERHRGGKLIF

SEQ ID NO: 363152 - protein, 15 aa, Homo sapiens
  CDR3 for beta chain variable domain of TCR clone 181576 (TRBV10-1, TRBJ2-3)
CASSATSGGFDTQYF

SEQ ID NO: 363153 - protein, 12 aa, Homo sapiens
  CDR3 for alpha chain variable domain of TCR clone 181577 (TRAV1-1, TRAJ24)
CAVRGSWGNSSL

SEQ ID NO: 363154 - protein, 16 aa, Homo sapiens
  CDR3 for beta chain variable domain of TCR clone 181577 (TRBV27, TRBJ2-2)
CASSFRGLVRTGELFF

SEQ ID NO: 363155 - protein, 13 aa, Homo sapiens
  CDR3 for alpha chain variable domain of TCR clone 181578 (TRAV12-1, TRAJ40)
CVVPTSGTYKYIF

SEQ ID NO: 363156 - protein, 18 aa, Homo sapiens
  CDR3 for beta chain variable domain of TCR clone 181578 (TRBV7-6, TRBJ2-1)
AASSPRTSGMSSYNEQFF

SEQ ID NO: 363157 - protein, 10 aa, Homo sapiens
  CDR3 for alpha chain variable domain of TCR clone 181579 (TRAV4, TRAJ15)
CLPFWTALIF

SEQ ID NO: 363158 - protein, 15 aa, Homo sapiens
  CDR3 for beta chain variable domain of TCR clone 181579 (TRBV5-1, TRBJ2-1)
CASSFPGTGYNEQFF

SEQ ID NO: 363159 - protein, 14 aa, Homo sapiens
  CDR3 for alpha chain variable domain of TCR clone 181580 (TRAV16, TRAJ33)
CALSAMDSNYQLIW

SEQ ID NO: 363160 - protein, 13 aa, Homo sapiens
  CDR3 for beta chain variable domain of TCR clone 181580 (TRBV18, TRBJ2-3)
CASSTGRTDTQYF

SEQ ID NO: 363161 - protein, 15 aa, Homo sapiens
  CDR3 for alpha chain variable domain of TCR clone 181581 (TRAV27, TRAJ45)
CAPVDSGGGADGLPF

SEQ ID NO: 363162 - protein, 13 aa, Homo sapiens
  CDR3 for beta chain variable domain of TCR clone 181581 (TRBV6-5, TRBJ2-6)
CASSTSGPLRLDF

SEQ ID NO: 363163 - protein, 16 aa, Homo sapiens
  CDR3 for alpha chain variable domain of TCR clone 181582 (TRAV26-1, TRAJ53)
CIVRVAMGGSNYKLPF

SEQ ID NO: 363164 - protein, 14 aa, Homo sapiens
  CDR3 for beta chain variable domain of TCR clone 181582 (TRBV2, TRBJ2-7)
CASSLTSGGYEQYF

SEQ ID NO: 363165 - protein, 18 aa, Homo sapiens
  CDR3 for alpha chain variable domain of TCR clone 181583 (TRAV29/DV5, TRAJ52)
CAAGFRGAGGTSYGKLTF

SEQ ID NO: 363166 - protein, 16 aa, Homo sapiens
  CDR3 for beta chain variable domain of TCR clone 181583 (TRBV20-1, TRBJ1-2)
CSASMGQGVANYGYTF

SEQ ID NO: 363167 - protein, 14 aa, Homo sapiens
  CDR3 for alpha chain variable domain of TCR clone 181584 (TRAV8-4, TRAJ45)
CASGGGGGADGLTF

SEQ ID NO: 363168 - protein, 17 aa, Homo sapiens
  CDR3 for beta chain variable domain of TCR clone 181584 (TRBV7-8, TRBJ2-6)
CASSAGTGGAGANVLTF

SEQ ID NO: 363169 - protein, 13 aa, Homo sapiens
  CDR3 for alpha chain variable domain of TCR clone 181585 (TRAV17, TRAJ40)
CAVALGGTYKYIF

SEQ ID NO: 363170 - protein, 16 aa, Homo sapiens
  CDR3 for beta chain variable domain of TCR clone 181585 (TRBV7-2, TRBJ1-4)
CASSLAPGRRDEKLFF

SEQ ID NO: 363171 - protein, 14 aa, Homo sapiens
  CDR3 for alpha chain variable domain of TCR clone 181586 (TRAV23/DV6, TRAJ4)
CAANLSGGYNKLIF

SEQ ID NO: 363172 - protein, 17 aa, Homo sapiens
  CDR3 for beta chain variable domain of TCR clone 181586 (TRBV4-1, TRBJ1-3)
CASSHQRGIRFGNTIYF

SEQ ID NO: 363173 - protein, 13 aa, Homo sapiens
  CDR3 for alpha chain variable domain of TCR clone 181587 (TRAV8-1, TRAJ8)
CAVNRTGFQKLVF

SEQ ID NO: 363174 - protein, 16 aa, Homo sapiens
  CDR3 for beta chain variable domain of TCR clone 181587 (TRBV7-9, TRBJ1-2)
CASSLGFSSGEDGYTF

SEQ ID NO: 363175 - protein, 16 aa, Homo sapiens
  CDR3 for alpha chain variable domain of TCR clone 181588 (TRAV12-3, TRAJ53)
CAMSPGSGGSHYKLTF

SEQ ID NO: 363176 - protein, 20 aa, Homo sapiens
  CDR3 for beta chain variable domain of TCR clone 181588 (TRBV7-8, TRBJ2-2)
CASSHLFPGPTIHITGELFF

SEQ ID NO: 363177 - protein, 15 aa, Homo sapiens
  CDR3 for alpha chain variable domain of TCR clone 181589 (TRAV17, TRAJ57)
CATGPSQGGSKKLVF

SEQ ID NO: 363178 - protein, 16 aa, Homo sapiens
  CDR3 for beta chain variable domain of TCR clone 181589 (TRBV12-4, TRBJ1-5)
CASSRPVGGSKQPQHF

SEQ ID NO: 363179 - protein, 15 aa, Homo sapiens
  CDR3 for alpha chain variable domain of TCR clone 181590 (TRAV27, TRAJ38)
CAARRNAGNNRKLIW

SEQ ID NO: 363180 - protein, 16 aa, Homo sapiens
  CDR3 for beta chain variable domain of TCR clone 181590 (TRBV7-6, TRBJ2-1)
CASSAPGPSSYNEQFF

SEQ ID NO: 363181 - protein, 17 aa, Homo sapiens
  CDR3 for alpha chain variable domain of TCR clone 181591 (TRAV29/DV5, TRAJ40)
CAASVIDTTSGTYKYIF

SEQ ID NO: 363182 - protein, 13 aa, Homo sapiens
  CDR3 for beta chain variable domain of TCR clone 181591 (TRBV6-1, TRBJ2-1)
CASSHDRNNEQFF

SEQ ID NO: 363183 - protein, 15 aa, Homo sapiens
  CDR3 for alpha chain variable domain of TCR clone 181592 (TRAV3, TRAJ22)
CAVRDRGSSARQLTF

SEQ ID NO: 363184 - protein, 20 aa, Homo sapiens
  CDR3 for beta chain variable domain of TCR clone 181592 (TRBV11-2, TRBJ1-6)
CASSLVFATGGSVHPSTLGT

SEQ ID NO: 363185 - protein, 13 aa, Homo sapiens
  CDR3 for alpha chain variable domain of TCR clone 181593 (TRAV13-1, TRAJ6)
CAARRGGSNIPTF

SEQ ID NO: 363186 - protein, 16 aa, Homo sapiens
  CDR3 for beta chain variable domain of TCR clone 181593 (TRBV7-9, TRBJ2-2)
CASSLATGVGTGELFF

SEQ ID NO: 363187 - protein, 13 aa, Homo sapiens
  CDR3 for alpha chain variable domain of TCR clone 181594 (TRAV27, TRAJ3)
ASLRGSSASKIIF

SEQ ID NO: 363188 - protein, 15 aa, Homo sapiens
  CDR3 for beta chain variable domain of TCR clone 181594 (TRBV28, TRBJ1-3)
CASSMGWAYGNTMYF

SEQ ID NO: 363189 - protein, 13 aa, Homo sapiens
  CDR3 for alpha chain variable domain of TCR clone 181595 (TRAV12-1, TRAJ22)
CVVPSGSARQLNF

SEQ ID NO: 363190 - protein, 15 aa, Homo sapiens
  CDR3 for beta chain variable domain of TCR clone 181595 (TRBV11-3, TRBJ2-7)
CASSPGPASSYEQYF

SEQ ID NO: 363191 - protein, 15 aa, Homo sapiens
  CDR3 for alpha chain variable domain of TCR clone 181596 (TRAV3, TRAJ5)
CAARVLDTGRRALTF

SEQ ID NO: 363192 - protein, 13 aa, Homo sapiens
  CDR3 for beta chain variable domain of TCR clone 181596 (TRBV12-4, TRBJ2-7)
CASSPTETYEQYF

SEQ ID NO: 363193 - protein, 13 aa, Homo sapiens
  CDR3 for alpha chain variable domain of TCR clone 181597 (TRAV17, TRAJ33)
CATDADSNYQLTW

SEQ ID NO: 363194 - protein, 17 aa, Homo sapiens
  CDR3 for beta chain variable domain of TCR clone 181597 (TRBV20-1, TRBJ2-3)
CSAVSPGLAGGQDTQYF

SEQ ID NO: 363195 - protein, 14 aa, Homo sapiens
  CDR3 for alpha chain variable domain of TCR clone 181598 (TRAV1-1, TRAJ28)
CAVNSGAGSYQLTF

SEQ ID NO: 363196 - protein, 14 aa, Homo sapiens
  CDR3 for beta chain variable domain of TCR clone 181598 (TRBV2, TRBJ1-5)
CASSGTVSNQPQHF

SEQ ID NO: 363197 - protein, 14 aa, Homo sapiens
  CDR3 for alpha chain variable domain of TCR clone 181599 (TRAV12-2, TRAJ44)
CAVNPAGTASKLTF

SEQ ID NO: 363198 - protein, 14 aa, Homo sapiens
  CDR3 for beta chain variable domain of TCR clone 181599 (TRBV7-8, TRBJ2-7)
CASSQTQGADEQYF

SEQ ID NO: 363199 - protein, 12 aa, Homo sapiens
  CDR3 for alpha chain variable domain of TCR clone 181600 (TRAV13-1, TRAJ53)
AASGGSNYKLTF

SEQ ID NO: 363200 - protein, 14 aa, Homo sapiens
  CDR3 for beta chain variable domain of TCR clone 181600 (TRBV7-7, TRBJ2-7)
CASSLGRGVGEQYF

SEQ ID NO: 363201 - protein, 15 aa, Homo sapiens
  CDR3 for alpha chain variable domain of TCR clone 181601 (TRAV3, TRAJ22)
CAVRDRGGSARQLTF

SEQ ID NO: 363202 - protein, 14 aa, Homo sapiens
  CDR3 for beta chain variable domain of TCR clone 181601 (TRBV7-3, TRBJ1-5)
RASSFSGCNQPQHF

SEQ ID NO: 363203 - protein, 16 aa, Homo sapiens
  CDR3 for alpha chain variable domain of TCR clone 181602 (TRAV12-3, TRAJ53)
CAMSPGSGGSNYKLTF

SEQ ID NO: 363204 - protein, 13 aa, Homo sapiens
  CDR3 for beta chain variable domain of TCR clone 181602 (TRBV6-3, TRBJ2-3)
CASTLQGIDTQYF

SEQ ID NO: 363205 - protein, 14 aa, Homo sapiens
  CDR3 for alpha chain variable domain of TCR clone 181603 (TRAV12-2, TRAJ17)
CAALFKAAGNKLTF

SEQ ID NO: 363206 - protein, 14 aa, Homo sapiens
  CDR3 for beta chain variable domain of TCR clone 181603 (TRBV18, TRBJ2-3)
CSSPLAGETDTQYF

SEQ ID NO: 363207 - protein, 11 aa, Homo sapiens
  CDR3 for alpha chain variable domain of TCR clone 181604 (TRAV4, TRAJ23)
CLVAPGGKLIF

SEQ ID NO: 363208 - protein, 15 aa, Homo sapiens
  CDR3 for beta chain variable domain of TCR clone 181604 (TRBV7-2, TRBJ2-1)
CASSFQADEYNEQCF

SEQ ID NO: 363209 - protein, 13 aa, Homo sapiens
  CDR3 for alpha chain variable domain of TCR clone 181605 (TRAV12-3, TRAJ33)
CAMSVNSNYQLIW

SEQ ID NO: 363210 - protein, 14 aa, Homo sapiens
  CDR3 for beta chain variable domain of TCR clone 181605 (TRBV20-1, TRBJ2-7)
CSAWTALSSYEQYF

SEQ ID NO: 363211 - protein, 16 aa, Homo sapiens
  CDR3 for alpha chain variable domain of TCR clone 181606 (TRAV12-3, TRAJ53)
CAMSPGSGGSNYKLTF

SEQ ID NO: 363212 - protein, 16 aa, Homo sapiens
  CDR3 for beta chain variable domain of TCR clone 181606 (TRBV18, TRBJ1-5)
CASSPYRVEGNQPQHF

SEQ ID NO: 363213 - protein, 14 aa, Homo sapiens
  CDR3 for alpha chain variable domain of TCR clone 181607 (TRAV8-3, TRAJ44)
CAVGNTGTASKLAF

SEQ ID NO: 363214 - protein, 15 aa, Homo sapiens
  CDR3 for beta chain variable domain of TCR clone 181607 (TRBV28, TRBJ2-7)
CASSFRGQGRYEQYF

SEQ ID NO: 363215 - protein, 13 aa, Homo sapiens
  CDR3 for alpha chain variable domain of TCR clone 181608 (TRAV8-3, TRAJ30)
CCGCLNSDDKIIF

SEQ ID NO: 363216 - protein, 15 aa, Homo sapiens
  CDR3 for beta chain variable domain of TCR clone 181608 (TRBV7-2, TRBJ2-7)
CASSLSGALTYEQYF

SEQ ID NO: 363217 - protein, 13 aa, Homo sapiens
  CDR3 for alpha chain variable domain of TCR clone 181609 (TRAV8-3, TRAJ28)
CAVGAVGSYQLTF

SEQ ID NO: 363218 - protein, 16 aa, Homo sapiens
  CDR3 for beta chain variable domain of TCR clone 181609 (TRBV15, TRBJ2-3)
CATSRDLGIVTDTQYF

SEQ ID NO: 363219 - protein, 11 aa, Homo sapiens
  CDR3 for alpha chain variable domain of TCR clone 181610 (TRAV21, TRAJ34)
CAVTNTDKLIF

SEQ ID NO: 363220 - protein, 15 aa, Homo sapiens
  CDR3 for beta chain variable domain of TCR clone 181610 (TRBV20-1, TRBJ2-7)
CIARDRVSGMDEQYF

SEQ ID NO: 363221 - protein, 14 aa, Homo sapiens
  CDR3 for alpha chain variable domain of TCR clone 181611 (TRAV12-2, TRAJ9)
CAVNMEGGGFKTIF

SEQ ID NO: 363222 - protein, 13 aa, Homo sapiens
  CDR3 for beta chain variable domain of TCR clone 181611 (TRBV11-3, TRBJ1-1)
CASSSNRDTEAFF

SEQ ID NO: 363223 - protein, 14 aa, Homo sapiens
  CDR3 for alpha chain variable domain of TCR clone 181612 (TRAV12-1, TRAJ9)
CVVTEYTGGFKTIF

SEQ ID NO: 363224 - protein, 13 aa, Homo sapiens
  CDR3 for beta chain variable domain of TCR clone 181612 (TRBV20-1, TRBJ1-1)
CSARAGGNTEAFF

SEQ ID NO: 363225 - protein, 15 aa, Homo sapiens
  CDR3 for alpha chain variable domain of TCR clone 181613 (TRAV8-3, TRAJ11)
CAVGLLNSGYSTLTF

SEQ ID NO: 363226 - protein, 13 aa, Homo sapiens
  CDR3 for beta chain variable domain of TCR clone 181613 (TRBV7-8, TRBJ2-7)
RRVRLTEMGEQYF

SEQ ID NO: 363227 - protein, 15 aa, Homo sapiens
  CDR3 for alpha chain variable domain of TCR clone 181614 (TRAV3, TRAJ42)
CAVRGGTGSQGNLFF

SEQ ID NO: 363228 - protein, 14 aa, Homo sapiens
  CDR3 for beta chain variable domain of TCR clone 181614 (TRBV19, TRBJ1-2)
CASSSLFARDVYTF

SEQ ID NO: 363229 - protein, 19 aa, Homo sapiens
  CDR3 for alpha chain variable domain of TCR clone 181615 (TRAV13-1, TRAJ52)
CAATPYQNAGGTSYGKLTF

SEQ ID NO: 363230 - protein, 14 aa, Homo sapiens
  CDR3 for beta chain variable domain of TCR clone 181615 (TRBV19, TRBJ2-7)
CASTVQGRPYEQYF

SEQ ID NO: 363231 - protein, 13 aa, Homo sapiens
  CDR3 for alpha chain variable domain of TCR clone 181616 (TRAV12-3, TRAJ9)
CAMRNTGGFKIIF

SEQ ID NO: 363232 - protein, 14 aa, Homo sapiens
  CDR3 for beta chain variable domain of TCR clone 181616 (TRBV11-3, TRBJ2-7)
CASSSTGEGYEQYF

SEQ ID NO: 363233 - protein, 17 aa, Homo sapiens
  CDR3 for alpha chain variable domain of TCR clone 181617 (TRAV3, TRAJ6)
CAVRDGPRAGGSYIPTF

SEQ ID NO: 363234 - protein, 13 aa, Homo sapiens
  CDR3 for beta chain variable domain of TCR clone 181617 (TRBV20-1, TRBJ2-1)
CSAQDGGPNEQFF

SEQ ID NO: 363235 - protein, 13 aa, Homo sapiens
  CDR3 for alpha chain variable domain of TCR clone 181618 (TRAV23/DV6, TRAJ48)
CAAIPERNEKLTF

SEQ ID NO: 363236 - protein, 14 aa, Homo sapiens
  CDR3 for beta chain variable domain of TCR clone 181618 (TRBV19, TRBJ2-1)
CASPTFVLSGEQFF

SEQ ID NO: 363237 - protein, 12 aa, Homo sapiens
  CDR3 for alpha chain variable domain of TCR clone 181619 (TRAV38-1, TRAJ47)
YAFETYGNKLVF

SEQ ID NO: 363238 - protein, 15 aa, Homo sapiens
  CDR3 for beta chain variable domain of TCR clone 181619 (TRBV20-1, TRBJ2-7)
CSARKGLAESYEQYF

SEQ ID NO: 363239 - protein, 11 aa, Homo sapiens
  CDR3 for alpha chain variable domain of TCR clone 181620 (TRAV2, TRAJ13)
CASGGYQKVTF

SEQ ID NO: 363240 - protein, 13 aa, Homo sapiens
  CDR3 for beta chain variable domain of TCR clone 181620 (TRBV20-1, TRBJ2-7)
CSAPGLADYEQYF

SEQ ID NO: 363241 - protein, 12 aa, Homo sapiens
  CDR3 for alpha chain variable domain of TCR clone 181621 (TRAV21, TRAJ11)
CAVRGGNNTLTF

SEQ ID NO: 363242 - protein, 15 aa, Homo sapiens
  CDR3 for beta chain variable domain of TCR clone 181621 (TRBV6-1, TRBJ2-7)
CASSEPIAATTEQYF

SEQ ID NO: 363243 - protein, 17 aa, Homo sapiens
  CDR3 for alpha chain variable domain of TCR clone 181622 (TRAV3, TRAJ28)
CAVRDQNSGAGSYQLTF

SEQ ID NO: 363244 - protein, 16 aa, Homo sapiens
  CDR3 for beta chain variable domain of TCR clone 181622 (TRBV7-3, TRBJ2-2)
CASSLKRGTLSGELFF

SEQ ID NO: 363245 - protein, 15 aa, Homo sapiens
  CDR3 for alpha chain variable domain of TCR clone 181623 (TRAV3, TRAJ5)
CAVRDRKTGRRALTF

SEQ ID NO: 363246 - protein, 15 aa, Homo sapiens
  CDR3 for beta chain variable domain of TCR clone 181623 (TRBV7-8, TRBJ2-1)
CASSVADSLDNEQFF

SEQ ID NO: 363247 - protein, 13 aa, Homo sapiens
  CDR3 for alpha chain variable domain of TCR clone 181624 (TRAV35, TRAJ44)
CAGLSGTASKLTF

SEQ ID NO: 363248 - protein, 12 aa, Homo sapiens
  CDR3 for beta chain variable domain of TCR clone 181624 (TRBV11-2, TRBJ2-2)
CASSLGGGELFF

SEQ ID NO: 363249 - protein, 14 aa, Homo sapiens
  CDR3 for alpha chain variable domain of TCR clone 181625 (TRAV1-2, TRAJ16)
CAVRGFSDGQKLLF

SEQ ID NO: 363250 - protein, 11 aa, Homo sapiens
  CDR3 for beta chain variable domain of TCR clone 181625 (TRBV11-2, TRBJ1-1)
CASSINTEAFF

SEQ ID NO: 363251 - protein, 11 aa, Homo sapiens
  CDR3 for alpha chain variable domain of TCR clone 181626 (TRAV1-2, TRAJ20)
CAVANDYKLSF

SEQ ID NO: 363252 - protein, 18 aa, Homo sapiens
  CDR3 for beta chain variable domain of TCR clone 181626 (TRBV20-1, TRBJ2-6)
CSAETTPTRGSVANVLTF

SEQ ID NO: 363253 - protein, 18 aa, Homo sapiens
  CDR3 for alpha chain variable domain of TCR clone 181627 (TRAV12-3, TRAJ52)
CAMSRTNAGGTSYGKLTF

SEQ ID NO: 363254 - protein, 16 aa, Homo sapiens
  CDR3 for beta chain variable domain of TCR clone 181627 (TRBV12-4, TRBJ1-5)
CASSRPVGGSNQPQHF

SEQ ID NO: 363255 - protein, 14 aa, Homo sapiens
  CDR3 for alpha chain variable domain of TCR clone 181628 (TRAV17, TRAJ30)
CATVTMNRDDKIIF

SEQ ID NO: 363256 - protein, 13 aa, Homo sapiens
  CDR3 for beta chain variable domain of TCR clone 181628 (TRBV19, TRBJ1-2)
CASSVPGQNGYTF

SEQ ID NO: 363257 - protein, 15 aa, Homo sapiens
  CDR3 for alpha chain variable domain of TCR clone 181629 (TRAV8-2, TRAJ24)
CVVSDRTDSCGKLQF

SEQ ID NO: 363258 - protein, 15 aa, Homo sapiens
  CDR3 for beta chain variable domain of TCR clone 181629 (TRBV29-1, TRBJ2-7)
CSVEFFDRGSYEQYF

SEQ ID NO: 363259 - protein, 13 aa, Homo sapiens
  CDR3 for alpha chain variable domain of TCR clone 181630 (TRAV12-3, TRAJ33)
CAMSVNSNYQLIG

SEQ ID NO: 363260 - protein, 12 aa, Homo sapiens
  CDR3 for beta chain variable domain of TCR clone 181630 (TRBV11-2, TRBJ2-1)
CASSLPLPEQFF

SEQ ID NO: 363261 - protein, 12 aa, Homo sapiens
  CDR3 for alpha chain variable domain of TCR clone 181631 (TRAV12-3, TRAJ17)
CAMTLTGNELTF

SEQ ID NO: 363262 - protein, 15 aa, Homo sapiens
  CDR3 for beta chain variable domain of TCR clone 181631 (TRBV20-1, TRBJ2-7)
RSARDRVSGMDEQYF

SEQ ID NO: 363263 - protein, 16 aa, Homo sapiens
  CDR3 for alpha chain variable domain of TCR clone 181632 (TRAV3, TRAJ21)
CAVRDIERGNFNKFYF

SEQ ID NO: 363264 - protein, 16 aa, Homo sapiens
  CDR3 for beta chain variable domain of TCR clone 181632 (TRBV12-4, TRBJ1-5)
CASSRPVGGSNHPQHF

SEQ ID NO: 363265 - protein, 14 aa, Homo sapiens
  CDR3 for alpha chain variable domain of TCR clone 181633 (TRAV12-3, TRAJ10)
SHLPLTGGGNKLTF

SEQ ID NO: 363266 - protein, 11 aa, Homo sapiens
  CDR3 for beta chain variable domain of TCR clone 181633 (TRBV10-3, TRBJ2-7)
CAISEGLEQYF

SEQ ID NO: 363267 - protein, 14 aa, Homo sapiens
  CDR3 for alpha chain variable domain of TCR clone 181634 (TRAV8-4, TRAJ37)
CAVSGSSNTGKLIF

SEQ ID NO: 363268 - protein, 14 aa, Homo sapiens
  CDR3 for beta chain variable domain of TCR clone 181634 (TRBV4-1, TRBJ2-2)
CASSQAVNTGELFF

SEQ ID NO: 363269 - protein, 13 aa, Homo sapiens
  CDR3 for alpha chain variable domain of TCR clone 181635 (TRAV8-3, TRAJ6)
CAARWGGSYIPTF

SEQ ID NO: 363270 - protein, 15 aa, Homo sapiens
  CDR3 for beta chain variable domain of TCR clone 181635 (TRBV4-1, TRBJ2-3)
CASSNLAGGRDTQYF

SEQ ID NO: 363271 - protein, 13 aa, Homo sapiens
  CDR3 for alpha chain variable domain of TCR clone 181636 (TRAV2, TRAJ40)
CAVVTSGTYKYIF

SEQ ID NO: 363272 - protein, 15 aa, Homo sapiens
  CDR3 for beta chain variable domain of TCR clone 181636 (TRBV7-3, TRBJ2-7)
CASSLTPTGYDEQYF

SEQ ID NO: 363273 - protein, 14 aa, Homo sapiens
  CDR3 for alpha chain variable domain of TCR clone 181637 (TRAV12-3, TRAJ10)
SHLPLTGGGNKLTF

SEQ ID NO: 363274 - protein, 13 aa, Homo sapiens
  CDR3 for beta chain variable domain of TCR clone 181637 (TRBV7-9, TRBJ2-3)
FASSPGSTDTQYF

SEQ ID NO: 363275 - protein, 21 aa, Homo sapiens
  CDR3 for alpha chain variable domain of TCR clone 181638 (TRAV26-1, TRAJ22)
CIVRVSFWFCKATDLWIWYTI

SEQ ID NO: 363276 - protein, 16 aa, Homo sapiens
  CDR3 for beta chain variable domain of TCR clone 181638 (TRBV24-1, TRBJ2-3)
CATSDPGTGATDTQYF

SEQ ID NO: 363277 - protein, 13 aa, Homo sapiens
  CDR3 for alpha chain variable domain of TCR clone 181639 (TRAV20, TRAJ37)
CAGCSSNTGKLIF

SEQ ID NO: 363278 - protein, 16 aa, Homo sapiens
  CDR3 for beta chain variable domain of TCR clone 181639 (TRBV5-5, TRBJ1-2)
CASSPTWGRGLYGYTF

SEQ ID NO: 363279 - protein, 15 aa, Homo sapiens
  CDR3 for alpha chain variable domain of TCR clone 181640 (TRAV21, TRAJ38)
CAVRQDAGNNRKLIW

SEQ ID NO: 363280 - protein, 13 aa, Homo sapiens
  CDR3 for beta chain variable domain of TCR clone 181640 (TRBV20-1, TRBJ1-1)
CSAPLGGGTEAFF

SEQ ID NO: 363281 - protein, 17 aa, Homo sapiens
  CDR3 for alpha chain variable domain of TCR clone 181641 (TRAV3, TRAJ6)
CAVRDGPRAGGSYINTF

SEQ ID NO: 363282 - protein, 12 aa, Homo sapiens
  CDR3 for beta chain variable domain of TCR clone 181641 (TRBV11-2, TRBJ2-2)
CASSLGGGELFF

SEQ ID NO: 363283 - protein, 13 aa, Homo sapiens
  CDR3 for alpha chain variable domain of TCR clone 181642 (TRAV13-1, TRAJ10)
GAAAEGGGNKLTF

SEQ ID NO: 363284 - protein, 15 aa, Homo sapiens
  CDR3 for beta chain variable domain of TCR clone 181642 (TRBV7-8, TRBJ2-2)
CASSLDQGWTGELFF

SEQ ID NO: 363285 - protein, 14 aa, Homo sapiens
  CDR3 for alpha chain variable domain of TCR clone 181643 (TRAV8-3, TRAJ4)
CAVGAAGGYNKLIF

SEQ ID NO: 363286 - protein, 15 aa, Homo sapiens
  CDR3 for beta chain variable domain of TCR clone 181643 (TRBV6-5, TRBJ1-2)
CARSYSPPRFYGYTF

SEQ ID NO: 363287 - protein, 17 aa, Homo sapiens
  CDR3 for alpha chain variable domain of TCR clone 181644 (TRAV21, TRAJ52)
CAAGVNAGGTSYGKLTF

SEQ ID NO: 363288 - protein, 13 aa, Homo sapiens
  CDR3 for beta chain variable domain of TCR clone 181644 (TRBV5-1, TRBJ1-2)
CASSFQGNYGYTF

SEQ ID NO: 363289 - protein, 13 aa, Homo sapiens
  CDR3 for alpha chain variable domain of TCR clone 181645 (TRAV27, TRAJ29)
CAGAHSGNTPLVF

SEQ ID NO: 363290 - protein, 14 aa, Homo sapiens
  CDR3 for beta chain variable domain of TCR clone 181645 (TRBV7-9, TRBJ2-7)
CASSIGQAAGGQYF

SEQ ID NO: 363291 - protein, 14 aa, Homo sapiens
  CDR3 for alpha chain variable domain of TCR clone 181646 (TRAV1-2, TRAJ8)
CAVREDTGFQKLLF

SEQ ID NO: 363292 - protein, 19 aa, Homo sapiens
  CDR3 for beta chain variable domain of TCR clone 181646 (TRBV28, TRBJ2-1)
CASSFSIRGSGRTRYEQFF

SEQ ID NO: 363293 - protein, 15 aa, Homo sapiens
  CDR3 for alpha chain variable domain of TCR clone 181647 (TRAV8-6, TRAJ10)
CAVSDQAGGGNKLTF

SEQ ID NO: 363294 - protein, 15 aa, Homo sapiens
  CDR3 for beta chain variable domain of TCR clone 181647 (TRBV3-1, TRBJ2-5)
CARSANLGGPETQYF

SEQ ID NO: 363295 - protein, 14 aa, Homo sapiens
  CDR3 for alpha chain variable domain of TCR clone 181648 (TRAV3, TRAJ9)
CAVRLNTGGFKTIF

SEQ ID NO: 363296 - protein, 15 aa, Homo sapiens
  CDR3 for beta chain variable domain of TCR clone 181648 (TRBV11-3, TRBJ1-1)
CASSLGGPGDTEAFF

SEQ ID NO: 363297 - protein, 11 aa, Homo sapiens
  CDR3 for alpha chain variable domain of TCR clone 181649 (TRAV26-1, TRAJ27)
CIDLNAGKSTF

SEQ ID NO: 363298 - protein, 18 aa, Homo sapiens
  CDR3 for beta chain variable domain of TCR clone 181649 (TRBV7-9, TRBJ2-6)
CASSFPGAGISGANVLTF

SEQ ID NO: 363299 - protein, 11 aa, Homo sapiens
  CDR3 for alpha chain variable domain of TCR clone 181650 (TRAV8-3, TRAJ4)
CAVGARPAFKR

SEQ ID NO: 363300 - protein, 13 aa, Homo sapiens
  CDR3 for beta chain variable domain of TCR clone 181650 (TRBV20-1, TRBJ1-2)
CSATGIQGSGYTF

SEQ ID NO: 363301 - protein, 13 aa, Homo sapiens
  CDR3 for alpha chain variable domain of TCR clone 181651 (TRAV36/DV7, TRAJ38)
CVANAGNNRKLMW

SEQ ID NO: 363302 - protein, 14 aa, Homo sapiens
  CDR3 for beta chain variable domain of TCR clone 181651 (TRBV19, TRBJ2-1)
CASPTFVLSGEQFF

SEQ ID NO: 363303 - protein, 13 aa, Homo sapiens
  CDR3 for alpha chain variable domain of TCR clone 181652 (TRAV26-2, TRAJ43)
CILRAVNNNDMRF

SEQ ID NO: 363304 - protein, 16 aa, Homo sapiens
  CDR3 for beta chain variable domain of TCR clone 181652 (TRBV9, TRBJ2-1)
CASSPTTGASYNEQFF

SEQ ID NO: 363305 - protein, 13 aa, Homo sapiens
  CDR3 for alpha chain variable domain of TCR clone 181653 (TRAV16, TRAJ34)
CITVLSHTDKLIF

SEQ ID NO: 363306 - protein, 14 aa, Homo sapiens
  CDR3 for beta chain variable domain of TCR clone 181653 (TRBV11-2, TRBJ1-2)
CASSLGTANYGYTF

SEQ ID NO: 363307 - protein, 14 aa, Homo sapiens
  CDR3 for alpha chain variable domain of TCR clone 181654 (TRAV12-3, TRAJ35)
CAMSLTGFGNVLHC

SEQ ID NO: 363308 - protein, 12 aa, Homo sapiens
  CDR3 for beta chain variable domain of TCR clone 181654 (TRBV12-4, TRBJ1-1)
CASSLAGLEAFF

SEQ ID NO: 363309 - protein, 15 aa, Homo sapiens
  CDR3 for alpha chain variable domain of TCR clone 181655 (TRAV21, TRAJ40)
CAVRPQTTGTYKYIF

SEQ ID NO: 363310 - protein, 13 aa, Homo sapiens
  CDR3 for beta chain variable domain of TCR clone 181655 (TRBV7-2, TRBJ2-2)
CASSSVRAGELFF

SEQ ID NO: 363311 - protein, 13 aa, Homo sapiens
  CDR3 for alpha chain variable domain of TCR clone 181656 (TRAV13-1, TRAJ21)
CAASANNFNKFYF

SEQ ID NO: 363312 - protein, 10 aa, Homo sapiens
  CDR3 for beta chain variable domain of TCR clone 181656 (TRBV29-1, TRBJ2-1)
CSVRTGEQFF

SEQ ID NO: 363313 - protein, 16 aa, Homo sapiens
  CDR3 for alpha chain variable domain of TCR clone 181657 (TRAV8-3, TRAJ13)
CAVGAYPSGGYQKVTF

SEQ ID NO: 363314 - protein, 15 aa, Homo sapiens
  CDR3 for beta chain variable domain of TCR clone 181657 (TRBV19, TRBJ1-2)
CASSVGQVLNYGYTF

SEQ ID NO: 363315 - protein, 14 aa, Homo sapiens
  CDR3 for alpha chain variable domain of TCR clone 181658 (TRAV2, TRAJ9)
CAVEDRSGGFKTIF

SEQ ID NO: 363316 - protein, 13 aa, Homo sapiens
  CDR3 for beta chain variable domain of TCR clone 181658 (TRBV29-1, TRBJ2-4)
CSVGEGTKNIQYF

SEQ ID NO: 363317 - protein, 13 aa, Homo sapiens
  CDR3 for alpha chain variable domain of TCR clone 181659 (TRAV12-2, TRAJ18)
CAVRGSTLGRLYF

SEQ ID NO: 363318 - protein, 14 aa, Homo sapiens
  CDR3 for beta chain variable domain of TCR clone 181659 (TRBV11-2, TRBJ2-5)
CASSRTGGIETQYF

SEQ ID NO: 363319 - protein, 15 aa, Homo sapiens
  CDR3 for alpha chain variable domain of TCR clone 181660 (TRAV8-3, TRAJ45)
CASSYSGGGADVFTF

SEQ ID NO: 363320 - protein, 13 aa, Homo sapiens
  CDR3 for beta chain variable domain of TCR clone 181660 (TRBV10-3, TRBJ2-7)
CASKLAVNYEQYF

SEQ ID NO: 363321 - protein, 14 aa, Homo sapiens
  CDR3 for alpha chain variable domain of TCR clone 181661 (TRAV26-1, TRAJ38)
CIADNAGNNRKLIW

SEQ ID NO: 363322 - protein, 11 aa, Homo sapiens
  CDR3 for beta chain variable domain of TCR clone 181661 (TRBV29-1, TRBJ1-1)
CSVEVGTRTFF

SEQ ID NO: 363323 - protein, 14 aa, Homo sapiens
  CDR3 for alpha chain variable domain of TCR clone 181662 (TRAV1-2, TRAJ8)
CAVREDTGCQKLVF

SEQ ID NO: 363324 - protein, 20 aa, Homo sapiens
  CDR3 for beta chain variable domain of TCR clone 181662 (TRBV28, TRBJ2-1)
CASTPIGRSPGLAGGNEQFF

SEQ ID NO: 363325 - protein, 14 aa, Homo sapiens
  CDR3 for alpha chain variable domain of TCR clone 181663 (TRAV12-2, TRAJ11)
CAMNMNSGYSTLTF

SEQ ID NO: 363326 - protein, 12 aa, Homo sapiens
  CDR3 for beta chain variable domain of TCR clone 181663 (TRBV11-2, TRBJ2-2)
CASSLGGGELFF

SEQ ID NO: 363327 - protein, 13 aa, Homo sapiens
  CDR3 for alpha chain variable domain of TCR clone 181664 (TRAV3, TRAJ20)
CAVRLSNDYKLSF

SEQ ID NO: 363328 - protein, 14 aa, Homo sapiens
  CDR3 for beta chain variable domain of TCR clone 181664 (TRBV10-3, TRBJ2-1)
CAISDRGGVTEQFF

SEQ ID NO: 363329 - protein, 16 aa, Homo sapiens
  CDR3 for alpha chain variable domain of TCR clone 181665 (TRAV3, TRAJ37)
CAVRGKGSGNTGKLIF

SEQ ID NO: 363330 - protein, 13 aa, Homo sapiens
  CDR3 for beta chain variable domain of TCR clone 181665 (TRBV7-2, TRBJ1-5)
CASSFARNQPQHF

SEQ ID NO: 363331 - protein, 14 aa, Homo sapiens
  CDR3 for alpha chain variable domain of TCR clone 181666 (TRAV8-2, TRAJ11)
CVVSEKSGYNTLTF

SEQ ID NO: 363332 - protein, 16 aa, Homo sapiens
  CDR3 for beta chain variable domain of TCR clone 181666 (TRBV28, TRBJ2-1)
CASSSPEYPRDNEQFF

SEQ ID NO: 363333 - protein, 12 aa, Homo sapiens
  CDR3 for alpha chain variable domain of TCR clone 181667 (TRAV12-2, TRAJ10)
WGVTGGGNKLTF

SEQ ID NO: 363334 - protein, 13 aa, Homo sapiens
  CDR3 for beta chain variable domain of TCR clone 181667 (TRBV4-1, TRBJ2-1)
CASSQAGGDEQFF

SEQ ID NO: 363335 - protein, 13 aa, Homo sapiens
  CDR3 for alpha chain variable domain of TCR clone 181668 (TRAV20, TRAJ15)
CATINQAGTALIF

SEQ ID NO: 363336 - protein, 13 aa, Homo sapiens
  CDR3 for beta chain variable domain of TCR clone 181668 (TRBV12-4, TRBJ2-1)
CASRQPSNNEQLF

SEQ ID NO: 363337 - protein, 14 aa, Homo sapiens
  CDR3 for alpha chain variable domain of TCR clone 181669 (TRAV35, TRAJ42)
CAGRYGGSQGNLIF

SEQ ID NO: 363338 - protein, 15 aa, Homo sapiens
  CDR3 for beta chain variable domain of TCR clone 181669 (TRBV7-9, TRBJ2-1)
CASSLSWGRANEQFF

SEQ ID NO: 363339 - protein, 16 aa, Homo sapiens
  CDR3 for alpha chain variable domain of TCR clone 181670 (TRAV21, TRAJ45)
CAVSWGSGGGADGLTF

SEQ ID NO: 363340 - protein, 12 aa, Homo sapiens
  CDR3 for beta chain variable domain of TCR clone 181670 (TRBV5-7, TRBJ1-2)
CASSLVQNGYTF

SEQ ID NO: 363341 - protein, 14 aa, Homo sapiens
  CDR3 for alpha chain variable domain of TCR clone 181671 (TRAV2, TRAJ9)
CAVEDRSGGFKTIF

SEQ ID NO: 363342 - protein, 15 aa, Homo sapiens
  CDR3 for beta chain variable domain of TCR clone 181671 (TRBV11-2, TRBJ2-4)
CASSRPGTGINIQYF

SEQ ID NO: 363343 - protein, 20 aa, Homo sapiens
  CDR3 for alpha chain variable domain of TCR clone 181672 (TRAV12-3, TRAJ41)
SLFIRDSQPSDSATPEALNF

SEQ ID NO: 363344 - protein, 15 aa, Homo sapiens
  CDR3 for beta chain variable domain of TCR clone 181672 (TRBV5-1, TRBJ2-7)
CASSSDLTSSYEQYF

SEQ ID NO: 363345 - protein, 13 aa, Homo sapiens
  CDR3 for alpha chain variable domain of TCR clone 181673 (TRAV8-3, TRAJ48)
CAVVPFGSDKLTF

SEQ ID NO: 363346 - protein, 15 aa, Homo sapiens
  CDR3 for beta chain variable domain of TCR clone 181673 (TRBV11-2, TRBJ2-1)
CASSSPSTLYNEQFF

SEQ ID NO: 363347 - protein, 13 aa, Homo sapiens
  CDR3 for alpha chain variable domain of TCR clone 181674 (TRAV21, TRAJ45)
CAVMGGGADGLTF

SEQ ID NO: 363348 - protein, 13 aa, Homo sapiens
  CDR3 for beta chain variable domain of TCR clone 181674 (TRBV12-4, TRBJ1-2)
CASSLRQGKGYTF

SEQ ID NO: 363349 - protein, 12 aa, Homo sapiens
  CDR3 for alpha chain variable domain of TCR clone 181675 (TRAV12-3, TRAJ17)
CAMTLTGNKLTF

SEQ ID NO: 363350 - protein, 15 aa, Homo sapiens
  CDR3 for beta chain variable domain of TCR clone 181675 (TRBV2, TRBJ2-3)
CASSERSGHTDTQYF

SEQ ID NO: 363351 - protein, 13 aa, Homo sapiens
  CDR3 for alpha chain variable domain of TCR clone 181676 (TRAV13-2, TRAJ13)
CAERPGVYQKVTF

SEQ ID NO: 363352 - protein, 13 aa, Homo sapiens
  CDR3 for beta chain variable domain of TCR clone 181676 (TRBV28, TRBJ1-2)
CAGRDRGNYGYTF

SEQ ID NO: 363353 - protein, 12 aa, Homo sapiens
  CDR3 for alpha chain variable domain of TCR clone 181677 (TRAV13-1, TRAJ49)
CAASPMGNQFYF

SEQ ID NO: 363354 - protein, 13 aa, Homo sapiens
  CDR3 for beta chain variable domain of TCR clone 181677 (TRBV7-6, TRBJ1-2)
CASSLVADYGYTF

SEQ ID NO: 363355 - protein, 15 aa, Homo sapiens
  CDR3 for alpha chain variable domain of TCR clone 181678 (TRAV14/DV4, TRAJ12)
CAMREERDSSYKLIF

SEQ ID NO: 363356 - protein, 15 aa, Homo sapiens
  CDR3 for beta chain variable domain of TCR clone 181678 (TRBV28, TRBJ1-3)
CASSMGWASGNTIYF

SEQ ID NO: 363357 - protein, 14 aa, Homo sapiens
  CDR3 for alpha chain variable domain of TCR clone 181679 (TRAV35, TRAJ13)
CAGSPSGGYQKVTF

SEQ ID NO: 363358 - protein, 13 aa, Homo sapiens
  CDR3 for beta chain variable domain of TCR clone 181679 (TRBV29-1, TRBJ1-1)
CSVADSRNTEAFF

SEQ ID NO: 363359 - protein, 17 aa, Homo sapiens
  CDR3 for alpha chain variable domain of TCR clone 181680 (TRAV14/DV4, TRAJ4)
CAMREASGRGGYNKLIF

SEQ ID NO: 363360 - protein, 13 aa, Homo sapiens
  CDR3 for beta chain variable domain of TCR clone 181680 (TRBV19, TRBJ1-1)
CASSFGRNTEAFF

SEQ ID NO: 363361 - protein, 12 aa, Homo sapiens
  CDR3 for alpha chain variable domain of TCR clone 181681 (TRAV9-2, TRAJ36)
CALKKGANNLFF

SEQ ID NO: 363362 - protein, 15 aa, Homo sapiens
  CDR3 for beta chain variable domain of TCR clone 181681 (TRBV15, TRBJ2-3)
CATSGAGFGTDTQYF

SEQ ID NO: 363363 - protein, 15 aa, Homo sapiens
  CDR3 for alpha chain variable domain of TCR clone 181682 (TRAV38-1, TRAJ37)
CAFIHGPGNTGKLIF

SEQ ID NO: 363364 - protein, 16 aa, Homo sapiens
  CDR3 for beta chain variable domain of TCR clone 181682 (TRBV12-5, TRBJ2-5)
CASGPRTSGNQETQYF

SEQ ID NO: 363365 - protein, 14 aa, Homo sapiens
  CDR3 for alpha chain variable domain of TCR clone 181683 (TRAV26-1, TRAJ15)
CIEAGNQAGTALIF

SEQ ID NO: 363366 - protein, 15 aa, Homo sapiens
  CDR3 for beta chain variable domain of TCR clone 181683 (TRBV12-4, TRBJ2-5)
CASSPPTGLQETQYF

SEQ ID NO: 363367 - protein, 15 aa, Homo sapiens
  CDR3 for alpha chain variable domain of TCR clone 181684 (TRAV8-4, TRAJ3)
CAVTGENLVQQCFQD

SEQ ID NO: 363368 - protein, 13 aa, Homo sapiens
  CDR3 for beta chain variable domain of TCR clone 181684 (TRBV12-4, TRBJ1-2)
CASSLRQGKGYTF

SEQ ID NO: 363369 - protein, 16 aa, Homo sapiens
  CDR3 for alpha chain variable domain of TCR clone 181685 (TRAV16, )
CALSGDIQNPDPAVYQ

SEQ ID NO: 363370 - protein, 16 aa, Homo sapiens
  CDR3 for beta chain variable domain of TCR clone 181685 (TRBV12-5, TRBJ2-5)
CASGPRTSGNQETQYF

SEQ ID NO: 363371 - protein, 11 aa, Homo sapiens
  CDR3 for alpha chain variable domain of TCR clone 181686 (TRAV21, TRAJ34)
CAPYNTDKLIF

SEQ ID NO: 363372 - protein, 16 aa, Homo sapiens
  CDR3 for beta chain variable domain of TCR clone 181686 (TRBV10-2, TRBJ1-1)
CASSEFGEGASTEAFF

SEQ ID NO: 363373 - protein, 15 aa, Homo sapiens
  CDR3 for alpha chain variable domain of TCR clone 181687 (TRAV26-1, TRAJ21)
CIVRVPNYNFNKFYF

SEQ ID NO: 363374 - protein, 16 aa, Homo sapiens
  CDR3 for beta chain variable domain of TCR clone 181687 (TRBV7-9, TRBJ2-3)
CSSSLQGNPGTDTQYF

SEQ ID NO: 363375 - protein, 17 aa, Homo sapiens
  CDR3 for alpha chain variable domain of TCR clone 181688 (TRAV26-2, TRAJ42)
CILRDVGYGGSQGNLSF

SEQ ID NO: 363376 - protein, 16 aa, Homo sapiens
  CDR3 for beta chain variable domain of TCR clone 181688 (TRBV12-4, TRBJ2-7)
CASSLIGGTGTYEQYF

SEQ ID NO: 363377 - protein, 16 aa, Homo sapiens
  CDR3 for alpha chain variable domain of TCR clone 181689 (TRAV3, TRAJ37)
CAVRGKGSGNTGKLIF

SEQ ID NO: 363378 - protein, 15 aa, Homo sapiens
  CDR3 for beta chain variable domain of TCR clone 181689 (TRBV7-3, TRBJ2-2)
CASSEAGQGTGELFF

SEQ ID NO: 363379 - protein, 14 aa, Homo sapiens
  CDR3 for alpha chain variable domain of TCR clone 181690 (TRAV17, TRAJ33)
CATDARRSNYQLIW

SEQ ID NO: 363380 - protein, 13 aa, Homo sapiens
  CDR3 for beta chain variable domain of TCR clone 181690 (TRBV19, TRBJ1-2)
CASSQGQVYGYTF

SEQ ID NO: 363381 - protein, 18 aa, Homo sapiens
  CDR3 for alpha chain variable domain of TCR clone 181691 (TRAV12-1, TRAJ26)
SLVIQPPTSVPYGQNFVF

SEQ ID NO: 363382 - protein, 13 aa, Homo sapiens
  CDR3 for beta chain variable domain of TCR clone 181691 (TRBV4-2, TRBJ1-1)
CASSQAGNTEAFF

SEQ ID NO: 363383 - protein, 14 aa, Homo sapiens
  CDR3 for alpha chain variable domain of TCR clone 181692 (TRAV1-2, TRAJ16)
CAVNRFSDGQKLPF

SEQ ID NO: 363384 - protein, 15 aa, Homo sapiens
  CDR3 for beta chain variable domain of TCR clone 181692 (TRBV7-9, TRBJ1-6)
CASSSPGRGNSPLHL

SEQ ID NO: 363385 - protein, 15 aa, Homo sapiens
  CDR3 for alpha chain variable domain of TCR clone 181693 (TRAV2, TRAJ9)
CAVEDRGTGGFKTIF

SEQ ID NO: 363386 - protein, 17 aa, Homo sapiens
  CDR3 for beta chain variable domain of TCR clone 181693 (TRBV11-2, TRBJ2-1)
CASSLYLPGVEYNEQFF

SEQ ID NO: 363387 - protein, 12 aa, Homo sapiens
  CDR3 for alpha chain variable domain of TCR clone 181694 (TRAV13-2, TRAJ23)
CAERHRGVKLIF

SEQ ID NO: 363388 - protein, 12 aa, Homo sapiens
  CDR3 for beta chain variable domain of TCR clone 181694 (TRBV5-5, TRBJ2-5)
CASSYFGEKQYF

SEQ ID NO: 363389 - protein, 13 aa, Homo sapiens
  CDR3 for alpha chain variable domain of TCR clone 181695 (TRAV21, TRAJ32)
CAVSGGATSKLIF

SEQ ID NO: 363390 - protein, 15 aa, Homo sapiens
  CDR3 for beta chain variable domain of TCR clone 181695 (TRBV23-1, TRBJ2-1)
CASSQWPQLTMSSSS

SEQ ID NO: 363391 - protein, 13 aa, Homo sapiens
  CDR3 for alpha chain variable domain of TCR clone 181696 (TRAV8-3, TRAJ6)
CAVGSGGSYIPTF

SEQ ID NO: 363392 - protein, 18 aa, Homo sapiens
  CDR3 for beta chain variable domain of TCR clone 181696 (TRBV11-2, TRBJ2-3)
CASSLGGASRGAPNTQYF

SEQ ID NO: 363393 - protein, 14 aa, Homo sapiens
  CDR3 for alpha chain variable domain of TCR clone 181697 (TRAV20, TRAJ42)
CAVQAGGRPRNLIF

SEQ ID NO: 363394 - protein, 14 aa, Homo sapiens
  CDR3 for beta chain variable domain of TCR clone 181697 (TRBV28, TRBJ1-2)
CASRIQGANYGYTF

SEQ ID NO: 363395 - protein, 16 aa, Homo sapiens
  CDR3 for alpha chain variable domain of TCR clone 181698 (TRAV30, TRAJ24)
CGTEIVDADRWGKFQF

SEQ ID NO: 363396 - protein, 14 aa, Homo sapiens
  CDR3 for beta chain variable domain of TCR clone 181698 (TRBV12-5, TRBJ2-5)
CASGSRTHQGTQYF

SEQ ID NO: 363397 - protein, 15 aa, Homo sapiens
  CDR3 for alpha chain variable domain of TCR clone 181699 (TRAV4, TRAJ42)
CLVGGYGGSKGNLIF

SEQ ID NO: 363398 - protein, 16 aa, Homo sapiens
  CDR3 for beta chain variable domain of TCR clone 181699 (TRBV27, TRBJ1-1)
CASSTRTGGVGTEAFF

SEQ ID NO: 363399 - protein, 14 aa, Homo sapiens
  CDR3 for alpha chain variable domain of TCR clone 181700 (TRAV26-1, TRAJ40)
CIVRLLSGTYKYIF

SEQ ID NO: 363400 - protein, 15 aa, Homo sapiens
  CDR3 for beta chain variable domain of TCR clone 181700 (TRBV11-3, TRBJ2-3)
CASLKDGREGDTQYF

SEQ ID NO: 363401 - protein, 13 aa, Homo sapiens
  CDR3 for alpha chain variable domain of TCR clone 181701 (TRAV20, TRAJ29)
CAVQAVGNTPLVF

SEQ ID NO: 363402 - protein, 13 aa, Homo sapiens
  CDR3 for beta chain variable domain of TCR clone 181701 (TRBV12-4, TRBJ1-2)
CASSLRQGKGYTF

SEQ ID NO: 363403 - protein, 15 aa, Homo sapiens
  CDR3 for alpha chain variable domain of TCR clone 181702 (TRAV8-3, TRAJ45)
CAPSYSGGGADGLTF

SEQ ID NO: 363404 - protein, 13 aa, Homo sapiens
  CDR3 for beta chain variable domain of TCR clone 181702 (TRBV10-3, TRBJ2-7)
CASKRAVNYEQYF

SEQ ID NO: 363405 - protein, 14 aa, Homo sapiens
  CDR3 for alpha chain variable domain of TCR clone 181703 (TRAV12-3, TRAJ54)
CAMRISQGAQKLVF

SEQ ID NO: 363406 - protein, 16 aa, Homo sapiens
  CDR3 for beta chain variable domain of TCR clone 181703 (TRBV28, TRBJ2-1)
CASRVPASGRIGEQSF

SEQ ID NO: 363407 - protein, 16 aa, Homo sapiens
  CDR3 for alpha chain variable domain of TCR clone 181704 (TRAV30, TRAJ24)
CGTAIVDADSWGKFQF

SEQ ID NO: 363408 - protein, 15 aa, Homo sapiens
  CDR3 for beta chain variable domain of TCR clone 181704 (TRBV28, TRBJ1-3)
CASSMGWASGNTIYF

SEQ ID NO: 363409 - protein, 13 aa, Homo sapiens
  CDR3 for alpha chain variable domain of TCR clone 181705 (TRAV12-2, TRAJ3)
CAFQYSSASKIIF

SEQ ID NO: 363410 - protein, 17 aa, Homo sapiens
  CDR3 for beta chain variable domain of TCR clone 181705 (TRBV20-1, TRBJ2-1)
CSASSSGLAGSYNEQFF

SEQ ID NO: 363411 - protein, 15 aa, Homo sapiens
  CDR3 for alpha chain variable domain of TCR clone 181706 (TRAV3, TRAJ4)
CAVRDGTGGYNKLIF

SEQ ID NO: 363412 - protein, 17 aa, Homo sapiens
  CDR3 for beta chain variable domain of TCR clone 181706 (TRBV28, TRBJ2-5)
CASSRQGGLAGAETQYF

SEQ ID NO: 363413 - protein, 13 aa, Homo sapiens
  CDR3 for alpha chain variable domain of TCR clone 181707 (TRAV12-3, TRAJ40)
CAMSDSGTYKYIF

SEQ ID NO: 363414 - protein, 14 aa, Homo sapiens
  CDR3 for beta chain variable domain of TCR clone 181707 (TRBV12-4, TRBJ1-1)
CASSLGTGGTEAFF

SEQ ID NO: 363415 - protein, 13 aa, Homo sapiens
  CDR3 for alpha chain variable domain of TCR clone 181708 (TRAV38-2/DV8, TRAJ29)
CAYRRGRETHLLS

SEQ ID NO: 363416 - protein, 17 aa, Homo sapiens
  CDR3 for beta chain variable domain of TCR clone 181708 (TRBV6-1, TRBJ1-2)
CASSGTHSQRGNYGYTF

SEQ ID NO: 363417 - protein, 11 aa, Homo sapiens
  CDR3 for alpha chain variable domain of TCR clone 181709 (TRAV13-1, TRAJ6)
CATLGSYIPPF

SEQ ID NO: 363418 - protein, 12 aa, Homo sapiens
  CDR3 for beta chain variable domain of TCR clone 181709 (TRBV11-2, TRBJ2-1)
WASSPGNNEQFF

SEQ ID NO: 363419 - protein, 13 aa, Homo sapiens
  CDR3 for alpha chain variable domain of TCR clone 181710 (TRAV35, TRAJ36)
CAGPRLGANNLFF

SEQ ID NO: 363420 - protein, 15 aa, Homo sapiens
  CDR3 for beta chain variable domain of TCR clone 181710 (TRBV28, TRBJ2-5)
CASSPQWSYQETQYF

SEQ ID NO: 363421 - protein, 12 aa, Homo sapiens
  CDR3 for alpha chain variable domain of TCR clone 181711 (TRAV12-3, TRAJ17)
CAMTLTGNKLTF

SEQ ID NO: 363422 - protein, 14 aa, Homo sapiens
  CDR3 for beta chain variable domain of TCR clone 181711 (TRBV7-2, TRBJ2-7)
CASSLRWEVNEQYF

SEQ ID NO: 363423 - protein, 13 aa, Homo sapiens
  CDR3 for alpha chain variable domain of TCR clone 181712 (TRAV23/DV6, TRAJ22)
CTPYSGSARQLTF

SEQ ID NO: 363424 - protein, 15 aa, Homo sapiens
  CDR3 for beta chain variable domain of TCR clone 181712 (TRBV11-2, TRBJ1-6)
CASSLDPWAVSPLHF

SEQ ID NO: 363425 - protein, 14 aa, Homo sapiens
  CDR3 for alpha chain variable domain of TCR clone 181713 (TRAV17, TRAJ57)
CATDPQGGSEKLVF

SEQ ID NO: 363426 - protein, 16 aa, Homo sapiens
  CDR3 for beta chain variable domain of TCR clone 181713 (TRBV12-4, TRBJ2-2)
CASSFWIVGNTGELFF

SEQ ID NO: 363427 - protein, 16 aa, Homo sapiens
  CDR3 for alpha chain variable domain of TCR clone 181714 (TRAV12-3, TRAJ53)
CAMSPGSGGSKYKLPF

SEQ ID NO: 363428 - protein, 15 aa, Homo sapiens
  CDR3 for beta chain variable domain of TCR clone 181714 (TRBV18, TRBJ2-7)
CASSPSSTGNYEQYF

SEQ ID NO: 363429 - protein, 16 aa, Homo sapiens
  CDR3 for alpha chain variable domain of TCR clone 181715 (TRAV30, TRAJ24)
CGTEIVDADSWGKFLF

SEQ ID NO: 363430 - protein, 14 aa, Homo sapiens
  CDR3 for beta chain variable domain of TCR clone 181715 (TRBV12-5, TRBJ2-5)
CASGSRTHQETKYF

SEQ ID NO: 363431 - protein, 18 aa, Homo sapiens
  CDR3 for alpha chain variable domain of TCR clone 181716 (TRAV26-1, TRAJ22)
CTIASSEYRSGSARQLTF

SEQ ID NO: 363432 - protein, 13 aa, Homo sapiens
  CDR3 for beta chain variable domain of TCR clone 181716 (TRBV7-9, TRBJ1-2)
CASSLKQNYGYTF

SEQ ID NO: 363433 - protein, 15 aa, Homo sapiens
  CDR3 for alpha chain variable domain of TCR clone 181717 (TRAV3, TRAJ20)
CAVSDIRLSDYKLSF

SEQ ID NO: 363434 - protein, 15 aa, Homo sapiens
  CDR3 for beta chain variable domain of TCR clone 181717 (TRBV7-9, TRBJ1-6)
CASSSPGRGNSPLHF

SEQ ID NO: 363435 - protein, 15 aa, Homo sapiens
  CDR3 for alpha chain variable domain of TCR clone 181718 (TRAV17, TRAJ4)
CATGTWSGGYNKLIF

SEQ ID NO: 363436 - protein, 13 aa, Homo sapiens
  CDR3 for beta chain variable domain of TCR clone 181718 (TRBV6-6, TRBJ2-7)
CASSPKHRAEQYF

SEQ ID NO: 363437 - protein, 11 aa, Homo sapiens
  CDR3 for alpha chain variable domain of TCR clone 181719 (TRAV4, TRAJ31)
CLVGLNARLML

SEQ ID NO: 363438 - protein, 16 aa, Homo sapiens
  CDR3 for beta chain variable domain of TCR clone 181719 (TRBV15, TRBJ2-6)
CATSVNGGFLANVLTF

SEQ ID NO: 363439 - protein, 21 aa, Homo sapiens
  CDR3 for alpha chain variable domain of TCR clone 181720 (TRAV3, )
CAVRPTPDIQNPDPAVYQLRD

SEQ ID NO: 363440 - protein, 14 aa, Homo sapiens
  CDR3 for beta chain variable domain of TCR clone 181720 (TRBV7-2, TRBJ2-7)
CASRSQGAAYEQYF

SEQ ID NO: 363441 - protein, 15 aa, Homo sapiens
  CDR3 for alpha chain variable domain of TCR clone 181721 (TRAV8-3, TRAJ27)
CALSPSKTNAGKSTF

SEQ ID NO: 363442 - protein, 15 aa, Homo sapiens
  CDR3 for beta chain variable domain of TCR clone 181721 (TRBV7-2, TRBJ2-1)
CASSSGLAGGNEQFF

SEQ ID NO: 363443 - protein, 10 aa, Homo sapiens
  CDR3 for alpha chain variable domain of TCR clone 181722 (TRAV23/DV6, TRAJ23)
CAASMKGKKP

SEQ ID NO: 363444 - protein, 14 aa, Homo sapiens
  CDR3 for beta chain variable domain of TCR clone 181722 (TRBV19, TRBJ1-4)
CASAIEAEGEKLFF

SEQ ID NO: 363445 - protein, 11 aa, Homo sapiens
  CDR3 for alpha chain variable domain of TCR clone 181723 (TRAV13-1, TRAJ40)
CAVSGTYKYIF

SEQ ID NO: 363446 - protein, 14 aa, Homo sapiens
  CDR3 for beta chain variable domain of TCR clone 181723 (TRBV5-7, TRBJ2-7)
CASSGGLSSYEQYF

SEQ ID NO: 363447 - protein, 12 aa, Homo sapiens
  CDR3 for alpha chain variable domain of TCR clone 181724 (TRAV1-1, TRAJ8)
CAGGTGVQKLVF

SEQ ID NO: 363448 - protein, 15 aa, Homo sapiens
  CDR3 for beta chain variable domain of TCR clone 181724 (TRBV7-9, TRBJ1-4)
CASSRTGGFNEKLFF

SEQ ID NO: 363449 - protein, 14 aa, Homo sapiens
  CDR3 for alpha chain variable domain of TCR clone 181725 (TRAV8-2, TRAJ4)
CVVSPSGGYNKRIF

SEQ ID NO: 363450 - protein, 15 aa, Homo sapiens
  CDR3 for beta chain variable domain of TCR clone 181725 (TRBV4-1, TRBJ1-4)
CASSDTGGTDEKLFF

SEQ ID NO: 363451 - protein, 14 aa, Homo sapiens
  CDR3 for alpha chain variable domain of TCR clone 181726 (TRAV38-1, TRAJ48)
CAFMANFGNEKVTF

SEQ ID NO: 363452 - protein, 16 aa, Homo sapiens
  CDR3 for beta chain variable domain of TCR clone 181726 (TRBV4-1, TRBJ2-7)
CASRPSGGGADNEQYF

SEQ ID NO: 363453 - protein, 12 aa, Homo sapiens
  CDR3 for alpha chain variable domain of TCR clone 181727 (TRAV13-1, TRAJ49)
CAAIPMGNQFYF

SEQ ID NO: 363454 - protein, 13 aa, Homo sapiens
  CDR3 for beta chain variable domain of TCR clone 181727 (TRBV20-1, TRBJ2-2)
CSASAAGTGELFF

SEQ ID NO: 363455 - protein, 17 aa, Homo sapiens
  CDR3 for alpha chain variable domain of TCR clone 181728 (TRAV3, TRAJ6)
CAVRDGPRAGGSYIPTF

SEQ ID NO: 363456 - protein, 12 aa, Homo sapiens
  CDR3 for beta chain variable domain of TCR clone 181728 (TRBV24-1, TRBJ1-1)
CATSDSDRGAFF

SEQ ID NO: 363457 - protein, 10 aa, Homo sapiens
  CDR3 for alpha chain variable domain of TCR clone 181729 (TRAV36/DV7, TRAJ48)
CAVGNEELTF

SEQ ID NO: 363458 - protein, 14 aa, Homo sapiens
  CDR3 for beta chain variable domain of TCR clone 181729 (TRBV19, TRBJ2-1)
CASPTFVLSGEQFF

SEQ ID NO: 363459 - protein, 14 aa, Homo sapiens
  CDR3 for alpha chain variable domain of TCR clone 181730 (TRAV1-2, TRAJ16)
CAVNRFSDGQKLLF

SEQ ID NO: 363460 - protein, 16 aa, Homo sapiens
  CDR3 for beta chain variable domain of TCR clone 181730 (TRBV20-1, TRBJ1-4)
CSAPGQGLLPNEKLFF

SEQ ID NO: 363461 - protein, 12 aa, Homo sapiens
  CDR3 for alpha chain variable domain of TCR clone 181731 (TRAV12-1, )
CVVNSWISRNLT

SEQ ID NO: 363462 - protein, 13 aa, Homo sapiens
  CDR3 for beta chain variable domain of TCR clone 181731 (TRBV10-2, TRBJ2-7)
CASGASGGYEQYF

SEQ ID NO: 363463 - protein, 13 aa, Homo sapiens
  CDR3 for alpha chain variable domain of TCR clone 181732 (TRAV3, TRAJ3)
CAVRDGGAPQIIF

SEQ ID NO: 363464 - protein, 13 aa, Homo sapiens
  CDR3 for beta chain variable domain of TCR clone 181732 (TRBV19, TRBJ2-7)
CASSMGQPYEQYF

SEQ ID NO: 363465 - protein, 16 aa, Homo sapiens
  CDR3 for alpha chain variable domain of TCR clone 181733 (TRAV4, TRAJ5)
CLVWPDHGHGPESTYF

SEQ ID NO: 363466 - protein, 17 aa, Homo sapiens
  CDR3 for beta chain variable domain of TCR clone 181733 (TRBV11-2, TRBJ2-1)
CASSLYPPGVEYNEQFF

SEQ ID NO: 363467 - protein, 16 aa, Homo sapiens
  CDR3 for alpha chain variable domain of TCR clone 181734 (TRAV35, TRAJ28)
CAGQKYTGAGSYQLTF

SEQ ID NO: 363468 - protein, 13 aa, Homo sapiens
  CDR3 for beta chain variable domain of TCR clone 181734 (TRBV19, TRBJ1-2)
CASSQGQVYGYTF

SEQ ID NO: 363469 - protein, 17 aa, Homo sapiens
  CDR3 for alpha chain variable domain of TCR clone 181735 (TRAV3, TRAJ6)
CAVRDGPRAGGSYIPTF

SEQ ID NO: 363470 - protein, 16 aa, Homo sapiens
  CDR3 for beta chain variable domain of TCR clone 181735 (TRBV4-2, TRBJ2-1)
CASSQGEGRTVNEQFF

SEQ ID NO: 363471 - protein, 11 aa, Homo sapiens
  CDR3 for alpha chain variable domain of TCR clone 181736 (TRAV2, TRAJ13)
CASGGYQKVTF

SEQ ID NO: 363472 - protein, 12 aa, Homo sapiens
  CDR3 for beta chain variable domain of TCR clone 181736 (TRBV11-2, TRBJ2-7)
CASSPPADEQYF

SEQ ID NO: 363473 - protein, 12 aa, Homo sapiens
  CDR3 for alpha chain variable domain of TCR clone 181737 (TRAV16, TRAJ12)
CAHGDSSYKLIF

SEQ ID NO: 363474 - protein, 13 aa, Homo sapiens
  CDR3 for beta chain variable domain of TCR clone 181737 (TRBV7-9, TRBJ1-2)
CASSLKQNYGYTF

SEQ ID NO: 363475 - protein, 16 aa, Homo sapiens
  CDR3 for alpha chain variable domain of TCR clone 181738 (TRAV3, TRAJ10)
CAVRDMRAGGGNKRTF

SEQ ID NO: 363476 - protein, 14 aa, Homo sapiens
  CDR3 for beta chain variable domain of TCR clone 181738 (TRBV7-3, TRBJ1-1)
CASSLGTGYTEAFF

SEQ ID NO: 363477 - protein, 15 aa, Homo sapiens
  CDR3 for alpha chain variable domain of TCR clone 181739 (TRAV12-3, TRAJ27)
CAMRAYNTNAGKSTF

SEQ ID NO: 363478 - protein, 13 aa, Homo sapiens
  CDR3 for beta chain variable domain of TCR clone 181739 (TRBV6-5, TRBJ2-5)
CASSPQGGETQYF

SEQ ID NO: 363479 - protein, 18 aa, Homo sapiens
  CDR3 for alpha chain variable domain of TCR clone 181740 (TRAV13-2, TRAJ52)
CAETPLNAGGTSNGKLTF

SEQ ID NO: 363480 - protein, 15 aa, Homo sapiens
  CDR3 for beta chain variable domain of TCR clone 181740 (TRBV7-2, TRBJ2-7)
CASSLKGALTYEQYF

SEQ ID NO: 363481 - protein, 18 aa, Homo sapiens
  CDR3 for alpha chain variable domain of TCR clone 181741 (TRAV9-2, TRAJ52)
CALSETNAGGTSYGKLTF

SEQ ID NO: 363482 - protein, 16 aa, Homo sapiens
  CDR3 for beta chain variable domain of TCR clone 181741 (TRBV12-4, TRBJ2-1)
CASSAVGQGNGDEQFF

SEQ ID NO: 363483 - protein, 14 aa, Homo sapiens
  CDR3 for alpha chain variable domain of TCR clone 181742 (TRAV8-1, TRAJ23)
CDVGTYNQGGKLIF

SEQ ID NO: 363484 - protein, 16 aa, Homo sapiens
  CDR3 for beta chain variable domain of TCR clone 181742 (TRBV18, TRBJ1-5)
CASSPSTGNSNQPQHF

SEQ ID NO: 363485 - protein, 17 aa, Homo sapiens
  CDR3 for alpha chain variable domain of TCR clone 181743 (TRAV3, TRAJ12)
CAVRDGGRMDSSYNLIF

SEQ ID NO: 363486 - protein, 13 aa, Homo sapiens
  CDR3 for beta chain variable domain of TCR clone 181743 (TRBV4-2, TRBJ1-1)
CASSQAGNTEAFF

SEQ ID NO: 363487 - protein, 16 aa, Homo sapiens
  CDR3 for alpha chain variable domain of TCR clone 181744 (TRAV8-2, TRAJ7)
CVVSEGPYYGNNRLAF

SEQ ID NO: 363488 - protein, 12 aa, Homo sapiens
  CDR3 for beta chain variable domain of TCR clone 181744 (TRBV14, TRBJ2-7)
CASSRLKGEQYF

SEQ ID NO: 363489 - protein, 14 aa, Homo sapiens
  CDR3 for alpha chain variable domain of TCR clone 181745 (TRAV4, TRAJ17)
CLVGDMAAGNKLTF

SEQ ID NO: 363490 - protein, 13 aa, Homo sapiens
  CDR3 for beta chain variable domain of TCR clone 181745 (TRBV11-2, TRBJ1-3)
CASSPTGGNTIYF

SEQ ID NO: 363491 - protein, 14 aa, Homo sapiens
  CDR3 for alpha chain variable domain of TCR clone 181746 (TRAV12-1, TRAJ24)
CVVRSTDSWGKSQF

SEQ ID NO: 363492 - protein, 13 aa, Homo sapiens
  CDR3 for beta chain variable domain of TCR clone 181746 (TRBV2, TRBJ2-3)
CASILAGGQGQYF

SEQ ID NO: 363493 - protein, 19 aa, Homo sapiens
  CDR3 for alpha chain variable domain of TCR clone 181747 (TRAV2, TRAJ20)
ILQVREADAAVYRDCKLSF

SEQ ID NO: 363494 - protein, 15 aa, Homo sapiens
  CDR3 for beta chain variable domain of TCR clone 181747 (TRBV4-1, TRBJ2-7)
CASSQNTGRLYEQYF

SEQ ID NO: 363495 - protein, 14 aa, Homo sapiens
  CDR3 for alpha chain variable domain of TCR clone 181748 (TRAV38-1, TRAJ30)
CAFMPMNRDDKFIF

SEQ ID NO: 363496 - protein, 15 aa, Homo sapiens
  CDR3 for beta chain variable domain of TCR clone 181748 (TRBV7-9, TRBJ2-7)
CASSLDLQGPYEQYF

SEQ ID NO: 363497 - protein, 15 aa, Homo sapiens
  CDR3 for alpha chain variable domain of TCR clone 181749 (TRAV14/DV4, TRAJ33)
CAMREGRDSNYQVIW

SEQ ID NO: 363498 - protein, 15 aa, Homo sapiens
  CDR3 for beta chain variable domain of TCR clone 181749 (TRBV5-5, TRBJ1-5)
CASSSTPGSNQPQHF

SEQ ID NO: 363499 - protein, 11 aa, Homo sapiens
  CDR3 for alpha chain variable domain of TCR clone 181750 (TRAV13-1, TRAJ39)
CASHAGNMLTF

SEQ ID NO: 363500 - protein, 14 aa, Homo sapiens
  CDR3 for beta chain variable domain of TCR clone 181750 (TRBV11-2, TRBJ1-5)
CASSLDRGRQPRHF

SEQ ID NO: 363501 - protein, 11 aa, Homo sapiens
  CDR3 for alpha chain variable domain of TCR clone 181751 (TRAV13-1, TRAJ5)
CAPKGRRALTF

SEQ ID NO: 363502 - protein, 17 aa, Homo sapiens
  CDR3 for beta chain variable domain of TCR clone 181751 (TRBV28, TRBJ2-5)
CASSTPEGDALQETQYV

SEQ ID NO: 363503 - protein, 17 aa, Homo sapiens
  CDR3 for alpha chain variable domain of TCR clone 181752 (TRAV12-2, TRAJ48)
CASNEKLTFGTGTRLTI

SEQ ID NO: 363504 - protein, 16 aa, Homo sapiens
  CDR3 for beta chain variable domain of TCR clone 181752 (TRBV10-2, TRBJ1-5)
CASSVRDRASNQPQHF

SEQ ID NO: 363505 - protein, 17 aa, Homo sapiens
  CDR3 for alpha chain variable domain of TCR clone 181753 (TRAV3, TRAJ6)
CAVIDGPRAGGSYIPTF

SEQ ID NO: 363506 - protein, 15 aa, Homo sapiens
  CDR3 for beta chain variable domain of TCR clone 181753 (TRBV7-9, TRBJ1-6)
CASSSPGRGNSPLHF

SEQ ID NO: 363507 - protein, 13 aa, Homo sapiens
  CDR3 for alpha chain variable domain of TCR clone 181754 (TRAV27, TRAJ45)
CRSSGGGADGLTF

SEQ ID NO: 363508 - protein, 14 aa, Homo sapiens
  CDR3 for beta chain variable domain of TCR clone 181754 (TRBV11-2, TRBJ1-3)
CASSLAVPGNTIYF

SEQ ID NO: 363509 - protein, 14 aa, Homo sapiens
  CDR3 for alpha chain variable domain of TCR clone 181755 (TRAV14/DV4, TRAJ20)
CAMRGSLNDYKISF

SEQ ID NO: 363510 - protein, 15 aa, Homo sapiens
  CDR3 for beta chain variable domain of TCR clone 181755 (TRBV27, TRBJ2-1)
CASSNGGGSSNEQFF

SEQ ID NO: 363511 - protein, 15 aa, Homo sapiens
  CDR3 for alpha chain variable domain of TCR clone 181756 (TRAV8-3, TRAJ37)
CAVGGLSSNTGKLIF

SEQ ID NO: 363512 - protein, 16 aa, Homo sapiens
  CDR3 for beta chain variable domain of TCR clone 181756 (TRBV7-9, TRBJ2-6)
CASSLKGPLRANVLTF

SEQ ID NO: 363513 - protein, 14 aa, Homo sapiens
  CDR3 for alpha chain variable domain of TCR clone 181757 (TRAV6, TRAJ39)
CALPNNNAGNMLTF

SEQ ID NO: 363514 - protein, 14 aa, Homo sapiens
  CDR3 for beta chain variable domain of TCR clone 181757 (TRBV19, TRBJ2-1)
CASPTFVLSGEQFF

SEQ ID NO: 363515 - protein, 15 aa, Homo sapiens
  CDR3 for alpha chain variable domain of TCR clone 181758 (TRAV1-2, TRAJ30)
CAVRPHGNRDDKIIF

SEQ ID NO: 363516 - protein, 13 aa, Homo sapiens
  CDR3 for beta chain variable domain of TCR clone 181758 (TRBV4-1, TRBJ2-7)
CASSQGQDYEQYF

SEQ ID NO: 363517 - protein, 14 aa, Homo sapiens
  CDR3 for alpha chain variable domain of TCR clone 181759 (TRAV12-3, TRAJ57)
CAMSAWGGSEKLVF

SEQ ID NO: 363518 - protein, 14 aa, Homo sapiens
  CDR3 for beta chain variable domain of TCR clone 181759 (TRBV18, TRBJ2-5)
CASSTGVSQETQYF

SEQ ID NO: 363519 - protein, 14 aa, Homo sapiens
  CDR3 for alpha chain variable domain of TCR clone 181760 (TRAV1-2, TRAJ27)
CAPAEYTNADKSTF

SEQ ID NO: 363520 - protein, 18 aa, Homo sapiens
  CDR3 for beta chain variable domain of TCR clone 181760 (TRBV28, TRBJ1-2)
CASRQQQGKRGSNYGYTF

SEQ ID NO: 363521 - protein, 12 aa, Homo sapiens
  CDR3 for alpha chain variable domain of TCR clone 181761 (TRAV30, TRAJ43)
CGTEERGNDMRV

SEQ ID NO: 363522 - protein, 13 aa, Homo sapiens
  CDR3 for beta chain variable domain of TCR clone 181761 (TRBV12-4, TRBJ1-2)
FASSSGSKDGYTF

SEQ ID NO: 363523 - protein, 12 aa, Homo sapiens
  CDR3 for alpha chain variable domain of TCR clone 181762 (TRAV16, TRAJ56)
CAPTGANSKQTF

SEQ ID NO: 363524 - protein, 17 aa, Homo sapiens
  CDR3 for beta chain variable domain of TCR clone 181762 (TRBV27, TRBJ2-6)
CASSLTGFASGANVLTF

SEQ ID NO: 363525 - protein, 13 aa, Homo sapiens
  CDR3 for alpha chain variable domain of TCR clone 181763 (TRAV2, TRAJ40)
CAVVTSGTYKYVF

SEQ ID NO: 363526 - protein, 16 aa, Homo sapiens
  CDR3 for beta chain variable domain of TCR clone 181763 (TRBV12-5, TRBJ2-5)
CASGPRTSGNKETQYF

SEQ ID NO: 363527 - protein, 16 aa, Homo sapiens
  CDR3 for alpha chain variable domain of TCR clone 181764 (TRAV3, TRAJ21)
CAVRDIARGNFNKFYF

SEQ ID NO: 363528 - protein, 13 aa, Homo sapiens
  CDR3 for beta chain variable domain of TCR clone 181764 (TRBV4-2, TRBJ1-1)
CASSQAGNTEAFF

SEQ ID NO: 363529 - protein, 14 aa, Homo sapiens
  CDR3 for alpha chain variable domain of TCR clone 181765 (TRAV17, TRAJ16)
CATADFSDGQKLLF

SEQ ID NO: 363530 - protein, 15 aa, Homo sapiens
  CDR3 for beta chain variable domain of TCR clone 181765 (TRBV3-1, TRBJ2-5)
CASSQEVRLEETQYF

SEQ ID NO: 363531 - protein, 12 aa, Homo sapiens
  CDR3 for alpha chain variable domain of TCR clone 181766 (TRAV1-2, TRAJ26)
CAVSPYGQNFVF

SEQ ID NO: 363532 - protein, 14 aa, Homo sapiens
  CDR3 for beta chain variable domain of TCR clone 181766 (TRBV5-1, TRBJ2-7)
CASSLASGVNEQYF

SEQ ID NO: 363533 - protein, 15 aa, Homo sapiens
  CDR3 for alpha chain variable domain of TCR clone 181767 (TRAV21, TRAJ24)
CAARSSTDSWGKLQF

SEQ ID NO: 363534 - protein, 14 aa, Homo sapiens
  CDR3 for beta chain variable domain of TCR clone 181767 (TRBV19, TRBJ2-7)
CASSIEASSYEQYF

SEQ ID NO: 363535 - protein, 13 aa, Homo sapiens
  CDR3 for alpha chain variable domain of TCR clone 181768 (TRAV3, TRAJ26)
CAVSRGYGKNFFF

SEQ ID NO: 363536 - protein, 15 aa, Homo sapiens
  CDR3 for beta chain variable domain of TCR clone 181768 (TRBV27, TRBJ2-1)
CASSLARGAYNEQFF

SEQ ID NO: 363537 - protein, 21 aa, Homo sapiens
  CDR3 for alpha chain variable domain of TCR clone 181769 (TRAV25, TRAJ47)
TATQTTDVGTYFWEYGNKMVF

SEQ ID NO: 363538 - protein, 16 aa, Homo sapiens
  CDR3 for beta chain variable domain of TCR clone 181769 (TRBV6-6, TRBJ2-1)
CASSWGGQGPYNEQFF

SEQ ID NO: 363539 - protein, 12 aa, Homo sapiens
  CDR3 for alpha chain variable domain of TCR clone 181770 (TRAV12-2, TRAJ10)
WGVTGGGNKLTF

SEQ ID NO: 363540 - protein, 12 aa, Homo sapiens
  CDR3 for beta chain variable domain of TCR clone 181770 (TRBV7-2, TRBJ1-6)
CASSLSSLPLHF

SEQ ID NO: 363541 - protein, 11 aa, Homo sapiens
  CDR3 for alpha chain variable domain of TCR clone 181771 (TRAV2, TRAJ13)
CASGGYQKVTF

SEQ ID NO: 363542 - protein, 14 aa, Homo sapiens
  CDR3 for beta chain variable domain of TCR clone 181771 (TRBV19, TRBJ2-7)
CASTVQGRPYEQYF

SEQ ID NO: 363543 - protein, 14 aa, Homo sapiens
  CDR3 for alpha chain variable domain of TCR clone 181772 (TRAV12-2, TRAJ13)
CAVKKTGGYQKVTF

SEQ ID NO: 363544 - protein, 15 aa, Homo sapiens
  CDR3 for beta chain variable domain of TCR clone 181772 (TRBV5-1, TRBJ1-1)
CASSSTTGTNTEAFF

SEQ ID NO: 363545 - protein, 12 aa, Homo sapiens
  CDR3 for alpha chain variable domain of TCR clone 181773 (TRAV8-3, TRAJ26)
CAGDNYGQNFVF

SEQ ID NO: 363546 - protein, 15 aa, Homo sapiens
  CDR3 for beta chain variable domain of TCR clone 181773 (TRBV6-5, TRBJ2-4)
CASSLRESPKNIQYF

SEQ ID NO: 363547 - protein, 15 aa, Homo sapiens
  CDR3 for alpha chain variable domain of TCR clone 181774 (TRAV30, TRAJ32)
CGTEILGGATNKLIF

SEQ ID NO: 363548 - protein, 13 aa, Homo sapiens
  CDR3 for beta chain variable domain of TCR clone 181774 (TRBV6-3, TRBJ2-7)
CASSFSGGYEQYL

SEQ ID NO: 363549 - protein, 12 aa, Homo sapiens
  CDR3 for alpha chain variable domain of TCR clone 181775 (TRAV12-2, TRAJ10)
WGVTGGGNELTF

SEQ ID NO: 363550 - protein, 20 aa, Homo sapiens
  CDR3 for beta chain variable domain of TCR clone 181775 (TRBV19, TRBJ2-1)
CASSISRTVTSTRLNNEQFF

SEQ ID NO: 363551 - protein, 14 aa, Homo sapiens
  CDR3 for alpha chain variable domain of TCR clone 181776 (TRAV16, TRAJ32)
CALKSGGATNKLIF

SEQ ID NO: 363552 - protein, 17 aa, Homo sapiens
  CDR3 for beta chain variable domain of TCR clone 181776 (TRBV7-8, TRBJ2-6)
CASSAGTGGAGANVLTF

SEQ ID NO: 363553 - protein, 11 aa, Homo sapiens
  CDR3 for alpha chain variable domain of TCR clone 181777 (TRAV38-2/DV8, TRAJ45)
CAYRKGDGLTF

SEQ ID NO: 363554 - protein, 14 aa, Homo sapiens
  CDR3 for beta chain variable domain of TCR clone 181777 (TRBV7-2, TRBJ1-1)
CASSFLTGTTEAFF

SEQ ID NO: 363555 - protein, 13 aa, Homo sapiens
  CDR3 for alpha chain variable domain of TCR clone 181778 (TRAV26-1, TRAJ48)
CIVRVVRDQKLTF

SEQ ID NO: 363556 - protein, 16 aa, Homo sapiens
  CDR3 for beta chain variable domain of TCR clone 181778 (TRBV15, TRBJ1-2)
CATSRGPRTGGGGYTF

SEQ ID NO: 363557 - protein, 14 aa, Homo sapiens
  CDR3 for alpha chain variable domain of TCR clone 181779 (TRAV1-2, TRAJ16)
CAVNRFSAGQKLLF

SEQ ID NO: 363558 - protein, 16 aa, Homo sapiens
  CDR3 for beta chain variable domain of TCR clone 181779 (TRBV4-1, TRBJ1-1)
CASSQDAGMGNTEAFF

SEQ ID NO: 363559 - protein, 14 aa, Homo sapiens
  CDR3 for alpha chain variable domain of TCR clone 181780 (TRAV13-1, TRAJ40)
CAASMTSGTYKYIF

SEQ ID NO: 363560 - protein, 15 aa, Homo sapiens
  CDR3 for beta chain variable domain of TCR clone 181780 (TRBV11-2, TRBJ1-3)
CASSLDGTVGNTIYF

SEQ ID NO: 363561 - protein, 12 aa, Homo sapiens
  CDR3 for alpha chain variable domain of TCR clone 181781 (TRAV13-1, TRAJ53)
RAAGGSNYKLTF

SEQ ID NO: 363562 - protein, 11 aa, Homo sapiens
  CDR3 for beta chain variable domain of TCR clone 181781 (TRBV2, TRBJ1-1)
CASREGAEAFF

SEQ ID NO: 363563 - protein, 14 aa, Homo sapiens
  CDR3 for alpha chain variable domain of TCR clone 181782 (TRAV2, TRAJ9)
CAVEDRRGGLKTIF

SEQ ID NO: 363564 - protein, 13 aa, Homo sapiens
  CDR3 for beta chain variable domain of TCR clone 181782 (TRBV12-4, TRBJ1-2)
CASTMTSNYGYTF

SEQ ID NO: 363565 - protein, 17 aa, Homo sapiens
  CDR3 for alpha chain variable domain of TCR clone 181783 (TRAV14/DV4, TRAJ28)
CAMRGTSSRAGSYQLTF

SEQ ID NO: 363566 - protein, 13 aa, Homo sapiens
  CDR3 for beta chain variable domain of TCR clone 181783 (TRBV28, TRBJ2-5)
CASSFAGGETQYF

SEQ ID NO: 363567 - protein, 13 aa, Homo sapiens
  CDR3 for alpha chain variable domain of TCR clone 181784 (TRAV21, TRAJ27)
CAARPGHAGKSTF

SEQ ID NO: 363568 - protein, 14 aa, Homo sapiens
  CDR3 for beta chain variable domain of TCR clone 181784 (TRBV7-6, TRBJ2-3)
CASSLGTVTDAQYF

SEQ ID NO: 363569 - protein, 16 aa, Homo sapiens
  CDR3 for alpha chain variable domain of TCR clone 181785 (TRAV30, TRAJ24)
CGTEIVDADSWGKFPF

SEQ ID NO: 363570 - protein, 15 aa, Homo sapiens
  CDR3 for beta chain variable domain of TCR clone 181785 (TRBV9, TRBJ2-1)
CASSLAGSSYNEQFF

SEQ ID NO: 363571 - protein, 14 aa, Homo sapiens
  CDR3 for alpha chain variable domain of TCR clone 181786 (TRAV8-1, TRAJ15)
CAVNGQQAGTALIF

SEQ ID NO: 363572 - protein, 16 aa, Homo sapiens
  CDR3 for beta chain variable domain of TCR clone 181786 (TRBV5-1, TRBJ2-2)
CASSSRTGGRTGELFF

SEQ ID NO: 363573 - protein, 12 aa, Homo sapiens
  CDR3 for alpha chain variable domain of TCR clone 181787 (TRAV13-1, TRAJ27)
CAAHTNAGKSTF

SEQ ID NO: 363574 - protein, 16 aa, Homo sapiens
  CDR3 for beta chain variable domain of TCR clone 181787 (TRBV7-9, TRBJ2-1)
CASSDVAGGSYNEQFF

SEQ ID NO: 363575 - protein, 14 aa, Homo sapiens
  CDR3 for alpha chain variable domain of TCR clone 181788 (TRAV8-3, TRAJ6)
CAVGASGGSYIPTF

SEQ ID NO: 363576 - protein, 17 aa, Homo sapiens
  CDR3 for beta chain variable domain of TCR clone 181788 (TRBV18, TRBJ2-2)
CASSPSDPCQNTGELFF

SEQ ID NO: 363577 - protein, 11 aa, Homo sapiens
  CDR3 for alpha chain variable domain of TCR clone 181789 (TRAV2, TRAJ13)
CASGGYQNVTF

SEQ ID NO: 363578 - protein, 15 aa, Homo sapiens
  CDR3 for beta chain variable domain of TCR clone 181789 (TRBV29-1, TRBJ2-1)
CSGRDRKSSYNEQFF

SEQ ID NO: 363579 - protein, 13 aa, Homo sapiens
  CDR3 for alpha chain variable domain of TCR clone 181790 (TRAV27, TRAJ45)
CRSSGAGADGLTF

SEQ ID NO: 363580 - protein, 17 aa, Homo sapiens
  CDR3 for beta chain variable domain of TCR clone 181790 (TRBV11-2, TRBJ2-1)
CASSLYPPGVEYNEQFF

SEQ ID NO: 363581 - protein, 14 aa, Homo sapiens
  CDR3 for alpha chain variable domain of TCR clone 181791 (TRAV1-2, TRAJ16)
CAVNRFSDGQKLLF

SEQ ID NO: 363582 - protein, 14 aa, Homo sapiens
  CDR3 for beta chain variable domain of TCR clone 181791 (TRBV12-5, TRBJ2-5)
CASGSRTHQGTQYF

SEQ ID NO: 363583 - protein, 14 aa, Homo sapiens
  CDR3 for alpha chain variable domain of TCR clone 181792 (TRAV17, TRAJ31)
CATVLRNNNARLMF

SEQ ID NO: 363584 - protein, 15 aa, Homo sapiens
  CDR3 for beta chain variable domain of TCR clone 181792 (TRBV12-4, TRBJ2-5)
CASSPPTGLQETQYF

SEQ ID NO: 363585 - protein, 14 aa, Homo sapiens
  CDR3 for alpha chain variable domain of TCR clone 181793 (TRAV35, TRAJ50)
CGGHRKTSYDKVIF

SEQ ID NO: 363586 - protein, 13 aa, Homo sapiens
  CDR3 for beta chain variable domain of TCR clone 181793 (TRBV7-7, TRBJ2-3)
CASSLSRADTQDF

SEQ ID NO: 363587 - protein, 17 aa, Homo sapiens
  CDR3 for alpha chain variable domain of TCR clone 181794 (TRAV12-3, TRAJ52)
CASPPFAGGTSYGKLTF

SEQ ID NO: 363588 - protein, 14 aa, Homo sapiens
  CDR3 for beta chain variable domain of TCR clone 181794 (TRBV7-3, TRBJ2-1)
CASSLAGGTNEQFF

SEQ ID NO: 363589 - protein, 14 aa, Homo sapiens
  CDR3 for alpha chain variable domain of TCR clone 181795 (TRAV3, TRAJ9)
CAVRLNTGGFKPIF

SEQ ID NO: 363590 - protein, 12 aa, Homo sapiens
  CDR3 for beta chain variable domain of TCR clone 181795 (TRBV11-2, TRBJ2-2)
CASSLGGGELFF

SEQ ID NO: 363591 - protein, 14 aa, Homo sapiens
  CDR3 for alpha chain variable domain of TCR clone 181796 (TRAV3, TRAJ9)
CAVRLNTGGFKTIF

SEQ ID NO: 363592 - protein, 13 aa, Homo sapiens
  CDR3 for beta chain variable domain of TCR clone 181796 (TRBV14, TRBJ1-1)
CASSREFGTEAFF

SEQ ID NO: 363593 - protein, 14 aa, Homo sapiens
  CDR3 for alpha chain variable domain of TCR clone 181797 (TRAV12-2, TRAJ10)
CAVNEAGGGNKLTF

SEQ ID NO: 363594 - protein, 13 aa, Homo sapiens
  CDR3 for beta chain variable domain of TCR clone 181797 (TRBV7-9, TRBJ2-3)
CASSPGSTDTQYF

SEQ ID NO: 363595 - protein, 14 aa, Homo sapiens
  CDR3 for alpha chain variable domain of TCR clone 181798 (TRAV8-6, TRAJ52)
CDVIGGTSYGKLTF

SEQ ID NO: 363596 - protein, 13 aa, Homo sapiens
  CDR3 for beta chain variable domain of TCR clone 181798 (TRBV19, TRBJ1-2)
CASSVPGQDGYTF

SEQ ID NO: 363597 - protein, 16 aa, Homo sapiens
  CDR3 for alpha chain variable domain of TCR clone 181799 (TRAV3, TRAJ37)
CAVRPHGSGNPGKLIF

SEQ ID NO: 363598 - protein, 15 aa, Homo sapiens
  CDR3 for beta chain variable domain of TCR clone 181799 (TRBV27, TRBJ2-1)
CASSNGGGSSNEQFF

SEQ ID NO: 363599 - protein, 17 aa, Homo sapiens
  CDR3 for alpha chain variable domain of TCR clone 181800 (TRAV3, TRAJ12)
CAVRDGGRMDSSYKLIF

SEQ ID NO: 363600 - protein, 12 aa, Homo sapiens
  CDR3 for beta chain variable domain of TCR clone 181800 (TRBV20-1, TRBJ1-1)
QCSTWGVTEAFF

SEQ ID NO: 363601 - protein, 13 aa, Homo sapiens
  CDR3 for alpha chain variable domain of TCR clone 181801 (TRAV21, TRAJ20)
CAVSRLGDYKLSL

SEQ ID NO: 363602 - protein, 13 aa, Homo sapiens
  CDR3 for beta chain variable domain of TCR clone 181801 (TRBV7-3, TRBJ1-1)
CASSPAGGLEAFF

SEQ ID NO: 363603 - protein, 12 aa, Homo sapiens
  CDR3 for alpha chain variable domain of TCR clone 181802 (TRAV12-1, TRAJ40)
CVFYSGTYKYIF

SEQ ID NO: 363604 - protein, 15 aa, Homo sapiens
  CDR3 for beta chain variable domain of TCR clone 181802 (TRBV4-1, TRBJ2-3)
CASSQVVAGADTQYF

SEQ ID NO: 363605 - protein, 16 aa, Homo sapiens
  CDR3 for alpha chain variable domain of TCR clone 181803 (TRAV4, TRAJ22)
CLVGDLYSGSARQLTF

SEQ ID NO: 363606 - protein, 13 aa, Homo sapiens
  CDR3 for beta chain variable domain of TCR clone 181803 (TRBV20-1, TRBJ1-6)
CSAPLGVGSPLHF

SEQ ID NO: 363607 - protein, 14 aa, Homo sapiens
  CDR3 for alpha chain variable domain of TCR clone 181804 (TRAV1-2, TRAJ16)
CAVNRFSDGQKLLF

SEQ ID NO: 363608 - protein, 14 aa, Homo sapiens
  CDR3 for beta chain variable domain of TCR clone 181804 (TRBV19, TRBJ2-1)
CASSPGLAPNEQFF

SEQ ID NO: 363609 - protein, 19 aa, Homo sapiens
  CDR3 for alpha chain variable domain of TCR clone 181805 (TRAV26-1, TRAJ52)
CIVRAHRNAGGTSYGKLTF

SEQ ID NO: 363610 - protein, 15 aa, Homo sapiens
  CDR3 for beta chain variable domain of TCR clone 181805 (TRBV29-1, TRBJ2-1)
CSGRDRESAYNEQFF

SEQ ID NO: 363611 - protein, 15 aa, Homo sapiens
  CDR3 for alpha chain variable domain of TCR clone 181806 (TRAV12-1, TRAJ44)
CVVFVNTGTASKLTF

SEQ ID NO: 363612 - protein, 13 aa, Homo sapiens
  CDR3 for beta chain variable domain of TCR clone 181806 (TRBV19, TRBJ1-2)
CASSQGQVYGYTF

SEQ ID NO: 363613 - protein, 14 aa, Homo sapiens
  CDR3 for alpha chain variable domain of TCR clone 181807 (TRAV35, TRAJ50)
CAGHRKTSYDKGIF

SEQ ID NO: 363614 - protein, 13 aa, Homo sapiens
  CDR3 for beta chain variable domain of TCR clone 181807 (TRBV7-7, TRBJ2-3)
CASSLSRADTQDF

SEQ ID NO: 363615 - protein, 10 aa, Homo sapiens
  CDR3 for alpha chain variable domain of TCR clone 181808 (TRAV23/DV6, TRAJ57)
CAASSTLSQG

SEQ ID NO: 363616 - protein, 14 aa, Homo sapiens
  CDR3 for beta chain variable domain of TCR clone 181808 (TRBV19, TRBJ2-1)
CASSKDRGKDEQFF

SEQ ID NO: 363617 - protein, 11 aa, Homo sapiens
  CDR3 for alpha chain variable domain of TCR clone 181809 (TRAV17, TRAJ43)
CATPRSNDMRF

SEQ ID NO: 363618 - protein, 15 aa, Homo sapiens
  CDR3 for beta chain variable domain of TCR clone 181809 (TRBV11-3, TRBJ2-1)
CASSLGTSGLNEQFF

SEQ ID NO: 363619 - protein, 14 aa, Homo sapiens
  CDR3 for alpha chain variable domain of TCR clone 181810 (TRAV26-1, TRAJ44)
CIARTTGTASKLTF

SEQ ID NO: 363620 - protein, 17 aa, Homo sapiens
  CDR3 for beta chain variable domain of TCR clone 181810 (TRBV28, TRBJ2-7)
CASSPLHRASGVYEQYF

SEQ ID NO: 363621 - protein, 13 aa, Homo sapiens
  CDR3 for alpha chain variable domain of TCR clone 181811 (TRAV8-2, TRAJ13)
CVVSDLSYQKVTF

SEQ ID NO: 363622 - protein, 14 aa, Homo sapiens
  CDR3 for beta chain variable domain of TCR clone 181811 (TRBV25-1, TRBJ1-1)
CASTHLGGNTEAFF

SEQ ID NO: 363623 - protein, 12 aa, Homo sapiens
  CDR3 for alpha chain variable domain of TCR clone 181812 (TRAV12-2, TRAJ10)
WGVTGGGNKLTF

SEQ ID NO: 363624 - protein, 15 aa, Homo sapiens
  CDR3 for beta chain variable domain of TCR clone 181812 (TRBV10-2, TRBJ2-6)
CASSEQGTGANVLTF

SEQ ID NO: 363625 - protein, 15 aa, Homo sapiens
  CDR3 for alpha chain variable domain of TCR clone 181813 (TRAV12-2, TRAJ13)
CRESLGSGGYQKVTL

SEQ ID NO: 363626 - protein, 15 aa, Homo sapiens
  CDR3 for beta chain variable domain of TCR clone 181813 (TRBV6-5, TRBJ2-1)
CASRRAQLSYNEQFF

SEQ ID NO: 363627 - protein, 16 aa, Homo sapiens
  CDR3 for alpha chain variable domain of TCR clone 181814 (TRAV4, TRAJ5)
CLVGPDHGHGQESTYF

SEQ ID NO: 363628 - protein, 15 aa, Homo sapiens
  CDR3 for beta chain variable domain of TCR clone 181814 (TRBV27, TRBJ2-5)
CASSLIPSGGEAQYF

SEQ ID NO: 363629 - protein, 15 aa, Homo sapiens
  CDR3 for alpha chain variable domain of TCR clone 181815 (TRAV14/DV4, TRAJ48)
CAMTLSNFGNEKLTF

SEQ ID NO: 363630 - protein, 16 aa, Homo sapiens
  CDR3 for beta chain variable domain of TCR clone 181815 (TRBV12-4, TRBJ2-1)
CASSAVGQGNGDVQFF

SEQ ID NO: 363631 - protein, 12 aa, Homo sapiens
  CDR3 for alpha chain variable domain of TCR clone 181816 (TRAV13-2, TRAJ39)
CAESRPGNMLTF

SEQ ID NO: 363632 - protein, 14 aa, Homo sapiens
  CDR3 for beta chain variable domain of TCR clone 181816 (TRBV13, TRBJ2-7)
CASSLKGASYEQYF

SEQ ID NO: 363633 - protein, 13 aa, Homo sapiens
  CDR3 for alpha chain variable domain of TCR clone 181817 (TRAV27, TRAJ6)
CAGGTRGSYIPTF

SEQ ID NO: 363634 - protein, 17 aa, Homo sapiens
  CDR3 for beta chain variable domain of TCR clone 181817 (TRBV19, TRBJ2-7)
CASSISFYDSYPYEQYF

SEQ ID NO: 363635 - protein, 13 aa, Homo sapiens
  CDR3 for alpha chain variable domain of TCR clone 181818 (TRAV12-1, TRAJ3)
CVVNPRGASKIIF

SEQ ID NO: 363636 - protein, 15 aa, Homo sapiens
  CDR3 for beta chain variable domain of TCR clone 181818 (TRBV28, TRBJ1-3)
CASSMGWASGNTIYF

SEQ ID NO: 363637 - protein, 14 aa, Homo sapiens
  CDR3 for alpha chain variable domain of TCR clone 181819 (TRAV12-2, TRAJ13)
CAVKKTGGYQKGTF

SEQ ID NO: 363638 - protein, 12 aa, Homo sapiens
  CDR3 for beta chain variable domain of TCR clone 181819 (TRBV11-2, TRBJ2-1)
CASSPGNNEQFF

SEQ ID NO: 363639 - protein, 21 aa, Homo sapiens
  CDR3 for alpha chain variable domain of TCR clone 181820 (TRAV9-2, )
CARIQIGDIQNPDPAVYQLRD

SEQ ID NO: 363640 - protein, 13 aa, Homo sapiens
  CDR3 for beta chain variable domain of TCR clone 181820 (TRBV20-1, TRBJ1-1)
CSARGGGNTEAFF

SEQ ID NO: 363641 - protein, 12 aa, Homo sapiens
  CDR3 for alpha chain variable domain of TCR clone 181821 (TRAV16, TRAJ27)
CALNHQCRQINL

SEQ ID NO: 363642 - protein, 15 aa, Homo sapiens
  CDR3 for beta chain variable domain of TCR clone 181821 (TRBV7-2, TRBJ2-1)
CASSSGLAGGNEQFF

SEQ ID NO: 363643 - protein, 17 aa, Homo sapiens
  CDR3 for alpha chain variable domain of TCR clone 181822 (TRAV3, TRAJ6)
CAVGDGPRAGGSSIPTF

SEQ ID NO: 363644 - protein, 14 aa, Homo sapiens
  CDR3 for beta chain variable domain of TCR clone 181822 (TRBV7-2, TRBJ2-7)
CASSPKTSFYEQYF

SEQ ID NO: 363645 - protein, 17 aa, Homo sapiens
  CDR3 for alpha chain variable domain of TCR clone 181823 (TRAV13-2, TRAJ5)
CAESVVIVGHGQESTYF

SEQ ID NO: 363646 - protein, 18 aa, Homo sapiens
  CDR3 for beta chain variable domain of TCR clone 181823 (TRBV4-1, TRBJ2-3)
CAISHQLAGGRSTDTQYF

SEQ ID NO: 363647 - protein, 13 aa, Homo sapiens
  CDR3 for alpha chain variable domain of TCR clone 181824 (TRAV2, TRAJ15)
CAVASQAGTALIF

SEQ ID NO: 363648 - protein, 16 aa, Homo sapiens
  CDR3 for beta chain variable domain of TCR clone 181824 (TRBV7-3, TRBJ2-2)
CASSLKRGILSGELFF

SEQ ID NO: 363649 - protein, 17 aa, Homo sapiens
  CDR3 for alpha chain variable domain of TCR clone 181825 (TRAV8-3, TRAJ50)
CAVGAVDTETSYDKVIF

SEQ ID NO: 363650 - protein, 13 aa, Homo sapiens
  CDR3 for beta chain variable domain of TCR clone 181825 (TRBV7-9, TRBJ2-2)
CASSSSGTGELFF

SEQ ID NO: 363651 - protein, 11 aa, Homo sapiens
  CDR3 for alpha chain variable domain of TCR clone 181826 (TRAV20, TRAJ34)
CRTKGTDKLIF

SEQ ID NO: 363652 - protein, 16 aa, Homo sapiens
  CDR3 for beta chain variable domain of TCR clone 181826 (TRBV7-8, TRBJ2-1)
CASSLAGTGRYNEQFF

SEQ ID NO: 363653 - protein, 15 aa, Homo sapiens
  CDR3 for alpha chain variable domain of TCR clone 181827 (TRAV3, TRAJ27)
CAVRDPLTHAGKSTF

SEQ ID NO: 363654 - protein, 15 aa, Homo sapiens
  CDR3 for beta chain variable domain of TCR clone 181827 (TRBV28, TRBJ2-1)
CASSIIAGGRSEQFF

SEQ ID NO: 363655 - protein, 14 aa, Homo sapiens
  CDR3 for alpha chain variable domain of TCR clone 181828 (TRAV13-1, TRAJ45)
CAAIGGGGADGLTF

SEQ ID NO: 363656 - protein, 16 aa, Homo sapiens
  CDR3 for beta chain variable domain of TCR clone 181828 (TRBV7-2, TRBJ1-1)
CASSLGAGWTHTEAFF

SEQ ID NO: 363657 - protein, 18 aa, Homo sapiens
  CDR3 for alpha chain variable domain of TCR clone 181829 (TRAV9-2, TRAJ52)
CVLSRHNAGGTSYGKLTF

SEQ ID NO: 363658 - protein, 13 aa, Homo sapiens
  CDR3 for beta chain variable domain of TCR clone 181829 (TRBV7-9, TRBJ1-2)
CASSLKQNYGYTF

SEQ ID NO: 363659 - protein, 14 aa, Homo sapiens
  CDR3 for alpha chain variable domain of TCR clone 181830 (TRAV1-1, TRAJ27)
FAVIYNTNAGKSTL

SEQ ID NO: 363660 - protein, 18 aa, Homo sapiens
  CDR3 for beta chain variable domain of TCR clone 181830 (TRBV7-3, TRBJ2-1)
CASSLTLASGRAMVSSPS

SEQ ID NO: 363661 - protein, 13 aa, Homo sapiens
  CDR3 for alpha chain variable domain of TCR clone 181831 (TRAV12-2, TRAJ18)
CAARGSTLGRLYF

SEQ ID NO: 363662 - protein, 20 aa, Homo sapiens
  CDR3 for beta chain variable domain of TCR clone 181831 (TRBV7-8, TRBJ2-2)
CASSHLFPGPTIHITGELFF

SEQ ID NO: 363663 - protein, 14 aa, Homo sapiens
  CDR3 for alpha chain variable domain of TCR clone 181832 (TRAV1-2, TRAJ33)
CAVRAPDSDYQLIW

SEQ ID NO: 363664 - protein, 14 aa, Homo sapiens
  CDR3 for beta chain variable domain of TCR clone 181832 (TRBV11-3, TRBJ1-6)
CASSFSGGDSPLDF

SEQ ID NO: 363665 - protein, 14 aa, Homo sapiens
  CDR3 for alpha chain variable domain of TCR clone 181833 (TRAV1-2, TRAJ16)
CAVNRFSDGQQLLF

SEQ ID NO: 363666 - protein, 15 aa, Homo sapiens
  CDR3 for beta chain variable domain of TCR clone 181833 (TRBV4-1, TRBJ1-4)
CASSDTGGTNEKLFF

SEQ ID NO: 363667 - protein, 12 aa, Homo sapiens
  CDR3 for alpha chain variable domain of TCR clone 181834 (TRAV13-1, TRAJ21)
CAAKEGFNKFYL

SEQ ID NO: 363668 - protein, 15 aa, Homo sapiens
  CDR3 for beta chain variable domain of TCR clone 181834 (TRBV25-1, TRBJ1-4)
CASSPGDSTNEKLFF

SEQ ID NO: 363669 - protein, 15 aa, Homo sapiens
  CDR3 for alpha chain variable domain of TCR clone 181835 (TRAV12-3, TRAJ6)
CAMSATSGGSYIPTF

SEQ ID NO: 363670 - protein, 12 aa, Homo sapiens
  CDR3 for beta chain variable domain of TCR clone 181835 (TRBV7-8, TRBJ2-4)
CASSLGGNIQYF

SEQ ID NO: 363671 - protein, 14 aa, Homo sapiens
  CDR3 for alpha chain variable domain of TCR clone 181836 (TRAV3, TRAJ9)
CAVRLNTGGFKTIF

SEQ ID NO: 363672 - protein, 12 aa, Homo sapiens
  CDR3 for beta chain variable domain of TCR clone 181836 (TRBV5-5, TRBJ1-2)
CASSALNYGYTF

SEQ ID NO: 363673 - protein, 11 aa, Homo sapiens
  CDR3 for alpha chain variable domain of TCR clone 181837 (TRAV2, TRAJ33)
CAVESNYQLIW

SEQ ID NO: 363674 - protein, 13 aa, Homo sapiens
  CDR3 for beta chain variable domain of TCR clone 181837 (TRBV28, TRBJ2-7)
CASRSSGVYEQYF

SEQ ID NO: 363675 - protein, 15 aa, Homo sapiens
  CDR3 for alpha chain variable domain of TCR clone 181838 (TRAV26-1, TRAJ44)
CIVRTGTGTASKLPF

SEQ ID NO: 363676 - protein, 19 aa, Homo sapiens
  CDR3 for beta chain variable domain of TCR clone 181838 (TRBV7-2, TRBJ2-3)
CASSFLSRNWGGGTDTQYF

SEQ ID NO: 363677 - protein, 16 aa, Homo sapiens
  CDR3 for alpha chain variable domain of TCR clone 181839 (TRAV16, TRAJ4)
CALSRMFSCGYNKLTF

SEQ ID NO: 363678 - protein, 16 aa, Homo sapiens
  CDR3 for beta chain variable domain of TCR clone 181839 (TRBV24-1, TRBJ2-3)
CATSDPGTGATDTQYF

SEQ ID NO: 363679 - protein, 16 aa, Homo sapiens
  CDR3 for alpha chain variable domain of TCR clone 181840 (TRAV30, TRAJ24)
YGTEIVDADSWGKFQF

SEQ ID NO: 363680 - protein, 14 aa, Homo sapiens
  CDR3 for beta chain variable domain of TCR clone 181840 (TRBV9, TRBJ2-4)
CASSPSGTSGFQYF

SEQ ID NO: 363681 - protein, 14 aa, Homo sapiens
  CDR3 for alpha chain variable domain of TCR clone 181841 (TRAV13-1, TRAJ44)
CAAKATGTAIKLTF

SEQ ID NO: 363682 - protein, 12 aa, Homo sapiens
  CDR3 for beta chain variable domain of TCR clone 181841 (TRBV19, TRBJ2-7)
CASTDSTYEQYF

SEQ ID NO: 363683 - protein, 14 aa, Homo sapiens
  CDR3 for alpha chain variable domain of TCR clone 181842 (TRAV1-2, TRAJ16)
CAVNRFSDGQKLFF

SEQ ID NO: 363684 - protein, 15 aa, Homo sapiens
  CDR3 for beta chain variable domain of TCR clone 181842 (TRBV19, TRBJ2-1)
CASSRPGQNYNEQFF

SEQ ID NO: 363685 - protein, 15 aa, Homo sapiens
  CDR3 for alpha chain variable domain of TCR clone 181843 (TRAV8-1, TRAJ6)
CAVNTPTGGSYIPTF

SEQ ID NO: 363686 - protein, 15 aa, Homo sapiens
  CDR3 for beta chain variable domain of TCR clone 181843 (TRBV11-2, TRBJ2-2)
CASSSDRVNAGELFF

SEQ ID NO: 363687 - protein, 11 aa, Homo sapiens
  CDR3 for alpha chain variable domain of TCR clone 181844 (TRAV25, TRAJ41)
CARNSGYALNF

SEQ ID NO: 363688 - protein, 12 aa, Homo sapiens
  CDR3 for beta chain variable domain of TCR clone 181844 (TRBV6-5, TRBJ2-3)
CASSDTTDTQYF

SEQ ID NO: 363689 - protein, 10 aa, Homo sapiens
  CDR3 for alpha chain variable domain of TCR clone 181845 (TRAV1-2, TRAJ31)
CAFFDARLMF

SEQ ID NO: 363690 - protein, 15 aa, Homo sapiens
  CDR3 for beta chain variable domain of TCR clone 181845 (TRBV4-1, TRBJ1-4)
CASSDTGGTNETLFF

SEQ ID NO: 363691 - protein, 15 aa, Homo sapiens
  CDR3 for alpha chain variable domain of TCR clone 181846 (TRAV29/DV5, TRAJ48)
CAASASNFGNEKLTF

SEQ ID NO: 363692 - protein, 14 aa, Homo sapiens
  CDR3 for beta chain variable domain of TCR clone 181846 (TRBV25-1, TRBJ1-1)
CASTHLGGNTEAFF

SEQ ID NO: 363693 - protein, 11 aa, Homo sapiens
  CDR3 for alpha chain variable domain of TCR clone 181847 (TRAV1-2, TRAJ20)
CAVSNDYKPSF

SEQ ID NO: 363694 - protein, 13 aa, Homo sapiens
  CDR3 for beta chain variable domain of TCR clone 181847 (TRBV7-9, TRBJ1-2)
CASSLEQNYGYTF

SEQ ID NO: 363695 - protein, 11 aa, Homo sapiens
  CDR3 for alpha chain variable domain of TCR clone 181848 (TRAV12-2, TRAJ54)
CAVEGAQNLVF

SEQ ID NO: 363696 - protein, 17 aa, Homo sapiens
  CDR3 for beta chain variable domain of TCR clone 181848 (TRBV18, TRBJ1-3)
CASSPYPTGPSGNTIYF

SEQ ID NO: 363697 - protein, 13 aa, Homo sapiens
  CDR3 for alpha chain variable domain of TCR clone 181849 (TRAV9-2, TRAJ53)
CALSGGSNYKLTF

SEQ ID NO: 363698 - protein, 17 aa, Homo sapiens
  CDR3 for beta chain variable domain of TCR clone 181849 (TRBV7-2, TRBJ1-4)
CASSFKAGPTTNEKLFF

SEQ ID NO: 363699 - protein, 13 aa, Homo sapiens
  CDR3 for alpha chain variable domain of TCR clone 181850 (TRAV1-2, TRAJ9)
CAALNTGGFKTIF

SEQ ID NO: 363700 - protein, 14 aa, Homo sapiens
  CDR3 for beta chain variable domain of TCR clone 181850 (TRBV13, TRBJ2-3)
CASSSGSPTDAQYF

SEQ ID NO: 363701 - protein, 16 aa, Homo sapiens
  CDR3 for alpha chain variable domain of TCR clone 181851 (TRAV12-1, TRAJ43)
CVVNPHRFGAGTRLTV

SEQ ID NO: 363702 - protein, 11 aa, Homo sapiens
  CDR3 for beta chain variable domain of TCR clone 181851 (TRBV10-3, TRBJ2-7)
CAISEGLEQYF

SEQ ID NO: 363703 - protein, 17 aa, Homo sapiens
  CDR3 for alpha chain variable domain of TCR clone 181852 (TRAV13-1, TRAJ52)
CAAGRNAGGTSSGKLTF

SEQ ID NO: 363704 - protein, 13 aa, Homo sapiens
  CDR3 for beta chain variable domain of TCR clone 181852 (TRBV7-2, TRBJ1-1)
CASNLRGAKVAFF

SEQ ID NO: 363705 - protein, 16 aa, Homo sapiens
  CDR3 for alpha chain variable domain of TCR clone 181853 (TRAV30, TRAJ24)
CGTEIVDADSWGTFQF

SEQ ID NO: 363706 - protein, 13 aa, Homo sapiens
  CDR3 for beta chain variable domain of TCR clone 181853 (TRBV18, TRBJ1-1)
CASSGGRNTEAFF

SEQ ID NO: 363707 - protein, 14 aa, Homo sapiens
  CDR3 for alpha chain variable domain of TCR clone 181854 (TRAV1-2, TRAJ16)
CAVNRFSDGQKLLF

SEQ ID NO: 363708 - protein, 18 aa, Homo sapiens
  CDR3 for beta chain variable domain of TCR clone 181854 (TRBV29-1, TRBJ2-7)
SAALNSSTGGPKSSTSGR

SEQ ID NO: 363709 - protein, 17 aa, Homo sapiens
  CDR3 for alpha chain variable domain of TCR clone 181855 (TRAV3, TRAJ42)
CAVRDRVYGGSQGNLIF

SEQ ID NO: 363710 - protein, 14 aa, Homo sapiens
  CDR3 for beta chain variable domain of TCR clone 181855 (TRBV12-5, TRBJ2-5)
CASGSRTYQGTQYF

SEQ ID NO: 363711 - protein, 17 aa, Homo sapiens
  CDR3 for alpha chain variable domain of TCR clone 181856 (TRAV26-1, TRAJ53)
CIVRVDDRGGSNYKLTF

SEQ ID NO: 363712 - protein, 12 aa, Homo sapiens
  CDR3 for beta chain variable domain of TCR clone 181856 (TRBV12-4, TRBJ2-7)
YASSLGGYEQYF

SEQ ID NO: 363713 - protein, 12 aa, Homo sapiens
  CDR3 for alpha chain variable domain of TCR clone 181857 (TRAV12-3, TRAJ42)
CAPGGSQGTLIF

SEQ ID NO: 363714 - protein, 13 aa, Homo sapiens
  CDR3 for beta chain variable domain of TCR clone 181857 (TRBV5-7, TRBJ2-6)
CASTSSGANVLTF

SEQ ID NO: 363715 - protein, 11 aa, Homo sapiens
  CDR3 for alpha chain variable domain of TCR clone 181858 (TRAV12-3, TRAJ49)
CAANTGNQFYF

SEQ ID NO: 363716 - protein, 15 aa, Homo sapiens
  CDR3 for beta chain variable domain of TCR clone 181858 (TRBV20-1, TRBJ2-7)
CSARVPAAYLYEQYF

SEQ ID NO: 363717 - protein, 15 aa, Homo sapiens
  CDR3 for alpha chain variable domain of TCR clone 181859 (TRAV17, TRAJ45)
TSVLRTGGGADGLTF

SEQ ID NO: 363718 - protein, 15 aa, Homo sapiens
  CDR3 for beta chain variable domain of TCR clone 181859 (TRBV5-7, TRBJ1-5)
CASSYGKLWDQPKHF

SEQ ID NO: 363719 - protein, 14 aa, Homo sapiens
  CDR3 for alpha chain variable domain of TCR clone 181860 (TRAV1-2, TRAJ8)
CAVREDTGFQKLVF

SEQ ID NO: 363720 - protein, 18 aa, Homo sapiens
  CDR3 for beta chain variable domain of TCR clone 181860 (TRBV11-2, TRBJ2-3)
CSSSLGGASRGAPNTQYF

SEQ ID NO: 363721 - protein, 16 aa, Homo sapiens
  CDR3 for alpha chain variable domain of TCR clone 181861 (TRAV3, TRAJ10)
CTVRDMRAGGGNKLTF

SEQ ID NO: 363722 - protein, 13 aa, Homo sapiens
  CDR3 for beta chain variable domain of TCR clone 181861 (TRBV6-1, TRBJ1-1)
CASRRQGNTEAFF

SEQ ID NO: 363723 - protein, 14 aa, Homo sapiens
  CDR3 for alpha chain variable domain of TCR clone 181862 (TRAV13-1, TRAJ44)
CAAKATGTASKLTF

SEQ ID NO: 363724 - protein, 13 aa, Homo sapiens
  CDR3 for beta chain variable domain of TCR clone 181862 (TRBV3-1, TRBJ1-1)
CASSPGVITEAFF

SEQ ID NO: 363725 - protein, 14 aa, Homo sapiens
  CDR3 for alpha chain variable domain of TCR clone 181863 (TRAV8-3, TRAJ15)
CAVGLNQAGTALIF

SEQ ID NO: 363726 - protein, 14 aa, Homo sapiens
  CDR3 for beta chain variable domain of TCR clone 181863 (TRBV28, TRBJ1-2)
CASRIQGANYGYTF

SEQ ID NO: 363727 - protein, 18 aa, Homo sapiens
  CDR3 for alpha chain variable domain of TCR clone 181864 (TRAV13-1, TRAJ52)
CAAKNTNAGGTSYGKLTF

SEQ ID NO: 363728 - protein, 15 aa, Homo sapiens
  CDR3 for beta chain variable domain of TCR clone 181864 (TRBV28, TRBJ2-4)
CAAGSGTLLMGIQYF

SEQ ID NO: 363729 - protein, 13 aa, Homo sapiens
  CDR3 for alpha chain variable domain of TCR clone 181865 (TRAV21, TRAJ37)
CAVSSGNTGKLIF

SEQ ID NO: 363730 - protein, 14 aa, Homo sapiens
  CDR3 for beta chain variable domain of TCR clone 181865 (TRBV19, TRBJ2-1)
CASPTFVLSGEQVF

SEQ ID NO: 363731 - protein, 17 aa, Homo sapiens
  CDR3 for alpha chain variable domain of TCR clone 181866 (TRAV3, TRAJ6)
CAVRDGPRAGGGYIPTF

SEQ ID NO: 363732 - protein, 14 aa, Homo sapiens
  CDR3 for beta chain variable domain of TCR clone 181866 (TRBV15, TRBJ2-5)
CATSGDRGQETQYF

SEQ ID NO: 363733 - protein, 13 aa, Homo sapiens
  CDR3 for alpha chain variable domain of TCR clone 181867 (TRAV26-1, TRAJ23)
CIDLRTRGGKLIF

SEQ ID NO: 363734 - protein, 14 aa, Homo sapiens
  CDR3 for beta chain variable domain of TCR clone 181867 (TRBV7-2, TRBJ2-7)
CASRSQGAAYEQYF

SEQ ID NO: 363735 - protein, 16 aa, Homo sapiens
  CDR3 for alpha chain variable domain of TCR clone 181868 (TRAV3, TRAJ21)
CAVRDIERGNFNKFYF

SEQ ID NO: 363736 - protein, 12 aa, Homo sapiens
  CDR3 for beta chain variable domain of TCR clone 181868 (TRBV7-9, TRBJ2-7)
CASSIKREEQYF

SEQ ID NO: 363737 - protein, 10 aa, Homo sapiens
  CDR3 for alpha chain variable domain of TCR clone 181869 (TRAV1-2, TRAJ20)
CALNDYKLSF

SEQ ID NO: 363738 - protein, 16 aa, Homo sapiens
  CDR3 for beta chain variable domain of TCR clone 181869 (TRBV20-1, TRBJ1-1)
CSARALTQGMNTEALF

SEQ ID NO: 363739 - protein, 14 aa, Homo sapiens
  CDR3 for alpha chain variable domain of TCR clone 181870 (TRAV12-3, TRAJ58)
CEMSTETSGSRLTF

SEQ ID NO: 363740 - protein, 13 aa, Homo sapiens
  CDR3 for beta chain variable domain of TCR clone 181870 (TRBV27, TRBJ2-3)
CASSWGRTDTQYF

SEQ ID NO: 363741 - protein, 11 aa, Homo sapiens
  CDR3 for alpha chain variable domain of TCR clone 181871 (TRAV12-2, TRAJ23)
CARGRGGKLIF

SEQ ID NO: 363742 - protein, 14 aa, Homo sapiens
  CDR3 for beta chain variable domain of TCR clone 181871 (TRBV28, TRBJ2-5)
CASSLRDRAETQYF

SEQ ID NO: 363743 - protein, 15 aa, Homo sapiens
  CDR3 for alpha chain variable domain of TCR clone 181872 (TRAV12-3, TRAJ6)
CAMSATTGGSYIPTF

SEQ ID NO: 363744 - protein, 13 aa, Homo sapiens
  CDR3 for beta chain variable domain of TCR clone 181872 (TRBV19, TRBJ1-2)
CASSVPGQDGYPF

SEQ ID NO: 363745 - protein, 11 aa, Homo sapiens
  CDR3 for alpha chain variable domain of TCR clone 181873 (TRAV35, TRAJ34)
CWARHTDKLIF

SEQ ID NO: 363746 - protein, 14 aa, Homo sapiens
  CDR3 for beta chain variable domain of TCR clone 181873 (TRBV5-1, TRBJ2-7)
CASSRGESLYEQYF

SEQ ID NO: 363747 - protein, 15 aa, Homo sapiens
  CDR3 for alpha chain variable domain of TCR clone 181874 (TRAV25, TRAJ52)
CAGRPGGTSYGKLTF

SEQ ID NO: 363748 - protein, 17 aa, Homo sapiens
  CDR3 for beta chain variable domain of TCR clone 181874 (TRBV11-2, TRBJ2-3)
CQQLRGGLAGAPNTQYF

SEQ ID NO: 363749 - protein, 22 aa, Homo sapiens
  CDR3 for alpha chain variable domain of TCR clone 181875 (TRAV12-1, )
CVVNAPRRIPDIQNPDPAVYQL

SEQ ID NO: 363750 - protein, 14 aa, Homo sapiens
  CDR3 for beta chain variable domain of TCR clone 181875 (TRBV13, TRBJ1-1)
CASTVITVNTEAFF

SEQ ID NO: 363751 - protein, 22 aa, Homo sapiens
  CDR3 for alpha chain variable domain of TCR clone 181876 (TRAV12-1, TRAJ6)
CVVPHQEEATYLHLEEEPALLF

SEQ ID NO: 363752 - protein, 17 aa, Homo sapiens
  CDR3 for beta chain variable domain of TCR clone 181876 (TRBV14, TRBJ2-3)
CASSQEPSGLSTDTQYF

SEQ ID NO: 363753 - protein, 12 aa, Homo sapiens
  CDR3 for alpha chain variable domain of TCR clone 181877 (TRAV21, TRAJ23)
CAVGPQGGKLIF

SEQ ID NO: 363754 - protein, 13 aa, Homo sapiens
  CDR3 for beta chain variable domain of TCR clone 181877 (TRBV20-1, TRBJ2-7)
CSSRTGAGYEQYF

SEQ ID NO: 363755 - protein, 17 aa, Homo sapiens
  CDR3 for alpha chain variable domain of TCR clone 181878 (TRAV35, TRAJ38)
CAGQLQRNAGNNRKLIW

SEQ ID NO: 363756 - protein, 15 aa, Homo sapiens
  CDR3 for beta chain variable domain of TCR clone 181878 (TRBV7-9, TRBJ2-1)
WASSLGLGGGTEQFF

SEQ ID NO: 363757 - protein, 14 aa, Homo sapiens
  CDR3 for alpha chain variable domain of TCR clone 181879 (TRAV1-2, TRAJ16)
CAVNRFSDGQNLLF

SEQ ID NO: 363758 - protein, 13 aa, Homo sapiens
  CDR3 for beta chain variable domain of TCR clone 181879 (TRBV19, TRBJ2-7)
CASRKAGGSEQYF

SEQ ID NO: 363759 - protein, 13 aa, Homo sapiens
  CDR3 for alpha chain variable domain of TCR clone 181880 (TRAV8-3, TRAJ43)
GAVVPYNNNDIRF

SEQ ID NO: 363760 - protein, 17 aa, Homo sapiens
  CDR3 for beta chain variable domain of TCR clone 181880 (TRBV7-7, TRBJ1-1)
CASIGDRPNLGVTEAFF

SEQ ID NO: 363761 - protein, 16 aa, Homo sapiens
  CDR3 for alpha chain variable domain of TCR clone 181881 (TRAV13-1, TRAJ22)
CAAKGGRYGSARQLTF

SEQ ID NO: 363762 - protein, 15 aa, Homo sapiens
  CDR3 for beta chain variable domain of TCR clone 181881 (TRBV9, TRBJ1-6)
CASSVAGTGDSPLHF

SEQ ID NO: 363763 - protein, 17 aa, Homo sapiens
  CDR3 for alpha chain variable domain of TCR clone 181882 (TRAV3, TRAJ6)
CAVRDGPRAGGSYIPTF

SEQ ID NO: 363764 - protein, 13 aa, Homo sapiens
  CDR3 for beta chain variable domain of TCR clone 181882 (TRBV7-2, TRBJ2-1)
CASSLDSYNEQFF

SEQ ID NO: 363765 - protein, 14 aa, Homo sapiens
  CDR3 for alpha chain variable domain of TCR clone 181883 (TRAV12-2, TRAJ9)
CAVNMEGGGFKTIF

SEQ ID NO: 363766 - protein, 13 aa, Homo sapiens
  CDR3 for beta chain variable domain of TCR clone 181883 (TRBV20-1, TRBJ1-1)
CSARGGGNTEAFF

SEQ ID NO: 363767 - protein, 12 aa, Homo sapiens
  CDR3 for alpha chain variable domain of TCR clone 181884 (TRAV21, TRAJ27)
CAPPGNAGKSTF

SEQ ID NO: 363768 - protein, 13 aa, Homo sapiens
  CDR3 for beta chain variable domain of TCR clone 181884 (TRBV2, TRBJ1-1)
CARNPTGECHAFF

SEQ ID NO: 363769 - protein, 11 aa, Homo sapiens
  CDR3 for alpha chain variable domain of TCR clone 181885 (TRAV4, TRAJ23)
CLVAPGGKLIF

SEQ ID NO: 363770 - protein, 15 aa, Homo sapiens
  CDR3 for beta chain variable domain of TCR clone 181885 (TRBV7-2, TRBJ2-7)
CASSSPGTVFYEQYF

SEQ ID NO: 363771 - protein, 12 aa, Homo sapiens
  CDR3 for alpha chain variable domain of TCR clone 181886 (TRAV8-3, TRAJ20)
CAVGANDYKLSF

SEQ ID NO: 363772 - protein, 16 aa, Homo sapiens
  CDR3 for beta chain variable domain of TCR clone 181886 (TRBV13, TRBJ2-3)
CQQPLQGSGGRNTQYF

SEQ ID NO: 363773 - protein, 10 aa, Homo sapiens
  CDR3 for alpha chain variable domain of TCR clone 181887 (TRAV8-4, TRAJ43)
CAVSADDMRF

SEQ ID NO: 363774 - protein, 14 aa, Homo sapiens
  CDR3 for beta chain variable domain of TCR clone 181887 (TRBV18, TRBJ2-5)
CASSPGVSQETQYF

SEQ ID NO: 363775 - protein, 15 aa, Homo sapiens
  CDR3 for alpha chain variable domain of TCR clone 181888 (TRAV1-2, TRAJ28)
CAVQYSGAGSYHLTF

SEQ ID NO: 363776 - protein, 13 aa, Homo sapiens
  CDR3 for beta chain variable domain of TCR clone 181888 (TRBV20-1, TRBJ2-7)
CSATHTSGYEQYF

SEQ ID NO: 363777 - protein, 13 aa, Homo sapiens
  CDR3 for alpha chain variable domain of TCR clone 181889 (TRAV8-3, TRAJ48)
CAVVPFGNENLTF

SEQ ID NO: 363778 - protein, 14 aa, Homo sapiens
  CDR3 for beta chain variable domain of TCR clone 181889 (TRBV18, TRBJ2-7)
CASSPRGGAYEQYF

SEQ ID NO: 363779 - protein, 13 aa, Homo sapiens
  CDR3 for alpha chain variable domain of TCR clone 181890 (TRAV29/DV5, TRAJ31)
CAASRNNNARLKF

SEQ ID NO: 363780 - protein, 14 aa, Homo sapiens
  CDR3 for beta chain variable domain of TCR clone 181890 (TRBV7-9, TRBJ2-2)
CASSLVQDTGELFF

SEQ ID NO: 363781 - protein, 14 aa, Homo sapiens
  CDR3 for alpha chain variable domain of TCR clone 181891 (TRAV20, TRAJ9)
CAVQASTGGFKTIF

SEQ ID NO: 363782 - protein, 14 aa, Homo sapiens
  CDR3 for beta chain variable domain of TCR clone 181891 (TRBV12-5, TRBJ1-6)
CGSRVGQINSPLHF

SEQ ID NO: 363783 - protein, 15 aa, Homo sapiens
  CDR3 for alpha chain variable domain of TCR clone 181892 (TRAV25, TRAJ53)
CPTINSGGSNYKLTF

SEQ ID NO: 363784 - protein, 14 aa, Homo sapiens
  CDR3 for beta chain variable domain of TCR clone 181892 (TRBV11-2, TRBJ2-3)
CASSRLARTDTQYF

SEQ ID NO: 363785 - protein, 17 aa, Homo sapiens
  CDR3 for alpha chain variable domain of TCR clone 181893 (TRAV13-1, TRAJ28)
CAAIPPYSGAGIYQLTF

SEQ ID NO: 363786 - protein, 15 aa, Homo sapiens
  CDR3 for beta chain variable domain of TCR clone 181893 (TRBV6-3, TRBJ2-2)
CASSFLATLTGELFF

SEQ ID NO: 363787 - protein, 15 aa, Homo sapiens
  CDR3 for alpha chain variable domain of TCR clone 181894 (TRAV26-1, TRAJ29)
CIVRVEGSGNKPLDF

SEQ ID NO: 363788 - protein, 15 aa, Homo sapiens
  CDR3 for beta chain variable domain of TCR clone 181894 (TRBV7-9, TRBJ1-5)
CASSQGHQPNQPQHF

SEQ ID NO: 363789 - protein, 17 aa, Homo sapiens
  CDR3 for alpha chain variable domain of TCR clone 181895 (TRAV3, TRAJ28)
CAVREAYSGAGSYQLTF

SEQ ID NO: 363790 - protein, 12 aa, Homo sapiens
  CDR3 for beta chain variable domain of TCR clone 181895 (TRBV11-2, TRBJ2-2)
CASSLGGGELFF

SEQ ID NO: 363791 - protein, 11 aa, Homo sapiens
  CDR3 for alpha chain variable domain of TCR clone 181896 (TRAV13-2, TRAJ20)
CADSNDYKPSF

SEQ ID NO: 363792 - protein, 12 aa, Homo sapiens
  CDR3 for beta chain variable domain of TCR clone 181896 (TRBV11-2, TRBJ2-2)
CASSLGGGELFF

SEQ ID NO: 363793 - protein, 17 aa, Homo sapiens
  CDR3 for alpha chain variable domain of TCR clone 181897 (TRAV13-1, TRAJ52)
CAASSGAGGTSYRKLTF

SEQ ID NO: 363794 - protein, 15 aa, Homo sapiens
  CDR3 for beta chain variable domain of TCR clone 181897 (TRBV2, TRBJ2-1)
CASSELAGCYNEQFF

SEQ ID NO: 363795 - protein, 11 aa, Homo sapiens
  CDR3 for alpha chain variable domain of TCR clone 181898 (TRAV39, TRAJ33)
CAVDPWIATIS

SEQ ID NO: 363796 - protein, 16 aa, Homo sapiens
  CDR3 for beta chain variable domain of TCR clone 181898 (TRBV27, TRBJ2-2)
CASSFRGLVRTGELFF

SEQ ID NO: 363797 - protein, 13 aa, Homo sapiens
  CDR3 for alpha chain variable domain of TCR clone 181899 (TRAV8-4, TRAJ3)
CAVSDSGASKIIF

SEQ ID NO: 363798 - protein, 16 aa, Homo sapiens
  CDR3 for beta chain variable domain of TCR clone 181899 (TRBV7-9, TRBJ2-7)
CASSNHGGQENYEQYF

SEQ ID NO: 363799 - protein, 20 aa, Homo sapiens
  CDR3 for alpha chain variable domain of TCR clone 181900 (TRAV8-3, TRAJ44)
LSTSVLWVRLYTGTSSKLTF

SEQ ID NO: 363800 - protein, 15 aa, Homo sapiens
  CDR3 for beta chain variable domain of TCR clone 181900 (TRBV6-5, TRBJ1-2)
CASSYSQAFNYGYTF

SEQ ID NO: 363801 - protein, 12 aa, Homo sapiens
  CDR3 for alpha chain variable domain of TCR clone 181901 (TRAV27, TRAJ13)
CAGVRGYQKVTF

SEQ ID NO: 363802 - protein, 12 aa, Homo sapiens
  CDR3 for beta chain variable domain of TCR clone 181901 (TRBV7-8, TRBJ2-7)
CASSLGDREQYF

SEQ ID NO: 363803 - protein, 14 aa, Homo sapiens
  CDR3 for alpha chain variable domain of TCR clone 181902 (TRAV27, TRAJ22)
CAGLPSGSARQLTF

SEQ ID NO: 363804 - protein, 15 aa, Homo sapiens
  CDR3 for beta chain variable domain of TCR clone 181902 (TRBV11-2, TRBJ2-1)
CASSKNRGLIYEQFF

SEQ ID NO: 363805 - protein, 16 aa, Homo sapiens
  CDR3 for alpha chain variable domain of TCR clone 181903 (TRAV20, TRAJ38)
CAVQASNVGNNRKPIW

SEQ ID NO: 363806 - protein, 15 aa, Homo sapiens
  CDR3 for beta chain variable domain of TCR clone 181903 (TRBV7-8, TRBJ2-6)
CLQGRGWLWANVLTF

SEQ ID NO: 363807 - protein, 15 aa, Homo sapiens
  CDR3 for alpha chain variable domain of TCR clone 181904 (TRAV12-2, TRAJ53)
CAVNGGGGCNYKLTF

SEQ ID NO: 363808 - protein, 17 aa, Homo sapiens
  CDR3 for beta chain variable domain of TCR clone 181904 (TRBV7-3, TRBJ2-3)
RASSLMKRMRGADTQYF

SEQ ID NO: 363809 - protein, 13 aa, Homo sapiens
  CDR3 for alpha chain variable domain of TCR clone 181905 (TRAV12-3, TRAJ40)
CAMSARGTYKYIV

SEQ ID NO: 363810 - protein, 16 aa, Homo sapiens
  CDR3 for beta chain variable domain of TCR clone 181905 (TRBV20-1, TRBJ2-3)
CSGEAGLAGGQDTQYF

SEQ ID NO: 363811 - protein, 14 aa, Homo sapiens
  CDR3 for alpha chain variable domain of TCR clone 181906 (TRAV26-1, TRAJ38)
CIADNAGKNRKLIW

SEQ ID NO: 363812 - protein, 15 aa, Homo sapiens
  CDR3 for beta chain variable domain of TCR clone 181906 (TRBV7-2, TRBJ2-1)
CASSLVAGRYNEQFF

SEQ ID NO: 363813 - protein, 13 aa, Homo sapiens
  CDR3 for alpha chain variable domain of TCR clone 181907 (TRAV8-6, TRAJ49)
CAVITNTGNQFYF

SEQ ID NO: 363814 - protein, 14 aa, Homo sapiens
  CDR3 for beta chain variable domain of TCR clone 181907 (TRBV5-1, TRBJ2-7)
CASSMGESLYEQYF

SEQ ID NO: 363815 - protein, 17 aa, Homo sapiens
  CDR3 for alpha chain variable domain of TCR clone 181908 (TRAV26-1, TRAJ36)
CIVRPPGAQTGANNLFF

SEQ ID NO: 363816 - protein, 16 aa, Homo sapiens
  CDR3 for beta chain variable domain of TCR clone 181908 (TRBV19, TRBJ2-1)
CASSKAGPSSYNEQFF

SEQ ID NO: 363817 - protein, 16 aa, Homo sapiens
  CDR3 for alpha chain variable domain of TCR clone 181909 (TRAV4, TRAJ9)
CLVGDPNMPGGFKTIF

SEQ ID NO: 363818 - protein, 16 aa, Homo sapiens
  CDR3 for beta chain variable domain of TCR clone 181909 (TRBV28, TRBJ1-4)
CASSPPYRGRSEKLFF

SEQ ID NO: 363819 - protein, 12 aa, Homo sapiens
  CDR3 for alpha chain variable domain of TCR clone 181910 (TRAV8-3, TRAJ20)
CAVDFNDYKLSF

SEQ ID NO: 363820 - protein, 14 aa, Homo sapiens
  CDR3 for beta chain variable domain of TCR clone 181910 (TRBV5-1, TRBJ2-7)
CASSRGESLYEQYF

SEQ ID NO: 363821 - protein, 12 aa, Homo sapiens
  CDR3 for alpha chain variable domain of TCR clone 181911 (TRAV10, TRAJ6)
CVVSEGSDIPTF

SEQ ID NO: 363822 - protein, 15 aa, Homo sapiens
  CDR3 for beta chain variable domain of TCR clone 181911 (TRBV4-3, TRBJ2-7)
CASSQGGRGIYEQHF

SEQ ID NO: 363823 - protein, 13 aa, Homo sapiens
  CDR3 for alpha chain variable domain of TCR clone 181912 (TRAV12-1, TRAJ9)
CVVLHTGGFKTIF

SEQ ID NO: 363824 - protein, 13 aa, Homo sapiens
  CDR3 for beta chain variable domain of TCR clone 181912 (TRBV20-1, TRBJ1-1)
CSARGGGNTEAFF

SEQ ID NO: 363825 - protein, 10 aa, Homo sapiens
  CDR3 for alpha chain variable domain of TCR clone 181913 (TRAV8-3, TRAJ43)
CAVALADMRF

SEQ ID NO: 363826 - protein, 15 aa, Homo sapiens
  CDR3 for beta chain variable domain of TCR clone 181913 (TRBV9, TRBJ1-6)
CASSVAGTGDSPLHF

SEQ ID NO: 363827 - protein, 12 aa, Homo sapiens
  CDR3 for alpha chain variable domain of TCR clone 181914 (TRAV12-3, TRAJ20)
CAMVRGDYKLSF

SEQ ID NO: 363828 - protein, 14 aa, Homo sapiens
  CDR3 for beta chain variable domain of TCR clone 181914 (TRBV19, TRBJ2-7)
CASSMGQGAIEQYF

SEQ ID NO: 363829 - protein, 13 aa, Homo sapiens
  CDR3 for alpha chain variable domain of TCR clone 181915 (TRAV17, TRAJ29)
CATGPSGNTPLVF

SEQ ID NO: 363830 - protein, 14 aa, Homo sapiens
  CDR3 for beta chain variable domain of TCR clone 181915 (TRBV2, TRBJ1-6)
CASEVSSYNSPLHL

SEQ ID NO: 363831 - protein, 16 aa, Homo sapiens
  CDR3 for alpha chain variable domain of TCR clone 181916 (TRAV30, TRAJ24)
CGTEIVDADSWGKFQF

SEQ ID NO: 363832 - protein, 14 aa, Homo sapiens
  CDR3 for beta chain variable domain of TCR clone 181916 (TRBV12-5, TRBJ2-5)
CASSSRTHEETQYF

SEQ ID NO: 363833 - protein, 13 aa, Homo sapiens
  CDR3 for alpha chain variable domain of TCR clone 181917 (TRAV3, TRAJ4)
CAVRDGGYNKLIF

SEQ ID NO: 363834 - protein, 13 aa, Homo sapiens
  CDR3 for beta chain variable domain of TCR clone 181917 (TRBV7-2, TRBJ2-2)
CASSSVRAGELFF

SEQ ID NO: 363835 - protein, 14 aa, Homo sapiens
  CDR3 for alpha chain variable domain of TCR clone 181918 (TRAV12-2, TRAJ13)
CAVKKTGGYQQVTF

SEQ ID NO: 363836 - protein, 16 aa, Homo sapiens
  CDR3 for beta chain variable domain of TCR clone 181918 (TRBV7-8, TRBJ2-4)
CASSAERTLAKNMQYF

SEQ ID NO: 363837 - protein, 13 aa, Homo sapiens
  CDR3 for alpha chain variable domain of TCR clone 181919 (TRAV23/DV6, TRAJ57)
ALPFLRGSEKLVF

SEQ ID NO: 363838 - protein, 14 aa, Homo sapiens
  CDR3 for beta chain variable domain of TCR clone 181919 (TRBV25-1, TRBJ1-1)
CASTHLGGNTEAFF

SEQ ID NO: 363839 - protein, 13 aa, Homo sapiens
  CDR3 for alpha chain variable domain of TCR clone 181920 (TRAV2, TRAJ40)
CAAVTSGTYKYIF

SEQ ID NO: 363840 - protein, 14 aa, Homo sapiens
  CDR3 for beta chain variable domain of TCR clone 181920 (TRBV19, TRBJ2-1)
CASPTFVLSGEQLF

SEQ ID NO: 363841 - protein, 15 aa, Homo sapiens
  CDR3 for alpha chain variable domain of TCR clone 181921 (TRAV13-1, TRAJ44)
CAASRGGGTASKLTF

SEQ ID NO: 363842 - protein, 14 aa, Homo sapiens
  CDR3 for beta chain variable domain of TCR clone 181921 (TRBV7-3, TRBJ1-1)
CASSLKGGNTEAFF

SEQ ID NO: 363843 - protein, 15 aa, Homo sapiens
  CDR3 for alpha chain variable domain of TCR clone 181922 (TRAV26-2, TRAJ54)
CILRDVGQGAQRLVF

SEQ ID NO: 363844 - protein, 13 aa, Homo sapiens
  CDR3 for beta chain variable domain of TCR clone 181922 (TRBV7-9, TRBJ1-1)
CASSLAGVTEAFF

SEQ ID NO: 363845 - protein, 13 aa, Homo sapiens
  CDR3 for alpha chain variable domain of TCR clone 181923 (TRAV12-2, TRAJ4)
CAVRPGGYNKLIF

SEQ ID NO: 363846 - protein, 12 aa, Homo sapiens
  CDR3 for beta chain variable domain of TCR clone 181923 (TRBV7-9, TRBJ2-7)
CASSIKREEQYF

SEQ ID NO: 363847 - protein, 10 aa, Homo sapiens
  CDR3 for alpha chain variable domain of TCR clone 181924 (TRAV36/DV7, TRAJ49)
CALTGNQFSF

SEQ ID NO: 363848 - protein, 15 aa, Homo sapiens
  CDR3 for beta chain variable domain of TCR clone 181924 (TRBV11-2, TRBJ2-1)
CASSLGTSGLNEQFF

SEQ ID NO: 363849 - protein, 15 aa, Homo sapiens
  CDR3 for alpha chain variable domain of TCR clone 181925 (TRAV8-2, TRAJ28)
CVVSESGAGSYQLTF

SEQ ID NO: 363850 - protein, 16 aa, Homo sapiens
  CDR3 for beta chain variable domain of TCR clone 181925 (TRBV10-3, TRBJ2-1)
CAISLTSGNSYNEQFV

SEQ ID NO: 363851 - protein, 14 aa, Homo sapiens
  CDR3 for alpha chain variable domain of TCR clone 181926 (TRAV8-1, TRAJ34)
CSVNPSYNTDKLIF

SEQ ID NO: 363852 - protein, 16 aa, Homo sapiens
  CDR3 for beta chain variable domain of TCR clone 181926 (TRBV7-2, TRBJ2-6)
CASSLAGRSGANVLTF

SEQ ID NO: 363853 - protein, 20 aa, Homo sapiens
  CDR3 for alpha chain variable domain of TCR clone 181927 (TRAV1-1, TRAJ39)
CLLLLRCESSAYIAGNMLTF

SEQ ID NO: 363854 - protein, 13 aa, Homo sapiens
  CDR3 for beta chain variable domain of TCR clone 181927 (TRBV12-4, TRBJ1-5)
CASSPDRAQPQHF

SEQ ID NO: 363855 - protein, 13 aa, Homo sapiens
  CDR3 for alpha chain variable domain of TCR clone 181928 (TRAV12-3, TRAJ33)
CAMSVNSNYQLIW

SEQ ID NO: 363856 - protein, 16 aa, Homo sapiens
  CDR3 for beta chain variable domain of TCR clone 181928 (TRBV12-4, TRBJ1-5)
CASSRPVGGSNQTQHF

SEQ ID NO: 363857 - protein, 16 aa, Homo sapiens
  CDR3 for alpha chain variable domain of TCR clone 181929 (TRAV12-3, TRAJ53)
CAMSPGSGGSNYKLTF

SEQ ID NO: 363858 - protein, 15 aa, Homo sapiens
  CDR3 for beta chain variable domain of TCR clone 181929 (TRBV12-4, TRBJ1-6)
CASSLGGQGTSHLHF

SEQ ID NO: 363859 - protein, 13 aa, Homo sapiens
  CDR3 for alpha chain variable domain of TCR clone 181930 (TRAV16, TRAJ28)
CALPGAGSYQLTF

SEQ ID NO: 363860 - protein, 16 aa, Homo sapiens
  CDR3 for beta chain variable domain of TCR clone 181930 (TRBV28, TRBJ1-5)
CASSLTGQGRNQPQHF

SEQ ID NO: 363861 - protein, 13 aa, Homo sapiens
  CDR3 for alpha chain variable domain of TCR clone 181931 (TRAV13-2, TRAJ48)
CAEMDFGYEKLTF

SEQ ID NO: 363862 - protein, 12 aa, Homo sapiens
  CDR3 for beta chain variable domain of TCR clone 181931 (TRBV5-1, TRBJ1-2)
CASSQDTYGYTF

SEQ ID NO: 363863 - protein, 12 aa, Homo sapiens
  CDR3 for alpha chain variable domain of TCR clone 181932 (TRAV1-1, TRAJ39)
CAVPVVGNMLTF

SEQ ID NO: 363864 - protein, 15 aa, Homo sapiens
  CDR3 for beta chain variable domain of TCR clone 181932 (TRBV7-3, TRBJ2-1)
CASSLGQGPFGEQFF

SEQ ID NO: 363865 - protein, 15 aa, Homo sapiens
  CDR3 for alpha chain variable domain of TCR clone 181933 (TRAV12-3, TRAJ6)
CAMSPASGGSYIPTF

SEQ ID NO: 363866 - protein, 14 aa, Homo sapiens
  CDR3 for beta chain variable domain of TCR clone 181933 (TRBV20-1, TRBJ1-3)
CSASPTGAGNTIYF

SEQ ID NO: 363867 - protein, 15 aa, Homo sapiens
  CDR3 for alpha chain variable domain of TCR clone 181934 (TRAV26-1, TRAJ29)
CIVRVEGSGNTPLVF

SEQ ID NO: 363868 - protein, 15 aa, Homo sapiens
  CDR3 for beta chain variable domain of TCR clone 181934 (TRBV7-9, TRBJ1-5)
CASSQGHQPNQHEHF

SEQ ID NO: 363869 - protein, 11 aa, Homo sapiens
  CDR3 for alpha chain variable domain of TCR clone 181935 (TRAV4, TRAJ31)
CLVGDNARLMF

SEQ ID NO: 363870 - protein, 14 aa, Homo sapiens
  CDR3 for beta chain variable domain of TCR clone 181935 (TRBV7-8, TRBJ2-3)
CASSFKSSTDTQYF

SEQ ID NO: 363871 - protein, 12 aa, Homo sapiens
  CDR3 for alpha chain variable domain of TCR clone 181936 (TRAV13-1, TRAJ9)
CASHTGGFKTIF

SEQ ID NO: 363872 - protein, 13 aa, Homo sapiens
  CDR3 for beta chain variable domain of TCR clone 181936 (TRBV10-3, TRBJ2-7)
CASKLAVNYEQYF

SEQ ID NO: 363873 - protein, 13 aa, Homo sapiens
  CDR3 for alpha chain variable domain of TCR clone 181937 (TRAV21, TRAJ27)
CAARPGNAGKSTF

SEQ ID NO: 363874 - protein, 14 aa, Homo sapiens
  CDR3 for beta chain variable domain of TCR clone 181937 (TRBV7-3, TRBJ2-3)
CASSSTGVADTQYF

SEQ ID NO: 363875 - protein, 16 aa, Homo sapiens
  CDR3 for alpha chain variable domain of TCR clone 181938 (TRAV8-6, TRAJ22)
CAVSPISSGSARQLTF

SEQ ID NO: 363876 - protein, 15 aa, Homo sapiens
  CDR3 for beta chain variable domain of TCR clone 181938 (TRBV7-9, TRBJ1-4)
CASSATGGNNEKLFF

SEQ ID NO: 363877 - protein, 14 aa, Homo sapiens
  CDR3 for alpha chain variable domain of TCR clone 181939 (TRAV1-2, TRAJ8)
CAVREDTGFQKLAF

SEQ ID NO: 363878 - protein, 13 aa, Homo sapiens
  CDR3 for beta chain variable domain of TCR clone 181939 (TRBV12-4, TRBJ2-5)
CASRKRGKETQYF

SEQ ID NO: 363879 - protein, 14 aa, Homo sapiens
  CDR3 for alpha chain variable domain of TCR clone 181940 (TRAV16, TRAJ33)
CALSAMDSNYQLIW

SEQ ID NO: 363880 - protein, 16 aa, Homo sapiens
  CDR3 for beta chain variable domain of TCR clone 181940 (TRBV4-1, TRBJ2-1)
CASSQQGAWESNEQFF

SEQ ID NO: 363881 - protein, 11 aa, Homo sapiens
  CDR3 for alpha chain variable domain of TCR clone 181941 (TRAV21, TRAJ39)
LLVNAGNMLTF

SEQ ID NO: 363882 - protein, 18 aa, Homo sapiens
  CDR3 for beta chain variable domain of TCR clone 181941 (TRBV7-2, TRBJ2-7)
CVSSLSGRGLAGGYEQYF

SEQ ID NO: 363883 - protein, 14 aa, Homo sapiens
  CDR3 for alpha chain variable domain of TCR clone 181942 (TRAV13-2, TRAJ26)
CAENLGNYGQNFVF

SEQ ID NO: 363884 - protein, 14 aa, Homo sapiens
  CDR3 for beta chain variable domain of TCR clone 181942 (TRBV19, TRBJ1-3)
CASNRGNSGNTKYF

SEQ ID NO: 363885 - protein, 11 aa, Homo sapiens
  CDR3 for alpha chain variable domain of TCR clone 181943 (TRAV26-1, TRAJ27)
CIDPNAGKSTF

SEQ ID NO: 363886 - protein, 14 aa, Homo sapiens
  CDR3 for beta chain variable domain of TCR clone 181943 (TRBV2, TRBJ2-7)
CASSLTSGGYEQYF

SEQ ID NO: 363887 - protein, 15 aa, Homo sapiens
  CDR3 for alpha chain variable domain of TCR clone 181944 (TRAV8-3, TRAJ11)
CAVGLWNSGYSTLTF

SEQ ID NO: 363888 - protein, 23 aa, Homo sapiens
  CDR3 for beta chain variable domain of TCR clone 181944 (TRBV7-9, TRBJ1-2)
EAQLEKSRLLSDRFSSGEDGYTF

SEQ ID NO: 363889 - protein, 16 aa, Homo sapiens
  CDR3 for alpha chain variable domain of TCR clone 181945 (TRAV3, TRAJ37)
CAVRGKGSGNTGKLIF

SEQ ID NO: 363890 - protein, 17 aa, Homo sapiens
  CDR3 for beta chain variable domain of TCR clone 181945 (TRBV28, TRBJ2-1)
CASSSARQALTYNEQFF

SEQ ID NO: 363891 - protein, 18 aa, Homo sapiens
  CDR3 for alpha chain variable domain of TCR clone 181946 (TRAV13-1, TRAJ52)
CAASKRSAGGTSYGKLTF

SEQ ID NO: 363892 - protein, 13 aa, Homo sapiens
  CDR3 for beta chain variable domain of TCR clone 181946 (TRBV12-4, TRBJ1-2)
CASSLRQGKGYSV

SEQ ID NO: 363893 - protein, 14 aa, Homo sapiens
  CDR3 for alpha chain variable domain of TCR clone 181947 (TRAV12-3, TRAJ10)
SHLPLTGRGNNLTF

SEQ ID NO: 363894 - protein, 11 aa, Homo sapiens
  CDR3 for beta chain variable domain of TCR clone 181947 (TRBV11-2, TRBJ2-2)
CASSLPGELFF

SEQ ID NO: 363895 - protein, 20 aa, Homo sapiens
  CDR3 for alpha chain variable domain of TCR clone 181948 (TRAV14/DV4, TRAJ22)
CAMREGPFSVSSGSARQLPF

SEQ ID NO: 363896 - protein, 13 aa, Homo sapiens
  CDR3 for beta chain variable domain of TCR clone 181948 (TRBV4-2, TRBJ2-3)
CASSQDWQHTQYF

SEQ ID NO: 363897 - protein, 13 aa, Homo sapiens
  CDR3 for alpha chain variable domain of TCR clone 181949 (TRAV21, TRAJ37)
CAVSSGNTGQLIF

SEQ ID NO: 363898 - protein, 13 aa, Homo sapiens
  CDR3 for beta chain variable domain of TCR clone 181949 (TRBV7-6, TRBJ2-3)
CASSLRSDNTQYF

SEQ ID NO: 363899 - protein, 10 aa, Homo sapiens
  CDR3 for alpha chain variable domain of TCR clone 181950 (TRAV30, TRAJ13)
CGIGNEKLTF

SEQ ID NO: 363900 - protein, 17 aa, Homo sapiens
  CDR3 for beta chain variable domain of TCR clone 181950 (TRBV11-2, TRBJ2-1)
CASSLCPPGVEYNEQFF

SEQ ID NO: 363901 - protein, 10 aa, Homo sapiens
  CDR3 for alpha chain variable domain of TCR clone 181951 (TRAV1-2, TRAJ31)
CAFFDARLMF

SEQ ID NO: 363902 - protein, 14 aa, Homo sapiens
  CDR3 for beta chain variable domain of TCR clone 181951 (TRBV19, TRBJ2-1)
CASPTFVLSGEQFF

SEQ ID NO: 363903 - protein, 15 aa, Homo sapiens
  CDR3 for alpha chain variable domain of TCR clone 181952 (TRAV8-3, TRAJ45)
CASSYSGGGSDGLTF

SEQ ID NO: 363904 - protein, 20 aa, Homo sapiens
  CDR3 for beta chain variable domain of TCR clone 181952 (TRBV28, TRBJ2-1)
CASTPIGRSPGLAGGNEQFS

SEQ ID NO: 363905 - protein, 13 aa, Homo sapiens
  CDR3 for alpha chain variable domain of TCR clone 181953 (TRAV8-6, TRAJ48)
CAGVNFENEKLIF

SEQ ID NO: 363906 - protein, 16 aa, Homo sapiens
  CDR3 for beta chain variable domain of TCR clone 181953 (TRBV4-2, TRBJ2-6)
CASSQARSSGANVLTF

SEQ ID NO: 363907 - protein, 14 aa, Homo sapiens
  CDR3 for alpha chain variable domain of TCR clone 181954 (TRAV12-2, TRAJ13)
CAVKKTGGYKKVTF

SEQ ID NO: 363908 - protein, 14 aa, Homo sapiens
  CDR3 for beta chain variable domain of TCR clone 181954 (TRBV19, TRBJ2-1)
CASPTFVLSSEQFF

SEQ ID NO: 363909 - protein, 14 aa, Homo sapiens
  CDR3 for alpha chain variable domain of TCR clone 181955 (TRAV23/DV6, TRAJ37)
CAASTSSKTGKLIF

SEQ ID NO: 363910 - protein, 15 aa, Homo sapiens
  CDR3 for beta chain variable domain of TCR clone 181955 (TRBV7-9, TRBJ2-7)
CASSPGGGLTYEQYF

SEQ ID NO: 363911 - protein, 15 aa, Homo sapiens
  CDR3 for alpha chain variable domain of TCR clone 181956 (TRAV13-1, TRAJ5)
CVASKADTGRRALTF

SEQ ID NO: 363912 - protein, 16 aa, Homo sapiens
  CDR3 for beta chain variable domain of TCR clone 181956 (TRBV7-2, TRBJ2-1)
CASSLGRTSGDNEQFF

SEQ ID NO: 363913 - protein, 14 aa, Homo sapiens
  CDR3 for alpha chain variable domain of TCR clone 181957 (TRAV8-3, TRAJ39)
CAVGANNAGNRLTF

SEQ ID NO: 363914 - protein, 12 aa, Homo sapiens
  CDR3 for beta chain variable domain of TCR clone 181957 (TRBV11-3, TRBJ1-1)
CASSHRQGEAFF

SEQ ID NO: 363915 - protein, 15 aa, Homo sapiens
  CDR3 for alpha chain variable domain of TCR clone 181958 (TRAV13-2, TRAJ10)
CAENRDSGGGNKLTF

SEQ ID NO: 363916 - protein, 16 aa, Homo sapiens
  CDR3 for beta chain variable domain of TCR clone 181958 (TRBV2, TRBJ1-3)
CASSRTGGSTGNTIYF

SEQ ID NO: 363917 - protein, 11 aa, Homo sapiens
  CDR3 for alpha chain variable domain of TCR clone 181959 (TRAV13-1, TRAJ39)
CASHAGNMLTF

SEQ ID NO: 363918 - protein, 14 aa, Homo sapiens
  CDR3 for beta chain variable domain of TCR clone 181959 (TRBV11-2, TRBJ1-5)
SASSLDTGRQPQHF

SEQ ID NO: 363919 - protein, 14 aa, Homo sapiens
  CDR3 for alpha chain variable domain of TCR clone 181960 (TRAV12-3, TRAJ57)
CSRALEGGSEKLVF

SEQ ID NO: 363920 - protein, 17 aa, Homo sapiens
  CDR3 for beta chain variable domain of TCR clone 181960 (TRBV11-3, TRBJ2-3)
CASSLGLTGGGTDTQYF

SEQ ID NO: 363921 - protein, 14 aa, Homo sapiens
  CDR3 for alpha chain variable domain of TCR clone 181961 (TRAV14/DV4, TRAJ49)
CAMRDGVNGNQFYF

SEQ ID NO: 363922 - protein, 14 aa, Homo sapiens
  CDR3 for beta chain variable domain of TCR clone 181961 (TRBV5-5, TRBJ2-7)
CASSLGLAVYEQYF

SEQ ID NO: 363923 - protein, 15 aa, Homo sapiens
  CDR3 for alpha chain variable domain of TCR clone 181962 (TRAV20, TRAJ22)
CCAGFIVCSARQLTF

SEQ ID NO: 363924 - protein, 13 aa, Homo sapiens
  CDR3 for beta chain variable domain of TCR clone 181962 (TRBV7-2, TRBJ2-5)
CASSQTSVETQYF

SEQ ID NO: 363925 - protein, 14 aa, Homo sapiens
  CDR3 for alpha chain variable domain of TCR clone 181963 (TRAV26-1, TRAJ38)
CIAANAGNNRKLIW

SEQ ID NO: 363926 - protein, 15 aa, Homo sapiens
  CDR3 for beta chain variable domain of TCR clone 181963 (TRBV7-2, TRBJ2-1)
CASSLVAGRYNEQFF

SEQ ID NO: 363927 - protein, 15 aa, Homo sapiens
  CDR3 for alpha chain variable domain of TCR clone 181964 (TRAV1-1, TRAJ20)
CAVRDNVANDYKLSF

SEQ ID NO: 363928 - protein, 15 aa, Homo sapiens
  CDR3 for beta chain variable domain of TCR clone 181964 (TRBV11-3, TRBJ2-7)
CASSPGPASSYEQYF

SEQ ID NO: 363929 - protein, 16 aa, Homo sapiens
  CDR3 for alpha chain variable domain of TCR clone 181965 (TRAV8-3, TRAJ13)
CAVGAYPSGGYQKVTF

SEQ ID NO: 363930 - protein, 17 aa, Homo sapiens
  CDR3 for beta chain variable domain of TCR clone 181965 (TRBV20-1, TRBJ2-1)
CSARDPLAGVWDNEQFF

SEQ ID NO: 363931 - protein, 14 aa, Homo sapiens
  CDR3 for alpha chain variable domain of TCR clone 181966 (TRAV23/DV6, TRAJ39)
CAASIGNAGNMLTF

SEQ ID NO: 363932 - protein, 14 aa, Homo sapiens
  CDR3 for beta chain variable domain of TCR clone 181966 (TRBV7-3, TRBJ1-1)
CASSLKGGNTEPFF

SEQ ID NO: 363933 - protein, 15 aa, Homo sapiens
  CDR3 for alpha chain variable domain of TCR clone 181967 (TRAV12-3, TRAJ22)
CAMRSSSGSARQLTF

SEQ ID NO: 363934 - protein, 18 aa, Homo sapiens
  CDR3 for beta chain variable domain of TCR clone 181967 (TRBV27, TRBJ2-1)
CASRRSGRGESSGNEQFS

SEQ ID NO: 363935 - protein, 15 aa, Homo sapiens
  CDR3 for alpha chain variable domain of TCR clone 181968 (TRAV8-6, TRAJ9)
CAVSDRDTGGFKTIF

SEQ ID NO: 363936 - protein, 16 aa, Homo sapiens
  CDR3 for beta chain variable domain of TCR clone 181968 (TRBV19, TRBJ2-3)
CASSPEWDRGTDTQYS

SEQ ID NO: 363937 - protein, 15 aa, Homo sapiens
  CDR3 for alpha chain variable domain of TCR clone 181969 (TRAV8-3, TRAJ11)
CAVGLLNSGYSTLTF

SEQ ID NO: 363938 - protein, 14 aa, Homo sapiens
  CDR3 for beta chain variable domain of TCR clone 181969 (TRBV4-1, TRBJ2-5)
CASSRSGSGETRYF

SEQ ID NO: 363939 - protein, 10 aa, Homo sapiens
  CDR3 for alpha chain variable domain of TCR clone 181970 (TRAV12-1, TRAJ31)
CVVNYARLMF

SEQ ID NO: 363940 - protein, 15 aa, Homo sapiens
  CDR3 for beta chain variable domain of TCR clone 181970 (TRBV28, TRBJ2-4)
CAAGSGTLLMGIQYF

SEQ ID NO: 363941 - protein, 13 aa, Homo sapiens
  CDR3 for alpha chain variable domain of TCR clone 181971 (TRAV8-4, TRAJ10)
CAAFTGGGNKLTF

SEQ ID NO: 363942 - protein, 15 aa, Homo sapiens
  CDR3 for beta chain variable domain of TCR clone 181971 (TRBV2, TRBJ2-3)
CASSDCEKATDTQYF

SEQ ID NO: 363943 - protein, 15 aa, Homo sapiens
  CDR3 for alpha chain variable domain of TCR clone 181972 (TRAV12-3, TRAJ6)
CAMSAASGGSYIPTF

SEQ ID NO: 363944 - protein, 13 aa, Homo sapiens
  CDR3 for beta chain variable domain of TCR clone 181972 (TRBV20-1, TRBJ1-2)
CSASTERIYDDTF

SEQ ID NO: 363945 - protein, 12 aa, Homo sapiens
  CDR3 for alpha chain variable domain of TCR clone 181973 (TRAV8-3, TRAJ20)
CSLGANDHKLSF

SEQ ID NO: 363946 - protein, 16 aa, Homo sapiens
  CDR3 for beta chain variable domain of TCR clone 181973 (TRBV19, TRBJ2-2)
CASRSPGTGATGELFF

SEQ ID NO: 363947 - protein, 14 aa, Homo sapiens
  CDR3 for alpha chain variable domain of TCR clone 181974 (TRAV12-2, TRAJ13)
CAVKKTGGYQKVTF

SEQ ID NO: 363948 - protein, 15 aa, Homo sapiens
  CDR3 for beta chain variable domain of TCR clone 181974 (TRBV27, TRBJ2-1)
CASSNGGGFSNEEFF

SEQ ID NO: 363949 - protein, 14 aa, Homo sapiens
  CDR3 for alpha chain variable domain of TCR clone 181975 (TRAV26-1, TRAJ39)
CIVRGSRAGNMLTF

SEQ ID NO: 363950 - protein, 15 aa, Homo sapiens
  CDR3 for beta chain variable domain of TCR clone 181975 (TRBV7-9, TRBJ1-5)
CASSQGHEPNQPQHF

SEQ ID NO: 363951 - protein, 19 aa, Homo sapiens
  CDR3 for alpha chain variable domain of TCR clone 181976 (TRAV17, TRAJ17)
CATDGRPGVIKAAGNKLTI

SEQ ID NO: 363952 - protein, 17 aa, Homo sapiens
  CDR3 for beta chain variable domain of TCR clone 181976 (TRBV12-4, TRBJ1-1)
CASSLSGFRTMNTEAFF

SEQ ID NO: 363953 - protein, 11 aa, Homo sapiens
  CDR3 for alpha chain variable domain of TCR clone 181977 (TRAV3, TRAJ13)
CAVTSSQKVTF

SEQ ID NO: 363954 - protein, 15 aa, Homo sapiens
  CDR3 for beta chain variable domain of TCR clone 181977 (TRBV7-9, TRBJ2-7)
CASSISGLAVYEQYF

SEQ ID NO: 363955 - protein, 12 aa, Homo sapiens
  CDR3 for alpha chain variable domain of TCR clone 181978 (TRAV29/DV5, TRAJ49)
CSALNTGNQFYF

SEQ ID NO: 363956 - protein, 14 aa, Homo sapiens
  CDR3 for beta chain variable domain of TCR clone 181978 (TRBV2, TRBJ2-2)
CASSEWTPTGELFF

SEQ ID NO: 363957 - protein, 14 aa, Homo sapiens
  CDR3 for alpha chain variable domain of TCR clone 181979 (TRAV8-6, TRAJ54)
CAVSGLQGAQKLVF

SEQ ID NO: 363958 - protein, 15 aa, Homo sapiens
  CDR3 for beta chain variable domain of TCR clone 181979 (TRBV4-1, TRBJ1-4)
CASSDTGGTNEKLLF

SEQ ID NO: 363959 - protein, 16 aa, Homo sapiens
  CDR3 for alpha chain variable domain of TCR clone 181980 (TRAV16, TRAJ57)
CAPYLITQGGSEKLVF

SEQ ID NO: 363960 - protein, 14 aa, Homo sapiens
  CDR3 for beta chain variable domain of TCR clone 181980 (TRBV19, TRBJ1-5)
CASRAPDSFLSQHF

SEQ ID NO: 363961 - protein, 15 aa, Homo sapiens
  CDR3 for alpha chain variable domain of TCR clone 181981 (TRAV8-3, TRAJ48)
CAVGAQLSGNEKLTF

SEQ ID NO: 363962 - protein, 14 aa, Homo sapiens
  CDR3 for beta chain variable domain of TCR clone 181981 (TRBV28, TRBJ2-1)
CACSLVAPYNEQFF

SEQ ID NO: 363963 - protein, 14 aa, Homo sapiens
  CDR3 for alpha chain variable domain of TCR clone 181982 (TRAV17, TRAJ12)
CAILPMDSSYKLIF

SEQ ID NO: 363964 - protein, 17 aa, Homo sapiens
  CDR3 for beta chain variable domain of TCR clone 181982 (TRBV7-3, TRBJ2-3)
CASSPRGQGYGTDTQYF

SEQ ID NO: 363965 - protein, 13 aa, Homo sapiens
  CDR3 for alpha chain variable domain of TCR clone 181983 (TRAV21, TRAJ57)
CAVTQGGSEKLVF

SEQ ID NO: 363966 - protein, 16 aa, Homo sapiens
  CDR3 for beta chain variable domain of TCR clone 181983 (TRBV7-8, TRBJ2-1)
CASSLQGTGRYNEQFF

SEQ ID NO: 363967 - protein, 16 aa, Homo sapiens
  CDR3 for alpha chain variable domain of TCR clone 181984 (TRAV30, TRAJ24)
CGTEIVDADIWGKFQF

SEQ ID NO: 363968 - protein, 14 aa, Homo sapiens
  CDR3 for beta chain variable domain of TCR clone 181984 (TRBV13, TRBJ2-1)
CASSPRPRYNEQFF

SEQ ID NO: 363969 - protein, 12 aa, Homo sapiens
  CDR3 for alpha chain variable domain of TCR clone 181985 (TRAV13-2, TRAJ23)
CAERHRGGKLIF

SEQ ID NO: 363970 - protein, 13 aa, Homo sapiens
  CDR3 for beta chain variable domain of TCR clone 181985 (TRBV7-8, TRBJ2-7)
CASSVTGGREQYF

SEQ ID NO: 363971 - protein, 16 aa, Homo sapiens
  CDR3 for alpha chain variable domain of TCR clone 181986 (TRAV12-3, TRAJ53)
CAMSPGSGGSNDKLTF

SEQ ID NO: 363972 - protein, 11 aa, Homo sapiens
  CDR3 for beta chain variable domain of TCR clone 181986 (TRBV29-1, TRBJ2-5)
CSEDRTGTQYY

SEQ ID NO: 363973 - protein, 15 aa, Homo sapiens
  CDR3 for alpha chain variable domain of TCR clone 181987 (TRAV14/DV4, TRAJ10)
CAMRELTGGGNKLTL

SEQ ID NO: 363974 - protein, 18 aa, Homo sapiens
  CDR3 for beta chain variable domain of TCR clone 181987 (TRBV7-9, TRBJ2-7)
CASSLTTSGSRTRYEQYF

SEQ ID NO: 363975 - protein, 13 aa, Homo sapiens
  CDR3 for alpha chain variable domain of TCR clone 181988 (TRAV21, TRAJ36)
CAVIKTGANNLFF

SEQ ID NO: 363976 - protein, 14 aa, Homo sapiens
  CDR3 for beta chain variable domain of TCR clone 181988 (TRBV7-8, TRBJ2-3)
CASSFKSSTDTQYF

SEQ ID NO: 363977 - protein, 14 aa, Homo sapiens
  CDR3 for alpha chain variable domain of TCR clone 181989 (TRAV17, TRAJ57)
CATDPQGGSEKLDF

SEQ ID NO: 363978 - protein, 14 aa, Homo sapiens
  CDR3 for beta chain variable domain of TCR clone 181989 (TRBV5-8, TRBJ2-3)
CASSLGQGTDTQYF

SEQ ID NO: 363979 - protein, 16 aa, Homo sapiens
  CDR3 for alpha chain variable domain of TCR clone 181990 (TRAV3, TRAJ23)
CAVKIGIYDQGGKLIF

SEQ ID NO: 363980 - protein, 17 aa, Homo sapiens
  CDR3 for beta chain variable domain of TCR clone 181990 (TRBV10-3, TRBJ2-6)
CAISESTAPSGANVLTF

SEQ ID NO: 363981 - protein, 12 aa, Homo sapiens
  CDR3 for alpha chain variable domain of TCR clone 181991 (TRAV1-2, TRAJ24)
CAVGVSWGKFQF

SEQ ID NO: 363982 - protein, 15 aa, Homo sapiens
  CDR3 for beta chain variable domain of TCR clone 181991 (TRBV6-1, TRBJ2-7)
CASSEGVGNPYEQYF

SEQ ID NO: 363983 - protein, 15 aa, Homo sapiens
  CDR3 for alpha chain variable domain of TCR clone 181992 (TRAV3, TRAJ12)
CAVRYIRDSSYKLIF

SEQ ID NO: 363984 - protein, 15 aa, Homo sapiens
  CDR3 for beta chain variable domain of TCR clone 181992 (TRBV27, TRBJ2-7)
CASSLRNEQGYEQYF

SEQ ID NO: 363985 - protein, 14 aa, Homo sapiens
  CDR3 for alpha chain variable domain of TCR clone 181993 (TRAV26-1, TRAJ45)
CIVRVVGGADRLTF

SEQ ID NO: 363986 - protein, 16 aa, Homo sapiens
  CDR3 for beta chain variable domain of TCR clone 181993 (TRBV7-9, TRBJ1-1)
CASSLTQVPSNTEAFF

SEQ ID NO: 363987 - protein, 14 aa, Homo sapiens
  CDR3 for alpha chain variable domain of TCR clone 181994 (TRAV12-3, TRAJ10)
SHLPLTGGGNKLTF

SEQ ID NO: 363988 - protein, 14 aa, Homo sapiens
  CDR3 for beta chain variable domain of TCR clone 181994 (TRBV4-2, TRBJ2-3)
CASSQPVLTDTQYF

SEQ ID NO: 363989 - protein, 15 aa, Homo sapiens
  CDR3 for alpha chain variable domain of TCR clone 181995 (TRAV14/DV4, TRAJ49)
CAMREGMNTGNQFYF

SEQ ID NO: 363990 - protein, 13 aa, Homo sapiens
  CDR3 for beta chain variable domain of TCR clone 181995 (TRBV20-1, TRBJ1-1)
CSARGGGNTEAFF

SEQ ID NO: 363991 - protein, 14 aa, Homo sapiens
  CDR3 for alpha chain variable domain of TCR clone 181996 (TRAV8-4, TRAJ13)
CAVTLSGGYQKVTF

SEQ ID NO: 363992 - protein, 12 aa, Homo sapiens
  CDR3 for beta chain variable domain of TCR clone 181996 (TRBV2, TRBJ2-1)
CAYGPPGNEQFF

SEQ ID NO: 363993 - protein, 14 aa, Homo sapiens
  CDR3 for alpha chain variable domain of TCR clone 181997 (TRAV8-3, TRAJ35)
CAVVPQGFGNVLHC

SEQ ID NO: 363994 - protein, 13 aa, Homo sapiens
  CDR3 for beta chain variable domain of TCR clone 181997 (TRBV10-3, TRBJ2-5)
CAMTSGAGETQYF

SEQ ID NO: 363995 - protein, 13 aa, Homo sapiens
  CDR3 for alpha chain variable domain of TCR clone 181998 (TRAV13-2, TRAJ48)
CAEMDFGNEQLTF

SEQ ID NO: 363996 - protein, 13 aa, Homo sapiens
  CDR3 for beta chain variable domain of TCR clone 181998 (TRBV12-4, TRBJ1-2)
CASSLRQGKGYTF

SEQ ID NO: 363997 - protein, 14 aa, Homo sapiens
  CDR3 for alpha chain variable domain of TCR clone 181999 (TRAV17, TRAJ57)
CATYPQGGSEKLVF

SEQ ID NO: 363998 - protein, 15 aa, Homo sapiens
  CDR3 for beta chain variable domain of TCR clone 181999 (TRBV5-7, TRBJ2-7)
CASSLGPGRGHEQYF

SEQ ID NO: 363999 - protein, 11 aa, Homo sapiens
  CDR3 for alpha chain variable domain of TCR clone 182000 (TRAV13-1, TRAJ39)
CASHAGNMLTL

SEQ ID NO: 364000 - protein, 15 aa, Homo sapiens
  CDR3 for beta chain variable domain of TCR clone 182000 (TRBV6-3, TRBJ2-7)
CASSSPGTVFYEQYF

SEQ ID NO: 364001 - protein, 15 aa, Homo sapiens
  CDR3 for alpha chain variable domain of TCR clone 182001 (TRAV3, TRAJ9)
CAVRARNTGGFKTIF

SEQ ID NO: 364002 - protein, 12 aa, Homo sapiens
  CDR3 for beta chain variable domain of TCR clone 182001 (TRBV5-1, TRBJ2-3)
CASSLAADTQYF

SEQ ID NO: 364003 - protein, 11 aa, Homo sapiens
  CDR3 for alpha chain variable domain of TCR clone 182002 (TRAV12-1, TRAJ34)
CVLNKGRELIF

SEQ ID NO: 364004 - protein, 12 aa, Homo sapiens
  CDR3 for beta chain variable domain of TCR clone 182002 (TRBV2, TRBJ2-1)
CAYGPPGNEQFF

SEQ ID NO: 364005 - protein, 12 aa, Homo sapiens
  CDR3 for alpha chain variable domain of TCR clone 182003 (TRAV21, TRAJ49)
CAVTNTGNQVYF

SEQ ID NO: 364006 - protein, 17 aa, Homo sapiens
  CDR3 for beta chain variable domain of TCR clone 182003 (TRBV13, TRBJ2-3)
CASSLSRVAGGRNTQYF

SEQ ID NO: 364007 - protein, 18 aa, Homo sapiens
  CDR3 for alpha chain variable domain of TCR clone 182004 (TRAV26-1, TRAJ23)
CIDRVGLEVWNQGGKLIF

SEQ ID NO: 364008 - protein, 16 aa, Homo sapiens
  CDR3 for beta chain variable domain of TCR clone 182004 (TRBV12-4, TRBJ2-5)
CASSFFVRGRQETQYF

SEQ ID NO: 364009 - protein, 13 aa, Homo sapiens
  CDR3 for alpha chain variable domain of TCR clone 182005 (TRAV3, TRAJ8)
CAVRFTGFQKLVL

SEQ ID NO: 364010 - protein, 12 aa, Homo sapiens
  CDR3 for beta chain variable domain of TCR clone 182005 (TRBV2, TRBJ1-2)
CASSGQTYGYTF

SEQ ID NO: 364011 - protein, 13 aa, Homo sapiens
  CDR3 for alpha chain variable domain of TCR clone 182006 (TRAV2, TRAJ24)
CDLHLTAGGNSSL

SEQ ID NO: 364012 - protein, 13 aa, Homo sapiens
  CDR3 for beta chain variable domain of TCR clone 182006 (TRBV7-9, TRBJ1-2)
CASSLKQNYGYTF

SEQ ID NO: 364013 - protein, 12 aa, Homo sapiens
  CDR3 for alpha chain variable domain of TCR clone 182007 (TRAV21, TRAJ58)
CALSASGSRLTF

SEQ ID NO: 364014 - protein, 13 aa, Homo sapiens
  CDR3 for beta chain variable domain of TCR clone 182007 (TRBV5-7, TRBJ1-2)
CASSLGVINGYTF

SEQ ID NO: 364015 - protein, 14 aa, Homo sapiens
  CDR3 for alpha chain variable domain of TCR clone 182008 (TRAV35, TRAJ22)
CAGLRPGSARQLTF

SEQ ID NO: 364016 - protein, 14 aa, Homo sapiens
  CDR3 for beta chain variable domain of TCR clone 182008 (TRBV11-3, TRBJ2-3)
CAISSGQGPDTQYF

SEQ ID NO: 364017 - protein, 23 aa, Homo sapiens
  CDR3 for alpha chain variable domain of TCR clone 182009 (TRAV8-6, TRAJ36)
CAVSDWLGQTTSSLGLERDSTLF

SEQ ID NO: 364018 - protein, 15 aa, Homo sapiens
  CDR3 for beta chain variable domain of TCR clone 182009 (TRBV9, TRBJ1-6)
CASSVAGTGDSPLHF

SEQ ID NO: 364019 - protein, 15 aa, Homo sapiens
  CDR3 for alpha chain variable domain of TCR clone 182010 (TRAV3, TRAJ22)
CAVRDRGGSARQLTF

SEQ ID NO: 364020 - protein, 17 aa, Homo sapiens
  CDR3 for beta chain variable domain of TCR clone 182010 (TRBV13, TRBJ2-3)
CASSLSRVEGGRNTQYF

SEQ ID NO: 364021 - protein, 13 aa, Homo sapiens
  CDR3 for alpha chain variable domain of TCR clone 182011 (TRAV2, TRAJ13)
CAVESGGYQKVTF

SEQ ID NO: 364022 - protein, 13 aa, Homo sapiens
  CDR3 for beta chain variable domain of TCR clone 182011 (TRBV28, TRBJ2-5)
CASSCAGGETQYF

SEQ ID NO: 364023 - protein, 16 aa, Homo sapiens
  CDR3 for alpha chain variable domain of TCR clone 182012 (TRAV30, TRAJ24)
CGTEIVDADSWGKFQF

SEQ ID NO: 364024 - protein, 14 aa, Homo sapiens
  CDR3 for beta chain variable domain of TCR clone 182012 (TRBV12-5, TRBJ2-5)
CASGSRTHKETRYF

SEQ ID NO: 364025 - protein, 15 aa, Homo sapiens
  CDR3 for alpha chain variable domain of TCR clone 182013 (TRAV13-1, TRAJ44)
CAASRGGGTASNLTF

SEQ ID NO: 364026 - protein, 12 aa, Homo sapiens
  CDR3 for beta chain variable domain of TCR clone 182013 (TRBV11-2, TRBJ2-2)
CASSLGGGELFF

SEQ ID NO: 364027 - protein, 10 aa, Homo sapiens
  CDR3 for alpha chain variable domain of TCR clone 182014 (TRAV23/DV6, TRAJ57)
CAAGPTLSQG

SEQ ID NO: 364028 - protein, 14 aa, Homo sapiens
  CDR3 for beta chain variable domain of TCR clone 182014 (TRBV25-1, TRBJ1-1)
CASTHLGGNTEAFF

SEQ ID NO: 364029 - protein, 16 aa, Homo sapiens
  CDR3 for alpha chain variable domain of TCR clone 182015 (TRAV23/DV6, TRAJ9)
CAASIGGNTGGFKTIF

SEQ ID NO: 364030 - protein, 12 aa, Homo sapiens
  CDR3 for beta chain variable domain of TCR clone 182015 (TRBV7-8, TRBJ2-7)
CDSSLGDREQYF

SEQ ID NO: 364031 - protein, 12 aa, Homo sapiens
  CDR3 for alpha chain variable domain of TCR clone 182016 (TRAV25, TRAJ30)
CAGKNRDDKMIF

SEQ ID NO: 364032 - protein, 11 aa, Homo sapiens
  CDR3 for beta chain variable domain of TCR clone 182016 (TRBV12-4, TRBJ2-7)
CATPEKGEQYF

SEQ ID NO: 364033 - protein, 13 aa, Homo sapiens
  CDR3 for alpha chain variable domain of TCR clone 182017 (TRAV12-3, TRAJ33)
CAMSVNSNYQLIW

SEQ ID NO: 364034 - protein, 15 aa, Homo sapiens
  CDR3 for beta chain variable domain of TCR clone 182017 (TRBV7-9, TRBJ2-7)
CASSPGGGLTYEQYF

SEQ ID NO: 364035 - protein, 13 aa, Homo sapiens
  CDR3 for alpha chain variable domain of TCR clone 182018 (TRAV12-2, TRAJ42)
CAVKRGSQGNPIF

SEQ ID NO: 364036 - protein, 12 aa, Homo sapiens
  CDR3 for beta chain variable domain of TCR clone 182018 (TRBV18, TRBJ2-3)
CQLNQNTDTQYF

SEQ ID NO: 364037 - protein, 13 aa, Homo sapiens
  CDR3 for alpha chain variable domain of TCR clone 182019 (TRAV12-1, TRAJ33)
CGDAPDSNSQLIW

SEQ ID NO: 364038 - protein, 12 aa, Homo sapiens
  CDR3 for beta chain variable domain of TCR clone 182019 (TRBV11-2, TRBJ2-2)
CASSLGGGELFF

SEQ ID NO: 364039 - protein, 14 aa, Homo sapiens
  CDR3 for alpha chain variable domain of TCR clone 182020 (TRAV12-3, TRAJ15)
CAMIPPQAGTDLIF

SEQ ID NO: 364040 - protein, 12 aa, Homo sapiens
  CDR3 for beta chain variable domain of TCR clone 182020 (TRBV11-2, TRBJ2-2)
CASSLGGGELFF

SEQ ID NO: 364041 - protein, 20 aa, Homo sapiens
  CDR3 for alpha chain variable domain of TCR clone 182021 (TRAV1-2, TRAJ34)
LLKELQMKDSASPNTDKLIF

SEQ ID NO: 364042 - protein, 11 aa, Homo sapiens
  CDR3 for beta chain variable domain of TCR clone 182021 (TRBV12-4, TRBJ2-3)
CASTATDTQYF

SEQ ID NO: 364043 - protein, 16 aa, Homo sapiens
  CDR3 for alpha chain variable domain of TCR clone 182022 (TRAV30, TRAJ24)
CGTEIVDAGSWGKFQF

SEQ ID NO: 364044 - protein, 18 aa, Homo sapiens
  CDR3 for beta chain variable domain of TCR clone 182022 (TRBV7-9, TRBJ2-7)
CASSLTTSGSRTWYEQYF

SEQ ID NO: 364045 - protein, 15 aa, Homo sapiens
  CDR3 for alpha chain variable domain of TCR clone 182023 (TRAV12-1, TRAJ26)
CALWSEFCLWSRNQI

SEQ ID NO: 364046 - protein, 14 aa, Homo sapiens
  CDR3 for beta chain variable domain of TCR clone 182023 (TRBV5-4, TRBJ2-1)
CASSLDQGLNEQFF

SEQ ID NO: 364047 - protein, 16 aa, Homo sapiens
  CDR3 for alpha chain variable domain of TCR clone 182024 (TRAV3, TRAJ37)
CAVRGRGSGNTGKLIF

SEQ ID NO: 364048 - protein, 14 aa, Homo sapiens
  CDR3 for beta chain variable domain of TCR clone 182024 (TRBV7-2, TRBJ2-7)
CASRSQGAAYEQYF

SEQ ID NO: 364049 - protein, 14 aa, Homo sapiens
  CDR3 for alpha chain variable domain of TCR clone 182025 (TRAV26-1, TRAJ39)
CIVRGSRACNMLTF

SEQ ID NO: 364050 - protein, 15 aa, Homo sapiens
  CDR3 for beta chain variable domain of TCR clone 182025 (TRBV7-9, TRBJ1-5)
CASSQGHQPNQAQHF

SEQ ID NO: 364051 - protein, 15 aa, Homo sapiens
  CDR3 for alpha chain variable domain of TCR clone 182026 (TRAV1-2, TRAJ17)
CAVRGYGAAGNKLTF

SEQ ID NO: 364052 - protein, 15 aa, Homo sapiens
  CDR3 for beta chain variable domain of TCR clone 182026 (TRBV11-2, TRBJ2-5)
APQGGRERPQETQYF

SEQ ID NO: 364053 - protein, 14 aa, Homo sapiens
  CDR3 for alpha chain variable domain of TCR clone 182027 (TRAV17, TRAJ6)
CSTNPAGGSYIPTF

SEQ ID NO: 364054 - protein, 17 aa, Homo sapiens
  CDR3 for beta chain variable domain of TCR clone 182027 (TRBV13, TRBJ2-3)
CASSLSRVAGGRNTQYF

SEQ ID NO: 364055 - protein, 14 aa, Homo sapiens
  CDR3 for alpha chain variable domain of TCR clone 182028 (TRAV1-2, TRAJ16)
CAVNRFSDGQKLLF

SEQ ID NO: 364056 - protein, 14 aa, Homo sapiens
  CDR3 for beta chain variable domain of TCR clone 182028 (TRBV6-1, TRBJ1-6)
CASSGTAYNSPLHL

SEQ ID NO: 364057 - protein, 20 aa, Homo sapiens
  CDR3 for alpha chain variable domain of TCR clone 182029 (TRAV8-3, TRAJ45)
LSTSVLWGSYSGGGADVLTF

SEQ ID NO: 364058 - protein, 11 aa, Homo sapiens
  CDR3 for beta chain variable domain of TCR clone 182029 (TRBV20-1, TRBJ2-5)
CGADRAETQYF

SEQ ID NO: 364059 - protein, 11 aa, Homo sapiens
  CDR3 for alpha chain variable domain of TCR clone 182030 (TRAV12-1, TRAJ31)
CVGRVQCQTHV

SEQ ID NO: 364060 - protein, 17 aa, Homo sapiens
  CDR3 for beta chain variable domain of TCR clone 182030 (TRBV13, TRBJ2-3)
CASSLSRVAGGRNTQYF

SEQ ID NO: 364061 - protein, 20 aa, Homo sapiens
  CDR3 for alpha chain variable domain of TCR clone 182031 (TRAV4, TRAJ29)
CCVLLPRGCVPFSGNTPLFF

SEQ ID NO: 364062 - protein, 12 aa, Homo sapiens
  CDR3 for beta chain variable domain of TCR clone 182031 (TRBV6-1, TRBJ2-7)
CASSDYSYEQYF

SEQ ID NO: 364063 - protein, 14 aa, Homo sapiens
  CDR3 for alpha chain variable domain of TCR clone 182032 (TRAV14/DV4, TRAJ41)
CARGGPDSGYALNF

SEQ ID NO: 364064 - protein, 15 aa, Homo sapiens
  CDR3 for beta chain variable domain of TCR clone 182032 (TRBV19, TRBJ2-1)
CASSIQATSYNEQFC

SEQ ID NO: 364065 - protein, 14 aa, Homo sapiens
  CDR3 for alpha chain variable domain of TCR clone 182033 (TRAV26-1, TRAJ45)
CIEVTGGGADGLTF

SEQ ID NO: 364066 - protein, 15 aa, Homo sapiens
  CDR3 for beta chain variable domain of TCR clone 182033 (TRBV7-9, TRBJ1-5)
CASSQGHQPNQPQHF

SEQ ID NO: 364067 - protein, 14 aa, Homo sapiens
  CDR3 for alpha chain variable domain of TCR clone 182034 (TRAV16, TRAJ22)
CALRGQGSARQLTF

SEQ ID NO: 364068 - protein, 15 aa, Homo sapiens
  CDR3 for beta chain variable domain of TCR clone 182034 (TRBV6-3, TRBJ2-7)
CASSSPGTVFYEQYF

SEQ ID NO: 364069 - protein, 14 aa, Homo sapiens
  CDR3 for alpha chain variable domain of TCR clone 182035 (TRAV8-3, TRAJ4)
CAVGASGGYNKLIF

SEQ ID NO: 364070 - protein, 13 aa, Homo sapiens
  CDR3 for beta chain variable domain of TCR clone 182035 (TRBV4-2, TRBJ1-1)
CASSQAGNTDAFF

SEQ ID NO: 364071 - protein, 13 aa, Homo sapiens
  CDR3 for alpha chain variable domain of TCR clone 182036 (TRAV2, TRAJ15)
CAVASQAGTALIF

SEQ ID NO: 364072 - protein, 14 aa, Homo sapiens
  CDR3 for beta chain variable domain of TCR clone 182036 (TRBV25-1, TRBJ1-1)
CASTHLEGNTEAFF

SEQ ID NO: 364073 - protein, 14 aa, Homo sapiens
  CDR3 for alpha chain variable domain of TCR clone 182037 (TRAV1-2, TRAJ16)
CAVNRFSDGQKLLF

SEQ ID NO: 364074 - protein, 17 aa, Homo sapiens
  CDR3 for beta chain variable domain of TCR clone 182037 (TRBV7-9, TRBJ2-1)
CASSLVASYPSYNEQLF

SEQ ID NO: 364075 - protein, 15 aa, Homo sapiens
  CDR3 for alpha chain variable domain of TCR clone 182038 (TRAV21, TRAJ53)
CATLNSGGSNYKLTF

SEQ ID NO: 364076 - protein, 17 aa, Homo sapiens
  CDR3 for beta chain variable domain of TCR clone 182038 (TRBV20-1, TRBJ2-2)
CSASGSGPGGLTGELFF

SEQ ID NO: 364077 - protein, 14 aa, Homo sapiens
  CDR3 for alpha chain variable domain of TCR clone 182039 (TRAV13-1, TRAJ35)
FAASKGGFGNVLHC

SEQ ID NO: 364078 - protein, 13 aa, Homo sapiens
  CDR3 for beta chain variable domain of TCR clone 182039 (TRBV7-3, TRBJ1-1)
CDSSQDWGAEAFF

SEQ ID NO: 364079 - protein, 12 aa, Homo sapiens
  CDR3 for alpha chain variable domain of TCR clone 182040 (TRAV20, TRAJ49)
CAVNKDGNQFYF

SEQ ID NO: 364080 - protein, 14 aa, Homo sapiens
  CDR3 for beta chain variable domain of TCR clone 182040 (TRBV7-9, TRBJ2-4)
CASSLAMGGNIQYF

SEQ ID NO: 364081 - protein, 18 aa, Homo sapiens
  CDR3 for alpha chain variable domain of TCR clone 182041 (TRAV9-2, TRAJ52)
CALSRHNAGGTSYGKVTF

SEQ ID NO: 364082 - protein, 13 aa, Homo sapiens
  CDR3 for beta chain variable domain of TCR clone 182041 (TRBV7-9, TRBJ1-2)
CASSLKQNYGYTF

SEQ ID NO: 364083 - protein, 16 aa, Homo sapiens
  CDR3 for alpha chain variable domain of TCR clone 182042 (TRAV27, TRAJ13)
CAGAKSDSGGYQKVTF

SEQ ID NO: 364084 - protein, 15 aa, Homo sapiens
  CDR3 for beta chain variable domain of TCR clone 182042 (TRBV2, TRBJ1-2)
CTSRNRESGNYGYTF

SEQ ID NO: 364085 - protein, 12 aa, Homo sapiens
  CDR3 for alpha chain variable domain of TCR clone 182043 (TRAV27, TRAJ9)
CAGESGGFKTIF

SEQ ID NO: 364086 - protein, 15 aa, Homo sapiens
  CDR3 for beta chain variable domain of TCR clone 182043 (TRBV19, TRBJ2-4)
CASSTPGIAKNIQYF

SEQ ID NO: 364087 - protein, 16 aa, Homo sapiens
  CDR3 for alpha chain variable domain of TCR clone 182044 (TRAV16, TRAJ52)
CALSGVGGTSYGKLTF

SEQ ID NO: 364088 - protein, 14 aa, Homo sapiens
  CDR3 for beta chain variable domain of TCR clone 182044 (TRBV19, TRBJ1-2)
CASGLQGQAYGDTF

SEQ ID NO: 364089 - protein, 16 aa, Homo sapiens
  CDR3 for alpha chain variable domain of TCR clone 182045 (TRAV14/DV4, TRAJ54)
CAMREGLAWGAQKLVF

SEQ ID NO: 364090 - protein, 16 aa, Homo sapiens
  CDR3 for beta chain variable domain of TCR clone 182045 (TRBV2, TRBJ2-5)
CASSETQGVGEETQYF

SEQ ID NO: 364091 - protein, 11 aa, Homo sapiens
  CDR3 for alpha chain variable domain of TCR clone 182046 (TRAV21, TRAJ34)
CAHYNTDKLIF

SEQ ID NO: 364092 - protein, 18 aa, Homo sapiens
  CDR3 for beta chain variable domain of TCR clone 182046 (TRBV20-1, TRBJ2-3)
CSASGLAGGPGTTDTQYF

SEQ ID NO: 364093 - protein, 13 aa, Homo sapiens
  CDR3 for alpha chain variable domain of TCR clone 182047 (TRAV35, TRAJ48)
CAGHEFGNEKLTF

SEQ ID NO: 364094 - protein, 14 aa, Homo sapiens
  CDR3 for beta chain variable domain of TCR clone 182047 (TRBV19, TRBJ2-1)
CANPTCVLSGEQFF

SEQ ID NO: 364095 - protein, 16 aa, Homo sapiens
  CDR3 for alpha chain variable domain of TCR clone 182048 (TRAV16, TRAJ52)
CALSAAGGTSYGKLTF

SEQ ID NO: 364096 - protein, 12 aa, Homo sapiens
  CDR3 for beta chain variable domain of TCR clone 182048 (TRBV12-4, TRBJ1-3)
CASSFSGKHLYF

SEQ ID NO: 364097 - protein, 14 aa, Homo sapiens
  CDR3 for alpha chain variable domain of TCR clone 182049 (TRAV12-1, TRAJ30)
CVVNIGGRDEKIIF

SEQ ID NO: 364098 - protein, 14 aa, Homo sapiens
  CDR3 for beta chain variable domain of TCR clone 182049 (TRBV20-1, TRBJ2-1)
CSAQIGGSANEQFF

SEQ ID NO: 364099 - protein, 14 aa, Homo sapiens
  CDR3 for alpha chain variable domain of TCR clone 182050 (TRAV3, TRAJ6)
CAVSDPWGSYIPTF

SEQ ID NO: 364100 - protein, 15 aa, Homo sapiens
  CDR3 for beta chain variable domain of TCR clone 182050 (TRBV20-1, TRBJ2-5)
CSAPPRTGFGETQYF

SEQ ID NO: 364101 - protein, 13 aa, Homo sapiens
  CDR3 for alpha chain variable domain of TCR clone 182051 (TRAV12-3, TRAJ7)
CAMSASGNIRLAF

SEQ ID NO: 364102 - protein, 14 aa, Homo sapiens
  CDR3 for beta chain variable domain of TCR clone 182051 (TRBV13, TRBJ2-5)
CASSLGPRGETQYF

SEQ ID NO: 364103 - protein, 17 aa, Homo sapiens
  CDR3 for alpha chain variable domain of TCR clone 182052 (TRAV13-1, TRAJ28)
CAASPPYSGAGSYQLTF

SEQ ID NO: 364104 - protein, 14 aa, Homo sapiens
  CDR3 for beta chain variable domain of TCR clone 182052 (TRBV19, TRBJ2-5)
CASSSSGIQETQYF

SEQ ID NO: 364105 - protein, 11 aa, Homo sapiens
  CDR3 for alpha chain variable domain of TCR clone 182053 (TRAV1-2, TRAJ31)
CAVNNNARLMF

SEQ ID NO: 364106 - protein, 12 aa, Homo sapiens
  CDR3 for beta chain variable domain of TCR clone 182053 (TRBV11-2, TRBJ2-4)
CASSSASGSEYF

SEQ ID NO: 364107 - protein, 12 aa, Homo sapiens
  CDR3 for alpha chain variable domain of TCR clone 182054 (TRAV16, TRAJ22)
CALEVYARQLTF

SEQ ID NO: 364108 - protein, 14 aa, Homo sapiens
  CDR3 for beta chain variable domain of TCR clone 182054 (TRBV11-2, TRBJ2-3)
CASSSIASTDTQYF

SEQ ID NO: 364109 - protein, 14 aa, Homo sapiens
  CDR3 for alpha chain variable domain of TCR clone 182055 (TRAV8-3, TRAJ15)
CAVGRHQAGTALIF

SEQ ID NO: 364110 - protein, 15 aa, Homo sapiens
  CDR3 for beta chain variable domain of TCR clone 182055 (TRBV5-4, TRBJ2-3)
CASSLYRGRTDTQYF

SEQ ID NO: 364111 - protein, 16 aa, Homo sapiens
  CDR3 for alpha chain variable domain of TCR clone 182056 (TRAV30, TRAJ24)
CGTEIVDADSWGKFQF

SEQ ID NO: 364112 - protein, 18 aa, Homo sapiens
  CDR3 for beta chain variable domain of TCR clone 182056 (TRBV11-2, TRBJ2-6)
CASSLNPFLGTGANVLTV

SEQ ID NO: 364113 - protein, 11 aa, Homo sapiens
  CDR3 for alpha chain variable domain of TCR clone 182057 (TRAV17, TRAJ49)
CATDAGNQFYF

SEQ ID NO: 364114 - protein, 13 aa, Homo sapiens
  CDR3 for beta chain variable domain of TCR clone 182057 (TRBV7-2, TRBJ1-1)
CASSSAGNTEAFF

SEQ ID NO: 364115 - protein, 14 aa, Homo sapiens
  CDR3 for alpha chain variable domain of TCR clone 182058 (TRAV26-1, TRAJ31)
CIALPPNNNARLMF

SEQ ID NO: 364116 - protein, 16 aa, Homo sapiens
  CDR3 for beta chain variable domain of TCR clone 182058 (TRBV10-2, TRBJ2-7)
CASSESPGSSGFEQDF

SEQ ID NO: 364117 - protein, 14 aa, Homo sapiens
  CDR3 for alpha chain variable domain of TCR clone 182059 (TRAV14/DV4, TRAJ15)
RAMRRDQAGTALIF

SEQ ID NO: 364118 - protein, 14 aa, Homo sapiens
  CDR3 for beta chain variable domain of TCR clone 182059 (TRBV28, TRBJ2-7)
CASRAAGLGYEQYF

SEQ ID NO: 364119 - protein, 12 aa, Homo sapiens
  CDR3 for alpha chain variable domain of TCR clone 182060 (TRAV8-4, TRAJ43)
CAVSVNNNDTRF

SEQ ID NO: 364120 - protein, 14 aa, Homo sapiens
  CDR3 for beta chain variable domain of TCR clone 182060 (TRBV11-2, TRBJ1-2)
CASSLGTANYGYTF

SEQ ID NO: 364121 - protein, 13 aa, Homo sapiens
  CDR3 for alpha chain variable domain of TCR clone 182061 (TRAV1-2, TRAJ20)
CAVRDGNDYELSF

SEQ ID NO: 364122 - protein, 13 aa, Homo sapiens
  CDR3 for beta chain variable domain of TCR clone 182061 (TRBV20-1, TRBJ1-1)
CSARGGGNTEAFF

SEQ ID NO: 364123 - protein, 17 aa, Homo sapiens
  CDR3 for alpha chain variable domain of TCR clone 182062 (TRAV26-1, TRAJ58)
CIVRVGAEETSGSRLTF

SEQ ID NO: 364124 - protein, 13 aa, Homo sapiens
  CDR3 for beta chain variable domain of TCR clone 182062 (TRBV4-2, TRBJ1-1)
CASSQAGNTEAFF

SEQ ID NO: 364125 - protein, 14 aa, Homo sapiens
  CDR3 for alpha chain variable domain of TCR clone 182063 (TRAV35, TRAJ54)
CAGYLIQGAQKLVF

SEQ ID NO: 364126 - protein, 14 aa, Homo sapiens
  CDR3 for beta chain variable domain of TCR clone 182063 (TRBV7-2, TRBJ2-5)
CTSSVGWAEETQYF

SEQ ID NO: 364127 - protein, 12 aa, Homo sapiens
  CDR3 for alpha chain variable domain of TCR clone 182064 (TRAV12-3, TRAJ17)
CAMTLTGKKLTF

SEQ ID NO: 364128 - protein, 17 aa, Homo sapiens
  CDR3 for beta chain variable domain of TCR clone 182064 (TRBV11-2, TRBJ2-1)
CASSLYPPGVEYNEQFF

SEQ ID NO: 364129 - protein, 13 aa, Homo sapiens
  CDR3 for alpha chain variable domain of TCR clone 182065 (TRAV12-3, TRAJ4)
CAMTERGYNKLIF

SEQ ID NO: 364130 - protein, 17 aa, Homo sapiens
  CDR3 for beta chain variable domain of TCR clone 182065 (TRBV28, TRBJ2-3)
CAGSLQVGPSSTDTQYF

SEQ ID NO: 364131 - protein, 14 aa, Homo sapiens
  CDR3 for alpha chain variable domain of TCR clone 182066 (TRAV12-2, TRAJ17)
CAVLFKAAGNKLTF

SEQ ID NO: 364132 - protein, 17 aa, Homo sapiens
  CDR3 for beta chain variable domain of TCR clone 182066 (TRBV20-1, TRBJ2-2)
GSASGSGQGGLTGELVF

SEQ ID NO: 364133 - protein, 15 aa, Homo sapiens
  CDR3 for alpha chain variable domain of TCR clone 182067 (TRAV3, TRAJ20)
CAVRDIKLSDYEPSF

SEQ ID NO: 364134 - protein, 15 aa, Homo sapiens
  CDR3 for beta chain variable domain of TCR clone 182067 (TRBV7-9, TRBJ1-6)
CASSSPGRGNSPLHF

SEQ ID NO: 364135 - protein, 15 aa, Homo sapiens
  CDR3 for alpha chain variable domain of TCR clone 182068 (TRAV27, TRAJ38)
CAARRNAGNNRKLIW

SEQ ID NO: 364136 - protein, 15 aa, Homo sapiens
  CDR3 for beta chain variable domain of TCR clone 182068 (TRBV5-1, TRBJ2-1)
CASSAPRAPYNEQFF

SEQ ID NO: 364137 - protein, 14 aa, Homo sapiens
  CDR3 for alpha chain variable domain of TCR clone 182069 (TRAV2, TRAJ30)
CAVEGSNRDDKIIF

SEQ ID NO: 364138 - protein, 13 aa, Homo sapiens
  CDR3 for beta chain variable domain of TCR clone 182069 (TRBV4-2, TRBJ1-1)
CASSQAGNTEAFF

SEQ ID NO: 364139 - protein, 17 aa, Homo sapiens
  CDR3 for alpha chain variable domain of TCR clone 182070 (TRAV3, TRAJ42)
CAVRDRDYGGSQGNLIF

SEQ ID NO: 364140 - protein, 12 aa, Homo sapiens
  CDR3 for beta chain variable domain of TCR clone 182070 (TRBV7-9, TRBJ2-7)
CASSLEGYEQYF

SEQ ID NO: 364141 - protein, 11 aa, Homo sapiens
  CDR3 for alpha chain variable domain of TCR clone 182071 (TRAV12-1, TRAJ21)
CVVYNFNKFYF

SEQ ID NO: 364142 - protein, 15 aa, Homo sapiens
  CDR3 for beta chain variable domain of TCR clone 182071 (TRBV10-2, TRBJ2-6)
CASSEQGTGANVLTF

SEQ ID NO: 364143 - protein, 15 aa, Homo sapiens
  CDR3 for alpha chain variable domain of TCR clone 182072 (TRAV3, TRAJ22)
CAVRDRGGSASQLAF

SEQ ID NO: 364144 - protein, 16 aa, Homo sapiens
  CDR3 for beta chain variable domain of TCR clone 182072 (TRBV5-4, TRBJ2-3)
CASQQPGAGGADTQYF

SEQ ID NO: 364145 - protein, 18 aa, Homo sapiens
  CDR3 for alpha chain variable domain of TCR clone 182073 (TRAV13-1, TRAJ52)
CAAKNPNAGGTSYGRLTF

SEQ ID NO: 364146 - protein, 15 aa, Homo sapiens
  CDR3 for beta chain variable domain of TCR clone 182073 (TRBV28, TRBJ2-3)
CASSPDRQGANTQYV

SEQ ID NO: 364147 - protein, 12 aa, Homo sapiens
  CDR3 for alpha chain variable domain of TCR clone 182074 (TRAV12-1, TRAJ16)
CGERARWPEAAL

SEQ ID NO: 364148 - protein, 15 aa, Homo sapiens
  CDR3 for beta chain variable domain of TCR clone 182074 (TRBV6-3, TRBJ2-7)
CASSSPGTVFYEQYF

SEQ ID NO: 364149 - protein, 13 aa, Homo sapiens
  CDR3 for alpha chain variable domain of TCR clone 182075 (TRAV35, TRAJ43)
CAGYPYNNNDMRF

SEQ ID NO: 364150 - protein, 15 aa, Homo sapiens
  CDR3 for beta chain variable domain of TCR clone 182075 (TRBV25-1, TRBJ1-4)
CASSKRIATNEKLFS

SEQ ID NO: 364151 - protein, 12 aa, Homo sapiens
  CDR3 for alpha chain variable domain of TCR clone 182076 (TRAV2, TRAJ32)
CAVGGATNKLIF

SEQ ID NO: 364152 - protein, 14 aa, Homo sapiens
  CDR3 for beta chain variable domain of TCR clone 182076 (TRBV9, TRBJ2-7)
CASSVGVGSYEQYF

SEQ ID NO: 364153 - protein, 12 aa, Homo sapiens
  CDR3 for alpha chain variable domain of TCR clone 182077 (TRAV12-2, TRAJ10)
WGVTGGGNKLTF

SEQ ID NO: 364154 - protein, 11 aa, Homo sapiens
  CDR3 for beta chain variable domain of TCR clone 182077 (TRBV12-4, TRBJ2-3)
CASTATDTQYF

SEQ ID NO: 364155 - protein, 14 aa, Homo sapiens
  CDR3 for alpha chain variable domain of TCR clone 182078 (TRAV1-2, TRAJ8)
CAVREDTGFQKLVV

SEQ ID NO: 364156 - protein, 12 aa, Homo sapiens
  CDR3 for beta chain variable domain of TCR clone 182078 (TRBV11-2, TRBJ2-2)
CASSLGGGELLF

SEQ ID NO: 364157 - protein, 17 aa, Homo sapiens
  CDR3 for alpha chain variable domain of TCR clone 182079 (TRAV29/DV5, TRAJ45)
CAADGPFSGGGADGLTF

SEQ ID NO: 364158 - protein, 11 aa, Homo sapiens
  CDR3 for beta chain variable domain of TCR clone 182079 (TRBV11-2, TRBJ2-2)
CASSLPGELFF

SEQ ID NO: 364159 - protein, 15 aa, Homo sapiens
  CDR3 for alpha chain variable domain of TCR clone 182080 (TRAV3, TRAJ23)
CAVRDRGNQGGKLIF

SEQ ID NO: 364160 - protein, 12 aa, Homo sapiens
  CDR3 for beta chain variable domain of TCR clone 182080 (TRBV12-4, TRBJ2-7)
CASSLGGYEQYF

SEQ ID NO: 364161 - protein, 12 aa, Homo sapiens
  CDR3 for alpha chain variable domain of TCR clone 182081 (TRAV23/DV6, TRAJ32)
FSMPGATNKLIF

SEQ ID NO: 364162 - protein, 17 aa, Homo sapiens
  CDR3 for beta chain variable domain of TCR clone 182081 (TRBV13, TRBJ2-3)
CASSSLGTSGLTDTQYF

SEQ ID NO: 364163 - protein, 16 aa, Homo sapiens
  CDR3 for alpha chain variable domain of TCR clone 182082 (TRAV30, TRAJ24)
CGTEIVDADSWGKFLF

SEQ ID NO: 364164 - protein, 12 aa, Homo sapiens
  CDR3 for beta chain variable domain of TCR clone 182082 (TRBV11-2, TRBJ2-2)
CASSLGGGELFF

SEQ ID NO: 364165 - protein, 12 aa, Homo sapiens
  CDR3 for alpha chain variable domain of TCR clone 182083 (TRAV1-2, TRAJ8)
CAVRTGFQKLVF

SEQ ID NO: 364166 - protein, 16 aa, Homo sapiens
  CDR3 for beta chain variable domain of TCR clone 182083 (TRBV13, TRBJ2-2)
CASSPRTGEHTGELFF

SEQ ID NO: 364167 - protein, 11 aa, Homo sapiens
  CDR3 for alpha chain variable domain of TCR clone 182084 (TRAV2, TRAJ24)
CAPSQLGKLQF

SEQ ID NO: 364168 - protein, 17 aa, Homo sapiens
  CDR3 for beta chain variable domain of TCR clone 182084 (TRBV5-1, TRBJ2-1)
CASSTGTSGYSYNEQFF

SEQ ID NO: 364169 - protein, 16 aa, Homo sapiens
  CDR3 for alpha chain variable domain of TCR clone 182085 (TRAV3, TRAJ37)
CAVRPHGFGNTGKLIF

SEQ ID NO: 364170 - protein, 15 aa, Homo sapiens
  CDR3 for beta chain variable domain of TCR clone 182085 (TRBV10-3, TRBJ2-3)
CAISLTSGGTDTQYF

SEQ ID NO: 364171 - protein, 13 aa, Homo sapiens
  CDR3 for alpha chain variable domain of TCR clone 182086 (TRAV38-2/DV8, TRAJ34)
CAYRNYNTDKLIF

SEQ ID NO: 364172 - protein, 13 aa, Homo sapiens
  CDR3 for beta chain variable domain of TCR clone 182086 (TRBV24-1, TRBJ2-2)
CATSDWSTGELFF

SEQ ID NO: 364173 - protein, 14 aa, Homo sapiens
  CDR3 for alpha chain variable domain of TCR clone 182087 (TRAV21, TRAJ57)
CAVSREGGSEKLVF

SEQ ID NO: 364174 - protein, 14 aa, Homo sapiens
  CDR3 for beta chain variable domain of TCR clone 182087 (TRBV7-2, TRBJ2-7)
CASRSQGAAYEQYF

SEQ ID NO: 364175 - protein, 15 aa, Homo sapiens
  CDR3 for alpha chain variable domain of TCR clone 182088 (TRAV8-6, TRAJ42)
CAVSGNGGSQGNLIF

SEQ ID NO: 364176 - protein, 13 aa, Homo sapiens
  CDR3 for beta chain variable domain of TCR clone 182088 (TRBV20-1, TRBJ1-1)
CSAGTVGNTEAFF

SEQ ID NO: 364177 - protein, 13 aa, Homo sapiens
  CDR3 for alpha chain variable domain of TCR clone 182089 (TRAV26-1, TRAJ40)
CIVATSGTYKYIF

SEQ ID NO: 364178 - protein, 14 aa, Homo sapiens
  CDR3 for beta chain variable domain of TCR clone 182089 (TRBV7-2, TRBJ1-1)
CASSFLTGTTEAFF

SEQ ID NO: 364179 - protein, 16 aa, Homo sapiens
  CDR3 for alpha chain variable domain of TCR clone 182090 (TRAV12-2, TRAJ40)
CAVIRGGTSGTDKYIF

SEQ ID NO: 364180 - protein, 13 aa, Homo sapiens
  CDR3 for beta chain variable domain of TCR clone 182090 (TRBV7-9, TRBJ1-2)
CASSLKQNYGYTF

SEQ ID NO: 364181 - protein, 10 aa, Homo sapiens
  CDR3 for alpha chain variable domain of TCR clone 182091 (TRAV1-2, TRAJ20)
CACNDHKLSF

SEQ ID NO: 364182 - protein, 16 aa, Homo sapiens
  CDR3 for beta chain variable domain of TCR clone 182091 (TRBV20-1, TRBJ2-1)
CSARDLKQGMNNEQFF

SEQ ID NO: 364183 - protein, 14 aa, Homo sapiens
  CDR3 for alpha chain variable domain of TCR clone 182092 (TRAV17, TRAJ57)
CATDPQGGSEKLVF

SEQ ID NO: 364184 - protein, 14 aa, Homo sapiens
  CDR3 for beta chain variable domain of TCR clone 182092 (TRBV6-1, TRBJ1-3)
CASVQGGGENTIYF

SEQ ID NO: 364185 - protein, 19 aa, Homo sapiens
  CDR3 for alpha chain variable domain of TCR clone 182093 (TRAV1-2, TRAJ26)
CLLPLCCERPDNYGQHFVF

SEQ ID NO: 364186 - protein, 13 aa, Homo sapiens
  CDR3 for beta chain variable domain of TCR clone 182093 (TRBV10-3, TRBJ1-2)
CAISERDSYGYTF

SEQ ID NO: 364187 - protein, 15 aa, Homo sapiens
  CDR3 for alpha chain variable domain of TCR clone 182094 (TRAV3, TRAJ22)
CAVRDRGGSARQLTF

SEQ ID NO: 364188 - protein, 16 aa, Homo sapiens
  CDR3 for beta chain variable domain of TCR clone 182094 (TRBV5-4, TRBJ2-3)
CASQQPGAGVSDTQYF

SEQ ID NO: 364189 - protein, 10 aa, Homo sapiens
  CDR3 for alpha chain variable domain of TCR clone 182095 (TRAV20, TRAJ22)
CAAPSRQLTF

SEQ ID NO: 364190 - protein, 14 aa, Homo sapiens
  CDR3 for beta chain variable domain of TCR clone 182095 (TRBV19, TRBJ2-1)
CASSMGSGATEQSF

SEQ ID NO: 364191 - protein, 13 aa, Homo sapiens
  CDR3 for alpha chain variable domain of TCR clone 182096 (TRAV3, TRAJ27)
CAVRPLGAGKSTS

SEQ ID NO: 364192 - protein, 14 aa, Homo sapiens
  CDR3 for beta chain variable domain of TCR clone 182096 (TRBV7-2, TRBJ2-7)
CASSPKTSFYEQYF

SEQ ID NO: 364193 - protein, 14 aa, Homo sapiens
  CDR3 for alpha chain variable domain of TCR clone 182097 (TRAV6, TRAJ6)
CALPTSGGSYIPTF

SEQ ID NO: 364194 - protein, 17 aa, Homo sapiens
  CDR3 for beta chain variable domain of TCR clone 182097 (TRBV5-1, TRBJ2-5)
FASSPVALGQNQETQYF

SEQ ID NO: 364195 - protein, 15 aa, Homo sapiens
  CDR3 for alpha chain variable domain of TCR clone 182098 (TRAV26-1, TRAJ42)
FIVRVKGGSQGNLIF

SEQ ID NO: 364196 - protein, 14 aa, Homo sapiens
  CDR3 for beta chain variable domain of TCR clone 182098 (TRBV19, TRBJ2-2)
CATTGHAYTGELFF

SEQ ID NO: 364197 - protein, 14 aa, Homo sapiens
  CDR3 for alpha chain variable domain of TCR clone 182099 (TRAV4, TRAJ20)
CLVGDFINDCKLSF

SEQ ID NO: 364198 - protein, 15 aa, Homo sapiens
  CDR3 for beta chain variable domain of TCR clone 182099 (TRBV9, TRBJ1-6)
CASSVAGTGDSPLHF

SEQ ID NO: 364199 - protein, 16 aa, Homo sapiens
  CDR3 for alpha chain variable domain of TCR clone 182100 (TRAV30, TRAJ24)
CGTEIVDADSWGKFQF

SEQ ID NO: 364200 - protein, 15 aa, Homo sapiens
  CDR3 for beta chain variable domain of TCR clone 182100 (TRBV20-1, TRBJ2-7)
CSARDRVSGMDEQFF

SEQ ID NO: 364201 - protein, 12 aa, Homo sapiens
  CDR3 for alpha chain variable domain of TCR clone 182101 (TRAV8-3, TRAJ26)
CAGDNYGQNFVF

SEQ ID NO: 364202 - protein, 13 aa, Homo sapiens
  CDR3 for beta chain variable domain of TCR clone 182101 (TRBV4-1, TRBJ2-5)
CASSLTRGETQYF

SEQ ID NO: 364203 - protein, 14 aa, Homo sapiens
  CDR3 for alpha chain variable domain of TCR clone 182102 (TRAV9-2, TRAJ39)
CALYIYNAGNMLTL

SEQ ID NO: 364204 - protein, 12 aa, Homo sapiens
  CDR3 for beta chain variable domain of TCR clone 182102 (TRBV7-2, TRBJ2-5)
CASSQYQETQYF

SEQ ID NO: 364205 - protein, 20 aa, Homo sapiens
  CDR3 for alpha chain variable domain of TCR clone 182103 (TRAV12-1, TRAJ42)
SSVIQPPTSVKGGSQGHLIF

SEQ ID NO: 364206 - protein, 18 aa, Homo sapiens
  CDR3 for beta chain variable domain of TCR clone 182103 (TRBV11-2, TRBJ2-3)
CASSVGGASRGAPNTQYF

SEQ ID NO: 364207 - protein, 19 aa, Homo sapiens
  CDR3 for alpha chain variable domain of TCR clone 182104 (TRAV13-1, TRAJ52)
CAASSSPNAGGTIYGKLTF

SEQ ID NO: 364208 - protein, 15 aa, Homo sapiens
  CDR3 for beta chain variable domain of TCR clone 182104 (TRBV9, TRBJ1-6)
CASSTGGGVDSPLHF

SEQ ID NO: 364209 - protein, 16 aa, Homo sapiens
  CDR3 for alpha chain variable domain of TCR clone 182105 (TRAV3, TRAJ21)
CAVRDIEIGNFNKFYF

SEQ ID NO: 364210 - protein, 16 aa, Homo sapiens
  CDR3 for beta chain variable domain of TCR clone 182105 (TRBV12-4, TRBJ1-5)
CASSRPVGGSNQPQHF

SEQ ID NO: 364211 - protein, 12 aa, Homo sapiens
  CDR3 for alpha chain variable domain of TCR clone 182106 (TRAV9-2, TRAJ26)
CALRGYGQIFVF

SEQ ID NO: 364212 - protein, 12 aa, Homo sapiens
  CDR3 for beta chain variable domain of TCR clone 182106 (TRBV29-1, TRBJ2-3)
CSVTGGADTQYF

SEQ ID NO: 364213 - protein, 16 aa, Homo sapiens
  CDR3 for alpha chain variable domain of TCR clone 182107 (TRAV16, TRAJ52)
CALSAAGGTSYGTLTF

SEQ ID NO: 364214 - protein, 17 aa, Homo sapiens
  CDR3 for beta chain variable domain of TCR clone 182107 (TRBV11-2, TRBJ2-1)
CASSLYPPGVEYNEQFF

SEQ ID NO: 364215 - protein, 14 aa, Homo sapiens
  CDR3 for alpha chain variable domain of TCR clone 182108 (TRAV8-3, TRAJ31)
CAVGRGLNNARLRF

SEQ ID NO: 364216 - protein, 15 aa, Homo sapiens
  CDR3 for beta chain variable domain of TCR clone 182108 (TRBV7-2, TRBJ2-2)
CASSLAGGLTGELFF

SEQ ID NO: 364217 - protein, 12 aa, Homo sapiens
  CDR3 for alpha chain variable domain of TCR clone 182109 (TRAV27, TRAJ33)
CAGDGSNYQLIW

SEQ ID NO: 364218 - protein, 14 aa, Homo sapiens
  CDR3 for beta chain variable domain of TCR clone 182109 (TRBV7-2, TRBJ1-6)
CASSLQGANSPLHF

SEQ ID NO: 364219 - protein, 13 aa, Homo sapiens
  CDR3 for alpha chain variable domain of TCR clone 182110 (TRAV3, TRAJ21)
CAVREPDFNKFYF

SEQ ID NO: 364220 - protein, 15 aa, Homo sapiens
  CDR3 for beta chain variable domain of TCR clone 182110 (TRBV5-1, TRBJ1-2)
CASSYPGTGSSGYTF

SEQ ID NO: 364221 - protein, 16 aa, Homo sapiens
  CDR3 for alpha chain variable domain of TCR clone 182111 (TRAV1-2, TRAJ10)
CAVRGVLTGGGNKLTF

SEQ ID NO: 364222 - protein, 15 aa, Homo sapiens
  CDR3 for beta chain variable domain of TCR clone 182111 (TRBV6-6, TRBJ2-7)
CASSYSYGGSYEQYF

SEQ ID NO: 364223 - protein, 14 aa, Homo sapiens
  CDR3 for alpha chain variable domain of TCR clone 182112 (TRAV8-3, TRAJ4)
CAVGAAGGYNKLIF

SEQ ID NO: 364224 - protein, 14 aa, Homo sapiens
  CDR3 for beta chain variable domain of TCR clone 182112 (TRBV7-2, TRBJ2-7)
CAGSPKTSFYEQYF

SEQ ID NO: 364225 - protein, 13 aa, Homo sapiens
  CDR3 for alpha chain variable domain of TCR clone 182113 (TRAV29/DV5, TRAJ31)
CAASRNNNARLMF

SEQ ID NO: 364226 - protein, 19 aa, Homo sapiens
  CDR3 for beta chain variable domain of TCR clone 182113 (TRBV2, TRBJ2-2)
CASSQPGLAGGGNTGELFF

SEQ ID NO: 364227 - protein, 11 aa, Homo sapiens
  CDR3 for alpha chain variable domain of TCR clone 182114 (TRAV12-1, TRAJ21)
CVVNNFNKFYF

SEQ ID NO: 364228 - protein, 17 aa, Homo sapiens
  CDR3 for beta chain variable domain of TCR clone 182114 (TRBV18, TRBJ2-1)
CASSKGLSGGADNEQLF

SEQ ID NO: 364229 - protein, 14 aa, Homo sapiens
  CDR3 for alpha chain variable domain of TCR clone 182115 (TRAV1-2, TRAJ8)
CAVREDTGFHKLVF

SEQ ID NO: 364230 - protein, 22 aa, Homo sapiens
  CDR3 for beta chain variable domain of TCR clone 182115 (TRBV7-3, TRBJ2-2)
GGTQPCISVPAAQEDTPGSCFF

SEQ ID NO: 364231 - protein, 17 aa, Homo sapiens
  CDR3 for alpha chain variable domain of TCR clone 182116 (TRAV3, TRAJ6)
CAVRDGPRAVGSYIPTF

SEQ ID NO: 364232 - protein, 16 aa, Homo sapiens
  CDR3 for beta chain variable domain of TCR clone 182116 (TRBV4-1, TRBJ2-7)
CASSLTAGQATYEQYF

SEQ ID NO: 364233 - protein, 19 aa, Homo sapiens
  CDR3 for alpha chain variable domain of TCR clone 182117 (TRAV1-2, TRAJ26)
CLLPLCCERPDNYGQNFVF

SEQ ID NO: 364234 - protein, 13 aa, Homo sapiens
  CDR3 for beta chain variable domain of TCR clone 182117 (TRBV19, TRBJ1-2)
CAISVPGQDGYTF

SEQ ID NO: 364235 - protein, 15 aa, Homo sapiens
  CDR3 for alpha chain variable domain of TCR clone 182118 (TRAV34, TRAJ38)
CGADITPGNNRKLIW

SEQ ID NO: 364236 - protein, 16 aa, Homo sapiens
  CDR3 for beta chain variable domain of TCR clone 182118 (TRBV12-5, TRBJ2-5)
CASGPRTSGNQETQYF

SEQ ID NO: 364237 - protein, 11 aa, Homo sapiens
  CDR3 for alpha chain variable domain of TCR clone 182119 (TRAV12-1, TRAJ43)
CVEYDNNDMRF

SEQ ID NO: 364238 - protein, 15 aa, Homo sapiens
  CDR3 for beta chain variable domain of TCR clone 182119 (TRBV18, TRBJ2-5)
CASSPRAIEAETQYF

SEQ ID NO: 364239 - protein, 15 aa, Homo sapiens
  CDR3 for alpha chain variable domain of TCR clone 182120 (TRAV12-1, TRAJ10)
CVVNKLTGGGNKLTF

SEQ ID NO: 364240 - protein, 16 aa, Homo sapiens
  CDR3 for beta chain variable domain of TCR clone 182120 (TRBV5-5, TRBJ1-2)
CASSPTWGRGLYGYTF

SEQ ID NO: 364241 - protein, 14 aa, Homo sapiens
  CDR3 for alpha chain variable domain of TCR clone 182121 (TRAV17, TRAJ37)
CATDAFSNTGKLIF

SEQ ID NO: 364242 - protein, 17 aa, Homo sapiens
  CDR3 for beta chain variable domain of TCR clone 182121 (TRBV11-2, TRBJ2-1)
CASSLYPPGVEYNEQFF

SEQ ID NO: 364243 - protein, 15 aa, Homo sapiens
  CDR3 for alpha chain variable domain of TCR clone 182122 (TRAV8-4, TRAJ29)
CAVSADFRGNTPLVF

SEQ ID NO: 364244 - protein, 14 aa, Homo sapiens
  CDR3 for beta chain variable domain of TCR clone 182122 (TRBV7-2, TRBJ1-1)
CASSFLTGTTEAFF

SEQ ID NO: 364245 - protein, 14 aa, Homo sapiens
  CDR3 for alpha chain variable domain of TCR clone 182123 (TRAV26-1, TRAJ38)
CIADNAGNNRKLIW

SEQ ID NO: 364246 - protein, 13 aa, Homo sapiens
  CDR3 for beta chain variable domain of TCR clone 182123 (TRBV20-1, TRBJ1-1)
CSAGTVGNTEAFF

SEQ ID NO: 364247 - protein, 16 aa, Homo sapiens
  CDR3 for alpha chain variable domain of TCR clone 182124 (TRAV12-3, TRAJ53)
CAMSPGSGGSNYKLTF

SEQ ID NO: 364248 - protein, 13 aa, Homo sapiens
  CDR3 for beta chain variable domain of TCR clone 182124 (TRBV10-3, TRBJ2-7)
CASKLAVNYEQYV

SEQ ID NO: 364249 - protein, 13 aa, Homo sapiens
  CDR3 for alpha chain variable domain of TCR clone 182125 (TRAV21, TRAJ27)
CAACTGNAGKSTF

SEQ ID NO: 364250 - protein, 13 aa, Homo sapiens
  CDR3 for beta chain variable domain of TCR clone 182125 (TRBV13, TRBJ2-1)
CASILGGRGEQFF

SEQ ID NO: 364251 - protein, 11 aa, Homo sapiens
  CDR3 for alpha chain variable domain of TCR clone 182126 (TRAV2, TRAJ33)
CAVESNYQLIW

SEQ ID NO: 364252 - protein, 16 aa, Homo sapiens
  CDR3 for beta chain variable domain of TCR clone 182126 (TRBV2, TRBJ2-2)
CASSAFGDANTGELFF

SEQ ID NO: 364253 - protein, 14 aa, Homo sapiens
  CDR3 for alpha chain variable domain of TCR clone 182127 (TRAV26-1, TRAJ45)
CIVRGAGGADGLTF

SEQ ID NO: 364254 - protein, 16 aa, Homo sapiens
  CDR3 for beta chain variable domain of TCR clone 182127 (TRBV7-9, TRBJ1-1)
CASSLTQVRSNTEAFF

SEQ ID NO: 364255 - protein, 13 aa, Homo sapiens
  CDR3 for alpha chain variable domain of TCR clone 182128 (TRAV13-2, TRAJ16)
CADARTDSQKLLF

SEQ ID NO: 364256 - protein, 19 aa, Homo sapiens
  CDR3 for beta chain variable domain of TCR clone 182128 (TRBV5-5, TRBJ2-5)
CASSIGGGWGDPVLRARHA

SEQ ID NO: 364257 - protein, 12 aa, Homo sapiens
  CDR3 for alpha chain variable domain of TCR clone 182129 (TRAV17, TRAJ30)
CVPERRDDKIIF

SEQ ID NO: 364258 - protein, 15 aa, Homo sapiens
  CDR3 for beta chain variable domain of TCR clone 182129 (TRBV6-3, TRBJ2-7)
CASSSPGTVFYEQYF

SEQ ID NO: 364259 - protein, 12 aa, Homo sapiens
  CDR3 for alpha chain variable domain of TCR clone 182130 (TRAV12-2, TRAJ16)
CAVAPAGQKLLF

SEQ ID NO: 364260 - protein, 13 aa, Homo sapiens
  CDR3 for beta chain variable domain of TCR clone 182130 (TRBV6-1, TRBJ1-1)
CASSVTGRLEAFF

SEQ ID NO: 364261 - protein, 18 aa, Homo sapiens
  CDR3 for alpha chain variable domain of TCR clone 182131 (TRAV12-3, TRAJ52)
CAMSMGWAGGTSYGKLTF

SEQ ID NO: 364262 - protein, 18 aa, Homo sapiens
  CDR3 for beta chain variable domain of TCR clone 182131 (TRBV11-2, TRBJ2-3)
CASSLGGASRGAPNTQYF

SEQ ID NO: 364263 - protein, 13 aa, Homo sapiens
  CDR3 for alpha chain variable domain of TCR clone 182132 (TRAV2, TRAJ26)
CAVEENYGQNFVF

SEQ ID NO: 364264 - protein, 15 aa, Homo sapiens
  CDR3 for beta chain variable domain of TCR clone 182132 (TRBV28, TRBJ1-5)
CASSPNGHSNQPQHF

SEQ ID NO: 364265 - protein, 14 aa, Homo sapiens
  CDR3 for alpha chain variable domain of TCR clone 182133 (TRAV8-3, TRAJ10)
CAVGNAGGGNKPTF

SEQ ID NO: 364266 - protein, 17 aa, Homo sapiens
  CDR3 for beta chain variable domain of TCR clone 182133 (TRBV27, TRBJ2-7)
CASSAKRPGTGPYEQYF

SEQ ID NO: 364267 - protein, 15 aa, Homo sapiens
  CDR3 for alpha chain variable domain of TCR clone 182134 (TRAV3, TRAJ37)
CAVRPTLSNTGKLIF

SEQ ID NO: 364268 - protein, 16 aa, Homo sapiens
  CDR3 for beta chain variable domain of TCR clone 182134 (TRBV24-1, TRBJ2-3)
CATSDRRQDLTDTQYF

SEQ ID NO: 364269 - protein, 14 aa, Homo sapiens
  CDR3 for alpha chain variable domain of TCR clone 182135 (TRAV8-3, TRAJ23)
CDVIIYNQGGKLIF

SEQ ID NO: 364270 - protein, 15 aa, Homo sapiens
  CDR3 for beta chain variable domain of TCR clone 182135 (TRBV18, TRBJ2-1)
CASSPPSASYNEQFF

SEQ ID NO: 364271 - protein, 11 aa, Homo sapiens
  CDR3 for alpha chain variable domain of TCR clone 182136 (TRAV13-2, TRAJ20)
FADSNDYKLSF

SEQ ID NO: 364272 - protein, 15 aa, Homo sapiens
  CDR3 for beta chain variable domain of TCR clone 182136 (TRBV4-1, TRBJ1-4)
CASSDTGGTNEKLFF

SEQ ID NO: 364273 - protein, 17 aa, Homo sapiens
  CDR3 for alpha chain variable domain of TCR clone 182137 (TRAV26-1, TRAJ53)
CIVRVDDSGGSNYKLTF

SEQ ID NO: 364274 - protein, 14 aa, Homo sapiens
  CDR3 for beta chain variable domain of TCR clone 182137 (TRBV20-1, TRBJ2-7)
CSAKTGTGGYEQYF

SEQ ID NO: 364275 - protein, 12 aa, Homo sapiens
  CDR3 for alpha chain variable domain of TCR clone 182138 (TRAV5, TRAJ27)
CAEITNAGKSTF

SEQ ID NO: 364276 - protein, 15 aa, Homo sapiens
  CDR3 for beta chain variable domain of TCR clone 182138 (TRBV11-2, TRBJ1-2)
CASSLEGVKRNGYTF

SEQ ID NO: 364277 - protein, 12 aa, Homo sapiens
  CDR3 for alpha chain variable domain of TCR clone 182139 (TRAV35, TRAJ49)
CAGWNTGNQFYF

SEQ ID NO: 364278 - protein, 14 aa, Homo sapiens
  CDR3 for beta chain variable domain of TCR clone 182139 (TRBV7-2, TRBJ2-5)
CASSPRGSSETQYF

SEQ ID NO: 364279 - protein, 13 aa, Homo sapiens
  CDR3 for alpha chain variable domain of TCR clone 182140 (TRAV13-1, TRAJ41)
CAASINSGYALNF

SEQ ID NO: 364280 - protein, 17 aa, Homo sapiens
  CDR3 for beta chain variable domain of TCR clone 182140 (TRBV19, TRBJ2-6)
CASSTGQVFSGANVLTF

SEQ ID NO: 364281 - protein, 17 aa, Homo sapiens
  CDR3 for alpha chain variable domain of TCR clone 182141 (TRAV3, TRAJ6)
CAVRDGPRAGGSYKPTF

SEQ ID NO: 364282 - protein, 15 aa, Homo sapiens
  CDR3 for beta chain variable domain of TCR clone 182141 (TRBV29-1, TRBJ2-5)
CSVEGLAVNQETQYF

SEQ ID NO: 364283 - protein, 11 aa, Homo sapiens
  CDR3 for alpha chain variable domain of TCR clone 182142 (TRAV27, TRAJ45)
CAGAQEEVLTD

SEQ ID NO: 364284 - protein, 17 aa, Homo sapiens
  CDR3 for beta chain variable domain of TCR clone 182142 (TRBV11-2, TRBJ2-1)
WASSLYPPGVEYNEQFF

SEQ ID NO: 364285 - protein, 11 aa, Homo sapiens
  CDR3 for alpha chain variable domain of TCR clone 182143 (TRAV13-1, TRAJ39)
CASHAGNMLTF

SEQ ID NO: 364286 - protein, 14 aa, Homo sapiens
  CDR3 for beta chain variable domain of TCR clone 182143 (TRBV11-2, TRBJ1-5)
CASSLDRGRQPQHY

SEQ ID NO: 364287 - protein, 11 aa, Homo sapiens
  CDR3 for alpha chain variable domain of TCR clone 182144 (TRAV1-1, TRAJ23)
CAVRQGGKLIF

SEQ ID NO: 364288 - protein, 14 aa, Homo sapiens
  CDR3 for beta chain variable domain of TCR clone 182144 (TRBV19, TRBJ2-1)
CASPNFVLSGEQFF

SEQ ID NO: 364289 - protein, 15 aa, Homo sapiens
  CDR3 for alpha chain variable domain of TCR clone 182145 (TRAV3, TRAJ22)
CAVRDRGGSARQLSF

SEQ ID NO: 364290 - protein, 15 aa, Homo sapiens
  CDR3 for beta chain variable domain of TCR clone 182145 (TRBV7-3, TRBJ2-2)
CASSETGQGTGELFF

SEQ ID NO: 364291 - protein, 12 aa, Homo sapiens
  CDR3 for alpha chain variable domain of TCR clone 182146 (TRAV12-3, TRAJ17)
CAMTLTGNKLTF

SEQ ID NO: 364292 - protein, 14 aa, Homo sapiens
  CDR3 for beta chain variable domain of TCR clone 182146 (TRBV4-2, TRBJ1-2)
CASSQVGQNYGYTF

SEQ ID NO: 364293 - protein, 11 aa, Homo sapiens
  CDR3 for alpha chain variable domain of TCR clone 182147 (TRAV3, TRAJ21)
CAVGNFNKFYF

SEQ ID NO: 364294 - protein, 13 aa, Homo sapiens
  CDR3 for beta chain variable domain of TCR clone 182147 (TRBV7-9, TRBJ1-2)
CASSLKQNYGHTF

SEQ ID NO: 364295 - protein, 15 aa, Homo sapiens
  CDR3 for alpha chain variable domain of TCR clone 182148 (TRAV12-2, TRAJ52)
CAVNAGGTSYGKLTF

SEQ ID NO: 364296 - protein, 13 aa, Homo sapiens
  CDR3 for beta chain variable domain of TCR clone 182148 (TRBV20-1, TRBJ2-7)
CSASPFSSYEQYF

SEQ ID NO: 364297 - protein, 13 aa, Homo sapiens
  CDR3 for alpha chain variable domain of TCR clone 182149 (TRAV22, TRAJ58)
CAVTETSGSRLTF

SEQ ID NO: 364298 - protein, 15 aa, Homo sapiens
  CDR3 for beta chain variable domain of TCR clone 182149 (TRBV7-6, TRBJ2-1)
CASSSLAGEGNEQFF

SEQ ID NO: 364299 - protein, 16 aa, Homo sapiens
  CDR3 for alpha chain variable domain of TCR clone 182150 (TRAV3, TRAJ10)
CAVRDMRAVGGNKLTF

SEQ ID NO: 364300 - protein, 16 aa, Homo sapiens
  CDR3 for beta chain variable domain of TCR clone 182150 (TRBV20-1, TRBJ1-4)
CSAPGQGLLTNEKLFF

SEQ ID NO: 364301 - protein, 14 aa, Homo sapiens
  CDR3 for alpha chain variable domain of TCR clone 182151 (TRAV12-2, TRAJ45)
CTVNIGGGADGLTF

SEQ ID NO: 364302 - protein, 13 aa, Homo sapiens
  CDR3 for beta chain variable domain of TCR clone 182151 (TRBV19, TRBJ2-2)
CASGIWSTGELFF

SEQ ID NO: 364303 - protein, 10 aa, Homo sapiens
  CDR3 for alpha chain variable domain of TCR clone 182152 (TRAV8-4, TRAJ12)
WRDSSYKLIF

SEQ ID NO: 364304 - protein, 13 aa, Homo sapiens
  CDR3 for beta chain variable domain of TCR clone 182152 (TRBV9, TRBJ2-1)
CASSVGQGGEQFF

SEQ ID NO: 364305 - protein, 10 aa, Homo sapiens
  CDR3 for alpha chain variable domain of TCR clone 182153 (TRAV12-2, TRAJ52)
RSTSYGKLTF

SEQ ID NO: 364306 - protein, 11 aa, Homo sapiens
  CDR3 for beta chain variable domain of TCR clone 182153 (TRBV11-2, TRBJ2-2)
RASSLPGELFF

SEQ ID NO: 364307 - protein, 15 aa, Homo sapiens
  CDR3 for alpha chain variable domain of TCR clone 182154 (TRAV21, TRAJ13)
CAVRPTSGGYQTVTF

SEQ ID NO: 364308 - protein, 18 aa, Homo sapiens
  CDR3 for beta chain variable domain of TCR clone 182154 (TRBV11-3, TRBJ2-1)
CASSSYPGGRDSYNEQFF

SEQ ID NO: 364309 - protein, 13 aa, Homo sapiens
  CDR3 for alpha chain variable domain of TCR clone 182155 (TRAV21, TRAJ20)
FAVGVFADYKLSF

SEQ ID NO: 364310 - protein, 14 aa, Homo sapiens
  CDR3 for beta chain variable domain of TCR clone 182155 (TRBV4-2, TRBJ1-4)
CASSPSSGNEKLFF

SEQ ID NO: 364311 - protein, 12 aa, Homo sapiens
  CDR3 for alpha chain variable domain of TCR clone 182156 (TRAV13-1, TRAJ49)
CAAPNTGNKSYF

SEQ ID NO: 364312 - protein, 17 aa, Homo sapiens
  CDR3 for beta chain variable domain of TCR clone 182156 (TRBV25-1, TRBJ2-7)
CASSDARVVFSSYEQYF

SEQ ID NO: 364313 - protein, 11 aa, Homo sapiens
  CDR3 for alpha chain variable domain of TCR clone 182157 (TRAV1-2, TRAJ20)
CAVANDYKLSF

SEQ ID NO: 364314 - protein, 18 aa, Homo sapiens
  CDR3 for beta chain variable domain of TCR clone 182157 (TRBV20-1, TRBJ2-6)
CSAATTTTHGSGANVLTF

SEQ ID NO: 364315 - protein, 14 aa, Homo sapiens
  CDR3 for alpha chain variable domain of TCR clone 182158 (TRAV36/DV7, TRAJ57)
CAVGFPGGSEKLVF

SEQ ID NO: 364316 - protein, 15 aa, Homo sapiens
  CDR3 for beta chain variable domain of TCR clone 182158 (TRBV7-9, TRBJ1-6)
CASSSPGRGNSPLHF

SEQ ID NO: 364317 - protein, 13 aa, Homo sapiens
  CDR3 for alpha chain variable domain of TCR clone 182159 (TRAV8-3, TRAJ6)
CAVGSGGSYIPTF

SEQ ID NO: 364318 - protein, 14 aa, Homo sapiens
  CDR3 for beta chain variable domain of TCR clone 182159 (TRBV11-3, TRBJ1-1)
CASSTQRGRTEAFF

SEQ ID NO: 364319 - protein, 14 aa, Homo sapiens
  CDR3 for alpha chain variable domain of TCR clone 182160 (TRAV26-1, TRAJ57)
CIRAGQGGSEKLVF

SEQ ID NO: 364320 - protein, 14 aa, Homo sapiens
  CDR3 for beta chain variable domain of TCR clone 182160 (TRBV19, TRBJ2-1)
CASPTFVLSGEQFF

SEQ ID NO: 364321 - protein, 14 aa, Homo sapiens
  CDR3 for alpha chain variable domain of TCR clone 182161 (TRAV13-1, TRAJ35)
CAASKGGFGNVLHC

SEQ ID NO: 364322 - protein, 16 aa, Homo sapiens
  CDR3 for beta chain variable domain of TCR clone 182161 (TRBV4-1, TRBJ1-1)
CASSSMSERPNTEAFF

SEQ ID NO: 364323 - protein, 13 aa, Homo sapiens
  CDR3 for alpha chain variable domain of TCR clone 182162 (TRAV21, TRAJ17)
CAATKAAGNKLTF

SEQ ID NO: 364324 - protein, 13 aa, Homo sapiens
  CDR3 for beta chain variable domain of TCR clone 182162 (TRBV12-4, TRBJ1-1)
CASSLGGTTEAFF

SEQ ID NO: 364325 - protein, 13 aa, Homo sapiens
  CDR3 for alpha chain variable domain of TCR clone 182163 (TRAV4, TRAJ12)
CLVGGDSSYKLIF

SEQ ID NO: 364326 - protein, 12 aa, Homo sapiens
  CDR3 for beta chain variable domain of TCR clone 182163 (TRBV13, TRBJ2-7)
CASSLQAYEQYF

SEQ ID NO: 364327 - protein, 14 aa, Homo sapiens
  CDR3 for alpha chain variable domain of TCR clone 182164 (TRAV1-2, TRAJ16)
CAVNRVSDGQKLLF

SEQ ID NO: 364328 - protein, 12 aa, Homo sapiens
  CDR3 for beta chain variable domain of TCR clone 182164 (TRBV27, TRBJ2-5)
CASSPTGETQYF

SEQ ID NO: 364329 - protein, 12 aa, Homo sapiens
  CDR3 for alpha chain variable domain of TCR clone 182165 (TRAV12-3, TRAJ17)
CAMTLTGSKLTF

SEQ ID NO: 364330 - protein, 15 aa, Homo sapiens
  CDR3 for beta chain variable domain of TCR clone 182165 (TRBV20-1, TRBJ2-7)
CSARDRVSGMDEQCF

SEQ ID NO: 364331 - protein, 16 aa, Homo sapiens
  CDR3 for alpha chain variable domain of TCR clone 182166 (TRAV16, TRAJ4)
CALSRIFSGGYNKLIF

SEQ ID NO: 364332 - protein, 14 aa, Homo sapiens
  CDR3 for beta chain variable domain of TCR clone 182166 (TRBV12-4, TRBJ1-4)
CASSRQGANEKLFF

SEQ ID NO: 364333 - protein, 16 aa, Homo sapiens
  CDR3 for alpha chain variable domain of TCR clone 182167 (TRAV26-2, TRAJ52)
CIRGPAGGTSYGKLTF

SEQ ID NO: 364334 - protein, 15 aa, Homo sapiens
  CDR3 for beta chain variable domain of TCR clone 182167 (TRBV20-1, TRBJ1-1)
CSASRGVTGNTQAFF

SEQ ID NO: 364335 - protein, 15 aa, Homo sapiens
  CDR3 for alpha chain variable domain of TCR clone 182168 (TRAV16, TRAJ52)
CALKSGGTSYGKLTF

SEQ ID NO: 364336 - protein, 13 aa, Homo sapiens
  CDR3 for beta chain variable domain of TCR clone 182168 (TRBV12-4, TRBJ1-2)
CASSLRQGKGYTF

SEQ ID NO: 364337 - protein, 12 aa, Homo sapiens
  CDR3 for alpha chain variable domain of TCR clone 182169 (TRAV13-2, TRAJ23)
CAERHSGGKLIF

SEQ ID NO: 364338 - protein, 13 aa, Homo sapiens
  CDR3 for beta chain variable domain of TCR clone 182169 (TRBV19, TRBJ1-2)
CASSVPGQDGYTF

SEQ ID NO: 364339 - protein, 15 aa, Homo sapiens
  CDR3 for alpha chain variable domain of TCR clone 182170 (TRAV21, TRAJ32)
CAVNSYRGATNKLIF

SEQ ID NO: 364340 - protein, 18 aa, Homo sapiens
  CDR3 for beta chain variable domain of TCR clone 182170 (TRBV7-9, TRBJ2-1)
CASSTGLAEGSSYNEQFF

SEQ ID NO: 364341 - protein, 14 aa, Homo sapiens
  CDR3 for alpha chain variable domain of TCR clone 182171 (TRAV8-3, TRAJ4)
CAVGAAGGYNKLIF

SEQ ID NO: 364342 - protein, 13 aa, Homo sapiens
  CDR3 for beta chain variable domain of TCR clone 182171 (TRBV15, TRBJ2-5)
CATSQIGEETQYF

SEQ ID NO: 364343 - protein, 18 aa, Homo sapiens
  CDR3 for alpha chain variable domain of TCR clone 182172 (TRAV26-2, TRAJ33)
CCVLLHPEEPASNYQLIW

SEQ ID NO: 364344 - protein, 13 aa, Homo sapiens
  CDR3 for beta chain variable domain of TCR clone 182172 (TRBV24-1, TRBJ2-2)
CATSEWSTGGLFF

SEQ ID NO: 364345 - protein, 16 aa, Homo sapiens
  CDR3 for alpha chain variable domain of TCR clone 182173 (TRAV14/DV4, TRAJ53)
CAMREGGGGSNYKLTF

SEQ ID NO: 364346 - protein, 13 aa, Homo sapiens
  CDR3 for beta chain variable domain of TCR clone 182173 (TRBV4-1, TRBJ2-2)
CASSQENTGELFF

SEQ ID NO: 364347 - protein, 12 aa, Homo sapiens
  CDR3 for alpha chain variable domain of TCR clone 182174 (TRAV12-1, TRAJ31)
CVSWNNNARLMF

SEQ ID NO: 364348 - protein, 15 aa, Homo sapiens
  CDR3 for beta chain variable domain of TCR clone 182174 (TRBV7-2, TRBJ1-5)
CASSLDRGQHQPQHF

SEQ ID NO: 364349 - protein, 12 aa, Homo sapiens
  CDR3 for alpha chain variable domain of TCR clone 182175 (TRAV17, TRAJ57)
GATDGGSEKLVF

SEQ ID NO: 364350 - protein, 12 aa, Homo sapiens
  CDR3 for beta chain variable domain of TCR clone 182175 (TRBV29-1, TRBJ2-2)
CSVDKYTGELFF

SEQ ID NO: 364351 - protein, 12 aa, Homo sapiens
  CDR3 for alpha chain variable domain of TCR clone 182176 (TRAV13-2, TRAJ23)
CAERHRGGKLIF

SEQ ID NO: 364352 - protein, 16 aa, Homo sapiens
  CDR3 for beta chain variable domain of TCR clone 182176 (TRBV11-2, TRBJ1-2)
CASSLDTGGADYGYTF

SEQ ID NO: 364353 - protein, 15 aa, Homo sapiens
  CDR3 for alpha chain variable domain of TCR clone 182177 (TRAV3, TRAJ4)
CAVRDGTGGSNKLIF

SEQ ID NO: 364354 - protein, 19 aa, Homo sapiens
  CDR3 for beta chain variable domain of TCR clone 182177 (TRBV27, TRBJ2-2)
CTSVPAVLAGYRTPGSCFF

SEQ ID NO: 364355 - protein, 11 aa, Homo sapiens
  CDR3 for alpha chain variable domain of TCR clone 182178 (TRAV3, TRAJ13)
CAVTSYQKVTF

SEQ ID NO: 364356 - protein, 15 aa, Homo sapiens
  CDR3 for beta chain variable domain of TCR clone 182178 (TRBV7-9, TRBJ2-7)
CAGSSSGLAVYEQYF

SEQ ID NO: 364357 - protein, 16 aa, Homo sapiens
  CDR3 for alpha chain variable domain of TCR clone 182179 (TRAV20, TRAJ28)
CAVRGPSGAGSYQLTF

SEQ ID NO: 364358 - protein, 13 aa, Homo sapiens
  CDR3 for beta chain variable domain of TCR clone 182179 (TRBV12-5, TRBJ2-3)
CASGDRQSDTQYF

SEQ ID NO: 364359 - protein, 16 aa, Homo sapiens
  CDR3 for alpha chain variable domain of TCR clone 182180 (TRAV1-2, TRAJ6)
CAVRDQGTGGSYIPTF

SEQ ID NO: 364360 - protein, 12 aa, Homo sapiens
  CDR3 for beta chain variable domain of TCR clone 182180 (TRBV28, TRBJ2-7)
CQHPGLAGEQYF

SEQ ID NO: 364361 - protein, 15 aa, Homo sapiens
  CDR3 for alpha chain variable domain of TCR clone 182181 (TRAV17, TRAJ28)
CATVILWGWELPTHF

SEQ ID NO: 364362 - protein, 15 aa, Homo sapiens
  CDR3 for beta chain variable domain of TCR clone 182181 (TRBV6-4, TRBJ1-5)
CASSASSRINQPQHF

SEQ ID NO: 364363 - protein, 13 aa, Homo sapiens
  CDR3 for alpha chain variable domain of TCR clone 182182 (TRAV1-1, TRAJ33)
CVVRRDSNYQLIW

SEQ ID NO: 364364 - protein, 16 aa, Homo sapiens
  CDR3 for beta chain variable domain of TCR clone 182182 (TRBV6-1, TRBJ2-2)
CASSAFRGGDTGELFF

SEQ ID NO: 364365 - protein, 15 aa, Homo sapiens
  CDR3 for alpha chain variable domain of TCR clone 182183 (TRAV3, TRAJ22)
CAVRDRGGSARQLTF

SEQ ID NO: 364366 - protein, 15 aa, Homo sapiens
  CDR3 for beta chain variable domain of TCR clone 182183 (TRBV27, TRBJ2-1)
CASINGGGSSNEQFF

SEQ ID NO: 364367 - protein, 15 aa, Homo sapiens
  CDR3 for alpha chain variable domain of TCR clone 182184 (TRAV17, TRAJ57)
CATGPSQGGSEKLVI

SEQ ID NO: 364368 - protein, 12 aa, Homo sapiens
  CDR3 for beta chain variable domain of TCR clone 182184 (TRBV12-4, TRBJ2-7)
CASSLGGYEQYF

SEQ ID NO: 364369 - protein, 14 aa, Homo sapiens
  CDR3 for alpha chain variable domain of TCR clone 182185 (TRAV13-1, TRAJ35)
CAASKGGFGNVLHC

SEQ ID NO: 364370 - protein, 14 aa, Homo sapiens
  CDR3 for beta chain variable domain of TCR clone 182185 (TRBV13, TRBJ2-7)
CASSLQGASYEQYF

SEQ ID NO: 364371 - protein, 16 aa, Homo sapiens
  CDR3 for alpha chain variable domain of TCR clone 182186 (TRAV26-1, TRAJ45)
CIVEKYSGGGAGGLTF

SEQ ID NO: 364372 - protein, 16 aa, Homo sapiens
  CDR3 for beta chain variable domain of TCR clone 182186 (TRBV10-3, TRBJ1-6)
CAISERRGQGNSPLHF

SEQ ID NO: 364373 - protein, 11 aa, Homo sapiens
  CDR3 for alpha chain variable domain of TCR clone 182187 (TRAV1-1, TRAJ20)
CAVFNDYKLSF

SEQ ID NO: 364374 - protein, 14 aa, Homo sapiens
  CDR3 for beta chain variable domain of TCR clone 182187 (TRBV19, TRBJ2-1)
CASSKDRGKMSSSS

SEQ ID NO: 364375 - protein, 14 aa, Homo sapiens
  CDR3 for alpha chain variable domain of TCR clone 182188 (TRAV12-2, TRAJ13)
CAVKKTGGYQKVTF

SEQ ID NO: 364376 - protein, 16 aa, Homo sapiens
  CDR3 for beta chain variable domain of TCR clone 182188 (TRBV7-3, TRBJ2-1)
CASSLAGYRSYNEQFF

SEQ ID NO: 364377 - protein, 13 aa, Homo sapiens
  CDR3 for alpha chain variable domain of TCR clone 182189 (TRAV38-1, TRAJ42)
CARWGGSQGKLIF

SEQ ID NO: 364378 - protein, 10 aa, Homo sapiens
  CDR3 for beta chain variable domain of TCR clone 182189 (TRBV2, TRBJ2-5)
CASSAATQFF

SEQ ID NO: 364379 - protein, 15 aa, Homo sapiens
  CDR3 for alpha chain variable domain of TCR clone 182190 (TRAV8-4, TRAJ15)
CAVSDPIQAGTALIF

SEQ ID NO: 364380 - protein, 14 aa, Homo sapiens
  CDR3 for beta chain variable domain of TCR clone 182190 (TRBV7-2, TRBJ1-3)
CASSLSRSGNTIYF

SEQ ID NO: 364381 - protein, 15 aa, Homo sapiens
  CDR3 for alpha chain variable domain of TCR clone 182191 (TRAV25, TRAJ10)
CAGPLLTGGGNKLTF

SEQ ID NO: 364382 - protein, 17 aa, Homo sapiens
  CDR3 for beta chain variable domain of TCR clone 182191 (TRBV7-8, TRBJ2-6)
CASSAGTGGAGANVLTF

SEQ ID NO: 364383 - protein, 14 aa, Homo sapiens
  CDR3 for alpha chain variable domain of TCR clone 182192 (TRAV1-2, TRAJ8)
CAVREDTGFQKLEF

SEQ ID NO: 364384 - protein, 15 aa, Homo sapiens
  CDR3 for beta chain variable domain of TCR clone 182192 (TRBV11-3, TRBJ2-1)
CASSLGDSSHNEQFF

SEQ ID NO: 364385 - protein, 16 aa, Homo sapiens
  CDR3 for alpha chain variable domain of TCR clone 182193 (TRAV38-2/DV8, TRAJ45)
CAYRGHSGGGADGLTF

SEQ ID NO: 364386 - protein, 14 aa, Homo sapiens
  CDR3 for beta chain variable domain of TCR clone 182193 (TRBV7-2, TRBJ2-7)
CASSPKTSFYEQYF

SEQ ID NO: 364387 - protein, 18 aa, Homo sapiens
  CDR3 for alpha chain variable domain of TCR clone 182194 (TRAV29/DV5, TRAJ52)
CEAGFRGAGGTSYGKLTF

SEQ ID NO: 364388 - protein, 15 aa, Homo sapiens
  CDR3 for beta chain variable domain of TCR clone 182194 (TRBV4-1, TRBJ1-4)
CASSDTGGTNEKLFF

SEQ ID NO: 364389 - protein, 13 aa, Homo sapiens
  CDR3 for alpha chain variable domain of TCR clone 182195 (TRAV12-2, TRAJ52)
CAVSGTSYGKLTF

SEQ ID NO: 364390 - protein, 15 aa, Homo sapiens
  CDR3 for beta chain variable domain of TCR clone 182195 (TRBV10-3, TRBJ2-1)
CAIRNGTSGHNEQFF

SEQ ID NO: 364391 - protein, 16 aa, Homo sapiens
  CDR3 for alpha chain variable domain of TCR clone 182196 (TRAV30, TRAJ24)
CGTEIVDADSWGKFHF

SEQ ID NO: 364392 - protein, 14 aa, Homo sapiens
  CDR3 for beta chain variable domain of TCR clone 182196 (TRBV12-5, TRBJ2-5)
CASGSRTHQETQYF

SEQ ID NO: 364393 - protein, 15 aa, Homo sapiens
  CDR3 for alpha chain variable domain of TCR clone 182197 (TRAV8-3, TRAJ15)
CAVGEPNQAGTALIF

SEQ ID NO: 364394 - protein, 14 aa, Homo sapiens
  CDR3 for beta chain variable domain of TCR clone 182197 (TRBV20-1, TRBJ2-1)
CSPNDEASYNEQFF

SEQ ID NO: 364395 - protein, 12 aa, Homo sapiens
  CDR3 for alpha chain variable domain of TCR clone 182198 (TRAV26-1, TRAJ53)
CIEGGSNYKLTF

SEQ ID NO: 364396 - protein, 12 aa, Homo sapiens
  CDR3 for beta chain variable domain of TCR clone 182198 (TRBV11-2, TRBJ2-2)
CASSLGGGELFF

SEQ ID NO: 364397 - protein, 15 aa, Homo sapiens
  CDR3 for alpha chain variable domain of TCR clone 182199 (TRAV2, TRAJ15)
CAVEDREQAGTALIF

SEQ ID NO: 364398 - protein, 14 aa, Homo sapiens
  CDR3 for beta chain variable domain of TCR clone 182199 (TRBV6-1, TRBJ1-3)
CASVQGGGGNTIYF

SEQ ID NO: 364399 - protein, 14 aa, Homo sapiens
  CDR3 for alpha chain variable domain of TCR clone 182200 (TRAV12-2, TRAJ45)
CAVNIGGGADRLTF

SEQ ID NO: 364400 - protein, 13 aa, Homo sapiens
  CDR3 for beta chain variable domain of TCR clone 182200 (TRBV19, TRBJ2-2)
CASGIWSTGELFF

SEQ ID NO: 364401 - protein, 11 aa, Homo sapiens
  CDR3 for alpha chain variable domain of TCR clone 182201 (TRAV21, TRAJ34)
CAVTNTDKLIF

SEQ ID NO: 364402 - protein, 16 aa, Homo sapiens
  CDR3 for beta chain variable domain of TCR clone 182201 (TRBV13, TRBJ2-3)
CQQPLQGSGGRNTQYF

SEQ ID NO: 364403 - protein, 11 aa, Homo sapiens
  CDR3 for alpha chain variable domain of TCR clone 182202 (TRAV12-1, TRAJ33)
CVVNMNYQLIW

SEQ ID NO: 364404 - protein, 15 aa, Homo sapiens
  CDR3 for beta chain variable domain of TCR clone 182202 (TRBV12-4, TRBJ2-5)
CASSPPTGLQETQYF

SEQ ID NO: 364405 - protein, 14 aa, Homo sapiens
  CDR3 for alpha chain variable domain of TCR clone 182203 (TRAV23/DV6, TRAJ40)
CAASLTSGTYKYTF

SEQ ID NO: 364406 - protein, 14 aa, Homo sapiens
  CDR3 for beta chain variable domain of TCR clone 182203 (TRBV19, TRBJ2-1)
CASPTFVLSGEQFF

SEQ ID NO: 364407 - protein, 17 aa, Homo sapiens
  CDR3 for alpha chain variable domain of TCR clone 182204 (TRAV3, TRAJ6)
CAVRDGPRAGGSYIPTF

SEQ ID NO: 364408 - protein, 14 aa, Homo sapiens
  CDR3 for beta chain variable domain of TCR clone 182204 (TRBV7-6, TRBJ2-7)
CASSLTGTGNEQYF

SEQ ID NO: 364409 - protein, 15 aa, Homo sapiens
  CDR3 for alpha chain variable domain of TCR clone 182205 (TRAV2, TRAJ13)
CAVEPEFWGLPESYL

SEQ ID NO: 364410 - protein, 14 aa, Homo sapiens
  CDR3 for beta chain variable domain of TCR clone 182205 (TRBV28, TRBJ1-5)
CASSGQALYQPQHL

SEQ ID NO: 364411 - protein, 13 aa, Homo sapiens
  CDR3 for alpha chain variable domain of TCR clone 182206 (TRAV1-2, TRAJ11)
CAVRSSGYSTLTF

SEQ ID NO: 364412 - protein, 14 aa, Homo sapiens
  CDR3 for beta chain variable domain of TCR clone 182206 (TRBV25-1, TRBJ1-2)
CASSEATGPYGYTF

SEQ ID NO: 364413 - protein, 12 aa, Homo sapiens
  CDR3 for alpha chain variable domain of TCR clone 182207 (TRAV12-2, TRAJ10)
WGVTGGGNKLTF

SEQ ID NO: 364414 - protein, 16 aa, Homo sapiens
  CDR3 for beta chain variable domain of TCR clone 182207 (TRBV7-6, TRBJ2-3)
CASSDSRGEGTDTQYF

SEQ ID NO: 364415 - protein, 11 aa, Homo sapiens
  CDR3 for alpha chain variable domain of TCR clone 182208 (TRAV26-1, TRAJ37)
CIVRVGRKLIF

SEQ ID NO: 364416 - protein, 16 aa, Homo sapiens
  CDR3 for beta chain variable domain of TCR clone 182208 (TRBV3-1, TRBJ2-1)
CAISRLLTSGGNEQFF

SEQ ID NO: 364417 - protein, 10 aa, Homo sapiens
  CDR3 for alpha chain variable domain of TCR clone 182209 (TRAV3, TRAJ30)
CAVREIEIIS

SEQ ID NO: 364418 - protein, 14 aa, Homo sapiens
  CDR3 for beta chain variable domain of TCR clone 182209 (TRBV15, TRBJ2-3)
YATRSGTSTDTQYF

SEQ ID NO: 364419 - protein, 15 aa, Homo sapiens
  CDR3 for alpha chain variable domain of TCR clone 182210 (TRAV17, TRAJ56)
CATDANTGANSKLTF

SEQ ID NO: 364420 - protein, 12 aa, Homo sapiens
  CDR3 for beta chain variable domain of TCR clone 182210 (TRBV7-8, TRBJ2-7)
CASSLGDRGQYF

SEQ ID NO: 364421 - protein, 15 aa, Homo sapiens
  CDR3 for alpha chain variable domain of TCR clone 182211 (TRAV26-1, TRAJ37)
CIVKTGSSNTGELIF

SEQ ID NO: 364422 - protein, 12 aa, Homo sapiens
  CDR3 for beta chain variable domain of TCR clone 182211 (TRBV7-8, TRBJ2-7)
CASSLGDREQYF

SEQ ID NO: 364423 - protein, 15 aa, Homo sapiens
  CDR3 for alpha chain variable domain of TCR clone 182212 (TRAV23/DV6, TRAJ18)
CAARYRGSTLGRLYF

SEQ ID NO: 364424 - protein, 16 aa, Homo sapiens
  CDR3 for beta chain variable domain of TCR clone 182212 (TRBV2, TRBJ2-1)
CASSVGGSLSYNEQFF

SEQ ID NO: 364425 - protein, 14 aa, Homo sapiens
  CDR3 for alpha chain variable domain of TCR clone 182213 (TRAV12-2, TRAJ17)
CAVLFKAAGNKPTF

SEQ ID NO: 364426 - protein, 12 aa, Homo sapiens
  CDR3 for beta chain variable domain of TCR clone 182213 (TRBV29-1, TRBJ2-3)
CSVTGGADTQYF

SEQ ID NO: 364427 - protein, 14 aa, Homo sapiens
  CDR3 for alpha chain variable domain of TCR clone 182214 (TRAV35, TRAJ33)
CAGSSQYSNYQLIW

SEQ ID NO: 364428 - protein, 14 aa, Homo sapiens
  CDR3 for beta chain variable domain of TCR clone 182214 (TRBV5-1, TRBJ2-7)
CASSRGESLYEQYF

SEQ ID NO: 364429 - protein, 12 aa, Homo sapiens
  CDR3 for alpha chain variable domain of TCR clone 182215 (TRAV27, TRAJ43)
CAGVMQNNDMRF

SEQ ID NO: 364430 - protein, 10 aa, Homo sapiens
  CDR3 for beta chain variable domain of TCR clone 182215 (TRBV2, TRBJ1-1)
CASELAEAFF

SEQ ID NO: 364431 - protein, 13 aa, Homo sapiens
  CDR3 for alpha chain variable domain of TCR clone 182216 (TRAV29/DV5, TRAJ31)
CAASRNNNARLMF

SEQ ID NO: 364432 - protein, 13 aa, Homo sapiens
  CDR3 for beta chain variable domain of TCR clone 182216 (TRBV28, TRBJ2-3)
CASSTGGGDTQYF

SEQ ID NO: 364433 - protein, 10 aa, Homo sapiens
  CDR3 for alpha chain variable domain of TCR clone 182217 (TRAV8-4, TRAJ43)
CAVSPDDMRF

SEQ ID NO: 364434 - protein, 15 aa, Homo sapiens
  CDR3 for beta chain variable domain of TCR clone 182217 (TRBV5-1, TRBJ2-3)
CASSVTSGSTDTQYF

SEQ ID NO: 364435 - protein, 17 aa, Homo sapiens
  CDR3 for alpha chain variable domain of TCR clone 182218 (TRAV38-2/DV8, TRAJ56)
CAYRGEVGTGANSKLTF

SEQ ID NO: 364436 - protein, 14 aa, Homo sapiens
  CDR3 for beta chain variable domain of TCR clone 182218 (TRBV11-1, TRBJ1-1)
CASSLEHPNTEAFF

SEQ ID NO: 364437 - protein, 13 aa, Homo sapiens
  CDR3 for alpha chain variable domain of TCR clone 182219 (TRAV13-1, TRAJ6)
CAARRGGSYIPTF

SEQ ID NO: 364438 - protein, 16 aa, Homo sapiens
  CDR3 for beta chain variable domain of TCR clone 182219 (TRBV7-9, TRBJ2-2)
CASSLATGVGTGELFL

SEQ ID NO: 364439 - protein, 18 aa, Homo sapiens
  CDR3 for alpha chain variable domain of TCR clone 182220 (TRAV21, TRAJ52)
CAVRPSPAGGTSYGKLTF

SEQ ID NO: 364440 - protein, 15 aa, Homo sapiens
  CDR3 for beta chain variable domain of TCR clone 182220 (TRBV3-1, TRBJ2-5)
CASSANLGGPETQYF

SEQ ID NO: 364441 - protein, 23 aa, Homo sapiens
  CDR3 for alpha chain variable domain of TCR clone 182221 (TRAV26-1, TRAJ38)
CVADNAGNNHIQNPDPAVSQLRD

SEQ ID NO: 364442 - protein, 13 aa, Homo sapiens
  CDR3 for beta chain variable domain of TCR clone 182221 (TRBV20-1, TRBJ1-1)
CSARGGGNTEAFF

SEQ ID NO: 364443 - protein, 18 aa, Homo sapiens
  CDR3 for alpha chain variable domain of TCR clone 182222 (TRAV12-3, TRAJ52)
CAMSVGGAGGTSYGKLTF

SEQ ID NO: 364444 - protein, 15 aa, Homo sapiens
  CDR3 for beta chain variable domain of TCR clone 182222 (TRBV7-8, TRBJ1-6)
CASSLARGYNSPLHF

SEQ ID NO: 364445 - protein, 15 aa, Homo sapiens
  CDR3 for alpha chain variable domain of TCR clone 182223 (TRAV12-2, TRAJ53)
FAGNGGGGSNYKLTF

SEQ ID NO: 364446 - protein, 17 aa, Homo sapiens
  CDR3 for beta chain variable domain of TCR clone 182223 (TRBV7-3, TRBJ2-3)
CASSLMKRMRGADTQYF

SEQ ID NO: 364447 - protein, 14 aa, Homo sapiens
  CDR3 for alpha chain variable domain of TCR clone 182224 (TRAV17, TRAJ39)
CATDPVRPGDMLTF

SEQ ID NO: 364448 - protein, 15 aa, Homo sapiens
  CDR3 for beta chain variable domain of TCR clone 182224 (TRBV13, TRBJ1-5)
CASSFGQGGVQPQHF

SEQ ID NO: 364449 - protein, 13 aa, Homo sapiens
  CDR3 for alpha chain variable domain of TCR clone 182225 (TRAV36/DV7, TRAJ37)
CAVFSSNTGKLIL

SEQ ID NO: 364450 - protein, 15 aa, Homo sapiens
  CDR3 for beta chain variable domain of TCR clone 182225 (TRBV12-4, TRBJ2-5)
CQQFLVRGRQETQYS

SEQ ID NO: 364451 - protein, 14 aa, Homo sapiens
  CDR3 for alpha chain variable domain of TCR clone 182226 (TRAV26-1, TRAJ34)
CIVRVAYNTYKLIF

SEQ ID NO: 364452 - protein, 11 aa, Homo sapiens
  CDR3 for beta chain variable domain of TCR clone 182226 (TRBV25-1, TRBJ2-4)
CQSRDQNIQYF

SEQ ID NO: 364453 - protein, 13 aa, Homo sapiens
  CDR3 for alpha chain variable domain of TCR clone 182227 (TRAV2, TRAJ24)
CAVGSTDRGKLQF

SEQ ID NO: 364454 - protein, 15 aa, Homo sapiens
  CDR3 for beta chain variable domain of TCR clone 182227 (TRBV2, TRBJ2-5)
CASTRDGGPQETQYF

SEQ ID NO: 364455 - protein, 13 aa, Homo sapiens
  CDR3 for alpha chain variable domain of TCR clone 182228 (TRAV27, TRAJ8)
CAGGPTGFQKLVF

SEQ ID NO: 364456 - protein, 16 aa, Homo sapiens
  CDR3 for beta chain variable domain of TCR clone 182228 (TRBV7-2, TRBJ2-5)
CASSSKWLSGQETQYF

SEQ ID NO: 364457 - protein, 12 aa, Homo sapiens
  CDR3 for alpha chain variable domain of TCR clone 182229 (TRAV23/DV6, TRAJ17)
CARGSCRQQATF

SEQ ID NO: 364458 - protein, 14 aa, Homo sapiens
  CDR3 for beta chain variable domain of TCR clone 182229 (TRBV7-2, TRBJ1-2)
CASSQTGSTYGYTF

SEQ ID NO: 364459 - protein, 14 aa, Homo sapiens
  CDR3 for alpha chain variable domain of TCR clone 182230 (TRAV12-1, TRAJ13)
CVVIGSGGYQKVTF

SEQ ID NO: 364460 - protein, 17 aa, Homo sapiens
  CDR3 for beta chain variable domain of TCR clone 182230 (TRBV15, TRBJ1-5)
CATSRAPPGTRNQPQHF

SEQ ID NO: 364461 - protein, 15 aa, Homo sapiens
  CDR3 for alpha chain variable domain of TCR clone 182231 (TRAV12-1, TRAJ44)
CVVDTPQGTASELTF

SEQ ID NO: 364462 - protein, 13 aa, Homo sapiens
  CDR3 for beta chain variable domain of TCR clone 182231 (TRBV27, TRBJ2-1)
CASSSGSYNEQFF

SEQ ID NO: 364463 - protein, 11 aa, Homo sapiens
  CDR3 for alpha chain variable domain of TCR clone 182232 (TRAV3, TRAJ21)
CAEGNFNKFYF

SEQ ID NO: 364464 - protein, 14 aa, Homo sapiens
  CDR3 for beta chain variable domain of TCR clone 182232 (TRBV19, TRBJ2-1)
CASPTFVLSGEQFF

SEQ ID NO: 364465 - protein, 13 aa, Homo sapiens
  CDR3 for alpha chain variable domain of TCR clone 182233 (TRAV29/DV5, TRAJ31)
CAASRNNNARLMF

SEQ ID NO: 364466 - protein, 15 aa, Homo sapiens
  CDR3 for beta chain variable domain of TCR clone 182233 (TRBV20-1, TRBJ2-2)
CSAIPGHSNTGELFF

SEQ ID NO: 364467 - protein, 17 aa, Homo sapiens
  CDR3 for alpha chain variable domain of TCR clone 182234 (TRAV13-1, TRAJ28)
CAASPPYSGAGSYQLTF

SEQ ID NO: 364468 - protein, 13 aa, Homo sapiens
  CDR3 for beta chain variable domain of TCR clone 182234 (TRBV6-1, TRBJ2-7)
CAGSRDREYEQYF

SEQ ID NO: 364469 - protein, 13 aa, Homo sapiens
  CDR3 for alpha chain variable domain of TCR clone 182235 (TRAV12-3, TRAJ33)
CAMSVNSNYQLIW

SEQ ID NO: 364470 - protein, 15 aa, Homo sapiens
  CDR3 for beta chain variable domain of TCR clone 182235 (TRBV6-1, TRBJ2-2)
CASSAGQGYTGELFF

SEQ ID NO: 364471 - protein, 11 aa, Homo sapiens
  CDR3 for alpha chain variable domain of TCR clone 182236 (TRAV3, TRAJ21)
SAMGNFNKFYF

SEQ ID NO: 364472 - protein, 16 aa, Homo sapiens
  CDR3 for beta chain variable domain of TCR clone 182236 (TRBV19, TRBJ2-1)
CASSKAGPSSYNEQFF

SEQ ID NO: 364473 - protein, 14 aa, Homo sapiens
  CDR3 for alpha chain variable domain of TCR clone 182237 (TRAV1-2, TRAJ16)
RAVNRFSDGQKLLF

SEQ ID NO: 364474 - protein, 15 aa, Homo sapiens
  CDR3 for beta chain variable domain of TCR clone 182237 (TRBV7-9, TRBJ1-6)
CASSSTGRGNSPLHF

SEQ ID NO: 364475 - protein, 13 aa, Homo sapiens
  CDR3 for alpha chain variable domain of TCR clone 182238 (TRAV13-1, TRAJ39)
CAASIWAGNMLTF

SEQ ID NO: 364476 - protein, 15 aa, Homo sapiens
  CDR3 for beta chain variable domain of TCR clone 182238 (TRBV15, TRBJ2-1)
CATSRPGQGLHEQFF

SEQ ID NO: 364477 - protein, 10 aa, Homo sapiens
  CDR3 for alpha chain variable domain of TCR clone 182239 (TRAV3, TRAJ30)
CAVREFEIIF

SEQ ID NO: 364478 - protein, 12 aa, Homo sapiens
  CDR3 for beta chain variable domain of TCR clone 182239 (TRBV20-1, TRBJ2-3)
CSADGAGDTQYF

SEQ ID NO: 364479 - protein, 11 aa, Homo sapiens
  CDR3 for alpha chain variable domain of TCR clone 182240 (TRAV2, TRAJ13)
CASGGYQKVTS

SEQ ID NO: 364480 - protein, 14 aa, Homo sapiens
  CDR3 for beta chain variable domain of TCR clone 182240 (TRBV7-3, TRBJ2-1)
CPSSLAGGTNEQFF

SEQ ID NO: 364481 - protein, 15 aa, Homo sapiens
  CDR3 for alpha chain variable domain of TCR clone 182241 (TRAV17, TRAJ56)
CASDANTGANSKLTF

SEQ ID NO: 364482 - protein, 14 aa, Homo sapiens
  CDR3 for beta chain variable domain of TCR clone 182241 (TRBV19, TRBJ1-5)
CASSLGTGGQPQHF

SEQ ID NO: 364483 - protein, 12 aa, Homo sapiens
  CDR3 for alpha chain variable domain of TCR clone 182242 (TRAV13-1, TRAJ21)
CATTINFNKFYF

SEQ ID NO: 364484 - protein, 14 aa, Homo sapiens
  CDR3 for beta chain variable domain of TCR clone 182242 (TRBV7-2, TRBJ2-7)
CASSPKTSLYEQYF

SEQ ID NO: 364485 - protein, 13 aa, Homo sapiens
  CDR3 for alpha chain variable domain of TCR clone 182243 (TRAV12-1, TRAJ26)
CVVRRNYGQNFVF

SEQ ID NO: 364486 - protein, 16 aa, Homo sapiens
  CDR3 for beta chain variable domain of TCR clone 182243 (TRBV20-1, TRBJ1-4)
CSAPGQGLLTNEKLFF

SEQ ID NO: 364487 - protein, 14 aa, Homo sapiens
  CDR3 for alpha chain variable domain of TCR clone 182244 (TRAV1-2, TRAJ16)
CAVDRFSDGQKLLF

SEQ ID NO: 364488 - protein, 15 aa, Homo sapiens
  CDR3 for beta chain variable domain of TCR clone 182244 (TRBV19, TRBJ1-6)
CASSTQGAVGSPLHF

SEQ ID NO: 364489 - protein, 14 aa, Homo sapiens
  CDR3 for alpha chain variable domain of TCR clone 182245 (TRAV26-1, TRAJ21)
CIVRPPYNFNKFYF

SEQ ID NO: 364490 - protein, 14 aa, Homo sapiens
  CDR3 for beta chain variable domain of TCR clone 182245 (TRBV19, TRBJ2-1)
CASSTFVLSGEQFF

SEQ ID NO: 364491 - protein, 14 aa, Homo sapiens
  CDR3 for alpha chain variable domain of TCR clone 182246 (TRAV13-1, TRAJ45)
CAAIGGGGADRLTF

SEQ ID NO: 364492 - protein, 16 aa, Homo sapiens
  CDR3 for beta chain variable domain of TCR clone 182246 (TRBV7-2, TRBJ1-1)
CASSLGAGWTNTEAFF

SEQ ID NO: 364493 - protein, 15 aa, Homo sapiens
  CDR3 for alpha chain variable domain of TCR clone 182247 (TRAV8-3, TRAJ11)
CAVGLLNSGYSPLTF

SEQ ID NO: 364494 - protein, 15 aa, Homo sapiens
  CDR3 for beta chain variable domain of TCR clone 182247 (TRBV7-2, TRBJ2-1)
CASSSGLAGGNEQFF

SEQ ID NO: 364495 - protein, 14 aa, Homo sapiens
  CDR3 for alpha chain variable domain of TCR clone 182248 (TRAV1-2, TRAJ16)
CAVNRFSDGQKLLF

SEQ ID NO: 364496 - protein, 15 aa, Homo sapiens
  CDR3 for beta chain variable domain of TCR clone 182248 (TRBV7-9, TRBJ1-6)
CASSSPGRGNSTLRF

SEQ ID NO: 364497 - protein, 20 aa, Homo sapiens
  CDR3 for alpha chain variable domain of TCR clone 182249 (TRAV26-1, TRAJ42)
CCVLLHRQTYYGGSQGNLIF

SEQ ID NO: 364498 - protein, 16 aa, Homo sapiens
  CDR3 for beta chain variable domain of TCR clone 182249 (TRBV4-1, TRBJ1-1)
CARSSMRERPNTEAFF

SEQ ID NO: 364499 - protein, 16 aa, Homo sapiens
  CDR3 for alpha chain variable domain of TCR clone 182250 (TRAV30, TRAJ24)
CGTEIVDADSWGKFQF

SEQ ID NO: 364500 - protein, 12 aa, Homo sapiens
  CDR3 for beta chain variable domain of TCR clone 182250 (TRBV7-3, TRBJ1-2)
CASSKKGVPVTF

SEQ ID NO: 364501 - protein, 13 aa, Homo sapiens
  CDR3 for alpha chain variable domain of TCR clone 182251 (TRAV20, TRAJ37)
CAGCSSNTGKLIF

SEQ ID NO: 364502 - protein, 13 aa, Homo sapiens
  CDR3 for beta chain variable domain of TCR clone 182251 (TRBV11-2, TRBJ2-5)
CASSRGPSETQYF

SEQ ID NO: 364503 - protein, 11 aa, Homo sapiens
  CDR3 for alpha chain variable domain of TCR clone 182252 (TRAV2, TRAJ13)
CASGGYQIVTF

SEQ ID NO: 364504 - protein, 15 aa, Homo sapiens
  CDR3 for beta chain variable domain of TCR clone 182252 (TRBV27, TRBJ2-1)
CASSNGGGSSNEQFF

SEQ ID NO: 364505 - protein, 11 aa, Homo sapiens
  CDR3 for alpha chain variable domain of TCR clone 182253 (TRAV13-1, TRAJ6)
CATLGSYIPTF

SEQ ID NO: 364506 - protein, 14 aa, Homo sapiens
  CDR3 for beta chain variable domain of TCR clone 182253 (TRBV7-9, TRBJ2-2)
CASSLGHRTGELFF

SEQ ID NO: 364507 - protein, 13 aa, Homo sapiens
  CDR3 for alpha chain variable domain of TCR clone 182254 (TRAV8-3, TRAJ21)
CAVGLDNFNKFYF

SEQ ID NO: 364508 - protein, 16 aa, Homo sapiens
  CDR3 for beta chain variable domain of TCR clone 182254 (TRBV19, TRBJ2-1)
CASSKAGPSSYNEQFF

SEQ ID NO: 364509 - protein, 16 aa, Homo sapiens
  CDR3 for alpha chain variable domain of TCR clone 182255 (TRAV12-1, TRAJ12)
CVVNTLLMDSSYKLIF

SEQ ID NO: 364510 - protein, 18 aa, Homo sapiens
  CDR3 for beta chain variable domain of TCR clone 182255 (TRBV11-2, TRBJ2-3)
CASSLGGASRGAPNTQYF

SEQ ID NO: 364511 - protein, 13 aa, Homo sapiens
  CDR3 for alpha chain variable domain of TCR clone 182256 (TRAV3, TRAJ27)
CAVRLLGAGKSTF

SEQ ID NO: 364512 - protein, 17 aa, Homo sapiens
  CDR3 for beta chain variable domain of TCR clone 182256 (TRBV27, TRBJ2-6)
CASSLTGFASGANVLTF

SEQ ID NO: 364513 - protein, 14 aa, Homo sapiens
  CDR3 for alpha chain variable domain of TCR clone 182257 (TRAV34, TRAJ44)
CGAEGTGTASKLTF

SEQ ID NO: 364514 - protein, 15 aa, Homo sapiens
  CDR3 for beta chain variable domain of TCR clone 182257 (TRBV5-1, TRBJ2-1)
CASSPPRAPYNEQFF

SEQ ID NO: 364515 - protein, 14 aa, Homo sapiens
  CDR3 for alpha chain variable domain of TCR clone 182258 (TRAV12-3, TRAJ21)
CAMEGHQGVNKFYF

SEQ ID NO: 364516 - protein, 16 aa, Homo sapiens
  CDR3 for beta chain variable domain of TCR clone 182258 (TRBV19, TRBJ2-1)
CASSKAGPSSYNEQFF

SEQ ID NO: 364517 - protein, 14 aa, Homo sapiens
  CDR3 for alpha chain variable domain of TCR clone 182259 (TRAV12-2, TRAJ36)
CAVSPPTGANNLLF

SEQ ID NO: 364518 - protein, 13 aa, Homo sapiens
  CDR3 for beta chain variable domain of TCR clone 182259 (TRBV20-1, TRBJ1-6)
CSAPTGLGSPLHF

SEQ ID NO: 364519 - protein, 12 aa, Homo sapiens
  CDR3 for alpha chain variable domain of TCR clone 182260 (TRAV12-3, TRAJ17)
CAMTLTGNKRTC

SEQ ID NO: 364520 - protein, 15 aa, Homo sapiens
  CDR3 for beta chain variable domain of TCR clone 182260 (TRBV20-1, TRBJ2-7)
CRARDRVSGMDEQYF

SEQ ID NO: 364521 - protein, 16 aa, Homo sapiens
  CDR3 for alpha chain variable domain of TCR clone 182261 (TRAV1-2, TRAJ10)
CAVRGVLTGGGNKLTF

SEQ ID NO: 364522 - protein, 17 aa, Homo sapiens
  CDR3 for beta chain variable domain of TCR clone 182261 (TRBV24-1, TRBJ2-1)
CATSDVSTSGTHNEQFF

SEQ ID NO: 364523 - protein, 15 aa, Homo sapiens
  CDR3 for alpha chain variable domain of TCR clone 182262 (TRAV16, TRAJ26)
CITVLQRNYGQNFVF

SEQ ID NO: 364524 - protein, 15 aa, Homo sapiens
  CDR3 for beta chain variable domain of TCR clone 182262 (TRBV7-2, TRBJ2-3)
CASSLTGTSTDTQYL

SEQ ID NO: 364525 - protein, 14 aa, Homo sapiens
  CDR3 for alpha chain variable domain of TCR clone 182263 (TRAV12-3, TRAJ10)
SHLPLTGGGNKLTF

SEQ ID NO: 364526 - protein, 16 aa, Homo sapiens
  CDR3 for beta chain variable domain of TCR clone 182263 (TRBV19, TRBJ2-1)
CASSKAGPSFYNEQFF

SEQ ID NO: 364527 - protein, 16 aa, Homo sapiens
  CDR3 for alpha chain variable domain of TCR clone 182264 (TRAV8-1, TRAJ39)
CAVNVPSYNAGNMLTF

SEQ ID NO: 364528 - protein, 13 aa, Homo sapiens
  CDR3 for beta chain variable domain of TCR clone 182264 (TRBV10-3, TRBJ2-7)
CASKLAVNYEQYF

SEQ ID NO: 364529 - protein, 17 aa, Homo sapiens
  CDR3 for alpha chain variable domain of TCR clone 182265 (TRAV26-1, TRAJ27)
CIVRVLTPMQANQPLVM

SEQ ID NO: 364530 - protein, 13 aa, Homo sapiens
  CDR3 for beta chain variable domain of TCR clone 182265 (TRBV20-1, TRBJ2-7)
CSATHTSGYEQYF

SEQ ID NO: 364531 - protein, 13 aa, Homo sapiens
  CDR3 for alpha chain variable domain of TCR clone 182266 (TRAV12-2, TRAJ12)
GAGPEDSSYKLIF

SEQ ID NO: 364532 - protein, 13 aa, Homo sapiens
  CDR3 for beta chain variable domain of TCR clone 182266 (TRBV28, TRBJ2-1)
CASSLIGRDEQFF

SEQ ID NO: 364533 - protein, 13 aa, Homo sapiens
  CDR3 for alpha chain variable domain of TCR clone 182267 (TRAV13-1, TRAJ20)
CAARVSNDYKLSF

SEQ ID NO: 364534 - protein, 13 aa, Homo sapiens
  CDR3 for beta chain variable domain of TCR clone 182267 (TRBV7-9, TRBJ1-2)
CASSLKQNYGYTF

SEQ ID NO: 364535 - protein, 18 aa, Homo sapiens
  CDR3 for alpha chain variable domain of TCR clone 182268 (TRAV8-3, TRAJ4)
WVRDPTSSDPGGYNKLIF

SEQ ID NO: 364536 - protein, 13 aa, Homo sapiens
  CDR3 for beta chain variable domain of TCR clone 182268 (TRBV20-1, TRBJ1-2)
CSATGIQGSGYAF

SEQ ID NO: 364537 - protein, 13 aa, Homo sapiens
  CDR3 for alpha chain variable domain of TCR clone 182269 (TRAV8-3, TRAJ42)
CARYGGCQGNLLF

SEQ ID NO: 364538 - protein, 14 aa, Homo sapiens
  CDR3 for beta chain variable domain of TCR clone 182269 (TRBV20-1, TRBJ2-1)
CSALDRGTYNEQFF

SEQ ID NO: 364539 - protein, 15 aa, Homo sapiens
  CDR3 for alpha chain variable domain of TCR clone 182270 (TRAV8-4, TRAJ47)
CAVSDLLGYGNKLVF

SEQ ID NO: 364540 - protein, 11 aa, Homo sapiens
  CDR3 for beta chain variable domain of TCR clone 182270 (TRBV19, TRBJ2-2)
CASSPSGGLNT

SEQ ID NO: 364541 - protein, 12 aa, Homo sapiens
  CDR3 for alpha chain variable domain of TCR clone 182271 (TRAV16, TRAJ56)
CAPTGANSKLTF

SEQ ID NO: 364542 - protein, 17 aa, Homo sapiens
  CDR3 for beta chain variable domain of TCR clone 182271 (TRBV27, TRBJ2-6)
CASSVTGFASGANVLTF

SEQ ID NO: 364543 - protein, 17 aa, Homo sapiens
  CDR3 for alpha chain variable domain of TCR clone 182272 (TRAV12-2, TRAJ6)
CAPQGPPRAGGSYIPTF

SEQ ID NO: 364544 - protein, 15 aa, Homo sapiens
  CDR3 for beta chain variable domain of TCR clone 182272 (TRBV11-3, TRBJ2-3)
CASLKDGREGDTQYF

SEQ ID NO: 364545 - protein, 11 aa, Homo sapiens
  CDR3 for alpha chain variable domain of TCR clone 182273 (TRAV17, TRAJ31)
CATDRTARLMF

SEQ ID NO: 364546 - protein, 14 aa, Homo sapiens
  CDR3 for beta chain variable domain of TCR clone 182273 (TRBV4-2, TRBJ2-3)
CASSQERGTDMQYF

SEQ ID NO: 364547 - protein, 12 aa, Homo sapiens
  CDR3 for alpha chain variable domain of TCR clone 182274 (TRAV12-2, TRAJ45)
CAVTGGADGLTF

SEQ ID NO: 364548 - protein, 14 aa, Homo sapiens
  CDR3 for beta chain variable domain of TCR clone 182274 (TRBV5-5, TRBJ2-7)
CPSSLGQGTYEQYF

SEQ ID NO: 364549 - protein, 15 aa, Homo sapiens
  CDR3 for alpha chain variable domain of TCR clone 182275 (TRAV35, TRAJ41)
CAGQLFSNSGYALNF

SEQ ID NO: 364550 - protein, 17 aa, Homo sapiens
  CDR3 for beta chain variable domain of TCR clone 182275 (TRBV12-4, TRBJ2-7)
CASSQRTSGTTSSTSGR

SEQ ID NO: 364551 - protein, 16 aa, Homo sapiens
  CDR3 for alpha chain variable domain of TCR clone 182276 (TRAV20, TRAJ22)
CAVQASSSGSARQLTF

SEQ ID NO: 364552 - protein, 13 aa, Homo sapiens
  CDR3 for beta chain variable domain of TCR clone 182276 (TRBV7-2, TRBJ2-5)
CASSKTSVENQYF

SEQ ID NO: 364553 - protein, 16 aa, Homo sapiens
  CDR3 for alpha chain variable domain of TCR clone 182277 (TRAV26-1, TRAJ52)
CIVSNAGGTSYGKLTF

SEQ ID NO: 364554 - protein, 16 aa, Homo sapiens
  CDR3 for beta chain variable domain of TCR clone 182277 (TRBV5-1, TRBJ2-1)
CASSLEGRGIYNEQFF

SEQ ID NO: 364555 - protein, 10 aa, Homo sapiens
  CDR3 for alpha chain variable domain of TCR clone 182278 (TRAV12-2, TRAJ41)
CAVTGYALNF

SEQ ID NO: 364556 - protein, 15 aa, Homo sapiens
  CDR3 for beta chain variable domain of TCR clone 182278 (TRBV4-2, TRBJ2-1)
CASSQDVRLAGEQFF

SEQ ID NO: 364557 - protein, 12 aa, Homo sapiens
  CDR3 for alpha chain variable domain of TCR clone 182279 (TRAV13-2, TRAJ23)
CAERHRGGKLIF

SEQ ID NO: 364558 - protein, 15 aa, Homo sapiens
  CDR3 for beta chain variable domain of TCR clone 182279 (TRBV5-1, TRBJ2-5)
CASSFKGGDQETQYF

SEQ ID NO: 364559 - protein, 10 aa, Homo sapiens
  CDR3 for alpha chain variable domain of TCR clone 182280 (TRAV12-1, TRAJ21)
CVVLSGYFGS

SEQ ID NO: 364560 - protein, 13 aa, Homo sapiens
  CDR3 for beta chain variable domain of TCR clone 182280 (TRBV7-3, TRBJ1-1)
CASSQDWGAEAFF

SEQ ID NO: 364561 - protein, 13 aa, Homo sapiens
  CDR3 for alpha chain variable domain of TCR clone 182281 (TRAV39, TRAJ58)
CAGEETSVSRLTF

SEQ ID NO: 364562 - protein, 15 aa, Homo sapiens
  CDR3 for beta chain variable domain of TCR clone 182281 (TRBV4-1, TRBJ2-7)
CASSQNTGRLYEQYF

SEQ ID NO: 364563 - protein, 13 aa, Homo sapiens
  CDR3 for alpha chain variable domain of TCR clone 182282 (TRAV17, TRAJ34)
CATVYYNTDKLIF

SEQ ID NO: 364564 - protein, 16 aa, Homo sapiens
  CDR3 for beta chain variable domain of TCR clone 182282 (TRBV10-3, TRBJ2-7)
CAISADLADRPYEQYF

SEQ ID NO: 364565 - protein, 13 aa, Homo sapiens
  CDR3 for alpha chain variable domain of TCR clone 182283 (TRAV8-3, TRAJ40)
CAVDPSGTYKYIF

SEQ ID NO: 364566 - protein, 17 aa, Homo sapiens
  CDR3 for beta chain variable domain of TCR clone 182283 (TRBV15, TRBJ1-4)
CATSRYGTGDPNEKLFF

SEQ ID NO: 364567 - protein, 14 aa, Homo sapiens
  CDR3 for alpha chain variable domain of TCR clone 182284 (TRAV17, TRAJ29)
CATDGGFRKHTSCL

SEQ ID NO: 364568 - protein, 14 aa, Homo sapiens
  CDR3 for beta chain variable domain of TCR clone 182284 (TRBV12-4, TRBJ2-7)
CASSSGLATSEQYF

SEQ ID NO: 364569 - protein, 14 aa, Homo sapiens
  CDR3 for alpha chain variable domain of TCR clone 182285 (TRAV16, TRAJ17)
CALSGRAAGNKLTF

SEQ ID NO: 364570 - protein, 15 aa, Homo sapiens
  CDR3 for beta chain variable domain of TCR clone 182285 (TRBV3-1, TRBJ1-2)
CASSPTRPPEGGYTF

SEQ ID NO: 364571 - protein, 13 aa, Homo sapiens
  CDR3 for alpha chain variable domain of TCR clone 182286 (TRAV27, TRAJ41)
CAGEGNSGYALNF

SEQ ID NO: 364572 - protein, 13 aa, Homo sapiens
  CDR3 for beta chain variable domain of TCR clone 182286 (TRBV7-2, TRBJ1-1)
CASSFGGNTEAFF

SEQ ID NO: 364573 - protein, 18 aa, Homo sapiens
  CDR3 for alpha chain variable domain of TCR clone 182287 (TRAV38-2/DV8, TRAJ23)
TAGGCPMYFCALSRKLIF

SEQ ID NO: 364574 - protein, 17 aa, Homo sapiens
  CDR3 for beta chain variable domain of TCR clone 182287 (TRBV5-4, TRBJ2-1)
CASSSAGGRGPYNEQFF

SEQ ID NO: 364575 - protein, 17 aa, Homo sapiens
  CDR3 for alpha chain variable domain of TCR clone 182288 (TRAV3, TRAJ6)
CAVRDGPRAGGSYIPTF

SEQ ID NO: 364576 - protein, 16 aa, Homo sapiens
  CDR3 for beta chain variable domain of TCR clone 182288 (TRBV20-1, TRBJ2-3)
CSAVRDRGPIADTQYF

SEQ ID NO: 364577 - protein, 15 aa, Homo sapiens
  CDR3 for alpha chain variable domain of TCR clone 182289 (TRAV26-1, TRAJ56)
FIVRVATGANSKLTF

SEQ ID NO: 364578 - protein, 15 aa, Homo sapiens
  CDR3 for beta chain variable domain of TCR clone 182289 (TRBV27, TRBJ2-7)
CASSPQREGQREQYF

SEQ ID NO: 364579 - protein, 14 aa, Homo sapiens
  CDR3 for alpha chain variable domain of TCR clone 182290 (TRAV1-2, TRAJ8)
CAVRVDTGFQKLVF

SEQ ID NO: 364580 - protein, 15 aa, Homo sapiens
  CDR3 for beta chain variable domain of TCR clone 182290 (TRBV4-1, TRBJ2-7)
CASSQNTGRLYEQYF

SEQ ID NO: 364581 - protein, 12 aa, Homo sapiens
  CDR3 for alpha chain variable domain of TCR clone 182291 (TRAV13-2, TRAJ23)
CAERQRGGKLIF

SEQ ID NO: 364582 - protein, 13 aa, Homo sapiens
  CDR3 for beta chain variable domain of TCR clone 182291 (TRBV7-9, TRBJ2-3)
CASSPGSTETQYF

SEQ ID NO: 364583 - protein, 15 aa, Homo sapiens
  CDR3 for alpha chain variable domain of TCR clone 182292 (TRAV8-3, TRAJ6)
CAVGEDRGGSYIPTF

SEQ ID NO: 364584 - protein, 14 aa, Homo sapiens
  CDR3 for beta chain variable domain of TCR clone 182292 (TRBV7-2, TRBJ1-4)
CASSHSKTNEKLFF

SEQ ID NO: 364585 - protein, 14 aa, Homo sapiens
  CDR3 for alpha chain variable domain of TCR clone 182293 (TRAV8-1, TRAJ5)
CAVRTDTGRRALTF

SEQ ID NO: 364586 - protein, 15 aa, Homo sapiens
  CDR3 for beta chain variable domain of TCR clone 182293 (TRBV7-2, TRBJ2-7)
CASSLAVGQVYEQYF

SEQ ID NO: 364587 - protein, 12 aa, Homo sapiens
  CDR3 for alpha chain variable domain of TCR clone 182294 (TRAV26-1, TRAJ31)
CIVRNNNARLMF

SEQ ID NO: 364588 - protein, 15 aa, Homo sapiens
  CDR3 for beta chain variable domain of TCR clone 182294 (TRBV20-1, TRBJ2-4)
SAVLDLTGGPNIQYF

SEQ ID NO: 364589 - protein, 11 aa, Homo sapiens
  CDR3 for alpha chain variable domain of TCR clone 182295 (TRAV1-2, TRAJ31)
CAVKNNARLMF

SEQ ID NO: 364590 - protein, 16 aa, Homo sapiens
  CDR3 for beta chain variable domain of TCR clone 182295 (TRBV27, TRBJ2-2)
CASSFRGLVRTGELFF

SEQ ID NO: 364591 - protein, 20 aa, Homo sapiens
  CDR3 for alpha chain variable domain of TCR clone 182296 (TRAV12-2, TRAJ52)
SPVIQPPARAGGTSDGKLTF

SEQ ID NO: 364592 - protein, 16 aa, Homo sapiens
  CDR3 for beta chain variable domain of TCR clone 182296 (TRBV15, TRBJ1-2)
CATSRGPRTGGGGYTF

SEQ ID NO: 364593 - protein, 11 aa, Homo sapiens
  CDR3 for alpha chain variable domain of TCR clone 182297 (TRAV12-1, TRAJ26)
CVVAYGQNFVF

SEQ ID NO: 364594 - protein, 13 aa, Homo sapiens
  CDR3 for beta chain variable domain of TCR clone 182297 (TRBV7-3, TRBJ1-1)
CASSQDWGAEAFF

SEQ ID NO: 364595 - protein, 16 aa, Homo sapiens
  CDR3 for alpha chain variable domain of TCR clone 182298 (TRAV4, TRAJ18)
CCVLLIVGSTLGRLYF

SEQ ID NO: 364596 - protein, 14 aa, Homo sapiens
  CDR3 for beta chain variable domain of TCR clone 182298 (TRBV18, TRBJ1-2)
CASSPSGRDYGYTF

SEQ ID NO: 364597 - protein, 16 aa, Homo sapiens
  CDR3 for alpha chain variable domain of TCR clone 182299 (TRAV14/DV4, TRAJ54)
CAMREGRIQGAQKLVF

SEQ ID NO: 364598 - protein, 13 aa, Homo sapiens
  CDR3 for beta chain variable domain of TCR clone 182299 (TRBV4-1, TRBJ2-1)
CASSQAGGDEQFF

SEQ ID NO: 364599 - protein, 14 aa, Homo sapiens
  CDR3 for alpha chain variable domain of TCR clone 182300 (TRAV17, TRAJ57)
CATDPQGGSEKLVF

SEQ ID NO: 364600 - protein, 15 aa, Homo sapiens
  CDR3 for beta chain variable domain of TCR clone 182300 (TRBV5-1, TRBJ2-1)
CASSFSGTGYNEQFF

SEQ ID NO: 364601 - protein, 16 aa, Homo sapiens
  CDR3 for alpha chain variable domain of TCR clone 182301 (TRAV8-6, TRAJ4)
CAATKILSGGYNKLIS

SEQ ID NO: 364602 - protein, 17 aa, Homo sapiens
  CDR3 for beta chain variable domain of TCR clone 182301 (TRBV20-1, TRBJ2-1)
CSASSSGLAGSYNEQFF

SEQ ID NO: 364603 - protein, 15 aa, Homo sapiens
  CDR3 for alpha chain variable domain of TCR clone 182302 (TRAV21, TRAJ53)
CATLNSGGSNYKLTF

SEQ ID NO: 364604 - protein, 14 aa, Homo sapiens
  CDR3 for beta chain variable domain of TCR clone 182302 (TRBV9, TRBJ1-2)
CASSVSTRSYDYTF

SEQ ID NO: 364605 - protein, 13 aa, Homo sapiens
  CDR3 for alpha chain variable domain of TCR clone 182303 (TRAV24, TRAJ37)
CAPLSSNTGKLIF

SEQ ID NO: 364606 - protein, 16 aa, Homo sapiens
  CDR3 for beta chain variable domain of TCR clone 182303 (TRBV20-1, TRBJ1-4)
CSAPGQGLLTNEKLFF

SEQ ID NO: 364607 - protein, 14 aa, Homo sapiens
  CDR3 for alpha chain variable domain of TCR clone 182304 (TRAV1-2, TRAJ16)
CAVNRFSDGQNLLF

SEQ ID NO: 364608 - protein, 19 aa, Homo sapiens
  CDR3 for beta chain variable domain of TCR clone 182304 (TRBV6-3, TRBJ1-2)
CASSYSKGRTGPPNYGYTF

SEQ ID NO: 364609 - protein, 15 aa, Homo sapiens
  CDR3 for alpha chain variable domain of TCR clone 182305 (TRAV23/DV6, )
CAADIQNPDPAVYQL

SEQ ID NO: 364610 - protein, 14 aa, Homo sapiens
  CDR3 for beta chain variable domain of TCR clone 182305 (TRBV5-7, TRBJ1-6)
CARSFAGHNSPLHF

SEQ ID NO: 364611 - protein, 15 aa, Homo sapiens
  CDR3 for alpha chain variable domain of TCR clone 182306 (TRAV39, TRAJ32)
CAVDMEGGATNKLIF

SEQ ID NO: 364612 - protein, 16 aa, Homo sapiens
  CDR3 for beta chain variable domain of TCR clone 182306 (TRBV7-3, TRBJ2-2)
CASSLKRGTLSGELFF

SEQ ID NO: 364613 - protein, 11 aa, Homo sapiens
  CDR3 for alpha chain variable domain of TCR clone 182307 (TRAV12-2, TRAJ29)
CAVTLRSPLVF

SEQ ID NO: 364614 - protein, 16 aa, Homo sapiens
  CDR3 for beta chain variable domain of TCR clone 182307 (TRBV19, TRBJ1-5)
CASSIDRGVPRQPQHF

SEQ ID NO: 364615 - protein, 13 aa, Homo sapiens
  CDR3 for alpha chain variable domain of TCR clone 182308 (TRAV8-1, TRAJ30)
CAVIMNRDDKIIF

SEQ ID NO: 364616 - protein, 14 aa, Homo sapiens
  CDR3 for beta chain variable domain of TCR clone 182308 (TRBV7-2, TRBJ2-7)
CASSPKTSFYEQYF

SEQ ID NO: 364617 - protein, 14 aa, Homo sapiens
  CDR3 for alpha chain variable domain of TCR clone 182309 (TRAV38-1, TRAJ29)
CAFITPSGNTPLVF

SEQ ID NO: 364618 - protein, 13 aa, Homo sapiens
  CDR3 for beta chain variable domain of TCR clone 182309 (TRBV24-1, TRBJ2-2)
CATGDWSTGELFF

SEQ ID NO: 364619 - protein, 13 aa, Homo sapiens
  CDR3 for alpha chain variable domain of TCR clone 182310 (TRAV13-1, TRAJ40)
CAARKGGTYKYIF

SEQ ID NO: 364620 - protein, 13 aa, Homo sapiens
  CDR3 for beta chain variable domain of TCR clone 182310 (TRBV7-6, TRBJ1-2)
CASSLVADYGYTF

SEQ ID NO: 364621 - protein, 15 aa, Homo sapiens
  CDR3 for alpha chain variable domain of TCR clone 182311 (TRAV38-1, TRAJ28)
CARRISGAGSYQLTF

SEQ ID NO: 364622 - protein, 13 aa, Homo sapiens
  CDR3 for beta chain variable domain of TCR clone 182311 (TRBV27, TRBJ1-1)
CASSLSIGAEAFF

SEQ ID NO: 364623 - protein, 12 aa, Homo sapiens
  CDR3 for alpha chain variable domain of TCR clone 182312 (TRAV8-6, TRAJ43)
CAVSHNNNDMRF

SEQ ID NO: 364624 - protein, 13 aa, Homo sapiens
  CDR3 for beta chain variable domain of TCR clone 182312 (TRBV7-3, TRBJ1-1)
CASSQDWGDEAFF

SEQ ID NO: 364625 - protein, 17 aa, Homo sapiens
  CDR3 for alpha chain variable domain of TCR clone 182313 (TRAV26-1, TRAJ53)
CIVRVYDSGGSNYKLTF

SEQ ID NO: 364626 - protein, 15 aa, Homo sapiens
  CDR3 for beta chain variable domain of TCR clone 182313 (TRBV20-1, TRBJ2-7)
CSARVPAAYFYVQYF

SEQ ID NO: 364627 - protein, 16 aa, Homo sapiens
  CDR3 for alpha chain variable domain of TCR clone 182314 (TRAV26-1, TRAJ48)
CIVRVRADFGNEKLTF

SEQ ID NO: 364628 - protein, 13 aa, Homo sapiens
  CDR3 for beta chain variable domain of TCR clone 182314 (TRBV28, TRBJ2-5)
CASSPTREETQYF

SEQ ID NO: 364629 - protein, 15 aa, Homo sapiens
  CDR3 for alpha chain variable domain of TCR clone 182315 (TRAV21, TRAJ53)
CATLNSGGSNYKLTF

SEQ ID NO: 364630 - protein, 16 aa, Homo sapiens
  CDR3 for beta chain variable domain of TCR clone 182315 (TRBV20-1, TRBJ1-2)
CCASMGQGVANYGYTF

SEQ ID NO: 364631 - protein, 18 aa, Homo sapiens
  CDR3 for alpha chain variable domain of TCR clone 182316 (TRAV21, TRAJ52)
CAVRPSPAGGTSYGKLTC

SEQ ID NO: 364632 - protein, 13 aa, Homo sapiens
  CDR3 for beta chain variable domain of TCR clone 182316 (TRBV10-3, TRBJ2-7)
CASKLAVNYEQYF

SEQ ID NO: 364633 - protein, 12 aa, Homo sapiens
  CDR3 for alpha chain variable domain of TCR clone 182317 (TRAV12-3, TRAJ17)
CAMTLTGNKLTF

SEQ ID NO: 364634 - protein, 11 aa, Homo sapiens
  CDR3 for beta chain variable domain of TCR clone 182317 (TRBV11-2, TRBJ1-1)
CASSINTEAFF

SEQ ID NO: 364635 - protein, 14 aa, Homo sapiens
  CDR3 for alpha chain variable domain of TCR clone 182318 (TRAV8-2, TRAJ4)
CVVSPSGGYNKLIF

SEQ ID NO: 364636 - protein, 11 aa, Homo sapiens
  CDR3 for beta chain variable domain of TCR clone 182318 (TRBV29-1, TRBJ2-5)
CIEDRTGTQYF

SEQ ID NO: 364637 - protein, 12 aa, Homo sapiens
  CDR3 for alpha chain variable domain of TCR clone 182319 (TRAV12-1, TRAJ40)
CVVYSGTYKYIF

SEQ ID NO: 364638 - protein, 14 aa, Homo sapiens
  CDR3 for beta chain variable domain of TCR clone 182319 (TRBV7-2, TRBJ2-2)
CASRGQGAAGELFF

SEQ ID NO: 364639 - protein, 16 aa, Homo sapiens
  CDR3 for alpha chain variable domain of TCR clone 182320 (TRAV41, TRAJ53)
CAVRFGSGGSNYKLTF

SEQ ID NO: 364640 - protein, 14 aa, Homo sapiens
  CDR3 for beta chain variable domain of TCR clone 182320 (TRBV4-1, TRBJ2-2)
CASSQAVNTGELFF

SEQ ID NO: 364641 - protein, 16 aa, Homo sapiens
  CDR3 for alpha chain variable domain of TCR clone 182321 (TRAV21, TRAJ52)
CAVTNAGGASYGKLTF

SEQ ID NO: 364642 - protein, 14 aa, Homo sapiens
  CDR3 for beta chain variable domain of TCR clone 182321 (TRBV19, TRBJ2-1)
CASPTFVLSGEQFF

SEQ ID NO: 364643 - protein, 13 aa, Homo sapiens
  CDR3 for alpha chain variable domain of TCR clone 182322 (TRAV12-2, TRAJ18)
CAVRGSTLGRLYF

SEQ ID NO: 364644 - protein, 12 aa, Homo sapiens
  CDR3 for beta chain variable domain of TCR clone 182322 (TRBV11-2, TRBJ2-1)
CASRQAHNEQFF

SEQ ID NO: 364645 - protein, 16 aa, Homo sapiens
  CDR3 for alpha chain variable domain of TCR clone 182323 (TRAV3, TRAJ10)
CAVRDMRAGGGNKLTV

SEQ ID NO: 364646 - protein, 12 aa, Homo sapiens
  CDR3 for beta chain variable domain of TCR clone 182323 (TRBV7-9, TRBJ1-1)
CASSLVRGEAFF

SEQ ID NO: 364647 - protein, 12 aa, Homo sapiens
  CDR3 for alpha chain variable domain of TCR clone 182324 (TRAV21, TRAJ49)
CAVNDGGNQFYF

SEQ ID NO: 364648 - protein, 13 aa, Homo sapiens
  CDR3 for beta chain variable domain of TCR clone 182324 (TRBV27, TRBJ1-1)
CASSLSIGAEAFF

SEQ ID NO: 364649 - protein, 16 aa, Homo sapiens
  CDR3 for alpha chain variable domain of TCR clone 182325 (TRAV9-2, TRAJ10)
CALSEGGTGGGNKLTF

SEQ ID NO: 364650 - protein, 16 aa, Homo sapiens
  CDR3 for beta chain variable domain of TCR clone 182325 (TRBV6-1, TRBJ1-3)
CASVQGGVETPYILER

SEQ ID NO: 364651 - protein, 12 aa, Homo sapiens
  CDR3 for alpha chain variable domain of TCR clone 182326 (TRAV13-2, TRAJ23)
CAERHRGGKLIS

SEQ ID NO: 364652 - protein, 16 aa, Homo sapiens
  CDR3 for beta chain variable domain of TCR clone 182326 (TRBV20-1, TRBJ1-4)
CSAPGQGLLTNEKLFF

SEQ ID NO: 364653 - protein, 14 aa, Homo sapiens
  CDR3 for alpha chain variable domain of TCR clone 182327 (TRAV1-2, TRAJ16)
CAVKRFSDGQKLLF

SEQ ID NO: 364654 - protein, 16 aa, Homo sapiens
  CDR3 for beta chain variable domain of TCR clone 182327 (TRBV27, TRBJ2-2)
CASSFRGLVRTGELFF

SEQ ID NO: 364655 - protein, 14 aa, Homo sapiens
  CDR3 for alpha chain variable domain of TCR clone 182328 (TRAV12-2, TRAJ15)
CAPHTGQAGTALIF

SEQ ID NO: 364656 - protein, 17 aa, Homo sapiens
  CDR3 for beta chain variable domain of TCR clone 182328 (TRBV7-9, TRBJ2-3)
CASSPTVAGDLTDTQYF

SEQ ID NO: 364657 - protein, 13 aa, Homo sapiens
  CDR3 for alpha chain variable domain of TCR clone 182329 (TRAV26-1, TRAJ34)
CIVRPWITDTLIF

SEQ ID NO: 364658 - protein, 13 aa, Homo sapiens
  CDR3 for beta chain variable domain of TCR clone 182329 (TRBV5-1, TRBJ2-1)
CASSLGSYNEQFF

SEQ ID NO: 364659 - protein, 14 aa, Homo sapiens
  CDR3 for alpha chain variable domain of TCR clone 182330 (TRAV26-1, TRAJ38)
CIADNAGNNRKQIW

SEQ ID NO: 364660 - protein, 15 aa, Homo sapiens
  CDR3 for beta chain variable domain of TCR clone 182330 (TRBV4-1, TRBJ1-1)
CTSSQEWGHYTEAFF

SEQ ID NO: 364661 - protein, 14 aa, Homo sapiens
  CDR3 for alpha chain variable domain of TCR clone 182331 (TRAV8-3, TRAJ35)
CAVVPQGFGNVLHC

SEQ ID NO: 364662 - protein, 14 aa, Homo sapiens
  CDR3 for beta chain variable domain of TCR clone 182331 (TRBV25-1, TRBJ1-1)
CASTHLGGNTEAFF

SEQ ID NO: 364663 - protein, 12 aa, Homo sapiens
  CDR3 for alpha chain variable domain of TCR clone 182332 (TRAV13-1, TRAJ21)
CTAKEGFNKFYF

SEQ ID NO: 364664 - protein, 15 aa, Homo sapiens
  CDR3 for beta chain variable domain of TCR clone 182332 (TRBV25-1, TRBJ1-4)
CASSPGDSTNEKLFF

SEQ ID NO: 364665 - protein, 16 aa, Homo sapiens
  CDR3 for alpha chain variable domain of TCR clone 182333 (TRAV14/DV4, TRAJ53)
CAMREGGGGSNYKLTF

SEQ ID NO: 364666 - protein, 11 aa, Homo sapiens
  CDR3 for beta chain variable domain of TCR clone 182333 (TRBV10-1, TRBJ2-3)
CASSDSDTQYF

SEQ ID NO: 364667 - protein, 11 aa, Homo sapiens
  CDR3 for alpha chain variable domain of TCR clone 182334 (TRAV3, TRAJ21)
CSVGNFNKFYF

SEQ ID NO: 364668 - protein, 17 aa, Homo sapiens
  CDR3 for beta chain variable domain of TCR clone 182334 (TRBV20-1, TRBJ2-1)
CSASSSGLAGSYNEQFF

SEQ ID NO: 364669 - protein, 13 aa, Homo sapiens
  CDR3 for alpha chain variable domain of TCR clone 182335 (TRAV27, TRAJ6)
CAGGKRGSYIPTF

SEQ ID NO: 364670 - protein, 14 aa, Homo sapiens
  CDR3 for beta chain variable domain of TCR clone 182335 (TRBV20-1, TRBJ2-4)
CSASGRVGENIQYF

SEQ ID NO: 364671 - protein, 13 aa, Homo sapiens
  CDR3 for alpha chain variable domain of TCR clone 182336 (TRAV12-2, TRAJ12)
CAVNWDSSYKLIF

SEQ ID NO: 364672 - protein, 14 aa, Homo sapiens
  CDR3 for beta chain variable domain of TCR clone 182336 (TRBV7-2, TRBJ2-2)
CASSPSGGTGELFF

SEQ ID NO: 364673 - protein, 15 aa, Homo sapiens
  CDR3 for alpha chain variable domain of TCR clone 182337 (TRAV20, TRAJ50)
CAVRQMKTSYDKVEF

SEQ ID NO: 364674 - protein, 16 aa, Homo sapiens
  CDR3 for beta chain variable domain of TCR clone 182337 (TRBV15, TRBJ1-2)
CATSRGPRTGGGGYTF

SEQ ID NO: 364675 - protein, 11 aa, Homo sapiens
  CDR3 for alpha chain variable domain of TCR clone 182338 (TRAV3, TRAJ49)
CAPITGNQFYF

SEQ ID NO: 364676 - protein, 16 aa, Homo sapiens
  CDR3 for beta chain variable domain of TCR clone 182338 (TRBV5-1, TRBJ2-3)
CASSVFPMPSTDTQYF

SEQ ID NO: 364677 - protein, 12 aa, Homo sapiens
  CDR3 for alpha chain variable domain of TCR clone 182339 (TRAV16, TRAJ56)
CAPTGANSKLTF

SEQ ID NO: 364678 - protein, 17 aa, Homo sapiens
  CDR3 for beta chain variable domain of TCR clone 182339 (TRBV11-1, TRBJ2-6)
CAGSLTGFASGANVLTF

SEQ ID NO: 364679 - protein, 13 aa, Homo sapiens
  CDR3 for alpha chain variable domain of TCR clone 182340 (TRAV8-6, TRAJ8)
CAVSNTGFQKLVF

SEQ ID NO: 364680 - protein, 15 aa, Homo sapiens
  CDR3 for beta chain variable domain of TCR clone 182340 (TRBV28, TRBJ2-5)
CASSSERTIQETQYF

SEQ ID NO: 364681 - protein, 14 aa, Homo sapiens
  CDR3 for alpha chain variable domain of TCR clone 182341 (TRAV35, TRAJ13)
CAGSPSGGYQKVTF

SEQ ID NO: 364682 - protein, 14 aa, Homo sapiens
  CDR3 for beta chain variable domain of TCR clone 182341 (TRBV27, TRBJ2-1)
CASSATGGYNEQFF

SEQ ID NO: 364683 - protein, 14 aa, Homo sapiens
  CDR3 for alpha chain variable domain of TCR clone 182342 (TRAV38-1, TRAJ45)
CASHSGGGADGLTF

SEQ ID NO: 364684 - protein, 13 aa, Homo sapiens
  CDR3 for beta chain variable domain of TCR clone 182342 (TRBV4-2, TRBJ1-1)
CASSQAGNAEAFF

SEQ ID NO: 364685 - protein, 12 aa, Homo sapiens
  CDR3 for alpha chain variable domain of TCR clone 182343 (TRAV13-1, TRAJ3)
CAATGVQQCFQD

SEQ ID NO: 364686 - protein, 16 aa, Homo sapiens
  CDR3 for beta chain variable domain of TCR clone 182343 (TRBV7-3, TRBJ2-2)
CASSLKRGTLSGELCF

SEQ ID NO: 364687 - protein, 16 aa, Homo sapiens
  CDR3 for alpha chain variable domain of TCR clone 182344 (TRAV22, TRAJ45)
CAVERGKRGGADGLTF

SEQ ID NO: 364688 - protein, 11 aa, Homo sapiens
  CDR3 for beta chain variable domain of TCR clone 182344 (TRBV29-1, TRBJ2-5)
CSEDRTWTQYF

SEQ ID NO: 364689 - protein, 12 aa, Homo sapiens
  CDR3 for alpha chain variable domain of TCR clone 182345 (TRAV3, TRAJ20)
CAVRDPDYKLSF

SEQ ID NO: 364690 - protein, 14 aa, Homo sapiens
  CDR3 for beta chain variable domain of TCR clone 182345 (TRBV7-2, TRBJ2-2)
CASRGQGAAGELFF

SEQ ID NO: 364691 - protein, 16 aa, Homo sapiens
  CDR3 for alpha chain variable domain of TCR clone 182346 (TRAV12-1, TRAJ43)
CVVNPHRFGAGTRLTV

SEQ ID NO: 364692 - protein, 13 aa, Homo sapiens
  CDR3 for beta chain variable domain of TCR clone 182346 (TRBV7-9, TRBJ2-5)
CASLPSGRETQYF

SEQ ID NO: 364693 - protein, 16 aa, Homo sapiens
  CDR3 for alpha chain variable domain of TCR clone 182347 (TRAV20, TRAJ38)
CAVQASNAGNNRKLIR

SEQ ID NO: 364694 - protein, 16 aa, Homo sapiens
  CDR3 for beta chain variable domain of TCR clone 182347 (TRBV7-8, TRBJ2-6)
CASRVGDSSGANVLTF

SEQ ID NO: 364695 - protein, 18 aa, Homo sapiens
  CDR3 for alpha chain variable domain of TCR clone 182348 (TRAV26-2, TRAJ54)
CILRDVEVGIQGAQKLVF

SEQ ID NO: 364696 - protein, 16 aa, Homo sapiens
  CDR3 for beta chain variable domain of TCR clone 182348 (TRBV5-5, TRBJ2-2)
CASSGRREGATGELFF

SEQ ID NO: 364697 - protein, 13 aa, Homo sapiens
  CDR3 for alpha chain variable domain of TCR clone 182349 (TRAV35, TRAJ58)
CAGLETSGSRLTF

SEQ ID NO: 364698 - protein, 14 aa, Homo sapiens
  CDR3 for beta chain variable domain of TCR clone 182349 (TRBV7-2, TRBJ2-5)
CASSPRGSSETQYF

SEQ ID NO: 364699 - protein, 13 aa, Homo sapiens
  CDR3 for alpha chain variable domain of TCR clone 182350 (TRAV13-1, TRAJ26)
CAIVFGHGTRLSV

SEQ ID NO: 364700 - protein, 15 aa, Homo sapiens
  CDR3 for beta chain variable domain of TCR clone 182350 (TRBV12-4, TRBJ2-1)
CASSLLGRTYNEQFF

SEQ ID NO: 364701 - protein, 11 aa, Homo sapiens
  CDR3 for alpha chain variable domain of TCR clone 182351 (TRAV35, TRAJ12)
RRMDSSYKLIF

SEQ ID NO: 364702 - protein, 14 aa, Homo sapiens
  CDR3 for beta chain variable domain of TCR clone 182351 (TRBV19, TRBJ1-1)
CASSPNRGGTEAFF

SEQ ID NO: 364703 - protein, 13 aa, Homo sapiens
  CDR3 for alpha chain variable domain of TCR clone 182352 (TRAV22, TRAJ29)
CAVGGSGNTPLVF

SEQ ID NO: 364704 - protein, 15 aa, Homo sapiens
  CDR3 for beta chain variable domain of TCR clone 182352 (TRBV18, TRBJ1-1)
CASSPRQGENTEAFF

SEQ ID NO: 364705 - protein, 12 aa, Homo sapiens
  CDR3 for alpha chain variable domain of TCR clone 182353 (TRAV8-6, TRAJ16)
CAVVLSGQKLLF

SEQ ID NO: 364706 - protein, 14 aa, Homo sapiens
  CDR3 for beta chain variable domain of TCR clone 182353 (TRBV4-2, TRBJ1-5)
CASSQGQGLQPQHF

SEQ ID NO: 364707 - protein, 14 aa, Homo sapiens
  CDR3 for alpha chain variable domain of TCR clone 182354 (TRAV16, TRAJ33)
YALSAMDSNYQLIL

SEQ ID NO: 364708 - protein, 15 aa, Homo sapiens
  CDR3 for beta chain variable domain of TCR clone 182354 (TRBV28, TRBJ2-7)
CASSLEAYPIYEQYF

SEQ ID NO: 364709 - protein, 16 aa, Homo sapiens
  CDR3 for alpha chain variable domain of TCR clone 182355 (TRAV30, TRAJ24)
CGPEIADADSWGKFQF

SEQ ID NO: 364710 - protein, 14 aa, Homo sapiens
  CDR3 for beta chain variable domain of TCR clone 182355 (TRBV12-5, TRBJ2-5)
CASGSRTHQETQYF

SEQ ID NO: 364711 - protein, 13 aa, Homo sapiens
  CDR3 for alpha chain variable domain of TCR clone 182356 (TRAV23/DV6, TRAJ21)
CAASREQLQQILL

SEQ ID NO: 364712 - protein, 16 aa, Homo sapiens
  CDR3 for beta chain variable domain of TCR clone 182356 (TRBV20-1, TRBJ2-3)
GSAVRDRGPIADTQYF

SEQ ID NO: 364713 - protein, 13 aa, Homo sapiens
  CDR3 for alpha chain variable domain of TCR clone 182357 (TRAV17, TRAJ9)
CATGSTEGFKTIF

SEQ ID NO: 364714 - protein, 14 aa, Homo sapiens
  CDR3 for beta chain variable domain of TCR clone 182357 (TRBV7-8, TRBJ2-7)
CASTFRGGPNEQYF

SEQ ID NO: 364715 - protein, 18 aa, Homo sapiens
  CDR3 for alpha chain variable domain of TCR clone 182358 (TRAV13-1, TRAJ52)
CAAKNPNPGGTSYGKLTF

SEQ ID NO: 364716 - protein, 17 aa, Homo sapiens
  CDR3 for beta chain variable domain of TCR clone 182358 (TRBV4-1, TRBJ2-7)
CASSPFLTSGGVVEQYF

SEQ ID NO: 364717 - protein, 18 aa, Homo sapiens
  CDR3 for alpha chain variable domain of TCR clone 182359 (TRAV21, TRAJ52)
CAVRPSPAGGTSYGKLTF

SEQ ID NO: 364718 - protein, 14 aa, Homo sapiens
  CDR3 for beta chain variable domain of TCR clone 182359 (TRBV7-2, TRBJ1-1)
CASSFLTGTTESFF

SEQ ID NO: 364719 - protein, 13 aa, Homo sapiens
  CDR3 for alpha chain variable domain of TCR clone 182360 (TRAV8-2, TRAJ13)
CVVSDLRYQKGTF

SEQ ID NO: 364720 - protein, 14 aa, Homo sapiens
  CDR3 for beta chain variable domain of TCR clone 182360 (TRBV25-1, TRBJ1-1)
CASTHLGGNTEAFF

SEQ ID NO: 364721 - protein, 15 aa, Homo sapiens
  CDR3 for alpha chain variable domain of TCR clone 182361 (TRAV17, TRAJ57)
CATGPSQGGSEKLVF

SEQ ID NO: 364722 - protein, 16 aa, Homo sapiens
  CDR3 for beta chain variable domain of TCR clone 182361 (TRBV13, TRBJ2-2)
CASSPRTGEHTGELFF

SEQ ID NO: 364723 - protein, 11 aa, Homo sapiens
  CDR3 for alpha chain variable domain of TCR clone 182362 (TRAV29/DV5, TRAJ47)
CAAQRGNKRVF

SEQ ID NO: 364724 - protein, 12 aa, Homo sapiens
  CDR3 for beta chain variable domain of TCR clone 182362 (TRBV11-2, TRBJ2-7)
CASSLPTYEQYF

SEQ ID NO: 364725 - protein, 15 aa, Homo sapiens
  CDR3 for alpha chain variable domain of TCR clone 182363 (TRAV35, TRAJ23)
CAGQRGYNQGVKLIF

SEQ ID NO: 364726 - protein, 16 aa, Homo sapiens
  CDR3 for beta chain variable domain of TCR clone 182363 (TRBV27, TRBJ2-1)
CASSSRLAGNYNEQFF

SEQ ID NO: 364727 - protein, 15 aa, Homo sapiens
  CDR3 for alpha chain variable domain of TCR clone 182364 (TRAV8-3, TRAJ37)
CAVGARASNTGQLIF

SEQ ID NO: 364728 - protein, 15 aa, Homo sapiens
  CDR3 for beta chain variable domain of TCR clone 182364 (TRBV5-4, TRBJ2-3)
CASSLAGRVTDTQYF

SEQ ID NO: 364729 - protein, 16 aa, Homo sapiens
  CDR3 for alpha chain variable domain of TCR clone 182365 (TRAV12-3, TRAJ53)
CAMSPGSGGSHYKLTF

SEQ ID NO: 364730 - protein, 16 aa, Homo sapiens
  CDR3 for beta chain variable domain of TCR clone 182365 (TRBV19, TRBJ2-1)
CASSKAGPSSYNEQFF

SEQ ID NO: 364731 - protein, 17 aa, Homo sapiens
  CDR3 for alpha chain variable domain of TCR clone 182366 (TRAV3, TRAJ6)
CAVRDGPRAGGSDIPTF

SEQ ID NO: 364732 - protein, 12 aa, Homo sapiens
  CDR3 for beta chain variable domain of TCR clone 182366 (TRBV11-2, TRBJ2-1)
CASSPGNNEQFF

SEQ ID NO: 364733 - protein, 11 aa, Homo sapiens
  CDR3 for alpha chain variable domain of TCR clone 182367 (TRAV8-3, TRAJ49)
CAVNTGNQFYF

SEQ ID NO: 364734 - protein, 12 aa, Homo sapiens
  CDR3 for beta chain variable domain of TCR clone 182367 (TRBV11-2, TRBJ2-7)
RASSPPADEQYF

SEQ ID NO: 364735 - protein, 14 aa, Homo sapiens
  CDR3 for alpha chain variable domain of TCR clone 182368 (TRAV21, TRAJ12)
CAVRNGDSNYKLIF

SEQ ID NO: 364736 - protein, 14 aa, Homo sapiens
  CDR3 for beta chain variable domain of TCR clone 182368 (TRBV7-6, TRBJ2-7)
CASSLTGTGNEQYF

SEQ ID NO: 364737 - protein, 13 aa, Homo sapiens
  CDR3 for alpha chain variable domain of TCR clone 182369 (TRAV8-6, TRAJ21)
CAVSPSSLNKFYF

SEQ ID NO: 364738 - protein, 14 aa, Homo sapiens
  CDR3 for beta chain variable domain of TCR clone 182369 (TRBV18, TRBJ2-5)
CASSPRASSETQYF

SEQ ID NO: 364739 - protein, 13 aa, Homo sapiens
  CDR3 for alpha chain variable domain of TCR clone 182370 (TRAV13-2, TRAJ48)
CAEMDFGNEKLTF

SEQ ID NO: 364740 - protein, 14 aa, Homo sapiens
  CDR3 for beta chain variable domain of TCR clone 182370 (TRBV2, TRBJ2-3)
CAVGGTISTDTQYF

SEQ ID NO: 364741 - protein, 17 aa, Homo sapiens
  CDR3 for alpha chain variable domain of TCR clone 182371 (TRAV17, TRAJ24)
CATANSMTTDSWGKLQF

SEQ ID NO: 364742 - protein, 14 aa, Homo sapiens
  CDR3 for beta chain variable domain of TCR clone 182371 (TRBV12-4, TRBJ1-1)
CASSLGTGGTEAFF

SEQ ID NO: 364743 - protein, 13 aa, Homo sapiens
  CDR3 for alpha chain variable domain of TCR clone 182372 (TRAV12-2, TRAJ9)
CAVKWAGGFKTIL

SEQ ID NO: 364744 - protein, 13 aa, Homo sapiens
  CDR3 for beta chain variable domain of TCR clone 182372 (TRBV7-3, TRBJ1-1)
CASSQDWGAEAFF

SEQ ID NO: 364745 - protein, 15 aa, Homo sapiens
  CDR3 for alpha chain variable domain of TCR clone 182373 (TRAV3, TRAJ3)
CAVRDGHSSASKIIF

SEQ ID NO: 364746 - protein, 17 aa, Homo sapiens
  CDR3 for beta chain variable domain of TCR clone 182373 (TRBV28, TRBJ2-5)
CASSTPEGDALQETQYF

SEQ ID NO: 364747 - protein, 14 aa, Homo sapiens
  CDR3 for alpha chain variable domain of TCR clone 182374 (TRAV12-1, TRAJ12)
CVVTRMDSSYKLIF

SEQ ID NO: 364748 - protein, 13 aa, Homo sapiens
  CDR3 for beta chain variable domain of TCR clone 182374 (TRBV20-1, TRBJ1-1)
CSARGGENTEAFF

SEQ ID NO: 364749 - protein, 11 aa, Homo sapiens
  CDR3 for alpha chain variable domain of TCR clone 182375 (TRAV2, TRAJ39)
CSYYCRQHAHL

SEQ ID NO: 364750 - protein, 16 aa, Homo sapiens
  CDR3 for beta chain variable domain of TCR clone 182375 (TRBV24-1, TRBJ2-3)
CATSGYRDRDTDTQYF

SEQ ID NO: 364751 - protein, 14 aa, Homo sapiens
  CDR3 for alpha chain variable domain of TCR clone 182376 (TRAV23/DV6, TRAJ40)
CAASLTSGTYKYIF

SEQ ID NO: 364752 - protein, 14 aa, Homo sapiens
  CDR3 for beta chain variable domain of TCR clone 182376 (TRBV5-1, TRBJ2-3)
CARSRGQGGGTQYF

SEQ ID NO: 364753 - protein, 14 aa, Homo sapiens
  CDR3 for alpha chain variable domain of TCR clone 182377 (TRAV8-6, TRAJ12)
CAVKAADSSYKLIF

SEQ ID NO: 364754 - protein, 15 aa, Homo sapiens
  CDR3 for beta chain variable domain of TCR clone 182377 (TRBV5-1, TRBJ2-5)
RASSLGLAEQETQYF

SEQ ID NO: 364755 - protein, 15 aa, Homo sapiens
  CDR3 for alpha chain variable domain of TCR clone 182378 (TRAV25, TRAJ52)
CAGRPGGTSYGKLTF

SEQ ID NO: 364756 - protein, 17 aa, Homo sapiens
  CDR3 for beta chain variable domain of TCR clone 182378 (TRBV7-8, TRBJ2-6)
CASSAVTGGAGANDLTF

SEQ ID NO: 364757 - protein, 15 aa, Homo sapiens
  CDR3 for alpha chain variable domain of TCR clone 182379 (TRAV3, TRAJ3)
CAVRDMSSSASKIIF

SEQ ID NO: 364758 - protein, 14 aa, Homo sapiens
  CDR3 for beta chain variable domain of TCR clone 182379 (TRBV6-6, TRBJ2-7)
CAGSIAGGVDEQYF

SEQ ID NO: 364759 - protein, 12 aa, Homo sapiens
  CDR3 for alpha chain variable domain of TCR clone 182380 (TRAV12-1, TRAJ31)
CVVNRNNARLMF

SEQ ID NO: 364760 - protein, 15 aa, Homo sapiens
  CDR3 for beta chain variable domain of TCR clone 182380 (TRBV10-3, TRBJ2-3)
CAISEALSSTDTQYL

SEQ ID NO: 364761 - protein, 12 aa, Homo sapiens
  CDR3 for alpha chain variable domain of TCR clone 182381 (TRAV12-3, TRAJ17)
CAMTLTGNKLTF

SEQ ID NO: 364762 - protein, 15 aa, Homo sapiens
  CDR3 for beta chain variable domain of TCR clone 182381 (TRBV20-1, TRBJ2-7)
CSASDRVSGMDEQCF

SEQ ID NO: 364763 - protein, 11 aa, Homo sapiens
  CDR3 for alpha chain variable domain of TCR clone 182382 (TRAV12-1, TRAJ43)
CVEYDKNDMRF

SEQ ID NO: 364764 - protein, 15 aa, Homo sapiens
  CDR3 for beta chain variable domain of TCR clone 182382 (TRBV18, TRBJ2-5)
CASSPRASEAETQYF

SEQ ID NO: 364765 - protein, 13 aa, Homo sapiens
  CDR3 for alpha chain variable domain of TCR clone 182383 (TRAV16, TRAJ54)
CALKVRGAQKLGF

SEQ ID NO: 364766 - protein, 13 aa, Homo sapiens
  CDR3 for beta chain variable domain of TCR clone 182383 (TRBV20-1, TRBJ1-1)
CSARGGGNTEAFF

SEQ ID NO: 364767 - protein, 14 aa, Homo sapiens
  CDR3 for alpha chain variable domain of TCR clone 182384 (TRAV13-1, TRAJ44)
CAAEATGTASKLTF

SEQ ID NO: 364768 - protein, 17 aa, Homo sapiens
  CDR3 for beta chain variable domain of TCR clone 182384 (TRBV7-3, TRBJ2-3)
RASRLMKRMRGADTQYF

SEQ ID NO: 364769 - protein, 12 aa, Homo sapiens
  CDR3 for alpha chain variable domain of TCR clone 182385 (TRAV12-1, TRAJ31)
CLSWNNNARLMF

SEQ ID NO: 364770 - protein, 15 aa, Homo sapiens
  CDR3 for beta chain variable domain of TCR clone 182385 (TRBV7-2, TRBJ1-5)
CASSLDRGQDQPQHF

SEQ ID NO: 364771 - protein, 17 aa, Homo sapiens
  CDR3 for alpha chain variable domain of TCR clone 182386 (TRAV36/DV7, TRAJ52)
CAVAQRAGGTSYGKLTF

SEQ ID NO: 364772 - protein, 15 aa, Homo sapiens
  CDR3 for beta chain variable domain of TCR clone 182386 (TRBV6-5, TRBJ2-1)
CASSYDAGAGNEQFF

SEQ ID NO: 364773 - protein, 13 aa, Homo sapiens
  CDR3 for alpha chain variable domain of TCR clone 182387 (TRAV36/DV7, TRAJ38)
CVANAGNNRKLIW

SEQ ID NO: 364774 - protein, 14 aa, Homo sapiens
  CDR3 for beta chain variable domain of TCR clone 182387 (TRBV7-2, TRBJ2-7)
CASGLRWEVNEQYF

SEQ ID NO: 364775 - protein, 14 aa, Homo sapiens
  CDR3 for alpha chain variable domain of TCR clone 182388 (TRAV3, TRAJ22)
CAVIYYGSARQLTF

SEQ ID NO: 364776 - protein, 13 aa, Homo sapiens
  CDR3 for beta chain variable domain of TCR clone 182388 (TRBV11-2, TRBJ2-5)
CASGHGAKETQYF

SEQ ID NO: 364777 - protein, 14 aa, Homo sapiens
  CDR3 for alpha chain variable domain of TCR clone 182389 (TRAV1-2, TRAJ8)
CAVRDDTGFQKIVF

SEQ ID NO: 364778 - protein, 15 aa, Homo sapiens
  CDR3 for beta chain variable domain of TCR clone 182389 (TRBV7-9, TRBJ1-4)
CASSARTGGNEKLFF

SEQ ID NO: 364779 - protein, 15 aa, Homo sapiens
  CDR3 for alpha chain variable domain of TCR clone 182390 (TRAV16, TRAJ52)
CSTWVGGTSYGKLTF

SEQ ID NO: 364780 - protein, 14 aa, Homo sapiens
  CDR3 for beta chain variable domain of TCR clone 182390 (TRBV19, TRBJ1-2)
CASSLQGQAYGYTF

SEQ ID NO: 364781 - protein, 14 aa, Homo sapiens
  CDR3 for alpha chain variable domain of TCR clone 182391 (TRAV12-2, TRAJ13)
CAVKKTGGYQKVTF

SEQ ID NO: 364782 - protein, 16 aa, Homo sapiens
  CDR3 for beta chain variable domain of TCR clone 182391 (TRBV5-1, TRBJ1-4)
CASSLAAQPTNEKLFF

SEQ ID NO: 364783 - protein, 12 aa, Homo sapiens
  CDR3 for alpha chain variable domain of TCR clone 182392 (TRAV30, TRAJ43)
CGTEERGNYMRF

SEQ ID NO: 364784 - protein, 17 aa, Homo sapiens
  CDR3 for beta chain variable domain of TCR clone 182392 (TRBV11-2, TRBJ2-1)
CASSLYPPGVEYNEQFF

SEQ ID NO: 364785 - protein, 12 aa, Homo sapiens
  CDR3 for alpha chain variable domain of TCR clone 182393 (TRAV30, TRAJ43)
CGTEERGNDMRF

SEQ ID NO: 364786 - protein, 16 aa, Homo sapiens
  CDR3 for beta chain variable domain of TCR clone 182393 (TRBV6-6, TRBJ2-4)
CASSNAGQGAKNIQYF

SEQ ID NO: 364787 - protein, 14 aa, Homo sapiens
  CDR3 for alpha chain variable domain of TCR clone 182394 (TRAV9-2, TRAJ39)
CALYIYNAGNMLTF

SEQ ID NO: 364788 - protein, 13 aa, Homo sapiens
  CDR3 for beta chain variable domain of TCR clone 182394 (TRBV20-1, TRBJ2-5)
CSARGDYQETQYF

SEQ ID NO: 364789 - protein, 12 aa, Homo sapiens
  CDR3 for alpha chain variable domain of TCR clone 182395 (TRAV35, TRAJ31)
CAAASNNARLMF

SEQ ID NO: 364790 - protein, 12 aa, Homo sapiens
  CDR3 for beta chain variable domain of TCR clone 182395 (TRBV11-2, TRBJ2-2)
CASSLGGGELFF

SEQ ID NO: 364791 - protein, 16 aa, Homo sapiens
  CDR3 for alpha chain variable domain of TCR clone 182396 (TRAV3, TRAJ10)
SAVRDMRAGGGNKLTF

SEQ ID NO: 364792 - protein, 15 aa, Homo sapiens
  CDR3 for beta chain variable domain of TCR clone 182396 (TRBV15, TRBJ1-5)
CATSTTGVVNQPQHF

SEQ ID NO: 364793 - protein, 14 aa, Homo sapiens
  CDR3 for alpha chain variable domain of TCR clone 182397 (TRAV12-2, TRAJ40)
CAVKIPPGTYKYIF

SEQ ID NO: 364794 - protein, 14 aa, Homo sapiens
  CDR3 for beta chain variable domain of TCR clone 182397 (TRBV20-1, TRBJ1-1)
CSAQTRIGGTEAFL

SEQ ID NO: 364795 - protein, 12 aa, Homo sapiens
  CDR3 for alpha chain variable domain of TCR clone 182398 (TRAV3, TRAJ39)
CAVVEWSNMLTF

SEQ ID NO: 364796 - protein, 14 aa, Homo sapiens
  CDR3 for beta chain variable domain of TCR clone 182398 (TRBV7-8, TRBJ2-3)
CARSFPDGQDTQYF

SEQ ID NO: 364797 - protein, 17 aa, Homo sapiens
  CDR3 for alpha chain variable domain of TCR clone 182399 (TRAV3, TRAJ38)
CAVRDWLNAGNNRKLIR

SEQ ID NO: 364798 - protein, 15 aa, Homo sapiens
  CDR3 for beta chain variable domain of TCR clone 182399 (TRBV27, TRBJ2-1)
CASSNGGGSSNEQFF

SEQ ID NO: 364799 - protein, 13 aa, Homo sapiens
  CDR3 for alpha chain variable domain of TCR clone 182400 (TRAV12-1, TRAJ29)
FVVNGPGNTPLVF

SEQ ID NO: 364800 - protein, 13 aa, Homo sapiens
  CDR3 for beta chain variable domain of TCR clone 182400 (TRBV15, TRBJ1-6)
CATSGGLNSPLHF

SEQ ID NO: 364801 - protein, 14 aa, Homo sapiens
  CDR3 for alpha chain variable domain of TCR clone 182401 (TRAV1-1, TRAJ27)
CAVIYNTNAGKSTF

SEQ ID NO: 364802 - protein, 18 aa, Homo sapiens
  CDR3 for beta chain variable domain of TCR clone 182401 (TRBV7-3, TRBJ2-1)
CASILTLASGRAMVSSSS

SEQ ID NO: 364803 - protein, 14 aa, Homo sapiens
  CDR3 for alpha chain variable domain of TCR clone 182402 (TRAV12-2, TRAJ17)
CAVLFKASGNKLTF

SEQ ID NO: 364804 - protein, 12 aa, Homo sapiens
  CDR3 for beta chain variable domain of TCR clone 182402 (TRBV11-2, TRBJ2-2)
CASSLGGGELFF

SEQ ID NO: 364805 - protein, 15 aa, Homo sapiens
  CDR3 for alpha chain variable domain of TCR clone 182403 (TRAV26-1, TRAJ56)
CIVRVDNGDNSKLTF

SEQ ID NO: 364806 - protein, 15 aa, Homo sapiens
  CDR3 for beta chain variable domain of TCR clone 182403 (TRBV20-1, TRBJ2-7)
CSARDPTEVGHEQYF

SEQ ID NO: 364807 - protein, 11 aa, Homo sapiens
  CDR3 for alpha chain variable domain of TCR clone 182404 (TRAV1-2, TRAJ20)
RAVANDYKLSF

SEQ ID NO: 364808 - protein, 18 aa, Homo sapiens
  CDR3 for beta chain variable domain of TCR clone 182404 (TRBV20-1, TRBJ2-6)
CSAETTPTHGSGPNVLTF

SEQ ID NO: 364809 - protein, 16 aa, Homo sapiens
  CDR3 for alpha chain variable domain of TCR clone 182405 (TRAV3, TRAJ10)
CAVRDMRAGGGNKLNF

SEQ ID NO: 364810 - protein, 15 aa, Homo sapiens
  CDR3 for beta chain variable domain of TCR clone 182405 (TRBV11-2, TRBJ1-6)
CASTGFGTAVSPLLF

SEQ ID NO: 364811 - protein, 12 aa, Homo sapiens
  CDR3 for alpha chain variable domain of TCR clone 182406 (TRAV25, TRAJ48)
CAGDFGNEKLTF

SEQ ID NO: 364812 - protein, 12 aa, Homo sapiens
  CDR3 for beta chain variable domain of TCR clone 182406 (TRBV2, TRBJ2-5)
CASKEYGETHYF

SEQ ID NO: 364813 - protein, 14 aa, Homo sapiens
  CDR3 for alpha chain variable domain of TCR clone 182407 (TRAV8-6, TRAJ8)
CAVTENTGFQKLVF

SEQ ID NO: 364814 - protein, 11 aa, Homo sapiens
  CDR3 for beta chain variable domain of TCR clone 182407 (TRBV29-1, TRBJ2-5)
CSEDRTGTQYL

SEQ ID NO: 364815 - protein, 14 aa, Homo sapiens
  CDR3 for alpha chain variable domain of TCR clone 182408 (TRAV12-1, TRAJ17)
CVVNYKAAGNKLTF

SEQ ID NO: 364816 - protein, 14 aa, Homo sapiens
  CDR3 for beta chain variable domain of TCR clone 182408 (TRBV2, TRBJ2-7)
CASSLTSGGYEQYF

SEQ ID NO: 364817 - protein, 13 aa, Homo sapiens
  CDR3 for alpha chain variable domain of TCR clone 182409 (TRAV3, TRAJ21)
CAVREPDFNKFYS

SEQ ID NO: 364818 - protein, 14 aa, Homo sapiens
  CDR3 for beta chain variable domain of TCR clone 182409 (TRBV4-1, TRBJ2-2)
CASSQVVNTGELFF

SEQ ID NO: 364819 - protein, 15 aa, Homo sapiens
  CDR3 for alpha chain variable domain of TCR clone 182410 (TRAV29/DV5, TRAJ53)
CAASASGGSNYNLTF

SEQ ID NO: 364820 - protein, 19 aa, Homo sapiens
  CDR3 for beta chain variable domain of TCR clone 182410 (TRBV5-1, TRBJ2-3)
CASSLWLAGGITTTDTQYF

SEQ ID NO: 364821 - protein, 13 aa, Homo sapiens
  CDR3 for alpha chain variable domain of TCR clone 182411 (TRAV17, TRAJ39)
CAISTNAGNMLTF

SEQ ID NO: 364822 - protein, 15 aa, Homo sapiens
  CDR3 for beta chain variable domain of TCR clone 182411 (TRBV12-4, TRBJ2-5)
CASSPPTGLQETLYF

SEQ ID NO: 364823 - protein, 14 aa, Homo sapiens
  CDR3 for alpha chain variable domain of TCR clone 182412 (TRAV12-3, TRAJ10)
SHLPLTGGGNKLTF

SEQ ID NO: 364824 - protein, 12 aa, Homo sapiens
  CDR3 for beta chain variable domain of TCR clone 182412 (TRBV11-2, TRBJ2-1)
CASSPGNNELFF

SEQ ID NO: 364825 - protein, 13 aa, Homo sapiens
  CDR3 for alpha chain variable domain of TCR clone 182413 (TRAV2, TRAJ40)
CAVVTSGTYKYIF

SEQ ID NO: 364826 - protein, 14 aa, Homo sapiens
  CDR3 for beta chain variable domain of TCR clone 182413 (TRBV7-9, TRBJ2-1)
CASSSMVGFGEQFL

SEQ ID NO: 364827 - protein, 12 aa, Homo sapiens
  CDR3 for alpha chain variable domain of TCR clone 182414 (TRAV29/DV5, TRAJ34)
CAASGNTDKLIF

SEQ ID NO: 364828 - protein, 15 aa, Homo sapiens
  CDR3 for beta chain variable domain of TCR clone 182414 (TRBV10-2, TRBJ2-6)
CASSEPGAGANVLTF

SEQ ID NO: 364829 - protein, 13 aa, Homo sapiens
  CDR3 for alpha chain variable domain of TCR clone 182415 (TRAV26-1, TRAJ34)
CIVRGHNTEKLIF

SEQ ID NO: 364830 - protein, 15 aa, Homo sapiens
  CDR3 for beta chain variable domain of TCR clone 182415 (TRBV4-1, TRBJ2-7)
CASSQEWGPSYEQYF

SEQ ID NO: 364831 - protein, 15 aa, Homo sapiens
  CDR3 for alpha chain variable domain of TCR clone 182416 (TRAV12-3, TRAJ6)
CAMSATTGGSYIPTF

SEQ ID NO: 364832 - protein, 13 aa, Homo sapiens
  CDR3 for beta chain variable domain of TCR clone 182416 (TRBV2, TRBJ2-1)
CASSGSSSGEQFF

SEQ ID NO: 364833 - protein, 16 aa, Homo sapiens
  CDR3 for alpha chain variable domain of TCR clone 182417 (TRAV3, TRAJ21)
CAVRDVERGNFNKFYF

SEQ ID NO: 364834 - protein, 15 aa, Homo sapiens
  CDR3 for beta chain variable domain of TCR clone 182417 (TRBV7-3, TRBJ2-1)
CASSPTGGGEVEQFF

SEQ ID NO: 364835 - protein, 15 aa, Homo sapiens
  CDR3 for alpha chain variable domain of TCR clone 182418 (TRAV26-1, TRAJ56)
CIVRVDNGANSKLTF

SEQ ID NO: 364836 - protein, 15 aa, Homo sapiens
  CDR3 for beta chain variable domain of TCR clone 182418 (TRBV20-1, TRBJ2-7)
CSARDPTEVGHGQYF

SEQ ID NO: 364837 - protein, 13 aa, Homo sapiens
  CDR3 for alpha chain variable domain of TCR clone 182419 (TRAV8-6, TRAJ36)
CAVIGPGANNLFF

SEQ ID NO: 364838 - protein, 16 aa, Homo sapiens
  CDR3 for beta chain variable domain of TCR clone 182419 (TRBV7-2, TRBJ1-5)
CASSPWGPEGNQPQHF

SEQ ID NO: 364839 - protein, 14 aa, Homo sapiens
  CDR3 for alpha chain variable domain of TCR clone 182420 (TRAV12-2, TRAJ40)
CAVKIPSGTYKYIF

SEQ ID NO: 364840 - protein, 12 aa, Homo sapiens
  CDR3 for beta chain variable domain of TCR clone 182420 (TRBV11-2, TRBJ2-2)
FASSLGGGELFF

SEQ ID NO: 364841 - protein, 13 aa, Homo sapiens
  CDR3 for alpha chain variable domain of TCR clone 182421 (TRAV21, TRAJ27)
CAQWGGNAGKSTF

SEQ ID NO: 364842 - protein, 14 aa, Homo sapiens
  CDR3 for beta chain variable domain of TCR clone 182421 (TRBV7-3, TRBJ1-1)
CVSSLKGGNTEAFF

SEQ ID NO: 364843 - protein, 13 aa, Homo sapiens
  CDR3 for alpha chain variable domain of TCR clone 182422 (TRAV2, TRAJ36)
CAVDQTGSNNLFF

SEQ ID NO: 364844 - protein, 12 aa, Homo sapiens
  CDR3 for beta chain variable domain of TCR clone 182422 (TRBV19, TRBJ1-1)
CASMNRYTEAFF

SEQ ID NO: 364845 - protein, 13 aa, Homo sapiens
  CDR3 for alpha chain variable domain of TCR clone 182423 (TRAV2, TRAJ40)
CAVVTSGTYKYIF

SEQ ID NO: 364846 - protein, 16 aa, Homo sapiens
  CDR3 for beta chain variable domain of TCR clone 182423 (TRBV7-9, TRBJ1-3)
CASSLGAGSSGNTLYF

SEQ ID NO: 364847 - protein, 14 aa, Homo sapiens
  CDR3 for alpha chain variable domain of TCR clone 182424 (TRAV26-1, TRAJ40)
CIVRLLSGTYKSIF

SEQ ID NO: 364848 - protein, 13 aa, Homo sapiens
  CDR3 for beta chain variable domain of TCR clone 182424 (TRBV3-1, TRBJ1-1)
CASSQLQGAEAFF

SEQ ID NO: 364849 - protein, 16 aa, Homo sapiens
  CDR3 for alpha chain variable domain of TCR clone 182425 (TRAV23/DV6, TRAJ9)
CAASIGGNTGGFKTIF

SEQ ID NO: 364850 - protein, 14 aa, Homo sapiens
  CDR3 for beta chain variable domain of TCR clone 182425 (TRBV6-1, TRBJ1-3)
CASVKGGGGNTIYF

SEQ ID NO: 364851 - protein, 14 aa, Homo sapiens
  CDR3 for alpha chain variable domain of TCR clone 182426 (TRAV26-1, TRAJ38)
CIADNAGNNRKLIC

SEQ ID NO: 364852 - protein, 15 aa, Homo sapiens
  CDR3 for beta chain variable domain of TCR clone 182426 (TRBV9, TRBJ2-1)
CASSLAGSSYNEQFF

SEQ ID NO: 364853 - protein, 13 aa, Homo sapiens
  CDR3 for alpha chain variable domain of TCR clone 182427 (TRAV13-1, TRAJ5)
CAARVTGRRALTF

SEQ ID NO: 364854 - protein, 15 aa, Homo sapiens
  CDR3 for beta chain variable domain of TCR clone 182427 (TRBV7-9, TRBJ2-1)
CASTHGTGIYNEQFF

SEQ ID NO: 364855 - protein, 12 aa, Homo sapiens
  CDR3 for alpha chain variable domain of TCR clone 182428 (TRAV29/DV5, TRAJ26)
CAAIPSVQNFVF

SEQ ID NO: 364856 - protein, 15 aa, Homo sapiens
  CDR3 for beta chain variable domain of TCR clone 182428 (TRBV19, TRBJ1-5)
CASSDSGPRNQPQHF

SEQ ID NO: 364857 - protein, 12 aa, Homo sapiens
  CDR3 for alpha chain variable domain of TCR clone 182429 (TRAV12-1, TRAJ20)
CVVNPDDYKLSF

SEQ ID NO: 364858 - protein, 15 aa, Homo sapiens
  CDR3 for beta chain variable domain of TCR clone 182429 (TRBV11-2, TRBJ1-6)
CASSLDPWAVSPLHF

SEQ ID NO: 364859 - protein, 14 aa, Homo sapiens
  CDR3 for alpha chain variable domain of TCR clone 182430 (TRAV12-1, TRAJ38)
CGELKAGNNRKLIW

SEQ ID NO: 364860 - protein, 12 aa, Homo sapiens
  CDR3 for beta chain variable domain of TCR clone 182430 (TRBV11-2, TRBJ2-2)
CASSLGGGELFF

SEQ ID NO: 364861 - protein, 14 aa, Homo sapiens
  CDR3 for alpha chain variable domain of TCR clone 182431 (TRAV12-1, TRAJ6)
CGEHCAGGSYIPTF

SEQ ID NO: 364862 - protein, 14 aa, Homo sapiens
  CDR3 for beta chain variable domain of TCR clone 182431 (TRBV6-6, TRBJ2-7)
CASSDSGAGYEQYF

SEQ ID NO: 364863 - protein, 14 aa, Homo sapiens
  CDR3 for alpha chain variable domain of TCR clone 182432 (TRAV9-2, TRAJ39)
WALYIYNAGNMLTF

SEQ ID NO: 364864 - protein, 16 aa, Homo sapiens
  CDR3 for beta chain variable domain of TCR clone 182432 (TRBV29-1, TRBJ2-6)
CSVEDITYSGANVLTF

SEQ ID NO: 364865 - protein, 16 aa, Homo sapiens
  CDR3 for alpha chain variable domain of TCR clone 182433 (TRAV30, TRAJ49)
SAAQRVGPNTGNQFYF

SEQ ID NO: 364866 - protein, 15 aa, Homo sapiens
  CDR3 for beta chain variable domain of TCR clone 182433 (TRBV2, TRBJ2-1)
CASSELAGSYNKQFF

SEQ ID NO: 364867 - protein, 12 aa, Homo sapiens
  CDR3 for alpha chain variable domain of TCR clone 182434 (TRAV25, TRAJ5)
CAGGGGQESTYF

SEQ ID NO: 364868 - protein, 12 aa, Homo sapiens
  CDR3 for beta chain variable domain of TCR clone 182434 (TRBV19, TRBJ2-1)
CASSRQGAEQFF

SEQ ID NO: 364869 - protein, 15 aa, Homo sapiens
  CDR3 for alpha chain variable domain of TCR clone 182435 (TRAV3, TRAJ5)
CAVRDRKTGRRALTF

SEQ ID NO: 364870 - protein, 14 aa, Homo sapiens
  CDR3 for beta chain variable domain of TCR clone 182435 (TRBV7-9, TRBJ2-2)
CAGSLVQDTGELFF

SEQ ID NO: 364871 - protein, 14 aa, Homo sapiens
  CDR3 for alpha chain variable domain of TCR clone 182436 (TRAV1-2, TRAJ8)
CAVREDTGFQKLVF

SEQ ID NO: 364872 - protein, 15 aa, Homo sapiens
  CDR3 for beta chain variable domain of TCR clone 182436 (TRBV20-1, TRBJ2-7)
CSAESGTSGADEQYF

SEQ ID NO: 364873 - protein, 14 aa, Homo sapiens
  CDR3 for alpha chain variable domain of TCR clone 182437 (TRAV2, TRAJ20)
CAVELTLNDYELSF

SEQ ID NO: 364874 - protein, 15 aa, Homo sapiens
  CDR3 for beta chain variable domain of TCR clone 182437 (TRBV4-1, TRBJ1-4)
CASSDTGGTNEKLFF

SEQ ID NO: 364875 - protein, 13 aa, Homo sapiens
  CDR3 for alpha chain variable domain of TCR clone 182438 (TRAV27, TRAJ9)
CAGAKTGGFKTNF

SEQ ID NO: 364876 - protein, 15 aa, Homo sapiens
  CDR3 for beta chain variable domain of TCR clone 182438 (TRBV11-2, TRBJ1-3)
CASSLDGTVGNTIYF

SEQ ID NO: 364877 - protein, 14 aa, Homo sapiens
  CDR3 for alpha chain variable domain of TCR clone 182439 (TRAV23/DV6, TRAJ21)
CAAYKSGPRDNFYF

SEQ ID NO: 364878 - protein, 15 aa, Homo sapiens
  CDR3 for beta chain variable domain of TCR clone 182439 (TRBV5-4, TRBJ2-2)
CASSLTSRGTGELFF

SEQ ID NO: 364879 - protein, 14 aa, Homo sapiens
  CDR3 for alpha chain variable domain of TCR clone 182440 (TRAV26-1, TRAJ8)
FIVRVDTGFQRLLF

SEQ ID NO: 364880 - protein, 15 aa, Homo sapiens
  CDR3 for beta chain variable domain of TCR clone 182440 (TRBV10-2, TRBJ2-7)
CASWNRGQATYERYF

SEQ ID NO: 364881 - protein, 17 aa, Homo sapiens
  CDR3 for alpha chain variable domain of TCR clone 182441 (TRAV4, TRAJ18)
CLVGERSVGSTLGRLYF

SEQ ID NO: 364882 - protein, 15 aa, Homo sapiens
  CDR3 for beta chain variable domain of TCR clone 182441 (TRBV10-2, TRBJ2-6)
CASSEQGTGANVLAF

SEQ ID NO: 364883 - protein, 13 aa, Homo sapiens
  CDR3 for alpha chain variable domain of TCR clone 182442 (TRAV2, TRAJ15)
CAVASQAGTALIF

SEQ ID NO: 364884 - protein, 16 aa, Homo sapiens
  CDR3 for beta chain variable domain of TCR clone 182442 (TRBV5-1, TRBJ1-1)
CASSSGVNSLNTEAFF

SEQ ID NO: 364885 - protein, 14 aa, Homo sapiens
  CDR3 for alpha chain variable domain of TCR clone 182443 (TRAV12-1, TRAJ17)
CVVNYKAAGNKLTF

SEQ ID NO: 364886 - protein, 13 aa, Homo sapiens
  CDR3 for beta chain variable domain of TCR clone 182443 (TRBV28, TRBJ2-2)
CASIRESTGELFF

SEQ ID NO: 364887 - protein, 15 aa, Homo sapiens
  CDR3 for alpha chain variable domain of TCR clone 182444 (TRAV23/DV6, TRAJ39)
CAASMRNNAGNMLTF

SEQ ID NO: 364888 - protein, 16 aa, Homo sapiens
  CDR3 for beta chain variable domain of TCR clone 182444 (TRBV4-1, TRBJ2-1)
CASSPYAGGHDNEQFF

SEQ ID NO: 364889 - protein, 16 aa, Homo sapiens
  CDR3 for alpha chain variable domain of TCR clone 182445 (TRAV13-1, TRAJ37)
CAASSLGPSKTGKLIF

SEQ ID NO: 364890 - protein, 12 aa, Homo sapiens
  CDR3 for beta chain variable domain of TCR clone 182445 (TRBV6-1, TRBJ2-5)
CASNEGRETQYF

SEQ ID NO: 364891 - protein, 14 aa, Homo sapiens
  CDR3 for alpha chain variable domain of TCR clone 182446 (TRAV17, TRAJ57)
CATDPQGGSEKLVF

SEQ ID NO: 364892 - protein, 18 aa, Homo sapiens
  CDR3 for beta chain variable domain of TCR clone 182446 (TRBV18, TRBJ1-3)
CASSPRGGAGPSGNTIYF

SEQ ID NO: 364893 - protein, 15 aa, Homo sapiens
  CDR3 for alpha chain variable domain of TCR clone 182447 (TRAV12-1, TRAJ9)
CVESFGDTGGFKTIF

SEQ ID NO: 364894 - protein, 15 aa, Homo sapiens
  CDR3 for beta chain variable domain of TCR clone 182447 (TRBV20-1, TRBJ2-7)
CSARDRVSGMDEQYF

SEQ ID NO: 364895 - protein, 18 aa, Homo sapiens
  CDR3 for alpha chain variable domain of TCR clone 182448 (TRAV26-1, TRAJ52)
CIVRVAGAGGTSYGKLTF

SEQ ID NO: 364896 - protein, 14 aa, Homo sapiens
  CDR3 for beta chain variable domain of TCR clone 182448 (TRBV12-4, TRBJ1-1)
CASSLGTGGTEAFF

SEQ ID NO: 364897 - protein, 21 aa, Homo sapiens
  CDR3 for alpha chain variable domain of TCR clone 182449 (TRAV34, TRAJ44)
PAMQASTSVEQTTGTASKLTF

SEQ ID NO: 364898 - protein, 16 aa, Homo sapiens
  CDR3 for beta chain variable domain of TCR clone 182449 (TRBV13, TRBJ2-2)
CASSPRTGEHTGELFF

SEQ ID NO: 364899 - protein, 12 aa, Homo sapiens
  CDR3 for alpha chain variable domain of TCR clone 182450 (TRAV12-1, TRAJ40)
CVVYSGTYKYIF

SEQ ID NO: 364900 - protein, 14 aa, Homo sapiens
  CDR3 for beta chain variable domain of TCR clone 182450 (TRBV7-8, TRBJ2-1)
CASSLAGSYNEQFF

SEQ ID NO: 364901 - protein, 15 aa, Homo sapiens
  CDR3 for alpha chain variable domain of TCR clone 182451 (TRAV2, TRAJ9)
CAVEDRGTGGFKTIF

SEQ ID NO: 364902 - protein, 15 aa, Homo sapiens
  CDR3 for beta chain variable domain of TCR clone 182451 (TRBV18, TRBJ2-1)
CASSPPSASYNEQFF

SEQ ID NO: 364903 - protein, 10 aa, Homo sapiens
  CDR3 for alpha chain variable domain of TCR clone 182452 (TRAV23/DV6, TRAJ57)
CAASSTLSQG

SEQ ID NO: 364904 - protein, 14 aa, Homo sapiens
  CDR3 for beta chain variable domain of TCR clone 182452 (TRBV7-8, TRBJ2-5)
CARSATGGQETQYF

SEQ ID NO: 364905 - protein, 13 aa, Homo sapiens
  CDR3 for alpha chain variable domain of TCR clone 182453 (TRAV2, TRAJ26)
CAVVGNYGQNLVF

SEQ ID NO: 364906 - protein, 15 aa, Homo sapiens
  CDR3 for beta chain variable domain of TCR clone 182453 (TRBV27, TRBJ2-1)
CASSNGGESSNEQFF

SEQ ID NO: 364907 - protein, 17 aa, Homo sapiens
  CDR3 for alpha chain variable domain of TCR clone 182454 (TRAV16, TRAJ37)
CAFWPKNGSSNTGKLIF

SEQ ID NO: 364908 - protein, 13 aa, Homo sapiens
  CDR3 for beta chain variable domain of TCR clone 182454 (TRBV3-1, TRBJ2-5)
CASSPVLSETQYF

SEQ ID NO: 364909 - protein, 13 aa, Homo sapiens
  CDR3 for alpha chain variable domain of TCR clone 182455 (TRAV2, TRAJ40)
CAVVTSGTYKYIF

SEQ ID NO: 364910 - protein, 14 aa, Homo sapiens
  CDR3 for beta chain variable domain of TCR clone 182455 (TRBV19, TRBJ2-1)
CASPTSVLRGEQFF

SEQ ID NO: 364911 - protein, 14 aa, Homo sapiens
  CDR3 for alpha chain variable domain of TCR clone 182456 (TRAV12-2, TRAJ13)
CAVKKTGGYQKVTF

SEQ ID NO: 364912 - protein, 18 aa, Homo sapiens
  CDR3 for beta chain variable domain of TCR clone 182456 (TRBV11-2, TRBJ2-3)
CASSLGWASRGAPNTQYF

SEQ ID NO: 364913 - protein, 12 aa, Homo sapiens
  CDR3 for alpha chain variable domain of TCR clone 182457 (TRAV12-3, TRAJ17)
CAMTLTGNKLTF

SEQ ID NO: 364914 - protein, 15 aa, Homo sapiens
  CDR3 for beta chain variable domain of TCR clone 182457 (TRBV20-1, TRBJ2-7)
CTARDRVSGIDEQYF

SEQ ID NO: 364915 - protein, 14 aa, Homo sapiens
  CDR3 for alpha chain variable domain of TCR clone 182458 (TRAV17, TRAJ48)
CATEGNFGNEKLTF

SEQ ID NO: 364916 - protein, 13 aa, Homo sapiens
  CDR3 for beta chain variable domain of TCR clone 182458 (TRBV3-1, TRBJ1-1)
CASSPGVITEAFF

SEQ ID NO: 364917 - protein, 17 aa, Homo sapiens
  CDR3 for alpha chain variable domain of TCR clone 182459 (TRAV3, TRAJ6)
CAVRDGPRAGGSYIPTF

SEQ ID NO: 364918 - protein, 13 aa, Homo sapiens
  CDR3 for beta chain variable domain of TCR clone 182459 (TRBV7-2, TRBJ2-2)
CASSLAVTGELFF

SEQ ID NO: 364919 - protein, 13 aa, Homo sapiens
  CDR3 for alpha chain variable domain of TCR clone 182460 (TRAV36/DV7, TRAJ37)
CAAFSSNTGKLIF

SEQ ID NO: 364920 - protein, 18 aa, Homo sapiens
  CDR3 for beta chain variable domain of TCR clone 182460 (TRBV11-2, TRBJ2-3)
CANSLGGASRGAPNTQYF

SEQ ID NO: 364921 - protein, 17 aa, Homo sapiens
  CDR3 for alpha chain variable domain of TCR clone 182461 (TRAV3, TRAJ12)
CAVRDGGRMDSSYKLIF

SEQ ID NO: 364922 - protein, 16 aa, Homo sapiens
  CDR3 for beta chain variable domain of TCR clone 182461 (TRBV10-3, TRBJ2-7)
CAISADFADRPYEQYF

SEQ ID NO: 364923 - protein, 16 aa, Homo sapiens
  CDR3 for alpha chain variable domain of TCR clone 182462 (TRAV30, TRAJ24)
CGTEIVDADSWGKFQF

SEQ ID NO: 364924 - protein, 14 aa, Homo sapiens
  CDR3 for beta chain variable domain of TCR clone 182462 (TRBV2, TRBJ2-2)
CASRARGNTGELFF

SEQ ID NO: 364925 - protein, 12 aa, Homo sapiens
  CDR3 for alpha chain variable domain of TCR clone 182463 (TRAV12-1, TRAJ40)
CVVYSGTYKYIF

SEQ ID NO: 364926 - protein, 15 aa, Homo sapiens
  CDR3 for beta chain variable domain of TCR clone 182463 (TRBV29-1, TRBJ2-1)
CSVEAPRGSPNEQFF

SEQ ID NO: 364927 - protein, 13 aa, Homo sapiens
  CDR3 for alpha chain variable domain of TCR clone 182464 (TRAV8-3, TRAJ28)
CAVGAVGSYQLTF

SEQ ID NO: 364928 - protein, 19 aa, Homo sapiens
  CDR3 for beta chain variable domain of TCR clone 182464 (TRBV6-3, TRBJ2-7)
CASSYRTGLAGGVSGEQYF

SEQ ID NO: 364929 - protein, 14 aa, Homo sapiens
  CDR3 for alpha chain variable domain of TCR clone 182465 (TRAV2, TRAJ9)
CAVEDRSGGFKTIF

SEQ ID NO: 364930 - protein, 13 aa, Homo sapiens
  CDR3 for beta chain variable domain of TCR clone 182465 (TRBV7-9, TRBJ2-2)
CASSLDPTGELFF

SEQ ID NO: 364931 - protein, 14 aa, Homo sapiens
  CDR3 for alpha chain variable domain of TCR clone 182466 (TRAV20, TRAJ54)
CAVQAGRGAQKLVF

SEQ ID NO: 364932 - protein, 13 aa, Homo sapiens
  CDR3 for beta chain variable domain of TCR clone 182466 (TRBV28, TRBJ2-7)
CASSNSGNYEQYF

SEQ ID NO: 364933 - protein, 14 aa, Homo sapiens
  CDR3 for alpha chain variable domain of TCR clone 182467 (TRAV12-2, TRAJ13)
CAVKKTGGYQKVNF

SEQ ID NO: 364934 - protein, 17 aa, Homo sapiens
  CDR3 for beta chain variable domain of TCR clone 182467 (TRBV13, TRBJ2-3)
CASSLSRVAGGRNTQYF

SEQ ID NO: 364935 - protein, 17 aa, Homo sapiens
  CDR3 for alpha chain variable domain of TCR clone 182468 (TRAV3, TRAJ42)
CAVRDSDYGGSQGNLIF

SEQ ID NO: 364936 - protein, 15 aa, Homo sapiens
  CDR3 for beta chain variable domain of TCR clone 182468 (TRBV6-6, TRBJ2-7)
CASSYSYGGSYEQYL

SEQ ID NO: 364937 - protein, 15 aa, Homo sapiens
  CDR3 for alpha chain variable domain of TCR clone 182469 (TRAV3, TRAJ5)
CAVRALDTGRRALTF

SEQ ID NO: 364938 - protein, 14 aa, Homo sapiens
  CDR3 for beta chain variable domain of TCR clone 182469 (TRBV25-1, TRBJ1-4)
CASSGGGQPEKLFF

SEQ ID NO: 364939 - protein, 13 aa, Homo sapiens
  CDR3 for alpha chain variable domain of TCR clone 182470 (TRAV4, TRAJ42)
RLVGGGSQGNLIF

SEQ ID NO: 364940 - protein, 16 aa, Homo sapiens
  CDR3 for beta chain variable domain of TCR clone 182470 (TRBV5-1, TRBJ2-3)
CASSLQGRVGADTQYF

SEQ ID NO: 364941 - protein, 14 aa, Homo sapiens
  CDR3 for alpha chain variable domain of TCR clone 182471 (TRAV23/DV6, TRAJ4)
CAANLSGGYNKLIF

SEQ ID NO: 364942 - protein, 15 aa, Homo sapiens
  CDR3 for beta chain variable domain of TCR clone 182471 (TRBV7-9, TRBJ1-1)
CASSLLEQGGTEAFF

SEQ ID NO: 364943 - protein, 13 aa, Homo sapiens
  CDR3 for alpha chain variable domain of TCR clone 182472 (TRAV13-1, TRAJ39)
CAASIWAGNMFTF

SEQ ID NO: 364944 - protein, 15 aa, Homo sapiens
  CDR3 for beta chain variable domain of TCR clone 182472 (TRBV7-9, TRBJ1-1)
CASSLLEQGGTEAFF

SEQ ID NO: 364945 - protein, 13 aa, Homo sapiens
  CDR3 for alpha chain variable domain of TCR clone 182473 (TRAV8-3, TRAJ28)
CAVGAVGSYQLTF

SEQ ID NO: 364946 - protein, 13 aa, Homo sapiens
  CDR3 for beta chain variable domain of TCR clone 182473 (TRBV2, TRBJ1-2)
CASTWTGEEGYTF

SEQ ID NO: 364947 - protein, 15 aa, Homo sapiens
  CDR3 for alpha chain variable domain of TCR clone 182474 (TRAV13-1, TRAJ44)
CAASRGGGTASKLTF

SEQ ID NO: 364948 - protein, 15 aa, Homo sapiens
  CDR3 for beta chain variable domain of TCR clone 182474 (TRBV7-2, TRBJ2-3)
CASSSTGLETDTQYF

SEQ ID NO: 364949 - protein, 12 aa, Homo sapiens
  CDR3 for alpha chain variable domain of TCR clone 182475 (TRAV30, TRAJ43)
GGTEGRGNDMRF

SEQ ID NO: 364950 - protein, 13 aa, Homo sapiens
  CDR3 for beta chain variable domain of TCR clone 182475 (TRBV27, TRBJ2-7)
CASSFSQGYEQYF

SEQ ID NO: 364951 - protein, 13 aa, Homo sapiens
  CDR3 for alpha chain variable domain of TCR clone 182476 (TRAV17, TRAJ5)
CAPMDTGRRALTF

SEQ ID NO: 364952 - protein, 15 aa, Homo sapiens
  CDR3 for beta chain variable domain of TCR clone 182476 (TRBV11-2, TRBJ2-1)
CASSLTSGGYNEQFF

SEQ ID NO: 364953 - protein, 12 aa, Homo sapiens
  CDR3 for alpha chain variable domain of TCR clone 182477 (TRAV12-3, TRAJ17)
CAMTLTGNKLTF

SEQ ID NO: 364954 - protein, 13 aa, Homo sapiens
  CDR3 for beta chain variable domain of TCR clone 182477 (TRBV19, TRBJ2-2)
CASSPLGIGELFF

SEQ ID NO: 364955 - protein, 17 aa, Homo sapiens
  CDR3 for alpha chain variable domain of TCR clone 182478 (TRAV3, TRAJ6)
CAVRDGPMAGGSYIPTF

SEQ ID NO: 364956 - protein, 14 aa, Homo sapiens
  CDR3 for beta chain variable domain of TCR clone 182478 (TRBV7-2, TRBJ2-7)
CASGPKTSFYEQYF

SEQ ID NO: 364957 - protein, 13 aa, Homo sapiens
  CDR3 for alpha chain variable domain of TCR clone 182479 (TRAV12-2, TRAJ18)
CAVRGSTLGRLYF

SEQ ID NO: 364958 - protein, 15 aa, Homo sapiens
  CDR3 for beta chain variable domain of TCR clone 182479 (TRBV11-3, TRBJ2-7)
CASSPGPASSYEQYF

SEQ ID NO: 364959 - protein, 11 aa, Homo sapiens
  CDR3 for alpha chain variable domain of TCR clone 182480 (TRAV27, TRAJ20)
CAGADDYKLSF

SEQ ID NO: 364960 - protein, 16 aa, Homo sapiens
  CDR3 for beta chain variable domain of TCR clone 182480 (TRBV19, TRBJ2-2)
CASRSPGTGATGELFF

SEQ ID NO: 364961 - protein, 12 aa, Homo sapiens
  CDR3 for alpha chain variable domain of TCR clone 182481 (TRAV35, TRAJ47)
CAGREYGNKLVF

SEQ ID NO: 364962 - protein, 14 aa, Homo sapiens
  CDR3 for beta chain variable domain of TCR clone 182481 (TRBV6-1, TRBJ1-3)
CASVQGGGGNTIYF

SEQ ID NO: 364963 - protein, 15 aa, Homo sapiens
  CDR3 for alpha chain variable domain of TCR clone 182482 (TRAV25, TRAJ52)
CAGTSGGTSYGKLTF

SEQ ID NO: 364964 - protein, 15 aa, Homo sapiens
  CDR3 for beta chain variable domain of TCR clone 182482 (TRBV7-2, TRBJ2-3)
CASSLAGAFIDTQYF

SEQ ID NO: 364965 - protein, 11 aa, Homo sapiens
  CDR3 for alpha chain variable domain of TCR clone 182483 (TRAV3, TRAJ21)
CAVGNFNKFYF

SEQ ID NO: 364966 - protein, 14 aa, Homo sapiens
  CDR3 for beta chain variable domain of TCR clone 182483 (TRBV7-9, TRBJ2-7)
CASSLSQGSYEQYF

SEQ ID NO: 364967 - protein, 15 aa, Homo sapiens
  CDR3 for alpha chain variable domain of TCR clone 182484 (TRAV12-1, TRAJ44)
CVADLPTGTASKLTF

SEQ ID NO: 364968 - protein, 13 aa, Homo sapiens
  CDR3 for beta chain variable domain of TCR clone 182484 (TRBV12-4, TRBJ1-5)
CASSPDRAQPQHF

SEQ ID NO: 364969 - protein, 16 aa, Homo sapiens
  CDR3 for alpha chain variable domain of TCR clone 182485 (TRAV26-1, TRAJ53)
CIVRVVMGGSNYKLTF

SEQ ID NO: 364970 - protein, 16 aa, Homo sapiens
  CDR3 for beta chain variable domain of TCR clone 182485 (TRBV28, TRBJ2-7)
CASSLFFETGGPEQYF

SEQ ID NO: 364971 - protein, 19 aa, Homo sapiens
  CDR3 for alpha chain variable domain of TCR clone 182486 (TRAV21, TRAJ40)
RLVTQPPTSVISGTYKYIF

SEQ ID NO: 364972 - protein, 16 aa, Homo sapiens
  CDR3 for beta chain variable domain of TCR clone 182486 (TRBV28, TRBJ2-3)
CASSFFRDPRLGTQYF

SEQ ID NO: 364973 - protein, 16 aa, Homo sapiens
  CDR3 for alpha chain variable domain of TCR clone 182487 (TRAV3, TRAJ10)
CAVRDMRAGGGNKLTF

SEQ ID NO: 364974 - protein, 17 aa, Homo sapiens
  CDR3 for beta chain variable domain of TCR clone 182487 (TRBV20-1, TRBJ2-2)
CRASGSGQGGLTGELFF

SEQ ID NO: 364975 - protein, 19 aa, Homo sapiens
  CDR3 for alpha chain variable domain of TCR clone 182488 (TRAV1-2, TRAJ26)
CLLPLCCERPDNYGQNFVF

SEQ ID NO: 364976 - protein, 17 aa, Homo sapiens
  CDR3 for beta chain variable domain of TCR clone 182488 (TRBV28, TRBJ2-5)
CARSRQGGLAGAETQYF

SEQ ID NO: 364977 - protein, 21 aa, Homo sapiens
  CDR3 for alpha chain variable domain of TCR clone 182489 (TRAV16, TRAJ22)
HLKKPFAQEEDSPMYLRQLTF

SEQ ID NO: 364978 - protein, 15 aa, Homo sapiens
  CDR3 for beta chain variable domain of TCR clone 182489 (TRBV7-9, TRBJ1-6)
CASSSPGRGNSPLHF

SEQ ID NO: 364979 - protein, 13 aa, Homo sapiens
  CDR3 for alpha chain variable domain of TCR clone 182490 (TRAV12-1, TRAJ8)
CVGMGPGFQKLVF

SEQ ID NO: 364980 - protein, 16 aa, Homo sapiens
  CDR3 for beta chain variable domain of TCR clone 182490 (TRBV20-1, TRBJ1-4)
CSAPGQGLLTNEKLFF

SEQ ID NO: 364981 - protein, 16 aa, Homo sapiens
  CDR3 for alpha chain variable domain of TCR clone 182491 (TRAV3, TRAJ37)
CAVRGKGSGNNGKLIF

SEQ ID NO: 364982 - protein, 13 aa, Homo sapiens
  CDR3 for beta chain variable domain of TCR clone 182491 (TRBV14, TRBJ2-7)
CASSQDRRYEQYF

SEQ ID NO: 364983 - protein, 14 aa, Homo sapiens
  CDR3 for alpha chain variable domain of TCR clone 182492 (TRAV30, TRAJ26)
CGTEIVSYGQNFVF

SEQ ID NO: 364984 - protein, 13 aa, Homo sapiens
  CDR3 for beta chain variable domain of TCR clone 182492 (TRBV19, TRBJ1-3)
CANRLSLGNTIYF

SEQ ID NO: 364985 - protein, 10 aa, Homo sapiens
  CDR3 for alpha chain variable domain of TCR clone 182493 (TRAV12-1, TRAJ43)
CVVHNNDMRF

SEQ ID NO: 364986 - protein, 13 aa, Homo sapiens
  CDR3 for beta chain variable domain of TCR clone 182493 (TRBV12-4, TRBJ1-2)
CATSSGLTVISTF

SEQ ID NO: 364987 - protein, 14 aa, Homo sapiens
  CDR3 for alpha chain variable domain of TCR clone 182494 (TRAV2, TRAJ9)
CAVEDRSGGFKTIF

SEQ ID NO: 364988 - protein, 15 aa, Homo sapiens
  CDR3 for beta chain variable domain of TCR clone 182494 (TRBV5-1, TRBJ2-3)
CASSSTSGSTDTQYF

SEQ ID NO: 364989 - protein, 17 aa, Homo sapiens
  CDR3 for alpha chain variable domain of TCR clone 182495 (TRAV3, TRAJ4)
CAVRDIMFSGGFNKRIF

SEQ ID NO: 364990 - protein, 13 aa, Homo sapiens
  CDR3 for beta chain variable domain of TCR clone 182495 (TRBV28, TRBJ2-1)
CASSLIGRDEQFF

SEQ ID NO: 364991 - protein, 14 aa, Homo sapiens
  CDR3 for alpha chain variable domain of TCR clone 182496 (TRAV1-2, TRAJ16)
CAVNRFSDGQKLLF

SEQ ID NO: 364992 - protein, 13 aa, Homo sapiens
  CDR3 for beta chain variable domain of TCR clone 182496 (TRBV5-5, TRBJ1-2)
CASGFWRGEDYTF

SEQ ID NO: 364993 - protein, 15 aa, Homo sapiens
  CDR3 for alpha chain variable domain of TCR clone 182497 (TRAV12-3, TRAJ27)
CAMRSYNTNAGKSTF

SEQ ID NO: 364994 - protein, 13 aa, Homo sapiens
  CDR3 for beta chain variable domain of TCR clone 182497 (TRBV11-2, TRBJ2-5)
CASSRGPSETQYF

SEQ ID NO: 364995 - protein, 18 aa, Homo sapiens
  CDR3 for alpha chain variable domain of TCR clone 182498 (TRAV29/DV5, TRAJ52)
WSAGFRGAGGTSYGKLTF

SEQ ID NO: 364996 - protein, 16 aa, Homo sapiens
  CDR3 for beta chain variable domain of TCR clone 182498 (TRBV7-3, TRBJ2-2)
CASSLKRGTLSGELFF

SEQ ID NO: 364997 - protein, 13 aa, Homo sapiens
  CDR3 for alpha chain variable domain of TCR clone 182499 (TRAV21, TRAJ37)
CAVSSGNTGKLIF

SEQ ID NO: 364998 - protein, 13 aa, Homo sapiens
  CDR3 for beta chain variable domain of TCR clone 182499 (TRBV11-2, TRBJ2-7)
CASSGTRPYEQYF

SEQ ID NO: 364999 - protein, 14 aa, Homo sapiens
  CDR3 for alpha chain variable domain of TCR clone 182500 (TRAV41, TRAJ57)
CAVLLQGGSEKLVF

SEQ ID NO: 365000 - protein, 14 aa, Homo sapiens
  CDR3 for beta chain variable domain of TCR clone 182500 (TRBV10-3, TRBJ1-1)
CATMDRPPEAFLDK

SEQ ID NO: 365001 - protein, 15 aa, Homo sapiens
  CDR3 for alpha chain variable domain of TCR clone 182501 (TRAV14/DV4, TRAJ33)
CAMRAGRDSNYQLIW

SEQ ID NO: 365002 - protein, 13 aa, Homo sapiens
  CDR3 for beta chain variable domain of TCR clone 182501 (TRBV19, TRBJ1-2)
CASSVPGQDGYTF

SEQ ID NO: 365003 - protein, 14 aa, Homo sapiens
  CDR3 for alpha chain variable domain of TCR clone 182502 (TRAV36/DV7, TRAJ53)
CAVVDGGSNYKLTF

SEQ ID NO: 365004 - protein, 14 aa, Homo sapiens
  CDR3 for beta chain variable domain of TCR clone 182502 (TRBV11-2, TRBJ2-1)
CASSPSRQGGGQFF

SEQ ID NO: 365005 - protein, 14 aa, Homo sapiens
  CDR3 for alpha chain variable domain of TCR clone 182503 (TRAV12-1, TRAJ42)
CVVIYGGSQGNLIF

SEQ ID NO: 365006 - protein, 17 aa, Homo sapiens
  CDR3 for beta chain variable domain of TCR clone 182503 (TRBV3-1, TRBJ2-6)
CASSPNTGPAGANGLTF

SEQ ID NO: 365007 - protein, 13 aa, Homo sapiens
  CDR3 for alpha chain variable domain of TCR clone 182504 (TRAV12-1, TRAJ21)
CVVTLNNFNKFYF

SEQ ID NO: 365008 - protein, 20 aa, Homo sapiens
  CDR3 for beta chain variable domain of TCR clone 182504 (TRBV7-8, TRBJ2-1)
CASSLAHRLAGVRSYNEQFF

SEQ ID NO: 365009 - protein, 13 aa, Homo sapiens
  CDR3 for alpha chain variable domain of TCR clone 182505 (TRAV8-2, TRAJ43)
CVVSDQGDNDMRF

SEQ ID NO: 365010 - protein, 13 aa, Homo sapiens
  CDR3 for beta chain variable domain of TCR clone 182505 (TRBV7-3, TRBJ1-1)
CASSQDWGAEAFF

SEQ ID NO: 365011 - protein, 15 aa, Homo sapiens
  CDR3 for alpha chain variable domain of TCR clone 182506 (TRAV3, TRAJ3)
FAVRDRDRSASKIIF

SEQ ID NO: 365012 - protein, 18 aa, Homo sapiens
  CDR3 for beta chain variable domain of TCR clone 182506 (TRBV25-1, TRBJ1-2)
CASSGLQNGQGLIFGYTF

SEQ ID NO: 365013 - protein, 11 aa, Homo sapiens
  CDR3 for alpha chain variable domain of TCR clone 182507 (TRAV17, TRAJ49)
CATNTGNPFYF

SEQ ID NO: 365014 - protein, 12 aa, Homo sapiens
  CDR3 for beta chain variable domain of TCR clone 182507 (TRBV2, TRBJ2-7)
CASSGGSGIPYF

SEQ ID NO: 365015 - protein, 14 aa, Homo sapiens
  CDR3 for alpha chain variable domain of TCR clone 182508 (TRAV13-1, TRAJ6)
CAASITGGSYIPTF

SEQ ID NO: 365016 - protein, 14 aa, Homo sapiens
  CDR3 for beta chain variable domain of TCR clone 182508 (TRBV27, TRBJ1-1)
CASSPQGKRAEAFF

SEQ ID NO: 365017 - protein, 11 aa, Homo sapiens
  CDR3 for alpha chain variable domain of TCR clone 182509 (TRAV3, TRAJ21)
CSVGNFNKFYF

SEQ ID NO: 365018 - protein, 16 aa, Homo sapiens
  CDR3 for beta chain variable domain of TCR clone 182509 (TRBV5-7, TRBJ2-5)
CASTLAPAGGRETQYF

SEQ ID NO: 365019 - protein, 15 aa, Homo sapiens
  CDR3 for alpha chain variable domain of TCR clone 182510 (TRAV3, TRAJ29)
CAVRAPLSGKTPLVF

SEQ ID NO: 365020 - protein, 15 aa, Homo sapiens
  CDR3 for beta chain variable domain of TCR clone 182510 (TRBV28, TRBJ1-1)
CASRIKGGLNTEAFF

SEQ ID NO: 365021 - protein, 14 aa, Homo sapiens
  CDR3 for alpha chain variable domain of TCR clone 182511 (TRAV36/DV7, TRAJ57)
CAVGFAGGSEKLVF

SEQ ID NO: 365022 - protein, 12 aa, Homo sapiens
  CDR3 for beta chain variable domain of TCR clone 182511 (TRBV19, TRBJ2-7)
CASTSGTYEQYF

SEQ ID NO: 365023 - protein, 13 aa, Homo sapiens
  CDR3 for alpha chain variable domain of TCR clone 182512 (TRAV17, TRAJ39)
CATDTNAGNMLTF

SEQ ID NO: 365024 - protein, 12 aa, Homo sapiens
  CDR3 for beta chain variable domain of TCR clone 182512 (TRBV7-3, TRBJ2-1)
CASSFINNEQFF

SEQ ID NO: 365025 - protein, 12 aa, Homo sapiens
  CDR3 for alpha chain variable domain of TCR clone 182513 (TRAV8-3, TRAJ41)
CAVALSGCALNF

SEQ ID NO: 365026 - protein, 18 aa, Homo sapiens
  CDR3 for beta chain variable domain of TCR clone 182513 (TRBV20-1, TRBJ2-6)
CSAETTPTHGSGANVLTF

SEQ ID NO: 365027 - protein, 16 aa, Homo sapiens
  CDR3 for alpha chain variable domain of TCR clone 182514 (TRAV30, TRAJ24)
CGTEIVDADSWGKFQF

SEQ ID NO: 365028 - protein, 14 aa, Homo sapiens
  CDR3 for beta chain variable domain of TCR clone 182514 (TRBV28, TRBJ2-1)
CASSPGEGGNEQFF

SEQ ID NO: 365029 - protein, 10 aa, Homo sapiens
  CDR3 for alpha chain variable domain of TCR clone 182515 (TRAV12-3, TRAJ18)
CAMSAEAQPW

SEQ ID NO: 365030 - protein, 16 aa, Homo sapiens
  CDR3 for beta chain variable domain of TCR clone 182515 (TRBV7-3, TRBJ2-3)
CASSLSGYRPEDTQYF

SEQ ID NO: 365031 - protein, 14 aa, Homo sapiens
  CDR3 for alpha chain variable domain of TCR clone 182516 (TRAV26-1, TRAJ45)
CIEVTGGGADGLTF

SEQ ID NO: 365032 - protein, 19 aa, Homo sapiens
  CDR3 for beta chain variable domain of TCR clone 182516 (TRBV19, TRBJ2-2)
CASTRPGIAGGRVTGELFF

SEQ ID NO: 365033 - protein, 11 aa, Homo sapiens
  CDR3 for alpha chain variable domain of TCR clone 182517 (TRAV12-3, TRAJ49)
CAANTGTSSIL

SEQ ID NO: 365034 - protein, 12 aa, Homo sapiens
  CDR3 for beta chain variable domain of TCR clone 182517 (TRBV6-3, TRBJ2-7)
CASCEPGFEQYF

SEQ ID NO: 365035 - protein, 12 aa, Homo sapiens
  CDR3 for alpha chain variable domain of TCR clone 182518 (TRAV38-2/DV8, TRAJ48)
CALLSGNEKLTV

SEQ ID NO: 365036 - protein, 15 aa, Homo sapiens
  CDR3 for beta chain variable domain of TCR clone 182518 (TRBV6-1, TRBJ2-1)
CASSELRGQYNEQFF

SEQ ID NO: 365037 - protein, 10 aa, Homo sapiens
  CDR3 for alpha chain variable domain of TCR clone 182519 (TRAV12-3, TRAJ49)
CAMNDDQFYF

SEQ ID NO: 365038 - protein, 11 aa, Homo sapiens
  CDR3 for beta chain variable domain of TCR clone 182519 (TRBV12-4, TRBJ2-7)
CASALKYEQYF

SEQ ID NO: 365039 - protein, 14 aa, Homo sapiens
  CDR3 for alpha chain variable domain of TCR clone 182520 (TRAV2, TRAJ37)
CAVDFTINTGKLIF

SEQ ID NO: 365040 - protein, 13 aa, Homo sapiens
  CDR3 for beta chain variable domain of TCR clone 182520 (TRBV4-1, TRBJ2-2)
CASSQENTGELFF

SEQ ID NO: 365041 - protein, 17 aa, Homo sapiens
  CDR3 for alpha chain variable domain of TCR clone 182521 (TRAV3, TRAJ6)
CAVRGGPRAGGSYIPTF

SEQ ID NO: 365042 - protein, 14 aa, Homo sapiens
  CDR3 for beta chain variable domain of TCR clone 182521 (TRBV7-2, TRBJ2-7)
YASSPRTSFYEQYF

SEQ ID NO: 365043 - protein, 12 aa, Homo sapiens
  CDR3 for alpha chain variable domain of TCR clone 182522 (TRAV1-1, TRAJ20)
CAVREDDYKLSF

SEQ ID NO: 365044 - protein, 14 aa, Homo sapiens
  CDR3 for beta chain variable domain of TCR clone 182522 (TRBV4-1, TRBJ2-2)
CASSHAVNTGELFF

SEQ ID NO: 365045 - protein, 14 aa, Homo sapiens
  CDR3 for alpha chain variable domain of TCR clone 182523 (TRAV4, TRAJ26)
CLVGPHNYGQNFVF

SEQ ID NO: 365046 - protein, 17 aa, Homo sapiens
  CDR3 for beta chain variable domain of TCR clone 182523 (TRBV24-1, TRBJ2-1)
CATSDVSTSGTYHEQFF

SEQ ID NO: 365047 - protein, 15 aa, Homo sapiens
  CDR3 for alpha chain variable domain of TCR clone 182524 (TRAV3, TRAJ5)
CAVRDLATGRRALTF

SEQ ID NO: 365048 - protein, 13 aa, Homo sapiens
  CDR3 for beta chain variable domain of TCR clone 182524 (TRBV20-1, TRBJ2-5)
CSARDSKQATQYF

SEQ ID NO: 365049 - protein, 13 aa, Homo sapiens
  CDR3 for alpha chain variable domain of TCR clone 182525 (TRAV13-1, TRAJ6)
CAASSGGSYIPTF

SEQ ID NO: 365050 - protein, 15 aa, Homo sapiens
  CDR3 for beta chain variable domain of TCR clone 182525 (TRBV12-4, TRBJ2-1)
CASSPPTGLQETQYF

SEQ ID NO: 365051 - protein, 14 aa, Homo sapiens
  CDR3 for alpha chain variable domain of TCR clone 182526 (TRAV12-1, TRAJ9)
CVVNRGTGGFKTIF

SEQ ID NO: 365052 - protein, 13 aa, Homo sapiens
  CDR3 for beta chain variable domain of TCR clone 182526 (TRBV28, TRBJ2-7)
CASSNSGNYEQYF

SEQ ID NO: 365053 - protein, 15 aa, Homo sapiens
  CDR3 for alpha chain variable domain of TCR clone 182527 (TRAV3, TRAJ3)
CAVRDRDSSASKIIC

SEQ ID NO: 365054 - protein, 18 aa, Homo sapiens
  CDR3 for beta chain variable domain of TCR clone 182527 (TRBV25-1, TRBJ1-2)
CASSGLQNGQGLIFGYTF

SEQ ID NO: 365055 - protein, 13 aa, Homo sapiens
  CDR3 for alpha chain variable domain of TCR clone 182528 (TRAV21, TRAJ27)
CAARPGNAGKSTF

SEQ ID NO: 365056 - protein, 15 aa, Homo sapiens
  CDR3 for beta chain variable domain of TCR clone 182528 (TRBV11-3, TRBJ2-7)
CASSHGPASSYEQYF

SEQ ID NO: 365057 - protein, 18 aa, Homo sapiens
  CDR3 for alpha chain variable domain of TCR clone 182529 (TRAV13-1, TRAJ52)
CAASKRSAGGTSYGKLKF

SEQ ID NO: 365058 - protein, 15 aa, Homo sapiens
  CDR3 for beta chain variable domain of TCR clone 182529 (TRBV28, TRBJ2-1)
CASSIIAGGRSEQFF

SEQ ID NO: 365059 - protein, 14 aa, Homo sapiens
  CDR3 for alpha chain variable domain of TCR clone 182530 (TRAV1-2, TRAJ8)
CAVREDTGFQKLVF

SEQ ID NO: 365060 - protein, 15 aa, Homo sapiens
  CDR3 for beta chain variable domain of TCR clone 182530 (TRBV6-3, TRBJ2-7)
CAGSPPGTVFYEQYF

SEQ ID NO: 365061 - protein, 13 aa, Homo sapiens
  CDR3 for alpha chain variable domain of TCR clone 182531 (TRAV8-3, TRAJ48)
CAVVPFGNEKLTF

SEQ ID NO: 365062 - protein, 19 aa, Homo sapiens
  CDR3 for beta chain variable domain of TCR clone 182531 (TRBV25-1, TRBJ2-2)
CAILVYRVDRGRKTGELVF

SEQ ID NO: 365063 - protein, 16 aa, Homo sapiens
  CDR3 for alpha chain variable domain of TCR clone 182532 (TRAV30, TRAJ24)
CGTEIVDADSWGKFQF

SEQ ID NO: 365064 - protein, 13 aa, Homo sapiens
  CDR3 for beta chain variable domain of TCR clone 182532 (TRBV18, TRBJ1-2)
CPSSASATEGYTF

SEQ ID NO: 365065 - protein, 15 aa, Homo sapiens
  CDR3 for alpha chain variable domain of TCR clone 182533 (TRAV25, TRAJ52)
CAGRPGGTSYGKLTF

SEQ ID NO: 365066 - protein, 15 aa, Homo sapiens
  CDR3 for beta chain variable domain of TCR clone 182533 (TRBV5-1, TRBJ2-7)
CASSLDLTSSYEQYF

SEQ ID NO: 365067 - protein, 15 aa, Homo sapiens
  CDR3 for alpha chain variable domain of TCR clone 182534 (TRAV3, TRAJ24)
CAVRDKMTAGGKCSL

SEQ ID NO: 365068 - protein, 14 aa, Homo sapiens
  CDR3 for beta chain variable domain of TCR clone 182534 (TRBV7-2, TRBJ2-3)
CASSQTGSSYTQYF

SEQ ID NO: 365069 - protein, 15 aa, Homo sapiens
  CDR3 for alpha chain variable domain of TCR clone 182535 (TRAV8-3, TRAJ27)
CAVGPSETNAGKSTF

SEQ ID NO: 365070 - protein, 15 aa, Homo sapiens
  CDR3 for beta chain variable domain of TCR clone 182535 (TRBV7-2, TRBJ2-1)
CASSSVLAGGNEQFF

SEQ ID NO: 365071 - protein, 15 aa, Homo sapiens
  CDR3 for alpha chain variable domain of TCR clone 182536 (TRAV26-1, TRAJ22)
CIVRVSFCFCPSTDL

SEQ ID NO: 365072 - protein, 13 aa, Homo sapiens
  CDR3 for beta chain variable domain of TCR clone 182536 (TRBV7-9, TRBJ1-2)
CASSFPQTYGFAF

SEQ ID NO: 365073 - protein, 14 aa, Homo sapiens
  CDR3 for alpha chain variable domain of TCR clone 182537 (TRAV2, TRAJ17)
CAVVGKAAGNKLTF

SEQ ID NO: 365074 - protein, 14 aa, Homo sapiens
  CDR3 for beta chain variable domain of TCR clone 182537 (TRBV12-4, TRBJ1-2)
CSSSPPGPGGGYTF

SEQ ID NO: 365075 - protein, 12 aa, Homo sapiens
  CDR3 for alpha chain variable domain of TCR clone 182538 (TRAV12-1, TRAJ23)
CVVNIPGGKLIF

SEQ ID NO: 365076 - protein, 18 aa, Homo sapiens
  CDR3 for beta chain variable domain of TCR clone 182538 (TRBV7-2, TRBJ2-3)
CASSLETSRGRKADTQYF

SEQ ID NO: 365077 - protein, 12 aa, Homo sapiens
  CDR3 for alpha chain variable domain of TCR clone 182539 (TRAV3, TRAJ20)
CAVRDGDYKLSF

SEQ ID NO: 365078 - protein, 15 aa, Homo sapiens
  CDR3 for beta chain variable domain of TCR clone 182539 (TRBV6-3, TRBJ2-7)
CASSSPGTVFYEQYF

SEQ ID NO: 365079 - protein, 13 aa, Homo sapiens
  CDR3 for alpha chain variable domain of TCR clone 182540 (TRAV23/DV6, TRAJ27)
CAARKPMPANQPL

SEQ ID NO: 365080 - protein, 14 aa, Homo sapiens
  CDR3 for beta chain variable domain of TCR clone 182540 (TRBV5-4, TRBJ1-1)
CASSLDSRRDEAFF

SEQ ID NO: 365081 - protein, 12 aa, Homo sapiens
  CDR3 for alpha chain variable domain of TCR clone 182541 (TRAV20, TRAJ39)
CAVGNADNMLTI

SEQ ID NO: 365082 - protein, 16 aa, Homo sapiens
  CDR3 for beta chain variable domain of TCR clone 182541 (TRBV15, TRBJ1-2)
CATSRGPRTGGGGDTF

SEQ ID NO: 365083 - protein, 16 aa, Homo sapiens
  CDR3 for alpha chain variable domain of TCR clone 182542 (TRAV30, TRAJ24)
CGTEIVHADSWGKFQF

SEQ ID NO: 365084 - protein, 15 aa, Homo sapiens
  CDR3 for beta chain variable domain of TCR clone 182542 (TRBV12-4, TRBJ2-2)
CASSPNDSGTGELFF

SEQ ID NO: 365085 - protein, 14 aa, Homo sapiens
  CDR3 for alpha chain variable domain of TCR clone 182543 (TRAV8-3, TRAJ4)
CAVGAAGGYSKLIF

SEQ ID NO: 365086 - protein, 14 aa, Homo sapiens
  CDR3 for beta chain variable domain of TCR clone 182543 (TRBV24-1, TRBJ1-1)
CATSIPRGDTEAFF

SEQ ID NO: 365087 - protein, 10 aa, Homo sapiens
  CDR3 for alpha chain variable domain of TCR clone 182544 (TRAV30, TRAJ48)
CVIGNEKLTF

SEQ ID NO: 365088 - protein, 14 aa, Homo sapiens
  CDR3 for beta chain variable domain of TCR clone 182544 (TRBV7-6, TRBJ2-3)
CASSVAGGTDTQYF

SEQ ID NO: 365089 - protein, 12 aa, Homo sapiens
  CDR3 for alpha chain variable domain of TCR clone 182545 (TRAV12-3, TRAJ17)
CAMTLTGNKLTF

SEQ ID NO: 365090 - protein, 15 aa, Homo sapiens
  CDR3 for beta chain variable domain of TCR clone 182545 (TRBV7-9, TRBJ1-6)
CVSSSPGRGNSPLHF

SEQ ID NO: 365091 - protein, 10 aa, Homo sapiens
  CDR3 for alpha chain variable domain of TCR clone 182546 (TRAV12-3, TRAJ49)
CAMNDDQFYF

SEQ ID NO: 365092 - protein, 13 aa, Homo sapiens
  CDR3 for beta chain variable domain of TCR clone 182546 (TRBV12-4, TRBJ1-1)
CASSPGTGVEAFF

SEQ ID NO: 365093 - protein, 13 aa, Homo sapiens
  CDR3 for alpha chain variable domain of TCR clone 182547 (TRAV13-2, TRAJ11)
CAENYSGYSTLTF

SEQ ID NO: 365094 - protein, 14 aa, Homo sapiens
  CDR3 for beta chain variable domain of TCR clone 182547 (TRBV7-2, TRBJ2-7)
CASRSQGAAYEQYF

SEQ ID NO: 365095 - protein, 15 aa, Homo sapiens
  CDR3 for alpha chain variable domain of TCR clone 182548 (TRAV23/DV6, TRAJ18)
RAARYRGSTLGRLYF

SEQ ID NO: 365096 - protein, 14 aa, Homo sapiens
  CDR3 for beta chain variable domain of TCR clone 182548 (TRBV7-8, TRBJ2-3)
CASSLEAGTDTQYF

SEQ ID NO: 365097 - protein, 14 aa, Homo sapiens
  CDR3 for alpha chain variable domain of TCR clone 182549 (TRAV12-2, TRAJ40)
CAVRIPSGTYKYIF

SEQ ID NO: 365098 - protein, 15 aa, Homo sapiens
  CDR3 for beta chain variable domain of TCR clone 182549 (TRBV27, TRBJ2-1)
CASSNGGGSSNEQFF

SEQ ID NO: 365099 - protein, 16 aa, Homo sapiens
  CDR3 for alpha chain variable domain of TCR clone 182550 (TRAV30, TRAJ24)
CGTAIVDADSWGKFQF

SEQ ID NO: 365100 - protein, 17 aa, Homo sapiens
  CDR3 for beta chain variable domain of TCR clone 182550 (TRBV20-1, TRBJ2-1)
CSASSSGLAGSYNEQFF

SEQ ID NO: 365101 - protein, 12 aa, Homo sapiens
  CDR3 for alpha chain variable domain of TCR clone 182551 (TRAV13-1, TRAJ21)
CAAKEGYNKFYF

SEQ ID NO: 365102 - protein, 18 aa, Homo sapiens
  CDR3 for beta chain variable domain of TCR clone 182551 (TRBV20-1, TRBJ2-6)
CSAETTPTHGSGANVLTF

SEQ ID NO: 365103 - protein, 16 aa, Homo sapiens
  CDR3 for alpha chain variable domain of TCR clone 182552 (TRAV13-1, TRAJ48)
CAASIFGNFGNEKLTF

SEQ ID NO: 365104 - protein, 14 aa, Homo sapiens
  CDR3 for beta chain variable domain of TCR clone 182552 (TRBV4-2, TRBJ2-1)
CASGLDRAYNEQFF

SEQ ID NO: 365105 - protein, 14 aa, Homo sapiens
  CDR3 for alpha chain variable domain of TCR clone 182553 (TRAV12-1, TRAJ13)
CVVIDSGGYQKVTF

SEQ ID NO: 365106 - protein, 12 aa, Homo sapiens
  CDR3 for beta chain variable domain of TCR clone 182553 (TRBV29-1, TRBJ2-3)
FSVTVGADTQYF

SEQ ID NO: 365107 - protein, 17 aa, Homo sapiens
  CDR3 for alpha chain variable domain of TCR clone 182554 (TRAV14/DV4, TRAJ45)
CAMREDYSGGGADGLTF

SEQ ID NO: 365108 - protein, 16 aa, Homo sapiens
  CDR3 for beta chain variable domain of TCR clone 182554 (TRBV7-9, TRBJ2-3)
CASSPWREVGTDTQYF

SEQ ID NO: 365109 - protein, 14 aa, Homo sapiens
  CDR3 for alpha chain variable domain of TCR clone 182555 (TRAV1-2, TRAJ16)
CTVNRFSDGQKLLF

SEQ ID NO: 365110 - protein, 15 aa, Homo sapiens
  CDR3 for beta chain variable domain of TCR clone 182555 (TRBV3-1, TRBJ2-5)
CASSANLGGPETQYF

SEQ ID NO: 365111 - protein, 14 aa, Homo sapiens
  CDR3 for alpha chain variable domain of TCR clone 182556 (TRAV12-2, TRAJ17)
CAALFKAAGNKLTF

SEQ ID NO: 365112 - protein, 17 aa, Homo sapiens
  CDR3 for beta chain variable domain of TCR clone 182556 (TRBV11-2, TRBJ2-1)
CASSLYPPGVEYNEQFF

SEQ ID NO: 365113 - protein, 15 aa, Homo sapiens
  CDR3 for alpha chain variable domain of TCR clone 182557 (TRAV12-2, TRAJ53)
CAVNGGGGSNYNLTF

SEQ ID NO: 365114 - protein, 17 aa, Homo sapiens
  CDR3 for beta chain variable domain of TCR clone 182557 (TRBV7-3, TRBJ2-3)
RASSLMKRMRGAATQYF

SEQ ID NO: 365115 - protein, 13 aa, Homo sapiens
  CDR3 for alpha chain variable domain of TCR clone 182558 (TRAV8-3, TRAJ44)
CAVVPGTASKLTF

SEQ ID NO: 365116 - protein, 14 aa, Homo sapiens
  CDR3 for beta chain variable domain of TCR clone 182558 (TRBV11-2, TRBJ2-3)
CASRRLAGTDTQYF

SEQ ID NO: 365117 - protein, 14 aa, Homo sapiens
  CDR3 for alpha chain variable domain of TCR clone 182559 (TRAV8-3, TRAJ35)
CAVVPQGFGNVLHC

SEQ ID NO: 365118 - protein, 17 aa, Homo sapiens
  CDR3 for beta chain variable domain of TCR clone 182559 (TRBV28, TRBJ2-5)
CASSRQGGLAGAETQYF

SEQ ID NO: 365119 - protein, 12 aa, Homo sapiens
  CDR3 for alpha chain variable domain of TCR clone 182560 (TRAV8-3, TRAJ15)
CAGNQAGTVLIF

SEQ ID NO: 365120 - protein, 15 aa, Homo sapiens
  CDR3 for beta chain variable domain of TCR clone 182560 (TRBV7-9, TRBJ2-7)
CASSLALAEAYEQYF

SEQ ID NO: 365121 - protein, 14 aa, Homo sapiens
  CDR3 for alpha chain variable domain of TCR clone 182561 (TRAV12-2, TRAJ17)
CAALFKAAGNKLTF

SEQ ID NO: 365122 - protein, 14 aa, Homo sapiens
  CDR3 for beta chain variable domain of TCR clone 182561 (TRBV12-5, TRBJ2-5)
CASGSRTHQETQYF

SEQ ID NO: 365123 - protein, 11 aa, Homo sapiens
  CDR3 for alpha chain variable domain of TCR clone 182562 (TRAV13-2, TRAJ20)
CADSNDYKLSF

SEQ ID NO: 365124 - protein, 12 aa, Homo sapiens
  CDR3 for beta chain variable domain of TCR clone 182562 (TRBV11-2, TRBJ2-2)
CASSLGGGELFL

SEQ ID NO: 365125 - protein, 14 aa, Homo sapiens
  CDR3 for alpha chain variable domain of TCR clone 182563 (TRAV8-1, TRAJ24)
CAVNAADSWGELQF

SEQ ID NO: 365126 - protein, 16 aa, Homo sapiens
  CDR3 for beta chain variable domain of TCR clone 182563 (TRBV4-3, TRBJ2-1)
CASSPALDRGVNEQFF

SEQ ID NO: 365127 - protein, 13 aa, Homo sapiens
  CDR3 for alpha chain variable domain of TCR clone 182564 (TRAV26-2, TRAJ43)
CILRAVNNNDMRF

SEQ ID NO: 365128 - protein, 14 aa, Homo sapiens
  CDR3 for beta chain variable domain of TCR clone 182564 (TRBV18, TRBJ2-5)
CASSPGVSQETQYF

SEQ ID NO: 365129 - protein, 16 aa, Homo sapiens
  CDR3 for alpha chain variable domain of TCR clone 182565 (TRAV21, TRAJ17)
CAVRPGEEAAGNKLTF

SEQ ID NO: 365130 - protein, 16 aa, Homo sapiens
  CDR3 for beta chain variable domain of TCR clone 182565 (TRBV2, TRBJ2-7)
CASSEPWTGSSYEQYF

SEQ ID NO: 365131 - protein, 14 aa, Homo sapiens
  CDR3 for alpha chain variable domain of TCR clone 182566 (TRAV9-2, TRAJ48)
CALSSNFGNEKLTF

SEQ ID NO: 365132 - protein, 14 aa, Homo sapiens
  CDR3 for beta chain variable domain of TCR clone 182566 (TRBV7-2, TRBJ1-1)
CASSFLTGTTEAFF

SEQ ID NO: 365133 - protein, 13 aa, Homo sapiens
  CDR3 for alpha chain variable domain of TCR clone 182567 (TRAV27, TRAJ45)
CRSSGGGADGLTF

SEQ ID NO: 365134 - protein, 15 aa, Homo sapiens
  CDR3 for beta chain variable domain of TCR clone 182567 (TRBV20-1, TRBJ2-7)
CSARDRVSWMDEQYF

SEQ ID NO: 365135 - protein, 16 aa, Homo sapiens
  CDR3 for alpha chain variable domain of TCR clone 182568 (TRAV1-1, TRAJ28)
CAVRDDSGAGSYQLTF

SEQ ID NO: 365136 - protein, 12 aa, Homo sapiens
  CDR3 for beta chain variable domain of TCR clone 182568 (TRBV11-2, TRBJ2-5)
CASSLDSQTQYF

SEQ ID NO: 365137 - protein, 14 aa, Homo sapiens
  CDR3 for alpha chain variable domain of TCR clone 182569 (TRAV12-2, TRAJ45)
CAVYSGGGADGLTF

SEQ ID NO: 365138 - protein, 14 aa, Homo sapiens
  CDR3 for beta chain variable domain of TCR clone 182569 (TRBV7-2, TRBJ2-5)
CASSFTQGQETQYF

SEQ ID NO: 365139 - protein, 12 aa, Homo sapiens
  CDR3 for alpha chain variable domain of TCR clone 182570 (TRAV12-3, TRAJ17)
CAMTLTGNKLTF

SEQ ID NO: 365140 - protein, 18 aa, Homo sapiens
  CDR3 for beta chain variable domain of TCR clone 182570 (TRBV4-1, TRBJ2-1)
CASSLVGGELAGFNEQFF

SEQ ID NO: 365141 - protein, 13 aa, Homo sapiens
  CDR3 for alpha chain variable domain of TCR clone 182571 (TRAV17, TRAJ5)
CAMGDTGRRALTF

SEQ ID NO: 365142 - protein, 13 aa, Homo sapiens
  CDR3 for beta chain variable domain of TCR clone 182571 (TRBV19, TRBJ1-5)
CASSIEPVQPQHF

SEQ ID NO: 365143 - protein, 13 aa, Homo sapiens
  CDR3 for alpha chain variable domain of TCR clone 182572 (TRAV12-2, TRAJ20)
CAVYPSNDYKPSF

SEQ ID NO: 365144 - protein, 15 aa, Homo sapiens
  CDR3 for beta chain variable domain of TCR clone 182572 (TRBV6-1, TRBJ2-5)
CASSEGRGIQETQYF

SEQ ID NO: 365145 - protein, 14 aa, Homo sapiens
  CDR3 for alpha chain variable domain of TCR clone 182573 (TRAV1-2, TRAJ8)
CAVREDTGCQKLVF

SEQ ID NO: 365146 - protein, 15 aa, Homo sapiens
  CDR3 for beta chain variable domain of TCR clone 182573 (TRBV6-3, TRBJ2-7)
CASSSPGTVCDEQYF

SEQ ID NO: 365147 - protein, 11 aa, Homo sapiens
  CDR3 for alpha chain variable domain of TCR clone 182574 (TRAV2, TRAJ13)
CASGGYQKVTF

SEQ ID NO: 365148 - protein, 14 aa, Homo sapiens
  CDR3 for beta chain variable domain of TCR clone 182574 (TRBV15, TRBJ2-1)
CATSGVEDYNEQFF

SEQ ID NO: 365149 - protein, 12 aa, Homo sapiens
  CDR3 for alpha chain variable domain of TCR clone 182575 (TRAV1-1, TRAJ8)
CAGGTGFRKIVF

SEQ ID NO: 365150 - protein, 15 aa, Homo sapiens
  CDR3 for beta chain variable domain of TCR clone 182575 (TRBV7-9, TRBJ1-4)
CASSRTGGFNEKLFF

SEQ ID NO: 365151 - protein, 15 aa, Homo sapiens
  CDR3 for alpha chain variable domain of TCR clone 182576 (TRAV2, TRAJ37)
CAVADGSSNTGKLIF

SEQ ID NO: 365152 - protein, 13 aa, Homo sapiens
  CDR3 for beta chain variable domain of TCR clone 182576 (TRBV20-1, TRBJ1-6)
CSTFREGNSPLHF

SEQ ID NO: 365153 - protein, 15 aa, Homo sapiens
  CDR3 for alpha chain variable domain of TCR clone 182577 (TRAV27, TRAJ38)
CAARRNAGNNRQLIW

SEQ ID NO: 365154 - protein, 12 aa, Homo sapiens
  CDR3 for beta chain variable domain of TCR clone 182577 (TRBV5-1, TRBJ2-7)
CARSLDSYEQYF

SEQ ID NO: 365155 - protein, 15 aa, Homo sapiens
  CDR3 for alpha chain variable domain of TCR clone 182578 (TRAV13-1, TRAJ5)
CAASKADTGRRALTF

SEQ ID NO: 365156 - protein, 15 aa, Homo sapiens
  CDR3 for beta chain variable domain of TCR clone 182578 (TRBV19, TRBJ2-1)
CASSMGWNSNNEQFV

SEQ ID NO: 365157 - protein, 14 aa, Homo sapiens
  CDR3 for alpha chain variable domain of TCR clone 182579 (TRAV9-2, TRAJ36)
CALPWRSGANNPFF

SEQ ID NO: 365158 - protein, 14 aa, Homo sapiens
  CDR3 for beta chain variable domain of TCR clone 182579 (TRBV2, TRBJ1-2)
CASSELQVNYGYTF

SEQ ID NO: 365159 - protein, 15 aa, Homo sapiens
  CDR3 for alpha chain variable domain of TCR clone 182580 (TRAV12-3, TRAJ10)
CASYILTEGGNKLTF

SEQ ID NO: 365160 - protein, 15 aa, Homo sapiens
  CDR3 for beta chain variable domain of TCR clone 182580 (TRBV7-2, TRBJ1-6)
CASSLGPDRGMPLHF

SEQ ID NO: 365161 - protein, 12 aa, Homo sapiens
  CDR3 for alpha chain variable domain of TCR clone 182581 (TRAV12-3, TRAJ20)
CARVRGDYKPSF

SEQ ID NO: 365162 - protein, 12 aa, Homo sapiens
  CDR3 for beta chain variable domain of TCR clone 182581 (TRBV6-1, TRBJ2-7)
CASSDYSYEQYF

SEQ ID NO: 365163 - protein, 11 aa, Homo sapiens
  CDR3 for alpha chain variable domain of TCR clone 182582 (TRAV38-2/DV8, TRAJ31)
CDYFSNARLMF

SEQ ID NO: 365164 - protein, 13 aa, Homo sapiens
  CDR3 for beta chain variable domain of TCR clone 182582 (TRBV20-1, TRBJ2-7)
CSARDEKSYEQYF

SEQ ID NO: 365165 - protein, 15 aa, Homo sapiens
  CDR3 for alpha chain variable domain of TCR clone 182583 (TRAV14/DV4, TRAJ12)
CAMTPPVDSSSKLIF

SEQ ID NO: 365166 - protein, 14 aa, Homo sapiens
  CDR3 for beta chain variable domain of TCR clone 182583 (TRBV19, TRBJ2-1)
CASSDNQGANEQFF

SEQ ID NO: 365167 - protein, 15 aa, Homo sapiens
  CDR3 for alpha chain variable domain of TCR clone 182584 (TRAV26-2, TRAJ45)
CIPRDRVDQEEVLTD

SEQ ID NO: 365168 - protein, 15 aa, Homo sapiens
  CDR3 for beta chain variable domain of TCR clone 182584 (TRBV7-6, TRBJ2-5)
CASSKPTGPQETQYF

SEQ ID NO: 365169 - protein, 16 aa, Homo sapiens
  CDR3 for alpha chain variable domain of TCR clone 182585 (TRAV30, TRAJ24)
CGTEIVDADSWGKFQF

SEQ ID NO: 365170 - protein, 17 aa, Homo sapiens
  CDR3 for beta chain variable domain of TCR clone 182585 (TRBV7-8, TRBJ2-7)
CASSFTSGRPPSYEQYF

SEQ ID NO: 365171 - protein, 16 aa, Homo sapiens
  CDR3 for alpha chain variable domain of TCR clone 182586 (TRAV4, TRAJ22)
CLVGDLYSGSARRLTF

SEQ ID NO: 365172 - protein, 16 aa, Homo sapiens
  CDR3 for beta chain variable domain of TCR clone 182586 (TRBV7-9, TRBJ2-1)
CASSDVVGGSYNEQFF

SEQ ID NO: 365173 - protein, 18 aa, Homo sapiens
  CDR3 for alpha chain variable domain of TCR clone 182587 (TRAV21, TRAJ52)
CAVRPSPAGGTSYGKLTF

SEQ ID NO: 365174 - protein, 18 aa, Homo sapiens
  CDR3 for beta chain variable domain of TCR clone 182587 (TRBV27, TRBJ2-1)
WASTSGTSGKATYNEQFF

SEQ ID NO: 365175 - protein, 15 aa, Homo sapiens
  CDR3 for alpha chain variable domain of TCR clone 182588 (TRAV17, TRAJ57)
CATGPSQGGSEKLVF

SEQ ID NO: 365176 - protein, 14 aa, Homo sapiens
  CDR3 for beta chain variable domain of TCR clone 182588 (TRBV11-2, TRBJ1-2)
CASSLDRGNYGYTF

SEQ ID NO: 365177 - protein, 15 aa, Homo sapiens
  CDR3 for alpha chain variable domain of TCR clone 182589 (TRAV8-2, TRAJ40)
CVVLGTTSGTYKYIF

SEQ ID NO: 365178 - protein, 14 aa, Homo sapiens
  CDR3 for beta chain variable domain of TCR clone 182589 (TRBV7-2, TRBJ2-7)
CASSPKTSFYEQYF

SEQ ID NO: 365179 - protein, 17 aa, Homo sapiens
  CDR3 for alpha chain variable domain of TCR clone 182590 (TRAV12-2, TRAJ45)
CAVNIWGSGGGADGLTF

SEQ ID NO: 365180 - protein, 16 aa, Homo sapiens
  CDR3 for beta chain variable domain of TCR clone 182590 (TRBV7-3, TRBJ2-2)
CASSLKRGTLSGELFF

SEQ ID NO: 365181 - protein, 13 aa, Homo sapiens
  CDR3 for alpha chain variable domain of TCR clone 182591 (TRAV12-2, TRAJ42)
CAVKRGSQVNLIF

SEQ ID NO: 365182 - protein, 13 aa, Homo sapiens
  CDR3 for beta chain variable domain of TCR clone 182591 (TRBV7-9, TRBJ2-3)
CASSPGSTDMQYF

SEQ ID NO: 365183 - protein, 12 aa, Homo sapiens
  CDR3 for alpha chain variable domain of TCR clone 182592 (TRAV3, TRAJ31)
CAAQRANARLMF

SEQ ID NO: 365184 - protein, 14 aa, Homo sapiens
  CDR3 for beta chain variable domain of TCR clone 182592 (TRBV5-5, TRBJ1-5)
CASSGQGVVQPQHF

SEQ ID NO: 365185 - protein, 16 aa, Homo sapiens
  CDR3 for alpha chain variable domain of TCR clone 182593 (TRAV3, TRAJ10)
CAVRDMRAGGGKKLTF

SEQ ID NO: 365186 - protein, 17 aa, Homo sapiens
  CDR3 for beta chain variable domain of TCR clone 182593 (TRBV28, TRBJ2-5)
CASSTPEGDALQETQYF

SEQ ID NO: 365187 - protein, 18 aa, Homo sapiens
  CDR3 for alpha chain variable domain of TCR clone 182594 (TRAV26-1, TRAJ23)
CIVRVGLEVWNQGGKLIF

SEQ ID NO: 365188 - protein, 14 aa, Homo sapiens
  CDR3 for beta chain variable domain of TCR clone 182594 (TRBV13, TRBJ2-7)
CASSLKGASYEQYF

SEQ ID NO: 365189 - protein, 13 aa, Homo sapiens
  CDR3 for alpha chain variable domain of TCR clone 182595 (TRAV2, TRAJ40)
CAVVTSGTYKYIF

SEQ ID NO: 365190 - protein, 15 aa, Homo sapiens
  CDR3 for beta chain variable domain of TCR clone 182595 (TRBV7-9, TRBJ2-7)
CASSLRTSGSYEQYF

SEQ ID NO: 365191 - protein, 13 aa, Homo sapiens
  CDR3 for alpha chain variable domain of TCR clone 182596 (TRAV20, TRAJ37)
CAGCSSNAGKLIF

SEQ ID NO: 365192 - protein, 12 aa, Homo sapiens
  CDR3 for beta chain variable domain of TCR clone 182596 (TRBV11-2, TRBJ2-1)
CASSPGNNEQFF

SEQ ID NO: 365193 - protein, 14 aa, Homo sapiens
  CDR3 for alpha chain variable domain of TCR clone 182597 (TRAV12-2, TRAJ48)
CAVNAFFGNETLTF

SEQ ID NO: 365194 - protein, 13 aa, Homo sapiens
  CDR3 for beta chain variable domain of TCR clone 182597 (TRBV28, TRBJ2-7)
CAGAQQGLDEQYF

SEQ ID NO: 365195 - protein, 18 aa, Homo sapiens
  CDR3 for alpha chain variable domain of TCR clone 182598 (TRAV26-2, TRAJ54)
CILRDVEVGIQGAQKLVF

SEQ ID NO: 365196 - protein, 14 aa, Homo sapiens
  CDR3 for beta chain variable domain of TCR clone 182598 (TRBV7-2, TRBJ2-5)
CASSPRGSSETQYF

SEQ ID NO: 365197 - protein, 12 aa, Homo sapiens
  CDR3 for alpha chain variable domain of TCR clone 182599 (TRAV13-1, TRAJ21)
CAAKEGFNKFYF

SEQ ID NO: 365198 - protein, 14 aa, Homo sapiens
  CDR3 for beta chain variable domain of TCR clone 182599 (TRBV13, TRBJ2-5)
CASSLGPRGETQYF

SEQ ID NO: 365199 - protein, 17 aa, Homo sapiens
  CDR3 for alpha chain variable domain of TCR clone 182600 (TRAV3, TRAJ12)
CAVRDGGRMDSSHKLIF

SEQ ID NO: 365200 - protein, 12 aa, Homo sapiens
  CDR3 for beta chain variable domain of TCR clone 182600 (TRBV11-2, TRBJ2-2)
CASSLGGGELFF

SEQ ID NO: 365201 - protein, 13 aa, Homo sapiens
  CDR3 for alpha chain variable domain of TCR clone 182601 (TRAV16, TRAJ54)
CTLKIRGAQKLVF

SEQ ID NO: 365202 - protein, 13 aa, Homo sapiens
  CDR3 for beta chain variable domain of TCR clone 182601 (TRBV20-1, TRBJ1-1)
CSARGGGNTEAFF

SEQ ID NO: 365203 - protein, 18 aa, Homo sapiens
  CDR3 for alpha chain variable domain of TCR clone 182602 (TRAV21, TRAJ52)
CAVRPSPAGGTSYGKLTF

SEQ ID NO: 365204 - protein, 14 aa, Homo sapiens
  CDR3 for beta chain variable domain of TCR clone 182602 (TRBV19, TRBJ2-5)
CASSSSGIQETQYF

SEQ ID NO: 365205 - protein, 17 aa, Homo sapiens
  CDR3 for alpha chain variable domain of TCR clone 182603 (TRAV3, TRAJ6)
CAVRDGPRAGGSSRPTF

SEQ ID NO: 365206 - protein, 14 aa, Homo sapiens
  CDR3 for beta chain variable domain of TCR clone 182603 (TRBV7-2, TRBJ2-7)
CASSPKTSFYEQYF

SEQ ID NO: 365207 - protein, 13 aa, Homo sapiens
  CDR3 for alpha chain variable domain of TCR clone 182604 (TRAV12-2, TRAJ12)
CAVNGDSSYKLIF

SEQ ID NO: 365208 - protein, 15 aa, Homo sapiens
  CDR3 for beta chain variable domain of TCR clone 182604 (TRBV11-2, TRBJ1-3)
CASSLSPLVRDTIYF

SEQ ID NO: 365209 - protein, 16 aa, Homo sapiens
  CDR3 for alpha chain variable domain of TCR clone 182605 (TRAV12-1, TRAJ53)
CVVTSVAGGSNYKLTF

SEQ ID NO: 365210 - protein, 16 aa, Homo sapiens
  CDR3 for beta chain variable domain of TCR clone 182605 (TRBV6-6, TRBJ2-3)
CASSYAHAGSTDTQYL

SEQ ID NO: 365211 - protein, 16 aa, Homo sapiens
  CDR3 for alpha chain variable domain of TCR clone 182606 (TRAV30, TRAJ24)
CGTEIVDADSGGKFQF

SEQ ID NO: 365212 - protein, 14 aa, Homo sapiens
  CDR3 for beta chain variable domain of TCR clone 182606 (TRBV12-5, TRBJ2-5)
CASGSRTQQETQYF

SEQ ID NO: 365213 - protein, 15 aa, Homo sapiens
  CDR3 for alpha chain variable domain of TCR clone 182607 (TRAV8-3, TRAJ11)
CAVGLLTSGYSTLPF

SEQ ID NO: 365214 - protein, 16 aa, Homo sapiens
  CDR3 for beta chain variable domain of TCR clone 182607 (TRBV7-9, TRBJ1-2)
CASSLGFSSGEDGYTF

SEQ ID NO: 365215 - protein, 14 aa, Homo sapiens
  CDR3 for alpha chain variable domain of TCR clone 182608 (TRAV20, TRAJ33)
CAVLTRDSNYQLIW

SEQ ID NO: 365216 - protein, 14 aa, Homo sapiens
  CDR3 for beta chain variable domain of TCR clone 182608 (TRBV7-2, TRBJ2-7)
CASSPKTSFYEQYF

SEQ ID NO: 365217 - protein, 12 aa, Homo sapiens
  CDR3 for alpha chain variable domain of TCR clone 182609 (TRAV13-2, TRAJ23)
FAERHRGGKLIF

SEQ ID NO: 365218 - protein, 15 aa, Homo sapiens
  CDR3 for beta chain variable domain of TCR clone 182609 (TRBV7-9, TRBJ1-6)
CASSSPGRGNSPLHF

SEQ ID NO: 365219 - protein, 14 aa, Homo sapiens
  CDR3 for alpha chain variable domain of TCR clone 182610 (TRAV29/DV5, TRAJ36)
CAARRKTGANNPFF

SEQ ID NO: 365220 - protein, 17 aa, Homo sapiens
  CDR3 for beta chain variable domain of TCR clone 182610 (TRBV7-6, TRBJ2-5)
CASSPGLADPWGETQYF

SEQ ID NO: 365221 - protein, 20 aa, Homo sapiens
  CDR3 for alpha chain variable domain of TCR clone 182611 (TRAV12-2, TRAJ52)
SPVIQPPARAGGTSYGKLTF

SEQ ID NO: 365222 - protein, 13 aa, Homo sapiens
  CDR3 for beta chain variable domain of TCR clone 182611 (TRBV11-3, TRBJ1-1)
CASTGSLNTEAFF

SEQ ID NO: 365223 - protein, 14 aa, Homo sapiens
  CDR3 for alpha chain variable domain of TCR clone 182612 (TRAV14/DV4, TRAJ54)
CAMREAPGAQKLVF

SEQ ID NO: 365224 - protein, 12 aa, Homo sapiens
  CDR3 for beta chain variable domain of TCR clone 182612 (TRBV11-2, TRBJ2-2)
CASSLGGGELFF

SEQ ID NO: 365225 - protein, 13 aa, Homo sapiens
  CDR3 for alpha chain variable domain of TCR clone 182613 (TRAV17, TRAJ4)
CATKTGGYNKLIF

SEQ ID NO: 365226 - protein, 14 aa, Homo sapiens
  CDR3 for beta chain variable domain of TCR clone 182613 (TRBV20-1, TRBJ1-5)
CSARDDRGNQPQHF

SEQ ID NO: 365227 - protein, 11 aa, Homo sapiens
  CDR3 for alpha chain variable domain of TCR clone 182614 (TRAV12-1, TRAJ34)
CVGNKGRELIF

SEQ ID NO: 365228 - protein, 19 aa, Homo sapiens
  CDR3 for beta chain variable domain of TCR clone 182614 (TRBV7-2, TRBJ2-3)
CASSPGLAGGGLTTDTQYF

SEQ ID NO: 365229 - protein, 13 aa, Homo sapiens
  CDR3 for alpha chain variable domain of TCR clone 182615 (TRAV17, TRAJ40)
FATRSPGTYKYIF

SEQ ID NO: 365230 - protein, 13 aa, Homo sapiens
  CDR3 for beta chain variable domain of TCR clone 182615 (TRBV2, TRBJ1-5)
CATAGPGNQPQHF

SEQ ID NO: 365231 - protein, 11 aa, Homo sapiens
  CDR3 for alpha chain variable domain of TCR clone 182616 (TRAV1-2, TRAJ31)
CAENNNARLMF

SEQ ID NO: 365232 - protein, 15 aa, Homo sapiens
  CDR3 for beta chain variable domain of TCR clone 182616 (TRBV28, TRBJ2-1)
CASGIIAGGRSEQFF

SEQ ID NO: 365233 - protein, 16 aa, Homo sapiens
  CDR3 for alpha chain variable domain of TCR clone 182617 (TRAV30, TRAJ24)
CGTEIVDADSWGKLQF

SEQ ID NO: 365234 - protein, 12 aa, Homo sapiens
  CDR3 for beta chain variable domain of TCR clone 182617 (TRBV11-2, TRBJ2-2)
CASSLPTGELFF

SEQ ID NO: 365235 - protein, 14 aa, Homo sapiens
  CDR3 for alpha chain variable domain of TCR clone 182618 (TRAV12-2, TRAJ32)
CAHPESGATNKPIF

SEQ ID NO: 365236 - protein, 13 aa, Homo sapiens
  CDR3 for beta chain variable domain of TCR clone 182618 (TRBV4-2, TRBJ2-3)
CQQRNQSPRMQYF

SEQ ID NO: 365237 - protein, 14 aa, Homo sapiens
  CDR3 for alpha chain variable domain of TCR clone 182619 (TRAV13-1, TRAJ35)
CAASKGGFGNVLHC

SEQ ID NO: 365238 - protein, 16 aa, Homo sapiens
  CDR3 for beta chain variable domain of TCR clone 182619 (TRBV10-3, TRBJ2-1)
CAISGVGDGGGGEQFF

SEQ ID NO: 365239 - protein, 22 aa, Homo sapiens
  CDR3 for alpha chain variable domain of TCR clone 182620 (TRAV1-1, TRAJ38)
CASNAGNNHIKNPDPAVYQLRD

SEQ ID NO: 365240 - protein, 14 aa, Homo sapiens
  CDR3 for beta chain variable domain of TCR clone 182620 (TRBV15, TRBJ2-1)
CATSGVEDYDEQFF

SEQ ID NO: 365241 - protein, 15 aa, Homo sapiens
  CDR3 for alpha chain variable domain of TCR clone 182621 (TRAV21, TRAJ40)
CAVRPQTSGTYKSIF

SEQ ID NO: 365242 - protein, 14 aa, Homo sapiens
  CDR3 for beta chain variable domain of TCR clone 182621 (TRBV7-2, TRBJ1-1)
CASSLKGGNTEAFF

SEQ ID NO: 365243 - protein, 12 aa, Homo sapiens
  CDR3 for alpha chain variable domain of TCR clone 182622 (TRAV12-3, TRAJ42)
CDPGGSQGNLIF

SEQ ID NO: 365244 - protein, 13 aa, Homo sapiens
  CDR3 for beta chain variable domain of TCR clone 182622 (TRBV5-7, TRBJ2-6)
CASTSSGANVLTF

SEQ ID NO: 365245 - protein, 12 aa, Homo sapiens
  CDR3 for alpha chain variable domain of TCR clone 182623 (TRAV17, TRAJ48)
CALNFGNEKLTF

SEQ ID NO: 365246 - protein, 13 aa, Homo sapiens
  CDR3 for beta chain variable domain of TCR clone 182623 (TRBV6-5, TRBJ2-5)
CASSSPGGETQYY

SEQ ID NO: 365247 - protein, 13 aa, Homo sapiens
  CDR3 for alpha chain variable domain of TCR clone 182624 (TRAV30, TRAJ16)
CGTFVGDGQKLLF

SEQ ID NO: 365248 - protein, 13 aa, Homo sapiens
  CDR3 for beta chain variable domain of TCR clone 182624 (TRBV7-9, TRBJ1-2)
CASSLKQNYGYTF

SEQ ID NO: 365249 - protein, 15 aa, Homo sapiens
  CDR3 for alpha chain variable domain of TCR clone 182625 (TRAV4, TRAJ10)
CLGGDGSGGGNKPTF

SEQ ID NO: 365250 - protein, 15 aa, Homo sapiens
  CDR3 for beta chain variable domain of TCR clone 182625 (TRBV27, TRBJ2-3)
CASSSLAGVIDTQYF

SEQ ID NO: 365251 - protein, 14 aa, Homo sapiens
  CDR3 for alpha chain variable domain of TCR clone 182626 (TRAV12-2, TRAJ13)
CAVKKTGGYQKVTL

SEQ ID NO: 365252 - protein, 15 aa, Homo sapiens
  CDR3 for beta chain variable domain of TCR clone 182626 (TRBV27, TRBJ2-1)
CASSSGGGSSNEQFF

SEQ ID NO: 365253 - protein, 14 aa, Homo sapiens
  CDR3 for alpha chain variable domain of TCR clone 182627 (TRAV39, TRAJ54)
CAVVLIQGTQKLVF

SEQ ID NO: 365254 - protein, 16 aa, Homo sapiens
  CDR3 for beta chain variable domain of TCR clone 182627 (TRBV3-1, TRBJ2-7)
CASSQGATGVAYEQYF

SEQ ID NO: 365255 - protein, 15 aa, Homo sapiens
  CDR3 for alpha chain variable domain of TCR clone 182628 (TRAV3, TRAJ48)
CAVRDLIFGNEKLTF

SEQ ID NO: 365256 - protein, 14 aa, Homo sapiens
  CDR3 for beta chain variable domain of TCR clone 182628 (TRBV7-9, TRBJ1-1)
CASSWGQGDTEAFF

SEQ ID NO: 365257 - protein, 14 aa, Homo sapiens
  CDR3 for alpha chain variable domain of TCR clone 182629 (TRAV23/DV6, TRAJ24)
CAANLSDSWGKLQF

SEQ ID NO: 365258 - protein, 14 aa, Homo sapiens
  CDR3 for beta chain variable domain of TCR clone 182629 (TRBV2, TRBJ2-1)
CASSEALDGNEQFF

SEQ ID NO: 365259 - protein, 16 aa, Homo sapiens
  CDR3 for alpha chain variable domain of TCR clone 182630 (TRAV12-3, TRAJ53)
CAMSVGSGGSNYKLTF

SEQ ID NO: 365260 - protein, 14 aa, Homo sapiens
  CDR3 for beta chain variable domain of TCR clone 182630 (TRBV25-1, TRBJ1-1)
CASTHLGGNTEAFF

SEQ ID NO: 365261 - protein, 14 aa, Homo sapiens
  CDR3 for alpha chain variable domain of TCR clone 182631 (TRAV1-2, TRAJ8)
CAVREDTGFQKLVF

SEQ ID NO: 365262 - protein, 14 aa, Homo sapiens
  CDR3 for beta chain variable domain of TCR clone 182631 (TRBV7-9, TRBJ2-7)
CASSLDYGGLGQYF

SEQ ID NO: 365263 - protein, 14 aa, Homo sapiens
  CDR3 for alpha chain variable domain of TCR clone 182632 (TRAV12-2, TRAJ3)
CAVSLYSSASEIIF

SEQ ID NO: 365264 - protein, 14 aa, Homo sapiens
  CDR3 for beta chain variable domain of TCR clone 182632 (TRBV27, TRBJ2-1)
CAGSIAETYNEQFF

SEQ ID NO: 365265 - protein, 13 aa, Homo sapiens
  CDR3 for alpha chain variable domain of TCR clone 182633 (TRAV8-3, TRAJ28)
CAVGAVGSYQLTF

SEQ ID NO: 365266 - protein, 17 aa, Homo sapiens
  CDR3 for beta chain variable domain of TCR clone 182633 (TRBV25-1, TRBJ2-1)
CASSAYGQGRGVYEQFF

SEQ ID NO: 365267 - protein, 12 aa, Homo sapiens
  CDR3 for alpha chain variable domain of TCR clone 182634 (TRAV9-2, TRAJ26)
CALRGYGQNFVF

SEQ ID NO: 365268 - protein, 16 aa, Homo sapiens
  CDR3 for beta chain variable domain of TCR clone 182634 (TRBV2, TRBJ2-3)
CASSTSVEGVTDTQYF

SEQ ID NO: 365269 - protein, 20 aa, Homo sapiens
  CDR3 for alpha chain variable domain of TCR clone 182635 (TRAV12-3, TRAJ4)
CAMTGAGTGWLYTHISRTLT

SEQ ID NO: 365270 - protein, 14 aa, Homo sapiens
  CDR3 for beta chain variable domain of TCR clone 182635 (TRBV10-3, TRBJ1-1)
CAISDTDRGVEAFF

SEQ ID NO: 365271 - protein, 13 aa, Homo sapiens
  CDR3 for alpha chain variable domain of TCR clone 182636 (TRAV8-1, TRAJ23)
CAVTGGQGGKIIF

SEQ ID NO: 365272 - protein, 14 aa, Homo sapiens
  CDR3 for beta chain variable domain of TCR clone 182636 (TRBV20-1, TRBJ1-1)
CSAQTRIGGTEAFF

SEQ ID NO: 365273 - protein, 12 aa, Homo sapiens
  CDR3 for alpha chain variable domain of TCR clone 182637 (TRAV13-1, TRAJ53)
AASGGSNYKLTF

SEQ ID NO: 365274 - protein, 15 aa, Homo sapiens
  CDR3 for beta chain variable domain of TCR clone 182637 (TRBV19, TRBJ1-6)
CASSTQGAVGSPLHF

SEQ ID NO: 365275 - protein, 12 aa, Homo sapiens
  CDR3 for alpha chain variable domain of TCR clone 182638 (TRAV13-2, TRAJ23)
CAARHRGGKLIF

SEQ ID NO: 365276 - protein, 19 aa, Homo sapiens
  CDR3 for beta chain variable domain of TCR clone 182638 (TRBV19, TRBJ2-5)
CASSIGQVTDFFLGETQYF

SEQ ID NO: 365277 - protein, 15 aa, Homo sapiens
  CDR3 for alpha chain variable domain of TCR clone 182639 (TRAV8-4, TRAJ3)
CAVTGENLVQQCFQD

SEQ ID NO: 365278 - protein, 16 aa, Homo sapiens
  CDR3 for beta chain variable domain of TCR clone 182639 (TRBV4-2, TRBJ1-1)
CASSQAGFGMYTEAFF

SEQ ID NO: 365279 - protein, 14 aa, Homo sapiens
  CDR3 for alpha chain variable domain of TCR clone 182640 (TRAV26-1, TRAJ39)
CIVRGSRAGNMLTF

SEQ ID NO: 365280 - protein, 18 aa, Homo sapiens
  CDR3 for beta chain variable domain of TCR clone 182640 (TRBV7-9, TRBJ2-7)
CASGLTTSGSRTWYEQYF

SEQ ID NO: 365281 - protein, 13 aa, Homo sapiens
  CDR3 for alpha chain variable domain of TCR clone 182641 (TRAV8-6, TRAJ49)
CAVITNTGNQFYF

SEQ ID NO: 365282 - protein, 11 aa, Homo sapiens
  CDR3 for beta chain variable domain of TCR clone 182641 (TRBV7-2, TRBJ2-3)
CASSSSDTQYF

SEQ ID NO: 365283 - protein, 16 aa, Homo sapiens
  CDR3 for alpha chain variable domain of TCR clone 182642 (TRAV12-3, TRAJ53)
CAMSPGSGGSNYKLTF

SEQ ID NO: 365284 - protein, 16 aa, Homo sapiens
  CDR3 for beta chain variable domain of TCR clone 182642 (TRBV4-2, TRBJ1-1)
CASSQAGFGMNTAAFF

SEQ ID NO: 365285 - protein, 14 aa, Homo sapiens
  CDR3 for alpha chain variable domain of TCR clone 182643 (TRAV26-1, TRAJ48)
CIVRVGFGNEKLTF

SEQ ID NO: 365286 - protein, 14 aa, Homo sapiens
  CDR3 for beta chain variable domain of TCR clone 182643 (TRBV7-6, TRBJ2-3)
CASSLETVTDTQYF

SEQ ID NO: 365287 - protein, 12 aa, Homo sapiens
  CDR3 for alpha chain variable domain of TCR clone 182644 (TRAV12-2, TRAJ9)
CAVFTGGFKTIF

SEQ ID NO: 365288 - protein, 13 aa, Homo sapiens
  CDR3 for beta chain variable domain of TCR clone 182644 (TRBV7-2, TRBJ2-2)
CASSLAVTGELFF

SEQ ID NO: 365289 - protein, 16 aa, Homo sapiens
  CDR3 for alpha chain variable domain of TCR clone 182645 (TRAV8-2, TRAJ36)
CVVSEVNWGKQPLLWD

SEQ ID NO: 365290 - protein, 14 aa, Homo sapiens
  CDR3 for beta chain variable domain of TCR clone 182645 (TRBV25-1, TRBJ1-1)
CASTHLGGNTEAFF

SEQ ID NO: 365291 - protein, 20 aa, Homo sapiens
  CDR3 for alpha chain variable domain of TCR clone 182646 (TRAV30, TRAJ32)
RDLLLRHREGYGVATNKLIF

SEQ ID NO: 365292 - protein, 13 aa, Homo sapiens
  CDR3 for beta chain variable domain of TCR clone 182646 (TRBV10-3, TRBJ2-7)
CASKLAVNYEQYF

SEQ ID NO: 365293 - protein, 15 aa, Homo sapiens
  CDR3 for alpha chain variable domain of TCR clone 182647 (TRAV8-3, TRAJ11)
CAVGLLNSGYSTLTF

SEQ ID NO: 365294 - protein, 23 aa, Homo sapiens
  CDR3 for beta chain variable domain of TCR clone 182647 (TRBV7-9, TRBJ1-2)
EAQLEKSRLLSDRFYSGEDGYTF

SEQ ID NO: 365295 - protein, 13 aa, Homo sapiens
  CDR3 for alpha chain variable domain of TCR clone 182648 (TRAV21, TRAJ49)
CAVRQSTGNQFYF

SEQ ID NO: 365296 - protein, 21 aa, Homo sapiens
  CDR3 for beta chain variable domain of TCR clone 182648 (TRBV12-4, TRBJ2-5)
CASSFFCQGAPRDPVLRARHA

SEQ ID NO: 365297 - protein, 13 aa, Homo sapiens
  CDR3 for alpha chain variable domain of TCR clone 182649 (TRAV12-2, TRAJ18)
CAVRGSTLGRLYF

SEQ ID NO: 365298 - protein, 18 aa, Homo sapiens
  CDR3 for beta chain variable domain of TCR clone 182649 (TRBV27, TRBJ2-3)
CASSLSGTRGRGTDTQYF

SEQ ID NO: 365299 - protein, 16 aa, Homo sapiens
  CDR3 for alpha chain variable domain of TCR clone 182650 (TRAV3, TRAJ37)
CSVRGKGSGNTGKLIF

SEQ ID NO: 365300 - protein, 15 aa, Homo sapiens
  CDR3 for beta chain variable domain of TCR clone 182650 (TRBV5-1, TRBJ2-7)
CASSLNGGPAREQYF

SEQ ID NO: 365301 - protein, 11 aa, Homo sapiens
  CDR3 for alpha chain variable domain of TCR clone 182651 (TRAV12-2, TRAJ49)
CAVNTGDQFYF

SEQ ID NO: 365302 - protein, 12 aa, Homo sapiens
  CDR3 for beta chain variable domain of TCR clone 182651 (TRBV2, TRBJ2-3)
CASSGRFDTQYF

SEQ ID NO: 365303 - protein, 14 aa, Homo sapiens
  CDR3 for alpha chain variable domain of TCR clone 182652 (TRAV1-2, TRAJ16)
CAVNRFSDGQKLLF

SEQ ID NO: 365304 - protein, 13 aa, Homo sapiens
  CDR3 for beta chain variable domain of TCR clone 182652 (TRBV6-5, TRBJ1-1)
QTSVYFCALRASF

SEQ ID NO: 365305 - protein, 13 aa, Homo sapiens
  CDR3 for alpha chain variable domain of TCR clone 182653 (TRAV26-1, TRAJ29)
CIVRRSGNTPLVF

SEQ ID NO: 365306 - protein, 16 aa, Homo sapiens
  CDR3 for beta chain variable domain of TCR clone 182653 (TRBV11-2, TRBJ2-7)
CASSLAPTGGNYEQYF

SEQ ID NO: 365307 - protein, 17 aa, Homo sapiens
  CDR3 for alpha chain variable domain of TCR clone 182654 (TRAV3, TRAJ6)
CAVRDGPRAGGNYIPTF

SEQ ID NO: 365308 - protein, 15 aa, Homo sapiens
  CDR3 for beta chain variable domain of TCR clone 182654 (TRBV19, TRBJ2-3)
CASSSDRVRTDTQYF

SEQ ID NO: 365309 - protein, 14 aa, Homo sapiens
  CDR3 for alpha chain variable domain of TCR clone 182655 (TRAV12-3, TRAJ21)
CAMEGHQGFNKFSF

SEQ ID NO: 365310 - protein, 16 aa, Homo sapiens
  CDR3 for beta chain variable domain of TCR clone 182655 (TRBV19, TRBJ2-1)
CASSKAGPSSYNEQFF

SEQ ID NO: 365311 - protein, 14 aa, Homo sapiens
  CDR3 for alpha chain variable domain of TCR clone 182656 (TRAV12-3, TRAJ10)
SHLPLTGGGHKLTF

SEQ ID NO: 365312 - protein, 15 aa, Homo sapiens
  CDR3 for beta chain variable domain of TCR clone 182656 (TRBV10-2, TRBJ2-6)
CASSEQGTGANVLTF

SEQ ID NO: 365313 - protein, 17 aa, Homo sapiens
  CDR3 for alpha chain variable domain of TCR clone 182657 (TRAV3, TRAJ6)
CAVRDGPRAGGSYIPTF

SEQ ID NO: 365314 - protein, 14 aa, Homo sapiens
  CDR3 for beta chain variable domain of TCR clone 182657 (TRBV5-1, TRBJ2-3)
CASSLFGPTDTQYF

SEQ ID NO: 365315 - protein, 14 aa, Homo sapiens
  CDR3 for alpha chain variable domain of TCR clone 182658 (TRAV35, TRAJ22)
CAGLRPGSARQLTF

SEQ ID NO: 365316 - protein, 15 aa, Homo sapiens
  CDR3 for beta chain variable domain of TCR clone 182658 (TRBV12-4, TRBJ2-5)
CASSPPTRLQETQYF

SEQ ID NO: 365317 - protein, 17 aa, Homo sapiens
  CDR3 for alpha chain variable domain of TCR clone 182659 (TRAV13-1, TRAJ28)
CAASPPYSGAGSYQLTF

SEQ ID NO: 365318 - protein, 17 aa, Homo sapiens
  CDR3 for beta chain variable domain of TCR clone 182659 (TRBV13, TRBJ2-3)
CASSPSRVAGGRNTQYF

SEQ ID NO: 365319 - protein, 15 aa, Homo sapiens
  CDR3 for alpha chain variable domain of TCR clone 182660 (TRAV26-2, TRAJ50)
CILRDEETSYDKVIF

SEQ ID NO: 365320 - protein, 11 aa, Homo sapiens
  CDR3 for beta chain variable domain of TCR clone 182660 (TRBV29-1, TRBJ2-5)
CSEDRTGTQYF

SEQ ID NO: 365321 - protein, 13 aa, Homo sapiens
  CDR3 for alpha chain variable domain of TCR clone 182661 (TRAV20, TRAJ48)
CAVQGVGHEKLTF

SEQ ID NO: 365322 - protein, 19 aa, Homo sapiens
  CDR3 for beta chain variable domain of TCR clone 182661 (TRBV2, TRBJ2-2)
CASSQPGLAGGGNTGELFF

SEQ ID NO: 365323 - protein, 16 aa, Homo sapiens
  CDR3 for alpha chain variable domain of TCR clone 182662 (TRAV30, TRAJ24)
CGTEIVDADSWGKFQF

SEQ ID NO: 365324 - protein, 15 aa, Homo sapiens
  CDR3 for beta chain variable domain of TCR clone 182662 (TRBV9, TRBJ1-6)
CASSSPGRGNSPLHF

SEQ ID NO: 365325 - protein, 22 aa, Homo sapiens
  CDR3 for alpha chain variable domain of TCR clone 182663 (TRAV8-3, TRAJ32)
CAVEVVLQTSSSLELALCLLSS

SEQ ID NO: 365326 - protein, 12 aa, Homo sapiens
  CDR3 for beta chain variable domain of TCR clone 182663 (TRBV7-8, TRBJ2-7)
CASSLGDGEQYF

SEQ ID NO: 365327 - protein, 12 aa, Homo sapiens
  CDR3 for alpha chain variable domain of TCR clone 182664 (TRAV1-2, TRAJ20)
CAVISNDYKLSF

SEQ ID NO: 365328 - protein, 17 aa, Homo sapiens
  CDR3 for beta chain variable domain of TCR clone 182664 (TRBV4-3, TRBJ2-1)
CASSQFSSGRASGEQFF

SEQ ID NO: 365329 - protein, 13 aa, Homo sapiens
  CDR3 for alpha chain variable domain of TCR clone 182665 (TRAV21, TRAJ26)
CAVLDNYGQNFVF

SEQ ID NO: 365330 - protein, 16 aa, Homo sapiens
  CDR3 for beta chain variable domain of TCR clone 182665 (TRBV29-1, TRBJ2-2)
CSVETRASGHTGELFF

SEQ ID NO: 365331 - protein, 12 aa, Homo sapiens
  CDR3 for alpha chain variable domain of TCR clone 182666 (TRAV1-1, TRAJ30)
CAVRGRDDKIIF

SEQ ID NO: 365332 - protein, 14 aa, Homo sapiens
  CDR3 for beta chain variable domain of TCR clone 182666 (TRBV19, TRBJ2-6)
CASTIGSGANVLTF

SEQ ID NO: 365333 - protein, 14 aa, Homo sapiens
  CDR3 for alpha chain variable domain of TCR clone 182667 (TRAV8-3, TRAJ4)
CAVGASGGYNKLIF

SEQ ID NO: 365334 - protein, 17 aa, Homo sapiens
  CDR3 for beta chain variable domain of TCR clone 182667 (TRBV11-2, TRBJ2-1)
CASSLCPPGVEYNKQFF

SEQ ID NO: 365335 - protein, 12 aa, Homo sapiens
  CDR3 for alpha chain variable domain of TCR clone 182668 (TRAV13-1, TRAJ15)
CAANKAGTALIF

SEQ ID NO: 365336 - protein, 14 aa, Homo sapiens
  CDR3 for beta chain variable domain of TCR clone 182668 (TRBV20-1, TRBJ2-5)
CSARYRGLQETQYF

SEQ ID NO: 365337 - protein, 16 aa, Homo sapiens
  CDR3 for alpha chain variable domain of TCR clone 182669 (TRAV13-2, TRAJ32)
CAENMNYGGATNKLIF

SEQ ID NO: 365338 - protein, 15 aa, Homo sapiens
  CDR3 for beta chain variable domain of TCR clone 182669 (TRBV9, TRBJ2-1)
CASSVSGTSPNEQFF

SEQ ID NO: 365339 - protein, 14 aa, Homo sapiens
  CDR3 for alpha chain variable domain of TCR clone 182670 (TRAV12-2, TRAJ45)
CAVNIGGGADGLTF

SEQ ID NO: 365340 - protein, 15 aa, Homo sapiens
  CDR3 for beta chain variable domain of TCR clone 182670 (TRBV11-2, TRBJ2-1)
CASSSPSTRYNEQFF

SEQ ID NO: 365341 - protein, 17 aa, Homo sapiens
  CDR3 for alpha chain variable domain of TCR clone 182671 (TRAV38-2/DV8, TRAJ28)
CAFLTLYSGAGSYQLTF

SEQ ID NO: 365342 - protein, 14 aa, Homo sapiens
  CDR3 for beta chain variable domain of TCR clone 182671 (TRBV6-1, TRBJ1-3)
CASVQGGGGNTIYF

SEQ ID NO: 365343 - protein, 13 aa, Homo sapiens
  CDR3 for alpha chain variable domain of TCR clone 182672 (TRAV12-2, TRAJ20)
CAVYPSNDYKLSF

SEQ ID NO: 365344 - protein, 16 aa, Homo sapiens
  CDR3 for beta chain variable domain of TCR clone 182672 (TRBV7-8, TRBJ2-6)
CASRVGDSSGANVLTF

SEQ ID NO: 365345 - protein, 19 aa, Homo sapiens
  CDR3 for alpha chain variable domain of TCR clone 182673 (TRAV12-1, TRAJ45)
CVVTHDGGYSGGGADGLTF

SEQ ID NO: 365346 - protein, 16 aa, Homo sapiens
  CDR3 for beta chain variable domain of TCR clone 182673 (TRBV2, TRBJ2-1)
CASSVGGSLSYNEQFF

SEQ ID NO: 365347 - protein, 12 aa, Homo sapiens
  CDR3 for alpha chain variable domain of TCR clone 182674 (TRAV26-1, TRAJ53)
CIEGGSNYKLTF

SEQ ID NO: 365348 - protein, 14 aa, Homo sapiens
  CDR3 for beta chain variable domain of TCR clone 182674 (TRBV4-1, TRBJ2-5)
CASSQYRDQETQYF

SEQ ID NO: 365349 - protein, 14 aa, Homo sapiens
  CDR3 for alpha chain variable domain of TCR clone 182675 (TRAV1-1, TRAJ27)
CAVIYNTNAGKSTF

SEQ ID NO: 365350 - protein, 17 aa, Homo sapiens
  CDR3 for beta chain variable domain of TCR clone 182675 (TRBV19, TRBJ2-3)
CASSIDPAGGGTDTQYF

SEQ ID NO: 365351 - protein, 14 aa, Homo sapiens
  CDR3 for alpha chain variable domain of TCR clone 182676 (TRAV13-1, TRAJ13)
CAAIPLVGYQKVTF

SEQ ID NO: 365352 - protein, 17 aa, Homo sapiens
  CDR3 for beta chain variable domain of TCR clone 182676 (TRBV7-3, TRBJ2-5)
CASSLGSGRSGSETQYF

SEQ ID NO: 365353 - protein, 11 aa, Homo sapiens
  CDR3 for alpha chain variable domain of TCR clone 182677 (TRAV8-3, TRAJ49)
CAVNTGNQFYF

SEQ ID NO: 365354 - protein, 14 aa, Homo sapiens
  CDR3 for beta chain variable domain of TCR clone 182677 (TRBV11-2, TRBJ2-7)
CASSPPPTSSTSGR

SEQ ID NO: 365355 - protein, 13 aa, Homo sapiens
  CDR3 for alpha chain variable domain of TCR clone 182678 (TRAV2, TRAJ15)
CAVASQAGTALIF

SEQ ID NO: 365356 - protein, 15 aa, Homo sapiens
  CDR3 for beta chain variable domain of TCR clone 182678 (TRBV18, TRBJ1-5)
CASSPSDRSNQPQHF

SEQ ID NO: 365357 - protein, 14 aa, Homo sapiens
  CDR3 for alpha chain variable domain of TCR clone 182679 (TRAV12-3, TRAJ10)
SHLPLTGGGNKLTF

SEQ ID NO: 365358 - protein, 16 aa, Homo sapiens
  CDR3 for beta chain variable domain of TCR clone 182679 (TRBV6-6, TRBJ1-6)
CASSLHGPGRGSPLHF

SEQ ID NO: 365359 - protein, 14 aa, Homo sapiens
  CDR3 for alpha chain variable domain of TCR clone 182680 (TRAV26-1, TRAJ26)
CIVIATFLGQNFVF

SEQ ID NO: 365360 - protein, 16 aa, Homo sapiens
  CDR3 for beta chain variable domain of TCR clone 182680 (TRBV12-4, TRBJ2-7)
CASRSTGTGPSYEQYF

SEQ ID NO: 365361 - protein, 16 aa, Homo sapiens
  CDR3 for alpha chain variable domain of TCR clone 182681 (TRAV16, TRAJ4)
CITVLPFSGGYNKPIF

SEQ ID NO: 365362 - protein, 14 aa, Homo sapiens
  CDR3 for beta chain variable domain of TCR clone 182681 (TRBV19, TRBJ2-7)
CASSMGQGAIEQYF

SEQ ID NO: 365363 - protein, 15 aa, Homo sapiens
  CDR3 for alpha chain variable domain of TCR clone 182682 (TRAV29/DV5, TRAJ24)
CAASGATDRWEKFQF

SEQ ID NO: 365364 - protein, 12 aa, Homo sapiens
  CDR3 for beta chain variable domain of TCR clone 182682 (TRBV11-2, TRBJ2-2)
CASSLPTGELFF

SEQ ID NO: 365365 - protein, 14 aa, Homo sapiens
  CDR3 for alpha chain variable domain of TCR clone 182683 (TRAV17, TRAJ57)
CATDPQGGSEKLVF

SEQ ID NO: 365366 - protein, 16 aa, Homo sapiens
  CDR3 for beta chain variable domain of TCR clone 182683 (TRBV13, TRBJ2-2)
CGSSPRTGEHTGELFF

SEQ ID NO: 365367 - protein, 16 aa, Homo sapiens
  CDR3 for alpha chain variable domain of TCR clone 182684 (TRAV13-1, TRAJ45)
CAASLESGGGADGLTF

SEQ ID NO: 365368 - protein, 14 aa, Homo sapiens
  CDR3 for beta chain variable domain of TCR clone 182684 (TRBV12-4, TRBJ1-3)
CATGQTVSGNTIYF

SEQ ID NO: 365369 - protein, 14 aa, Homo sapiens
  CDR3 for alpha chain variable domain of TCR clone 182685 (TRAV1-2, TRAJ16)
CAVNRFSDGQKLLF

SEQ ID NO: 365370 - protein, 15 aa, Homo sapiens
  CDR3 for beta chain variable domain of TCR clone 182685 (TRBV7-9, TRBJ1-6)
CASSPPGRGNSPLLF

SEQ ID NO: 365371 - protein, 14 aa, Homo sapiens
  CDR3 for alpha chain variable domain of TCR clone 182686 (TRAV12-3, TRAJ42)
CAMNYGGSQGNLIF

SEQ ID NO: 365372 - protein, 17 aa, Homo sapiens
  CDR3 for beta chain variable domain of TCR clone 182686 (TRBV7-3, TRBJ2-3)
CASSLMKRMRGADTQYF

SEQ ID NO: 365373 - protein, 10 aa, Homo sapiens
  CDR3 for alpha chain variable domain of TCR clone 182687 (TRAV21, TRAJ34)
CAADTDKLIF

SEQ ID NO: 365374 - protein, 15 aa, Homo sapiens
  CDR3 for beta chain variable domain of TCR clone 182687 (TRBV11-2, TRBJ2-7)
CASNSNPYPPYEQYF

SEQ ID NO: 365375 - protein, 12 aa, Homo sapiens
  CDR3 for alpha chain variable domain of TCR clone 182688 (TRAV21, TRAJ13)
PGPSGGYQKVTF

SEQ ID NO: 365376 - protein, 17 aa, Homo sapiens
  CDR3 for beta chain variable domain of TCR clone 182688 (TRBV7-9, TRBJ1-6)
CASSSPGRGNSPLHLGT

SEQ ID NO: 365377 - protein, 15 aa, Homo sapiens
  CDR3 for alpha chain variable domain of TCR clone 182689 (TRAV8-3, TRAJ35)
CAVGATIGFGNVLHC

SEQ ID NO: 365378 - protein, 15 aa, Homo sapiens
  CDR3 for beta chain variable domain of TCR clone 182689 (TRBV20-1, TRBJ2-7)
CSARDRVSGMDEQYF

SEQ ID NO: 365379 - protein, 15 aa, Homo sapiens
  CDR3 for alpha chain variable domain of TCR clone 182690 (TRAV9-2, TRAJ56)
CALSDVDGANSMLTF

SEQ ID NO: 365380 - protein, 19 aa, Homo sapiens
  CDR3 for beta chain variable domain of TCR clone 182690 (TRBV11-1, TRBJ2-2)
CTSVPAVFGDEFAPGSCFF

SEQ ID NO: 365381 - protein, 16 aa, Homo sapiens
  CDR3 for alpha chain variable domain of TCR clone 182691 (TRAV3, TRAJ3)
CAVRDRAKSSASKIIF

SEQ ID NO: 365382 - protein, 16 aa, Homo sapiens
  CDR3 for beta chain variable domain of TCR clone 182691 (TRBV20-1, TRBJ2-4)
FSATSLAELAKNIQYF

SEQ ID NO: 365383 - protein, 11 aa, Homo sapiens
  CDR3 for alpha chain variable domain of TCR clone 182692 (TRAV21, TRAJ33)
CAVLSNYQLIW

SEQ ID NO: 365384 - protein, 15 aa, Homo sapiens
  CDR3 for beta chain variable domain of TCR clone 182692 (TRBV11-2, TRBJ2-7)
CASSLMEGGSYEQYF

SEQ ID NO: 365385 - protein, 19 aa, Homo sapiens
  CDR3 for alpha chain variable domain of TCR clone 182693 (TRAV26-1, TRAJ52)
CIVRAHRNPGGTSYGKLTF

SEQ ID NO: 365386 - protein, 13 aa, Homo sapiens
  CDR3 for beta chain variable domain of TCR clone 182693 (TRBV19, TRBJ2-7)
CASRKAGGSEQYF

SEQ ID NO: 365387 - protein, 13 aa, Homo sapiens
  CDR3 for alpha chain variable domain of TCR clone 182694 (TRAV13-1, TRAJ29)
CAATFSGNTPLVF

SEQ ID NO: 365388 - protein, 15 aa, Homo sapiens
  CDR3 for beta chain variable domain of TCR clone 182694 (TRBV28, TRBJ1-3)
CASSMGWASGNTIYF

SEQ ID NO: 365389 - protein, 13 aa, Homo sapiens
  CDR3 for alpha chain variable domain of TCR clone 182695 (TRAV12-1, TRAJ6)
CVVFPGGSYIPTF

SEQ ID NO: 365390 - protein, 11 aa, Homo sapiens
  CDR3 for beta chain variable domain of TCR clone 182695 (TRBV12-4, TRBJ2-3)
CASTATDTQYF

SEQ ID NO: 365391 - protein, 14 aa, Homo sapiens
  CDR3 for alpha chain variable domain of TCR clone 182696 (TRAV27, TRAJ22)
CAGLPSGSARQLTF

SEQ ID NO: 365392 - protein, 17 aa, Homo sapiens
  CDR3 for beta chain variable domain of TCR clone 182696 (TRBV7-9, TRBJ2-6)
CASSFGAGYSGANVLTF

SEQ ID NO: 365393 - protein, 16 aa, Homo sapiens
  CDR3 for alpha chain variable domain of TCR clone 182697 (TRAV30, TRAJ24)
CGTEIVDADSWGKFQF

SEQ ID NO: 365394 - protein, 20 aa, Homo sapiens
  CDR3 for beta chain variable domain of TCR clone 182697 (TRBV4-1, TRBJ2-2)
CASSQASPPGLASNTGELFF

SEQ ID NO: 365395 - protein, 14 aa, Homo sapiens
  CDR3 for alpha chain variable domain of TCR clone 182698 (TRAV1-2, TRAJ8)
CAVREDTGFQKLVF

SEQ ID NO: 365396 - protein, 15 aa, Homo sapiens
  CDR3 for beta chain variable domain of TCR clone 182698 (TRBV19, TRBJ1-1)
CASSIRRQMNTEAFF

SEQ ID NO: 365397 - protein, 14 aa, Homo sapiens
  CDR3 for alpha chain variable domain of TCR clone 182699 (TRAV1-2, TRAJ8)
CAVREDTGFQKLVL

SEQ ID NO: 365398 - protein, 16 aa, Homo sapiens
  CDR3 for beta chain variable domain of TCR clone 182699 (TRBV5-1, TRBJ1-1)
CASSSGGNSLNTEAFF

SEQ ID NO: 365399 - protein, 12 aa, Homo sapiens
  CDR3 for alpha chain variable domain of TCR clone 182700 (TRAV1-1, TRAJ8)
CAGGTGFQKFVF

SEQ ID NO: 365400 - protein, 16 aa, Homo sapiens
  CDR3 for beta chain variable domain of TCR clone 182700 (TRBV12-4, TRBJ1-5)
CASSRPVGGSNQPQHF

SEQ ID NO: 365401 - protein, 14 aa, Homo sapiens
  CDR3 for alpha chain variable domain of TCR clone 182701 (TRAV9-2, TRAJ39)
CALYNYNAGNMFTF

SEQ ID NO: 365402 - protein, 16 aa, Homo sapiens
  CDR3 for beta chain variable domain of TCR clone 182701 (TRBV7-3, TRBJ2-3)
CASSPGAGRFTDTQYF

SEQ ID NO: 365403 - protein, 12 aa, Homo sapiens
  CDR3 for alpha chain variable domain of TCR clone 182702 (TRAV38-2/DV8, TRAJ47)
CVLMEYGNKLVL

SEQ ID NO: 365404 - protein, 14 aa, Homo sapiens
  CDR3 for beta chain variable domain of TCR clone 182702 (TRBV20-1, TRBJ1-5)
CSATDRGSNQPQHF

SEQ ID NO: 365405 - protein, 15 aa, Homo sapiens
  CDR3 for alpha chain variable domain of TCR clone 182703 (TRAV21, TRAJ24)
CAARSSTDSWGNCSL

SEQ ID NO: 365406 - protein, 14 aa, Homo sapiens
  CDR3 for beta chain variable domain of TCR clone 182703 (TRBV7-2, TRBJ2-1)
CASSPGTFYNEQFF

SEQ ID NO: 365407 - protein, 14 aa, Homo sapiens
  CDR3 for alpha chain variable domain of TCR clone 182704 (TRAV1-2, TRAJ8)
CAVREDTGFQKLVF

SEQ ID NO: 365408 - protein, 15 aa, Homo sapiens
  CDR3 for beta chain variable domain of TCR clone 182704 (TRBV7-3, TRBJ2-1)
CASSLRAGSYNEQFF

SEQ ID NO: 365409 - protein, 16 aa, Homo sapiens
  CDR3 for alpha chain variable domain of TCR clone 182705 (TRAV8-3, TRAJ13)
CAVGAYPSGGYQKVTF

SEQ ID NO: 365410 - protein, 16 aa, Homo sapiens
  CDR3 for beta chain variable domain of TCR clone 182705 (TRBV19, TRBJ1-2)
CASSIGSNRDGYGYTF

SEQ ID NO: 365411 - protein, 14 aa, Homo sapiens
  CDR3 for alpha chain variable domain of TCR clone 182706 (TRAV8-3, TRAJ9)
CAVGYNTGGFKTIF

SEQ ID NO: 365412 - protein, 14 aa, Homo sapiens
  CDR3 for beta chain variable domain of TCR clone 182706 (TRBV28, TRBJ1-2)
CASRIQGANYGYTF

SEQ ID NO: 365413 - protein, 14 aa, Homo sapiens
  CDR3 for alpha chain variable domain of TCR clone 182707 (TRAV1-2, TRAJ16)
CSVNRFSDGQKLLF

SEQ ID NO: 365414 - protein, 14 aa, Homo sapiens
  CDR3 for beta chain variable domain of TCR clone 182707 (TRBV7-2, TRBJ2-7)
CASSPKTSFYEQYF

SEQ ID NO: 365415 - protein, 11 aa, Homo sapiens
  CDR3 for alpha chain variable domain of TCR clone 182708 (TRAV21, TRAJ11)
CAVNGYGTLTC

SEQ ID NO: 365416 - protein, 11 aa, Homo sapiens
  CDR3 for beta chain variable domain of TCR clone 182708 (TRBV19, TRBJ1-1)
CASSIGSEAFF

SEQ ID NO: 365417 - protein, 13 aa, Homo sapiens
  CDR3 for alpha chain variable domain of TCR clone 182709 (TRAV8-6, TRAJ33)
CAVSEGSNYKLIW

SEQ ID NO: 365418 - protein, 13 aa, Homo sapiens
  CDR3 for beta chain variable domain of TCR clone 182709 (TRBV5-7, TRBJ2-3)
CASSLGRTDTQYF

SEQ ID NO: 365419 - protein, 12 aa, Homo sapiens
  CDR3 for alpha chain variable domain of TCR clone 182710 (TRAV13-1, TRAJ21)
CAAKEGFNKFYF

SEQ ID NO: 365420 - protein, 17 aa, Homo sapiens
  CDR3 for beta chain variable domain of TCR clone 182710 (TRBV20-1, TRBJ2-1)
CSAISSGLAGSYNEQFF

SEQ ID NO: 365421 - protein, 15 aa, Homo sapiens
  CDR3 for alpha chain variable domain of TCR clone 182711 (TRAV3, TRAJ9)
CAVSDSNTGGFKTIF

SEQ ID NO: 365422 - protein, 16 aa, Homo sapiens
  CDR3 for beta chain variable domain of TCR clone 182711 (TRBV15, TRBJ2-5)
CATSPTTGQGMETQYF

SEQ ID NO: 365423 - protein, 22 aa, Homo sapiens
  CDR3 for alpha chain variable domain of TCR clone 182712 (TRAV26-1, TRAJ30)
CIVRVRTEMTRSSLEKGHDFIF

SEQ ID NO: 365424 - protein, 18 aa, Homo sapiens
  CDR3 for beta chain variable domain of TCR clone 182712 (TRBV4-1, TRBJ1-5)
CDSSQDPRGQGLNQPQHF

SEQ ID NO: 365425 - protein, 10 aa, Homo sapiens
  CDR3 for alpha chain variable domain of TCR clone 182713 (TRAV23/DV6, TRAJ57)
CAASSTLSQG

SEQ ID NO: 365426 - protein, 15 aa, Homo sapiens
  CDR3 for beta chain variable domain of TCR clone 182713 (TRBV12-4, TRBJ2-1)
CASSPLSGRNNEQFF

SEQ ID NO: 365427 - protein, 14 aa, Homo sapiens
  CDR3 for alpha chain variable domain of TCR clone 182714 (TRAV16, TRAJ3)
CALSQYSSASKIIF

SEQ ID NO: 365428 - protein, 13 aa, Homo sapiens
  CDR3 for beta chain variable domain of TCR clone 182714 (TRBV15, TRBJ1-6)
CATSGGLNSPLHF

SEQ ID NO: 365429 - protein, 17 aa, Homo sapiens
  CDR3 for alpha chain variable domain of TCR clone 182715 (TRAV17, TRAJ28)
CATDPRRGGAGSYQLTF

SEQ ID NO: 365430 - protein, 17 aa, Homo sapiens
  CDR3 for beta chain variable domain of TCR clone 182715 (TRBV25-1, TRBJ2-5)
CASSRRGGRGGQETQYF

SEQ ID NO: 365431 - protein, 20 aa, Homo sapiens
  CDR3 for alpha chain variable domain of TCR clone 182716 (TRAV14/DV4, TRAJ22)
CAMREGPFSISSGSARQLTF

SEQ ID NO: 365432 - protein, 13 aa, Homo sapiens
  CDR3 for beta chain variable domain of TCR clone 182716 (TRBV4-2, TRBJ2-3)
YASSQDWQHTQYF

SEQ ID NO: 365433 - protein, 14 aa, Homo sapiens
  CDR3 for alpha chain variable domain of TCR clone 182717 (TRAV13-2, TRAJ11)
CAETGNSGYSTLTF

SEQ ID NO: 365434 - protein, 20 aa, Homo sapiens
  CDR3 for beta chain variable domain of TCR clone 182717 (TRBV28, TRBJ2-1)
CASTPIGRSPGLAGGNEQFF

SEQ ID NO: 365435 - protein, 14 aa, Homo sapiens
  CDR3 for alpha chain variable domain of TCR clone 182718 (TRAV1-2, TRAJ8)
CAVREETGFQKLVF

SEQ ID NO: 365436 - protein, 16 aa, Homo sapiens
  CDR3 for beta chain variable domain of TCR clone 182718 (TRBV12-4, TRBJ1-5)
CASSRPVGGSNQPQHF

SEQ ID NO: 365437 - protein, 16 aa, Homo sapiens
  CDR3 for alpha chain variable domain of TCR clone 182719 (TRAV3, TRAJ6)
CAVRDGMGRRKLHTYI

SEQ ID NO: 365438 - protein, 15 aa, Homo sapiens
  CDR3 for beta chain variable domain of TCR clone 182719 (TRBV5-1, TRBJ2-7)
CASSLGDFATYEQYF

SEQ ID NO: 365439 - protein, 14 aa, Homo sapiens
  CDR3 for alpha chain variable domain of TCR clone 182720 (TRAV17, TRAJ6)
CAKDASGGSYIPTF

SEQ ID NO: 365440 - protein, 19 aa, Homo sapiens
  CDR3 for beta chain variable domain of TCR clone 182720 (TRBV4-3, TRBJ2-7)
CASSQEFIGWQVTPYEQYF

SEQ ID NO: 365441 - protein, 23 aa, Homo sapiens
  CDR3 for alpha chain variable domain of TCR clone 182721 (TRAV36/DV7, TRAJ44)
CAVEQIPALPVNSPLGLEQDFRS

SEQ ID NO: 365442 - protein, 16 aa, Homo sapiens
  CDR3 for beta chain variable domain of TCR clone 182721 (TRBV7-9, TRBJ1-2)
CASSLGFSSGEDGYTL

SEQ ID NO: 365443 - protein, 14 aa, Homo sapiens
  CDR3 for alpha chain variable domain of TCR clone 182722 (TRAV1-2, TRAJ28)
CVARSGAGSYQPTF

SEQ ID NO: 365444 - protein, 16 aa, Homo sapiens
  CDR3 for beta chain variable domain of TCR clone 182722 (TRBV5-1, TRBJ2-5)
CASSLRRTSGQETQYF

SEQ ID NO: 365445 - protein, 12 aa, Homo sapiens
  CDR3 for alpha chain variable domain of TCR clone 182723 (TRAV23/DV6, TRAJ30)
CAASKGDDKIIF

SEQ ID NO: 365446 - protein, 15 aa, Homo sapiens
  CDR3 for beta chain variable domain of TCR clone 182723 (TRBV7-9, TRBJ2-7)
CASSLDLDRGYEQYF

SEQ ID NO: 365447 - protein, 12 aa, Homo sapiens
  CDR3 for alpha chain variable domain of TCR clone 182724 (TRAV27, TRAJ58)
CAGARDTSRLTF

SEQ ID NO: 365448 - protein, 15 aa, Homo sapiens
  CDR3 for beta chain variable domain of TCR clone 182724 (TRBV12-4, TRBJ2-5)
CASSPPTGLQETQYF

SEQ ID NO: 365449 - protein, 14 aa, Homo sapiens
  CDR3 for alpha chain variable domain of TCR clone 182725 (TRAV8-3, TRAJ6)
CAVGGRGGSYIPTF

SEQ ID NO: 365450 - protein, 15 aa, Homo sapiens
  CDR3 for beta chain variable domain of TCR clone 182725 (TRBV9, TRBJ1-6)
CASSVAGTGDSPLHF

SEQ ID NO: 365451 - protein, 14 aa, Homo sapiens
  CDR3 for alpha chain variable domain of TCR clone 182726 (TRAV12-1, TRAJ39)
CVVSRGNAGNMLTF

SEQ ID NO: 365452 - protein, 17 aa, Homo sapiens
  CDR3 for beta chain variable domain of TCR clone 182726 (TRBV7-9, TRBJ2-1)
CASSLVASYPSYNEQFL

SEQ ID NO: 365453 - protein, 14 aa, Homo sapiens
  CDR3 for alpha chain variable domain of TCR clone 182727 (TRAV26-1, TRAJ38)
CIADNAGNNRKLIW

SEQ ID NO: 365454 - protein, 14 aa, Homo sapiens
  CDR3 for beta chain variable domain of TCR clone 182727 (TRBV4-1, TRBJ2-2)
CASSQEVNTGELFF

SEQ ID NO: 365455 - protein, 15 aa, Homo sapiens
  CDR3 for alpha chain variable domain of TCR clone 182728 (TRAV12-1, TRAJ4)
CVVNPFSGGYTKLIF

SEQ ID NO: 365456 - protein, 13 aa, Homo sapiens
  CDR3 for beta chain variable domain of TCR clone 182728 (TRBV20-1, TRBJ1-2)
CSARGTADYGYTF

SEQ ID NO: 365457 - protein, 14 aa, Homo sapiens
  CDR3 for alpha chain variable domain of TCR clone 182729 (TRAV1-2, TRAJ8)
CAVREDTGFQRLVF

SEQ ID NO: 365458 - protein, 14 aa, Homo sapiens
  CDR3 for beta chain variable domain of TCR clone 182729 (TRBV12-5, TRBJ2-5)
CASGSRTHQETQYF

SEQ ID NO: 365459 - protein, 15 aa, Homo sapiens
  CDR3 for alpha chain variable domain of TCR clone 182730 (TRAV8-6, TRAJ10)
CAVSDQEGGGNKLTF

SEQ ID NO: 365460 - protein, 15 aa, Homo sapiens
  CDR3 for beta chain variable domain of TCR clone 182730 (TRBV3-1, TRBJ2-5)
CASSANLGGPETQYF

SEQ ID NO: 365461 - protein, 19 aa, Homo sapiens
  CDR3 for alpha chain variable domain of TCR clone 182731 (TRAV26-1, TRAJ52)
CIVRAHRNAGGTSYGKLTF

SEQ ID NO: 365462 - protein, 13 aa, Homo sapiens
  CDR3 for beta chain variable domain of TCR clone 182731 (TRBV7-2, TRBJ2-2)
CASSSVRAGELFF

SEQ ID NO: 365463 - protein, 14 aa, Homo sapiens
  CDR3 for alpha chain variable domain of TCR clone 182732 (TRAV35, TRAJ22)
CAGLRPGSARQLTF

SEQ ID NO: 365464 - protein, 15 aa, Homo sapiens
  CDR3 for beta chain variable domain of TCR clone 182732 (TRBV12-4, TRBJ2-5)
CASSPMTGLQETQYF

SEQ ID NO: 365465 - protein, 16 aa, Homo sapiens
  CDR3 for alpha chain variable domain of TCR clone 182733 (TRAV30, TRAJ24)
CGPEIVDADSWGKFQF

SEQ ID NO: 365466 - protein, 14 aa, Homo sapiens
  CDR3 for beta chain variable domain of TCR clone 182733 (TRBV19, TRBJ2-1)
CASPTFVLSGEQFF

SEQ ID NO: 365467 - protein, 14 aa, Homo sapiens
  CDR3 for alpha chain variable domain of TCR clone 182734 (TRAV12-2, TRAJ36)
CPVNPPTGANNLFF

SEQ ID NO: 365468 - protein, 13 aa, Homo sapiens
  CDR3 for beta chain variable domain of TCR clone 182734 (TRBV20-1, TRBJ1-6)
CSAPTGLGSPLHF

SEQ ID NO: 365469 - protein, 12 aa, Homo sapiens
  CDR3 for alpha chain variable domain of TCR clone 182735 (TRAV29/DV5, TRAJ34)
CAARHNTDKLIF

SEQ ID NO: 365470 - protein, 15 aa, Homo sapiens
  CDR3 for beta chain variable domain of TCR clone 182735 (TRBV19, TRBJ2-7)
CASSPAGSGEALRYV

SEQ ID NO: 365471 - protein, 12 aa, Homo sapiens
  CDR3 for alpha chain variable domain of TCR clone 182736 (TRAV13-1, TRAJ49)
CAAPNTRNQFYF

SEQ ID NO: 365472 - protein, 17 aa, Homo sapiens
  CDR3 for beta chain variable domain of TCR clone 182736 (TRBV25-1, TRBJ2-7)
CASSDARVVFSSYEQYF

SEQ ID NO: 365473 - protein, 10 aa, Homo sapiens
  CDR3 for alpha chain variable domain of TCR clone 182737 (TRAV3, TRAJ31)
CCETRCRLMF

SEQ ID NO: 365474 - protein, 15 aa, Homo sapiens
  CDR3 for beta chain variable domain of TCR clone 182737 (TRBV5-7, TRBJ2-2)
CASSLASSNTGELFF

SEQ ID NO: 365475 - protein, 14 aa, Homo sapiens
  CDR3 for alpha chain variable domain of TCR clone 182738 (TRAV12-2, TRAJ6)
CASKWGGGSYIPTF

SEQ ID NO: 365476 - protein, 14 aa, Homo sapiens
  CDR3 for beta chain variable domain of TCR clone 182738 (TRBV11-2, TRBJ2-5)
CASSRTGGIETQYF

SEQ ID NO: 365477 - protein, 15 aa, Homo sapiens
  CDR3 for alpha chain variable domain of TCR clone 182739 (TRAV27, TRAJ38)
CAARRNAGNNRKLIW

SEQ ID NO: 365478 - protein, 17 aa, Homo sapiens
  CDR3 for beta chain variable domain of TCR clone 182739 (TRBV20-1, TRBJ2-2)
CSASGSGRGGLTGELFF

SEQ ID NO: 365479 - protein, 15 aa, Homo sapiens
  CDR3 for alpha chain variable domain of TCR clone 182740 (TRAV3, TRAJ47)
CAVRDIGEYGNKLVF

SEQ ID NO: 365480 - protein, 14 aa, Homo sapiens
  CDR3 for beta chain variable domain of TCR clone 182740 (TRBV13, TRBJ2-5)
CASSSERVGETQYF

SEQ ID NO: 365481 - protein, 12 aa, Homo sapiens
  CDR3 for alpha chain variable domain of TCR clone 182741 (TRAV4, TRAJ26)
CLVGDYGQNFVF

SEQ ID NO: 365482 - protein, 15 aa, Homo sapiens
  CDR3 for beta chain variable domain of TCR clone 182741 (TRBV11-2, TRBJ2-2)
CASSSDRVNAGELFF

SEQ ID NO: 365483 - protein, 13 aa, Homo sapiens
  CDR3 for alpha chain variable domain of TCR clone 182742 (TRAV12-3, TRAJ33)
CAMSVNSNYQLIW

SEQ ID NO: 365484 - protein, 13 aa, Homo sapiens
  CDR3 for beta chain variable domain of TCR clone 182742 (TRBV7-9, TRBJ2-3)
CASSSTGTDTQYF

SEQ ID NO: 365485 - protein, 15 aa, Homo sapiens
  CDR3 for alpha chain variable domain of TCR clone 182743 (TRAV35, TRAJ42)
CAGQGYGGSQGNLIF

SEQ ID NO: 365486 - protein, 13 aa, Homo sapiens
  CDR3 for beta chain variable domain of TCR clone 182743 (TRBV7-2, TRBJ1-1)
CASSVVQGAEAFF

SEQ ID NO: 365487 - protein, 17 aa, Homo sapiens
  CDR3 for alpha chain variable domain of TCR clone 182744 (TRAV16, TRAJ58)
CITVLSNGETSGSRLTF

SEQ ID NO: 365488 - protein, 17 aa, Homo sapiens
  CDR3 for beta chain variable domain of TCR clone 182744 (TRBV18, TRBJ2-1)
CASSKGLSGGADNEQCF

SEQ ID NO: 365489 - protein, 14 aa, Homo sapiens
  CDR3 for alpha chain variable domain of TCR clone 182745 (TRAV12-2, TRAJ13)
CAVKKTGGYQKVTF

SEQ ID NO: 365490 - protein, 16 aa, Homo sapiens
  CDR3 for beta chain variable domain of TCR clone 182745 (TRBV4-2, TRBJ2-7)
CASSQDTSGGPSEQYF

SEQ ID NO: 365491 - protein, 16 aa, Homo sapiens
  CDR3 for alpha chain variable domain of TCR clone 182746 (TRAV12-3, TRAJ53)
YAMSPGSGGSNYILTF

SEQ ID NO: 365492 - protein, 11 aa, Homo sapiens
  CDR3 for beta chain variable domain of TCR clone 182746 (TRBV29-1, TRBJ2-5)
CSEDRTGTQYF

SEQ ID NO: 365493 - protein, 14 aa, Homo sapiens
  CDR3 for alpha chain variable domain of TCR clone 182747 (TRAV14/DV4, TRAJ20)
CAMRESLNDYKLRF

SEQ ID NO: 365494 - protein, 15 aa, Homo sapiens
  CDR3 for beta chain variable domain of TCR clone 182747 (TRBV5-7, TRBJ1-5)
CASSYGKLWDQPQHF

SEQ ID NO: 365495 - protein, 14 aa, Homo sapiens
  CDR3 for alpha chain variable domain of TCR clone 182748 (TRAV17, TRAJ32)
CATDPGGATNKLIF

SEQ ID NO: 365496 - protein, 12 aa, Homo sapiens
  CDR3 for beta chain variable domain of TCR clone 182748 (TRBV28, TRBJ2-3)
SASSLYRDTQYF

SEQ ID NO: 365497 - protein, 13 aa, Homo sapiens
  CDR3 for alpha chain variable domain of TCR clone 182749 (TRAV23/DV6, TRAJ34)
CAAIENNTYKLIF

SEQ ID NO: 365498 - protein, 13 aa, Homo sapiens
  CDR3 for beta chain variable domain of TCR clone 182749 (TRBV29-1, TRBJ2-7)
CSVGPRGGYEQYF

SEQ ID NO: 365499 - protein, 14 aa, Homo sapiens
  CDR3 for alpha chain variable domain of TCR clone 182750 (TRAV29/DV5, TRAJ36)
CAARRKTGANNLFF

SEQ ID NO: 365500 - protein, 12 aa, Homo sapiens
  CDR3 for beta chain variable domain of TCR clone 182750 (TRBV12-4, TRBJ2-7)
CAGSLGGYEQYF

SEQ ID NO: 365501 - protein, 15 aa, Homo sapiens
  CDR3 for alpha chain variable domain of TCR clone 182751 (TRAV27, TRAJ28)
ASTSHSGAGSYQLTF

SEQ ID NO: 365502 - protein, 17 aa, Homo sapiens
  CDR3 for beta chain variable domain of TCR clone 182751 (TRBV13, TRBJ2-3)
CASSLSRVAGGRNTQYF

SEQ ID NO: 365503 - protein, 18 aa, Homo sapiens
  CDR3 for alpha chain variable domain of TCR clone 182752 (TRAV13-1, TRAJ10)
CAASKGREVTGGGNKLTF

SEQ ID NO: 365504 - protein, 14 aa, Homo sapiens
  CDR3 for beta chain variable domain of TCR clone 182752 (TRBV18, TRBJ2-7)
CASSPRGGAYEQYF

SEQ ID NO: 365505 - protein, 13 aa, Homo sapiens
  CDR3 for alpha chain variable domain of TCR clone 182753 (TRAV16, TRAJ9)
CVLSNTGGFKTIF

SEQ ID NO: 365506 - protein, 14 aa, Homo sapiens
  CDR3 for beta chain variable domain of TCR clone 182753 (TRBV5-1, TRBJ2-1)
CASSLEGPVYEQFF

SEQ ID NO: 365507 - protein, 16 aa, Homo sapiens
  CDR3 for alpha chain variable domain of TCR clone 182754 (TRAV26-1, TRAJ28)
CIVRGYSVAGSYQLTF

SEQ ID NO: 365508 - protein, 17 aa, Homo sapiens
  CDR3 for beta chain variable domain of TCR clone 182754 (TRBV24-1, TRBJ2-2)
CATSDFGGVPYTGELFF

SEQ ID NO: 365509 - protein, 12 aa, Homo sapiens
  CDR3 for alpha chain variable domain of TCR clone 182755 (TRAV27, TRAJ35)
CAGADFGNVLHF

SEQ ID NO: 365510 - protein, 15 aa, Homo sapiens
  CDR3 for beta chain variable domain of TCR clone 182755 (TRBV7-2, TRBJ1-2)
CASSLVSGGDYGYTF

SEQ ID NO: 365511 - protein, 14 aa, Homo sapiens
  CDR3 for alpha chain variable domain of TCR clone 182756 (TRAV1-2, TRAJ16)
CAVNRFSDGQKLLL

SEQ ID NO: 365512 - protein, 11 aa, Homo sapiens
  CDR3 for beta chain variable domain of TCR clone 182756 (TRBV7-8, TRBJ2-7)
CASSLSHEQYF

SEQ ID NO: 365513 - protein, 13 aa, Homo sapiens
  CDR3 for alpha chain variable domain of TCR clone 182757 (TRAV13-1, TRAJ21)
CAASIYNFNKFYF

SEQ ID NO: 365514 - protein, 14 aa, Homo sapiens
  CDR3 for beta chain variable domain of TCR clone 182757 (TRBV20-1, TRBJ2-1)
CSALDRGSYNEQFF

SEQ ID NO: 365515 - protein, 16 aa, Homo sapiens
  CDR3 for alpha chain variable domain of TCR clone 182758 (TRAV8-2, TRAJ45)
CVVSEGTGGGADGLTF

SEQ ID NO: 365516 - protein, 13 aa, Homo sapiens
  CDR3 for beta chain variable domain of TCR clone 182758 (TRBV7-9, TRBJ2-7)
CASSFAGAYEQYF

SEQ ID NO: 365517 - protein, 17 aa, Homo sapiens
  CDR3 for alpha chain variable domain of TCR clone 182759 (TRAV22, TRAJ53)
CAVGFSNSVGSNYKLTF

SEQ ID NO: 365518 - protein, 15 aa, Homo sapiens
  CDR3 for beta chain variable domain of TCR clone 182759 (TRBV29-1, TRBJ2-1)
CSVPTGLALYNEQFF

SEQ ID NO: 365519 - protein, 18 aa, Homo sapiens
  CDR3 for alpha chain variable domain of TCR clone 182760 (TRAV21, TRAJ52)
CAVRPSPAGGTSYGKLTF

SEQ ID NO: 365520 - protein, 15 aa, Homo sapiens
  CDR3 for beta chain variable domain of TCR clone 182760 (TRBV11-3, TRBJ2-7)
CASGPGPASSYEQYF

SEQ ID NO: 365521 - protein, 14 aa, Homo sapiens
  CDR3 for alpha chain variable domain of TCR clone 182761 (TRAV1-2, TRAJ16)
CAVNRFSDGQKLIF

SEQ ID NO: 365522 - protein, 16 aa, Homo sapiens
  CDR3 for beta chain variable domain of TCR clone 182761 (TRBV7-2, TRBJ2-7)
CASSLDPGGGSGEQYF

SEQ ID NO: 365523 - protein, 11 aa, Homo sapiens
  CDR3 for alpha chain variable domain of TCR clone 182762 (TRAV12-3, TRAJ27)
CAMANAGKSTF

SEQ ID NO: 365524 - protein, 11 aa, Homo sapiens
  CDR3 for beta chain variable domain of TCR clone 182762 (TRBV10-3, TRBJ2-7)
CAISEGLEQYF

SEQ ID NO: 365525 - protein, 14 aa, Homo sapiens
  CDR3 for alpha chain variable domain of TCR clone 182763 (TRAV8-2, TRAJ4)
CVVSPSGGYNKLIF

SEQ ID NO: 365526 - protein, 15 aa, Homo sapiens
  CDR3 for beta chain variable domain of TCR clone 182763 (TRBV4-1, TRBJ1-4)
CASCDTGGTNEKLFF

SEQ ID NO: 365527 - protein, 16 aa, Homo sapiens
  CDR3 for alpha chain variable domain of TCR clone 182764 (TRAV30, TRAJ24)
CGTEIVDADSWGKFQF

SEQ ID NO: 365528 - protein, 13 aa, Homo sapiens
  CDR3 for beta chain variable domain of TCR clone 182764 (TRBV7-7, TRBJ1-1)
CASSVGANTEAFF

SEQ ID NO: 365529 - protein, 10 aa, Homo sapiens
  CDR3 for alpha chain variable domain of TCR clone 182765 (TRAV23/DV6, TRAJ57)
CAASSTLSQG

SEQ ID NO: 365530 - protein, 14 aa, Homo sapiens
  CDR3 for beta chain variable domain of TCR clone 182765 (TRBV14, TRBJ2-7)
CASRHRDKPYEQYF

SEQ ID NO: 365531 - protein, 16 aa, Homo sapiens
  CDR3 for alpha chain variable domain of TCR clone 182766 (TRAV8-4, TRAJ5)
CAVSPLMDTGRRALTF

SEQ ID NO: 365532 - protein, 14 aa, Homo sapiens
  CDR3 for beta chain variable domain of TCR clone 182766 (TRBV19, TRBJ1-6)
CASSTDGWNSPLHV

SEQ ID NO: 365533 - protein, 11 aa, Homo sapiens
  CDR3 for alpha chain variable domain of TCR clone 182767 (TRAV12-2, TRAJ39)
CAVNNMLTFGV

SEQ ID NO: 365534 - protein, 16 aa, Homo sapiens
  CDR3 for beta chain variable domain of TCR clone 182767 (TRBV9, TRBJ2-7)
CASSAGPDRSPYEQYF

SEQ ID NO: 365535 - protein, 15 aa, Homo sapiens
  CDR3 for alpha chain variable domain of TCR clone 182768 (TRAV3, TRAJ5)
CAVRDLSTGRRARTF

SEQ ID NO: 365536 - protein, 16 aa, Homo sapiens
  CDR3 for beta chain variable domain of TCR clone 182768 (TRBV20-1, TRBJ1-4)
CSAPGQGLLTNEKLFF

SEQ ID NO: 365537 - protein, 14 aa, Homo sapiens
  CDR3 for alpha chain variable domain of TCR clone 182769 (TRAV4, TRAJ17)
CLVGDPLVGNKLTF

SEQ ID NO: 365538 - protein, 20 aa, Homo sapiens
  CDR3 for beta chain variable domain of TCR clone 182769 (TRBV20-1, TRBJ2-1)
CSARLYSVAGGPSYYNEQFF

SEQ ID NO: 365539 - protein, 14 aa, Homo sapiens
  CDR3 for alpha chain variable domain of TCR clone 182770 (TRAV8-4, TRAJ17)
CAVSFPAAGNKLTF

SEQ ID NO: 365540 - protein, 14 aa, Homo sapiens
  CDR3 for beta chain variable domain of TCR clone 182770 (TRBV10-3, TRBJ2-5)
CAISVGGVYETQYF

SEQ ID NO: 365541 - protein, 14 aa, Homo sapiens
  CDR3 for alpha chain variable domain of TCR clone 182771 (TRAV1-2, TRAJ6)
CAVRSSGGSYIPTF

SEQ ID NO: 365542 - protein, 15 aa, Homo sapiens
  CDR3 for beta chain variable domain of TCR clone 182771 (TRBV7-9, TRBJ1-5)
CASSQGHQPNQPQHF

SEQ ID NO: 365543 - protein, 14 aa, Homo sapiens
  CDR3 for alpha chain variable domain of TCR clone 182772 (TRAV17, TRAJ35)
CATDRPGFGNVLHC

SEQ ID NO: 365544 - protein, 19 aa, Homo sapiens
  CDR3 for beta chain variable domain of TCR clone 182772 (TRBV11-3, TRBJ2-2)
CASSTRPGAKTTNTGEPFF

SEQ ID NO: 365545 - protein, 15 aa, Homo sapiens
  CDR3 for alpha chain variable domain of TCR clone 182773 (TRAV20, TRAJ41)
CAVQANSNSGYALNF

SEQ ID NO: 365546 - protein, 18 aa, Homo sapiens
  CDR3 for beta chain variable domain of TCR clone 182773 (TRBV7-9, TRBJ2-7)
CASSLTTSGSRTWYKQYF

SEQ ID NO: 365547 - protein, 16 aa, Homo sapiens
  CDR3 for alpha chain variable domain of TCR clone 182774 (TRAV16, TRAJ52)
CALSAAGGTSHGKLTF

SEQ ID NO: 365548 - protein, 16 aa, Homo sapiens
  CDR3 for beta chain variable domain of TCR clone 182774 (TRBV12-4, TRBJ1-5)
CASIRPVGGSNQLQHF

SEQ ID NO: 365549 - protein, 14 aa, Homo sapiens
  CDR3 for alpha chain variable domain of TCR clone 182775 (TRAV4, TRAJ20)
CLVGDFINYYKLSF

SEQ ID NO: 365550 - protein, 15 aa, Homo sapiens
  CDR3 for beta chain variable domain of TCR clone 182775 (TRBV9, TRBJ1-6)
CASSVAGTGDSPLHF

SEQ ID NO: 365551 - protein, 17 aa, Homo sapiens
  CDR3 for alpha chain variable domain of TCR clone 182776 (TRAV1-2, TRAJ8)
CAVRDPDENTGFQKLVF

SEQ ID NO: 365552 - protein, 16 aa, Homo sapiens
  CDR3 for beta chain variable domain of TCR clone 182776 (TRBV7-9, TRBJ2-2)
CASSGFGGTNTGELFF

SEQ ID NO: 365553 - protein, 18 aa, Homo sapiens
  CDR3 for alpha chain variable domain of TCR clone 182777 (TRAV12-2, )
CAVEDIQNPDPAVYQLRD

SEQ ID NO: 365554 - protein, 17 aa, Homo sapiens
  CDR3 for beta chain variable domain of TCR clone 182777 (TRBV20-1, TRBJ2-6)
CSARDRDRASGANVLTF

SEQ ID NO: 365555 - protein, 10 aa, Homo sapiens
  CDR3 for alpha chain variable domain of TCR clone 182778 (TRAV8-4, TRAJ43)
CAVSAADMRF

SEQ ID NO: 365556 - protein, 15 aa, Homo sapiens
  CDR3 for beta chain variable domain of TCR clone 182778 (TRBV5-1, TRBJ2-3)
CASSVTSGYTDTQYF

SEQ ID NO: 365557 - protein, 13 aa, Homo sapiens
  CDR3 for alpha chain variable domain of TCR clone 182779 (TRAV30, TRAJ24)
CGTVTDSWGKLQF

SEQ ID NO: 365558 - protein, 13 aa, Homo sapiens
  CDR3 for beta chain variable domain of TCR clone 182779 (TRBV7-3, TRBJ2-1)
CASSLDSYNEQFF

SEQ ID NO: 365559 - protein, 13 aa, Homo sapiens
  CDR3 for alpha chain variable domain of TCR clone 182780 (TRAV13-1, TRAJ39)
CSKYSNAGNMLTF

SEQ ID NO: 365560 - protein, 16 aa, Homo sapiens
  CDR3 for beta chain variable domain of TCR clone 182780 (TRBV7-8, TRBJ2-1)
RASSLQGTGRYNEQFF

SEQ ID NO: 365561 - protein, 14 aa, Homo sapiens
  CDR3 for alpha chain variable domain of TCR clone 182781 (TRAV16, TRAJ35)
CALSAIGFGNVLHC

SEQ ID NO: 365562 - protein, 15 aa, Homo sapiens
  CDR3 for beta chain variable domain of TCR clone 182781 (TRBV7-9, TRBJ1-6)
CASSSPGRGNSPLHF

SEQ ID NO: 365563 - protein, 20 aa, Homo sapiens
  CDR3 for alpha chain variable domain of TCR clone 182782 (TRAV8-3, TRAJ45)
LSTSVLWGSYSGGGADGLTF

SEQ ID NO: 365564 - protein, 15 aa, Homo sapiens
  CDR3 for beta chain variable domain of TCR clone 182782 (TRBV5-4, TRBJ2-2)
CASSLTSRGTGELFF

SEQ ID NO: 365565 - protein, 14 aa, Homo sapiens
  CDR3 for alpha chain variable domain of TCR clone 182783 (TRAV9-2, TRAJ39)
CALYIYNAGNMLTF

SEQ ID NO: 365566 - protein, 15 aa, Homo sapiens
  CDR3 for beta chain variable domain of TCR clone 182783 (TRBV12-4, TRBJ2-5)
CASSPPTGLQGTQYF

SEQ ID NO: 365567 - protein, 16 aa, Homo sapiens
  CDR3 for alpha chain variable domain of TCR clone 182784 (TRAV27, TRAJ13)
CAGAKSDSGGYQKFTF

SEQ ID NO: 365568 - protein, 15 aa, Homo sapiens
  CDR3 for beta chain variable domain of TCR clone 182784 (TRBV7-9, TRBJ1-6)
CASSSPGRGNSPLHF

SEQ ID NO: 365569 - protein, 16 aa, Homo sapiens
  CDR3 for alpha chain variable domain of TCR clone 182785 (TRAV3, TRAJ10)
CAVRDMRSGGGNKLTF

SEQ ID NO: 365570 - protein, 16 aa, Homo sapiens
  CDR3 for beta chain variable domain of TCR clone 182785 (TRBV12-4, TRBJ1-5)
CASSRPVGGSNQPQHF

SEQ ID NO: 365571 - protein, 15 aa, Homo sapiens
  CDR3 for alpha chain variable domain of TCR clone 182786 (TRAV3, TRAJ36)
CAVRASQTGANNLFF

SEQ ID NO: 365572 - protein, 14 aa, Homo sapiens
  CDR3 for beta chain variable domain of TCR clone 182786 (TRBV7-2, TRBJ1-2)
CASSQTGSTYGYTF

SEQ ID NO: 365573 - protein, 14 aa, Homo sapiens
  CDR3 for alpha chain variable domain of TCR clone 182787 (TRAV20, TRAJ29)
CAVQAWVGNTPLVF

SEQ ID NO: 365574 - protein, 14 aa, Homo sapiens
  CDR3 for beta chain variable domain of TCR clone 182787 (TRBV19, TRBJ1-2)
CASSSLTGNYGYTF

SEQ ID NO: 365575 - protein, 12 aa, Homo sapiens
  CDR3 for alpha chain variable domain of TCR clone 182788 (TRAV26-2, TRAJ21)
CILKGNFNKFYF

SEQ ID NO: 365576 - protein, 12 aa, Homo sapiens
  CDR3 for beta chain variable domain of TCR clone 182788 (TRBV12-4, TRBJ2-7)
CASSLGGYEQYF

SEQ ID NO: 365577 - protein, 12 aa, Homo sapiens
  CDR3 for alpha chain variable domain of TCR clone 182789 (TRAV27, TRAJ35)
CAGADFGNVPHC

SEQ ID NO: 365578 - protein, 15 aa, Homo sapiens
  CDR3 for beta chain variable domain of TCR clone 182789 (TRBV19, TRBJ2-1)
CASSISSGGYNDQFF

SEQ ID NO: 365579 - protein, 13 aa, Homo sapiens
  CDR3 for alpha chain variable domain of TCR clone 182790 (TRAV25, TRAJ10)
CAGRTGGGNKFTF

SEQ ID NO: 365580 - protein, 15 aa, Homo sapiens
  CDR3 for beta chain variable domain of TCR clone 182790 (TRBV19, TRBJ2-1)
CASSSPGVPLDEQFF

SEQ ID NO: 365581 - protein, 14 aa, Homo sapiens
  CDR3 for alpha chain variable domain of TCR clone 182791 (TRAV2, TRAJ37)
CSVDFTSNTGKLIF

SEQ ID NO: 365582 - protein, 16 aa, Homo sapiens
  CDR3 for beta chain variable domain of TCR clone 182791 (TRBV27, TRBJ2-7)
CASSSERRDSAYEQYF

SEQ ID NO: 365583 - protein, 13 aa, Homo sapiens
  CDR3 for alpha chain variable domain of TCR clone 182792 (TRAV12-2, TRAJ20)
CAVNRFDDYKRSF

SEQ ID NO: 365584 - protein, 13 aa, Homo sapiens
  CDR3 for beta chain variable domain of TCR clone 182792 (TRBV18, TRBJ1-1)
CASSGGRNTEAFF

SEQ ID NO: 365585 - protein, 14 aa, Homo sapiens
  CDR3 for alpha chain variable domain of TCR clone 182793 (TRAV2, TRAJ29)
CAGPFQCGNTPLVF

SEQ ID NO: 365586 - protein, 11 aa, Homo sapiens
  CDR3 for beta chain variable domain of TCR clone 182793 (TRBV29-1, TRBJ2-5)
CSEDRTGTQYF

SEQ ID NO: 365587 - protein, 15 aa, Homo sapiens
  CDR3 for alpha chain variable domain of TCR clone 182794 (TRAV12-1, TRAJ4)
CVVNPFSGGYSKMIF

SEQ ID NO: 365588 - protein, 13 aa, Homo sapiens
  CDR3 for beta chain variable domain of TCR clone 182794 (TRBV20-1, TRBJ1-2)
CSARGTADYGYTF

SEQ ID NO: 365589 - protein, 18 aa, Homo sapiens
  CDR3 for alpha chain variable domain of TCR clone 182795 (TRAV21, TRAJ52)
CAVRPSPAGGTSYGKLTF

SEQ ID NO: 365590 - protein, 17 aa, Homo sapiens
  CDR3 for beta chain variable domain of TCR clone 182795 (TRBV6-1, TRBJ2-7)
CASRARLAGSPSYEQYF

SEQ ID NO: 365591 - protein, 13 aa, Homo sapiens
  CDR3 for alpha chain variable domain of TCR clone 182796 (TRAV8-2, TRAJ47)
SATRLSTPGELVF

SEQ ID NO: 365592 - protein, 14 aa, Homo sapiens
  CDR3 for beta chain variable domain of TCR clone 182796 (TRBV5-7, TRBJ1-1)
CASSLAGDWTEAFF

SEQ ID NO: 365593 - protein, 10 aa, Homo sapiens
  CDR3 for alpha chain variable domain of TCR clone 182797 (TRAV1-2, TRAJ31)
CAFFDARLMF

SEQ ID NO: 365594 - protein, 13 aa, Homo sapiens
  CDR3 for beta chain variable domain of TCR clone 182797 (TRBV12-4, TRBJ2-3)
CASRLGLGDTQYF

SEQ ID NO: 365595 - protein, 16 aa, Homo sapiens
  CDR3 for alpha chain variable domain of TCR clone 182798 (TRAV14/DV4, TRAJ20)
CAMREGRSRDDYKLIF

SEQ ID NO: 365596 - protein, 17 aa, Homo sapiens
  CDR3 for beta chain variable domain of TCR clone 182798 (TRBV15, TRBJ1-1)
CATSRVGGADGDTEAFF

SEQ ID NO: 365597 - protein, 18 aa, Homo sapiens
  CDR3 for alpha chain variable domain of TCR clone 182799 (TRAV9-2, TRAJ52)
CALSRHNAGGTSCGKLTF

SEQ ID NO: 365598 - protein, 13 aa, Homo sapiens
  CDR3 for beta chain variable domain of TCR clone 182799 (TRBV7-9, TRBJ1-2)
CASSLKQNYGYTF

SEQ ID NO: 365599 - protein, 13 aa, Homo sapiens
  CDR3 for alpha chain variable domain of TCR clone 182800 (TRAV36/DV7, TRAJ53)
CALSGGSNYKLTF

SEQ ID NO: 365600 - protein, 14 aa, Homo sapiens
  CDR3 for beta chain variable domain of TCR clone 182800 (TRBV12-5, TRBJ2-5)
CASGSRTHQETQYF

SEQ ID NO: 365601 - protein, 14 aa, Homo sapiens
  CDR3 for alpha chain variable domain of TCR clone 182801 (TRAV8-3, TRAJ39)
CVVGANNAGNMLTF

SEQ ID NO: 365602 - protein, 13 aa, Homo sapiens
  CDR3 for beta chain variable domain of TCR clone 182801 (TRBV3-1, TRBJ2-5)
CASSPVLSETQYF

SEQ ID NO: 365603 - protein, 14 aa, Homo sapiens
  CDR3 for alpha chain variable domain of TCR clone 182802 (TRAV12-2, TRAJ44)
CAVNPAGTASKLTF

SEQ ID NO: 365604 - protein, 16 aa, Homo sapiens
  CDR3 for beta chain variable domain of TCR clone 182802 (TRBV2, TRBJ2-6)
CASSEVGGPGANVLTF

SEQ ID NO: 365605 - protein, 15 aa, Homo sapiens
  CDR3 for alpha chain variable domain of TCR clone 182803 (TRAV17, TRAJ57)
CATGPSQGGSDKLVF

SEQ ID NO: 365606 - protein, 14 aa, Homo sapiens
  CDR3 for beta chain variable domain of TCR clone 182803 (TRBV11-2, TRBJ1-2)
CASSLYRGNYGYTF

SEQ ID NO: 365607 - protein, 14 aa, Homo sapiens
  CDR3 for alpha chain variable domain of TCR clone 182804 (TRAV27, TRAJ15)
CAGVDNQAGIALIF

SEQ ID NO: 365608 - protein, 11 aa, Homo sapiens
  CDR3 for beta chain variable domain of TCR clone 182804 (TRBV29-1, TRBJ1-1)
CSVEVGTRTFF

SEQ ID NO: 365609 - protein, 13 aa, Homo sapiens
  CDR3 for alpha chain variable domain of TCR clone 182805 (TRAV13-1, TRAJ16)
CAAFESDGQKLLF

SEQ ID NO: 365610 - protein, 15 aa, Homo sapiens
  CDR3 for beta chain variable domain of TCR clone 182805 (TRBV7-3, TRBJ2-1)
CASSPTGGGEVEQFF

SEQ ID NO: 365611 - protein, 16 aa, Homo sapiens
  CDR3 for alpha chain variable domain of TCR clone 182806 (TRAV3, TRAJ10)
CAVRDMRAGGGNKHTF

SEQ ID NO: 365612 - protein, 13 aa, Homo sapiens
  CDR3 for beta chain variable domain of TCR clone 182806 (TRBV4-2, TRBJ1-1)
CASSQAGNTEAFF

SEQ ID NO: 365613 - protein, 11 aa, Homo sapiens
  CDR3 for alpha chain variable domain of TCR clone 182807 (TRAV23/DV6, TRAJ49)
CAVAPVTSSIL

SEQ ID NO: 365614 - protein, 16 aa, Homo sapiens
  CDR3 for beta chain variable domain of TCR clone 182807 (TRBV20-1, TRBJ2-1)
CSALTWTSGSYNEQFF

SEQ ID NO: 365615 - protein, 16 aa, Homo sapiens
  CDR3 for alpha chain variable domain of TCR clone 182808 (TRAV12-2, TRAJ45)
CAVKRNPGGGADGLTF

SEQ ID NO: 365616 - protein, 12 aa, Homo sapiens
  CDR3 for beta chain variable domain of TCR clone 182808 (TRBV5-1, TRBJ2-5)
CASSLGLETQYF

SEQ ID NO: 365617 - protein, 16 aa, Homo sapiens
  CDR3 for alpha chain variable domain of TCR clone 182809 (TRAV22, TRAJ45)
CAVERGKRGGADGRTF

SEQ ID NO: 365618 - protein, 11 aa, Homo sapiens
  CDR3 for beta chain variable domain of TCR clone 182809 (TRBV29-1, TRBJ2-5)
CSEDRTGTQYF

SEQ ID NO: 365619 - protein, 13 aa, Homo sapiens
  CDR3 for alpha chain variable domain of TCR clone 182810 (TRAV12-1, TRAJ7)
CVVNMRGNKRLAF

SEQ ID NO: 365620 - protein, 16 aa, Homo sapiens
  CDR3 for beta chain variable domain of TCR clone 182810 (TRBV20-1, TRBJ1-4)
CSAPGQGLLTNEKLFF

SEQ ID NO: 365621 - protein, 14 aa, Homo sapiens
  CDR3 for alpha chain variable domain of TCR clone 182811 (TRAV12-3, TRAJ10)
SHLPLTGGGNKLTF

SEQ ID NO: 365622 - protein, 14 aa, Homo sapiens
  CDR3 for beta chain variable domain of TCR clone 182811 (TRBV28, TRBJ2-4)
CASTQVTGVNIQYF

SEQ ID NO: 365623 - protein, 17 aa, Homo sapiens
  CDR3 for alpha chain variable domain of TCR clone 182812 (TRAV27, TRAJ42)
CAERVIYYGGSQGNLIF

SEQ ID NO: 365624 - protein, 13 aa, Homo sapiens
  CDR3 for beta chain variable domain of TCR clone 182812 (TRBV11-2, TRBJ2-7)
CASSRGPSETQYF

SEQ ID NO: 365625 - protein, 13 aa, Homo sapiens
  CDR3 for alpha chain variable domain of TCR clone 182813 (TRAV2, TRAJ15)
CAVASQAGTALFF

SEQ ID NO: 365626 - protein, 17 aa, Homo sapiens
  CDR3 for beta chain variable domain of TCR clone 182813 (TRBV7-3, TRBJ2-5)
CASSLGSGRSGSETQYF

SEQ ID NO: 365627 - protein, 12 aa, Homo sapiens
  CDR3 for alpha chain variable domain of TCR clone 182814 (TRAV13-1, TRAJ21)
CAAKEGFNKFYF

SEQ ID NO: 365628 - protein, 16 aa, Homo sapiens
  CDR3 for beta chain variable domain of TCR clone 182814 (TRBV18, TRBJ1-2)
CASSPPERVTIYGYTF

SEQ ID NO: 365629 - protein, 13 aa, Homo sapiens
  CDR3 for alpha chain variable domain of TCR clone 182815 (TRAV3, TRAJ5)
CAVRDTGRRALTF

SEQ ID NO: 365630 - protein, 17 aa, Homo sapiens
  CDR3 for beta chain variable domain of TCR clone 182815 (TRBV20-1, TRBJ2-2)
CSASGSGQGGLTGELFC

SEQ ID NO: 365631 - protein, 18 aa, Homo sapiens
  CDR3 for alpha chain variable domain of TCR clone 182816 (TRAV26-1, TRAJ23)
CIVRVGLAVWNQGGKLNF

SEQ ID NO: 365632 - protein, 16 aa, Homo sapiens
  CDR3 for beta chain variable domain of TCR clone 182816 (TRBV12-4, TRBJ2-5)
CASSFFVRGRQETQYF

SEQ ID NO: 365633 - protein, 14 aa, Homo sapiens
  CDR3 for alpha chain variable domain of TCR clone 182817 (TRAV38-1, TRAJ45)
CASHSGGGADGLTF

SEQ ID NO: 365634 - protein, 15 aa, Homo sapiens
  CDR3 for beta chain variable domain of TCR clone 182817 (TRBV9, TRBJ1-6)
CASSVAGTGDSPLHF

SEQ ID NO: 365635 - protein, 14 aa, Homo sapiens
  CDR3 for alpha chain variable domain of TCR clone 182818 (TRAV4, TRAJ17)
CLVCDMAAGNKLTF

SEQ ID NO: 365636 - protein, 14 aa, Homo sapiens
  CDR3 for beta chain variable domain of TCR clone 182818 (TRBV7-6, TRBJ2-3)
CASSLGTVTDTQYF

SEQ ID NO: 365637 - protein, 14 aa, Homo sapiens
  CDR3 for alpha chain variable domain of TCR clone 182819 (TRAV3, TRAJ21)
CALGRGSTNFTLDL

SEQ ID NO: 365638 - protein, 14 aa, Homo sapiens
  CDR3 for beta chain variable domain of TCR clone 182819 (TRBV7-9, TRBJ2-4)
CASSLARGGNNQYF

SEQ ID NO: 365639 - protein, 15 aa, Homo sapiens
  CDR3 for alpha chain variable domain of TCR clone 182820 (TRAV21, TRAJ24)
CAARSSTDSWGKLQF

SEQ ID NO: 365640 - protein, 11 aa, Homo sapiens
  CDR3 for beta chain variable domain of TCR clone 182820 (TRBV11-2, TRBJ2-2)
CASSLPVELFF

SEQ ID NO: 365641 - protein, 12 aa, Homo sapiens
  CDR3 for alpha chain variable domain of TCR clone 182821 (TRAV3, TRAJ20)
CAVRDPDYKLIF

SEQ ID NO: 365642 - protein, 14 aa, Homo sapiens
  CDR3 for beta chain variable domain of TCR clone 182821 (TRBV4-2, TRBJ2-1)
CASGLDRAYNEQFF

SEQ ID NO: 365643 - protein, 14 aa, Homo sapiens
  CDR3 for alpha chain variable domain of TCR clone 182822 (TRAV8-3, TRAJ4)
CAVGAAGGYNKLIF

SEQ ID NO: 365644 - protein, 14 aa, Homo sapiens
  CDR3 for beta chain variable domain of TCR clone 182822 (TRBV7-3, TRBJ2-1)
CASSLKGLELLQWA

SEQ ID NO: 365645 - protein, 16 aa, Homo sapiens
  CDR3 for alpha chain variable domain of TCR clone 182823 (TRAV16, TRAJ42)
CALSGLLGGSQGNLIF

SEQ ID NO: 365646 - protein, 15 aa, Homo sapiens
  CDR3 for beta chain variable domain of TCR clone 182823 (TRBV5-1, TRBJ2-1)
CASSPGGLAGNGQFF

SEQ ID NO: 365647 - protein, 13 aa, Homo sapiens
  CDR3 for alpha chain variable domain of TCR clone 182824 (TRAV13-1, TRAJ5)
CAAEHTGRRALTF

SEQ ID NO: 365648 - protein, 12 aa, Homo sapiens
  CDR3 for beta chain variable domain of TCR clone 182824 (TRBV14, TRBJ1-1)
CASSQLKGLAFF

SEQ ID NO: 365649 - protein, 14 aa, Homo sapiens
  CDR3 for alpha chain variable domain of TCR clone 182825 (TRAV13-2, TRAJ37)
CAERPYSNTGKLIF

SEQ ID NO: 365650 - protein, 13 aa, Homo sapiens
  CDR3 for beta chain variable domain of TCR clone 182825 (TRBV10-3, TRBJ2-7)
CASKLAVNYEQYF

SEQ ID NO: 365651 - protein, 13 aa, Homo sapiens
  CDR3 for alpha chain variable domain of TCR clone 182826 (TRAV8-3, TRAJ40)
CAVGAQYLRNLQI

SEQ ID NO: 365652 - protein, 12 aa, Homo sapiens
  CDR3 for beta chain variable domain of TCR clone 182826 (TRBV7-2, TRBJ2-5)
CASSQYQETQYF

SEQ ID NO: 365653 - protein, 15 aa, Homo sapiens
  CDR3 for alpha chain variable domain of TCR clone 182827 (TRAV13-1, TRAJ49)
CAAPFYFGTGTSLRS

SEQ ID NO: 365654 - protein, 14 aa, Homo sapiens
  CDR3 for beta chain variable domain of TCR clone 182827 (TRBV7-9, TRBJ2-7)
CASSLARGTYEQYF

SEQ ID NO: 365655 - protein, 14 aa, Homo sapiens
  CDR3 for alpha chain variable domain of TCR clone 182828 (TRAV3, TRAJ6)
CAVRDWGGSYIPTF

SEQ ID NO: 365656 - protein, 14 aa, Homo sapiens
  CDR3 for beta chain variable domain of TCR clone 182828 (TRBV7-6, TRBJ2-3)
CASSVAGGTDTQYF

SEQ ID NO: 365657 - protein, 14 aa, Homo sapiens
  CDR3 for alpha chain variable domain of TCR clone 182829 (TRAV9-2, TRAJ39)
CALYIYNAGNMLTF

SEQ ID NO: 365658 - protein, 15 aa, Homo sapiens
  CDR3 for beta chain variable domain of TCR clone 182829 (TRBV6-6, TRBJ2-7)
CASSYSYGGSYEQYF

SEQ ID NO: 365659 - protein, 12 aa, Homo sapiens
  CDR3 for alpha chain variable domain of TCR clone 182830 (TRAV8-3, TRAJ20)
CAVGANDYKLSF

SEQ ID NO: 365660 - protein, 20 aa, Homo sapiens
  CDR3 for beta chain variable domain of TCR clone 182830 (TRBV7-8, TRBJ2-2)
CASSHLFPGPTIHITGELFF

SEQ ID NO: 365661 - protein, 12 aa, Homo sapiens
  CDR3 for alpha chain variable domain of TCR clone 182831 (TRAV13-1, TRAJ21)
CAAKEGFNKFYF

SEQ ID NO: 365662 - protein, 18 aa, Homo sapiens
  CDR3 for beta chain variable domain of TCR clone 182831 (TRBV20-1, TRBJ2-6)
CSAATTPTHGSGANVLTF

SEQ ID NO: 365663 - protein, 15 aa, Homo sapiens
  CDR3 for alpha chain variable domain of TCR clone 182832 (TRAV2, TRAJ9)
CAVAALNTGGFKTIF

SEQ ID NO: 365664 - protein, 15 aa, Homo sapiens
  CDR3 for beta chain variable domain of TCR clone 182832 (TRBV5-1, TRBJ2-5)
CASSFKGGDQETQYF

SEQ ID NO: 365665 - protein, 16 aa, Homo sapiens
  CDR3 for alpha chain variable domain of TCR clone 182833 (TRAV23/DV6, TRAJ35)
CAASKGGLGFGNVLHC

SEQ ID NO: 365666 - protein, 15 aa, Homo sapiens
  CDR3 for beta chain variable domain of TCR clone 182833 (TRBV27, TRBJ2-1)
CASSNGGGSSNEQFF

SEQ ID NO: 365667 - protein, 13 aa, Homo sapiens
  CDR3 for alpha chain variable domain of TCR clone 182834 (TRAV26-1, TRAJ33)
CIVRVEGNYQLIW

SEQ ID NO: 365668 - protein, 16 aa, Homo sapiens
  CDR3 for beta chain variable domain of TCR clone 182834 (TRBV15, TRBJ2-7)
CATSRYRGRRRGEQYF

SEQ ID NO: 365669 - protein, 14 aa, Homo sapiens
  CDR3 for alpha chain variable domain of TCR clone 182835 (TRAV12-2, TRAJ6)
CAVIASGGSYLPTF

SEQ ID NO: 365670 - protein, 16 aa, Homo sapiens
  CDR3 for beta chain variable domain of TCR clone 182835 (TRBV7-2, TRBJ2-3)
CASSLAGAGSGDTQYF

SEQ ID NO: 365671 - protein, 13 aa, Homo sapiens
  CDR3 for alpha chain variable domain of TCR clone 182836 (TRAV12-3, TRAJ13)
CAMTSWGYQKVTF

SEQ ID NO: 365672 - protein, 13 aa, Homo sapiens
  CDR3 for beta chain variable domain of TCR clone 182836 (TRBV20-1, TRBJ2-2)
CSALSGGAGELFF

SEQ ID NO: 365673 - protein, 12 aa, Homo sapiens
  CDR3 for alpha chain variable domain of TCR clone 182837 (TRAV12-3, TRAJ17)
CAMTLTGNTLTF

SEQ ID NO: 365674 - protein, 15 aa, Homo sapiens
  CDR3 for beta chain variable domain of TCR clone 182837 (TRBV20-1, TRBJ2-7)
RSARDRVSGMDEQYF

SEQ ID NO: 365675 - protein, 15 aa, Homo sapiens
  CDR3 for alpha chain variable domain of TCR clone 182838 (TRAV3, TRAJ40)
CAVRDVTSGTYKYIF

SEQ ID NO: 365676 - protein, 13 aa, Homo sapiens
  CDR3 for beta chain variable domain of TCR clone 182838 (TRBV7-9, TRBJ1-2)
CASSLKQNYGYIF

SEQ ID NO: 365677 - protein, 16 aa, Homo sapiens
  CDR3 for alpha chain variable domain of TCR clone 182839 (TRAV14/DV4, TRAJ37)
CAMREYGSGNTGTLIF

SEQ ID NO: 365678 - protein, 15 aa, Homo sapiens
  CDR3 for beta chain variable domain of TCR clone 182839 (TRBV2, TRBJ2-5)
CASSEQGLIGETQYF

SEQ ID NO: 365679 - protein, 15 aa, Homo sapiens
  CDR3 for alpha chain variable domain of TCR clone 182840 (TRAV3, TRAJ20)
CDVKDSRSNDYKLSF

SEQ ID NO: 365680 - protein, 14 aa, Homo sapiens
  CDR3 for beta chain variable domain of TCR clone 182840 (TRBV20-1, TRBJ2-7)
CSARRGNGIYEQYF

SEQ ID NO: 365681 - protein, 16 aa, Homo sapiens
  CDR3 for alpha chain variable domain of TCR clone 182841 (TRAV12-3, TRAJ53)
CAMSPGRGGSNYKLTF

SEQ ID NO: 365682 - protein, 15 aa, Homo sapiens
  CDR3 for beta chain variable domain of TCR clone 182841 (TRBV24-1, TRBJ2-1)
CATSGAGGFYNEQFF

SEQ ID NO: 365683 - protein, 14 aa, Homo sapiens
  CDR3 for alpha chain variable domain of TCR clone 182842 (TRAV21, TRAJ45)
CAVHSEGGADGLTF

SEQ ID NO: 365684 - protein, 14 aa, Homo sapiens
  CDR3 for beta chain variable domain of TCR clone 182842 (TRBV20-1, TRBJ2-1)
CSARRLAEANEQFF

SEQ ID NO: 365685 - protein, 13 aa, Homo sapiens
  CDR3 for alpha chain variable domain of TCR clone 182843 (TRAV2, TRAJ40)
CAVVTSGTYKYIF

SEQ ID NO: 365686 - protein, 12 aa, Homo sapiens
  CDR3 for beta chain variable domain of TCR clone 182843 (TRBV7-9, TRBJ2-7)
CASSLEGYEQYF

SEQ ID NO: 365687 - protein, 15 aa, Homo sapiens
  CDR3 for alpha chain variable domain of TCR clone 182844 (TRAV27, TRAJ38)
CAARRNAGNHRKLIW

SEQ ID NO: 365688 - protein, 13 aa, Homo sapiens
  CDR3 for beta chain variable domain of TCR clone 182844 (TRBV12-5, TRBJ2-3)
CASGDRQSDTQYL

SEQ ID NO: 365689 - protein, 15 aa, Homo sapiens
  CDR3 for alpha chain variable domain of TCR clone 182845 (TRAV21, TRAJ57)
CAVIITQGGSEKLVF

SEQ ID NO: 365690 - protein, 14 aa, Homo sapiens
  CDR3 for beta chain variable domain of TCR clone 182845 (TRBV5-1, TRBJ2-2)
CASSLIWIPGELFL

SEQ ID NO: 365691 - protein, 13 aa, Homo sapiens
  CDR3 for alpha chain variable domain of TCR clone 182846 (TRAV21, TRAJ27)
CAARPGNAGKSTF

SEQ ID NO: 365692 - protein, 14 aa, Homo sapiens
  CDR3 for beta chain variable domain of TCR clone 182846 (TRBV7-6, TRBJ2-3)
GASRLGTVTDTQYF

SEQ ID NO: 365693 - protein, 12 aa, Homo sapiens
  CDR3 for alpha chain variable domain of TCR clone 182847 (TRAV8-4, TRAJ37)
CAKSSNTGKLIF

SEQ ID NO: 365694 - protein, 15 aa, Homo sapiens
  CDR3 for beta chain variable domain of TCR clone 182847 (TRBV11-2, TRBJ2-1)
CASSSPSTRYNEQFF

SEQ ID NO: 365695 - protein, 15 aa, Homo sapiens
  CDR3 for alpha chain variable domain of TCR clone 182848 (TRAV12-2, TRAJ53)
CAVNGGGGSNYKLTF

SEQ ID NO: 365696 - protein, 13 aa, Homo sapiens
  CDR3 for beta chain variable domain of TCR clone 182848 (TRBV12-4, TRBJ2-1)
CASSHYTDNEQFF

SEQ ID NO: 365697 - protein, 17 aa, Homo sapiens
  CDR3 for alpha chain variable domain of TCR clone 182849 (TRAV2, TRAJ36)
CAVEDRGNWGQQPLLWD

SEQ ID NO: 365698 - protein, 14 aa, Homo sapiens
  CDR3 for beta chain variable domain of TCR clone 182849 (TRBV7-9, TRBJ2-5)
CASSLDTAQETQYF

SEQ ID NO: 365699 - protein, 15 aa, Homo sapiens
  CDR3 for alpha chain variable domain of TCR clone 182850 (TRAV13-1, TRAJ36)
CAASIRQTGAHNLFF

SEQ ID NO: 365700 - protein, 17 aa, Homo sapiens
  CDR3 for beta chain variable domain of TCR clone 182850 (TRBV20-1, TRBJ2-2)
CSARDRTSGRHTGELFF

SEQ ID NO: 365701 - protein, 11 aa, Homo sapiens
  CDR3 for alpha chain variable domain of TCR clone 182851 (TRAV12-1, TRAJ8)
CVVTGFQKLVF

SEQ ID NO: 365702 - protein, 14 aa, Homo sapiens
  CDR3 for beta chain variable domain of TCR clone 182851 (TRBV19, TRBJ2-1)
CASGKSTQSNEQFF

SEQ ID NO: 365703 - protein, 16 aa, Homo sapiens
  CDR3 for alpha chain variable domain of TCR clone 182852 (TRAV13-1, TRAJ37)
CAASSLGSSNTGKLIF

SEQ ID NO: 365704 - protein, 12 aa, Homo sapiens
  CDR3 for beta chain variable domain of TCR clone 182852 (TRBV6-1, TRBJ2-5)
CASSEGRETQYC

SEQ ID NO: 365705 - protein, 15 aa, Homo sapiens
  CDR3 for alpha chain variable domain of TCR clone 182853 (TRAV26-1, TRAJ44)
CIVRANTGTASKRTF

SEQ ID NO: 365706 - protein, 16 aa, Homo sapiens
  CDR3 for beta chain variable domain of TCR clone 182853 (TRBV7-7, TRBJ2-1)
CASSLASGTSYNGQFF

SEQ ID NO: 365707 - protein, 16 aa, Homo sapiens
  CDR3 for alpha chain variable domain of TCR clone 182854 (TRAV17, TRAJ28)
CATALDSGAGSYQLTF

SEQ ID NO: 365708 - protein, 17 aa, Homo sapiens
  CDR3 for beta chain variable domain of TCR clone 182854 (TRBV13, TRBJ2-3)
CASSLSRVAGGRNTQYF

SEQ ID NO: 365709 - protein, 15 aa, Homo sapiens
  CDR3 for alpha chain variable domain of TCR clone 182855 (TRAV25, TRAJ52)
CAGRPGGTSYGKLTF

SEQ ID NO: 365710 - protein, 15 aa, Homo sapiens
  CDR3 for beta chain variable domain of TCR clone 182855 (TRBV7-8, TRBJ2-2)
CASSSDRVNAGELFF

SEQ ID NO: 365711 - protein, 13 aa, Homo sapiens
  CDR3 for alpha chain variable domain of TCR clone 182856 (TRAV30, TRAJ24)
CGTVTDSWGKLQI

SEQ ID NO: 365712 - protein, 15 aa, Homo sapiens
  CDR3 for beta chain variable domain of TCR clone 182856 (TRBV19, TRBJ1-1)
CASTSGQIQNTEAFF

SEQ ID NO: 365713 - protein, 16 aa, Homo sapiens
  CDR3 for alpha chain variable domain of TCR clone 182857 (TRAV30, TRAJ24)
CGTEIVDADSCGKFQF

SEQ ID NO: 365714 - protein, 19 aa, Homo sapiens
  CDR3 for beta chain variable domain of TCR clone 182857 (TRBV25-1, TRBJ2-2)
CAILVYRVDRGRKTGELFF

SEQ ID NO: 365715 - protein, 11 aa, Homo sapiens
  CDR3 for alpha chain variable domain of TCR clone 182858 (TRAV27, TRAJ47)
CRSNQGNKLVF

SEQ ID NO: 365716 - protein, 16 aa, Homo sapiens
  CDR3 for beta chain variable domain of TCR clone 182858 (TRBV7-9, TRBJ2-1)
CASSDVAGGSYNEQFV

SEQ ID NO: 365717 - protein, 15 aa, Homo sapiens
  CDR3 for alpha chain variable domain of TCR clone 182859 (TRAV12-3, TRAJ6)
CAMSATTGGSYIPTF

SEQ ID NO: 365718 - protein, 18 aa, Homo sapiens
  CDR3 for beta chain variable domain of TCR clone 182859 (TRBV6-6, TRBJ1-3)
CASSYSKWDSISGNTIYF

SEQ ID NO: 365719 - protein, 13 aa, Homo sapiens
  CDR3 for alpha chain variable domain of TCR clone 182860 (TRAV12-3, TRAJ33)
CAMSVNSNYQVIW

SEQ ID NO: 365720 - protein, 13 aa, Homo sapiens
  CDR3 for beta chain variable domain of TCR clone 182860 (TRBV4-1, TRBJ2-2)
CASSQENTGELFF

SEQ ID NO: 365721 - protein, 13 aa, Homo sapiens
  CDR3 for alpha chain variable domain of TCR clone 182861 (TRAV26-1, TRAJ40)
CTARVEGTYRYIF

SEQ ID NO: 365722 - protein, 15 aa, Homo sapiens
  CDR3 for beta chain variable domain of TCR clone 182861 (TRBV12-4, TRBJ1-2)
CASSLAHRDGQAYTF

SEQ ID NO: 365723 - protein, 15 aa, Homo sapiens
  CDR3 for alpha chain variable domain of TCR clone 182862 (TRAV21, TRAJ24)
CAARSSTDSWGKLQF

SEQ ID NO: 365724 - protein, 13 aa, Homo sapiens
  CDR3 for beta chain variable domain of TCR clone 182862 (TRBV11-2, TRBJ2-5)
SASSSTGEETQYF

SEQ ID NO: 365725 - protein, 14 aa, Homo sapiens
  CDR3 for alpha chain variable domain of TCR clone 182863 (TRAV17, TRAJ16)
CATAEFSDGQKRLF

SEQ ID NO: 365726 - protein, 15 aa, Homo sapiens
  CDR3 for beta chain variable domain of TCR clone 182863 (TRBV18, TRBJ2-1)
CASSPPSASYNEQFF

SEQ ID NO: 365727 - protein, 15 aa, Homo sapiens
  CDR3 for alpha chain variable domain of TCR clone 182864 (TRAV3, TRAJ30)
CAVRDEYGRDDKIII

SEQ ID NO: 365728 - protein, 16 aa, Homo sapiens
  CDR3 for beta chain variable domain of TCR clone 182864 (TRBV5-1, TRBJ2-5)
CASSLANHRGRETQYF

SEQ ID NO: 365729 - protein, 12 aa, Homo sapiens
  CDR3 for alpha chain variable domain of TCR clone 182865 (TRAV13-1, TRAJ48)
CAANFGNEKLTC

SEQ ID NO: 365730 - protein, 14 aa, Homo sapiens
  CDR3 for beta chain variable domain of TCR clone 182865 (TRBV18, TRBJ2-3)
CASSGLADTDTQYF

SEQ ID NO: 365731 - protein, 13 aa, Homo sapiens
  CDR3 for alpha chain variable domain of TCR clone 182866 (TRAV8-3, TRAJ48)
CAVVPFGNEKLTF

SEQ ID NO: 365732 - protein, 15 aa, Homo sapiens
  CDR3 for beta chain variable domain of TCR clone 182866 (TRBV11-2, TRBJ2-1)
CASSSPSTHYNEQFF

SEQ ID NO: 365733 - protein, 11 aa, Homo sapiens
  CDR3 for alpha chain variable domain of TCR clone 182867 (TRAV12-3, TRAJ41)
CAMNAREALNF

SEQ ID NO: 365734 - protein, 16 aa, Homo sapiens
  CDR3 for beta chain variable domain of TCR clone 182867 (TRBV7-8, TRBJ2-3)
CASSTEGRRETDTQYF

SEQ ID NO: 365735 - protein, 13 aa, Homo sapiens
  CDR3 for alpha chain variable domain of TCR clone 182868 (TRAV21, TRAJ56)
CAVRTGANSKPTF

SEQ ID NO: 365736 - protein, 15 aa, Homo sapiens
  CDR3 for beta chain variable domain of TCR clone 182868 (TRBV7-9, TRBJ1-1)
CASSHRGTVNTEAFF

SEQ ID NO: 365737 - protein, 14 aa, Homo sapiens
  CDR3 for alpha chain variable domain of TCR clone 182869 (TRAV12-1, TRAJ33)
CVVNMRSSNYQLIW

SEQ ID NO: 365738 - protein, 15 aa, Homo sapiens
  CDR3 for beta chain variable domain of TCR clone 182869 (TRBV6-3, TRBJ2-7)
CASSSPGTVFYEQYF

SEQ ID NO: 365739 - protein, 15 aa, Homo sapiens
  CDR3 for alpha chain variable domain of TCR clone 182870 (TRAV27, TRAJ38)
CAARRNAGNNRKLIW

SEQ ID NO: 365740 - protein, 16 aa, Homo sapiens
  CDR3 for beta chain variable domain of TCR clone 182870 (TRBV20-1, TRBJ2-3)
CSAVRDRGPIADTQYF

SEQ ID NO: 365741 - protein, 16 aa, Homo sapiens
  CDR3 for alpha chain variable domain of TCR clone 182871 (TRAV30, TRAJ24)
CGTEIVDADSWGKFQF

SEQ ID NO: 365742 - protein, 15 aa, Homo sapiens
  CDR3 for beta chain variable domain of TCR clone 182871 (TRBV9, TRBJ2-1)
CASSVGSGFYNEQFF

SEQ ID NO: 365743 - protein, 17 aa, Homo sapiens
  CDR3 for alpha chain variable domain of TCR clone 182872 (TRAV14/DV4, TRAJ28)
CAMRGTSSGAGSSQLTF

SEQ ID NO: 365744 - protein, 13 aa, Homo sapiens
  CDR3 for beta chain variable domain of TCR clone 182872 (TRBV28, TRBJ2-5)
CASSFAGGETQYF

SEQ ID NO: 365745 - protein, 14 aa, Homo sapiens
  CDR3 for alpha chain variable domain of TCR clone 182873 (TRAV2, TRAJ9)
SAVEDRSGGFKTIF

SEQ ID NO: 365746 - protein, 19 aa, Homo sapiens
  CDR3 for beta chain variable domain of TCR clone 182873 (TRBV25-1, TRBJ2-2)
CAILVYRVDRGRKTGELSF

SEQ ID NO: 365747 - protein, 13 aa, Homo sapiens
  CDR3 for alpha chain variable domain of TCR clone 182874 (TRAV17, TRAJ6)
CATGFGGSYIPTF

SEQ ID NO: 365748 - protein, 14 aa, Homo sapiens
  CDR3 for beta chain variable domain of TCR clone 182874 (TRBV7-8, TRBJ2-3)
CASSLEAGTDTQYF

SEQ ID NO: 365749 - protein, 15 aa, Homo sapiens
  CDR3 for alpha chain variable domain of TCR clone 182875 (TRAV3, TRAJ47)
CAVRDIGEYGNKLVF

SEQ ID NO: 365750 - protein, 14 aa, Homo sapiens
  CDR3 for beta chain variable domain of TCR clone 182875 (TRBV7-2, TRBJ2-7)
CASSLYPGRYEQYF

SEQ ID NO: 365751 - protein, 13 aa, Homo sapiens
  CDR3 for alpha chain variable domain of TCR clone 182876 (TRAV39, TRAJ58)
CAGEETSGSRLTF

SEQ ID NO: 365752 - protein, 16 aa, Homo sapiens
  CDR3 for beta chain variable domain of TCR clone 182876 (TRBV12-5, TRBJ2-5)
CASGPRTSGNQETQYF

SEQ ID NO: 365753 - protein, 15 aa, Homo sapiens
  CDR3 for alpha chain variable domain of TCR clone 182877 (TRAV8-2, TRAJ16)
CVVSDGFSDCQKLLF

SEQ ID NO: 365754 - protein, 14 aa, Homo sapiens
  CDR3 for beta chain variable domain of TCR clone 182877 (TRBV7-3, TRBJ1-1)
CASSLGTGYTEAFF

SEQ ID NO: 365755 - protein, 13 aa, Homo sapiens
  CDR3 for alpha chain variable domain of TCR clone 182878 (TRAV27, TRAJ27)
CAGGITNAGKSTF

SEQ ID NO: 365756 - protein, 16 aa, Homo sapiens
  CDR3 for beta chain variable domain of TCR clone 182878 (TRBV18, TRBJ2-2)
CASSPPRTANTGELFF

SEQ ID NO: 365757 - protein, 13 aa, Homo sapiens
  CDR3 for alpha chain variable domain of TCR clone 182879 (TRAV17, TRAJ57)
CAIYQGGSEKLLF

SEQ ID NO: 365758 - protein, 16 aa, Homo sapiens
  CDR3 for beta chain variable domain of TCR clone 182879 (TRBV4-3, TRBJ2-1)
CASSQERLAGFNEQFF

SEQ ID NO: 365759 - protein, 14 aa, Homo sapiens
  CDR3 for alpha chain variable domain of TCR clone 182880 (TRAV12-2, TRAJ40)
CAVKIPSGTYKYIF

SEQ ID NO: 365760 - protein, 17 aa, Homo sapiens
  CDR3 for beta chain variable domain of TCR clone 182880 (TRBV13, TRBJ2-3)
CASRLSRVAGGRNTQYF

SEQ ID NO: 365761 - protein, 16 aa, Homo sapiens
  CDR3 for alpha chain variable domain of TCR clone 182881 (TRAV3, TRAJ37)
CAVRPHGSGNTGKLIF

SEQ ID NO: 365762 - protein, 16 aa, Homo sapiens
  CDR3 for beta chain variable domain of TCR clone 182881 (TRBV9, TRBJ1-2)
WAGSVEEKVSPYGYTF

SEQ ID NO: 365763 - protein, 14 aa, Homo sapiens
  CDR3 for alpha chain variable domain of TCR clone 182882 (TRAV1-2, TRAJ8)
CAVREDTGFQKLVF

SEQ ID NO: 365764 - protein, 15 aa, Homo sapiens
  CDR3 for beta chain variable domain of TCR clone 182882 (TRBV27, TRBJ2-5)
CASSLYPRGGETQYF

SEQ ID NO: 365765 - protein, 12 aa, Homo sapiens
  CDR3 for alpha chain variable domain of TCR clone 182883 (TRAV13-1, TRAJ42)
VNYGGSQGNLIF

SEQ ID NO: 365766 - protein, 15 aa, Homo sapiens
  CDR3 for beta chain variable domain of TCR clone 182883 (TRBV20-1, TRBJ2-1)
RSASSAGSSYNEQFF

SEQ ID NO: 365767 - protein, 13 aa, Homo sapiens
  CDR3 for alpha chain variable domain of TCR clone 182884 (TRAV8-6, TRAJ16)
CAVSSPDGRKLRF

SEQ ID NO: 365768 - protein, 16 aa, Homo sapiens
  CDR3 for beta chain variable domain of TCR clone 182884 (TRBV5-7, TRBJ2-3)
CASSSLGGAITDTQYF

SEQ ID NO: 365769 - protein, 15 aa, Homo sapiens
  CDR3 for alpha chain variable domain of TCR clone 182885 (TRAV8-3, TRAJ41)
CAVGSNSNSGYARNF

SEQ ID NO: 365770 - protein, 17 aa, Homo sapiens
  CDR3 for beta chain variable domain of TCR clone 182885 (TRBV25-1, TRBJ2-1)
CASSACGQGRGVYEQFF

SEQ ID NO: 365771 - protein, 16 aa, Homo sapiens
  CDR3 for alpha chain variable domain of TCR clone 182886 (TRAV30, TRAJ24)
CGTEIVDADSWGKFQF

SEQ ID NO: 365772 - protein, 14 aa, Homo sapiens
  CDR3 for beta chain variable domain of TCR clone 182886 (TRBV12-5, TRBJ2-5)
CASGSGTHQGTQYF

SEQ ID NO: 365773 - protein, 12 aa, Homo sapiens
  CDR3 for alpha chain variable domain of TCR clone 182887 (TRAV3, TRAJ43)
CAVRDPNNDMRF

SEQ ID NO: 365774 - protein, 14 aa, Homo sapiens
  CDR3 for beta chain variable domain of TCR clone 182887 (TRBV2, TRBJ2-7)
CASSLTSGGYEQYF

SEQ ID NO: 365775 - protein, 14 aa, Homo sapiens
  CDR3 for alpha chain variable domain of TCR clone 182888 (TRAV1-1, TRAJ35)
CAVRSIGFGNVLHC

SEQ ID NO: 365776 - protein, 12 aa, Homo sapiens
  CDR3 for beta chain variable domain of TCR clone 182888 (TRBV12-5, TRBJ2-5)
CASGQGVETQYF

SEQ ID NO: 365777 - protein, 17 aa, Homo sapiens
  CDR3 for alpha chain variable domain of TCR clone 182889 (TRAV19, TRAJ28)
CALSEASSGAGSYQLTF

SEQ ID NO: 365778 - protein, 16 aa, Homo sapiens
  CDR3 for beta chain variable domain of TCR clone 182889 (TRBV11-2, TRBJ1-1)
CASSLRQGGGHSKAFF

SEQ ID NO: 365779 - protein, 13 aa, Homo sapiens
  CDR3 for alpha chain variable domain of TCR clone 182890 (TRAV21, TRAJ56)
CAVRTGANSKLTF

SEQ ID NO: 365780 - protein, 14 aa, Homo sapiens
  CDR3 for beta chain variable domain of TCR clone 182890 (TRBV7-9, TRBJ1-1)
CSSHRGTVNTEAFF

SEQ ID NO: 365781 - protein, 19 aa, Homo sapiens
  CDR3 for alpha chain variable domain of TCR clone 182891 (TRAV23/DV6, TRAJ9)
CSKHRLKGAGHTGGFKPIF

SEQ ID NO: 365782 - protein, 12 aa, Homo sapiens
  CDR3 for beta chain variable domain of TCR clone 182891 (TRBV7-8, TRBJ2-7)
CASSLGDREQYF

SEQ ID NO: 365783 - protein, 15 aa, Homo sapiens
  CDR3 for alpha chain variable domain of TCR clone 182892 (TRAV26-1, TRAJ29)
CIVRVEGSGNTPLVF

SEQ ID NO: 365784 - protein, 12 aa, Homo sapiens
  CDR3 for beta chain variable domain of TCR clone 182892 (TRBV19, TRBJ2-5)
CASSISEETQYF

SEQ ID NO: 365785 - protein, 16 aa, Homo sapiens
  CDR3 for alpha chain variable domain of TCR clone 182893 (TRAV12-3, TRAJ50)
CAMRDPMKTSYDKVIF

SEQ ID NO: 365786 - protein, 13 aa, Homo sapiens
  CDR3 for beta chain variable domain of TCR clone 182893 (TRBV4-1, TRBJ2-3)
CASSLDLTDTQYF

SEQ ID NO: 365787 - protein, 13 aa, Homo sapiens
  CDR3 for alpha chain variable domain of TCR clone 182894 (TRAV12-1, TRAJ11)
CVVNRAGYSTLTF

SEQ ID NO: 365788 - protein, 15 aa, Homo sapiens
  CDR3 for beta chain variable domain of TCR clone 182894 (TRBV27, TRBJ2-2)
CQQFTARGRARGAVF

SEQ ID NO: 365789 - protein, 16 aa, Homo sapiens
  CDR3 for alpha chain variable domain of TCR clone 182895 (TRAV23/DV6, TRAJ9)
CAASIGGNTGGFKTIY

SEQ ID NO: 365790 - protein, 15 aa, Homo sapiens
  CDR3 for beta chain variable domain of TCR clone 182895 (TRBV6-3, TRBJ2-7)
CASSSPGTVLYEQYF

SEQ ID NO: 365791 - protein, 16 aa, Homo sapiens
  CDR3 for alpha chain variable domain of TCR clone 182896 (TRAV35, TRAJ52)
CAGQGSGGTSYGKLTF

SEQ ID NO: 365792 - protein, 17 aa, Homo sapiens
  CDR3 for beta chain variable domain of TCR clone 182896 (TRBV13, TRBJ2-3)
CASSPSRVAGGRNTQYF

SEQ ID NO: 365793 - protein, 13 aa, Homo sapiens
  CDR3 for alpha chain variable domain of TCR clone 182897 (TRAV4, TRAJ28)
CLFIWGWELPTHF

SEQ ID NO: 365794 - protein, 14 aa, Homo sapiens
  CDR3 for beta chain variable domain of TCR clone 182897 (TRBV7-9, TRBJ2-5)
CASSLYTARETQYF

SEQ ID NO: 365795 - protein, 13 aa, Homo sapiens
  CDR3 for alpha chain variable domain of TCR clone 182898 (TRAV21, TRAJ20)
CAVGLRVDYKLSF

SEQ ID NO: 365796 - protein, 13 aa, Homo sapiens
  CDR3 for beta chain variable domain of TCR clone 182898 (TRBV29-1, TRBJ2-1)
CSVEGGRVNEQVF

SEQ ID NO: 365797 - protein, 14 aa, Homo sapiens
  CDR3 for alpha chain variable domain of TCR clone 182899 (TRAV21, TRAJ35)
CAVMPIGFGNVLHC

SEQ ID NO: 365798 - protein, 12 aa, Homo sapiens
  CDR3 for beta chain variable domain of TCR clone 182899 (TRBV7-9, TRBJ2-7)
YASSIKRAEQYF

SEQ ID NO: 365799 - protein, 12 aa, Homo sapiens
  CDR3 for alpha chain variable domain of TCR clone 182900 (TRAV12-3, TRAJ17)
CAMTLTGNKLTF

SEQ ID NO: 365800 - protein, 15 aa, Homo sapiens
  CDR3 for beta chain variable domain of TCR clone 182900 (TRBV19, TRBJ2-1)
CASSILGEGRNEQFV

SEQ ID NO: 365801 - protein, 13 aa, Homo sapiens
  CDR3 for alpha chain variable domain of TCR clone 182901 (TRAV21, TRAJ27)
CAARPGNAGKSTF

SEQ ID NO: 365802 - protein, 15 aa, Homo sapiens
  CDR3 for beta chain variable domain of TCR clone 182901 (TRBV7-2, TRBJ2-1)
CASSLLAGVSDEQFF

SEQ ID NO: 365803 - protein, 15 aa, Homo sapiens
  CDR3 for alpha chain variable domain of TCR clone 182902 (TRAV21, TRAJ24)
CAARSSTDSRGHLQF

SEQ ID NO: 365804 - protein, 13 aa, Homo sapiens
  CDR3 for beta chain variable domain of TCR clone 182902 (TRBV11-2, TRBJ2-5)
CASSSTGEETQYF

SEQ ID NO: 365805 - protein, 13 aa, Homo sapiens
  CDR3 for alpha chain variable domain of TCR clone 182903 (TRAV26-1, TRAJ34)
CIVRPWITDKLIF

SEQ ID NO: 365806 - protein, 14 aa, Homo sapiens
  CDR3 for beta chain variable domain of TCR clone 182903 (TRBV12-4, TRBJ1-4)
CASSRQGANEKQFF

SEQ ID NO: 365807 - protein, 15 aa, Homo sapiens
  CDR3 for alpha chain variable domain of TCR clone 182904 (TRAV17, TRAJ57)
CATDPSQGGSEKLVF

SEQ ID NO: 365808 - protein, 15 aa, Homo sapiens
  CDR3 for beta chain variable domain of TCR clone 182904 (TRBV7-9, TRBJ1-6)
CASSSPGRGNSPLHF

SEQ ID NO: 365809 - protein, 13 aa, Homo sapiens
  CDR3 for alpha chain variable domain of TCR clone 182905 (TRAV12-1, TRAJ22)
CVVYSGPARKLTF

SEQ ID NO: 365810 - protein, 10 aa, Homo sapiens
  CDR3 for beta chain variable domain of TCR clone 182905 (TRBV6-3, TRBJ2-2)
CASRDGELFF

SEQ ID NO: 365811 - protein, 17 aa, Homo sapiens
  CDR3 for alpha chain variable domain of TCR clone 182906 (TRAV3, TRAJ37)
CAVRDMRTPGNTGKLIF

SEQ ID NO: 365812 - protein, 11 aa, Homo sapiens
  CDR3 for beta chain variable domain of TCR clone 182906 (TRBV7-2, TRBJ2-7)
CASSSGLWQYF

SEQ ID NO: 365813 - protein, 14 aa, Homo sapiens
  CDR3 for alpha chain variable domain of TCR clone 182907 (TRAV12-2, TRAJ13)
CAVNHSGGYQKVTF

SEQ ID NO: 365814 - protein, 13 aa, Homo sapiens
  CDR3 for beta chain variable domain of TCR clone 182907 (TRBV20-1, TRBJ1-6)
CSAKLGGTSPLHF

SEQ ID NO: 365815 - protein, 18 aa, Homo sapiens
  CDR3 for alpha chain variable domain of TCR clone 182908 (TRAV26-1, TRAJ23)
CIVRVGLEVWNQGGKLIF

SEQ ID NO: 365816 - protein, 12 aa, Homo sapiens
  CDR3 for beta chain variable domain of TCR clone 182908 (TRBV19, TRBJ1-5)
CASSIAQQTQHF

SEQ ID NO: 365817 - protein, 23 aa, Homo sapiens
  CDR3 for alpha chain variable domain of TCR clone 182909 (TRAV8-6, TRAJ38)
CAVRNAGNNHIQNPDPAVYQLRN

SEQ ID NO: 365818 - protein, 15 aa, Homo sapiens
  CDR3 for beta chain variable domain of TCR clone 182909 (TRBV4-1, TRBJ2-2)
CASSEGQGITGELFF

SEQ ID NO: 365819 - protein, 12 aa, Homo sapiens
  CDR3 for alpha chain variable domain of TCR clone 182910 (TRAV21, TRAJ3)
CCFYSSASKIIF

SEQ ID NO: 365820 - protein, 16 aa, Homo sapiens
  CDR3 for beta chain variable domain of TCR clone 182910 (TRBV19, TRBJ2-1)
CASSKAGPSSYNELFF

SEQ ID NO: 365821 - protein, 13 aa, Homo sapiens
  CDR3 for alpha chain variable domain of TCR clone 182911 (TRAV8-2, TRAJ43)
CVVSDPGDNDMRF

SEQ ID NO: 365822 - protein, 12 aa, Homo sapiens
  CDR3 for beta chain variable domain of TCR clone 182911 (TRBV7-9, TRBJ2-7)
CASRTGFDEQYF

SEQ ID NO: 365823 - protein, 11 aa, Homo sapiens
  CDR3 for alpha chain variable domain of TCR clone 182912 (TRAV3, TRAJ17)
PRGAAGNKLTF

SEQ ID NO: 365824 - protein, 17 aa, Homo sapiens
  CDR3 for beta chain variable domain of TCR clone 182912 (TRBV11-2, TRBJ2-1)
CASSLYPPGVEYNEQFF

SEQ ID NO: 365825 - protein, 19 aa, Homo sapiens
  CDR3 for alpha chain variable domain of TCR clone 182913 (TRAV29/DV5, TRAJ49)
CSVLLCSKLTVDTGNQFYF

SEQ ID NO: 365826 - protein, 17 aa, Homo sapiens
  CDR3 for beta chain variable domain of TCR clone 182913 (TRBV13, TRBJ2-3)
CTSSLSRVAGGRNTQYF

SEQ ID NO: 365827 - protein, 12 aa, Homo sapiens
  CDR3 for alpha chain variable domain of TCR clone 182914 (TRAV13-1, TRAJ49)
CAASPMGNQFYF

SEQ ID NO: 365828 - protein, 17 aa, Homo sapiens
  CDR3 for beta chain variable domain of TCR clone 182914 (TRBV4-1, TRBJ2-2)
CASSHPHDGSKVGELFF

SEQ ID NO: 365829 - protein, 13 aa, Homo sapiens
  CDR3 for alpha chain variable domain of TCR clone 182915 (TRAV2, TRAJ15)
CAVEAQAGTALIF

SEQ ID NO: 365830 - protein, 16 aa, Homo sapiens
  CDR3 for beta chain variable domain of TCR clone 182915 (TRBV2, TRBJ2-3)
CASSTSVEGVTDTQYF

SEQ ID NO: 365831 - protein, 14 aa, Homo sapiens
  CDR3 for alpha chain variable domain of TCR clone 182916 (TRAV2, TRAJ9)
CAVEDRSGGFKTIF

SEQ ID NO: 365832 - protein, 15 aa, Homo sapiens
  CDR3 for beta chain variable domain of TCR clone 182916 (TRBV7-9, TRBJ2-2)
CASNSWGGRTGELFF

SEQ ID NO: 365833 - protein, 16 aa, Homo sapiens
  CDR3 for alpha chain variable domain of TCR clone 182917 (TRAV30, TRAJ24)
CGTEIVDADRWGKFQF

SEQ ID NO: 365834 - protein, 14 aa, Homo sapiens
  CDR3 for beta chain variable domain of TCR clone 182917 (TRBV7-2, TRBJ2-7)
CASSPKTSFYEQYF

SEQ ID NO: 365835 - protein, 15 aa, Homo sapiens
  CDR3 for alpha chain variable domain of TCR clone 182918 (TRAV12-3, TRAJ6)
CAMSATTGGSYIPTF

SEQ ID NO: 365836 - protein, 14 aa, Homo sapiens
  CDR3 for beta chain variable domain of TCR clone 182918 (TRBV20-1, TRBJ1-1)
CSAPTRIGGTEAFF

SEQ ID NO: 365837 - protein, 14 aa, Homo sapiens
  CDR3 for alpha chain variable domain of TCR clone 182919 (TRAV21, TRAJ15)
CRSYHNQAGTALIF

SEQ ID NO: 365838 - protein, 14 aa, Homo sapiens
  CDR3 for beta chain variable domain of TCR clone 182919 (TRBV12-5, TRBJ2-5)
CASGSRTHQETQYF

SEQ ID NO: 365839 - protein, 12 aa, Homo sapiens
  CDR3 for alpha chain variable domain of TCR clone 182920 (TRAV16, TRAJ10)
CSRTGEGNKLTF

SEQ ID NO: 365840 - protein, 13 aa, Homo sapiens
  CDR3 for beta chain variable domain of TCR clone 182920 (TRBV19, TRBJ1-2)
CASSQGQVYGYTF

SEQ ID NO: 365841 - protein, 14 aa, Homo sapiens
  CDR3 for alpha chain variable domain of TCR clone 182921 (TRAV13-2, TRAJ17)
CADNGKAAGNKLTF

SEQ ID NO: 365842 - protein, 15 aa, Homo sapiens
  CDR3 for beta chain variable domain of TCR clone 182921 (TRBV11-2, TRBJ2-1)
CASSLGTSGLNEQFF

SEQ ID NO: 365843 - protein, 15 aa, Homo sapiens
  CDR3 for alpha chain variable domain of TCR clone 182922 (TRAV13-1, TRAJ18)
CAASGGGSTLGRLYF

SEQ ID NO: 365844 - protein, 13 aa, Homo sapiens
  CDR3 for beta chain variable domain of TCR clone 182922 (TRBV18, TRBJ2-1)
CASGLASNNEQYF

SEQ ID NO: 365845 - protein, 16 aa, Homo sapiens
  CDR3 for alpha chain variable domain of TCR clone 182923 (TRAV12-1, TRAJ28)
CVVIAYSGAGSYQLTF

SEQ ID NO: 365846 - protein, 15 aa, Homo sapiens
  CDR3 for beta chain variable domain of TCR clone 182923 (TRBV14, TRBJ1-1)
CASSQEVMVFTEAFF

SEQ ID NO: 365847 - protein, 16 aa, Homo sapiens
  CDR3 for alpha chain variable domain of TCR clone 182924 (TRAV30, TRAJ24)
CGTEIVDADSWGKFQF

SEQ ID NO: 365848 - protein, 14 aa, Homo sapiens
  CDR3 for beta chain variable domain of TCR clone 182924 (TRBV19, TRBJ2-1)
CASPTFVLSVEQFF

SEQ ID NO: 365849 - protein, 15 aa, Homo sapiens
  CDR3 for alpha chain variable domain of TCR clone 182925 (TRAV3, TRAJ4)
CAVRDGTGGYNKLIF

SEQ ID NO: 365850 - protein, 21 aa, Homo sapiens
  CDR3 for beta chain variable domain of TCR clone 182925 (TRBV4-2, TRBJ2-3)
PCSQKTRPCISVPAAPDTQYF

SEQ ID NO: 365851 - protein, 12 aa, Homo sapiens
  CDR3 for alpha chain variable domain of TCR clone 182926 (TRAV12-1, TRAJ16)
CVVFRDGQKLLF

SEQ ID NO: 365852 - protein, 13 aa, Homo sapiens
  CDR3 for beta chain variable domain of TCR clone 182926 (TRBV12-4, TRBJ1-2)
CASSLRQGKGYAF

SEQ ID NO: 365853 - protein, 12 aa, Homo sapiens
  CDR3 for alpha chain variable domain of TCR clone 182927 (TRAV29/DV5, TRAJ34)
CAARHNTDKLIF

SEQ ID NO: 365854 - protein, 14 aa, Homo sapiens
  CDR3 for beta chain variable domain of TCR clone 182927 (TRBV7-8, TRBJ2-3)
CASSLEAGTDTQYF

SEQ ID NO: 365855 - protein, 14 aa, Homo sapiens
  CDR3 for alpha chain variable domain of TCR clone 182928 (TRAV1-2, TRAJ8)
CAVREDTGFQKLVF

SEQ ID NO: 365856 - protein, 14 aa, Homo sapiens
  CDR3 for beta chain variable domain of TCR clone 182928 (TRBV29-1, TRBJ2-3)
CSAGAGVGADTQHF

SEQ ID NO: 365857 - protein, 14 aa, Homo sapiens
  CDR3 for alpha chain variable domain of TCR clone 182929 (TRAV2, TRAJ42)
CAVVGGGSQGNLIF

SEQ ID NO: 365858 - protein, 19 aa, Homo sapiens
  CDR3 for beta chain variable domain of TCR clone 182929 (TRBV2, TRBJ2-7)
CASSDDETSGRANDYEQYF

SEQ ID NO: 365859 - protein, 17 aa, Homo sapiens
  CDR3 for alpha chain variable domain of TCR clone 182930 (TRAV3, TRAJ42)
CAVRDRDYGGSQGNLIF

SEQ ID NO: 365860 - protein, 14 aa, Homo sapiens
  CDR3 for beta chain variable domain of TCR clone 182930 (TRBV4-1, TRBJ1-4)
CASSQDASREKLFF

SEQ ID NO: 365861 - protein, 20 aa, Homo sapiens
  CDR3 for alpha chain variable domain of TCR clone 182931 (TRAV21, TRAJ30)
CAVRRRMTRSSLEKGHEFIF

SEQ ID NO: 365862 - protein, 15 aa, Homo sapiens
  CDR3 for beta chain variable domain of TCR clone 182931 (TRBV6-6, TRBJ2-7)
CASSYSYGGSYEQYF

SEQ ID NO: 365863 - protein, 14 aa, Homo sapiens
  CDR3 for alpha chain variable domain of TCR clone 182932 (TRAV2, TRAJ37)
CAVDFTSNTGKLIF

SEQ ID NO: 365864 - protein, 13 aa, Homo sapiens
  CDR3 for beta chain variable domain of TCR clone 182932 (TRBV20-1, TRBJ1-1)
CSAPLGWGTEAFF

SEQ ID NO: 365865 - protein, 14 aa, Homo sapiens
  CDR3 for alpha chain variable domain of TCR clone 182933 (TRAV8-4, TRAJ38)
CARPNAGNNRKLIW

SEQ ID NO: 365866 - protein, 12 aa, Homo sapiens
  CDR3 for beta chain variable domain of TCR clone 182933 (TRBV6-1, TRBJ2-7)
YASSEPLYEQYF

SEQ ID NO: 365867 - protein, 12 aa, Homo sapiens
  CDR3 for alpha chain variable domain of TCR clone 182934 (TRAV23/DV6, TRAJ8)
CAANTGFQKLVF

SEQ ID NO: 365868 - protein, 14 aa, Homo sapiens
  CDR3 for beta chain variable domain of TCR clone 182934 (TRBV4-2, TRBJ1-5)
CASSQDSINQPQHF

SEQ ID NO: 365869 - protein, 17 aa, Homo sapiens
  CDR3 for alpha chain variable domain of TCR clone 182935 (TRAV8-6, TRAJ58)
CAVSSWVGETSGSRLTF

SEQ ID NO: 365870 - protein, 15 aa, Homo sapiens
  CDR3 for beta chain variable domain of TCR clone 182935 (TRBV19, TRBJ1-1)
CASTSGQIQNTEAFF

SEQ ID NO: 365871 - protein, 14 aa, Homo sapiens
  CDR3 for alpha chain variable domain of TCR clone 182936 (TRAV9-2, TRAJ28)
CALTLGAGIYQLTF

SEQ ID NO: 365872 - protein, 15 aa, Homo sapiens
  CDR3 for beta chain variable domain of TCR clone 182936 (TRBV7-8, TRBJ2-3)
CASRKLRDHTDTQYF

SEQ ID NO: 365873 - protein, 19 aa, Homo sapiens
  CDR3 for alpha chain variable domain of TCR clone 182937 (TRAV29/DV5, TRAJ49)
CSVLLCSKLTVDTGNQFYF

SEQ ID NO: 365874 - protein, 12 aa, Homo sapiens
  CDR3 for beta chain variable domain of TCR clone 182937 (TRBV11-2, TRBJ2-2)
CASSLGGGELFF

SEQ ID NO: 365875 - protein, 14 aa, Homo sapiens
  CDR3 for alpha chain variable domain of TCR clone 182938 (TRAV17, TRAJ45)
CATASGGGADGITF

SEQ ID NO: 365876 - protein, 13 aa, Homo sapiens
  CDR3 for beta chain variable domain of TCR clone 182938 (TRBV15, TRBJ2-7)
CATSTTGHYEQYF

SEQ ID NO: 365877 - protein, 12 aa, Homo sapiens
  CDR3 for alpha chain variable domain of TCR clone 182939 (TRAV21, TRAJ11)
CAATSVYSTLTF

SEQ ID NO: 365878 - protein, 13 aa, Homo sapiens
  CDR3 for beta chain variable domain of TCR clone 182939 (TRBV20-1, TRBJ1-1)
CSARGGGNTEAFF

SEQ ID NO: 365879 - protein, 14 aa, Homo sapiens
  CDR3 for alpha chain variable domain of TCR clone 182940 (TRAV17, TRAJ34)
CATDSLKGTDKLIF

SEQ ID NO: 365880 - protein, 13 aa, Homo sapiens
  CDR3 for beta chain variable domain of TCR clone 182940 (TRBV11-2, TRBJ2-7)
CASSGTRPYEQYF

SEQ ID NO: 365881 - protein, 20 aa, Homo sapiens
  CDR3 for alpha chain variable domain of TCR clone 182941 (TRAV6, TRAJ37)
TASQPADSPRKAGNTGKLIF

SEQ ID NO: 365882 - protein, 16 aa, Homo sapiens
  CDR3 for beta chain variable domain of TCR clone 182941 (TRBV19, TRBJ1-1)
CASRPRSEALNTDAFF

SEQ ID NO: 365883 - protein, 17 aa, Homo sapiens
  CDR3 for alpha chain variable domain of TCR clone 182942 (TRAV4, TRAJ3)
CCVLLPRGRSSASKIIF

SEQ ID NO: 365884 - protein, 14 aa, Homo sapiens
  CDR3 for beta chain variable domain of TCR clone 182942 (TRBV7-3, TRBJ2-1)
CASSLAGGTNEQFF

SEQ ID NO: 365885 - protein, 11 aa, Homo sapiens
  CDR3 for alpha chain variable domain of TCR clone 182943 (TRAV1-2, TRAJ20)
CAVANDYKLSF

SEQ ID NO: 365886 - protein, 12 aa, Homo sapiens
  CDR3 for beta chain variable domain of TCR clone 182943 (TRBV6-3, TRBJ2-7)
CASSLTPYEQYF

SEQ ID NO: 365887 - protein, 13 aa, Homo sapiens
  CDR3 for alpha chain variable domain of TCR clone 182944 (TRAV17, TRAJ54)
CAAGIQGAQKLGF

SEQ ID NO: 365888 - protein, 14 aa, Homo sapiens
  CDR3 for beta chain variable domain of TCR clone 182944 (TRBV11-3, TRBJ1-2)
CASSLGTANYGYTF

SEQ ID NO: 365889 - protein, 14 aa, Homo sapiens
  CDR3 for alpha chain variable domain of TCR clone 182945 (TRAV17, TRAJ54)
CATDANQGAQKLVL

SEQ ID NO: 365890 - protein, 12 aa, Homo sapiens
  CDR3 for beta chain variable domain of TCR clone 182945 (TRBV7-9, TRBJ2-7)
CASSTKREEQYF

SEQ ID NO: 365891 - protein, 13 aa, Homo sapiens
  CDR3 for alpha chain variable domain of TCR clone 182946 (TRAV8-4, TRAJ47)
CAVPALYGSKLVF

SEQ ID NO: 365892 - protein, 12 aa, Homo sapiens
  CDR3 for beta chain variable domain of TCR clone 182946 (TRBV28, TRBJ2-1)
CASSFRGNEQFF

SEQ ID NO: 365893 - protein, 13 aa, Homo sapiens
  CDR3 for alpha chain variable domain of TCR clone 182947 (TRAV30, TRAJ31)
CGTGRGSNARLMF

SEQ ID NO: 365894 - protein, 12 aa, Homo sapiens
  CDR3 for beta chain variable domain of TCR clone 182947 (TRBV11-3, TRBJ1-1)
CASSHRQGEAFF

SEQ ID NO: 365895 - protein, 10 aa, Homo sapiens
  CDR3 for alpha chain variable domain of TCR clone 182948 (TRAV13-1, TRAJ27)
CAPLARQINL

SEQ ID NO: 365896 - protein, 13 aa, Homo sapiens
  CDR3 for beta chain variable domain of TCR clone 182948 (TRBV7-3, TRBJ1-1)
CASSQDWGAKAFF

SEQ ID NO: 365897 - protein, 15 aa, Homo sapiens
  CDR3 for alpha chain variable domain of TCR clone 182949 (TRAV21, TRAJ6)
CAVPPPFGGSYIPTF

SEQ ID NO: 365898 - protein, 15 aa, Homo sapiens
  CDR3 for beta chain variable domain of TCR clone 182949 (TRBV10-2, TRBJ2-5)
CASSEPDRVQETQYF

SEQ ID NO: 365899 - protein, 14 aa, Homo sapiens
  CDR3 for alpha chain variable domain of TCR clone 182950 (TRAV12-2, TRAJ53)
CAVKGGGSNYKRTF

SEQ ID NO: 365900 - protein, 15 aa, Homo sapiens
  CDR3 for beta chain variable domain of TCR clone 182950 (TRBV11-2, TRBJ2-2)
CASSLDTGNTGELFF

SEQ ID NO: 365901 - protein, 15 aa, Homo sapiens
  CDR3 for alpha chain variable domain of TCR clone 182951 (TRAV25, TRAJ52)
CAGTSGGTSYGRLTF

SEQ ID NO: 365902 - protein, 13 aa, Homo sapiens
  CDR3 for beta chain variable domain of TCR clone 182951 (TRBV6-5, TRBJ2-5)
CASSPQGGEAQYF

SEQ ID NO: 365903 - protein, 14 aa, Homo sapiens
  CDR3 for alpha chain variable domain of TCR clone 182952 (TRAV1-2, TRAJ16)
CAVNRFSDGQKLLF

SEQ ID NO: 365904 - protein, 14 aa, Homo sapiens
  CDR3 for beta chain variable domain of TCR clone 182952 (TRBV7-8, TRBJ2-1)
CATERERSYNEQFF

SEQ ID NO: 365905 - protein, 14 aa, Homo sapiens
  CDR3 for alpha chain variable domain of TCR clone 182953 (TRAV26-1, TRAJ22)
CIVRVYGSARQLTS

SEQ ID NO: 365906 - protein, 17 aa, Homo sapiens
  CDR3 for beta chain variable domain of TCR clone 182953 (TRBV7-3, TRBJ2-3)
CASSPGGLAGFGDTQYF

SEQ ID NO: 365907 - protein, 17 aa, Homo sapiens
  CDR3 for alpha chain variable domain of TCR clone 182954 (TRAV13-1, TRAJ52)
CAASSGAGGTSYGKLTF

SEQ ID NO: 365908 - protein, 12 aa, Homo sapiens
  CDR3 for beta chain variable domain of TCR clone 182954 (TRBV11-2, TRBJ2-2)
CASILGGGELFF

SEQ ID NO: 365909 - protein, 16 aa, Homo sapiens
  CDR3 for alpha chain variable domain of TCR clone 182955 (TRAV12-3, TRAJ53)
CAMSPGSRCSNYKLTF

SEQ ID NO: 365910 - protein, 11 aa, Homo sapiens
  CDR3 for beta chain variable domain of TCR clone 182955 (TRBV29-1, TRBJ2-5)
CSEDRTGTQYF

SEQ ID NO: 365911 - protein, 16 aa, Homo sapiens
  CDR3 for alpha chain variable domain of TCR clone 182956 (TRAV30, TRAJ24)
CGTEILDADSWGKFQF

SEQ ID NO: 365912 - protein, 16 aa, Homo sapiens
  CDR3 for beta chain variable domain of TCR clone 182956 (TRBV7-9, TRBJ1-2)
CASSLGFSSGEDGYTF

SEQ ID NO: 365913 - protein, 16 aa, Homo sapiens
  CDR3 for alpha chain variable domain of TCR clone 182957 (TRAV12-1, TRAJ42)
CVVTPYYGGRRGNLIF

SEQ ID NO: 365914 - protein, 18 aa, Homo sapiens
  CDR3 for beta chain variable domain of TCR clone 182957 (TRBV24-1, TRBJ2-3)
CATSDLPRLAGGADTQYF

SEQ ID NO: 365915 - protein, 11 aa, Homo sapiens
  CDR3 for alpha chain variable domain of TCR clone 182958 (TRAV35, TRAJ30)
CAPGGDDKIIF

SEQ ID NO: 365916 - protein, 17 aa, Homo sapiens
  CDR3 for beta chain variable domain of TCR clone 182958 (TRBV7-8, TRBJ2-6)
CASSAGTGGAGANGLTF

SEQ ID NO: 365917 - protein, 15 aa, Homo sapiens
  CDR3 for alpha chain variable domain of TCR clone 182959 (TRAV8-3, TRAJ27)
CAVGPSKTNAGKSTF

SEQ ID NO: 365918 - protein, 14 aa, Homo sapiens
  CDR3 for beta chain variable domain of TCR clone 182959 (TRBV9, TRBJ2-7)
CASSVGVGSYEQYF

SEQ ID NO: 365919 - protein, 18 aa, Homo sapiens
  CDR3 for alpha chain variable domain of TCR clone 182960 (TRAV13-1, TRAJ52)
CAAKNPNAVGTSYGKLTF

SEQ ID NO: 365920 - protein, 18 aa, Homo sapiens
  CDR3 for beta chain variable domain of TCR clone 182960 (TRBV25-1, TRBJ1-2)
CASSGLQNGQGLIFGYTF

SEQ ID NO: 365921 - protein, 18 aa, Homo sapiens
  CDR3 for alpha chain variable domain of TCR clone 182961 (TRAV13-1, TRAJ52)
CAAKNPNAGGPSYGKLTF

SEQ ID NO: 365922 - protein, 15 aa, Homo sapiens
  CDR3 for beta chain variable domain of TCR clone 182961 (TRBV6-1, TRBJ2-3)
CASSERGGITDTQYF

SEQ ID NO: 365923 - protein, 17 aa, Homo sapiens
  CDR3 for alpha chain variable domain of TCR clone 182962 (TRAV29/DV5, TRAJ42)
CAASAGNYGGSQGTLIF

SEQ ID NO: 365924 - protein, 16 aa, Homo sapiens
  CDR3 for beta chain variable domain of TCR clone 182962 (TRBV27, TRBJ2-2)
CASSFRGLVRTGELFF

SEQ ID NO: 365925 - protein, 13 aa, Homo sapiens
  CDR3 for alpha chain variable domain of TCR clone 182963 (TRAV1-2, TRAJ9)
CAVLNTGGFKTIF

SEQ ID NO: 365926 - protein, 15 aa, Homo sapiens
  CDR3 for beta chain variable domain of TCR clone 182963 (TRBV20-1, TRBJ1-5)
CSAFKNGQRNQPQHF

SEQ ID NO: 365927 - protein, 13 aa, Homo sapiens
  CDR3 for alpha chain variable domain of TCR clone 182964 (TRAV2, TRAJ40)
CAVVTSGTYKYIF

SEQ ID NO: 365928 - protein, 14 aa, Homo sapiens
  CDR3 for beta chain variable domain of TCR clone 182964 (TRBV19, TRBJ2-1)
CDSPTFVLSGEQLF

SEQ ID NO: 365929 - protein, 11 aa, Homo sapiens
  CDR3 for alpha chain variable domain of TCR clone 182965 (TRAV3, TRAJ21)
CAVGNFNKFYF

SEQ ID NO: 365930 - protein, 13 aa, Homo sapiens
  CDR3 for beta chain variable domain of TCR clone 182965 (TRBV27, TRBJ1-4)
CASSLMGDEKLFF

SEQ ID NO: 365931 - protein, 15 aa, Homo sapiens
  CDR3 for alpha chain variable domain of TCR clone 182966 (TRAV2, TRAJ9)
CAVEDRGTGGFKTIF

SEQ ID NO: 365932 - protein, 16 aa, Homo sapiens
  CDR3 for beta chain variable domain of TCR clone 182966 (TRBV7-7, TRBJ2-3)
CASSPGTSGSTDTQYF

SEQ ID NO: 365933 - protein, 11 aa, Homo sapiens
  CDR3 for alpha chain variable domain of TCR clone 182967 (TRAV12-1, TRAJ37)
CVVNTTGKLIF

SEQ ID NO: 365934 - protein, 13 aa, Homo sapiens
  CDR3 for beta chain variable domain of TCR clone 182967 (TRBV12-4, TRBJ1-5)
CASSPDRAQPQHF

SEQ ID NO: 365935 - protein, 13 aa, Homo sapiens
  CDR3 for alpha chain variable domain of TCR clone 182968 (TRAV13-1, TRAJ33)
CAESRAGNYQLIW

SEQ ID NO: 365936 - protein, 15 aa, Homo sapiens
  CDR3 for beta chain variable domain of TCR clone 182968 (TRBV2, TRBJ2-7)
EDSAMYFCASSEQYF

SEQ ID NO: 365937 - protein, 14 aa, Homo sapiens
  CDR3 for alpha chain variable domain of TCR clone 182969 (TRAV12-3, TRAJ56)
CAMSVTGANSKLTF

SEQ ID NO: 365938 - protein, 17 aa, Homo sapiens
  CDR3 for beta chain variable domain of TCR clone 182969 (TRBV20-1, TRBJ2-3)
CSASLLGRGGSEDTQYF

SEQ ID NO: 365939 - protein, 16 aa, Homo sapiens
  CDR3 for alpha chain variable domain of TCR clone 182970 (TRAV12-3, TRAJ53)
CAMSPRSGGSNYKLTF

SEQ ID NO: 365940 - protein, 11 aa, Homo sapiens
  CDR3 for beta chain variable domain of TCR clone 182970 (TRBV29-1, TRBJ2-5)
CSEDRTETQYF

SEQ ID NO: 365941 - protein, 15 aa, Homo sapiens
  CDR3 for alpha chain variable domain of TCR clone 182971 (TRAV26-1, TRAJ29)
CIVRVEGAGNTPLVF

SEQ ID NO: 365942 - protein, 15 aa, Homo sapiens
  CDR3 for beta chain variable domain of TCR clone 182971 (TRBV7-9, TRBJ1-5)
CASSQGHQPNQAQHF

SEQ ID NO: 365943 - protein, 14 aa, Homo sapiens
  CDR3 for alpha chain variable domain of TCR clone 182972 (TRAV26-1, TRAJ45)
CIEVTGGGSDRLTF

SEQ ID NO: 365944 - protein, 13 aa, Homo sapiens
  CDR3 for beta chain variable domain of TCR clone 182972 (TRBV7-6, TRBJ1-2)
CASSLVADYGYIF

SEQ ID NO: 365945 - protein, 14 aa, Homo sapiens
  CDR3 for alpha chain variable domain of TCR clone 182973 (TRAV17, TRAJ12)
CATDREDSSYKLIF

SEQ ID NO: 365946 - protein, 16 aa, Homo sapiens
  CDR3 for beta chain variable domain of TCR clone 182973 (TRBV4-1, TRBJ2-3)
CASSQSTSGAEDTQYF

SEQ ID NO: 365947 - protein, 13 aa, Homo sapiens
  CDR3 for alpha chain variable domain of TCR clone 182974 (TRAV1-2, TRAJ20)
CAVRDGNDYKLSF

SEQ ID NO: 365948 - protein, 14 aa, Homo sapiens
  CDR3 for beta chain variable domain of TCR clone 182974 (TRBV7-2, TRBJ2-3)
CARSLGGGERYAVF

SEQ ID NO: 365949 - protein, 21 aa, Homo sapiens
  CDR3 for alpha chain variable domain of TCR clone 182975 (TRAV12-1, TRAJ32)
SSVIQPPTSMNYGGATNNLIF

SEQ ID NO: 365950 - protein, 18 aa, Homo sapiens
  CDR3 for beta chain variable domain of TCR clone 182975 (TRBV20-1, TRBJ2-3)
CSASGLAGGPGTTDTQYF

SEQ ID NO: 365951 - protein, 18 aa, Homo sapiens
  CDR3 for alpha chain variable domain of TCR clone 182976 (TRAV13-1, TRAJ52)
CAASKRSAGGTSYGKLTF

SEQ ID NO: 365952 - protein, 12 aa, Homo sapiens
  CDR3 for beta chain variable domain of TCR clone 182976 (TRBV11-2, TRBJ2-2)
CASSRGGGELLF

SEQ ID NO: 365953 - protein, 11 aa, Homo sapiens
  CDR3 for alpha chain variable domain of TCR clone 182977 (TRAV21, TRAJ48)
CAVDGNEKLTF

SEQ ID NO: 365954 - protein, 13 aa, Homo sapiens
  CDR3 for beta chain variable domain of TCR clone 182977 (TRBV12-4, TRBJ2-7)
CASSLERVREQYF

SEQ ID NO: 365955 - protein, 16 aa, Homo sapiens
  CDR3 for alpha chain variable domain of TCR clone 182978 (TRAV26-1, TRAJ53)
CIVRVAMGGSNYKLAF

SEQ ID NO: 365956 - protein, 22 aa, Homo sapiens
  CDR3 for beta chain variable domain of TCR clone 182978 (TRBV7-9, TRBJ2-1)
RGTRPCISVPAAHRDSLYEQFF

SEQ ID NO: 365957 - protein, 13 aa, Homo sapiens
  CDR3 for alpha chain variable domain of TCR clone 182979 (TRAV12-2, TRAJ10)
CAVPTGGGNKLTF

SEQ ID NO: 365958 - protein, 14 aa, Homo sapiens
  CDR3 for beta chain variable domain of TCR clone 182979 (TRBV25-1, TRBJ1-1)
CAITHLGGNTEAFF

SEQ ID NO: 365959 - protein, 16 aa, Homo sapiens
  CDR3 for alpha chain variable domain of TCR clone 182980 (TRAV21, TRAJ37)
CAVRTAGSSNTGKLIF

SEQ ID NO: 365960 - protein, 13 aa, Homo sapiens
  CDR3 for beta chain variable domain of TCR clone 182980 (TRBV18, TRBJ1-1)
CASSGGRNTEAFF

SEQ ID NO: 365961 - protein, 15 aa, Homo sapiens
  CDR3 for alpha chain variable domain of TCR clone 182981 (TRAV13-2, TRAJ50)
CAEEPLKTSYDKVIF

SEQ ID NO: 365962 - protein, 15 aa, Homo sapiens
  CDR3 for beta chain variable domain of TCR clone 182981 (TRBV20-1, TRBJ1-5)
CSARGSVDSNQHQHF

SEQ ID NO: 365963 - protein, 15 aa, Homo sapiens
  CDR3 for alpha chain variable domain of TCR clone 182982 (TRAV8-6, TRAJ10)
CAASSKGGGGNKLTF

SEQ ID NO: 365964 - protein, 16 aa, Homo sapiens
  CDR3 for beta chain variable domain of TCR clone 182982 (TRBV12-5, TRBJ2-5)
CASGPRTSGNQETQYF

SEQ ID NO: 365965 - protein, 12 aa, Homo sapiens
  CDR3 for alpha chain variable domain of TCR clone 182983 (TRAV12-3, TRAJ17)
CAMTLTGNKLTY

SEQ ID NO: 365966 - protein, 14 aa, Homo sapiens
  CDR3 for beta chain variable domain of TCR clone 182983 (TRBV19, TRBJ2-1)
CASPTFVLGGEQFF

SEQ ID NO: 365967 - protein, 12 aa, Homo sapiens
  CDR3 for alpha chain variable domain of TCR clone 182984 (TRAV22, TRAJ34)
CAVLYNTDKLIF

SEQ ID NO: 365968 - protein, 20 aa, Homo sapiens
  CDR3 for beta chain variable domain of TCR clone 182984 (TRBV19, TRBJ2-1)
CASSISRTVTSTRLNNEQFF

SEQ ID NO: 365969 - protein, 17 aa, Homo sapiens
  CDR3 for alpha chain variable domain of TCR clone 182985 (TRAV3, TRAJ28)
CAVREEYSGAGSYQLTF

SEQ ID NO: 365970 - protein, 18 aa, Homo sapiens
  CDR3 for beta chain variable domain of TCR clone 182985 (TRBV27, TRBJ2-1)
CASGNRAVGVGSKNEQFF

SEQ ID NO: 365971 - protein, 15 aa, Homo sapiens
  CDR3 for alpha chain variable domain of TCR clone 182986 (TRAV17, TRAJ22)
CATAPISGSARQLTF

SEQ ID NO: 365972 - protein, 12 aa, Homo sapiens
  CDR3 for beta chain variable domain of TCR clone 182986 (TRBV7-2, TRBJ1-5)
CASSLWSQPQHF

SEQ ID NO: 365973 - protein, 13 aa, Homo sapiens
  CDR3 for alpha chain variable domain of TCR clone 182987 (TRAV13-2, TRAJ13)
CAERPGGYQKVTF

SEQ ID NO: 365974 - protein, 18 aa, Homo sapiens
  CDR3 for beta chain variable domain of TCR clone 182987 (TRBV7-6, TRBJ2-1)
CASSPRTSGMSPYNEQFF

SEQ ID NO: 365975 - protein, 14 aa, Homo sapiens
  CDR3 for alpha chain variable domain of TCR clone 182988 (TRAV2, TRAJ37)
CAVAFTSNTGKLIF

SEQ ID NO: 365976 - protein, 13 aa, Homo sapiens
  CDR3 for beta chain variable domain of TCR clone 182988 (TRBV20-1, TRBJ1-1)
CSAPLGGGTEAFL

SEQ ID NO: 365977 - protein, 11 aa, Homo sapiens
  CDR3 for alpha chain variable domain of TCR clone 182989 (TRAV2, TRAJ40)
CAVEGTYKYIF

SEQ ID NO: 365978 - protein, 13 aa, Homo sapiens
  CDR3 for beta chain variable domain of TCR clone 182989 (TRBV4-2, TRBJ1-1)
CASSQAGNTEAFF

SEQ ID NO: 365979 - protein, 15 aa, Homo sapiens
  CDR3 for alpha chain variable domain of TCR clone 182990 (TRAV41, TRAJ45)
CAASYSGGGADGLTF

SEQ ID NO: 365980 - protein, 16 aa, Homo sapiens
  CDR3 for beta chain variable domain of TCR clone 182990 (TRBV6-1, TRBJ2-1)
CASSGPGQEVYNEQFF

SEQ ID NO: 365981 - protein, 17 aa, Homo sapiens
  CDR3 for alpha chain variable domain of TCR clone 182991 (TRAV17, TRAJ7)
CATFGRLAFGKGNQVVV

SEQ ID NO: 365982 - protein, 13 aa, Homo sapiens
  CDR3 for beta chain variable domain of TCR clone 182991 (TRBV12-4, TRBJ2-7)
CASSLERVREQYF

SEQ ID NO: 365983 - protein, 13 aa, Homo sapiens
  CDR3 for alpha chain variable domain of TCR clone 182992 (TRAV27, TRAJ54)
CAGAGQGAQKLAF

SEQ ID NO: 365984 - protein, 16 aa, Homo sapiens
  CDR3 for beta chain variable domain of TCR clone 182992 (TRBV11-2, TRBJ2-2)
CASSLRTGNLIGELFF

SEQ ID NO: 365985 - protein, 14 aa, Homo sapiens
  CDR3 for alpha chain variable domain of TCR clone 182993 (TRAV8-1, TRAJ10)
CAVIFTGGGNKLTF

SEQ ID NO: 365986 - protein, 14 aa, Homo sapiens
  CDR3 for beta chain variable domain of TCR clone 182993 (TRBV25-1, TRBJ1-1)
CASTHLVGNTEAFF

SEQ ID NO: 365987 - protein, 11 aa, Homo sapiens
  CDR3 for alpha chain variable domain of TCR clone 182994 (TRAV21, TRAJ34)
CAHYNTDKLIF

SEQ ID NO: 365988 - protein, 15 aa, Homo sapiens
  CDR3 for beta chain variable domain of TCR clone 182994 (TRBV3-1, TRBJ1-2)
CASSRRNPGFYGYTF

SEQ ID NO: 365989 - protein, 14 aa, Homo sapiens
  CDR3 for alpha chain variable domain of TCR clone 182995 (TRAV35, TRAJ22)
CAGLRPGSARQLTF

SEQ ID NO: 365990 - protein, 17 aa, Homo sapiens
  CDR3 for beta chain variable domain of TCR clone 182995 (TRBV7-9, TRBJ2-1)
CASSLVASYPSYNEQFF

SEQ ID NO: 365991 - protein, 12 aa, Homo sapiens
  CDR3 for alpha chain variable domain of TCR clone 182996 (TRAV12-3, TRAJ17)
CAMMLTGNKLNF

SEQ ID NO: 365992 - protein, 15 aa, Homo sapiens
  CDR3 for beta chain variable domain of TCR clone 182996 (TRBV20-1, TRBJ2-7)
CSARDQVSGMDEQYF

SEQ ID NO: 365993 - protein, 12 aa, Homo sapiens
  CDR3 for alpha chain variable domain of TCR clone 182997 (TRAV3, TRAJ20)
CAVRDPDYKLSF

SEQ ID NO: 365994 - protein, 13 aa, Homo sapiens
  CDR3 for beta chain variable domain of TCR clone 182997 (TRBV20-1, TRBJ2-5)
CSARDNYMETQYF

SEQ ID NO: 365995 - protein, 17 aa, Homo sapiens
  CDR3 for alpha chain variable domain of TCR clone 182998 (TRAV3, TRAJ6)
CAVSGGPRAGGSYIPTF

SEQ ID NO: 365996 - protein, 12 aa, Homo sapiens
  CDR3 for beta chain variable domain of TCR clone 182998 (TRBV11-2, TRBJ2-1)
CASSPGNNEQFF

SEQ ID NO: 365997 - protein, 18 aa, Homo sapiens
  CDR3 for alpha chain variable domain of TCR clone 182999 (TRAV1-2, TRAJ18)
CAVRDMGDRGSTLGRLDF

SEQ ID NO: 365998 - protein, 16 aa, Homo sapiens
  CDR3 for beta chain variable domain of TCR clone 182999 (TRBV29-1, TRBJ1-2)
CSVEANRNIANYGYTF

SEQ ID NO: 365999 - protein, 15 aa, Homo sapiens
  CDR3 for alpha chain variable domain of TCR clone 183000 (TRAV19, TRAJ8)
CALSGPNTGFQKLVF

SEQ ID NO: 366000 - protein, 14 aa, Homo sapiens
  CDR3 for beta chain variable domain of TCR clone 183000 (TRBV19, TRBJ2-1)
CASPTFVLSGEQFF

SEQ ID NO: 366001 - protein, 11 aa, Homo sapiens
  CDR3 for alpha chain variable domain of TCR clone 183001 (TRAV2, TRAJ13)
CASGGYQKVTF

SEQ ID NO: 366002 - protein, 20 aa, Homo sapiens
  CDR3 for beta chain variable domain of TCR clone 183001 (TRBV28, TRBJ2-1)
CASTPIGRPPGLAGGNEQFF

SEQ ID NO: 366003 - protein, 16 aa, Homo sapiens
  CDR3 for alpha chain variable domain of TCR clone 183002 (TRAV30, TRAJ24)
CGTETVDADSWGKFKF

SEQ ID NO: 366004 - protein, 13 aa, Homo sapiens
  CDR3 for beta chain variable domain of TCR clone 183002 (TRBV10-3, TRBJ2-7)
CASKLAVNYEQYF

SEQ ID NO: 366005 - protein, 13 aa, Homo sapiens
  CDR3 for alpha chain variable domain of TCR clone 183003 (TRAV2, TRAJ12)
CAVGADSSYKLIF

SEQ ID NO: 366006 - protein, 16 aa, Homo sapiens
  CDR3 for beta chain variable domain of TCR clone 183003 (TRBV27, TRBJ2-2)
CASSSSGVSNTGELFF

SEQ ID NO: 366007 - protein, 10 aa, Homo sapiens
  CDR3 for alpha chain variable domain of TCR clone 183004 (TRAV8-4, TRAJ39)
CAVSGNMLTF

SEQ ID NO: 366008 - protein, 14 aa, Homo sapiens
  CDR3 for beta chain variable domain of TCR clone 183004 (TRBV25-1, TRBJ1-1)
CASTHLGVNTEAFC

SEQ ID NO: 366009 - protein, 17 aa, Homo sapiens
  CDR3 for alpha chain variable domain of TCR clone 183005 (TRAV3, TRAJ6)
CAVRDGPRAGGSYIPTF

SEQ ID NO: 366010 - protein, 16 aa, Homo sapiens
  CDR3 for beta chain variable domain of TCR clone 183005 (TRBV5-1, TRBJ2-5)
CASSLSLAGAQETQYF

SEQ ID NO: 366011 - protein, 16 aa, Homo sapiens
  CDR3 for alpha chain variable domain of TCR clone 183006 (TRAV27, TRAJ13)
CAGAKSDSGGYQKVTF

SEQ ID NO: 366012 - protein, 15 aa, Homo sapiens
  CDR3 for beta chain variable domain of TCR clone 183006 (TRBV29-1, TRBJ2-1)
CSVGRHALYYNEQFF

SEQ ID NO: 366013 - protein, 15 aa, Homo sapiens
  CDR3 for alpha chain variable domain of TCR clone 183007 (TRAV23/DV6, TRAJ30)
CAASSQESRDDKIIF

SEQ ID NO: 366014 - protein, 17 aa, Homo sapiens
  CDR3 for beta chain variable domain of TCR clone 183007 (TRBV4-3, TRBJ2-1)
CASSPFSSGRASGEQFF

SEQ ID NO: 366015 - protein, 13 aa, Homo sapiens
  CDR3 for alpha chain variable domain of TCR clone 183008 (TRAV17, TRAJ5)
CAPMDTGRRALTF

SEQ ID NO: 366016 - protein, 11 aa, Homo sapiens
  CDR3 for beta chain variable domain of TCR clone 183008 (TRBV19, TRBJ1-1)
CASSIGSEAFF

SEQ ID NO: 366017 - protein, 13 aa, Homo sapiens
  CDR3 for alpha chain variable domain of TCR clone 183009 (TRAV1-2, TRAJ9)
CAALNTGGFTTIF

SEQ ID NO: 366018 - protein, 16 aa, Homo sapiens
  CDR3 for beta chain variable domain of TCR clone 183009 (TRBV11-2, TRBJ2-1)
CASSPRPAGVYNEQFF

SEQ ID NO: 366019 - protein, 15 aa, Homo sapiens
  CDR3 for alpha chain variable domain of TCR clone 183010 (TRAV17, TRAJ56)
CATGPFTGANSKLTF

SEQ ID NO: 366020 - protein, 14 aa, Homo sapiens
  CDR3 for beta chain variable domain of TCR clone 183010 (TRBV19, TRBJ2-1)
CASPTLVLSGEQFF

SEQ ID NO: 366021 - protein, 13 aa, Homo sapiens
  CDR3 for alpha chain variable domain of TCR clone 183011 (TRAV2, TRAJ40)
CAVVTSGTYKYIF

SEQ ID NO: 366022 - protein, 17 aa, Homo sapiens
  CDR3 for beta chain variable domain of TCR clone 183011 (TRBV7-6, TRBJ2-1)
CIAGPAAWGGGADEQFF

SEQ ID NO: 366023 - protein, 14 aa, Homo sapiens
  CDR3 for alpha chain variable domain of TCR clone 183012 (TRAV12-3, TRAJ10)
SHLPLTGGGNKLTF

SEQ ID NO: 366024 - protein, 15 aa, Homo sapiens
  CDR3 for beta chain variable domain of TCR clone 183012 (TRBV11-3, TRBJ2-3)
CASLRDGRGGDTQYF

SEQ ID NO: 366025 - protein, 16 aa, Homo sapiens
  CDR3 for alpha chain variable domain of TCR clone 183013 (TRAV30, TRAJ24)
CGTEIVDADSWGKFQF

SEQ ID NO: 366026 - protein, 12 aa, Homo sapiens
  CDR3 for beta chain variable domain of TCR clone 183013 (TRBV27, TRBJ2-1)
CASRGFYNEQFL

SEQ ID NO: 366027 - protein, 14 aa, Homo sapiens
  CDR3 for alpha chain variable domain of TCR clone 183014 (TRAV13-1, TRAJ36)
CAAIFQTGANNLFF

SEQ ID NO: 366028 - protein, 15 aa, Homo sapiens
  CDR3 for beta chain variable domain of TCR clone 183014 (TRBV5-1, TRBJ1-1)
CASSPPGGSNTEAFF

SEQ ID NO: 366029 - protein, 13 aa, Homo sapiens
  CDR3 for alpha chain variable domain of TCR clone 183015 (TRAV12-3, TRAJ13)
CALTSGGYQKVTF

SEQ ID NO: 366030 - protein, 13 aa, Homo sapiens
  CDR3 for beta chain variable domain of TCR clone 183015 (TRBV7-9, TRBJ1-2)
CASSLKQNYGYTF

SEQ ID NO: 366031 - protein, 17 aa, Homo sapiens
  CDR3 for alpha chain variable domain of TCR clone 183016 (TRAV13-1, TRAJ28)
CAASPPYSGAGSYQLTF

SEQ ID NO: 366032 - protein, 15 aa, Homo sapiens
  CDR3 for beta chain variable domain of TCR clone 183016 (TRBV27, TRBJ2-1)
CASSNGGGSSNEQFF

SEQ ID NO: 366033 - protein, 14 aa, Homo sapiens
  CDR3 for alpha chain variable domain of TCR clone 183017 (TRAV13-2, TRAJ17)
CAENSKAAGNKLTF

SEQ ID NO: 366034 - protein, 15 aa, Homo sapiens
  CDR3 for beta chain variable domain of TCR clone 183017 (TRBV4-1, TRBJ1-4)
CASSDTGGTNEKLFF

SEQ ID NO: 366035 - protein, 12 aa, Homo sapiens
  CDR3 for alpha chain variable domain of TCR clone 183018 (TRAV8-6, TRAJ43)
CAVSNNNNDMRF

SEQ ID NO: 366036 - protein, 15 aa, Homo sapiens
  CDR3 for beta chain variable domain of TCR clone 183018 (TRBV7-3, TRBJ2-6)
CASSLGGSGANVLTF

SEQ ID NO: 366037 - protein, 13 aa, Homo sapiens
  CDR3 for alpha chain variable domain of TCR clone 183019 (TRAV1-2, TRAJ8)
CAVGSTGFQKLVF

SEQ ID NO: 366038 - protein, 16 aa, Homo sapiens
  CDR3 for beta chain variable domain of TCR clone 183019 (TRBV12-5, TRBJ2-5)
CASGPRTSGNQETQYF

SEQ ID NO: 366039 - protein, 14 aa, Homo sapiens
  CDR3 for alpha chain variable domain of TCR clone 183020 (TRAV12-2, TRAJ5)
CAVNRSTGRRALTF

SEQ ID NO: 366040 - protein, 12 aa, Homo sapiens
  CDR3 for beta chain variable domain of TCR clone 183020 (TRBV6-3, TRBJ2-7)
CASSLTPYEQYF

SEQ ID NO: 366041 - protein, 15 aa, Homo sapiens
  CDR3 for alpha chain variable domain of TCR clone 183021 (TRAV36/DV7, TRAJ48)
CAVEASDFGNEKLTF

SEQ ID NO: 366042 - protein, 15 aa, Homo sapiens
  CDR3 for beta chain variable domain of TCR clone 183021 (TRBV28, TRBJ2-1)
CASSIIAGGRSEQFF

SEQ ID NO: 366043 - protein, 14 aa, Homo sapiens
  CDR3 for alpha chain variable domain of TCR clone 183022 (TRAV12-2, TRAJ36)
CAVNPPTGANNRFF

SEQ ID NO: 366044 - protein, 13 aa, Homo sapiens
  CDR3 for beta chain variable domain of TCR clone 183022 (TRBV20-1, TRBJ1-6)
CSAPTGLGSPLHF

SEQ ID NO: 366045 - protein, 14 aa, Homo sapiens
  CDR3 for alpha chain variable domain of TCR clone 183023 (TRAV30, TRAJ33)
CGTVAPRSNYQLIW

SEQ ID NO: 366046 - protein, 16 aa, Homo sapiens
  CDR3 for beta chain variable domain of TCR clone 183023 (TRBV12-5, TRBJ2-5)
CASGPRTSGNQETQNF

SEQ ID NO: 366047 - protein, 11 aa, Homo sapiens
  CDR3 for alpha chain variable domain of TCR clone 183024 (TRAV25, TRAJ20)
CAVEYGNKLVF

SEQ ID NO: 366048 - protein, 16 aa, Homo sapiens
  CDR3 for beta chain variable domain of TCR clone 183024 (TRBV19, TRBJ2-1)
CASSKAGPSSYNEQFF

SEQ ID NO: 366049 - protein, 13 aa, Homo sapiens
  CDR3 for alpha chain variable domain of TCR clone 183025 (TRAV13-1, TRAJ5)
CAAEHTGRRALTF

SEQ ID NO: 366050 - protein, 14 aa, Homo sapiens
  CDR3 for beta chain variable domain of TCR clone 183025 (TRBV7-8, TRBJ2-3)
CASGLEAGTDTQYF

SEQ ID NO: 366051 - protein, 12 aa, Homo sapiens
  CDR3 for alpha chain variable domain of TCR clone 183026 (TRAV21, TRAJ11)
CAATPGYSTLTF

SEQ ID NO: 366052 - protein, 15 aa, Homo sapiens
  CDR3 for beta chain variable domain of TCR clone 183026 (TRBV12-4, TRBJ2-5)
CASSPPTGLQETQYF

SEQ ID NO: 366053 - protein, 14 aa, Homo sapiens
  CDR3 for alpha chain variable domain of TCR clone 183027 (TRAV8-2, TRAJ4)
CVVSPSGGYNKLIF

SEQ ID NO: 366054 - protein, 17 aa, Homo sapiens
  CDR3 for beta chain variable domain of TCR clone 183027 (TRBV13, TRBJ2-3)
CASSLARVAGGRNTQYF

SEQ ID NO: 366055 - protein, 23 aa, Homo sapiens
  CDR3 for alpha chain variable domain of TCR clone 183028 (TRAV12-2, TRAJ43)
SLLIRDSQPSDSPTYLCAFDMRF

SEQ ID NO: 366056 - protein, 18 aa, Homo sapiens
  CDR3 for beta chain variable domain of TCR clone 183028 (TRBV20-1, TRBJ2-3)
CSASGLAGGPGTTDTQYF

SEQ ID NO: 366057 - protein, 14 aa, Homo sapiens
  CDR3 for alpha chain variable domain of TCR clone 183029 (TRAV12-2, TRAJ13)
CAMKKTGGYQKVTF

SEQ ID NO: 366058 - protein, 14 aa, Homo sapiens
  CDR3 for beta chain variable domain of TCR clone 183029 (TRBV6-1, TRBJ1-3)
CASVQGGGGNTIYF

SEQ ID NO: 366059 - protein, 13 aa, Homo sapiens
  CDR3 for alpha chain variable domain of TCR clone 183030 (TRAV8-3, TRAJ43)
CAVVPYNNNDMRF

SEQ ID NO: 366060 - protein, 14 aa, Homo sapiens
  CDR3 for beta chain variable domain of TCR clone 183030 (TRBV7-3, TRBJ1-1)
CASSLKGGNTEAFF

SEQ ID NO: 366061 - protein, 15 aa, Homo sapiens
  CDR3 for alpha chain variable domain of TCR clone 183031 (TRAV17, TRAJ4)
CATGTWSGGYNKLIF

SEQ ID NO: 366062 - protein, 15 aa, Homo sapiens
  CDR3 for beta chain variable domain of TCR clone 183031 (TRBV2, TRBJ2-3)
CASSDFEKATDTQYF

SEQ ID NO: 366063 - protein, 18 aa, Homo sapiens
  CDR3 for alpha chain variable domain of TCR clone 183032 (TRAV26-1, TRAJ45)
CIVRPGGYSGGGADGLTF

SEQ ID NO: 366064 - protein, 13 aa, Homo sapiens
  CDR3 for beta chain variable domain of TCR clone 183032 (TRBV19, TRBJ1-5)
CASSIEPVQPQHF

SEQ ID NO: 366065 - protein, 13 aa, Homo sapiens
  CDR3 for alpha chain variable domain of TCR clone 183033 (TRAV12-2, TRAJ50)
CAVIVTSYDKVIF

SEQ ID NO: 366066 - protein, 14 aa, Homo sapiens
  CDR3 for beta chain variable domain of TCR clone 183033 (TRBV18, TRBJ2-7)
CASSPRGGAYEQYF

SEQ ID NO: 366067 - protein, 11 aa, Homo sapiens
  CDR3 for alpha chain variable domain of TCR clone 183034 (TRAV12-1, TRAJ30)
CVVNGQDKIIF

SEQ ID NO: 366068 - protein, 17 aa, Homo sapiens
  CDR3 for beta chain variable domain of TCR clone 183034 (TRBV25-1, TRBJ2-1)
CASSAYGQGRGVYEQFF

SEQ ID NO: 366069 - protein, 15 aa, Homo sapiens
  CDR3 for alpha chain variable domain of TCR clone 183035 (TRAV8-3, TRAJ11)
CAVGLLNSGYSALTF

SEQ ID NO: 366070 - protein, 15 aa, Homo sapiens
  CDR3 for beta chain variable domain of TCR clone 183035 (TRBV13, TRBJ2-1)
CASSLLSGLNNEQFF

SEQ ID NO: 366071 - protein, 13 aa, Homo sapiens
  CDR3 for alpha chain variable domain of TCR clone 183036 (TRAV20, TRAJ37)
CAGCSSNTGKLIF

SEQ ID NO: 366072 - protein, 19 aa, Homo sapiens
  CDR3 for beta chain variable domain of TCR clone 183036 (TRBV7-2, TRBJ2-5)
CASSLSGGGGDPVLRARHA

SEQ ID NO: 366073 - protein, 16 aa, Homo sapiens
  CDR3 for alpha chain variable domain of TCR clone 183037 (TRAV8-2, TRAJ45)
CVVSEGKGGGADGLTF

SEQ ID NO: 366074 - protein, 15 aa, Homo sapiens
  CDR3 for beta chain variable domain of TCR clone 183037 (TRBV7-9, TRBJ2-5)
CASSLVAGGLETQYF

SEQ ID NO: 366075 - protein, 12 aa, Homo sapiens
  CDR3 for alpha chain variable domain of TCR clone 183038 (TRAV21, TRAJ13)
PGPSGGDQKVTF

SEQ ID NO: 366076 - protein, 15 aa, Homo sapiens
  CDR3 for beta chain variable domain of TCR clone 183038 (TRBV27, TRBJ2-5)
CASSLYPRGGETQYF

SEQ ID NO: 366077 - protein, 15 aa, Homo sapiens
  CDR3 for alpha chain variable domain of TCR clone 183039 (TRAV12-2, TRAJ43)
CAFDMRFGAETRLTV

SEQ ID NO: 366078 - protein, 13 aa, Homo sapiens
  CDR3 for beta chain variable domain of TCR clone 183039 (TRBV4-2, TRBJ1-1)
CASSQAGNTEAFF

SEQ ID NO: 366079 - protein, 14 aa, Homo sapiens
  CDR3 for alpha chain variable domain of TCR clone 183040 (TRAV12-1, TRAJ34)
CVVNLDYNTDKLIF

SEQ ID NO: 366080 - protein, 17 aa, Homo sapiens
  CDR3 for beta chain variable domain of TCR clone 183040 (TRBV20-1, TRBJ2-7)
CSAARTSGGGSSYEQYF

SEQ ID NO: 366081 - protein, 16 aa, Homo sapiens
  CDR3 for alpha chain variable domain of TCR clone 183041 (TRAV26-1, TRAJ45)
CIVEKYSGGGADGLTF

SEQ ID NO: 366082 - protein, 16 aa, Homo sapiens
  CDR3 for beta chain variable domain of TCR clone 183041 (TRBV10-3, TRBJ1-6)
CAISERRGQGNAPLHF

SEQ ID NO: 366083 - protein, 12 aa, Homo sapiens
  CDR3 for alpha chain variable domain of TCR clone 183042 (TRAV29/DV5, TRAJ49)
CAATDTGNQFYF

SEQ ID NO: 366084 - protein, 13 aa, Homo sapiens
  CDR3 for beta chain variable domain of TCR clone 183042 (TRBV28, TRBJ2-3)
CASSLPQVDTQYF

SEQ ID NO: 366085 - protein, 15 aa, Homo sapiens
  CDR3 for alpha chain variable domain of TCR clone 183043 (TRAV23/DV6, TRAJ18)
CAARYRGSTLGRLYF

SEQ ID NO: 366086 - protein, 15 aa, Homo sapiens
  CDR3 for beta chain variable domain of TCR clone 183043 (TRBV7-2, TRBJ2-1)
CASTHGTGIYNEQFF

SEQ ID NO: 366087 - protein, 13 aa, Homo sapiens
  CDR3 for alpha chain variable domain of TCR clone 183044 (TRAV3, TRAJ43)
CAVKARNNNDMRF

SEQ ID NO: 366088 - protein, 16 aa, Homo sapiens
  CDR3 for beta chain variable domain of TCR clone 183044 (TRBV7-9, TRBJ2-3)
CASRFSVAGGTDTQYF

SEQ ID NO: 366089 - protein, 13 aa, Homo sapiens
  CDR3 for alpha chain variable domain of TCR clone 183045 (TRAV13-1, TRAJ6)
CARGSGGSYIPKF

SEQ ID NO: 366090 - protein, 17 aa, Homo sapiens
  CDR3 for beta chain variable domain of TCR clone 183045 (TRBV7-8, TRBJ2-1)
CASSPPTGTLAYNEQFF

SEQ ID NO: 366091 - protein, 14 aa, Homo sapiens
  CDR3 for alpha chain variable domain of TCR clone 183046 (TRAV17, TRAJ57)
CATDHQGGSEKLVF

SEQ ID NO: 366092 - protein, 15 aa, Homo sapiens
  CDR3 for beta chain variable domain of TCR clone 183046 (TRBV12-4, TRBJ1-2)
CASRLGVAGNYGYTF

SEQ ID NO: 366093 - protein, 16 aa, Homo sapiens
  CDR3 for alpha chain variable domain of TCR clone 183047 (TRAV4, TRAJ18)
CCVLLIGGSTLGRLYF

SEQ ID NO: 366094 - protein, 15 aa, Homo sapiens
  CDR3 for beta chain variable domain of TCR clone 183047 (TRBV5-6, TRBJ2-7)
CASSLPGQVFYEQYF

SEQ ID NO: 366095 - protein, 11 aa, Homo sapiens
  CDR3 for alpha chain variable domain of TCR clone 183048 (TRAV27, TRAJ40)
SLTSGTYKYIF

SEQ ID NO: 366096 - protein, 12 aa, Homo sapiens
  CDR3 for beta chain variable domain of TCR clone 183048 (TRBV18, TRBJ2-3)
CQLNHNTDTQYF

SEQ ID NO: 366097 - protein, 17 aa, Homo sapiens
  CDR3 for alpha chain variable domain of TCR clone 183049 (TRAV13-1, TRAJ31)
CAPRDRLMFGDGTQLVV

SEQ ID NO: 366098 - protein, 12 aa, Homo sapiens
  CDR3 for beta chain variable domain of TCR clone 183049 (TRBV7-9, TRBJ2-7)
CDRSLEGYEQYF

SEQ ID NO: 366099 - protein, 16 aa, Homo sapiens
  CDR3 for alpha chain variable domain of TCR clone 183050 (TRAV3, TRAJ3)
CAVRDRAKSRASKIIF

SEQ ID NO: 366100 - protein, 16 aa, Homo sapiens
  CDR3 for beta chain variable domain of TCR clone 183050 (TRBV20-1, TRBJ2-4)
CSATSLAELAKNTQYF

SEQ ID NO: 366101 - protein, 11 aa, Homo sapiens
  CDR3 for alpha chain variable domain of TCR clone 183051 (TRAV23/DV6, TRAJ36)
CAASKLGQTTS

SEQ ID NO: 366102 - protein, 13 aa, Homo sapiens
  CDR3 for beta chain variable domain of TCR clone 183051 (TRBV5-4, TRBJ1-5)
CASSLGGDQPQHF

SEQ ID NO: 366103 - protein, 13 aa, Homo sapiens
  CDR3 for alpha chain variable domain of TCR clone 183052 (TRAV20, TRAJ21)
CAVEGYNFNKFYF

SEQ ID NO: 366104 - protein, 14 aa, Homo sapiens
  CDR3 for beta chain variable domain of TCR clone 183052 (TRBV7-9, TRBJ2-1)
CASRPTGLRNEQFF

SEQ ID NO: 366105 - protein, 14 aa, Homo sapiens
  CDR3 for alpha chain variable domain of TCR clone 183053 (TRAV25, TRAJ39)
CGRPNNNAGNMLTF

SEQ ID NO: 366106 - protein, 15 aa, Homo sapiens
  CDR3 for beta chain variable domain of TCR clone 183053 (TRBV15, TRBJ1-5)
CATSRDPVSNQPQHF

SEQ ID NO: 366107 - protein, 14 aa, Homo sapiens
  CDR3 for alpha chain variable domain of TCR clone 183054 (TRAV2, TRAJ9)
CAVEYRSGGFKTIF

SEQ ID NO: 366108 - protein, 15 aa, Homo sapiens
  CDR3 for beta chain variable domain of TCR clone 183054 (TRBV28, TRBJ2-5)
CASSPPWSYQETQYF

SEQ ID NO: 366109 - protein, 13 aa, Homo sapiens
  CDR3 for alpha chain variable domain of TCR clone 183055 (TRAV21, TRAJ57)
CAVTQGGSEKLVF

SEQ ID NO: 366110 - protein, 15 aa, Homo sapiens
  CDR3 for beta chain variable domain of TCR clone 183055 (TRBV5-1, TRBJ1-1)
CDSSSTTGTNTEAFF

SEQ ID NO: 366111 - protein, 11 aa, Homo sapiens
  CDR3 for alpha chain variable domain of TCR clone 183056 (TRAV27, TRAJ45)
CAGAQEEVLTH

SEQ ID NO: 366112 - protein, 17 aa, Homo sapiens
  CDR3 for beta chain variable domain of TCR clone 183056 (TRBV11-2, TRBJ2-1)
CASSLYPPGVEYNEQFF

SEQ ID NO: 366113 - protein, 14 aa, Homo sapiens
  CDR3 for alpha chain variable domain of TCR clone 183057 (TRAV12-2, TRAJ13)
CAVKRTGGYQKVTF

SEQ ID NO: 366114 - protein, 15 aa, Homo sapiens
  CDR3 for beta chain variable domain of TCR clone 183057 (TRBV20-1, TRBJ2-7)
CSARDRVSGMDEQYF

SEQ ID NO: 366115 - protein, 16 aa, Homo sapiens
  CDR3 for alpha chain variable domain of TCR clone 183058 (TRAV3, TRAJ10)
CAVRDVRAGGGNKLTF

SEQ ID NO: 366116 - protein, 13 aa, Homo sapiens
  CDR3 for beta chain variable domain of TCR clone 183058 (TRBV4-2, TRBJ1-1)
CASSQAGNTEAFF

SEQ ID NO: 366117 - protein, 13 aa, Homo sapiens
  CDR3 for alpha chain variable domain of TCR clone 183059 (TRAV36/DV7, TRAJ29)
CCGPLSGNTPLVF

SEQ ID NO: 366118 - protein, 15 aa, Homo sapiens
  CDR3 for beta chain variable domain of TCR clone 183059 (TRBV20-1, TRBJ2-7)
CSARDRVSGMDEQYF

SEQ ID NO: 366119 - protein, 16 aa, Homo sapiens
  CDR3 for alpha chain variable domain of TCR clone 183060 (TRAV12-3, TRAJ53)
CAMSPGSGGSNYKLTF

SEQ ID NO: 366120 - protein, 13 aa, Homo sapiens
  CDR3 for beta chain variable domain of TCR clone 183060 (TRBV10-3, TRBJ2-7)
CAAKLAVNYEQYF

SEQ ID NO: 366121 - protein, 12 aa, Homo sapiens
  CDR3 for alpha chain variable domain of TCR clone 183061 (TRAV13-1, TRAJ49)
YAAPNTGNQFYF

SEQ ID NO: 366122 - protein, 17 aa, Homo sapiens
  CDR3 for beta chain variable domain of TCR clone 183061 (TRBV25-1, TRBJ2-7)
CASSDARVVFSSYEQYF

SEQ ID NO: 366123 - protein, 11 aa, Homo sapiens
  CDR3 for alpha chain variable domain of TCR clone 183062 (TRAV13-2, TRAJ23)
CAESPRVKLIF

SEQ ID NO: 366124 - protein, 18 aa, Homo sapiens
  CDR3 for beta chain variable domain of TCR clone 183062 (TRBV6-5, TRBJ1-1)
CASSYSAPGGTGGTEAFF

SEQ ID NO: 366125 - protein, 16 aa, Homo sapiens
  CDR3 for alpha chain variable domain of TCR clone 183063 (TRAV27, TRAJ52)
CAGAPAGGTSYGKLTF

SEQ ID NO: 366126 - protein, 15 aa, Homo sapiens
  CDR3 for beta chain variable domain of TCR clone 183063 (TRBV7-9, TRBJ1-5)
CASSQGHQPNQPQHF

SEQ ID NO: 366127 - protein, 14 aa, Homo sapiens
  CDR3 for alpha chain variable domain of TCR clone 183064 (TRAV26-1, TRAJ45)
CIEVTGGGADGLTL

SEQ ID NO: 366128 - protein, 19 aa, Homo sapiens
  CDR3 for beta chain variable domain of TCR clone 183064 (TRBV19, TRBJ2-2)
CASTRPGLAGGRVTGELFF

SEQ ID NO: 366129 - protein, 15 aa, Homo sapiens
  CDR3 for alpha chain variable domain of TCR clone 183065 (TRAV8-3, TRAJ45)
CASSYSGGGAGGLTF

SEQ ID NO: 366130 - protein, 16 aa, Homo sapiens
  CDR3 for beta chain variable domain of TCR clone 183065 (TRBV7-9, TRBJ2-2)
CASSGFGGANTGELFF

SEQ ID NO: 366131 - protein, 14 aa, Homo sapiens
  CDR3 for alpha chain variable domain of TCR clone 183066 (TRAV12-3, TRAJ57)
CAMSAWGGSEKLVF

SEQ ID NO: 366132 - protein, 14 aa, Homo sapiens
  CDR3 for beta chain variable domain of TCR clone 183066 (TRBV18, TRBJ2-5)
CASSPGVSQDTQYF

SEQ ID NO: 366133 - protein, 16 aa, Homo sapiens
  CDR3 for alpha chain variable domain of TCR clone 183067 (TRAV21, TRAJ52)
CAVSDAGCTSYGKLTF

SEQ ID NO: 366134 - protein, 13 aa, Homo sapiens
  CDR3 for beta chain variable domain of TCR clone 183067 (TRBV7-3, TRBJ2-5)
CASSFRGSQTQYF

SEQ ID NO: 366135 - protein, 17 aa, Homo sapiens
  CDR3 for alpha chain variable domain of TCR clone 183068 (TRAV26-1, TRAJ53)
CIVRVDDSGGSNYKLTF

SEQ ID NO: 366136 - protein, 12 aa, Homo sapiens
  CDR3 for beta chain variable domain of TCR clone 183068 (TRBV5-7, TRBJ2-7)
CASSVQGGEQYF

SEQ ID NO: 366137 - protein, 13 aa, Homo sapiens
  CDR3 for alpha chain variable domain of TCR clone 183069 (TRAV29/DV5, TRAJ31)
CAASRNNNARLLF

SEQ ID NO: 366138 - protein, 12 aa, Homo sapiens
  CDR3 for beta chain variable domain of TCR clone 183069 (TRBV14, TRBJ2-7)
CASSLYKDEQYF

SEQ ID NO: 366139 - protein, 14 aa, Homo sapiens
  CDR3 for alpha chain variable domain of TCR clone 183070 (TRAV1-2, TRAJ16)
CAVNRFSDGQKLLF

SEQ ID NO: 366140 - protein, 16 aa, Homo sapiens
  CDR3 for beta chain variable domain of TCR clone 183070 (TRBV20-1, TRBJ1-4)
CSAPGQGLLTNEKLVF

SEQ ID NO: 366141 - protein, 10 aa, Homo sapiens
  CDR3 for alpha chain variable domain of TCR clone 183071 (TRAV8-4, TRAJ39)
CAVAGNMLTF

SEQ ID NO: 366142 - protein, 16 aa, Homo sapiens
  CDR3 for beta chain variable domain of TCR clone 183071 (TRBV6-1, TRBJ2-5)
CASSETLDRGAETQYF

SEQ ID NO: 366143 - protein, 13 aa, Homo sapiens
  CDR3 for alpha chain variable domain of TCR clone 183072 (TRAV17, TRAJ9)
CATDYTGGFKTIF

SEQ ID NO: 366144 - protein, 17 aa, Homo sapiens
  CDR3 for beta chain variable domain of TCR clone 183072 (TRBV4-3, TRBJ2-2)
CASSQDTSARSPGELFF

SEQ ID NO: 366145 - protein, 16 aa, Homo sapiens
  CDR3 for alpha chain variable domain of TCR clone 183073 (TRAV12-1, TRAJ53)
CAMSPGSGGSNYKLTF

SEQ ID NO: 366146 - protein, 13 aa, Homo sapiens
  CDR3 for beta chain variable domain of TCR clone 183073 (TRBV12-5, TRBJ2-3)
CASQNRGTDTQYF

SEQ ID NO: 366147 - protein, 17 aa, Homo sapiens
  CDR3 for alpha chain variable domain of TCR clone 183074 (TRAV3, TRAJ38)
CAVRDCLNAGNNRKLIW

SEQ ID NO: 366148 - protein, 15 aa, Homo sapiens
  CDR3 for beta chain variable domain of TCR clone 183074 (TRBV7-9, TRBJ1-6)
CASSSPGRGNSPLHF

SEQ ID NO: 366149 - protein, 14 aa, Homo sapiens
  CDR3 for alpha chain variable domain of TCR clone 183075 (TRAV17, TRAJ12)
CATDEKDSSYKLIF

SEQ ID NO: 366150 - protein, 18 aa, Homo sapiens
  CDR3 for beta chain variable domain of TCR clone 183075 (TRBV25-1, TRBJ1-2)
CASSGLQNGQGLIFGDTF

SEQ ID NO: 366151 - protein, 16 aa, Homo sapiens
  CDR3 for alpha chain variable domain of TCR clone 183076 (TRAV30, TRAJ24)
CGTEIVDADSWGKFQF

SEQ ID NO: 366152 - protein, 13 aa, Homo sapiens
  CDR3 for beta chain variable domain of TCR clone 183076 (TRBV10-3, TRBJ2-7)
CASKLAMNYEQYF

SEQ ID NO: 366153 - protein, 18 aa, Homo sapiens
  CDR3 for alpha chain variable domain of TCR clone 183077 (TRAV13-1, TRAJ52)
CAASKRSAGGTSYGKLTF

SEQ ID NO: 366154 - protein, 15 aa, Homo sapiens
  CDR3 for beta chain variable domain of TCR clone 183077 (TRBV5-1, TRBJ2-2)
CASSSQGGNTGELFF

SEQ ID NO: 366155 - protein, 11 aa, Homo sapiens
  CDR3 for alpha chain variable domain of TCR clone 183078 (TRAV1-1, TRAJ23)
GAVRQGGKLIF

SEQ ID NO: 366156 - protein, 13 aa, Homo sapiens
  CDR3 for beta chain variable domain of TCR clone 183078 (TRBV12-5, TRBJ2-3)
CASGDRQSDTQYF

SEQ ID NO: 366157 - protein, 17 aa, Homo sapiens
  CDR3 for alpha chain variable domain of TCR clone 183079 (TRAV13-1, TRAJ31)
CAPRDRLMFGYGTQLVV

SEQ ID NO: 366158 - protein, 15 aa, Homo sapiens
  CDR3 for beta chain variable domain of TCR clone 183079 (TRBV4-1, TRBJ1-4)
CASSDTGGTNEKLFF

SEQ ID NO: 366159 - protein, 17 aa, Homo sapiens
  CDR3 for alpha chain variable domain of TCR clone 183080 (TRAV38-1, TRAJ28)
CALMKPTSGAGSFQLTF

SEQ ID NO: 366160 - protein, 15 aa, Homo sapiens
  CDR3 for beta chain variable domain of TCR clone 183080 (TRBV5-1, TRBJ2-4)
CASSLGGGGSYIQYF

SEQ ID NO: 366161 - protein, 12 aa, Homo sapiens
  CDR3 for alpha chain variable domain of TCR clone 183081 (TRAV12-3, TRAJ17)
CAMTLTGNKLTF

SEQ ID NO: 366162 - protein, 16 aa, Homo sapiens
  CDR3 for beta chain variable domain of TCR clone 183081 (TRBV4-2, TRBJ2-7)
CASSQDRGTSSYEQYF

SEQ ID NO: 366163 - protein, 15 aa, Homo sapiens
  CDR3 for alpha chain variable domain of TCR clone 183082 (TRAV30, TRAJ32)
CGTEILGGATNKLIF

SEQ ID NO: 366164 - protein, 16 aa, Homo sapiens
  CDR3 for beta chain variable domain of TCR clone 183082 (TRBV19, TRBJ2-2)
CASRSPGTGATGELFF

SEQ ID NO: 366165 - protein, 11 aa, Homo sapiens
  CDR3 for alpha chain variable domain of TCR clone 183083 (TRAV3, TRAJ21)
CAVGNFNKFYF

SEQ ID NO: 366166 - protein, 14 aa, Homo sapiens
  CDR3 for beta chain variable domain of TCR clone 183083 (TRBV20-1, TRBJ2-2)
CSAPDTAKTGELFF

SEQ ID NO: 366167 - protein, 12 aa, Homo sapiens
  CDR3 for alpha chain variable domain of TCR clone 183084 (TRAV12-2, TRAJ52)
IGRGTSYGKLTF

SEQ ID NO: 366168 - protein, 13 aa, Homo sapiens
  CDR3 for beta chain variable domain of TCR clone 183084 (TRBV15, TRBJ2-7)
CATSTTGHYEQYF

SEQ ID NO: 366169 - protein, 13 aa, Homo sapiens
  CDR3 for alpha chain variable domain of TCR clone 183085 (TRAV3, TRAJ27)
CAVRPLGAGKSTF

SEQ ID NO: 366170 - protein, 16 aa, Homo sapiens
  CDR3 for beta chain variable domain of TCR clone 183085 (TRBV7-3, TRBJ2-5)
CASSLMGGASQETQYF

SEQ ID NO: 366171 - protein, 14 aa, Homo sapiens
  CDR3 for alpha chain variable domain of TCR clone 183086 (TRAV26-1, TRAJ45)
CIEVKGGGADGPTF

SEQ ID NO: 366172 - protein, 13 aa, Homo sapiens
  CDR3 for beta chain variable domain of TCR clone 183086 (TRBV7-7, TRBJ1-2)
CASSLVADYGYTF

SEQ ID NO: 366173 - protein, 17 aa, Homo sapiens
  CDR3 for alpha chain variable domain of TCR clone 183087 (TRAV3, TRAJ6)
CAVRDGPRAVGSYIPTF

SEQ ID NO: 366174 - protein, 14 aa, Homo sapiens
  CDR3 for beta chain variable domain of TCR clone 183087 (TRBV7-2, TRBJ2-7)
CASIPKTSFYEQYF

SEQ ID NO: 366175 - protein, 12 aa, Homo sapiens
  CDR3 for alpha chain variable domain of TCR clone 183088 (TRAV2, TRAJ31)
CAVEDNNARLMF

SEQ ID NO: 366176 - protein, 16 aa, Homo sapiens
  CDR3 for beta chain variable domain of TCR clone 183088 (TRBV10-3, TRBJ2-1)
CAISGVGDGGGGEQCF

SEQ ID NO: 366177 - protein, 12 aa, Homo sapiens
  CDR3 for alpha chain variable domain of TCR clone 183089 (TRAV13-1, TRAJ20)
FAASMGDYKLSF

SEQ ID NO: 366178 - protein, 15 aa, Homo sapiens
  CDR3 for beta chain variable domain of TCR clone 183089 (TRBV11-3, TRBJ2-3)
CASNGGLDSTDTQYF

SEQ ID NO: 366179 - protein, 14 aa, Homo sapiens
  CDR3 for alpha chain variable domain of TCR clone 183090 (TRAV2, TRAJ37)
CAADFTSNTGKLIF

SEQ ID NO: 366180 - protein, 15 aa, Homo sapiens
  CDR3 for beta chain variable domain of TCR clone 183090 (TRBV7-9, TRBJ1-4)
CASSRTGGFNEKLFF

SEQ ID NO: 366181 - protein, 15 aa, Homo sapiens
  CDR3 for alpha chain variable domain of TCR clone 183091 (TRAV23/DV6, TRAJ13)
CAAWPGGGGYQKATF

SEQ ID NO: 366182 - protein, 14 aa, Homo sapiens
  CDR3 for beta chain variable domain of TCR clone 183091 (TRBV7-2, TRBJ1-1)
CASSFLTGTTEAFF

SEQ ID NO: 366183 - protein, 15 aa, Homo sapiens
  CDR3 for alpha chain variable domain of TCR clone 183092 (TRAV3, TRAJ3)
CAVRDMSSSASTIIF

SEQ ID NO: 366184 - protein, 14 aa, Homo sapiens
  CDR3 for beta chain variable domain of TCR clone 183092 (TRBV6-6, TRBJ2-7)
CASSIAGGVDEQYF

SEQ ID NO: 366185 - protein, 18 aa, Homo sapiens
  CDR3 for alpha chain variable domain of TCR clone 183093 (TRAV1-1, TRAJ42)
CAVSPSAFYGGSKGNLIF

SEQ ID NO: 366186 - protein, 18 aa, Homo sapiens
  CDR3 for beta chain variable domain of TCR clone 183093 (TRBV11-2, TRBJ2-3)
CASSLGGASRGAPNTQYF

SEQ ID NO: 366187 - protein, 19 aa, Homo sapiens
  CDR3 for alpha chain variable domain of TCR clone 183094 (TRAV1-1, TRAJ13)
CLLLLRCEGESGGYQKVTF

SEQ ID NO: 366188 - protein, 13 aa, Homo sapiens
  CDR3 for beta chain variable domain of TCR clone 183094 (TRBV29-1, TRBJ2-1)
CSVEGGRVNEQFV

SEQ ID NO: 366189 - protein, 17 aa, Homo sapiens
  CDR3 for alpha chain variable domain of TCR clone 183095 (TRAV26-2, TRAJ42)
CILRDVGYGGSQGNLIF

SEQ ID NO: 366190 - protein, 13 aa, Homo sapiens
  CDR3 for beta chain variable domain of TCR clone 183095 (TRBV7-3, TRBJ1-1)
CASSQDWGAEAFF

SEQ ID NO: 366191 - protein, 18 aa, Homo sapiens
  CDR3 for alpha chain variable domain of TCR clone 183096 (TRAV38-2/DV8, TRAJ42)
CAYRSADLTGGSQGNLIF

SEQ ID NO: 366192 - protein, 12 aa, Homo sapiens
  CDR3 for beta chain variable domain of TCR clone 183096 (TRBV11-2, TRBJ2-2)
CASSLGGRELFF

SEQ ID NO: 366193 - protein, 14 aa, Homo sapiens
  CDR3 for alpha chain variable domain of TCR clone 183097 (TRAV12-3, TRAJ10)
SHLPLTGGGNKLTF

SEQ ID NO: 366194 - protein, 15 aa, Homo sapiens
  CDR3 for beta chain variable domain of TCR clone 183097 (TRBV25-1, TRBJ2-4)
CASSETESAKNIHYF

SEQ ID NO: 366195 - protein, 15 aa, Homo sapiens
  CDR3 for alpha chain variable domain of TCR clone 183098 (TRAV27, TRAJ37)
CAGIHGSSNTGKLIF

SEQ ID NO: 366196 - protein, 13 aa, Homo sapiens
  CDR3 for beta chain variable domain of TCR clone 183098 (TRBV19, TRBJ2-1)
CASSIRNSWEQFF

SEQ ID NO: 366197 - protein, 14 aa, Homo sapiens
  CDR3 for alpha chain variable domain of TCR clone 183099 (TRAV3, TRAJ8)
CAVSLNTGFQKLVF

SEQ ID NO: 366198 - protein, 14 aa, Homo sapiens
  CDR3 for beta chain variable domain of TCR clone 183099 (TRBV6-6, TRBJ1-5)
CARVDSGFNQPQHF

SEQ ID NO: 366199 - protein, 14 aa, Homo sapiens
  CDR3 for alpha chain variable domain of TCR clone 183100 (TRAV1-2, TRAJ16)
CAVNRFSDGQKQLF

SEQ ID NO: 366200 - protein, 14 aa, Homo sapiens
  CDR3 for beta chain variable domain of TCR clone 183100 (TRBV7-2, TRBJ2-5)
CASSPLGQSETQYF

SEQ ID NO: 366201 - protein, 13 aa, Homo sapiens
  CDR3 for alpha chain variable domain of TCR clone 183101 (TRAV3, TRAJ21)
CAVREQDFNKFYF

SEQ ID NO: 366202 - protein, 17 aa, Homo sapiens
  CDR3 for beta chain variable domain of TCR clone 183101 (TRBV7-8, TRBJ2-6)
CASSAGTGGAGANVLTF

SEQ ID NO: 366203 - protein, 14 aa, Homo sapiens
  CDR3 for alpha chain variable domain of TCR clone 183102 (TRAV12-1, TRAJ46)
CVVTAKSSGDKLTF

SEQ ID NO: 366204 - protein, 17 aa, Homo sapiens
  CDR3 for beta chain variable domain of TCR clone 183102 (TRBV4-1, TRBJ2-3)
CASSKDPAGGPLDTQYF

SEQ ID NO: 366205 - protein, 14 aa, Homo sapiens
  CDR3 for alpha chain variable domain of TCR clone 183103 (TRAV12-2, TRAJ13)
CAVKKTGGYQKVTF

SEQ ID NO: 366206 - protein, 14 aa, Homo sapiens
  CDR3 for beta chain variable domain of TCR clone 183103 (TRBV6-1, TRBJ1-3)
CSSVQGGGGNTIYF

SEQ ID NO: 366207 - protein, 12 aa, Homo sapiens
  CDR3 for alpha chain variable domain of TCR clone 183104 (TRAV35, TRAJ12)
CAGMDSSYKLIF

SEQ ID NO: 366208 - protein, 14 aa, Homo sapiens
  CDR3 for beta chain variable domain of TCR clone 183104 (TRBV12-5, TRBJ2-5)
YASGSRTHQETQYF

SEQ ID NO: 366209 - protein, 13 aa, Homo sapiens
  CDR3 for alpha chain variable domain of TCR clone 183105 (TRAV2, TRAJ10)
CAVETGVGNKLTF

SEQ ID NO: 366210 - protein, 14 aa, Homo sapiens
  CDR3 for beta chain variable domain of TCR clone 183105 (TRBV20-1, TRBJ2-3)
CSAGGRRGTDTQYF

SEQ ID NO: 366211 - protein, 15 aa, Homo sapiens
  CDR3 for alpha chain variable domain of TCR clone 183106 (TRAV27, TRAJ38)
CAGRFDAGNNRKLIW

SEQ ID NO: 366212 - protein, 23 aa, Homo sapiens
  CDR3 for beta chain variable domain of TCR clone 183106 (TRBV20-1, TRBJ2-1)
QCSRPRRVYGTSGALPPGNEQFF

SEQ ID NO: 366213 - protein, 14 aa, Homo sapiens
  CDR3 for alpha chain variable domain of TCR clone 183107 (TRAV12-2, TRAJ17)
CAVLFKAAGNKLPF

SEQ ID NO: 366214 - protein, 14 aa, Homo sapiens
  CDR3 for beta chain variable domain of TCR clone 183107 (TRBV12-5, TRBJ2-5)
CASGSRTNQETQYF

SEQ ID NO: 366215 - protein, 15 aa, Homo sapiens
  CDR3 for alpha chain variable domain of TCR clone 183108 (TRAV27, TRAJ38)
CAARRNAGNNRKRIW

SEQ ID NO: 366216 - protein, 17 aa, Homo sapiens
  CDR3 for beta chain variable domain of TCR clone 183108 (TRBV13, TRBJ2-3)
CASSLSRVAGGRNTQYF

SEQ ID NO: 366217 - protein, 16 aa, Homo sapiens
  CDR3 for alpha chain variable domain of TCR clone 183109 (TRAV16, TRAJ52)
CALSAAGGTSYGKLSF

SEQ ID NO: 366218 - protein, 13 aa, Homo sapiens
  CDR3 for beta chain variable domain of TCR clone 183109 (TRBV3-1, TRBJ1-5)
CASSQFGDQPQHF

SEQ ID NO: 366219 - protein, 14 aa, Homo sapiens
  CDR3 for alpha chain variable domain of TCR clone 183110 (TRAV12-1, TRAJ45)
CVVNVGGGADGLTF

SEQ ID NO: 366220 - protein, 16 aa, Homo sapiens
  CDR3 for beta chain variable domain of TCR clone 183110 (TRBV7-3, TRBJ2-1)
CASSLEGYRSYNEQFF

SEQ ID NO: 366221 - protein, 15 aa, Homo sapiens
  CDR3 for alpha chain variable domain of TCR clone 183111 (TRAV8-4, TRAJ15)
CAVSDPGQAGTALIF

SEQ ID NO: 366222 - protein, 14 aa, Homo sapiens
  CDR3 for beta chain variable domain of TCR clone 183111 (TRBV7-2, TRBJ1-3)
CASSLSRSGNTIYF

SEQ ID NO: 366223 - protein, 13 aa, Homo sapiens
  CDR3 for alpha chain variable domain of TCR clone 183112 (TRAV36/DV7, TRAJ53)
CCLSGGSNYKLTF

SEQ ID NO: 366224 - protein, 15 aa, Homo sapiens
  CDR3 for beta chain variable domain of TCR clone 183112 (TRBV2, TRBJ1-4)
CASSERRGTNEKLFF

SEQ ID NO: 366225 - protein, 14 aa, Homo sapiens
  CDR3 for alpha chain variable domain of TCR clone 183113 (TRAV2, TRAJ9)
CAVENRSGGFKTIF

SEQ ID NO: 366226 - protein, 15 aa, Homo sapiens
  CDR3 for beta chain variable domain of TCR clone 183113 (TRBV20-1, TRBJ2-7)
CSARDRVSGMDEQYF

SEQ ID NO: 366227 - protein, 10 aa, Homo sapiens
  CDR3 for alpha chain variable domain of TCR clone 183114 (TRAV3, TRAJ20)
CAVRPSVTTP

SEQ ID NO: 366228 - protein, 15 aa, Homo sapiens
  CDR3 for beta chain variable domain of TCR clone 183114 (TRBV6-5, TRBJ2-1)
CASSYDAGAGNEQFF

SEQ ID NO: 366229 - protein, 10 aa, Homo sapiens
  CDR3 for alpha chain variable domain of TCR clone 183115 (TRAV26-1, TRAJ22)
CIVSLNFFWF

SEQ ID NO: 366230 - protein, 17 aa, Homo sapiens
  CDR3 for beta chain variable domain of TCR clone 183115 (TRBV7-3, TRBJ2-3)
CASSRGLAGGVPDTQYF

SEQ ID NO: 366231 - protein, 15 aa, Homo sapiens
  CDR3 for alpha chain variable domain of TCR clone 183116 (TRAV17, TRAJ57)
CATGPSPGGSEKLVL

SEQ ID NO: 366232 - protein, 14 aa, Homo sapiens
  CDR3 for beta chain variable domain of TCR clone 183116 (TRBV12-5, TRBJ2-5)
CASGSRTHQETQYF

SEQ ID NO: 366233 - protein, 14 aa, Homo sapiens
  CDR3 for alpha chain variable domain of TCR clone 183117 (TRAV12-2, TRAJ40)
CAVKIPSGTYKYIF

SEQ ID NO: 366234 - protein, 13 aa, Homo sapiens
  CDR3 for beta chain variable domain of TCR clone 183117 (TRBV12-4, TRBJ1-1)
CASSPGTGFEDFF

SEQ ID NO: 366235 - protein, 14 aa, Homo sapiens
  CDR3 for alpha chain variable domain of TCR clone 183118 (TRAV1-2, TRAJ16)
CAVNRVSDGRKLLF

SEQ ID NO: 366236 - protein, 15 aa, Homo sapiens
  CDR3 for beta chain variable domain of TCR clone 183118 (TRBV7-9, TRBJ1-6)
CASSSPGRGNSPLHF

SEQ ID NO: 366237 - protein, 13 aa, Homo sapiens
  CDR3 for alpha chain variable domain of TCR clone 183119 (TRAV26-1, TRAJ33)
CIVRVEGNYQLSL

SEQ ID NO: 366238 - protein, 16 aa, Homo sapiens
  CDR3 for beta chain variable domain of TCR clone 183119 (TRBV15, TRBJ2-7)
CATSRDRGRRRGEQYF

SEQ ID NO: 366239 - protein, 14 aa, Homo sapiens
  CDR3 for alpha chain variable domain of TCR clone 183120 (TRAV23/DV6, TRAJ13)
CAAMYSGCYQKVTF

SEQ ID NO: 366240 - protein, 14 aa, Homo sapiens
  CDR3 for beta chain variable domain of TCR clone 183120 (TRBV7-9, TRBJ2-1)
CASSPRDSLYEQFF

SEQ ID NO: 366241 - protein, 15 aa, Homo sapiens
  CDR3 for alpha chain variable domain of TCR clone 183121 (TRAV21, TRAJ40)
CDVRPQTSGTYKYIF

SEQ ID NO: 366242 - protein, 13 aa, Homo sapiens
  CDR3 for beta chain variable domain of TCR clone 183121 (TRBV7-2, TRBJ2-2)
CASSSVRAGELFF

SEQ ID NO: 366243 - protein, 18 aa, Homo sapiens
  CDR3 for alpha chain variable domain of TCR clone 183122 (TRAV13-1, TRAJ52)
CAAKNPNAGGTSYGKLTF

SEQ ID NO: 366244 - protein, 11 aa, Homo sapiens
  CDR3 for beta chain variable domain of TCR clone 183122 (TRBV19, TRBJ2-5)
CASSIKETQYF

SEQ ID NO: 366245 - protein, 15 aa, Homo sapiens
  CDR3 for alpha chain variable domain of TCR clone 183123 (TRAV26-1, TRAJ42)
CIVRVKGGSQGNLIY

SEQ ID NO: 366246 - protein, 14 aa, Homo sapiens
  CDR3 for beta chain variable domain of TCR clone 183123 (TRBV19, TRBJ2-2)
CATTGHANTGELFF

SEQ ID NO: 366247 - protein, 15 aa, Homo sapiens
  CDR3 for alpha chain variable domain of TCR clone 183124 (TRAV27, TRAJ38)
CAARRNAGNNRKLLW

SEQ ID NO: 366248 - protein, 13 aa, Homo sapiens
  CDR3 for beta chain variable domain of TCR clone 183124 (TRBV12-5, TRBJ2-3)
CASGDRQSDTRYF

SEQ ID NO: 366249 - protein, 13 aa, Homo sapiens
  CDR3 for alpha chain variable domain of TCR clone 183125 (TRAV3, TRAJ43)
CAVKARNNNDMRF

SEQ ID NO: 366250 - protein, 16 aa, Homo sapiens
  CDR3 for beta chain variable domain of TCR clone 183125 (TRBV7-9, TRBJ2-3)
CASSFSVAGGTDTQDF

SEQ ID NO: 366251 - protein, 11 aa, Homo sapiens
  CDR3 for alpha chain variable domain of TCR clone 183126 (TRAV1-1, TRAJ16)
CAAGYGQKLLF

SEQ ID NO: 366252 - protein, 15 aa, Homo sapiens
  CDR3 for beta chain variable domain of TCR clone 183126 (TRBV28, TRBJ1-2)
CASIPQGSDDYGYTF

SEQ ID NO: 366253 - protein, 12 aa, Homo sapiens
  CDR3 for alpha chain variable domain of TCR clone 183127 (TRAV2, TRAJ34)
CAVERNTDKLIF

SEQ ID NO: 366254 - protein, 23 aa, Homo sapiens
  CDR3 for beta chain variable domain of TCR clone 183127 (TRBV7-2, TRBJ2-5)
RRTRPGISVPAASLGGGEETQYF

SEQ ID NO: 366255 - protein, 11 aa, Homo sapiens
  CDR3 for alpha chain variable domain of TCR clone 183128 (TRAV3, TRAJ21)
CAVGNFNKFYF

SEQ ID NO: 366256 - protein, 14 aa, Homo sapiens
  CDR3 for beta chain variable domain of TCR clone 183128 (TRBV29-1, TRBJ2-2)
CSGRGSGNTGELFC

SEQ ID NO: 366257 - protein, 12 aa, Homo sapiens
  CDR3 for alpha chain variable domain of TCR clone 183129 (TRAV8-3, TRAJ26)
CAGDNYGQNFVF

SEQ ID NO: 366258 - protein, 15 aa, Homo sapiens
  CDR3 for beta chain variable domain of TCR clone 183129 (TRBV2, TRBJ2-7)
CASSEGLARSYEQYF

SEQ ID NO: 366259 - protein, 11 aa, Homo sapiens
  CDR3 for alpha chain variable domain of TCR clone 183130 (TRAV2, TRAJ13)
CASGGYQKATF

SEQ ID NO: 366260 - protein, 14 aa, Homo sapiens
  CDR3 for beta chain variable domain of TCR clone 183130 (TRBV5-4, TRBJ1-1)
CASSLDSRRDEAFF

SEQ ID NO: 366261 - protein, 15 aa, Homo sapiens
  CDR3 for alpha chain variable domain of TCR clone 183131 (TRAV29/DV5, TRAJ24)
CAASGATESWGKFQF

SEQ ID NO: 366262 - protein, 14 aa, Homo sapiens
  CDR3 for beta chain variable domain of TCR clone 183131 (TRBV7-2, TRBJ1-1)
CASSFLTGTTEAFF

SEQ ID NO: 366263 - protein, 12 aa, Homo sapiens
  CDR3 for alpha chain variable domain of TCR clone 183132 (TRAV23/DV6, TRAJ49)
CAATPGQVCRSF

SEQ ID NO: 366264 - protein, 14 aa, Homo sapiens
  CDR3 for beta chain variable domain of TCR clone 183132 (TRBV7-3, TRBJ1-1)
CASSLKGGNTEAFF

SEQ ID NO: 366265 - protein, 11 aa, Homo sapiens
  CDR3 for alpha chain variable domain of TCR clone 183133 (TRAV2, TRAJ21)
CAVFNFNKFYF

SEQ ID NO: 366266 - protein, 15 aa, Homo sapiens
  CDR3 for beta chain variable domain of TCR clone 183133 (TRBV11-3, TRBJ2-2)
CASSYFSTGTGELFF

SEQ ID NO: 366267 - protein, 14 aa, Homo sapiens
  CDR3 for alpha chain variable domain of TCR clone 183134 (TRAV1-2, TRAJ8)
CAVREDPGFQKLVF

SEQ ID NO: 366268 - protein, 13 aa, Homo sapiens
  CDR3 for beta chain variable domain of TCR clone 183134 (TRBV27, TRBJ1-1)
CASSLSIGAEAFF

SEQ ID NO: 366269 - protein, 13 aa, Homo sapiens
  CDR3 for alpha chain variable domain of TCR clone 183135 (TRAV2, TRAJ16)
CAVESGDGQKLLF

SEQ ID NO: 366270 - protein, 14 aa, Homo sapiens
  CDR3 for beta chain variable domain of TCR clone 183135 (TRBV6-3, TRBJ2-5)
CASSYSLREKNQYF

SEQ ID NO: 366271 - protein, 14 aa, Homo sapiens
  CDR3 for alpha chain variable domain of TCR clone 183136 (TRAV26-1, TRAJ34)
CIVRVAYKPDKLIF

SEQ ID NO: 366272 - protein, 15 aa, Homo sapiens
  CDR3 for beta chain variable domain of TCR clone 183136 (TRBV20-1, TRBJ2-7)
CSARVPAAYFYEQYF

SEQ ID NO: 366273 - protein, 14 aa, Homo sapiens
  CDR3 for alpha chain variable domain of TCR clone 183137 (TRAV1-2, TRAJ33)
CAVRAPVSNYQLIW

SEQ ID NO: 366274 - protein, 14 aa, Homo sapiens
  CDR3 for beta chain variable domain of TCR clone 183137 (TRBV11-3, TRBJ1-6)
CASSFSGGDSPLHF

SEQ ID NO: 366275 - protein, 13 aa, Homo sapiens
  CDR3 for alpha chain variable domain of TCR clone 183138 (TRAV2, TRAJ35)
CAPRVGFGNVLHC

SEQ ID NO: 366276 - protein, 15 aa, Homo sapiens
  CDR3 for beta chain variable domain of TCR clone 183138 (TRBV6-3, TRBJ2-7)
CASSSPGTVFYEQYF

SEQ ID NO: 366277 - protein, 23 aa, Homo sapiens
  CDR3 for alpha chain variable domain of TCR clone 183139 (TRAV26-1, TRAJ38)
CIADNAGNNHIQNPDPTAYQLRD

SEQ ID NO: 366278 - protein, 12 aa, Homo sapiens
  CDR3 for beta chain variable domain of TCR clone 183139 (TRBV11-2, TRBJ2-2)
CASSLGGGELFF

SEQ ID NO: 366279 - protein, 11 aa, Homo sapiens
  CDR3 for alpha chain variable domain of TCR clone 183140 (TRAV27, TRAJ45)
CAGAQEEVLTD

SEQ ID NO: 366280 - protein, 17 aa, Homo sapiens
  CDR3 for beta chain variable domain of TCR clone 183140 (TRBV11-2, TRBJ2-1)
CASSLYPPGVEYNEKFF

SEQ ID NO: 366281 - protein, 17 aa, Homo sapiens
  CDR3 for alpha chain variable domain of TCR clone 183141 (TRAV3, TRAJ12)
CAVREIGGMDSSYKLIF

SEQ ID NO: 366282 - protein, 14 aa, Homo sapiens
  CDR3 for beta chain variable domain of TCR clone 183141 (TRBV7-8, TRBJ1-5)
CASSLGAFNQPQHF

SEQ ID NO: 366283 - protein, 15 aa, Homo sapiens
  CDR3 for alpha chain variable domain of TCR clone 183142 (TRAV8-3, TRAJ27)
CAVGPSKTNAGKSTF

SEQ ID NO: 366284 - protein, 16 aa, Homo sapiens
  CDR3 for beta chain variable domain of TCR clone 183142 (TRBV7-3, TRBJ2-3)
CASSRTASLSTDTQYF

SEQ ID NO: 366285 - protein, 15 aa, Homo sapiens
  CDR3 for alpha chain variable domain of TCR clone 183143 (TRAV12-3, TRAJ6)
CAMSATTGGSDIPTF

SEQ ID NO: 366286 - protein, 13 aa, Homo sapiens
  CDR3 for beta chain variable domain of TCR clone 183143 (TRBV7-9, TRBJ1-2)
CASSLKQNYGYTF

SEQ ID NO: 366287 - protein, 10 aa, Homo sapiens
  CDR3 for alpha chain variable domain of TCR clone 183144 (TRAV2, TRAJ34)
CAVVNNKLIF

SEQ ID NO: 366288 - protein, 20 aa, Homo sapiens
  CDR3 for beta chain variable domain of TCR clone 183144 (TRBV19, TRBJ2-1)
CASSISRTVTSTRLNNEQFF

SEQ ID NO: 366289 - protein, 15 aa, Homo sapiens
  CDR3 for alpha chain variable domain of TCR clone 183145 (TRAV8-3, TRAJ41)
CAVGSNSNSGYVLNF

SEQ ID NO: 366290 - protein, 17 aa, Homo sapiens
  CDR3 for beta chain variable domain of TCR clone 183145 (TRBV25-1, TRBJ2-1)
CASSAYGQGRGVYDQFF

SEQ ID NO: 366291 - protein, 15 aa, Homo sapiens
  CDR3 for alpha chain variable domain of TCR clone 183146 (TRAV3, TRAJ5)
CAVRDLDTGRRALTF

SEQ ID NO: 366292 - protein, 16 aa, Homo sapiens
  CDR3 for beta chain variable domain of TCR clone 183146 (TRBV27, TRBJ2-2)
CASSFRGLVRTGELFF

SEQ ID NO: 366293 - protein, 14 aa, Homo sapiens
  CDR3 for alpha chain variable domain of TCR clone 183147 (TRAV1-2, TRAJ8)
CAVREDTGFQKLVF

SEQ ID NO: 366294 - protein, 16 aa, Homo sapiens
  CDR3 for beta chain variable domain of TCR clone 183147 (TRBV7-9, TRBJ2-1)
CASSDVAGCSYNEQFF

SEQ ID NO: 366295 - protein, 15 aa, Homo sapiens
  CDR3 for alpha chain variable domain of TCR clone 183148 (TRAV17, TRAJ16)
CATALRFSDGQKLLF

SEQ ID NO: 366296 - protein, 15 aa, Homo sapiens
  CDR3 for beta chain variable domain of TCR clone 183148 (TRBV20-1, TRBJ1-1)
CSASRGVTGYTEAFF

SEQ ID NO: 366297 - protein, 18 aa, Homo sapiens
  CDR3 for alpha chain variable domain of TCR clone 183149 (TRAV26-2, TRAJ54)
CILRDVEVGIQGAQKLVF

SEQ ID NO: 366298 - protein, 14 aa, Homo sapiens
  CDR3 for beta chain variable domain of TCR clone 183149 (TRBV5-1, TRBJ2-3)
CASSDRGSTDTQYF

SEQ ID NO: 366299 - protein, 15 aa, Homo sapiens
  CDR3 for alpha chain variable domain of TCR clone 183150 (TRAV2, TRAJ11)
CAVGGRNSGYSTLTF

SEQ ID NO: 366300 - protein, 12 aa, Homo sapiens
  CDR3 for beta chain variable domain of TCR clone 183150 (TRBV5-4, TRBJ2-7)
CASSVEAYEQYF

SEQ ID NO: 366301 - protein, 14 aa, Homo sapiens
  CDR3 for alpha chain variable domain of TCR clone 183151 (TRAV8-3, TRAJ37)
CAGGSSGNTGKLIF

SEQ ID NO: 366302 - protein, 15 aa, Homo sapiens
  CDR3 for beta chain variable domain of TCR clone 183151 (TRBV11-2, TRBJ1-3)
CASSLSPLVRDTIYF

SEQ ID NO: 366303 - protein, 14 aa, Homo sapiens
  CDR3 for alpha chain variable domain of TCR clone 183152 (TRAV12-3, TRAJ42)
CAMNYGGSQGNLIF

SEQ ID NO: 366304 - protein, 13 aa, Homo sapiens
  CDR3 for beta chain variable domain of TCR clone 183152 (TRBV7-2, TRBJ2-2)
CASSSVRAGELFF

SEQ ID NO: 366305 - protein, 13 aa, Homo sapiens
  CDR3 for alpha chain variable domain of TCR clone 183153 (TRAV12-2, TRAJ42)
CAVKRGSQGNLIF

SEQ ID NO: 366306 - protein, 14 aa, Homo sapiens
  CDR3 for beta chain variable domain of TCR clone 183153 (TRBV27, TRBJ2-2)
CASSLGAATGELFF

SEQ ID NO: 366307 - protein, 16 aa, Homo sapiens
  CDR3 for alpha chain variable domain of TCR clone 183154 (TRAV26-1, TRAJ36)
CIVRVSYQAGANNLFF

SEQ ID NO: 366308 - protein, 13 aa, Homo sapiens
  CDR3 for beta chain variable domain of TCR clone 183154 (TRBV5-5, TRBJ1-5)
CASSLGIGGDQHF

SEQ ID NO: 366309 - protein, 12 aa, Homo sapiens
  CDR3 for alpha chain variable domain of TCR clone 183155 (TRAV13-1, TRAJ21)
CAEFFNFNKFYF

SEQ ID NO: 366310 - protein, 14 aa, Homo sapiens
  CDR3 for beta chain variable domain of TCR clone 183155 (TRBV4-1, TRBJ2-7)
CASRLTSGSYEQYF

SEQ ID NO: 366311 - protein, 11 aa, Homo sapiens
  CDR3 for alpha chain variable domain of TCR clone 183156 (TRAV21, TRAJ31)
CAVGNNARLMF

SEQ ID NO: 366312 - protein, 15 aa, Homo sapiens
  CDR3 for beta chain variable domain of TCR clone 183156 (TRBV7-2, TRBJ2-7)
CASSLAVGQVYEQYF

SEQ ID NO: 366313 - protein, 13 aa, Homo sapiens
  CDR3 for alpha chain variable domain of TCR clone 183157 (TRAV8-3, TRAJ36)
CAVGATGANNLFF

SEQ ID NO: 366314 - protein, 16 aa, Homo sapiens
  CDR3 for beta chain variable domain of TCR clone 183157 (TRBV7-9, TRBJ2-1)
CASSDVAGGSYNEQFF

SEQ ID NO: 366315 - protein, 15 aa, Homo sapiens
  CDR3 for alpha chain variable domain of TCR clone 183158 (TRAV13-2, TRAJ8)
CAPGGRNTGFQKLVF

SEQ ID NO: 366316 - protein, 13 aa, Homo sapiens
  CDR3 for beta chain variable domain of TCR clone 183158 (TRBV7-2, TRBJ2-7)
CASSSPSGSEQYF

SEQ ID NO: 366317 - protein, 14 aa, Homo sapiens
  CDR3 for alpha chain variable domain of TCR clone 183159 (TRAV13-1, TRAJ10)
CAASSTGRGNKLTF

SEQ ID NO: 366318 - protein, 15 aa, Homo sapiens
  CDR3 for beta chain variable domain of TCR clone 183159 (TRBV11-3, TRBJ1-3)
CASSLFGPSGNTIYF

SEQ ID NO: 366319 - protein, 14 aa, Homo sapiens
  CDR3 for alpha chain variable domain of TCR clone 183160 (TRAV8-4, TRAJ9)
CAVRINTGGFKTIF

SEQ ID NO: 366320 - protein, 15 aa, Homo sapiens
  CDR3 for beta chain variable domain of TCR clone 183160 (TRBV12-4, TRBJ2-2)
CASSFKSANTGELFF

SEQ ID NO: 366321 - protein, 13 aa, Homo sapiens
  CDR3 for alpha chain variable domain of TCR clone 183161 (TRAV21, TRAJ57)
CAVTQGGSEKLVF

SEQ ID NO: 366322 - protein, 16 aa, Homo sapiens
  CDR3 for beta chain variable domain of TCR clone 183161 (TRBV19, TRBJ2-3)
CASSPGAASRTDTQYF

SEQ ID NO: 366323 - protein, 13 aa, Homo sapiens
  CDR3 for alpha chain variable domain of TCR clone 183162 (TRAV21, TRAJ27)
CAACPGNAGKSTF

SEQ ID NO: 366324 - protein, 13 aa, Homo sapiens
  CDR3 for beta chain variable domain of TCR clone 183162 (TRBV18, TRBJ2-7)
CASQSGGGYEQYF

SEQ ID NO: 366325 - protein, 15 aa, Homo sapiens
  CDR3 for alpha chain variable domain of TCR clone 183163 (TRAV34, TRAJ38)
CGADFTPGNNRKLIW

SEQ ID NO: 366326 - protein, 16 aa, Homo sapiens
  CDR3 for beta chain variable domain of TCR clone 183163 (TRBV12-5, TRBJ2-5)
CAGGPRTNGSQETQYF

SEQ ID NO: 366327 - protein, 16 aa, Homo sapiens
  CDR3 for alpha chain variable domain of TCR clone 183164 (TRAV30, TRAJ24)
CGTEIVYADSWGKFQF

SEQ ID NO: 366328 - protein, 15 aa, Homo sapiens
  CDR3 for beta chain variable domain of TCR clone 183164 (TRBV19, TRBJ1-1)
CASTSGQIQNTEAFF

SEQ ID NO: 366329 - protein, 17 aa, Homo sapiens
  CDR3 for alpha chain variable domain of TCR clone 183165 (TRAV3, TRAJ42)
CAVRDRDYGGSQGNLIF

SEQ ID NO: 366330 - protein, 14 aa, Homo sapiens
  CDR3 for beta chain variable domain of TCR clone 183165 (TRBV12-5, TRBJ2-5)
CASGSRTHQETQFF

SEQ ID NO: 366331 - protein, 13 aa, Homo sapiens
  CDR3 for alpha chain variable domain of TCR clone 183166 (TRAV27, TRAJ49)
CAPRPYTGNQFYF

SEQ ID NO: 366332 - protein, 13 aa, Homo sapiens
  CDR3 for beta chain variable domain of TCR clone 183166 (TRBV10-3, TRBJ1-2)
CAISERDSYGYTF

SEQ ID NO: 366333 - protein, 14 aa, Homo sapiens
  CDR3 for alpha chain variable domain of TCR clone 183167 (TRAV12-1, TRAJ28)
CVSHSGAGSYQLTF

SEQ ID NO: 366334 - protein, 14 aa, Homo sapiens
  CDR3 for beta chain variable domain of TCR clone 183167 (TRBV19, TRBJ2-1)
CASPTFVLSGEQVF

SEQ ID NO: 366335 - protein, 14 aa, Homo sapiens
  CDR3 for alpha chain variable domain of TCR clone 183168 (TRAV8-3, TRAJ4)
CAVGAAGGYNKLIF

SEQ ID NO: 366336 - protein, 12 aa, Homo sapiens
  CDR3 for beta chain variable domain of TCR clone 183168 (TRBV7-9, TRBJ2-7)
CASSIKREEQYF

SEQ ID NO: 366337 - protein, 12 aa, Homo sapiens
  CDR3 for alpha chain variable domain of TCR clone 183169 (TRAV12-1, TRAJ31)
CVVSLLRARLMF

SEQ ID NO: 366338 - protein, 16 aa, Homo sapiens
  CDR3 for beta chain variable domain of TCR clone 183169 (TRBV7-3, TRBJ2-1)
CASSKPLAGGYNEQFF

SEQ ID NO: 366339 - protein, 13 aa, Homo sapiens
  CDR3 for alpha chain variable domain of TCR clone 183170 (TRAV12-2, TRAJ50)
CAVIVTSYEKVIF

SEQ ID NO: 366340 - protein, 14 aa, Homo sapiens
  CDR3 for beta chain variable domain of TCR clone 183170 (TRBV9, TRBJ2-1)
CASSVDPRGKEQFF

SEQ ID NO: 366341 - protein, 15 aa, Homo sapiens
  CDR3 for alpha chain variable domain of TCR clone 183171 (TRAV38-2/DV8, TRAJ57)
CAYGRVFGKGTKLTV

SEQ ID NO: 366342 - protein, 16 aa, Homo sapiens
  CDR3 for beta chain variable domain of TCR clone 183171 (TRBV5-1, TRBJ1-1)
CAGSSGGNSLNTEAFF

SEQ ID NO: 366343 - protein, 15 aa, Homo sapiens
  CDR3 for alpha chain variable domain of TCR clone 183172 (TRAV12-1, TRAJ40)
CVVNMHFPGTYKYIF

SEQ ID NO: 366344 - protein, 13 aa, Homo sapiens
  CDR3 for beta chain variable domain of TCR clone 183172 (TRBV20-1, TRBJ1-2)
CSARGQTLEGYTF

SEQ ID NO: 366345 - protein, 11 aa, Homo sapiens
  CDR3 for alpha chain variable domain of TCR clone 183173 (TRAV21, TRAJ48)
CAVDGNEKLTF

SEQ ID NO: 366346 - protein, 16 aa, Homo sapiens
  CDR3 for beta chain variable domain of TCR clone 183173 (TRBV19, TRBJ2-1)
CASSSKGTMSYNEQFF

SEQ ID NO: 366347 - protein, 11 aa, Homo sapiens
  CDR3 for alpha chain variable domain of TCR clone 183174 (TRAV13-1, TRAJ6)
CATLGSYIPTF

SEQ ID NO: 366348 - protein, 13 aa, Homo sapiens
  CDR3 for beta chain variable domain of TCR clone 183174 (TRBV10-3, TRBJ2-7)
CAPKLAVNYEQYF

SEQ ID NO: 366349 - protein, 15 aa, Homo sapiens
  CDR3 for alpha chain variable domain of TCR clone 183175 (TRAV17, TRAJ35)
CATAFVIGCGNVLHC

SEQ ID NO: 366350 - protein, 15 aa, Homo sapiens
  CDR3 for beta chain variable domain of TCR clone 183175 (TRBV7-9, TRBJ2-7)
CASSLALAEAYEQYF

SEQ ID NO: 366351 - protein, 13 aa, Homo sapiens
  CDR3 for alpha chain variable domain of TCR clone 183176 (TRAV3, TRAJ4)
CAVRDGGYNNLIL

SEQ ID NO: 366352 - protein, 15 aa, Homo sapiens
  CDR3 for beta chain variable domain of TCR clone 183176 (TRBV5-1, TRBJ2-1)
CASSPPRAPYNEQFF

SEQ ID NO: 366353 - protein, 14 aa, Homo sapiens
  CDR3 for alpha chain variable domain of TCR clone 183177 (TRAV1-2, TRAJ16)
CAVNRFSDGQKLLF

SEQ ID NO: 366354 - protein, 15 aa, Homo sapiens
  CDR3 for beta chain variable domain of TCR clone 183177 (TRBV7-2, TRBJ2-2)
CASSTRTGYTGALFF

SEQ ID NO: 366355 - protein, 18 aa, Homo sapiens
  CDR3 for alpha chain variable domain of TCR clone 183178 (TRAV12-3, TRAJ52)
CAMSVGGAGGTSYGKLAF

SEQ ID NO: 366356 - protein, 14 aa, Homo sapiens
  CDR3 for beta chain variable domain of TCR clone 183178 (TRBV19, TRBJ2-7)
CASSRGPNSYEQYF

SEQ ID NO: 366357 - protein, 13 aa, Homo sapiens
  CDR3 for alpha chain variable domain of TCR clone 183179 (TRAV8-6, TRAJ34)
CAVSDQGTDKLIF

SEQ ID NO: 366358 - protein, 17 aa, Homo sapiens
  CDR3 for beta chain variable domain of TCR clone 183179 (TRBV11-2, TRBJ2-1)
CASSLYPPGVEYNEQFF

SEQ ID NO: 366359 - protein, 14 aa, Homo sapiens
  CDR3 for alpha chain variable domain of TCR clone 183180 (TRAV1-2, TRAJ16)
CAANRFSDGQKLPF

SEQ ID NO: 366360 - protein, 13 aa, Homo sapiens
  CDR3 for beta chain variable domain of TCR clone 183180 (TRBV19, TRBJ1-2)
CASSVPGQDGYTF

SEQ ID NO: 366361 - protein, 13 aa, Homo sapiens
  CDR3 for alpha chain variable domain of TCR clone 183181 (TRAV16, TRAJ26)
CITVLCLGQNFVF

SEQ ID NO: 366362 - protein, 13 aa, Homo sapiens
  CDR3 for beta chain variable domain of TCR clone 183181 (TRBV11-2, TRBJ1-2)
CASSLDSPSGYTF

SEQ ID NO: 366363 - protein, 22 aa, Homo sapiens
  CDR3 for alpha chain variable domain of TCR clone 183182 (TRAV13-1, TRAJ35)
CAESKGGFGNVLHCGSGNPVIV

SEQ ID NO: 366364 - protein, 13 aa, Homo sapiens
  CDR3 for beta chain variable domain of TCR clone 183182 (TRBV7-3, TRBJ1-1)
CASSHDWGAEAFF

SEQ ID NO: 366365 - protein, 14 aa, Homo sapiens
  CDR3 for alpha chain variable domain of TCR clone 183183 (TRAV3, TRAJ17)
CAVRDAAAGNKLTF

SEQ ID NO: 366366 - protein, 13 aa, Homo sapiens
  CDR3 for beta chain variable domain of TCR clone 183183 (TRBV19, TRBJ1-2)
CASSVPGQDGYIF

SEQ ID NO: 366367 - protein, 14 aa, Homo sapiens
  CDR3 for alpha chain variable domain of TCR clone 183184 (TRAV25, TRAJ22)
CAVRSSGSARQLTF

SEQ ID NO: 366368 - protein, 19 aa, Homo sapiens
  CDR3 for beta chain variable domain of TCR clone 183184 (TRBV25-1, TRBJ2-2)
CAILVYRVDRGRKTGELFL

SEQ ID NO: 366369 - protein, 14 aa, Homo sapiens
  CDR3 for alpha chain variable domain of TCR clone 183185 (TRAV12-1, TRAJ54)
CVVSIYQGAKKLVF

SEQ ID NO: 366370 - protein, 16 aa, Homo sapiens
  CDR3 for beta chain variable domain of TCR clone 183185 (TRBV13, TRBJ2-2)
CASSPRTGEHTGELFF

SEQ ID NO: 366371 - protein, 15 aa, Homo sapiens
  CDR3 for alpha chain variable domain of TCR clone 183186 (TRAV13-1, TRAJ5)
CAASPRGHGQVSTYF

SEQ ID NO: 366372 - protein, 17 aa, Homo sapiens
  CDR3 for beta chain variable domain of TCR clone 183186 (TRBV3-1, TRBJ2-2)
CASSQFRDKVDTGELFF

SEQ ID NO: 366373 - protein, 14 aa, Homo sapiens
  CDR3 for alpha chain variable domain of TCR clone 183187 (TRAV1-2, TRAJ8)
CAVGENTGFQKLVF

SEQ ID NO: 366374 - protein, 16 aa, Homo sapiens
  CDR3 for beta chain variable domain of TCR clone 183187 (TRBV5-7, TRBJ2-5)
CASTLAPAGGRETQYF

SEQ ID NO: 366375 - protein, 12 aa, Homo sapiens
  CDR3 for alpha chain variable domain of TCR clone 183188 (TRAV9-2, TRAJ36)
CALKKGANNLFF

SEQ ID NO: 366376 - protein, 17 aa, Homo sapiens
  CDR3 for beta chain variable domain of TCR clone 183188 (TRBV20-1, TRBJ1-5)
CSARGIPQGVGNQPQHF

SEQ ID NO: 366377 - protein, 13 aa, Homo sapiens
  CDR3 for alpha chain variable domain of TCR clone 183189 (TRAV17, TRAJ22)
CDGRRGSARQLTF

SEQ ID NO: 366378 - protein, 14 aa, Homo sapiens
  CDR3 for beta chain variable domain of TCR clone 183189 (TRBV19, TRBJ1-1)
CASSITGWETEAFF

SEQ ID NO: 366379 - protein, 14 aa, Homo sapiens
  CDR3 for alpha chain variable domain of TCR clone 183190 (TRAV1-2, TRAJ16)
CAVRSASDDQKLLF

SEQ ID NO: 366380 - protein, 17 aa, Homo sapiens
  CDR3 for beta chain variable domain of TCR clone 183190 (TRBV7-3, TRBJ2-3)
CASSLMKRMRGADTQYF

SEQ ID NO: 366381 - protein, 16 aa, Homo sapiens
  CDR3 for alpha chain variable domain of TCR clone 183191 (TRAV30, TRAJ24)
CGTEIVDADSWGKFQF

SEQ ID NO: 366382 - protein, 17 aa, Homo sapiens
  CDR3 for beta chain variable domain of TCR clone 183191 (TRBV6-1, TRBJ1-2)
CASIGTHSQRGNYGYTF

SEQ ID NO: 366383 - protein, 17 aa, Homo sapiens
  CDR3 for alpha chain variable domain of TCR clone 183192 (TRAV3, TRAJ12)
CAVRDGGRMDSSYKLIF

SEQ ID NO: 366384 - protein, 14 aa, Homo sapiens
  CDR3 for beta chain variable domain of TCR clone 183192 (TRBV6-5, TRBJ2-7)
CASSSGVPPYEQYF

SEQ ID NO: 366385 - protein, 10 aa, Homo sapiens
  CDR3 for alpha chain variable domain of TCR clone 183193 (TRAV12-3, TRAJ49)
CAMNDDQFYF

SEQ ID NO: 366386 - protein, 15 aa, Homo sapiens
  CDR3 for beta chain variable domain of TCR clone 183193 (TRBV10-3, TRBJ2-5)
CAIRPGDVDLGTQYF

SEQ ID NO: 366387 - protein, 14 aa, Homo sapiens
  CDR3 for alpha chain variable domain of TCR clone 183194 (TRAV17, TRAJ56)
CATVPAGANSKLTF

SEQ ID NO: 366388 - protein, 14 aa, Homo sapiens
  CDR3 for beta chain variable domain of TCR clone 183194 (TRBV19, TRBJ2-1)
CASPTFVLSGEQFF

SEQ ID NO: 366389 - protein, 12 aa, Homo sapiens
  CDR3 for alpha chain variable domain of TCR clone 183195 (TRAV13-1, TRAJ21)
CAAKEGFNKFYF

SEQ ID NO: 366390 - protein, 16 aa, Homo sapiens
  CDR3 for beta chain variable domain of TCR clone 183195 (TRBV18, TRBJ1-5)
CASSPRTGGGNQPQHF

SEQ ID NO: 366391 - protein, 13 aa, Homo sapiens
  CDR3 for alpha chain variable domain of TCR clone 183196 (TRAV21, TRAJ32)
CAVSGGATNKLIF

SEQ ID NO: 366392 - protein, 13 aa, Homo sapiens
  CDR3 for beta chain variable domain of TCR clone 183196 (TRBV23-1, TRBJ2-1)
QQSMAPAHNEQFF

SEQ ID NO: 366393 - protein, 13 aa, Homo sapiens
  CDR3 for alpha chain variable domain of TCR clone 183197 (TRAV3, TRAJ20)
CAVRSLNDYKLSF

SEQ ID NO: 366394 - protein, 14 aa, Homo sapiens
  CDR3 for beta chain variable domain of TCR clone 183197 (TRBV11-2, TRBJ2-7)
CASSLGAGAYEQYF

SEQ ID NO: 366395 - protein, 14 aa, Homo sapiens
  CDR3 for alpha chain variable domain of TCR clone 183198 (TRAV26-1, TRAJ39)
CIVRGSRAGNMLTF

SEQ ID NO: 366396 - protein, 15 aa, Homo sapiens
  CDR3 for beta chain variable domain of TCR clone 183198 (TRBV7-9, TRBJ1-5)
CASSQGHHPKQPQHF

SEQ ID NO: 366397 - protein, 11 aa, Homo sapiens
  CDR3 for alpha chain variable domain of TCR clone 183199 (TRAV21, TRAJ31)
CAVRNNARLMF

SEQ ID NO: 366398 - protein, 15 aa, Homo sapiens
  CDR3 for beta chain variable domain of TCR clone 183199 (TRBV29-1, TRBJ2-6)
CSVGDRGSGANVLTF

SEQ ID NO: 366399 - protein, 11 aa, Homo sapiens
  CDR3 for alpha chain variable domain of TCR clone 183200 (TRAV13-2, TRAJ15)
CSHQAGTALIF

SEQ ID NO: 366400 - protein, 13 aa, Homo sapiens
  CDR3 for beta chain variable domain of TCR clone 183200 (TRBV7-9, TRBJ1-2)
CDSSLKQNYGYTF

SEQ ID NO: 366401 - protein, 13 aa, Homo sapiens
  CDR3 for alpha chain variable domain of TCR clone 183201 (TRAV13-1, TRAJ43)
CAASKNNNNDMRF

SEQ ID NO: 366402 - protein, 18 aa, Homo sapiens
  CDR3 for beta chain variable domain of TCR clone 183201 (TRBV11-2, TRBJ2-3)
CASSLGGASRGAPNTQYF

SEQ ID NO: 366403 - protein, 12 aa, Homo sapiens
  CDR3 for alpha chain variable domain of TCR clone 183202 (TRAV2, TRAJ9)
CAVGAGGFKTIF

SEQ ID NO: 366404 - protein, 15 aa, Homo sapiens
  CDR3 for beta chain variable domain of TCR clone 183202 (TRBV6-3, TRBJ2-2)
CASSFLATLTGELFF

SEQ ID NO: 366405 - protein, 12 aa, Homo sapiens
  CDR3 for alpha chain variable domain of TCR clone 183203 (TRAV13-1, TRAJ15)
CAANQAGTALIF

SEQ ID NO: 366406 - protein, 13 aa, Homo sapiens
  CDR3 for beta chain variable domain of TCR clone 183203 (TRBV19, TRBJ1-2)
CASSVPGQDGYTF

SEQ ID NO: 366407 - protein, 14 aa, Homo sapiens
  CDR3 for alpha chain variable domain of TCR clone 183204 (TRAV12-2, TRAJ44)
CAVNPAGTASKLTF

SEQ ID NO: 366408 - protein, 13 aa, Homo sapiens
  CDR3 for beta chain variable domain of TCR clone 183204 (TRBV20-1, TRBJ1-6)
CSAPVEVGSPLHF

SEQ ID NO: 366409 - protein, 15 aa, Homo sapiens
  CDR3 for alpha chain variable domain of TCR clone 183205 (TRAV13-1, TRAJ5)
CAASKADTGRRALPF

SEQ ID NO: 366410 - protein, 16 aa, Homo sapiens
  CDR3 for beta chain variable domain of TCR clone 183205 (TRBV7-2, TRBJ2-1)
CASSLGRTSGDNEQFF

SEQ ID NO: 366411 - protein, 14 aa, Homo sapiens
  CDR3 for alpha chain variable domain of TCR clone 183206 (TRAV1-2, TRAJ16)
WSVNRFSDGQKLLF

SEQ ID NO: 366412 - protein, 16 aa, Homo sapiens
  CDR3 for beta chain variable domain of TCR clone 183206 (TRBV29-1, TRBJ2-7)
CSVEVVGTSGSYEQYF

SEQ ID NO: 366413 - protein, 12 aa, Homo sapiens
  CDR3 for alpha chain variable domain of TCR clone 183207 (TRAV17, TRAJ57)
CATDGGAEKLVF

SEQ ID NO: 366414 - protein, 12 aa, Homo sapiens
  CDR3 for beta chain variable domain of TCR clone 183207 (TRBV12-4, TRBJ1-2)
CASSFIWLRLRF

SEQ ID NO: 366415 - protein, 13 aa, Homo sapiens
  CDR3 for alpha chain variable domain of TCR clone 183208 (TRAV12-1, TRAJ22)
CVVYFGSARQLTF

SEQ ID NO: 366416 - protein, 16 aa, Homo sapiens
  CDR3 for beta chain variable domain of TCR clone 183208 (TRBV5-1, TRBJ2-1)
CASSLADIESYNEQFF

SEQ ID NO: 366417 - protein, 16 aa, Homo sapiens
  CDR3 for alpha chain variable domain of TCR clone 183209 (TRAV3, TRAJ10)
CAVRDMRAGGGNKLTF

SEQ ID NO: 366418 - protein, 15 aa, Homo sapiens
  CDR3 for beta chain variable domain of TCR clone 183209 (TRBV6-3, TRBJ2-7)
CASSSSGTVFYEQYF

SEQ ID NO: 366419 - protein, 11 aa, Homo sapiens
  CDR3 for alpha chain variable domain of TCR clone 183210 (TRAV3, TRAJ21)
CAVGNFNKFYF

SEQ ID NO: 366420 - protein, 17 aa, Homo sapiens
  CDR3 for beta chain variable domain of TCR clone 183210 (TRBV20-1, TRBJ2-7)
CSATRAGGVAGVEEQYF

SEQ ID NO: 366421 - protein, 14 aa, Homo sapiens
  CDR3 for alpha chain variable domain of TCR clone 183211 (TRAV12-2, TRAJ13)
CAVKKTGGYQKVTF

SEQ ID NO: 366422 - protein, 16 aa, Homo sapiens
  CDR3 for beta chain variable domain of TCR clone 183211 (TRBV9, TRBJ1-2)
CASSVEENVSPYGYTF

SEQ ID NO: 366423 - protein, 15 aa, Homo sapiens
  CDR3 for alpha chain variable domain of TCR clone 183212 (TRAV3, TRAJ5)
CAVRDLDTGRRALSF

SEQ ID NO: 366424 - protein, 13 aa, Homo sapiens
  CDR3 for beta chain variable domain of TCR clone 183212 (TRBV20-1, TRBJ2-5)
CSARDSKQATQYF

SEQ ID NO: 366425 - protein, 15 aa, Homo sapiens
  CDR3 for alpha chain variable domain of TCR clone 183213 (TRAV3, TRAJ40)
CAVRDGPGGTCKYIF

SEQ ID NO: 366426 - protein, 16 aa, Homo sapiens
  CDR3 for beta chain variable domain of TCR clone 183213 (TRBV5-1, TRBJ1-1)
CASSSGGNSLNTEAFF

SEQ ID NO: 366427 - protein, 14 aa, Homo sapiens
  CDR3 for alpha chain variable domain of TCR clone 183214 (TRAV1-2, TRAJ8)
CAVREDTGFQKLVF

SEQ ID NO: 366428 - protein, 15 aa, Homo sapiens
  CDR3 for beta chain variable domain of TCR clone 183214 (TRBV11-3, TRBJ2-1)
CASSLGDSSHNEQFL

SEQ ID NO: 366429 - protein, 15 aa, Homo sapiens
  CDR3 for alpha chain variable domain of TCR clone 183215 (TRAV27, TRAJ38)
CAVRFNAGNNRKLIW

SEQ ID NO: 366430 - protein, 13 aa, Homo sapiens
  CDR3 for beta chain variable domain of TCR clone 183215 (TRBV12-5, TRBJ2-3)
CASQNRGTDTQYF

SEQ ID NO: 366431 - protein, 14 aa, Homo sapiens
  CDR3 for alpha chain variable domain of TCR clone 183216 (TRAV8-3, TRAJ13)
CAVGARGGYQKVTF

SEQ ID NO: 366432 - protein, 16 aa, Homo sapiens
  CDR3 for beta chain variable domain of TCR clone 183216 (TRBV27, TRBJ2-7)
CASSLGSGTGTYEQYF

SEQ ID NO: 366433 - protein, 15 aa, Homo sapiens
  CDR3 for alpha chain variable domain of TCR clone 183217 (TRAV17, TRAJ17)
CATDASIIRRQQANF

SEQ ID NO: 366434 - protein, 16 aa, Homo sapiens
  CDR3 for beta chain variable domain of TCR clone 183217 (TRBV19, TRBJ2-1)
CASSKAGPSSYNEQFF

SEQ ID NO: 366435 - protein, 16 aa, Homo sapiens
  CDR3 for alpha chain variable domain of TCR clone 183218 (TRAV4, TRAJ22)
CLVGDLYSGSARQLTF

SEQ ID NO: 366436 - protein, 15 aa, Homo sapiens
  CDR3 for beta chain variable domain of TCR clone 183218 (TRBV20-1, TRBJ2-7)
CSARVPAAYFYEQYF

SEQ ID NO: 366437 - protein, 13 aa, Homo sapiens
  CDR3 for alpha chain variable domain of TCR clone 183219 (TRAV14/DV4, TRAJ44)
CAMETGTASKLTF

SEQ ID NO: 366438 - protein, 15 aa, Homo sapiens
  CDR3 for beta chain variable domain of TCR clone 183219 (TRBV20-1, TRBJ1-6)
CSARAGGTFNSTLHF

SEQ ID NO: 366439 - protein, 14 aa, Homo sapiens
  CDR3 for alpha chain variable domain of TCR clone 183220 (TRAV13-2, TRAJ15)
CAENPNQEGTARIF

SEQ ID NO: 366440 - protein, 16 aa, Homo sapiens
  CDR3 for beta chain variable domain of TCR clone 183220 (TRBV12-4, TRBJ1-2)
CASSPTATGKTRGYTF

SEQ ID NO: 366441 - protein, 16 aa, Homo sapiens
  CDR3 for alpha chain variable domain of TCR clone 183221 (TRAV17, TRAJ35)
CATAEGGVGFGNVLHC

SEQ ID NO: 366442 - protein, 13 aa, Homo sapiens
  CDR3 for beta chain variable domain of TCR clone 183221 (TRBV10-3, TRBJ1-2)
CAISERDSYGYTF

SEQ ID NO: 366443 - protein, 15 aa, Homo sapiens
  CDR3 for alpha chain variable domain of TCR clone 183222 (TRAV17, TRAJ45)
CATAYSGGGADGLTF

SEQ ID NO: 366444 - protein, 14 aa, Homo sapiens
  CDR3 for beta chain variable domain of TCR clone 183222 (TRBV7-2, TRBJ2-5)
CASSPRGSSETQYF

SEQ ID NO: 366445 - protein, 19 aa, Homo sapiens
  CDR3 for alpha chain variable domain of TCR clone 183223 (TRAV4, TRAJ4)
CTTASWVTQWSGGYNKLIF

SEQ ID NO: 366446 - protein, 15 aa, Homo sapiens
  CDR3 for beta chain variable domain of TCR clone 183223 (TRBV27, TRBJ2-1)
CASSNGGGSSNEQFF

SEQ ID NO: 366447 - protein, 13 aa, Homo sapiens
  CDR3 for alpha chain variable domain of TCR clone 183224 (TRAV2, TRAJ13)
CAVEPGGYQKVTF

SEQ ID NO: 366448 - protein, 13 aa, Homo sapiens
  CDR3 for beta chain variable domain of TCR clone 183224 (TRBV29-1, TRBJ2-3)
SAALQGGADTQYF

SEQ ID NO: 366449 - protein, 13 aa, Homo sapiens
  CDR3 for alpha chain variable domain of TCR clone 183225 (TRAV2, TRAJ15)
CAVASQAGTALIF

SEQ ID NO: 366450 - protein, 15 aa, Homo sapiens
  CDR3 for beta chain variable domain of TCR clone 183225 (TRBV7-3, TRBJ2-1)
CASSLGQGPFGEQFF

SEQ ID NO: 366451 - protein, 12 aa, Homo sapiens
  CDR3 for alpha chain variable domain of TCR clone 183226 (TRAV21, TRAJ27)
CAANTNAGKSTF

SEQ ID NO: 366452 - protein, 14 aa, Homo sapiens
  CDR3 for beta chain variable domain of TCR clone 183226 (TRBV19, TRBJ2-2)
SATTGHANTGELFF

SEQ ID NO: 366453 - protein, 14 aa, Homo sapiens
  CDR3 for alpha chain variable domain of TCR clone 183227 (TRAV1-2, TRAJ8)
CAVREDTGFQKLVF

SEQ ID NO: 366454 - protein, 15 aa, Homo sapiens
  CDR3 for beta chain variable domain of TCR clone 183227 (TRBV28, TRBJ1-1)
CASTSTRGLNTEAFF

SEQ ID NO: 366455 - protein, 13 aa, Homo sapiens
  CDR3 for alpha chain variable domain of TCR clone 183228 (TRAV21, TRAJ27)
CAARPGNAGVSTF

SEQ ID NO: 366456 - protein, 14 aa, Homo sapiens
  CDR3 for beta chain variable domain of TCR clone 183228 (TRBV7-6, TRBJ2-3)
CASSLGTVTDTQYF

SEQ ID NO: 366457 - protein, 16 aa, Homo sapiens
  CDR3 for alpha chain variable domain of TCR clone 183229 (TRAV1-2, TRAJ10)
FAVRGVLTGGGNKLTF

SEQ ID NO: 366458 - protein, 15 aa, Homo sapiens
  CDR3 for beta chain variable domain of TCR clone 183229 (TRBV7-9, TRBJ1-6)
CASSSPGRGNSPLHF

SEQ ID NO: 366459 - protein, 15 aa, Homo sapiens
  CDR3 for alpha chain variable domain of TCR clone 183230 (TRAV26-1, TRAJ29)
CIVRVEGSGNTPLVF

SEQ ID NO: 366460 - protein, 15 aa, Homo sapiens
  CDR3 for beta chain variable domain of TCR clone 183230 (TRBV7-9, TRBJ1-5)
CASSQGHQTKQTQHF

SEQ ID NO: 366461 - protein, 14 aa, Homo sapiens
  CDR3 for alpha chain variable domain of TCR clone 183231 (TRAV8-6, TRAJ11)
CAVSDPSGYSTLTF

SEQ ID NO: 366462 - protein, 13 aa, Homo sapiens
  CDR3 for beta chain variable domain of TCR clone 183231 (TRBV20-1, TRBJ1-1)
CSARGGGNTEAFF

SEQ ID NO: 366463 - protein, 15 aa, Homo sapiens
  CDR3 for alpha chain variable domain of TCR clone 183232 (TRAV3, TRAJ22)
CAVRDRGGSARQLTF

SEQ ID NO: 366464 - protein, 15 aa, Homo sapiens
  CDR3 for beta chain variable domain of TCR clone 183232 (TRBV27, TRBJ2-1)
CASSNGGGSSDEQFF

SEQ ID NO: 366465 - protein, 15 aa, Homo sapiens
  CDR3 for alpha chain variable domain of TCR clone 183233 (TRAV8-2, TRAJ16)
CVVSDGFSDGQKLLC

SEQ ID NO: 366466 - protein, 14 aa, Homo sapiens
  CDR3 for beta chain variable domain of TCR clone 183233 (TRBV7-3, TRBJ1-1)
CASSLGTGYTEAFF

SEQ ID NO: 366467 - protein, 15 aa, Homo sapiens
  CDR3 for alpha chain variable domain of TCR clone 183234 (TRAV38-1, TRAJ57)
CAFMDSQGGSEKLVF

SEQ ID NO: 366468 - protein, 16 aa, Homo sapiens
  CDR3 for beta chain variable domain of TCR clone 183234 (TRBV10-3, TRBJ2-1)
CAIRGGRRGDYNEQFF

SEQ ID NO: 366469 - protein, 12 aa, Homo sapiens
  CDR3 for alpha chain variable domain of TCR clone 183235 (TRAV12-3, TRAJ40)
CAMSSGTYKYIF

SEQ ID NO: 366470 - protein, 12 aa, Homo sapiens
  CDR3 for beta chain variable domain of TCR clone 183235 (TRBV11-2, TRBJ2-2)
CASSLPTGELFF

SEQ ID NO: 366471 - protein, 14 aa, Homo sapiens
  CDR3 for alpha chain variable domain of TCR clone 183236 (TRAV8-4, TRAJ54)
CAVSEVLGAQKLVF

SEQ ID NO: 366472 - protein, 14 aa, Homo sapiens
  CDR3 for beta chain variable domain of TCR clone 183236 (TRBV4-1, TRBJ2-7)
CASSPVAGGDEQYF

SEQ ID NO: 366473 - protein, 12 aa, Homo sapiens
  CDR3 for alpha chain variable domain of TCR clone 183237 (TRAV13-2, TRAJ23)
CAERHRGGKLIF

SEQ ID NO: 366474 - protein, 15 aa, Homo sapiens
  CDR3 for beta chain variable domain of TCR clone 183237 (TRBV7-2, TRBJ2-1)
CASSLVGSSYNEQFF

SEQ ID NO: 366475 - protein, 13 aa, Homo sapiens
  CDR3 for alpha chain variable domain of TCR clone 183238 (TRAV12-3, TRAJ7)
CSMTPYGNNSLAF

SEQ ID NO: 366476 - protein, 16 aa, Homo sapiens
  CDR3 for beta chain variable domain of TCR clone 183238 (TRBV20-1, TRBJ1-4)
CSARPYGGELNEKLFF

SEQ ID NO: 366477 - protein, 15 aa, Homo sapiens
  CDR3 for alpha chain variable domain of TCR clone 183239 (TRAV8-3, TRAJ27)
CAVGPSKTNAGRSTL

SEQ ID NO: 366478 - protein, 13 aa, Homo sapiens
  CDR3 for beta chain variable domain of TCR clone 183239 (TRBV11-3, TRBJ2-7)
CASSLDKLYEQYF

SEQ ID NO: 366479 - protein, 14 aa, Homo sapiens
  CDR3 for alpha chain variable domain of TCR clone 183240 (TRAV26-1, TRAJ38)
CIADNAGNNRKLIW

SEQ ID NO: 366480 - protein, 15 aa, Homo sapiens
  CDR3 for beta chain variable domain of TCR clone 183240 (TRBV20-1, TRBJ2-7)
CSARDRVSGMHEQYF

SEQ ID NO: 366481 - protein, 13 aa, Homo sapiens
  CDR3 for alpha chain variable domain of TCR clone 183241 (TRAV12-1, TRAJ22)
CVASGGSAKQLTF

SEQ ID NO: 366482 - protein, 13 aa, Homo sapiens
  CDR3 for beta chain variable domain of TCR clone 183241 (TRBV29-1, TRBJ2-3)
SAALQGGADTQYF

SEQ ID NO: 366483 - protein, 13 aa, Homo sapiens
  CDR3 for alpha chain variable domain of TCR clone 183242 (TRAV8-6, TRAJ49)
CAVSGQPGNQFYF

SEQ ID NO: 366484 - protein, 17 aa, Homo sapiens
  CDR3 for beta chain variable domain of TCR clone 183242 (TRBV7-8, TRBJ2-6)
CASSAGTGGAGANVLTF

SEQ ID NO: 366485 - protein, 16 aa, Homo sapiens
  CDR3 for alpha chain variable domain of TCR clone 183243 (TRAV8-6, TRAJ53)
CAVRENSGGSNYKLTF

SEQ ID NO: 366486 - protein, 13 aa, Homo sapiens
  CDR3 for beta chain variable domain of TCR clone 183243 (TRBV5-4, TRBJ1-2)
CASSNRGTYGYTF

SEQ ID NO: 366487 - protein, 19 aa, Homo sapiens
  CDR3 for alpha chain variable domain of TCR clone 183244 (TRAV25, TRAJ20)
TATQTTDVGILPHYYKLSF

SEQ ID NO: 366488 - protein, 15 aa, Homo sapiens
  CDR3 for beta chain variable domain of TCR clone 183244 (TRBV6-6, TRBJ1-5)
CASSSIQGTNQPQHF

SEQ ID NO: 366489 - protein, 16 aa, Homo sapiens
  CDR3 for alpha chain variable domain of TCR clone 183245 (TRAV3, TRAJ28)
CAVREAYSGAELPTHF

SEQ ID NO: 366490 - protein, 17 aa, Homo sapiens
  CDR3 for beta chain variable domain of TCR clone 183245 (TRBV20-1, TRBJ2-1)
CSASSSGLAGSYNEQFF

SEQ ID NO: 366491 - protein, 14 aa, Homo sapiens
  CDR3 for alpha chain variable domain of TCR clone 183246 (TRAV1-2, TRAJ8)
CAVREDTGFQKLVF

SEQ ID NO: 366492 - protein, 19 aa, Homo sapiens
  CDR3 for beta chain variable domain of TCR clone 183246 (TRBV23-1, TRBJ2-3)
TVSLRHQPRSTGSTDTQYF

SEQ ID NO: 366493 - protein, 12 aa, Homo sapiens
  CDR3 for alpha chain variable domain of TCR clone 183247 (TRAV27, TRAJ35)
CAGADFGNVLRC

SEQ ID NO: 366494 - protein, 15 aa, Homo sapiens
  CDR3 for beta chain variable domain of TCR clone 183247 (TRBV19, TRBJ2-1)
CASSISSGGYNEQFF

SEQ ID NO: 366495 - protein, 14 aa, Homo sapiens
  CDR3 for alpha chain variable domain of TCR clone 183248 (TRAV8-3, TRAJ35)
CAVVPQGFGNVLHF

SEQ ID NO: 366496 - protein, 15 aa, Homo sapiens
  CDR3 for beta chain variable domain of TCR clone 183248 (TRBV6-1, TRBJ2-2)
CASSAGQRYTGELFF

SEQ ID NO: 366497 - protein, 16 aa, Homo sapiens
  CDR3 for alpha chain variable domain of TCR clone 183249 (TRAV8-3, TRAJ10)
CAVVLYSREEETNSPL

SEQ ID NO: 366498 - protein, 16 aa, Homo sapiens
  CDR3 for beta chain variable domain of TCR clone 183249 (TRBV7-2, TRBJ2-5)
CASSSKWLSGQETQYF

SEQ ID NO: 366499 - protein, 18 aa, Homo sapiens
  CDR3 for alpha chain variable domain of TCR clone 183250 (TRAV21, TRAJ52)
CAVRPSPAGGTSYGKLTF

SEQ ID NO: 366500 - protein, 13 aa, Homo sapiens
  CDR3 for beta chain variable domain of TCR clone 183250 (TRBV20-1, TRBJ2-5)
CSAREAFQETQYY

SEQ ID NO: 366501 - protein, 14 aa, Homo sapiens
  CDR3 for alpha chain variable domain of TCR clone 183251 (TRAV12-2, TRAJ45)
CAVNIGGGADGLTF

SEQ ID NO: 366502 - protein, 14 aa, Homo sapiens
  CDR3 for beta chain variable domain of TCR clone 183251 (TRBV19, TRBJ2-1)
CASTTARTGNEQFF

SEQ ID NO: 366503 - protein, 13 aa, Homo sapiens
  CDR3 for alpha chain variable domain of TCR clone 183252 (TRAV12-3, TRAJ13)
CAMSSGGYQKVTF

SEQ ID NO: 366504 - protein, 14 aa, Homo sapiens
  CDR3 for beta chain variable domain of TCR clone 183252 (TRBV11-2, TRBJ2-3)
CASSRLARTDTQYF

SEQ ID NO: 366505 - protein, 13 aa, Homo sapiens
  CDR3 for alpha chain variable domain of TCR clone 183253 (TRAV12-1, TRAJ39)
CVVAQRAGNMLTF

SEQ ID NO: 366506 - protein, 17 aa, Homo sapiens
  CDR3 for beta chain variable domain of TCR clone 183253 (TRBV4-1, TRBJ2-5)
CASSQDLTGGPIETQYF

SEQ ID NO: 366507 - protein, 16 aa, Homo sapiens
  CDR3 for alpha chain variable domain of TCR clone 183254 (TRAV1-2, TRAJ18)
CAVRLERGSTLGRLYF

SEQ ID NO: 366508 - protein, 16 aa, Homo sapiens
  CDR3 for beta chain variable domain of TCR clone 183254 (TRBV20-1, TRBJ2-7)
CSASTSGRLSSYEQYF

SEQ ID NO: 366509 - protein, 14 aa, Homo sapiens
  CDR3 for alpha chain variable domain of TCR clone 183255 (TRAV1-2, TRAJ8)
YAVREDTGFQKLVF

SEQ ID NO: 366510 - protein, 15 aa, Homo sapiens
  CDR3 for beta chain variable domain of TCR clone 183255 (TRBV6-6, TRBJ2-7)
CASSYSYGGSYEQYF

SEQ ID NO: 366511 - protein, 12 aa, Homo sapiens
  CDR3 for alpha chain variable domain of TCR clone 183256 (TRAV4, TRAJ6)
CLAPGGSYIPTF

SEQ ID NO: 366512 - protein, 14 aa, Homo sapiens
  CDR3 for beta chain variable domain of TCR clone 183256 (TRBV13, TRBJ2-3)
CASSLGGPQRPQYF

SEQ ID NO: 366513 - protein, 11 aa, Homo sapiens
  CDR3 for alpha chain variable domain of TCR clone 183257 (TRAV1-1, TRAJ23)
CAVRQGGKLIF

SEQ ID NO: 366514 - protein, 14 aa, Homo sapiens
  CDR3 for beta chain variable domain of TCR clone 183257 (TRBV12-4, TRBJ1-4)
CASRMTGRSEKLFF

SEQ ID NO: 366515 - protein, 14 aa, Homo sapiens
  CDR3 for alpha chain variable domain of TCR clone 183258 (TRAV12-2, TRAJ40)
CAVKIPSGTYKYIF

SEQ ID NO: 366516 - protein, 15 aa, Homo sapiens
  CDR3 for beta chain variable domain of TCR clone 183258 (TRBV2, TRBJ2-7)
CASSEGLARSYEQYV

SEQ ID NO: 366517 - protein, 13 aa, Homo sapiens
  CDR3 for alpha chain variable domain of TCR clone 183259 (TRAV13-2, TRAJ54)
CAENYQGAQKLVF

SEQ ID NO: 366518 - protein, 13 aa, Homo sapiens
  CDR3 for beta chain variable domain of TCR clone 183259 (TRBV18, TRBJ2-5)
CASSLQGQETQYF

SEQ ID NO: 366519 - protein, 16 aa, Homo sapiens
  CDR3 for alpha chain variable domain of TCR clone 183260 (TRAV27, TRAJ13)
CAGAKSDSGGYQKVTF

SEQ ID NO: 366520 - protein, 13 aa, Homo sapiens
  CDR3 for beta chain variable domain of TCR clone 183260 (TRBV12-4, TRBJ1-2)
CSSFVGTAYGYTF

SEQ ID NO: 366521 - protein, 13 aa, Homo sapiens
  CDR3 for alpha chain variable domain of TCR clone 183261 (TRAV27, TRAJ29)
CAGAHSGNTPLVF

SEQ ID NO: 366522 - protein, 13 aa, Homo sapiens
  CDR3 for beta chain variable domain of TCR clone 183261 (TRBV24-1, TRBJ2-1)
CATSAGPYNEQFF

SEQ ID NO: 366523 - protein, 13 aa, Homo sapiens
  CDR3 for alpha chain variable domain of TCR clone 183262 (TRAV20, TRAJ20)
CAVQNPHDDKLSF

SEQ ID NO: 366524 - protein, 12 aa, Homo sapiens
  CDR3 for beta chain variable domain of TCR clone 183262 (TRBV18, TRBJ2-7)
CASSPNNNEQYF

SEQ ID NO: 366525 - protein, 15 aa, Homo sapiens
  CDR3 for alpha chain variable domain of TCR clone 183263 (TRAV26-2, TRAJ13)
CILRDLSGGYQKVTF

SEQ ID NO: 366526 - protein, 10 aa, Homo sapiens
  CDR3 for beta chain variable domain of TCR clone 183263 (TRBV7-9, TRBJ2-5)
CASLSATQYF

SEQ ID NO: 366527 - protein, 13 aa, Homo sapiens
  CDR3 for alpha chain variable domain of TCR clone 183264 (TRAV8-3, TRAJ28)
CAVGAVGSYQLNF

SEQ ID NO: 366528 - protein, 15 aa, Homo sapiens
  CDR3 for beta chain variable domain of TCR clone 183264 (TRBV4-1, TRBJ2-5)
CASSQWDLYQETQYF

SEQ ID NO: 366529 - protein, 14 aa, Homo sapiens
  CDR3 for alpha chain variable domain of TCR clone 183265 (TRAV35, TRAJ46)
CAGPQKSSGDKLTF

SEQ ID NO: 366530 - protein, 16 aa, Homo sapiens
  CDR3 for beta chain variable domain of TCR clone 183265 (TRBV25-1, TRBJ1-1)
CASSGDRDRGRIEAFF

SEQ ID NO: 366531 - protein, 16 aa, Homo sapiens
  CDR3 for alpha chain variable domain of TCR clone 183266 (TRAV16, TRAJ4)
CALSRMFSGGYNKLIF

SEQ ID NO: 366532 - protein, 15 aa, Homo sapiens
  CDR3 for beta chain variable domain of TCR clone 183266 (TRBV7-2, TRBJ2-7)
CASSTPGLTRGEQYF

SEQ ID NO: 366533 - protein, 14 aa, Homo sapiens
  CDR3 for alpha chain variable domain of TCR clone 183267 (TRAV12-2, TRAJ40)
CAVKIPSGTYKYIF

SEQ ID NO: 366534 - protein, 14 aa, Homo sapiens
  CDR3 for beta chain variable domain of TCR clone 183267 (TRBV7-8, TRBJ2-7)
CASSPRYRVYEQYF

SEQ ID NO: 366535 - protein, 12 aa, Homo sapiens
  CDR3 for alpha chain variable domain of TCR clone 183268 (TRAV13-1, TRAJ21)
CAAKEGFNKFYF

SEQ ID NO: 366536 - protein, 17 aa, Homo sapiens
  CDR3 for beta chain variable domain of TCR clone 183268 (TRBV19, TRBJ2-7)
CASSICFYDSYPYEQYF

SEQ ID NO: 366537 - protein, 15 aa, Homo sapiens
  CDR3 for alpha chain variable domain of TCR clone 183269 (TRAV26-1, TRAJ56)
CIVRVDNGANSKMTF

SEQ ID NO: 366538 - protein, 15 aa, Homo sapiens
  CDR3 for beta chain variable domain of TCR clone 183269 (TRBV20-1, TRBJ2-7)
CSARYPTEVGHEQYF

SEQ ID NO: 366539 - protein, 14 aa, Homo sapiens
  CDR3 for alpha chain variable domain of TCR clone 183270 (TRAV12-3, TRAJ10)
SHLPLTGGGSKLTF

SEQ ID NO: 366540 - protein, 18 aa, Homo sapiens
  CDR3 for beta chain variable domain of TCR clone 183270 (TRBV7-6, TRBJ2-1)
CASSPRTSGMSSYNEQFF

SEQ ID NO: 366541 - protein, 18 aa, Homo sapiens
  CDR3 for alpha chain variable domain of TCR clone 183271 (TRAV8-3, TRAJ28)
CAVGATLGLGVTNSHSGR

SEQ ID NO: 366542 - protein, 14 aa, Homo sapiens
  CDR3 for beta chain variable domain of TCR clone 183271 (TRBV7-2, TRBJ2-1)
CASSLGVGYNEQFF

SEQ ID NO: 366543 - protein, 15 aa, Homo sapiens
  CDR3 for alpha chain variable domain of TCR clone 183272 (TRAV8-3, TRAJ45)
CASSYSGGGADGLTF

SEQ ID NO: 366544 - protein, 19 aa, Homo sapiens
  CDR3 for beta chain variable domain of TCR clone 183272 (TRBV11-1, TRBJ2-1)
CASSSLGTGGFTLDNEQFF

SEQ ID NO: 366545 - protein, 13 aa, Homo sapiens
  CDR3 for alpha chain variable domain of TCR clone 183273 (TRAV13-1, TRAJ21)
CAESIYNFNKFYF

SEQ ID NO: 366546 - protein, 12 aa, Homo sapiens
  CDR3 for beta chain variable domain of TCR clone 183273 (TRBV11-2, TRBJ2-1)
CASSPGNNEQFF

SEQ ID NO: 366547 - protein, 14 aa, Homo sapiens
  CDR3 for alpha chain variable domain of TCR clone 183274 (TRAV12-1, TRAJ42)
CVVIYGGSQGNLIF

SEQ ID NO: 366548 - protein, 15 aa, Homo sapiens
  CDR3 for beta chain variable domain of TCR clone 183274 (TRBV5-8, TRBJ2-2)
CASSLDRGATGELFF

SEQ ID NO: 366549 - protein, 13 aa, Homo sapiens
  CDR3 for alpha chain variable domain of TCR clone 183275 (TRAV12-3, TRAJ13)
CAMSSGGYQKVTF

SEQ ID NO: 366550 - protein, 13 aa, Homo sapiens
  CDR3 for beta chain variable domain of TCR clone 183275 (TRBV7-3, TRBJ1-1)
CASSRDWGAEAFF

SEQ ID NO: 366551 - protein, 13 aa, Homo sapiens
  CDR3 for alpha chain variable domain of TCR clone 183276 (TRAV20, TRAJ29)
CAVQAVGNKPLVF

SEQ ID NO: 366552 - protein, 15 aa, Homo sapiens
  CDR3 for beta chain variable domain of TCR clone 183276 (TRBV10-2, TRBJ2-5)
CTSRGSGGPQETQYF

SEQ ID NO: 366553 - protein, 14 aa, Homo sapiens
  CDR3 for alpha chain variable domain of TCR clone 183277 (TRAV26-1, TRAJ45)
CIEVTGGGADGLTF

SEQ ID NO: 366554 - protein, 16 aa, Homo sapiens
  CDR3 for beta chain variable domain of TCR clone 183277 (TRBV6-1, TRBJ2-5)
CASSETLDRGAETQYF

SEQ ID NO: 366555 - protein, 14 aa, Homo sapiens
  CDR3 for alpha chain variable domain of TCR clone 183278 (TRAV9-2, TRAJ39)
CALYIYNARNMLTF

SEQ ID NO: 366556 - protein, 13 aa, Homo sapiens
  CDR3 for beta chain variable domain of TCR clone 183278 (TRBV4-2, TRBJ1-1)
CASSQAGNTEAFF

SEQ ID NO: 366557 - protein, 14 aa, Homo sapiens
  CDR3 for alpha chain variable domain of TCR clone 183279 (TRAV26-1, TRAJ38)
CIADNAGNNRKLIW

SEQ ID NO: 366558 - protein, 13 aa, Homo sapiens
  CDR3 for beta chain variable domain of TCR clone 183279 (TRBV20-1, TRBJ1-1)
GSARGGGNTEAFS

SEQ ID NO: 366559 - protein, 15 aa, Homo sapiens
  CDR3 for alpha chain variable domain of TCR clone 183280 (TRAV30, TRAJ57)
CGPAIPQGGSEKLVF

SEQ ID NO: 366560 - protein, 13 aa, Homo sapiens
  CDR3 for beta chain variable domain of TCR clone 183280 (TRBV7-9, TRBJ1-2)
CASSPSNFWGYTF

SEQ ID NO: 366561 - protein, 13 aa, Homo sapiens
  CDR3 for alpha chain variable domain of TCR clone 183281 (TRAV8-1, TRAJ32)
CAADGGATNKLIF

SEQ ID NO: 366562 - protein, 14 aa, Homo sapiens
  CDR3 for beta chain variable domain of TCR clone 183281 (TRBV4-1, TRBJ2-2)
CASSQAVNTGELFF

SEQ ID NO: 366563 - protein, 12 aa, Homo sapiens
  CDR3 for alpha chain variable domain of TCR clone 183282 (TRAV13-1, TRAJ21)
CAAKEGLNKFYF

SEQ ID NO: 366564 - protein, 20 aa, Homo sapiens
  CDR3 for beta chain variable domain of TCR clone 183282 (TRBV7-8, TRBJ2-2)
CASSHLFPGPTIHITGELFF

SEQ ID NO: 366565 - protein, 13 aa, Homo sapiens
  CDR3 for alpha chain variable domain of TCR clone 183283 (TRAV2, TRAJ40)
CAVVTSGTYKYIF

SEQ ID NO: 366566 - protein, 13 aa, Homo sapiens
  CDR3 for beta chain variable domain of TCR clone 183283 (TRBV7-9, TRBJ2-1)
CASSLGTVNEQFF

SEQ ID NO: 366567 - protein, 14 aa, Homo sapiens
  CDR3 for alpha chain variable domain of TCR clone 183284 (TRAV8-6, TRAJ54)
CAVSPALGAQKLGF

SEQ ID NO: 366568 - protein, 15 aa, Homo sapiens
  CDR3 for beta chain variable domain of TCR clone 183284 (TRBV4-1, TRBJ1-6)
CASSAGQGYNSPLDF

SEQ ID NO: 366569 - protein, 12 aa, Homo sapiens
  CDR3 for alpha chain variable domain of TCR clone 183285 (TRAV5, TRAJ27)
CAAITNAGKSTF

SEQ ID NO: 366570 - protein, 14 aa, Homo sapiens
  CDR3 for beta chain variable domain of TCR clone 183285 (TRBV12-5, TRBJ2-5)
CASGSRTHQETQYF

SEQ ID NO: 366571 - protein, 17 aa, Homo sapiens
  CDR3 for alpha chain variable domain of TCR clone 183286 (TRAV17, TRAJ28)
CATDPRRGGAGSYPLTC

SEQ ID NO: 366572 - protein, 16 aa, Homo sapiens
  CDR3 for beta chain variable domain of TCR clone 183286 (TRBV25-1, TRBJ1-1)
CASSGDRDRGRIEAFF

SEQ ID NO: 366573 - protein, 16 aa, Homo sapiens
  CDR3 for alpha chain variable domain of TCR clone 183287 (TRAV14/DV4, TRAJ54)
CAMREGRIQGAQKLVF

SEQ ID NO: 366574 - protein, 18 aa, Homo sapiens
  CDR3 for beta chain variable domain of TCR clone 183287 (TRBV4-1, TRBJ1-5)
CASSQDPRGQGLNQPQHF

SEQ ID NO: 366575 - protein, 10 aa, Homo sapiens
  CDR3 for alpha chain variable domain of TCR clone 183288 (TRAV21, TRAJ31)
CAVDYARLMF

SEQ ID NO: 366576 - protein, 13 aa, Homo sapiens
  CDR3 for beta chain variable domain of TCR clone 183288 (TRBV4-1, TRBJ1-1)
CASSRKMNTEAFF

SEQ ID NO: 366577 - protein, 13 aa, Homo sapiens
  CDR3 for alpha chain variable domain of TCR clone 183289 (TRAV19, TRAJ57)
CALLQGGSEKLVF

SEQ ID NO: 366578 - protein, 12 aa, Homo sapiens
  CDR3 for beta chain variable domain of TCR clone 183289 (TRBV29-1, TRBJ2-3)
CSVTGGADTQYF

SEQ ID NO: 366579 - protein, 12 aa, Homo sapiens
  CDR3 for alpha chain variable domain of TCR clone 183290 (TRAV13-2, TRAJ39)
CAESRPGNMLTF

SEQ ID NO: 366580 - protein, 13 aa, Homo sapiens
  CDR3 for beta chain variable domain of TCR clone 183290 (TRBV10-3, TRBJ2-7)
CASKLAVNYEQYF

SEQ ID NO: 366581 - protein, 15 aa, Homo sapiens
  CDR3 for alpha chain variable domain of TCR clone 183291 (TRAV17, TRAJ10)
CATVLLTGGGNKLTF

SEQ ID NO: 366582 - protein, 17 aa, Homo sapiens
  CDR3 for beta chain variable domain of TCR clone 183291 (TRBV7-3, TRBJ2-3)
CASSLMKRMRGADTQYF

SEQ ID NO: 366583 - protein, 10 aa, Homo sapiens
  CDR3 for alpha chain variable domain of TCR clone 183292 (TRAV16, TRAJ22)
SAMYLRQLTF

SEQ ID NO: 366584 - protein, 14 aa, Homo sapiens
  CDR3 for beta chain variable domain of TCR clone 183292 (TRBV11-2, TRBJ2-7)
CASSLGAGAYEQYF

SEQ ID NO: 366585 - protein, 13 aa, Homo sapiens
  CDR3 for alpha chain variable domain of TCR clone 183293 (TRAV13-2, TRAJ48)
CAEMDFGNEKLTF

SEQ ID NO: 366586 - protein, 22 aa, Homo sapiens
  CDR3 for beta chain variable domain of TCR clone 183293 (TRBV7-3, TRBJ2-2)
GGTQPCISVPAAQEDTPGSCFF

SEQ ID NO: 366587 - protein, 15 aa, Homo sapiens
  CDR3 for alpha chain variable domain of TCR clone 183294 (TRAV2, TRAJ9)
CAVEDRGTGGFKTIF

SEQ ID NO: 366588 - protein, 22 aa, Homo sapiens
  CDR3 for beta chain variable domain of TCR clone 183294 (TRBV7-8, TRBJ2-7)
CASSRVPLRGPSSGLLSYEQYF

SEQ ID NO: 366589 - protein, 14 aa, Homo sapiens
  CDR3 for alpha chain variable domain of TCR clone 183295 (TRAV38-1, TRAJ40)
CALRPTSGTYKYIF

SEQ ID NO: 366590 - protein, 13 aa, Homo sapiens
  CDR3 for beta chain variable domain of TCR clone 183295 (TRBV2, TRBJ1-1)
CARNPTGGFHAFF

SEQ ID NO: 366591 - protein, 14 aa, Homo sapiens
  CDR3 for alpha chain variable domain of TCR clone 183296 (TRAV1-1, TRAJ27)
CAVIYNTNAGKSTF

SEQ ID NO: 366592 - protein, 14 aa, Homo sapiens
  CDR3 for beta chain variable domain of TCR clone 183296 (TRBV20-1, TRBJ1-6)
CSARGTGYNSPLHF

SEQ ID NO: 366593 - protein, 11 aa, Homo sapiens
  CDR3 for alpha chain variable domain of TCR clone 183297 (TRAV21, TRAJ34)
CAVTNTDKLIF

SEQ ID NO: 366594 - protein, 17 aa, Homo sapiens
  CDR3 for beta chain variable domain of TCR clone 183297 (TRBV20-1, TRBJ2-1)
CSARTPSGGPPTMSSSS

SEQ ID NO: 366595 - protein, 16 aa, Homo sapiens
  CDR3 for alpha chain variable domain of TCR clone 183298 (TRAV12-3, TRAJ53)
CAMSPGSGASNYKLTF

SEQ ID NO: 366596 - protein, 16 aa, Homo sapiens
  CDR3 for beta chain variable domain of TCR clone 183298 (TRBV4-2, TRBJ1-1)
CASSQAGFGMNTEAFF

SEQ ID NO: 366597 - protein, 14 aa, Homo sapiens
  CDR3 for alpha chain variable domain of TCR clone 183299 (TRAV30, TRAJ26)
CGTEIVSYGQDFVF

SEQ ID NO: 366598 - protein, 11 aa, Homo sapiens
  CDR3 for beta chain variable domain of TCR clone 183299 (TRBV6-3, TRBJ2-3)
CATGQADTQYF

SEQ ID NO: 366599 - protein, 13 aa, Homo sapiens
  CDR3 for alpha chain variable domain of TCR clone 183300 (TRAV8-4, TRAJ4)
CAVISGGYNKLIF

SEQ ID NO: 366600 - protein, 14 aa, Homo sapiens
  CDR3 for beta chain variable domain of TCR clone 183300 (TRBV19, TRBJ2-1)
CASPTFVLSGEQFF

SEQ ID NO: 366601 - protein, 14 aa, Homo sapiens
  CDR3 for alpha chain variable domain of TCR clone 183301 (TRAV3, TRAJ40)
CAVRDRRGTYKYIF

SEQ ID NO: 366602 - protein, 14 aa, Homo sapiens
  CDR3 for beta chain variable domain of TCR clone 183301 (TRBV7-3, TRBJ2-7)
CASSLSGVSYEQYF

SEQ ID NO: 366603 - protein, 14 aa, Homo sapiens
  CDR3 for alpha chain variable domain of TCR clone 183302 (TRAV3, TRAJ27)
CALRDDTNAGKSTF

SEQ ID NO: 366604 - protein, 15 aa, Homo sapiens
  CDR3 for beta chain variable domain of TCR clone 183302 (TRBV7-7, TRBJ2-2)
CATSKLAKNTGELFF

SEQ ID NO: 366605 - protein, 14 aa, Homo sapiens
  CDR3 for alpha chain variable domain of TCR clone 183303 (TRAV26-1, TRAJ38)
CIADNAGNNRKLIW

SEQ ID NO: 366606 - protein, 15 aa, Homo sapiens
  CDR3 for beta chain variable domain of TCR clone 183303 (TRBV2, TRBJ2-7)
CASSDGLARSYEQYF

SEQ ID NO: 366607 - protein, 12 aa, Homo sapiens
  CDR3 for alpha chain variable domain of TCR clone 183304 (TRAV27, TRAJ35)
CAGETLGMCCIA

SEQ ID NO: 366608 - protein, 13 aa, Homo sapiens
  CDR3 for beta chain variable domain of TCR clone 183304 (TRBV7-3, TRBJ1-1)
CASSQDWGAEAFF

SEQ ID NO: 366609 - protein, 14 aa, Homo sapiens
  CDR3 for alpha chain variable domain of TCR clone 183305 (TRAV2, TRAJ37)
CAVDFTSNPGTLIF

SEQ ID NO: 366610 - protein, 15 aa, Homo sapiens
  CDR3 for beta chain variable domain of TCR clone 183305 (TRBV20-1, TRBJ1-1)
CSASRGVTGNTEAFF

SEQ ID NO: 366611 - protein, 13 aa, Homo sapiens
  CDR3 for alpha chain variable domain of TCR clone 183306 (TRAV12-2, TRAJ20)
CAVYPSNDYKLSF

SEQ ID NO: 366612 - protein, 15 aa, Homo sapiens
  CDR3 for beta chain variable domain of TCR clone 183306 (TRBV19, TRBJ1-2)
CASSVGQVLNYGYTF

SEQ ID NO: 366613 - protein, 12 aa, Homo sapiens
  CDR3 for alpha chain variable domain of TCR clone 183307 (TRAV16, TRAJ27)
CALNHQCRQINL

SEQ ID NO: 366614 - protein, 14 aa, Homo sapiens
  CDR3 for beta chain variable domain of TCR clone 183307 (TRBV11-2, TRBJ1-5)
CATSLDRGRQPQHF

SEQ ID NO: 366615 - protein, 11 aa, Homo sapiens
  CDR3 for alpha chain variable domain of TCR clone 183308 (TRAV3, TRAJ21)
CAVGNFNKFSF

SEQ ID NO: 366616 - protein, 16 aa, Homo sapiens
  CDR3 for beta chain variable domain of TCR clone 183308 (TRBV7-6, TRBJ2-1)
CASSAPGPSSYNEQFF

SEQ ID NO: 366617 - protein, 12 aa, Homo sapiens
  CDR3 for alpha chain variable domain of TCR clone 183309 (TRAV12-2, TRAJ42)
CAVGGSQGNLIF

SEQ ID NO: 366618 - protein, 13 aa, Homo sapiens
  CDR3 for beta chain variable domain of TCR clone 183309 (TRBV12-4, TRBJ1-2)
CASSLRQGKGYTF

SEQ ID NO: 366619 - protein, 14 aa, Homo sapiens
  CDR3 for alpha chain variable domain of TCR clone 183310 (TRAV8-4, TRAJ15)
CAVSPYQAGTALIF

SEQ ID NO: 366620 - protein, 16 aa, Homo sapiens
  CDR3 for beta chain variable domain of TCR clone 183310 (TRBV5-4, TRBJ2-3)
CASQQPGAGGADTQYF

SEQ ID NO: 366621 - protein, 14 aa, Homo sapiens
  CDR3 for alpha chain variable domain of TCR clone 183311 (TRAV3, TRAJ33)
CAVRDMGSNYQLIW

SEQ ID NO: 366622 - protein, 17 aa, Homo sapiens
  CDR3 for beta chain variable domain of TCR clone 183311 (TRBV19, TRBJ2-1)
CASSIWSAQPTHNERFF

SEQ ID NO: 366623 - protein, 11 aa, Homo sapiens
  CDR3 for alpha chain variable domain of TCR clone 183312 (TRAV12-3, TRAJ20)
CAMSYDYKLSF

SEQ ID NO: 366624 - protein, 14 aa, Homo sapiens
  CDR3 for beta chain variable domain of TCR clone 183312 (TRBV7-2, TRBJ2-7)
CASSPETSFYEQYF

SEQ ID NO: 366625 - protein, 15 aa, Homo sapiens
  CDR3 for alpha chain variable domain of TCR clone 183313 (TRAV35, TRAJ34)
CAGTSIVRNTDKLIF

SEQ ID NO: 366626 - protein, 16 aa, Homo sapiens
  CDR3 for beta chain variable domain of TCR clone 183313 (TRBV2, TRBJ2-5)
CASSETQGVGEETQYF

SEQ ID NO: 366627 - protein, 17 aa, Homo sapiens
  CDR3 for alpha chain variable domain of TCR clone 183314 (TRAV3, TRAJ6)
CAVRDGPRAGGIYIPTF

SEQ ID NO: 366628 - protein, 14 aa, Homo sapiens
  CDR3 for beta chain variable domain of TCR clone 183314 (TRBV7-2, TRBJ2-7)
CASSPKTSSYEQYF

SEQ ID NO: 366629 - protein, 13 aa, Homo sapiens
  CDR3 for alpha chain variable domain of TCR clone 183315 (TRAV8-4, TRAJ39)
CAVSDQPGNMLTF

SEQ ID NO: 366630 - protein, 15 aa, Homo sapiens
  CDR3 for beta chain variable domain of TCR clone 183315 (TRBV28, TRBJ2-2)
CASCPGTLTTGELFF

SEQ ID NO: 366631 - protein, 21 aa, Homo sapiens
  CDR3 for alpha chain variable domain of TCR clone 183316 (TRAV21, TRAJ27)
CAARPGNAGKSTFVDGPTLTV

SEQ ID NO: 366632 - protein, 14 aa, Homo sapiens
  CDR3 for beta chain variable domain of TCR clone 183316 (TRBV7-6, TRBJ2-3)
CASSLGTVTDTQYF

SEQ ID NO: 366633 - protein, 17 aa, Homo sapiens
  CDR3 for alpha chain variable domain of TCR clone 183317 (TRAV3, TRAJ6)
CAVRDGPRAGGSYIPTF

SEQ ID NO: 366634 - protein, 14 aa, Homo sapiens
  CDR3 for beta chain variable domain of TCR clone 183317 (TRBV25-1, TRBJ1-4)
CASSGGGQPEKLFF

SEQ ID NO: 366635 - protein, 17 aa, Homo sapiens
  CDR3 for alpha chain variable domain of TCR clone 183318 (TRAV38-1, TRAJ45)
CAFMKHYMGVGADGLTF

SEQ ID NO: 366636 - protein, 13 aa, Homo sapiens
  CDR3 for beta chain variable domain of TCR clone 183318 (TRBV2, TRBJ1-4)
CASSERAGEKLFF

SEQ ID NO: 366637 - protein, 19 aa, Homo sapiens
  CDR3 for alpha chain variable domain of TCR clone 183319 (TRAV25, TRAJ20)
TATQTTDVGILPHDYKLSF

SEQ ID NO: 366638 - protein, 15 aa, Homo sapiens
  CDR3 for beta chain variable domain of TCR clone 183319 (TRBV6-1, TRBJ2-5)
CASSGRWGAVETQYF

SEQ ID NO: 366639 - protein, 18 aa, Homo sapiens
  CDR3 for alpha chain variable domain of TCR clone 183320 (TRAV12-3, TRAJ10)
SPVIQHLPLTGGGNKLTF

SEQ ID NO: 366640 - protein, 15 aa, Homo sapiens
  CDR3 for beta chain variable domain of TCR clone 183320 (TRBV10-2, TRBJ2-6)
CASSEQGTGANVLTF

SEQ ID NO: 366641 - protein, 12 aa, Homo sapiens
  CDR3 for alpha chain variable domain of TCR clone 183321 (TRAV3, TRAJ27)
CAVRDGAGKSTF

SEQ ID NO: 366642 - protein, 15 aa, Homo sapiens
  CDR3 for beta chain variable domain of TCR clone 183321 (TRBV13, TRBJ2-2)
CARGYRGRRTGELFF

SEQ ID NO: 366643 - protein, 11 aa, Homo sapiens
  CDR3 for alpha chain variable domain of TCR clone 183322 (TRAV26-1, TRAJ27)
CIDPNAGKSTF

SEQ ID NO: 366644 - protein, 18 aa, Homo sapiens
  CDR3 for beta chain variable domain of TCR clone 183322 (TRBV7-9, TRBJ2-6)
CASSFPGAGISGANVLAF

SEQ ID NO: 366645 - protein, 13 aa, Homo sapiens
  CDR3 for alpha chain variable domain of TCR clone 183323 (TRAV13-1, TRAJ21)
CAASIYNFNKFYS

SEQ ID NO: 366646 - protein, 13 aa, Homo sapiens
  CDR3 for beta chain variable domain of TCR clone 183323 (TRBV27, TRBJ1-4)
CASSLMGDEKLFL

SEQ ID NO: 366647 - protein, 17 aa, Homo sapiens
  CDR3 for alpha chain variable domain of TCR clone 183324 (TRAV26-1, TRAJ53)
CIVRVDDSGGSHYKLTF

SEQ ID NO: 366648 - protein, 12 aa, Homo sapiens
  CDR3 for beta chain variable domain of TCR clone 183324 (TRBV12-4, TRBJ2-7)
YASSLGGYEQYF

SEQ ID NO: 366649 - protein, 17 aa, Homo sapiens
  CDR3 for alpha chain variable domain of TCR clone 183325 (TRAV3, TRAJ6)
CAVRDGPRARGSSIPTF

SEQ ID NO: 366650 - protein, 14 aa, Homo sapiens
  CDR3 for beta chain variable domain of TCR clone 183325 (TRBV7-2, TRBJ2-7)
CASSPKTSFYEQYF

SEQ ID NO: 366651 - protein, 12 aa, Homo sapiens
  CDR3 for alpha chain variable domain of TCR clone 183326 (TRAV21, TRAJ49)
CAVSWTGNQFYF

SEQ ID NO: 366652 - protein, 18 aa, Homo sapiens
  CDR3 for beta chain variable domain of TCR clone 183326 (TRBV7-8, TRBJ2-1)
CASSPAEGLAGGLNEQFV

SEQ ID NO: 366653 - protein, 13 aa, Homo sapiens
  CDR3 for alpha chain variable domain of TCR clone 183327 (TRAV1-2, TRAJ9)
CAALNTGGFKTIF

SEQ ID NO: 366654 - protein, 13 aa, Homo sapiens
  CDR3 for beta chain variable domain of TCR clone 183327 (TRBV15, TRBJ1-6)
CATSGGLNSPLHC

SEQ ID NO: 366655 - protein, 13 aa, Homo sapiens
  CDR3 for alpha chain variable domain of TCR clone 183328 (TRAV13-1, TRAJ5)
CAASDTGRRALTF

SEQ ID NO: 366656 - protein, 13 aa, Homo sapiens
  CDR3 for beta chain variable domain of TCR clone 183328 (TRBV4-1, TRBJ1-1)
CASSQLGTGEAFF

SEQ ID NO: 366657 - protein, 12 aa, Homo sapiens
  CDR3 for alpha chain variable domain of TCR clone 183329 (TRAV4, TRAJ26)
CPVGDYGQNFVF

SEQ ID NO: 366658 - protein, 16 aa, Homo sapiens
  CDR3 for beta chain variable domain of TCR clone 183329 (TRBV7-2, TRBJ1-2)
CASSSNQDRRGHGYAF

SEQ ID NO: 366659 - protein, 21 aa, Homo sapiens
  CDR3 for alpha chain variable domain of TCR clone 183330 (TRAV8-3, TRAJ32)
CAVEVVLQTSSSLKLALCLLS

SEQ ID NO: 366660 - protein, 15 aa, Homo sapiens
  CDR3 for beta chain variable domain of TCR clone 183330 (TRBV7-2, TRBJ2-1)
CASSSRTSREDEQFF

SEQ ID NO: 366661 - protein, 12 aa, Homo sapiens
  CDR3 for alpha chain variable domain of TCR clone 183331 (TRAV13-2, TRAJ23)
CAERHRGGKLIF

SEQ ID NO: 366662 - protein, 14 aa, Homo sapiens
  CDR3 for beta chain variable domain of TCR clone 183331 (TRBV5-1, TRBJ2-2)
CASSLGGGSGELFF

SEQ ID NO: 366663 - protein, 15 aa, Homo sapiens
  CDR3 for alpha chain variable domain of TCR clone 183332 (TRAV8-2, TRAJ44)
CVVSPNTGTASKLTF

SEQ ID NO: 366664 - protein, 12 aa, Homo sapiens
  CDR3 for beta chain variable domain of TCR clone 183332 (TRBV11-2, TRBJ2-2)
CAVARNTGELFF

SEQ ID NO: 366665 - protein, 12 aa, Homo sapiens
  CDR3 for alpha chain variable domain of TCR clone 183333 (TRAV12-3, TRAJ17)
CAMTLTGNKLTF

SEQ ID NO: 366666 - protein, 14 aa, Homo sapiens
  CDR3 for beta chain variable domain of TCR clone 183333 (TRBV7-3, TRBJ2-1)
CACSLAGGTNEQFF

SEQ ID NO: 366667 - protein, 13 aa, Homo sapiens
  CDR3 for alpha chain variable domain of TCR clone 183334 (TRAV27, TRAJ3)
ASLRGSSASKIIF

SEQ ID NO: 366668 - protein, 15 aa, Homo sapiens
  CDR3 for beta chain variable domain of TCR clone 183334 (TRBV28, TRBJ1-3)
CVGSMGWASGNTIYF

SEQ ID NO: 366669 - protein, 16 aa, Homo sapiens
  CDR3 for alpha chain variable domain of TCR clone 183335 (TRAV12-2, TRAJ32)
CAVNLGQGGATNKLIF

SEQ ID NO: 366670 - protein, 15 aa, Homo sapiens
  CDR3 for beta chain variable domain of TCR clone 183335 (TRBV3-1, TRBJ2-2)
CASSQDWTRAGELFF

SEQ ID NO: 366671 - protein, 13 aa, Homo sapiens
  CDR3 for alpha chain variable domain of TCR clone 183336 (TRAV13-2, TRAJ48)
CAEMDFGNEKLTF

SEQ ID NO: 366672 - protein, 14 aa, Homo sapiens
  CDR3 for beta chain variable domain of TCR clone 183336 (TRBV20-1, TRBJ2-7)
CSAKDRKGAYEQCF

SEQ ID NO: 366673 - protein, 12 aa, Homo sapiens
  CDR3 for alpha chain variable domain of TCR clone 183337 (TRAV12-2, TRAJ13)
CAPEGGYQKVTF

SEQ ID NO: 366674 - protein, 16 aa, Homo sapiens
  CDR3 for beta chain variable domain of TCR clone 183337 (TRBV5-1, TRBJ2-5)
GASGSSGLGGAETQYF

SEQ ID NO: 366675 - protein, 18 aa, Homo sapiens
  CDR3 for alpha chain variable domain of TCR clone 183338 (TRAV13-1, TRAJ52)
CAAKNPNAGGTSYGKLTF

SEQ ID NO: 366676 - protein, 17 aa, Homo sapiens
  CDR3 for beta chain variable domain of TCR clone 183338 (TRBV20-1, TRBJ2-7)
CSARDPEGDHREYEQYF

SEQ ID NO: 366677 - protein, 14 aa, Homo sapiens
  CDR3 for alpha chain variable domain of TCR clone 183339 (TRAV12-2, TRAJ15)
CAPHTGQAGTALIC

SEQ ID NO: 366678 - protein, 14 aa, Homo sapiens
  CDR3 for beta chain variable domain of TCR clone 183339 (TRBV7-8, TRBJ2-7)
CASSPRDRVYEQYF

SEQ ID NO: 366679 - protein, 14 aa, Homo sapiens
  CDR3 for alpha chain variable domain of TCR clone 183340 (TRAV8-3, TRAJ39)
CAVGANNAGNMLAF

SEQ ID NO: 366680 - protein, 13 aa, Homo sapiens
  CDR3 for beta chain variable domain of TCR clone 183340 (TRBV3-1, TRBJ2-5)
CASSPGLSETQYF

SEQ ID NO: 366681 - protein, 16 aa, Homo sapiens
  CDR3 for alpha chain variable domain of TCR clone 183341 (TRAV3, TRAJ37)
CAVRGKGSGNPGKLIF

SEQ ID NO: 366682 - protein, 13 aa, Homo sapiens
  CDR3 for beta chain variable domain of TCR clone 183341 (TRBV10-3, TRBJ1-2)
CAISERDSYGYTF

SEQ ID NO: 366683 - protein, 14 aa, Homo sapiens
  CDR3 for alpha chain variable domain of TCR clone 183342 (TRAV16, TRAJ37)
CALDISGNTGKLIF

SEQ ID NO: 366684 - protein, 13 aa, Homo sapiens
  CDR3 for beta chain variable domain of TCR clone 183342 (TRBV27, TRBJ1-1)
CASSLSNGAEAFF

SEQ ID NO: 366685 - protein, 10 aa, Homo sapiens
  CDR3 for alpha chain variable domain of TCR clone 183343 (TRAV39, TRAJ30)
CAVEYDKIIF

SEQ ID NO: 366686 - protein, 12 aa, Homo sapiens
  CDR3 for beta chain variable domain of TCR clone 183343 (TRBV19, TRBJ2-1)
CASSMQDTEQFF

SEQ ID NO: 366687 - protein, 14 aa, Homo sapiens
  CDR3 for alpha chain variable domain of TCR clone 183344 (TRAV2, TRAJ3)
CAVDRYSSASKIIF

SEQ ID NO: 366688 - protein, 16 aa, Homo sapiens
  CDR3 for beta chain variable domain of TCR clone 183344 (TRBV20-1, TRBJ1-5)
CSAELPGQQANQPQHF

SEQ ID NO: 366689 - protein, 13 aa, Homo sapiens
  CDR3 for alpha chain variable domain of TCR clone 183345 (TRAV8-3, TRAJ28)
CAVGAVGSYQLTF

SEQ ID NO: 366690 - protein, 16 aa, Homo sapiens
  CDR3 for beta chain variable domain of TCR clone 183345 (TRBV3-1, TRBJ2-5)
CASSPGQFNGFGTQYF

SEQ ID NO: 366691 - protein, 14 aa, Homo sapiens
  CDR3 for alpha chain variable domain of TCR clone 183346 (TRAV12-2, TRAJ13)
CAGKKAGGYQKVTF

SEQ ID NO: 366692 - protein, 13 aa, Homo sapiens
  CDR3 for beta chain variable domain of TCR clone 183346 (TRBV7-9, TRBJ1-2)
CASSLKQNYGYTF

SEQ ID NO: 366693 - protein, 14 aa, Homo sapiens
  CDR3 for alpha chain variable domain of TCR clone 183347 (TRAV2, TRAJ23)
CAVGLRNQGGKLIF

SEQ ID NO: 366694 - protein, 12 aa, Homo sapiens
  CDR3 for beta chain variable domain of TCR clone 183347 (TRBV7-8, TRBJ2-7)
CASSLGDREQYF

SEQ ID NO: 366695 - protein, 11 aa, Homo sapiens
  CDR3 for alpha chain variable domain of TCR clone 183348 (TRAV39, TRAJ33)
CAGDRWIATIS

SEQ ID NO: 366696 - protein, 14 aa, Homo sapiens
  CDR3 for beta chain variable domain of TCR clone 183348 (TRBV25-1, TRBJ1-1)
CASTHLGGNTEAFF

SEQ ID NO: 366697 - protein, 14 aa, Homo sapiens
  CDR3 for alpha chain variable domain of TCR clone 183349 (TRAV12-1, TRAJ17)
CVVNYKAAGNKLTF

SEQ ID NO: 366698 - protein, 14 aa, Homo sapiens
  CDR3 for beta chain variable domain of TCR clone 183349 (TRBV4-3, TRBJ2-1)
FASGLDRAYNEQFF

SEQ ID NO: 366699 - protein, 15 aa, Homo sapiens
  CDR3 for alpha chain variable domain of TCR clone 183350 (TRAV3, TRAJ3)
CAVRDRDSIASKIIF

SEQ ID NO: 366700 - protein, 18 aa, Homo sapiens
  CDR3 for beta chain variable domain of TCR clone 183350 (TRBV25-1, TRBJ1-2)
CASSGLQNGQGLVFGYTF

SEQ ID NO: 366701 - protein, 13 aa, Homo sapiens
  CDR3 for alpha chain variable domain of TCR clone 183351 (TRAV27, TRAJ49)
CAPRPYTGTQFYF

SEQ ID NO: 366702 - protein, 15 aa, Homo sapiens
  CDR3 for beta chain variable domain of TCR clone 183351 (TRBV19, TRBJ2-1)
CASSINREPSHEQFF

SEQ ID NO: 366703 - protein, 12 aa, Homo sapiens
  CDR3 for alpha chain variable domain of TCR clone 183352 (TRAV16, TRAJ10)
CSRTGGGNKLTF

SEQ ID NO: 366704 - protein, 15 aa, Homo sapiens
  CDR3 for beta chain variable domain of TCR clone 183352 (TRBV7-9, TRBJ2-7)
CASSPGGGLTYEQYF

SEQ ID NO: 366705 - protein, 17 aa, Homo sapiens
  CDR3 for alpha chain variable domain of TCR clone 183353 (TRAV3, TRAJ6)
CAVRDGPRAGGSYLPTF

SEQ ID NO: 366706 - protein, 13 aa, Homo sapiens
  CDR3 for beta chain variable domain of TCR clone 183353 (TRBV27, TRBJ2-1)
CASRTLGVGEQFF

SEQ ID NO: 366707 - protein, 11 aa, Homo sapiens
  CDR3 for alpha chain variable domain of TCR clone 183354 (TRAV12-2, TRAJ31)
CAILNNARLMF

SEQ ID NO: 366708 - protein, 13 aa, Homo sapiens
  CDR3 for beta chain variable domain of TCR clone 183354 (TRBV20-1, TRBJ1-1)
CSARLGQGTEAFC

SEQ ID NO: 366709 - protein, 13 aa, Homo sapiens
  CDR3 for alpha chain variable domain of TCR clone 183355 (TRAV2, TRAJ15)
CAVASPAGTALTF

SEQ ID NO: 366710 - protein, 16 aa, Homo sapiens
  CDR3 for beta chain variable domain of TCR clone 183355 (TRBV5-1, TRBJ1-1)
CASSSGGNSLNTEAFF

SEQ ID NO: 366711 - protein, 13 aa, Homo sapiens
  CDR3 for alpha chain variable domain of TCR clone 183356 (TRAV21, TRAJ27)
CAARPGNAGKSTF

SEQ ID NO: 366712 - protein, 14 aa, Homo sapiens
  CDR3 for beta chain variable domain of TCR clone 183356 (TRBV18, TRBJ1-5)
CASSPGNSNQPQHF

SEQ ID NO: 366713 - protein, 17 aa, Homo sapiens
  CDR3 for alpha chain variable domain of TCR clone 183357 (TRAV26-2, TRAJ54)
CCVLLHPPGRGAQKLVF

SEQ ID NO: 366714 - protein, 16 aa, Homo sapiens
  CDR3 for beta chain variable domain of TCR clone 183357 (TRBV4-1, TRBJ1-1)
CASSSMSERPNTEAFF

SEQ ID NO: 366715 - protein, 13 aa, Homo sapiens
  CDR3 for alpha chain variable domain of TCR clone 183358 (TRAV12-1, TRAJ31)
CVVNDNNNARLMF

SEQ ID NO: 366716 - protein, 13 aa, Homo sapiens
  CDR3 for beta chain variable domain of TCR clone 183358 (TRBV15, TRBJ2-5)
CATSQIGEETQYF

SEQ ID NO: 366717 - protein, 16 aa, Homo sapiens
  CDR3 for alpha chain variable domain of TCR clone 183359 (TRAV35, TRAJ37)
CWAFLRGSSNTGKLIF

SEQ ID NO: 366718 - protein, 12 aa, Homo sapiens
  CDR3 for beta chain variable domain of TCR clone 183359 (TRBV2, TRBJ1-2)
CQLSSGQHGYTF

SEQ ID NO: 366719 - protein, 15 aa, Homo sapiens
  CDR3 for alpha chain variable domain of TCR clone 183360 (TRAV3, TRAJ4)
CAQNMFSGGYNKLIF

SEQ ID NO: 366720 - protein, 15 aa, Homo sapiens
  CDR3 for beta chain variable domain of TCR clone 183360 (TRBV5-5, TRBJ2-2)
CASSRQASGAGELFF

SEQ ID NO: 366721 - protein, 13 aa, Homo sapiens
  CDR3 for alpha chain variable domain of TCR clone 183361 (TRAV26-1, TRAJ36)
CIVVGTGANNLFF

SEQ ID NO: 366722 - protein, 16 aa, Homo sapiens
  CDR3 for beta chain variable domain of TCR clone 183361 (TRBV10-3, TRBJ2-1)
CAISGVGDGGGGEQVF

SEQ ID NO: 366723 - protein, 13 aa, Homo sapiens
  CDR3 for alpha chain variable domain of TCR clone 183362 (TRAV12-3, TRAJ4)
CAMSAGGYNKLIF

SEQ ID NO: 366724 - protein, 14 aa, Homo sapiens
  CDR3 for beta chain variable domain of TCR clone 183362 (TRBV10-3, TRBJ1-5)
CAIRPTGAHQPQHF

SEQ ID NO: 366725 - protein, 13 aa, Homo sapiens
  CDR3 for alpha chain variable domain of TCR clone 183363 (TRAV17, TRAJ22)
CSHHSGSARQLTF

SEQ ID NO: 366726 - protein, 13 aa, Homo sapiens
  CDR3 for beta chain variable domain of TCR clone 183363 (TRBV27, TRBJ1-4)
CASSLMGDEKLFF

SEQ ID NO: 366727 - protein, 15 aa, Homo sapiens
  CDR3 for alpha chain variable domain of TCR clone 183364 (TRAV34, TRAJ38)
CGADLTPGNNRTLIW

SEQ ID NO: 366728 - protein, 16 aa, Homo sapiens
  CDR3 for beta chain variable domain of TCR clone 183364 (TRBV12-5, TRBJ2-5)
CASGPRTSGNQETQYF

SEQ ID NO: 366729 - protein, 14 aa, Homo sapiens
  CDR3 for alpha chain variable domain of TCR clone 183365 (TRAV9-2, TRAJ38)
CALRGAGNNRKLLW

SEQ ID NO: 366730 - protein, 15 aa, Homo sapiens
  CDR3 for beta chain variable domain of TCR clone 183365 (TRBV19, TRBJ2-1)
CASSTGTSSYNEQFF

SEQ ID NO: 366731 - protein, 12 aa, Homo sapiens
  CDR3 for alpha chain variable domain of TCR clone 183366 (TRAV1-1, TRAJ9)
CAVNTGGFKTIF

SEQ ID NO: 366732 - protein, 14 aa, Homo sapiens
  CDR3 for beta chain variable domain of TCR clone 183366 (TRBV7-8, TRBJ2-5)
CASSATGGQETQYF

SEQ ID NO: 366733 - protein, 11 aa, Homo sapiens
  CDR3 for alpha chain variable domain of TCR clone 183367 (TRAV3, TRAJ21)
CAVGNFNKFYF

SEQ ID NO: 366734 - protein, 16 aa, Homo sapiens
  CDR3 for beta chain variable domain of TCR clone 183367 (TRBV19, TRBJ2-1)
CASSKAGTSSYNEQFF

SEQ ID NO: 366735 - protein, 12 aa, Homo sapiens
  CDR3 for alpha chain variable domain of TCR clone 183368 (TRAV16, TRAJ13)
CITLRGYQKVTF

SEQ ID NO: 366736 - protein, 17 aa, Homo sapiens
  CDR3 for beta chain variable domain of TCR clone 183368 (TRBV28, TRBJ2-7)
CASSRQGGLAGAETQYF

SEQ ID NO: 366737 - protein, 17 aa, Homo sapiens
  CDR3 for alpha chain variable domain of TCR clone 183369 (TRAV12-3, TRAJ26)
CAMSGGRWDNYGQNFVF

SEQ ID NO: 366738 - protein, 12 aa, Homo sapiens
  CDR3 for beta chain variable domain of TCR clone 183369 (TRBV19, TRBJ1-1)
CDSSTTGIEAFF

SEQ ID NO: 366739 - protein, 10 aa, Homo sapiens
  CDR3 for alpha chain variable domain of TCR clone 183370 (TRAV8-4, TRAJ43)
SVVSADDMRF

SEQ ID NO: 366740 - protein, 13 aa, Homo sapiens
  CDR3 for beta chain variable domain of TCR clone 183370 (TRBV12-4, TRBJ2-5)
CASSPGTEETQYF

SEQ ID NO: 366741 - protein, 13 aa, Homo sapiens
  CDR3 for alpha chain variable domain of TCR clone 183371 (TRAV3, TRAJ41)
CAVSSNSRYALNF

SEQ ID NO: 366742 - protein, 14 aa, Homo sapiens
  CDR3 for beta chain variable domain of TCR clone 183371 (TRBV7-2, TRBJ2-7)
CASSPKTSFYEQYF

SEQ ID NO: 366743 - protein, 15 aa, Homo sapiens
  CDR3 for alpha chain variable domain of TCR clone 183372 (TRAV17, TRAJ45)
CATAYSGGGADGLTF

SEQ ID NO: 366744 - protein, 16 aa, Homo sapiens
  CDR3 for beta chain variable domain of TCR clone 183372 (TRBV12-5, TRBJ2-5)
CASGPRTSGNQETQYF

SEQ ID NO: 366745 - protein, 15 aa, Homo sapiens
  CDR3 for alpha chain variable domain of TCR clone 183373 (TRAV8-3, TRAJ11)
CAVGLLNSGYSPLTF

SEQ ID NO: 366746 - protein, 16 aa, Homo sapiens
  CDR3 for beta chain variable domain of TCR clone 183373 (TRBV7-9, TRBJ1-2)
CASSLGFSSGEDGYSF

SEQ ID NO: 366747 - protein, 16 aa, Homo sapiens
  CDR3 for alpha chain variable domain of TCR clone 183374 (TRAV36/DV7, TRAJ33)
WRPGNTVQDSNYQLIW

SEQ ID NO: 366748 - protein, 15 aa, Homo sapiens
  CDR3 for beta chain variable domain of TCR clone 183374 (TRBV29-1, TRBJ2-1)
CSVGRHALFYNEQFF

SEQ ID NO: 366749 - protein, 13 aa, Homo sapiens
  CDR3 for alpha chain variable domain of TCR clone 183375 (TRAV12-1, TRAJ40)
CVVPTSGTYRYIF

SEQ ID NO: 366750 - protein, 16 aa, Homo sapiens
  CDR3 for beta chain variable domain of TCR clone 183375 (TRBV7-6, TRBJ2-3)
CASSARTSRGTDTQYF

SEQ ID NO: 366751 - protein, 13 aa, Homo sapiens
  CDR3 for alpha chain variable domain of TCR clone 183376 (TRAV30, TRAJ6)
CGFIEGGSYIPTF

SEQ ID NO: 366752 - protein, 13 aa, Homo sapiens
  CDR3 for beta chain variable domain of TCR clone 183376 (TRBV5-4, TRBJ2-5)
CASSPVSQETQSF

SEQ ID NO: 366753 - protein, 15 aa, Homo sapiens
  CDR3 for alpha chain variable domain of TCR clone 183377 (TRAV21, TRAJ53)
CATLNSGGSNYKLTF

SEQ ID NO: 366754 - protein, 14 aa, Homo sapiens
  CDR3 for beta chain variable domain of TCR clone 183377 (TRBV27, TRBJ2-5)
CASSSLKGWETQYF

SEQ ID NO: 366755 - protein, 15 aa, Homo sapiens
  CDR3 for alpha chain variable domain of TCR clone 183378 (TRAV21, TRAJ24)
CAARSSTDSWGKLQF

SEQ ID NO: 366756 - protein, 16 aa, Homo sapiens
  CDR3 for beta chain variable domain of TCR clone 183378 (TRBV12-4, TRBJ1-5)
CASSRPVGGSNQPQHF

SEQ ID NO: 366757 - protein, 13 aa, Homo sapiens
  CDR3 for alpha chain variable domain of TCR clone 183379 (TRAV3, TRAJ30)
CAGRDRGDDKIIL

SEQ ID NO: 366758 - protein, 16 aa, Homo sapiens
  CDR3 for beta chain variable domain of TCR clone 183379 (TRBV7-3, TRBJ2-2)
CASSLKRGTLSGELFF

SEQ ID NO: 366759 - protein, 18 aa, Homo sapiens
  CDR3 for alpha chain variable domain of TCR clone 183380 (TRAV12-3, TRAJ52)
CAMSVGGAGGTSYGKLTF

SEQ ID NO: 366760 - protein, 13 aa, Homo sapiens
  CDR3 for beta chain variable domain of TCR clone 183380 (TRBV12-4, TRBJ2-7)
CASSPTETYEQYF

SEQ ID NO: 366761 - protein, 13 aa, Homo sapiens
  CDR3 for alpha chain variable domain of TCR clone 183381 (TRAV8-4, TRAJ44)
CAVFTGTASKLTF

SEQ ID NO: 366762 - protein, 15 aa, Homo sapiens
  CDR3 for beta chain variable domain of TCR clone 183381 (TRBV14, TRBJ2-1)
CASSQMGLHFNEQFF

SEQ ID NO: 366763 - protein, 14 aa, Homo sapiens
  CDR3 for alpha chain variable domain of TCR clone 183382 (TRAV8-2, TRAJ4)
CVVRPSGGYNKLIF

SEQ ID NO: 366764 - protein, 15 aa, Homo sapiens
  CDR3 for beta chain variable domain of TCR clone 183382 (TRBV10-2, TRBJ2-5)
CASRGSGGPQETQYF

SEQ ID NO: 366765 - protein, 13 aa, Homo sapiens
  CDR3 for alpha chain variable domain of TCR clone 183383 (TRAV1-2, TRAJ15)
CAVTGQAGTALIF

SEQ ID NO: 366766 - protein, 15 aa, Homo sapiens
  CDR3 for beta chain variable domain of TCR clone 183383 (TRBV25-1, TRBJ1-4)
CASSKRIATNEKLFF

SEQ ID NO: 366767 - protein, 17 aa, Homo sapiens
  CDR3 for alpha chain variable domain of TCR clone 183384 (TRAV3, TRAJ6)
CAVRDGPRAGGSYIPTF

SEQ ID NO: 366768 - protein, 13 aa, Homo sapiens
  CDR3 for beta chain variable domain of TCR clone 183384 (TRBV20-1, TRBJ1-1)
CSARGGGNTEAFY

SEQ ID NO: 366769 - protein, 16 aa, Homo sapiens
  CDR3 for alpha chain variable domain of TCR clone 183385 (TRAV3, TRAJ37)
CAVRVRGSGNTGKLIF

SEQ ID NO: 366770 - protein, 15 aa, Homo sapiens
  CDR3 for beta chain variable domain of TCR clone 183385 (TRBV3-1, TRBJ2-1)
CASSPRDSGLNEQFF

SEQ ID NO: 366771 - protein, 15 aa, Homo sapiens
  CDR3 for alpha chain variable domain of TCR clone 183386 (TRAV21, TRAJ53)
CATLNSGGSHYKLTF

SEQ ID NO: 366772 - protein, 13 aa, Homo sapiens
  CDR3 for beta chain variable domain of TCR clone 183386 (TRBV7-2, TRBJ1-6)
CASSLGSNSPLLF

SEQ ID NO: 366773 - protein, 15 aa, Homo sapiens
  CDR3 for alpha chain variable domain of TCR clone 183387 (TRAV12-2, TRAJ43)
CAFDMRFGAGTRLTV

SEQ ID NO: 366774 - protein, 13 aa, Homo sapiens
  CDR3 for beta chain variable domain of TCR clone 183387 (TRBV12-4, TRBJ2-2)
CASSITGSGELFF

SEQ ID NO: 366775 - protein, 17 aa, Homo sapiens
  CDR3 for alpha chain variable domain of TCR clone 183388 (TRAV3, TRAJ42)
CAVRDRDYGGSQGNLVF

SEQ ID NO: 366776 - protein, 15 aa, Homo sapiens
  CDR3 for beta chain variable domain of TCR clone 183388 (TRBV2, TRBJ2-7)
CASSEGLARSYEQYF

SEQ ID NO: 366777 - protein, 12 aa, Homo sapiens
  CDR3 for alpha chain variable domain of TCR clone 183389 (TRAV30, TRAJ43)
CGTEERDNDMRF

SEQ ID NO: 366778 - protein, 14 aa, Homo sapiens
  CDR3 for beta chain variable domain of TCR clone 183389 (TRBV7-2, TRBJ2-7)
CASSPKTSFYEQYF

SEQ ID NO: 366779 - protein, 13 aa, Homo sapiens
  CDR3 for alpha chain variable domain of TCR clone 183390 (TRAV27, TRAJ41)
CAGEGNSGYALNF

SEQ ID NO: 366780 - protein, 13 aa, Homo sapiens
  CDR3 for beta chain variable domain of TCR clone 183390 (TRBV12-4, TRBJ1-2)
CASSLRQGKGYTF

SEQ ID NO: 366781 - protein, 15 aa, Homo sapiens
  CDR3 for alpha chain variable domain of TCR clone 183391 (TRAV12-2, TRAJ53)
CAVNGGGGSNYKLTF

SEQ ID NO: 366782 - protein, 17 aa, Homo sapiens
  CDR3 for beta chain variable domain of TCR clone 183391 (TRBV7-3, TRBJ2-3)
CASSLMKRVRGADTQYF

SEQ ID NO: 366783 - protein, 15 aa, Homo sapiens
  CDR3 for alpha chain variable domain of TCR clone 183392 (TRAV3, TRAJ22)
CAVRDRGGSASQLTF

SEQ ID NO: 366784 - protein, 14 aa, Homo sapiens
  CDR3 for beta chain variable domain of TCR clone 183392 (TRBV25-1, TRBJ1-1)
CASTHLGGNTEAFF

SEQ ID NO: 366785 - protein, 11 aa, Homo sapiens
  CDR3 for alpha chain variable domain of TCR clone 183393 (TRAV17, TRAJ43)
CATDLHNDMRF

SEQ ID NO: 366786 - protein, 13 aa, Homo sapiens
  CDR3 for beta chain variable domain of TCR clone 183393 (TRBV19, TRBJ1-5)
CASSITGGQPQHF

SEQ ID NO: 366787 - protein, 15 aa, Homo sapiens
  CDR3 for alpha chain variable domain of TCR clone 183394 (TRAV2, TRAJ9)
CAVEDRGTVGFKTIF

SEQ ID NO: 366788 - protein, 16 aa, Homo sapiens
  CDR3 for beta chain variable domain of TCR clone 183394 (TRBV24-1, TRBJ2-3)
CATSDPGTGATDTQYL

SEQ ID NO: 366789 - protein, 11 aa, Homo sapiens
  CDR3 for alpha chain variable domain of TCR clone 183395 (TRAV6, TRAJ21)
CALDNFNKFYF

SEQ ID NO: 366790 - protein, 12 aa, Homo sapiens
  CDR3 for beta chain variable domain of TCR clone 183395 (TRBV28, TRBJ2-6)
CAIQAGANVLTF

SEQ ID NO: 366791 - protein, 14 aa, Homo sapiens
  CDR3 for alpha chain variable domain of TCR clone 183396 (TRAV21, TRAJ32)
CAVWDGGATNKLIF

SEQ ID NO: 366792 - protein, 17 aa, Homo sapiens
  CDR3 for beta chain variable domain of TCR clone 183396 (TRBV19, TRBJ2-7)
CASSISFYDSYPYEQYF

SEQ ID NO: 366793 - protein, 11 aa, Homo sapiens
  CDR3 for alpha chain variable domain of TCR clone 183397 (TRAV26-1, TRAJ37)
CIVRVGRKLIF

SEQ ID NO: 366794 - protein, 14 aa, Homo sapiens
  CDR3 for beta chain variable domain of TCR clone 183397 (TRBV4-1, TRBJ2-2)
CASSQAVNTGELFF

SEQ ID NO: 366795 - protein, 13 aa, Homo sapiens
  CDR3 for alpha chain variable domain of TCR clone 183398 (TRAV2, TRAJ15)
CAVASQAGTALIF

SEQ ID NO: 366796 - protein, 15 aa, Homo sapiens
  CDR3 for beta chain variable domain of TCR clone 183398 (TRBV4-1, TRBJ1-2)
CASSQGQGAAYGYTF

SEQ ID NO: 366797 - protein, 16 aa, Homo sapiens
  CDR3 for alpha chain variable domain of TCR clone 183399 (TRAV38-1, TRAJ32)
CAFMKGGGGATNKLIF

SEQ ID NO: 366798 - protein, 16 aa, Homo sapiens
  CDR3 for beta chain variable domain of TCR clone 183399 (TRBV20-1, TRBJ1-5)
CSASRGTGYSNQPQHF

SEQ ID NO: 366799 - protein, 12 aa, Homo sapiens
  CDR3 for alpha chain variable domain of TCR clone 183400 (TRAV12-3, TRAJ17)
CAMTLTGNKLTF

SEQ ID NO: 366800 - protein, 16 aa, Homo sapiens
  CDR3 for beta chain variable domain of TCR clone 183400 (TRBV20-1, TRBJ1-2)
GSAPMGQGVANYGYTF

SEQ ID NO: 366801 - protein, 12 aa, Homo sapiens
  CDR3 for alpha chain variable domain of TCR clone 183401 (TRAV26-1, TRAJ26)
FIVYNYGQNFVF

SEQ ID NO: 366802 - protein, 15 aa, Homo sapiens
  CDR3 for beta chain variable domain of TCR clone 183401 (TRBV7-2, TRBJ2-3)
CASSLRGGSTDTQYF

SEQ ID NO: 366803 - protein, 19 aa, Homo sapiens
  CDR3 for alpha chain variable domain of TCR clone 183402 (TRAV2, TRAJ20)
ILQVREADAAVYRDCKLSF

SEQ ID NO: 366804 - protein, 19 aa, Homo sapiens
  CDR3 for beta chain variable domain of TCR clone 183402 (TRBV4-1, TRBJ2-5)
CASSQEGSGTSKRGETQYF

SEQ ID NO: 366805 - protein, 11 aa, Homo sapiens
  CDR3 for alpha chain variable domain of TCR clone 183403 (TRAV1-1, TRAJ20)
CAVFNDYKLSF

SEQ ID NO: 366806 - protein, 13 aa, Homo sapiens
  CDR3 for beta chain variable domain of TCR clone 183403 (TRBV7-9, TRBJ1-2)
CASSLKQNYGYTF

SEQ ID NO: 366807 - protein, 11 aa, Homo sapiens
  CDR3 for alpha chain variable domain of TCR clone 183404 (TRAV35, TRAJ30)
CAPGGDDKIIF

SEQ ID NO: 366808 - protein, 22 aa, Homo sapiens
  CDR3 for beta chain variable domain of TCR clone 183404 (TRBV7-6, TRBJ2-1)
SGTRPCIGVPAAWGGGADEQFF

SEQ ID NO: 366809 - protein, 13 aa, Homo sapiens
  CDR3 for alpha chain variable domain of TCR clone 183405 (TRAV8-6, TRAJ9)
FAVWDTGGFRTIF

SEQ ID NO: 366810 - protein, 14 aa, Homo sapiens
  CDR3 for beta chain variable domain of TCR clone 183405 (TRBV2, TRBJ2-1)
CASSEALIYNEQFF

SEQ ID NO: 366811 - protein, 12 aa, Homo sapiens
  CDR3 for alpha chain variable domain of TCR clone 183406 (TRAV21, TRAJ33)
CAKMDSNYQLLC

SEQ ID NO: 366812 - protein, 14 aa, Homo sapiens
  CDR3 for beta chain variable domain of TCR clone 183406 (TRBV2, TRBJ2-7)
CASSLTSGGYEQYF

SEQ ID NO: 366813 - protein, 14 aa, Homo sapiens
  CDR3 for alpha chain variable domain of TCR clone 183407 (TRAV12-2, TRAJ13)
GAVKKTGGYQKVTF

SEQ ID NO: 366814 - protein, 15 aa, Homo sapiens
  CDR3 for beta chain variable domain of TCR clone 183407 (TRBV11-2, TRBJ2-2)
CASSSDRVNAGELFF

SEQ ID NO: 366815 - protein, 13 aa, Homo sapiens
  CDR3 for alpha chain variable domain of TCR clone 183408 (TRAV12-3, TRAJ5)
CAMIYTGRRALTF

SEQ ID NO: 366816 - protein, 11 aa, Homo sapiens
  CDR3 for beta chain variable domain of TCR clone 183408 (TRBV18, TRBJ1-4)
CQLTEPGKLFF

SEQ ID NO: 366817 - protein, 15 aa, Homo sapiens
  CDR3 for alpha chain variable domain of TCR clone 183409 (TRAV12-1, TRAJ44)
CVVFVNTGTASKLTF

SEQ ID NO: 366818 - protein, 16 aa, Homo sapiens
  CDR3 for beta chain variable domain of TCR clone 183409 (TRBV7-9, TRBJ2-6)
CASSLKGPLRANVLTF

SEQ ID NO: 366819 - protein, 14 aa, Homo sapiens
  CDR3 for alpha chain variable domain of TCR clone 183410 (TRAV17, TRAJ15)
CATGPNQAGTALIF

SEQ ID NO: 366820 - protein, 15 aa, Homo sapiens
  CDR3 for beta chain variable domain of TCR clone 183410 (TRBV11-2, TRBJ2-2)
CASRSDRVNAGELFF

SEQ ID NO: 366821 - protein, 15 aa, Homo sapiens
  CDR3 for alpha chain variable domain of TCR clone 183411 (TRAV26-1, TRAJ44)
CIVRIGTGTASKLTF

SEQ ID NO: 366822 - protein, 15 aa, Homo sapiens
  CDR3 for beta chain variable domain of TCR clone 183411 (TRBV27, TRBJ2-1)
CASSNGGGSSNEQFF

SEQ ID NO: 366823 - protein, 13 aa, Homo sapiens
  CDR3 for alpha chain variable domain of TCR clone 183412 (TRAV12-1, TRAJ16)
CVVNGPDGQKLLF

SEQ ID NO: 366824 - protein, 18 aa, Homo sapiens
  CDR3 for beta chain variable domain of TCR clone 183412 (TRBV24-1, TRBJ2-2)
CHQCPWAYGTPITGELFF

SEQ ID NO: 366825 - protein, 14 aa, Homo sapiens
  CDR3 for alpha chain variable domain of TCR clone 183413 (TRAV2, TRAJ29)
CSVESYSGNTPLVF

SEQ ID NO: 366826 - protein, 17 aa, Homo sapiens
  CDR3 for beta chain variable domain of TCR clone 183413 (TRBV20-1, TRBJ2-1)
CSASSSGLAGSYNEQFF

SEQ ID NO: 366827 - protein, 13 aa, Homo sapiens
  CDR3 for alpha chain variable domain of TCR clone 183414 (TRAV3, TRAJ27)
CAVRPLGAGKSTF

SEQ ID NO: 366828 - protein, 15 aa, Homo sapiens
  CDR3 for beta chain variable domain of TCR clone 183414 (TRBV6-6, TRBJ2-5)
CASSPGGGLEETQYF

SEQ ID NO: 366829 - protein, 15 aa, Homo sapiens
  CDR3 for alpha chain variable domain of TCR clone 183415 (TRAV26-1, TRAJ29)
CIVRVEGSGNTPLVF

SEQ ID NO: 366830 - protein, 15 aa, Homo sapiens
  CDR3 for beta chain variable domain of TCR clone 183415 (TRBV7-9, TRBJ1-5)
CASSQGHRPNQPQHV

SEQ ID NO: 366831 - protein, 12 aa, Homo sapiens
  CDR3 for alpha chain variable domain of TCR clone 183416 (TRAV21, TRAJ11)
CAATSGYSTLTF

SEQ ID NO: 366832 - protein, 13 aa, Homo sapiens
  CDR3 for beta chain variable domain of TCR clone 183416 (TRBV20-1, TRBJ1-1)
CSAPLGGGTEAFF

SEQ ID NO: 366833 - protein, 10 aa, Homo sapiens
  CDR3 for alpha chain variable domain of TCR clone 183417 (TRAV12-1, TRAJ37)
AQGNTGKLIF

SEQ ID NO: 366834 - protein, 15 aa, Homo sapiens
  CDR3 for beta chain variable domain of TCR clone 183417 (TRBV7-2, TRBJ2-3)
CASSLEQGGTDTQYF

SEQ ID NO: 366835 - protein, 15 aa, Homo sapiens
  CDR3 for alpha chain variable domain of TCR clone 183418 (TRAV8-3, TRAJ45)
CASSYSGGGADGLTF

SEQ ID NO: 366836 - protein, 14 aa, Homo sapiens
  CDR3 for beta chain variable domain of TCR clone 183418 (TRBV12-4, TRBJ2-7)
CASSLTGRAYEQYF

SEQ ID NO: 366837 - protein, 11 aa, Homo sapiens
  CDR3 for alpha chain variable domain of TCR clone 183419 (TRAV21, TRAJ11)
CAVNGYSTLTF

SEQ ID NO: 366838 - protein, 13 aa, Homo sapiens
  CDR3 for beta chain variable domain of TCR clone 183419 (TRBV6-3, TRBJ2-5)
CASSWAGEETQYF

SEQ ID NO: 366839 - protein, 16 aa, Homo sapiens
  CDR3 for alpha chain variable domain of TCR clone 183420 (TRAV12-3, TRAJ53)
CAMSTGSGGSNYKLTF

SEQ ID NO: 366840 - protein, 17 aa, Homo sapiens
  CDR3 for beta chain variable domain of TCR clone 183420 (TRBV20-1, TRBJ2-2)
CSASGSGQGELTGELFF

SEQ ID NO: 366841 - protein, 14 aa, Homo sapiens
  CDR3 for alpha chain variable domain of TCR clone 183421 (TRAV8-4, TRAJ48)
CAVSETFGNEKLTF

SEQ ID NO: 366842 - protein, 14 aa, Homo sapiens
  CDR3 for beta chain variable domain of TCR clone 183421 (TRBV25-1, TRBJ1-1)
CASTHLGGNTEAFF

SEQ ID NO: 366843 - protein, 13 aa, Homo sapiens
  CDR3 for alpha chain variable domain of TCR clone 183422 (TRAV21, TRAJ57)
CAVIEGGSEKLVF

SEQ ID NO: 366844 - protein, 18 aa, Homo sapiens
  CDR3 for beta chain variable domain of TCR clone 183422 (TRBV11-2, TRBJ2-3)
CASSLGGASRGAPNTQYF

SEQ ID NO: 366845 - protein, 12 aa, Homo sapiens
  CDR3 for alpha chain variable domain of TCR clone 183423 (TRAV2, TRAJ9)
CAVGAGGFKTIF

SEQ ID NO: 366846 - protein, 12 aa, Homo sapiens
  CDR3 for beta chain variable domain of TCR clone 183423 (TRBV18, TRBJ2-1)
CASSSDEDEQFF

SEQ ID NO: 366847 - protein, 15 aa, Homo sapiens
  CDR3 for alpha chain variable domain of TCR clone 183424 (TRAV23/DV6, TRAJ33)
CAASNSGGGNYQLIW

SEQ ID NO: 366848 - protein, 16 aa, Homo sapiens
  CDR3 for beta chain variable domain of TCR clone 183424 (TRBV7-2, TRBJ2-7)
CASSLYRGATSSTSGR

SEQ ID NO: 366849 - protein, 14 aa, Homo sapiens
  CDR3 for alpha chain variable domain of TCR clone 183425 (TRAV1-2, TRAJ16)
CAVNRLSDGQKLLF

SEQ ID NO: 366850 - protein, 13 aa, Homo sapiens
  CDR3 for beta chain variable domain of TCR clone 183425 (TRBV18, TRBJ2-5)
CASSPAGQETQYF

SEQ ID NO: 366851 - protein, 12 aa, Homo sapiens
  CDR3 for alpha chain variable domain of TCR clone 183426 (TRAV12-3, TRAJ20)
CAMVRGDYKLSF

SEQ ID NO: 366852 - protein, 17 aa, Homo sapiens
  CDR3 for beta chain variable domain of TCR clone 183426 (TRBV4-1, TRBJ1-5)
CASSQQPPTVANQPQHF

SEQ ID NO: 366853 - protein, 12 aa, Homo sapiens
  CDR3 for alpha chain variable domain of TCR clone 183427 (TRAV17, TRAJ12)
CATLRSSYKLIF

SEQ ID NO: 366854 - protein, 14 aa, Homo sapiens
  CDR3 for beta chain variable domain of TCR clone 183427 (TRBV28, TRBJ2-2)
CASSLVQDTGELFF

SEQ ID NO: 366855 - protein, 13 aa, Homo sapiens
  CDR3 for alpha chain variable domain of TCR clone 183428 (TRAV20, TRAJ37)
CAGCSSNTGKLIF

SEQ ID NO: 366856 - protein, 14 aa, Homo sapiens
  CDR3 for beta chain variable domain of TCR clone 183428 (TRBV20-1, TRBJ2-5)
CSARDVRAGETQYF

SEQ ID NO: 366857 - protein, 13 aa, Homo sapiens
  CDR3 for alpha chain variable domain of TCR clone 183429 (TRAV8-3, TRAJ21)
CAVGLDNLNKFYF

SEQ ID NO: 366858 - protein, 17 aa, Homo sapiens
  CDR3 for beta chain variable domain of TCR clone 183429 (TRBV7-8, TRBJ2-6)
CASSAGTGGAGANVLTF

SEQ ID NO: 366859 - protein, 13 aa, Homo sapiens
  CDR3 for alpha chain variable domain of TCR clone 183430 (TRAV17, TRAJ29)
CATDAFRQHTSCL

SEQ ID NO: 366860 - protein, 13 aa, Homo sapiens
  CDR3 for beta chain variable domain of TCR clone 183430 (TRBV5-7, TRBJ2-6)
CASTSSGANVLTF

SEQ ID NO: 366861 - protein, 15 aa, Homo sapiens
  CDR3 for alpha chain variable domain of TCR clone 183431 (TRAV23/DV6, TRAJ46)
CAASKSGSSGAKLPF

SEQ ID NO: 366862 - protein, 15 aa, Homo sapiens
  CDR3 for beta chain variable domain of TCR clone 183431 (TRBV18, TRBJ2-1)
CASSPPSASYNEQFF

SEQ ID NO: 366863 - protein, 16 aa, Homo sapiens
  CDR3 for alpha chain variable domain of TCR clone 183432 (TRAV30, TRAJ24)
CGTEIVDADSWGKFQF

SEQ ID NO: 366864 - protein, 18 aa, Homo sapiens
  CDR3 for beta chain variable domain of TCR clone 183432 (TRBV11-2, TRBJ2-3)
CASRLGGASRGAPNTQYF

SEQ ID NO: 366865 - protein, 13 aa, Homo sapiens
  CDR3 for alpha chain variable domain of TCR clone 183433 (TRAV13-2, TRAJ48)
CAEMDFGNEKLTF

SEQ ID NO: 366866 - protein, 18 aa, Homo sapiens
  CDR3 for beta chain variable domain of TCR clone 183433 (TRBV20-1, TRBJ2-6)
CSAETTTTHGSGANVLTF

SEQ ID NO: 366867 - protein, 10 aa, Homo sapiens
  CDR3 for alpha chain variable domain of TCR clone 183434 (TRAV30, TRAJ48)
CGIGNEKLTF

SEQ ID NO: 366868 - protein, 14 aa, Homo sapiens
  CDR3 for beta chain variable domain of TCR clone 183434 (TRBV7-9, TRBJ2-7)
CASREGTGSHEQYF

SEQ ID NO: 366869 - protein, 13 aa, Homo sapiens
  CDR3 for alpha chain variable domain of TCR clone 183435 (TRAV3, TRAJ3)
CAVRALGASKIIF

SEQ ID NO: 366870 - protein, 12 aa, Homo sapiens
  CDR3 for beta chain variable domain of TCR clone 183435 (TRBV7-8, TRBJ2-7)
CASEGGPHGQYF

SEQ ID NO: 366871 - protein, 14 aa, Homo sapiens
  CDR3 for alpha chain variable domain of TCR clone 183436 (TRAV17, TRAJ22)
CATSPSGSARQLTF

SEQ ID NO: 366872 - protein, 13 aa, Homo sapiens
  CDR3 for beta chain variable domain of TCR clone 183436 (TRBV5-1, TRBJ2-7)
CASSATGGNEQYF

SEQ ID NO: 366873 - protein, 16 aa, Homo sapiens
  CDR3 for alpha chain variable domain of TCR clone 183437 (TRAV17, TRAJ28)
CATDEYSGAGSYQPTF

SEQ ID NO: 366874 - protein, 13 aa, Homo sapiens
  CDR3 for beta chain variable domain of TCR clone 183437 (TRBV7-9, TRBJ1-2)
CASRTGPNYGYTF

SEQ ID NO: 366875 - protein, 11 aa, Homo sapiens
  CDR3 for alpha chain variable domain of TCR clone 183438 (TRAV35, TRAJ30)
CAPGGVDKIIF

SEQ ID NO: 366876 - protein, 14 aa, Homo sapiens
  CDR3 for beta chain variable domain of TCR clone 183438 (TRBV7-6, TRBJ2-1)
CASSLGGGADEQFF

SEQ ID NO: 366877 - protein, 15 aa, Homo sapiens
  CDR3 for alpha chain variable domain of TCR clone 183439 (TRAV35, TRAJ40)
CAGQLGTSGTYKYIF

SEQ ID NO: 366878 - protein, 11 aa, Homo sapiens
  CDR3 for beta chain variable domain of TCR clone 183439 (TRBV23-1, TRBJ2-7)
SSSGAGLEQYF

SEQ ID NO: 366879 - protein, 12 aa, Homo sapiens
  CDR3 for alpha chain variable domain of TCR clone 183440 (TRAV1-1, TRAJ24)
CAATDSWGKLQF

SEQ ID NO: 366880 - protein, 13 aa, Homo sapiens
  CDR3 for beta chain variable domain of TCR clone 183440 (TRBV27, TRBJ2-7)
CASSFVSSYEQYF

SEQ ID NO: 366881 - protein, 17 aa, Homo sapiens
  CDR3 for alpha chain variable domain of TCR clone 183441 (TRAV3, TRAJ6)
CAVRYGPRAGGSYIPTF

SEQ ID NO: 366882 - protein, 14 aa, Homo sapiens
  CDR3 for beta chain variable domain of TCR clone 183441 (TRBV7-2, TRBJ2-7)
CASSPKASFYEQYF

SEQ ID NO: 366883 - protein, 12 aa, Homo sapiens
  CDR3 for alpha chain variable domain of TCR clone 183442 (TRAV13-1, TRAJ21)
CAAKEGLNKFYF

SEQ ID NO: 366884 - protein, 18 aa, Homo sapiens
  CDR3 for beta chain variable domain of TCR clone 183442 (TRBV7-6, TRBJ2-1)
CASSPRTSGMSSYNEQFF

SEQ ID NO: 366885 - protein, 16 aa, Homo sapiens
  CDR3 for alpha chain variable domain of TCR clone 183443 (TRAV12-3, TRAJ28)
CAMRANSGAGSYQLTL

SEQ ID NO: 366886 - protein, 16 aa, Homo sapiens
  CDR3 for beta chain variable domain of TCR clone 183443 (TRBV7-2, TRBJ1-3)
CASSRLEASSGNTMYF

SEQ ID NO: 366887 - protein, 13 aa, Homo sapiens
  CDR3 for alpha chain variable domain of TCR clone 183444 (TRAV8-3, TRAJ21)
CAVGAYNFNKFYF

SEQ ID NO: 366888 - protein, 18 aa, Homo sapiens
  CDR3 for beta chain variable domain of TCR clone 183444 (TRBV7-7, TRBJ2-1)
CASSLALTSGRSYNEQFF

SEQ ID NO: 366889 - protein, 16 aa, Homo sapiens
  CDR3 for alpha chain variable domain of TCR clone 183445 (TRAV1-2, TRAJ16)
CAVNRFSDGRSCPLQG

SEQ ID NO: 366890 - protein, 13 aa, Homo sapiens
  CDR3 for beta chain variable domain of TCR clone 183445 (TRBV10-3, TRBJ2-7)
CASKLAVNYEQYF

SEQ ID NO: 366891 - protein, 14 aa, Homo sapiens
  CDR3 for alpha chain variable domain of TCR clone 183446 (TRAV36/DV7, TRAJ53)
CAVVAGGSNYKLTF

SEQ ID NO: 366892 - protein, 14 aa, Homo sapiens
  CDR3 for beta chain variable domain of TCR clone 183446 (TRBV19, TRBJ2-1)
CASPTFVLSGEQFF

SEQ ID NO: 366893 - protein, 13 aa, Homo sapiens
  CDR3 for alpha chain variable domain of TCR clone 183447 (TRAV2, TRAJ40)
CAVVTSVTYKYIF

SEQ ID NO: 366894 - protein, 14 aa, Homo sapiens
  CDR3 for beta chain variable domain of TCR clone 183447 (TRBV19, TRBJ2-3)
CASSAPRGTDTQYF

SEQ ID NO: 366895 - protein, 15 aa, Homo sapiens
  CDR3 for alpha chain variable domain of TCR clone 183448 (TRAV35, TRAJ58)
CAGRRQETSGSRLTF

SEQ ID NO: 366896 - protein, 15 aa, Homo sapiens
  CDR3 for beta chain variable domain of TCR clone 183448 (TRBV28, TRBJ1-5)
CASSDQVYSNQPQHF

SEQ ID NO: 366897 - protein, 15 aa, Homo sapiens
  CDR3 for alpha chain variable domain of TCR clone 183449 (TRAV17, TRAJ28)
CATVDSGAGSYQLTF

SEQ ID NO: 366898 - protein, 13 aa, Homo sapiens
  CDR3 for beta chain variable domain of TCR clone 183449 (TRBV5-4, TRBJ2-5)
CASSRQGGETQYF

SEQ ID NO: 366899 - protein, 14 aa, Homo sapiens
  CDR3 for alpha chain variable domain of TCR clone 183450 (TRAV12-2, TRAJ13)
CAVRKTGGYQKVTF

SEQ ID NO: 366900 - protein, 14 aa, Homo sapiens
  CDR3 for beta chain variable domain of TCR clone 183450 (TRBV12-5, TRBJ2-5)
CASGSRTHQETQYF

SEQ ID NO: 366901 - protein, 13 aa, Homo sapiens
  CDR3 for alpha chain variable domain of TCR clone 183451 (TRAV2, TRAJ12)
CAVGADSSYKLIF

SEQ ID NO: 366902 - protein, 13 aa, Homo sapiens
  CDR3 for beta chain variable domain of TCR clone 183451 (TRBV20-1, TRBJ2-1)
CSARASPRDEQSF

SEQ ID NO: 366903 - protein, 14 aa, Homo sapiens
  CDR3 for alpha chain variable domain of TCR clone 183452 (TRAV1-2, TRAJ8)
CAVREDTGFQKLVF

SEQ ID NO: 366904 - protein, 14 aa, Homo sapiens
  CDR3 for beta chain variable domain of TCR clone 183452 (TRBV6-3, TRBJ2-7)
CASSPGTVFYEQYF

SEQ ID NO: 366905 - protein, 15 aa, Homo sapiens
  CDR3 for alpha chain variable domain of TCR clone 183453 (TRAV4, TRAJ42)
CLVGGYGGSQGNLIF

SEQ ID NO: 366906 - protein, 16 aa, Homo sapiens
  CDR3 for beta chain variable domain of TCR clone 183453 (TRBV27, TRBJ1-1)
CASSTRTGGVGTEAFV

SEQ ID NO: 366907 - protein, 13 aa, Homo sapiens
  CDR3 for alpha chain variable domain of TCR clone 183454 (TRAV1-1, TRAJ11)
CAVLNSGYGTLTF

SEQ ID NO: 366908 - protein, 15 aa, Homo sapiens
  CDR3 for beta chain variable domain of TCR clone 183454 (TRBV7-6, TRBJ1-5)
CASSQSSGINQPQHF

SEQ ID NO: 366909 - protein, 14 aa, Homo sapiens
  CDR3 for alpha chain variable domain of TCR clone 183455 (TRAV21, TRAJ45)
CAVHSGGGADGRTF

SEQ ID NO: 366910 - protein, 14 aa, Homo sapiens
  CDR3 for beta chain variable domain of TCR clone 183455 (TRBV20-1, TRBJ2-1)
CSARRLAEANEQFF

SEQ ID NO: 366911 - protein, 13 aa, Homo sapiens
  CDR3 for alpha chain variable domain of TCR clone 183456 (TRAV13-1, TRAJ6)
CAARLGGSYIPTF

SEQ ID NO: 366912 - protein, 16 aa, Homo sapiens
  CDR3 for beta chain variable domain of TCR clone 183456 (TRBV7-9, TRBJ2-2)
CASSLATGVGTGELFF

SEQ ID NO: 366913 - protein, 14 aa, Homo sapiens
  CDR3 for alpha chain variable domain of TCR clone 183457 (TRAV9-2, TRAJ9)
CALSDPTGGFKTIF

SEQ ID NO: 366914 - protein, 14 aa, Homo sapiens
  CDR3 for beta chain variable domain of TCR clone 183457 (TRBV20-1, TRBJ2-4)
CSARDRGQGGSQYF

SEQ ID NO: 366915 - protein, 12 aa, Homo sapiens
  CDR3 for alpha chain variable domain of TCR clone 183458 (TRAV26-1, TRAJ13)
CIVARGYRNGTF

SEQ ID NO: 366916 - protein, 14 aa, Homo sapiens
  CDR3 for beta chain variable domain of TCR clone 183458 (TRBV7-2, TRBJ2-7)
CASSPKTSFYEQYF

SEQ ID NO: 366917 - protein, 14 aa, Homo sapiens
  CDR3 for alpha chain variable domain of TCR clone 183459 (TRAV27, TRAJ17)
CRSTIRAACNKLTF

SEQ ID NO: 366918 - protein, 16 aa, Homo sapiens
  CDR3 for beta chain variable domain of TCR clone 183459 (TRBV5-7, TRBJ2-5)
CASTLAPAGGRETQYF

SEQ ID NO: 366919 - protein, 15 aa, Homo sapiens
  CDR3 for alpha chain variable domain of TCR clone 183460 (TRAV2, TRAJ9)
CAVEDRGTGGFKTIF

SEQ ID NO: 366920 - protein, 16 aa, Homo sapiens
  CDR3 for beta chain variable domain of TCR clone 183460 (TRBV5-1, TRBJ2-3)
CASSLGLAVYTDTQYF

SEQ ID NO: 366921 - protein, 15 aa, Homo sapiens
  CDR3 for alpha chain variable domain of TCR clone 183461 (TRAV23/DV6, TRAJ13)
YAAWPGGGGYQKVTF

SEQ ID NO: 366922 - protein, 17 aa, Homo sapiens
  CDR3 for beta chain variable domain of TCR clone 183461 (TRBV19, TRBJ2-7)
CARSISFYDSYPYEQYF

SEQ ID NO: 366923 - protein, 17 aa, Homo sapiens
  CDR3 for alpha chain variable domain of TCR clone 183462 (TRAV2, TRAJ36)
CAVEGRGNWGKHPLLWD

SEQ ID NO: 366924 - protein, 14 aa, Homo sapiens
  CDR3 for beta chain variable domain of TCR clone 183462 (TRBV7-9, TRBJ2-5)
CASSLDTAQETQYF

SEQ ID NO: 366925 - protein, 15 aa, Homo sapiens
  CDR3 for alpha chain variable domain of TCR clone 183463 (TRAV3, TRAJ22)
CAVRDRGGSARQLTL

SEQ ID NO: 366926 - protein, 13 aa, Homo sapiens
  CDR3 for beta chain variable domain of TCR clone 183463 (TRBV2, TRBJ1-1)
CASSEGGNTEAFF

SEQ ID NO: 366927 - protein, 23 aa, Homo sapiens
  CDR3 for alpha chain variable domain of TCR clone 183464 (TRAV26-1, TRAJ38)
CIAENAGNNHNQNPDPAVYQLRD

SEQ ID NO: 366928 - protein, 13 aa, Homo sapiens
  CDR3 for beta chain variable domain of TCR clone 183464 (TRBV20-1, TRBJ1-1)
CSARGGGNTEAFF

SEQ ID NO: 366929 - protein, 13 aa, Homo sapiens
  CDR3 for alpha chain variable domain of TCR clone 183465 (TRAV21, TRAJ27)
CAARPGNAGKSLF

SEQ ID NO: 366930 - protein, 14 aa, Homo sapiens
  CDR3 for beta chain variable domain of TCR clone 183465 (TRBV7-6, TRBJ2-3)
CASSLGTVTDTQYF

SEQ ID NO: 366931 - protein, 12 aa, Homo sapiens
  CDR3 for alpha chain variable domain of TCR clone 183466 (TRAV8-3, TRAJ26)
CAGDNYGQNFVF

SEQ ID NO: 366932 - protein, 14 aa, Homo sapiens
  CDR3 for beta chain variable domain of TCR clone 183466 (TRBV15, TRBJ2-3)
CATRSGTSTDTQYF

SEQ ID NO: 366933 - protein, 11 aa, Homo sapiens
  CDR3 for alpha chain variable domain of TCR clone 183467 (TRAV13-1, TRAJ39)
CASHAGNMLTF

SEQ ID NO: 366934 - protein, 14 aa, Homo sapiens
  CDR3 for beta chain variable domain of TCR clone 183467 (TRBV11-2, TRBJ1-5)
CASSLDRGSQPQHF

SEQ ID NO: 366935 - protein, 11 aa, Homo sapiens
  CDR3 for alpha chain variable domain of TCR clone 183468 (TRAV13-1, TRAJ39)
CASHAGNMLTF

SEQ ID NO: 366936 - protein, 16 aa, Homo sapiens
  CDR3 for beta chain variable domain of TCR clone 183468 (TRBV7-9, TRBJ1-2)
CASSLGFSSGEDGYIF

SEQ ID NO: 366937 - protein, 13 aa, Homo sapiens
  CDR3 for alpha chain variable domain of TCR clone 183469 (TRAV12-3, TRAJ53)
CAMRGGSNYKLTF

SEQ ID NO: 366938 - protein, 16 aa, Homo sapiens
  CDR3 for beta chain variable domain of TCR clone 183469 (TRBV5-4, TRBJ2-3)
CASQQPGAGGADTQYF

SEQ ID NO: 366939 - protein, 17 aa, Homo sapiens
  CDR3 for alpha chain variable domain of TCR clone 183470 (TRAV3, TRAJ6)
CAVRDGPRVGGSYIPTF

SEQ ID NO: 366940 - protein, 12 aa, Homo sapiens
  CDR3 for beta chain variable domain of TCR clone 183470 (TRBV11-2, TRBJ2-2)
CASSLGGGELFV

SEQ ID NO: 366941 - protein, 17 aa, Homo sapiens
  CDR3 for alpha chain variable domain of TCR clone 183471 (TRAV2, TRAJ22)
ILQVREAEAAEQRQLTF

SEQ ID NO: 366942 - protein, 16 aa, Homo sapiens
  CDR3 for beta chain variable domain of TCR clone 183471 (TRBV2, TRBJ2-5)
CASSETQGVGEETQYF

SEQ ID NO: 366943 - protein, 13 aa, Homo sapiens
  CDR3 for alpha chain variable domain of TCR clone 183472 (TRAV13-1, TRAJ53)
QAARGGSNYKLTF

SEQ ID NO: 366944 - protein, 14 aa, Homo sapiens
  CDR3 for beta chain variable domain of TCR clone 183472 (TRBV11-2, TRBJ2-7)
CASSLGAGAYEQYF

SEQ ID NO: 366945 - protein, 17 aa, Homo sapiens
  CDR3 for alpha chain variable domain of TCR clone 183473 (TRAV3, TRAJ7)
CAVRDMSPLEGTTDSLL

SEQ ID NO: 366946 - protein, 12 aa, Homo sapiens
  CDR3 for beta chain variable domain of TCR clone 183473 (TRBV11-2, TRBJ2-1)
CASSPGNNEQFF

SEQ ID NO: 366947 - protein, 16 aa, Homo sapiens
  CDR3 for alpha chain variable domain of TCR clone 183474 (TRAV30, TRAJ24)
CGTEIVDADSWGRFQF

SEQ ID NO: 366948 - protein, 14 aa, Homo sapiens
  CDR3 for beta chain variable domain of TCR clone 183474 (TRBV7-2, TRBJ1-2)
CASSQTGSTYGYTF

SEQ ID NO: 366949 - protein, 16 aa, Homo sapiens
  CDR3 for alpha chain variable domain of TCR clone 183475 (TRAV3, TRAJ42)
CAVSDIEGGSQGNLIF

SEQ ID NO: 366950 - protein, 14 aa, Homo sapiens
  CDR3 for beta chain variable domain of TCR clone 183475 (TRBV18, TRBJ1-1)
CASSPPTGRTEAFF

SEQ ID NO: 366951 - protein, 13 aa, Homo sapiens
  CDR3 for alpha chain variable domain of TCR clone 183476 (TRAV35, TRAJ21)
GAGQLSNFNKFYF

SEQ ID NO: 366952 - protein, 11 aa, Homo sapiens
  CDR3 for beta chain variable domain of TCR clone 183476 (TRBV7-6, TRBJ2-5)
CASSSQETQYF

SEQ ID NO: 366953 - protein, 15 aa, Homo sapiens
  CDR3 for alpha chain variable domain of TCR clone 183477 (TRAV26-1, TRAJ17)
CIVRVVKAAGNKLTF

SEQ ID NO: 366954 - protein, 15 aa, Homo sapiens
  CDR3 for beta chain variable domain of TCR clone 183477 (TRBV11-1, TRBJ2-7)
CASSHDSGGDYEQYF

SEQ ID NO: 366955 - protein, 14 aa, Homo sapiens
  CDR3 for alpha chain variable domain of TCR clone 183478 (TRAV1-2, TRAJ16)
CAVNRFSDGQKLPF

SEQ ID NO: 366956 - protein, 12 aa, Homo sapiens
  CDR3 for beta chain variable domain of TCR clone 183478 (TRBV5-1, TRBJ2-7)
CASSSTTYEQYF

SEQ ID NO: 366957 - protein, 12 aa, Homo sapiens
  CDR3 for alpha chain variable domain of TCR clone 183479 (TRAV21, TRAJ30)
CAVMNRDDKIIF

SEQ ID NO: 366958 - protein, 14 aa, Homo sapiens
  CDR3 for beta chain variable domain of TCR clone 183479 (TRBV4-2, TRBJ2-1)
CASGLDRAYNEQFF

SEQ ID NO: 366959 - protein, 16 aa, Homo sapiens
  CDR3 for alpha chain variable domain of TCR clone 183480 (TRAV30, TRAJ24)
CGTEIVGADSWGKFQF

SEQ ID NO: 366960 - protein, 15 aa, Homo sapiens
  CDR3 for beta chain variable domain of TCR clone 183480 (TRBV7-9, TRBJ1-4)
CASSARTGGNETLFF

SEQ ID NO: 366961 - protein, 15 aa, Homo sapiens
  CDR3 for alpha chain variable domain of TCR clone 183481 (TRAV9-2, TRAJ49)
CALSPPDDTGNQFYF

SEQ ID NO: 366962 - protein, 13 aa, Homo sapiens
  CDR3 for beta chain variable domain of TCR clone 183481 (TRBV29-1, TRBJ2-5)
CSVGGTSAETQYF

SEQ ID NO: 366963 - protein, 16 aa, Homo sapiens
  CDR3 for alpha chain variable domain of TCR clone 183482 (TRAV12-3, TRAJ53)
CAMSVGSGGSNYKLTF

SEQ ID NO: 366964 - protein, 15 aa, Homo sapiens
  CDR3 for beta chain variable domain of TCR clone 183482 (TRBV4-3, TRBJ2-7)
CASSQDLGSSYEQYF

SEQ ID NO: 366965 - protein, 13 aa, Homo sapiens
  CDR3 for alpha chain variable domain of TCR clone 183483 (TRAV12-1, TRAJ16)
CVVSTRNGQKLLF

SEQ ID NO: 366966 - protein, 19 aa, Homo sapiens
  CDR3 for beta chain variable domain of TCR clone 183483 (TRBV6-1, TRBJ2-5)
CDSSRFGAGGPGLEETQYF

SEQ ID NO: 366967 - protein, 11 aa, Homo sapiens
  CDR3 for alpha chain variable domain of TCR clone 183484 (TRAV26-1, TRAJ37)
CIVRVGRKLIF

SEQ ID NO: 366968 - protein, 14 aa, Homo sapiens
  CDR3 for beta chain variable domain of TCR clone 183484 (TRBV9, TRBJ2-4)
CASSPSGTSGYQYF

SEQ ID NO: 366969 - protein, 12 aa, Homo sapiens
  CDR3 for alpha chain variable domain of TCR clone 183485 (TRAV8-3, TRAJ26)
CAGDNYSQNFVF

SEQ ID NO: 366970 - protein, 13 aa, Homo sapiens
  CDR3 for beta chain variable domain of TCR clone 183485 (TRBV20-1, TRBJ1-1)
CSAPLGGGTEAFF

SEQ ID NO: 366971 - protein, 12 aa, Homo sapiens
  CDR3 for alpha chain variable domain of TCR clone 183486 (TRAV13-2, TRAJ8)
CAPWLGFQKLVF

SEQ ID NO: 366972 - protein, 13 aa, Homo sapiens
  CDR3 for beta chain variable domain of TCR clone 183486 (TRBV20-1, TRBJ1-1)
CSAPLGGGTEAFF

SEQ ID NO: 366973 - protein, 13 aa, Homo sapiens
  CDR3 for alpha chain variable domain of TCR clone 183487 (TRAV2, TRAJ21)
CAVEDLNFNKFYF

SEQ ID NO: 366974 - protein, 16 aa, Homo sapiens
  CDR3 for beta chain variable domain of TCR clone 183487 (TRBV27, TRBJ2-2)
CASSFRGLVRTGELFF

SEQ ID NO: 366975 - protein, 12 aa, Homo sapiens
  CDR3 for alpha chain variable domain of TCR clone 183488 (TRAV8-4, TRAJ22)
CAATGSARQLTF

SEQ ID NO: 366976 - protein, 13 aa, Homo sapiens
  CDR3 for beta chain variable domain of TCR clone 183488 (TRBV10-3, TRBJ2-7)
CASKLAVNYEQYF

SEQ ID NO: 366977 - protein, 14 aa, Homo sapiens
  CDR3 for alpha chain variable domain of TCR clone 183489 (TRAV38-1, TRAJ45)
CASHSGGGADGLTF

SEQ ID NO: 366978 - protein, 13 aa, Homo sapiens
  CDR3 for beta chain variable domain of TCR clone 183489 (TRBV15, TRBJ2-5)
CATSQIGEETQYF

SEQ ID NO: 366979 - protein, 11 aa, Homo sapiens
  CDR3 for alpha chain variable domain of TCR clone 183490 (TRAV12-3, TRAJ27)
CAMANAGKSTF

SEQ ID NO: 366980 - protein, 12 aa, Homo sapiens
  CDR3 for beta chain variable domain of TCR clone 183490 (TRBV12-4, TRBJ1-4)
CASSRSGAGLFF

SEQ ID NO: 366981 - protein, 23 aa, Homo sapiens
  CDR3 for alpha chain variable domain of TCR clone 183491 (TRAV8-3, )
CAVGASNAGNNNIQNPDPAVYQL

SEQ ID NO: 366982 - protein, 15 aa, Homo sapiens
  CDR3 for beta chain variable domain of TCR clone 183491 (TRBV11-3, TRBJ1-3)
CASSLFCPSGNTIYF

SEQ ID NO: 366983 - protein, 18 aa, Homo sapiens
  CDR3 for alpha chain variable domain of TCR clone 183492 (TRAV26-1, TRAJ52)
CIVRVEGAGGTSYGKLTF

SEQ ID NO: 366984 - protein, 14 aa, Homo sapiens
  CDR3 for beta chain variable domain of TCR clone 183492 (TRBV20-1, TRBJ2-7)
CSAKRGRSSYEQYF

SEQ ID NO: 366985 - protein, 14 aa, Homo sapiens
  CDR3 for alpha chain variable domain of TCR clone 183493 (TRAV29/DV5, TRAJ36)
CAARRKNGANNLFF

SEQ ID NO: 366986 - protein, 16 aa, Homo sapiens
  CDR3 for beta chain variable domain of TCR clone 183493 (TRBV12-5, TRBJ2-5)
CASGPRTSGNQETQYF

SEQ ID NO: 366987 - protein, 16 aa, Homo sapiens
  CDR3 for alpha chain variable domain of TCR clone 183494 (TRAV12-3, TRAJ53)
CAMSPGSGGSNDKLTF

SEQ ID NO: 366988 - protein, 14 aa, Homo sapiens
  CDR3 for beta chain variable domain of TCR clone 183494 (TRBV12-5, TRBJ2-5)
CASGSRTHQETQYF

SEQ ID NO: 366989 - protein, 14 aa, Homo sapiens
  CDR3 for alpha chain variable domain of TCR clone 183495 (TRAV12-1, TRAJ17)
CVVNYKAAGNKLTF

SEQ ID NO: 366990 - protein, 13 aa, Homo sapiens
  CDR3 for beta chain variable domain of TCR clone 183495 (TRBV7-6, TRBJ2-7)
CASSLDHTHEQYF

SEQ ID NO: 366991 - protein, 14 aa, Homo sapiens
  CDR3 for alpha chain variable domain of TCR clone 183496 (TRAV1-2, TRAJ16)
CAVNRFSDGQKLLF

SEQ ID NO: 366992 - protein, 15 aa, Homo sapiens
  CDR3 for beta chain variable domain of TCR clone 183496 (TRBV28, TRBJ2-2)
CASSLLFPGAGELFF

SEQ ID NO: 366993 - protein, 13 aa, Homo sapiens
  CDR3 for alpha chain variable domain of TCR clone 183497 (TRAV12-2, TRAJ3)
CAFQYSSASKIIL

SEQ ID NO: 366994 - protein, 11 aa, Homo sapiens
  CDR3 for beta chain variable domain of TCR clone 183497 (TRBV20-1, TRBJ2-3)
CSGTSSTTQYF

SEQ ID NO: 366995 - protein, 15 aa, Homo sapiens
  CDR3 for alpha chain variable domain of TCR clone 183498 (TRAV8-3, TRAJ7)
CAVGSISYGNNSLAF

SEQ ID NO: 366996 - protein, 15 aa, Homo sapiens
  CDR3 for beta chain variable domain of TCR clone 183498 (TRBV4-2, TRBJ1-1)
CASSQEDLPRTEAFF

SEQ ID NO: 366997 - protein, 14 aa, Homo sapiens
  CDR3 for alpha chain variable domain of TCR clone 183499 (TRAV8-6, TRAJ53)
CAALVVGSNYKLTF

SEQ ID NO: 366998 - protein, 15 aa, Homo sapiens
  CDR3 for beta chain variable domain of TCR clone 183499 (TRBV20-1, TRBJ2-3)
CSAEPLAGHGDTQYF

SEQ ID NO: 366999 - protein, 12 aa, Homo sapiens
  CDR3 for alpha chain variable domain of TCR clone 183500 (TRAV38-1, TRAJ20)
CAFIWNDYKLSF

SEQ ID NO: 367000 - protein, 15 aa, Homo sapiens
  CDR3 for beta chain variable domain of TCR clone 183500 (TRBV4-1, TRBJ1-4)
CASSDTGGTNEKLFF

SEQ ID NO: 367001 - protein, 14 aa, Homo sapiens
  CDR3 for alpha chain variable domain of TCR clone 183501 (TRAV27, TRAJ22)
CAGVSVLGKRQLTV

SEQ ID NO: 367002 - protein, 17 aa, Homo sapiens
  CDR3 for beta chain variable domain of TCR clone 183501 (TRBV14, TRBJ2-1)
CASSQDRRVTSYNEQFF

SEQ ID NO: 367003 - protein, 12 aa, Homo sapiens
  CDR3 for alpha chain variable domain of TCR clone 183502 (TRAV41, TRAJ58)
CAVETSSSRLTF

SEQ ID NO: 367004 - protein, 16 aa, Homo sapiens
  CDR3 for beta chain variable domain of TCR clone 183502 (TRBV24-1, TRBJ2-3)
CATSDPGTGATDTQYF

SEQ ID NO: 367005 - protein, 14 aa, Homo sapiens
  CDR3 for alpha chain variable domain of TCR clone 183503 (TRAV12-1, TRAJ17)
CVVNFKAAGNKLTF

SEQ ID NO: 367006 - protein, 17 aa, Homo sapiens
  CDR3 for beta chain variable domain of TCR clone 183503 (TRBV20-1, TRBJ2-1)
CSASASGLAGFYNEQFF

SEQ ID NO: 367007 - protein, 14 aa, Homo sapiens
  CDR3 for alpha chain variable domain of TCR clone 183504 (TRAV12-1, TRAJ45)
CVVMRSGGADGLTF

SEQ ID NO: 367008 - protein, 18 aa, Homo sapiens
  CDR3 for beta chain variable domain of TCR clone 183504 (TRBV19, TRBJ2-6)
CASSKNRGTHSGANVLTF

SEQ ID NO: 367009 - protein, 14 aa, Homo sapiens
  CDR3 for alpha chain variable domain of TCR clone 183505 (TRAV8-3, TRAJ4)
CAVGAAGGYNKLIF

SEQ ID NO: 367010 - protein, 15 aa, Homo sapiens
  CDR3 for beta chain variable domain of TCR clone 183505 (TRBV11-3, TRBJ2-3)
CASLKDGREGDTKYF

SEQ ID NO: 367011 - protein, 15 aa, Homo sapiens
  CDR3 for alpha chain variable domain of TCR clone 183506 (TRAV12-2, TRAJ53)
CAVNGGGGSNYKLTF

SEQ ID NO: 367012 - protein, 16 aa, Homo sapiens
  CDR3 for beta chain variable domain of TCR clone 183506 (TRBV20-1, TRBJ2-2)
CSARSAGGLGTGELFF

SEQ ID NO: 367013 - protein, 13 aa, Homo sapiens
  CDR3 for alpha chain variable domain of TCR clone 183507 (TRAV13-1, TRAJ20)
CAAGVSNDYKLSF

SEQ ID NO: 367014 - protein, 16 aa, Homo sapiens
  CDR3 for beta chain variable domain of TCR clone 183507 (TRBV11-1, TRBJ1-1)
CATNPRDRAFNTEAFF

SEQ ID NO: 367015 - protein, 12 aa, Homo sapiens
  CDR3 for alpha chain variable domain of TCR clone 183508 (TRAV12-3, TRAJ20)
CAMVRGDYKLSF

SEQ ID NO: 367016 - protein, 19 aa, Homo sapiens
  CDR3 for beta chain variable domain of TCR clone 183508 (TRBV28, TRBJ2-1)
CASSFSIRGSGRTRYEQFF

SEQ ID NO: 367017 - protein, 22 aa, Homo sapiens
  CDR3 for alpha chain variable domain of TCR clone 183509 (TRAV40, )
CLLGDGIPDIQNPDPAGYQLRD

SEQ ID NO: 367018 - protein, 16 aa, Homo sapiens
  CDR3 for beta chain variable domain of TCR clone 183509 (TRBV20-1, TRBJ1-5)
CSADLPGQQTNQPQHF

SEQ ID NO: 367019 - protein, 13 aa, Homo sapiens
  CDR3 for alpha chain variable domain of TCR clone 183510 (TRAV8-1, TRAJ23)
CAVTGGQGGKLIF

SEQ ID NO: 367020 - protein, 15 aa, Homo sapiens
  CDR3 for beta chain variable domain of TCR clone 183510 (TRBV20-1, TRBJ2-2)
CSAIPGHANTGELFF

SEQ ID NO: 367021 - protein, 11 aa, Homo sapiens
  CDR3 for alpha chain variable domain of TCR clone 183511 (TRAV2, TRAJ13)
CASGGYQKVTI

SEQ ID NO: 367022 - protein, 14 aa, Homo sapiens
  CDR3 for beta chain variable domain of TCR clone 183511 (TRBV7-3, TRBJ2-1)
CASSLAGGTNEQFF

SEQ ID NO: 367023 - protein, 13 aa, Homo sapiens
  CDR3 for alpha chain variable domain of TCR clone 183512 (TRAV26-2, TRAJ41)
FILRDASGYALNF

SEQ ID NO: 367024 - protein, 16 aa, Homo sapiens
  CDR3 for beta chain variable domain of TCR clone 183512 (TRBV12-4, TRBJ2-7)
CASSLIGGTGTYEQYF

SEQ ID NO: 367025 - protein, 15 aa, Homo sapiens
  CDR3 for alpha chain variable domain of TCR clone 183513 (TRAV12-2, TRAJ53)
CAVNGGGGSNYKLTL

SEQ ID NO: 367026 - protein, 12 aa, Homo sapiens
  CDR3 for beta chain variable domain of TCR clone 183513 (TRBV27, TRBJ1-6)
CASKLFQGPLHF

SEQ ID NO: 367027 - protein, 15 aa, Homo sapiens
  CDR3 for alpha chain variable domain of TCR clone 183514 (TRAV26-1, TRAJ29)
CIVRVEGSGNTPLVF

SEQ ID NO: 367028 - protein, 14 aa, Homo sapiens
  CDR3 for beta chain variable domain of TCR clone 183514 (TRBV20-1, TRBJ2-4)
CSASGRVGENIQHF

SEQ ID NO: 367029 - protein, 12 aa, Homo sapiens
  CDR3 for alpha chain variable domain of TCR clone 183515 (TRAV29/DV5, TRAJ26)
CAAILSGQNFVF

SEQ ID NO: 367030 - protein, 15 aa, Homo sapiens
  CDR3 for beta chain variable domain of TCR clone 183515 (TRBV19, TRBJ1-5)
CASSDSGPRNQTQHF

SEQ ID NO: 367031 - protein, 16 aa, Homo sapiens
  CDR3 for alpha chain variable domain of TCR clone 183516 (TRAV3, TRAJ27)
CSVRDPQGTNAGKSTF

SEQ ID NO: 367032 - protein, 17 aa, Homo sapiens
  CDR3 for beta chain variable domain of TCR clone 183516 (TRBV4-1, TRBJ2-7)
CASSQGRGLQTSYEQYF

SEQ ID NO: 367033 - protein, 14 aa, Homo sapiens
  CDR3 for alpha chain variable domain of TCR clone 183517 (TRAV8-4, TRAJ48)
CAVSETFGNEKLTF

SEQ ID NO: 367034 - protein, 14 aa, Homo sapiens
  CDR3 for beta chain variable domain of TCR clone 183517 (TRBV20-1, TRBJ1-1)
CSAPPADMNTEAFF

SEQ ID NO: 367035 - protein, 15 aa, Homo sapiens
  CDR3 for alpha chain variable domain of TCR clone 183518 (TRAV17, TRAJ37)
CATDGGSSNTGKLIF

SEQ ID NO: 367036 - protein, 14 aa, Homo sapiens
  CDR3 for beta chain variable domain of TCR clone 183518 (TRBV5-1, TRBJ2-7)
CASSRGESLYEQYF

SEQ ID NO: 367037 - protein, 17 aa, Homo sapiens
  CDR3 for alpha chain variable domain of TCR clone 183519 (TRAV3, TRAJ38)
CAVSDCLNAGNNRKLIW

SEQ ID NO: 367038 - protein, 14 aa, Homo sapiens
  CDR3 for beta chain variable domain of TCR clone 183519 (TRBV5-5, TRBJ1-5)
CASSGQGVDQPQHF

SEQ ID NO: 367039 - protein, 13 aa, Homo sapiens
  CDR3 for alpha chain variable domain of TCR clone 183520 (TRAV36/DV7, TRAJ37)
CAVFSSNTGKLIF

SEQ ID NO: 367040 - protein, 17 aa, Homo sapiens
  CDR3 for beta chain variable domain of TCR clone 183520 (TRBV11-2, TRBJ2-3)
CQQLRGASRGAPNTQYF

SEQ ID NO: 367041 - protein, 12 aa, Homo sapiens
  CDR3 for alpha chain variable domain of TCR clone 183521 (TRAV8-3, TRAJ26)
CAVITMVRILSL

SEQ ID NO: 367042 - protein, 13 aa, Homo sapiens
  CDR3 for beta chain variable domain of TCR clone 183521 (TRBV20-1, TRBJ1-1)
CSAPLGGGTEAFF

SEQ ID NO: 367043 - protein, 14 aa, Homo sapiens
  CDR3 for alpha chain variable domain of TCR clone 183522 (TRAV12-2, TRAJ9)
FAVNMEGGGFKTIF

SEQ ID NO: 367044 - protein, 14 aa, Homo sapiens
  CDR3 for beta chain variable domain of TCR clone 183522 (TRBV2, TRBJ2-5)
CASSEVLAQETQYF

SEQ ID NO: 367045 - protein, 14 aa, Homo sapiens
  CDR3 for alpha chain variable domain of TCR clone 183523 (TRAV2, TRAJ37)
CAVDFTSNTGKLFF

SEQ ID NO: 367046 - protein, 11 aa, Homo sapiens
  CDR3 for beta chain variable domain of TCR clone 183523 (TRBV11-2, TRBJ1-1)
CASSINTEAFF

SEQ ID NO: 367047 - protein, 11 aa, Homo sapiens
  CDR3 for alpha chain variable domain of TCR clone 183524 (TRAV36/DV7, TRAJ43)
CAVEEIGDMRF

SEQ ID NO: 367048 - protein, 14 aa, Homo sapiens
  CDR3 for beta chain variable domain of TCR clone 183524 (TRBV12-5, TRBJ2-5)
CASGSRTHQETQYF

SEQ ID NO: 367049 - protein, 13 aa, Homo sapiens
  CDR3 for alpha chain variable domain of TCR clone 183525 (TRAV25, TRAJ47)
CAGHREYGKKLVF

SEQ ID NO: 367050 - protein, 17 aa, Homo sapiens
  CDR3 for beta chain variable domain of TCR clone 183525 (TRBV7-8, TRBJ2-5)
CASSLASGGRFQETQYF

SEQ ID NO: 367051 - protein, 14 aa, Homo sapiens
  CDR3 for alpha chain variable domain of TCR clone 183526 (TRAV8-3, TRAJ4)
CAVGAAGGYNKLIC

SEQ ID NO: 367052 - protein, 14 aa, Homo sapiens
  CDR3 for beta chain variable domain of TCR clone 183526 (TRBV4-1, TRBJ2-7)
CASIPSREGFEQYF

SEQ ID NO: 367053 - protein, 11 aa, Homo sapiens
  CDR3 for alpha chain variable domain of TCR clone 183527 (TRAV21, TRAJ9)
CAVPGGFKTIF

SEQ ID NO: 367054 - protein, 16 aa, Homo sapiens
  CDR3 for beta chain variable domain of TCR clone 183527 (TRBV7-9, TRBJ2-5)
GHVSLPLQGAQETQYF

SEQ ID NO: 367055 - protein, 13 aa, Homo sapiens
  CDR3 for alpha chain variable domain of TCR clone 183528 (TRAV2, TRAJ40)
CAVVTSGTYKYIF

SEQ ID NO: 367056 - protein, 15 aa, Homo sapiens
  CDR3 for beta chain variable domain of TCR clone 183528 (TRBV6-3, TRBJ2-7)
CASSSTGTVFYEQYF

SEQ ID NO: 367057 - protein, 13 aa, Homo sapiens
  CDR3 for alpha chain variable domain of TCR clone 183529 (TRAV21, TRAJ27)
CAARPGNAGKSTF

SEQ ID NO: 367058 - protein, 21 aa, Homo sapiens
  CDR3 for beta chain variable domain of TCR clone 183529 (TRBV24-1, TRBJ2-5)
ESAIPNQTALYFCATRETQYF

SEQ ID NO: 367059 - protein, 14 aa, Homo sapiens
  CDR3 for alpha chain variable domain of TCR clone 183530 (TRAV16, TRAJ57)
CALPTQGGYEKLVF

SEQ ID NO: 367060 - protein, 15 aa, Homo sapiens
  CDR3 for beta chain variable domain of TCR clone 183530 (TRBV28, TRBJ1-3)
CASWGGHLSGNTIYF

SEQ ID NO: 367061 - protein, 12 aa, Homo sapiens
  CDR3 for alpha chain variable domain of TCR clone 183531 (TRAV8-3, TRAJ6)
CAVAGGSYIPTF

SEQ ID NO: 367062 - protein, 14 aa, Homo sapiens
  CDR3 for beta chain variable domain of TCR clone 183531 (TRBV7-2, TRBJ2-7)
CASSPKTSFYEQYF

SEQ ID NO: 367063 - protein, 13 aa, Homo sapiens
  CDR3 for alpha chain variable domain of TCR clone 183532 (TRAV8-3, TRAJ44)
CAVVPGTASKLTF

SEQ ID NO: 367064 - protein, 14 aa, Homo sapiens
  CDR3 for beta chain variable domain of TCR clone 183532 (TRBV11-2, TRBJ2-3)
CASSGLARTDTQHF

SEQ ID NO: 367065 - protein, 14 aa, Homo sapiens
  CDR3 for alpha chain variable domain of TCR clone 183533 (TRAV1-2, TRAJ16)
CAVNRFSDGQKLLF

SEQ ID NO: 367066 - protein, 12 aa, Homo sapiens
  CDR3 for beta chain variable domain of TCR clone 183533 (TRBV6-6, TRBJ2-5)
CASNRQSGTQYF

SEQ ID NO: 367067 - protein, 13 aa, Homo sapiens
  CDR3 for alpha chain variable domain of TCR clone 183534 (TRAV26-1, TRAJ34)
CIVRPWITDKLIF

SEQ ID NO: 367068 - protein, 14 aa, Homo sapiens
  CDR3 for beta chain variable domain of TCR clone 183534 (TRBV12-4, TRBJ1-4)
CASSRQGANENLFF

SEQ ID NO: 367069 - protein, 16 aa, Homo sapiens
  CDR3 for alpha chain variable domain of TCR clone 183535 (TRAV16, TRAJ52)
CALSAAGGTSYGKLTF

SEQ ID NO: 367070 - protein, 13 aa, Homo sapiens
  CDR3 for beta chain variable domain of TCR clone 183535 (TRBV3-1, TRBJ1-5)
CASSRFGDQPQHF

SEQ ID NO: 367071 - protein, 14 aa, Homo sapiens
  CDR3 for alpha chain variable domain of TCR clone 183536 (TRAV13-2, TRAJ26)
CAENLGKYGQNFVF

SEQ ID NO: 367072 - protein, 14 aa, Homo sapiens
  CDR3 for beta chain variable domain of TCR clone 183536 (TRBV19, TRBJ1-3)
CASNRGNSGNTIYF

SEQ ID NO: 367073 - protein, 17 aa, Homo sapiens
  CDR3 for alpha chain variable domain of TCR clone 183537 (TRAV3, TRAJ42)
CAVRDRDYGGRKGNLIF

SEQ ID NO: 367074 - protein, 14 aa, Homo sapiens
  CDR3 for beta chain variable domain of TCR clone 183537 (TRBV19, TRBJ2-5)
CASSMTGQQETQYF

SEQ ID NO: 367075 - protein, 14 aa, Homo sapiens
  CDR3 for alpha chain variable domain of TCR clone 183538 (TRAV17, TRAJ20)
CATLSGSNDHKLSF

SEQ ID NO: 367076 - protein, 16 aa, Homo sapiens
  CDR3 for beta chain variable domain of TCR clone 183538 (TRBV27, TRBJ2-2)
CASSFRGLVRTVELFF

SEQ ID NO: 367077 - protein, 16 aa, Homo sapiens
  CDR3 for alpha chain variable domain of TCR clone 183539 (TRAV3, TRAJ10)
CAVRDMRAGGGNKLTF

SEQ ID NO: 367078 - protein, 13 aa, Homo sapiens
  CDR3 for beta chain variable domain of TCR clone 183539 (TRBV2, TRBJ2-7)
CASSVGGSGEQYF

SEQ ID NO: 367079 - protein, 14 aa, Homo sapiens
  CDR3 for alpha chain variable domain of TCR clone 183540 (TRAV2, TRAJ22)
CAVGRGGSARQLTF

SEQ ID NO: 367080 - protein, 14 aa, Homo sapiens
  CDR3 for beta chain variable domain of TCR clone 183540 (TRBV28, TRBJ2-7)
CASSLLRISYEQYF

SEQ ID NO: 367081 - protein, 17 aa, Homo sapiens
  CDR3 for alpha chain variable domain of TCR clone 183541 (TRAV3, TRAJ58)
CAVSSWVGETSGSRLTF

SEQ ID NO: 367082 - protein, 14 aa, Homo sapiens
  CDR3 for beta chain variable domain of TCR clone 183541 (TRBV4-2, TRBJ2-1)
CASGLDRAYNEQFF

SEQ ID NO: 367083 - protein, 15 aa, Homo sapiens
  CDR3 for alpha chain variable domain of TCR clone 183542 (TRAV26-1, TRAJ22)
CIVRVSVWFCKSTDL

SEQ ID NO: 367084 - protein, 13 aa, Homo sapiens
  CDR3 for beta chain variable domain of TCR clone 183542 (TRBV7-9, TRBJ1-2)
CASSLKQNYGYTF

SEQ ID NO: 367085 - protein, 13 aa, Homo sapiens
  CDR3 for alpha chain variable domain of TCR clone 183543 (TRAV27, TRAJ41)
CAGEGNSGYALNF

SEQ ID NO: 367086 - protein, 13 aa, Homo sapiens
  CDR3 for beta chain variable domain of TCR clone 183543 (TRBV4-1, TRBJ2-7)
CASSQGQAYEQYF

SEQ ID NO: 367087 - protein, 13 aa, Homo sapiens
  CDR3 for alpha chain variable domain of TCR clone 183544 (TRAV6, TRAJ40)
CALVPSGTYKYIF

SEQ ID NO: 367088 - protein, 18 aa, Homo sapiens
  CDR3 for beta chain variable domain of TCR clone 183544 (TRBV7-7, TRBJ2-1)
CASSLALTSGRSYNEQFF

SEQ ID NO: 367089 - protein, 14 aa, Homo sapiens
  CDR3 for alpha chain variable domain of TCR clone 183545 (TRAV17, TRAJ35)
CATDMPGFGNVLHC

SEQ ID NO: 367090 - protein, 15 aa, Homo sapiens
  CDR3 for beta chain variable domain of TCR clone 183545 (TRBV28, TRBJ2-5)
CASSSGRVIQETQYF

SEQ ID NO: 367091 - protein, 14 aa, Homo sapiens
  CDR3 for alpha chain variable domain of TCR clone 183546 (TRAV16, TRAJ17)
CAPRIKAAGNKLTF

SEQ ID NO: 367092 - protein, 17 aa, Homo sapiens
  CDR3 for beta chain variable domain of TCR clone 183546 (TRBV7-2, TRBJ2-3)
CASSSYSGNRRADTQYF

SEQ ID NO: 367093 - protein, 22 aa, Homo sapiens
  CDR3 for alpha chain variable domain of TCR clone 183547 (TRAV12-2, TRAJ53)
SPVIQPPISVPPILSSNYKLTF

SEQ ID NO: 367094 - protein, 13 aa, Homo sapiens
  CDR3 for beta chain variable domain of TCR clone 183547 (TRBV7-7, TRBJ2-3)
CASSLSRADTQYF

SEQ ID NO: 367095 - protein, 15 aa, Homo sapiens
  CDR3 for alpha chain variable domain of TCR clone 183548 (TRAV16, TRAJ23)
CALSGPYNQGGKLIF

SEQ ID NO: 367096 - protein, 13 aa, Homo sapiens
  CDR3 for beta chain variable domain of TCR clone 183548 (TRBV3-1, TRBJ1-1)
CASSPGVITEAFF

SEQ ID NO: 367097 - protein, 14 aa, Homo sapiens
  CDR3 for alpha chain variable domain of TCR clone 183549 (TRAV8-4, TRAJ15)
CAVILNQAGTALIF

SEQ ID NO: 367098 - protein, 12 aa, Homo sapiens
  CDR3 for beta chain variable domain of TCR clone 183549 (TRBV7-9, TRBJ1-6)
CASSASESPLHC

SEQ ID NO: 367099 - protein, 11 aa, Homo sapiens
  CDR3 for alpha chain variable domain of TCR clone 183550 (TRAV23/DV6, TRAJ44)
CAAPTPGKLTF

SEQ ID NO: 367100 - protein, 11 aa, Homo sapiens
  CDR3 for beta chain variable domain of TCR clone 183550 (TRBV7-9, TRBJ2-3)
CASSGPDTQYF

SEQ ID NO: 367101 - protein, 18 aa, Homo sapiens
  CDR3 for alpha chain variable domain of TCR clone 183551 (TRAV8-4, TRAJ52)
CAVTRANAGGTSYGKLTF

SEQ ID NO: 367102 - protein, 14 aa, Homo sapiens
  CDR3 for beta chain variable domain of TCR clone 183551 (TRBV19, TRBJ2-7)
CASTVQGRPYEQYL

SEQ ID NO: 367103 - protein, 13 aa, Homo sapiens
  CDR3 for alpha chain variable domain of TCR clone 183552 (TRAV23/DV6, TRAJ12)
CAPRVDSSYKLIF

SEQ ID NO: 367104 - protein, 16 aa, Homo sapiens
  CDR3 for beta chain variable domain of TCR clone 183552 (TRBV7-3, TRBJ2-1)
CASSLEGYRSYNEQFF

SEQ ID NO: 367105 - protein, 14 aa, Homo sapiens
  CDR3 for alpha chain variable domain of TCR clone 183553 (TRAV4, TRAJ9)
CLVGSGTGGFKTIF

SEQ ID NO: 367106 - protein, 15 aa, Homo sapiens
  CDR3 for beta chain variable domain of TCR clone 183553 (TRBV7-2, TRBJ2-1)
CASSFASGRVNEQFF

SEQ ID NO: 367107 - protein, 14 aa, Homo sapiens
  CDR3 for alpha chain variable domain of TCR clone 183554 (TRAV12-2, TRAJ44)
CAVNKAGTASKLTF

SEQ ID NO: 367108 - protein, 16 aa, Homo sapiens
  CDR3 for beta chain variable domain of TCR clone 183554 (TRBV19, TRBJ1-5)
CASSIDRGGPRQPQHF

SEQ ID NO: 367109 - protein, 15 aa, Homo sapiens
  CDR3 for alpha chain variable domain of TCR clone 183555 (TRAV3, TRAJ22)
CAVRDRGGSARQLTF

SEQ ID NO: 367110 - protein, 12 aa, Homo sapiens
  CDR3 for beta chain variable domain of TCR clone 183555 (TRBV7-2, TRBJ2-1)
CASSPQDSEQFF

SEQ ID NO: 367111 - protein, 12 aa, Homo sapiens
  CDR3 for alpha chain variable domain of TCR clone 183556 (TRAV21, TRAJ37)
CAVRSNTGKLIF

SEQ ID NO: 367112 - protein, 14 aa, Homo sapiens
  CDR3 for beta chain variable domain of TCR clone 183556 (TRBV19, TRBJ2-1)
CASEVTGDRNEQFF

SEQ ID NO: 367113 - protein, 11 aa, Homo sapiens
  CDR3 for alpha chain variable domain of TCR clone 183557 (TRAV2, TRAJ13)
CASGGYQKVTF

SEQ ID NO: 367114 - protein, 15 aa, Homo sapiens
  CDR3 for beta chain variable domain of TCR clone 183557 (TRBV6-6, TRBJ1-1)
CASSPRGDVETEAFF

SEQ ID NO: 367115 - protein, 14 aa, Homo sapiens
  CDR3 for alpha chain variable domain of TCR clone 183558 (TRAV12-2, TRAJ17)
CAVLFKAAGNKLTF

SEQ ID NO: 367116 - protein, 14 aa, Homo sapiens
  CDR3 for beta chain variable domain of TCR clone 183558 (TRBV15, TRBJ1-2)
CATSRDFNRVGYTF

SEQ ID NO: 367117 - protein, 13 aa, Homo sapiens
  CDR3 for alpha chain variable domain of TCR clone 183559 (TRAV36/DV7, TRAJ37)
CAVFSSNTGKLNF

SEQ ID NO: 367118 - protein, 15 aa, Homo sapiens
  CDR3 for beta chain variable domain of TCR clone 183559 (TRBV5-1, TRBJ2-2)
CASSSQGGNTGELFF

SEQ ID NO: 367119 - protein, 11 aa, Homo sapiens
  CDR3 for alpha chain variable domain of TCR clone 183560 (TRAV36/DV7, TRAJ45)
SGGGGADGLTF

SEQ ID NO: 367120 - protein, 15 aa, Homo sapiens
  CDR3 for beta chain variable domain of TCR clone 183560 (TRBV7-2, TRBJ1-3)
CASSPQGGSGNTIYF

SEQ ID NO: 367121 - protein, 16 aa, Homo sapiens
  CDR3 for alpha chain variable domain of TCR clone 183561 (TRAV3, TRAJ37)
CAVRGKGSGNTGKLIF

SEQ ID NO: 367122 - protein, 16 aa, Homo sapiens
  CDR3 for beta chain variable domain of TCR clone 183561 (TRBV12-4, TRBJ1-5)
CASSRPVGGSNKPQHF

SEQ ID NO: 367123 - protein, 15 aa, Homo sapiens
  CDR3 for alpha chain variable domain of TCR clone 183562 (TRAV3, TRAJ22)
CAVRDRGGSARQLTF

SEQ ID NO: 367124 - protein, 15 aa, Homo sapiens
  CDR3 for beta chain variable domain of TCR clone 183562 (TRBV28, TRBJ2-5)
CASSPGQGSIETQYF

SEQ ID NO: 367125 - protein, 17 aa, Homo sapiens
  CDR3 for alpha chain variable domain of TCR clone 183563 (TRAV4, TRAJ42)
CLVGVLNYGGSQGNLIF

SEQ ID NO: 367126 - protein, 15 aa, Homo sapiens
  CDR3 for beta chain variable domain of TCR clone 183563 (TRBV2, TRBJ2-7)
CASSEGLARSYVQYF

SEQ ID NO: 367127 - protein, 15 aa, Homo sapiens
  CDR3 for alpha chain variable domain of TCR clone 183564 (TRAV12-3, TRAJ22)
CAMRSSSGSTRQLTF

SEQ ID NO: 367128 - protein, 18 aa, Homo sapiens
  CDR3 for beta chain variable domain of TCR clone 183564 (TRBV27, TRBJ2-1)
CASRRSGRGESSGNEQFF

SEQ ID NO: 367129 - protein, 14 aa, Homo sapiens
  CDR3 for alpha chain variable domain of TCR clone 183565 (TRAV8-3, TRAJ4)
CAVGAAGGYNKLIF

SEQ ID NO: 367130 - protein, 12 aa, Homo sapiens
  CDR3 for beta chain variable domain of TCR clone 183565 (TRBV18, TRBJ1-1)
CASSPGGTEAFF

SEQ ID NO: 367131 - protein, 13 aa, Homo sapiens
  CDR3 for alpha chain variable domain of TCR clone 183566 (TRAV2, TRAJ40)
CAGVTSGTYKYIF

SEQ ID NO: 367132 - protein, 15 aa, Homo sapiens
  CDR3 for beta chain variable domain of TCR clone 183566 (TRBV11-3, TRBJ2-3)
CASLKDGREGDTQYF

SEQ ID NO: 367133 - protein, 14 aa, Homo sapiens
  CDR3 for alpha chain variable domain of TCR clone 183567 (TRAV1-2, TRAJ16)
CAVNRFSDGQKLLF

SEQ ID NO: 367134 - protein, 13 aa, Homo sapiens
  CDR3 for beta chain variable domain of TCR clone 183567 (TRBV20-1, TRBJ1-1)
CSARAGGNTGAFF

SEQ ID NO: 367135 - protein, 12 aa, Homo sapiens
  CDR3 for alpha chain variable domain of TCR clone 183568 (TRAV13-1, TRAJ20)
CAARQNDYKLSF

SEQ ID NO: 367136 - protein, 14 aa, Homo sapiens
  CDR3 for beta chain variable domain of TCR clone 183568 (TRBV5-1, TRBJ2-7)
CASSFASGVNYQYF

SEQ ID NO: 367137 - protein, 14 aa, Homo sapiens
  CDR3 for alpha chain variable domain of TCR clone 183569 (TRAV26-1, TRAJ38)
CIADNAVNNRKPIW

SEQ ID NO: 367138 - protein, 13 aa, Homo sapiens
  CDR3 for beta chain variable domain of TCR clone 183569 (TRBV20-1, TRBJ1-1)
CSARGGGNTEAFF

SEQ ID NO: 367139 - protein, 13 aa, Homo sapiens
  CDR3 for alpha chain variable domain of TCR clone 183570 (TRAV2, TRAJ15)
CAVASQAGTALIF

SEQ ID NO: 367140 - protein, 16 aa, Homo sapiens
  CDR3 for beta chain variable domain of TCR clone 183570 (TRBV11-3, TRBJ2-7)
CASSPHGAGGPYEQYF

SEQ ID NO: 367141 - protein, 15 aa, Homo sapiens
  CDR3 for alpha chain variable domain of TCR clone 183571 (TRAV12-1, TRAJ44)
CVVFVNTGTASTLTF

SEQ ID NO: 367142 - protein, 16 aa, Homo sapiens
  CDR3 for beta chain variable domain of TCR clone 183571 (TRBV20-1, TRBJ2-5)
CSPGGTSGGYMETQYF

SEQ ID NO: 367143 - protein, 13 aa, Homo sapiens
  CDR3 for alpha chain variable domain of TCR clone 183572 (TRAV30, TRAJ39)
CGTEKNAGNMRTF

SEQ ID NO: 367144 - protein, 12 aa, Homo sapiens
  CDR3 for beta chain variable domain of TCR clone 183572 (TRBV12-4, TRBJ2-5)
CASRSAQETQYF

SEQ ID NO: 367145 - protein, 16 aa, Homo sapiens
  CDR3 for alpha chain variable domain of TCR clone 183573 (TRAV26-1, TRAJ32)
CIVRTNYGGATNKLIF

SEQ ID NO: 367146 - protein, 16 aa, Homo sapiens
  CDR3 for beta chain variable domain of TCR clone 183573 (TRBV4-2, TRBJ2-1)
CASSHDDNPEGAQEFF

SEQ ID NO: 367147 - protein, 15 aa, Homo sapiens
  CDR3 for alpha chain variable domain of TCR clone 183574 (TRAV1-2, TRAJ15)
CAVDVMGSAGTALIF

SEQ ID NO: 367148 - protein, 16 aa, Homo sapiens
  CDR3 for beta chain variable domain of TCR clone 183574 (TRBV15, TRBJ1-2)
CATSRGPRTGGGGYTF

SEQ ID NO: 367149 - protein, 12 aa, Homo sapiens
  CDR3 for alpha chain variable domain of TCR clone 183575 (TRAV13-2, TRAJ23)
CAERHRGGKLIF

SEQ ID NO: 367150 - protein, 14 aa, Homo sapiens
  CDR3 for beta chain variable domain of TCR clone 183575 (TRBV20-1, TRBJ2-7)
CSAKTGTGGYEQYF

SEQ ID NO: 367151 - protein, 14 aa, Homo sapiens
  CDR3 for alpha chain variable domain of TCR clone 183576 (TRAV8-6, TRAJ17)
CCDPPAAAGNKLTF

SEQ ID NO: 367152 - protein, 12 aa, Homo sapiens
  CDR3 for beta chain variable domain of TCR clone 183576 (TRBV11-2, TRBJ2-2)
CASSLGGGELFF

SEQ ID NO: 367153 - protein, 13 aa, Homo sapiens
  CDR3 for alpha chain variable domain of TCR clone 183577 (TRAV8-4, TRAJ4)
CAVSDIGYNKLIF

SEQ ID NO: 367154 - protein, 13 aa, Homo sapiens
  CDR3 for beta chain variable domain of TCR clone 183577 (TRBV19, TRBJ1-2)
CASSQGQVYDYTF

SEQ ID NO: 367155 - protein, 15 aa, Homo sapiens
  CDR3 for alpha chain variable domain of TCR clone 183578 (TRAV23/DV6, TRAJ18)
CAARYRGSTLGRLYF

SEQ ID NO: 367156 - protein, 14 aa, Homo sapiens
  CDR3 for beta chain variable domain of TCR clone 183578 (TRBV9, TRBJ2-1)
CASSVDPRGKEQFF

SEQ ID NO: 367157 - protein, 13 aa, Homo sapiens
  CDR3 for alpha chain variable domain of TCR clone 183579 (TRAV23/DV6, TRAJ6)
CAAKPGGSYIPTF

SEQ ID NO: 367158 - protein, 15 aa, Homo sapiens
  CDR3 for beta chain variable domain of TCR clone 183579 (TRBV5-1, TRBJ1-2)
CASSSYGECDYGYTF

SEQ ID NO: 367159 - protein, 17 aa, Homo sapiens
  CDR3 for alpha chain variable domain of TCR clone 183580 (TRAV35, TRAJ52)
CAGQLAAGGTSCGKLTF

SEQ ID NO: 367160 - protein, 12 aa, Homo sapiens
  CDR3 for beta chain variable domain of TCR clone 183580 (TRBV20-1, TRBJ2-7)
CSAGRRQSEQYF

SEQ ID NO: 367161 - protein, 11 aa, Homo sapiens
  CDR3 for alpha chain variable domain of TCR clone 183581 (TRAV35, TRAJ30)
CAGERDAKIIF

SEQ ID NO: 367162 - protein, 14 aa, Homo sapiens
  CDR3 for beta chain variable domain of TCR clone 183581 (TRBV15, TRBJ2-5)
CATSGDRGQETQYF

SEQ ID NO: 367163 - protein, 14 aa, Homo sapiens
  CDR3 for alpha chain variable domain of TCR clone 183582 (TRAV8-1, TRAJ49)
CASSIANTGNQFYF

SEQ ID NO: 367164 - protein, 15 aa, Homo sapiens
  CDR3 for beta chain variable domain of TCR clone 183582 (TRBV7-6, TRBJ1-5)
CASSQSSGINQPQHF

SEQ ID NO: 367165 - protein, 13 aa, Homo sapiens
  CDR3 for alpha chain variable domain of TCR clone 183583 (TRAV2, TRAJ24)
CDLQLTAGGNSSF

SEQ ID NO: 367166 - protein, 13 aa, Homo sapiens
  CDR3 for beta chain variable domain of TCR clone 183583 (TRBV7-9, TRBJ1-2)
CASSLKQNYGYTF

SEQ ID NO: 367167 - protein, 13 aa, Homo sapiens
  CDR3 for alpha chain variable domain of TCR clone 183584 (TRAV29/DV5, TRAJ47)
CAASAEYGNKLVF

SEQ ID NO: 367168 - protein, 14 aa, Homo sapiens
  CDR3 for beta chain variable domain of TCR clone 183584 (TRBV6-1, TRBJ1-3)
CASVQGGGGNTIYF

SEQ ID NO: 367169 - protein, 17 aa, Homo sapiens
  CDR3 for alpha chain variable domain of TCR clone 183585 (TRAV13-1, TRAJ52)
CAAGRNAGGTSYGKITF

SEQ ID NO: 367170 - protein, 13 aa, Homo sapiens
  CDR3 for beta chain variable domain of TCR clone 183585 (TRBV7-2, TRBJ1-1)
CASNLKGAKVAFF

SEQ ID NO: 367171 - protein, 14 aa, Homo sapiens
  CDR3 for alpha chain variable domain of TCR clone 183586 (TRAV8-3, TRAJ4)
CAVGAAGGYNKLIF

SEQ ID NO: 367172 - protein, 15 aa, Homo sapiens
  CDR3 for beta chain variable domain of TCR clone 183586 (TRBV5-1, TRBJ2-1)
CASSPPRAAYNEQFF

SEQ ID NO: 367173 - protein, 12 aa, Homo sapiens
  CDR3 for alpha chain variable domain of TCR clone 183587 (TRAV1-1, TRAJ8)
CAGGTGFQKLVF

SEQ ID NO: 367174 - protein, 15 aa, Homo sapiens
  CDR3 for beta chain variable domain of TCR clone 183587 (TRBV24-1, TRBJ2-1)
CANSGSGGFYNEQFF

SEQ ID NO: 367175 - protein, 14 aa, Homo sapiens
  CDR3 for alpha chain variable domain of TCR clone 183588 (TRAV1-2, TRAJ8)
CAVREDTGSQKLVF

SEQ ID NO: 367176 - protein, 11 aa, Homo sapiens
  CDR3 for beta chain variable domain of TCR clone 183588 (TRBV27, TRBJ2-3)
CASSLGDTQYF

SEQ ID NO: 367177 - protein, 15 aa, Homo sapiens
  CDR3 for alpha chain variable domain of TCR clone 183589 (TRAV1-2, TRAJ6)
CAVRATSGGSYIPTF

SEQ ID NO: 367178 - protein, 15 aa, Homo sapiens
  CDR3 for beta chain variable domain of TCR clone 183589 (TRBV20-1, TRBJ2-7)
CSARDRVSGMDEQYF

SEQ ID NO: 367179 - protein, 14 aa, Homo sapiens
  CDR3 for alpha chain variable domain of TCR clone 183590 (TRAV12-2, TRAJ13)
CAVKKTGRYQKVTF

SEQ ID NO: 367180 - protein, 15 aa, Homo sapiens
  CDR3 for beta chain variable domain of TCR clone 183590 (TRBV19, TRBJ1-6)
CVSSTQGAVGSPLHF

SEQ ID NO: 367181 - protein, 13 aa, Homo sapiens
  CDR3 for alpha chain variable domain of TCR clone 183591 (TRAV8-1, TRAJ9)
CAVNSVGGFKTIF

SEQ ID NO: 367182 - protein, 13 aa, Homo sapiens
  CDR3 for beta chain variable domain of TCR clone 183591 (TRBV7-9, TRBJ1-2)
CASSLKQNYGYTF

SEQ ID NO: 367183 - protein, 11 aa, Homo sapiens
  CDR3 for alpha chain variable domain of TCR clone 183592 (TRAV12-1, TRAJ26)
CAVAYGQNFVF

SEQ ID NO: 367184 - protein, 15 aa, Homo sapiens
  CDR3 for beta chain variable domain of TCR clone 183592 (TRBV12-4, TRBJ2-5)
CASSGTGQAQETQYF

SEQ ID NO: 367185 - protein, 23 aa, Homo sapiens
  CDR3 for alpha chain variable domain of TCR clone 183593 (TRAV41, TRAJ32)
CAVRIMVVLQTSSSLEPALCLLS

SEQ ID NO: 367186 - protein, 15 aa, Homo sapiens
  CDR3 for beta chain variable domain of TCR clone 183593 (TRBV11-2, TRBJ2-1)
CASSKNRGLIYEQFF

SEQ ID NO: 367187 - protein, 17 aa, Homo sapiens
  CDR3 for alpha chain variable domain of TCR clone 183594 (TRAV3, TRAJ12)
CAVRDGGRMDSSYKLIF

SEQ ID NO: 367188 - protein, 15 aa, Homo sapiens
  CDR3 for beta chain variable domain of TCR clone 183594 (TRBV7-9, TRBJ1-5)
CASSQGHQPNQPQHF

SEQ ID NO: 367189 - protein, 13 aa, Homo sapiens
  CDR3 for alpha chain variable domain of TCR clone 183595 (TRAV2, TRAJ29)
GAAQYSGNTPLVF

SEQ ID NO: 367190 - protein, 14 aa, Homo sapiens
  CDR3 for beta chain variable domain of TCR clone 183595 (TRBV7-9, TRBJ2-4)
CASSLAMGGNIQYF

SEQ ID NO: 367191 - protein, 18 aa, Homo sapiens
  CDR3 for alpha chain variable domain of TCR clone 183596 (TRAV8-6, TRAJ39)
CAVTPPGLIDNAGNMLTF

SEQ ID NO: 367192 - protein, 15 aa, Homo sapiens
  CDR3 for beta chain variable domain of TCR clone 183596 (TRBV9, TRBJ2-1)
CASSVGSGFYNEQFF

SEQ ID NO: 367193 - protein, 13 aa, Homo sapiens
  CDR3 for alpha chain variable domain of TCR clone 183597 (TRAV21, TRAJ27)
CAARPGNAGNSTF

SEQ ID NO: 367194 - protein, 14 aa, Homo sapiens
  CDR3 for beta chain variable domain of TCR clone 183597 (TRBV7-6, TRBJ2-3)
CARSLGTVTDTQYF

SEQ ID NO: 367195 - protein, 12 aa, Homo sapiens
  CDR3 for alpha chain variable domain of TCR clone 183598 (TRAV36/DV7, TRAJ54)
CAVVRGAQKLVF

SEQ ID NO: 367196 - protein, 13 aa, Homo sapiens
  CDR3 for beta chain variable domain of TCR clone 183598 (TRBV6-1, TRBJ1-1)
CASSRQGNTEAFF

SEQ ID NO: 367197 - protein, 14 aa, Homo sapiens
  CDR3 for alpha chain variable domain of TCR clone 183599 (TRAV26-1, TRAJ38)
CIADNADNNRKLIW

SEQ ID NO: 367198 - protein, 13 aa, Homo sapiens
  CDR3 for beta chain variable domain of TCR clone 183599 (TRBV20-1, TRBJ1-1)
CSARGGGDTEAFF

SEQ ID NO: 367199 - protein, 12 aa, Homo sapiens
  CDR3 for alpha chain variable domain of TCR clone 183600 (TRAV21, TRAJ23)
CAVGPQGGKLIF

SEQ ID NO: 367200 - protein, 16 aa, Homo sapiens
  CDR3 for beta chain variable domain of TCR clone 183600 (TRBV4-2, TRBJ1-5)
CASSQGQGASNQPQHF

SEQ ID NO: 367201 - protein, 11 aa, Homo sapiens
  CDR3 for alpha chain variable domain of TCR clone 183601 (TRAV3, TRAJ21)
CAVGNFNKFYF

SEQ ID NO: 367202 - protein, 16 aa, Homo sapiens
  CDR3 for beta chain variable domain of TCR clone 183601 (TRBV19, TRBJ2-1)
CARSKAAPSSYNEQFF

SEQ ID NO: 367203 - protein, 15 aa, Homo sapiens
  CDR3 for alpha chain variable domain of TCR clone 183602 (TRAV13-1, TRAJ16)
CAARYQMARSCSLQG

SEQ ID NO: 367204 - protein, 14 aa, Homo sapiens
  CDR3 for beta chain variable domain of TCR clone 183602 (TRBV7-8, TRBJ2-5)
CASSATGGQETQYF

SEQ ID NO: 367205 - protein, 12 aa, Homo sapiens
  CDR3 for alpha chain variable domain of TCR clone 183603 (TRAV12-3, TRAJ5)
CAMDTGRRALTF

SEQ ID NO: 367206 - protein, 14 aa, Homo sapiens
  CDR3 for beta chain variable domain of TCR clone 183603 (TRBV20-1, TRBJ2-7)
CSAQIGGSANEQFF

SEQ ID NO: 367207 - protein, 14 aa, Homo sapiens
  CDR3 for alpha chain variable domain of TCR clone 183604 (TRAV12-1, TRAJ38)
CVVNNAGNNRKLIW

SEQ ID NO: 367208 - protein, 16 aa, Homo sapiens
  CDR3 for beta chain variable domain of TCR clone 183604 (TRBV7-2, TRBJ1-2)
CASSRQGGGANYGYSF

SEQ ID NO: 367209 - protein, 15 aa, Homo sapiens
  CDR3 for alpha chain variable domain of TCR clone 183605 (TRAV8-3, TRAJ45)
CASSYSGGGADGLTF

SEQ ID NO: 367210 - protein, 13 aa, Homo sapiens
  CDR3 for beta chain variable domain of TCR clone 183605 (TRBV10-3, TRBJ2-7)
CASKSAVNYEQYF

SEQ ID NO: 367211 - protein, 14 aa, Homo sapiens
  CDR3 for alpha chain variable domain of TCR clone 183606 (TRAV3, TRAJ26)
CAVRDYNYGQNFVF

SEQ ID NO: 367212 - protein, 16 aa, Homo sapiens
  CDR3 for beta chain variable domain of TCR clone 183606 (TRBV20-1, TRBJ2-5)
SAVLTPPGGGGETQYF

SEQ ID NO: 367213 - protein, 14 aa, Homo sapiens
  CDR3 for alpha chain variable domain of TCR clone 183607 (TRAV12-2, TRAJ13)
CAVKKTGGYQKVTF

SEQ ID NO: 367214 - protein, 15 aa, Homo sapiens
  CDR3 for beta chain variable domain of TCR clone 183607 (TRBV18, TRBJ2-1)
CASSNGGGSSNEQFF

SEQ ID NO: 367215 - protein, 14 aa, Homo sapiens
  CDR3 for alpha chain variable domain of TCR clone 183608 (TRAV29/DV5, TRAJ36)
CAARRKTGANNLFF

SEQ ID NO: 367216 - protein, 14 aa, Homo sapiens
  CDR3 for beta chain variable domain of TCR clone 183608 (TRBV12-5, TRBJ2-5)
CASGSRTHQETRYF

SEQ ID NO: 367217 - protein, 10 aa, Homo sapiens
  CDR3 for alpha chain variable domain of TCR clone 183609 (TRAV25, TRAJ53)
CAGSNYKLTF

SEQ ID NO: 367218 - protein, 13 aa, Homo sapiens
  CDR3 for beta chain variable domain of TCR clone 183609 (TRBV29-1, TRBJ1-1)
CSVGDSRNTEAFF

SEQ ID NO: 367219 - protein, 14 aa, Homo sapiens
  CDR3 for alpha chain variable domain of TCR clone 183610 (TRAV29/DV5, TRAJ45)
CAASARGGADGLTF

SEQ ID NO: 367220 - protein, 13 aa, Homo sapiens
  CDR3 for beta chain variable domain of TCR clone 183610 (TRBV10-3, TRBJ1-2)
CAISERDSYGYTF

SEQ ID NO: 367221 - protein, 12 aa, Homo sapiens
  CDR3 for alpha chain variable domain of TCR clone 183611 (TRAV8-3, TRAJ20)
WAVDFNDYKLSF

SEQ ID NO: 367222 - protein, 13 aa, Homo sapiens
  CDR3 for beta chain variable domain of TCR clone 183611 (TRBV5-6, TRBJ2-3)
CASSLGRTDTQYF

SEQ ID NO: 367223 - protein, 15 aa, Homo sapiens
  CDR3 for alpha chain variable domain of TCR clone 183612 (TRAV12-3, TRAJ6)
CATSATSGGSYIPTF

SEQ ID NO: 367224 - protein, 11 aa, Homo sapiens
  CDR3 for beta chain variable domain of TCR clone 183612 (TRBV20-1, TRBJ1-5)
CSAQGDQPQHF

SEQ ID NO: 367225 - protein, 12 aa, Homo sapiens
  CDR3 for alpha chain variable domain of TCR clone 183613 (TRAV12-3, TRAJ17)
CAMTLTGNKLTF

SEQ ID NO: 367226 - protein, 16 aa, Homo sapiens
  CDR3 for beta chain variable domain of TCR clone 183613 (TRBV12-4, TRBJ1-5)
CASSRPVRGSNQPQHF

SEQ ID NO: 367227 - protein, 15 aa, Homo sapiens
  CDR3 for alpha chain variable domain of TCR clone 183614 (TRAV35, TRAJ41)
CAGQLFSNSGYALNF

SEQ ID NO: 367228 - protein, 14 aa, Homo sapiens
  CDR3 for beta chain variable domain of TCR clone 183614 (TRBV7-2, TRBJ1-2)
CASSRGGTNYGYIF

SEQ ID NO: 367229 - protein, 15 aa, Homo sapiens
  CDR3 for alpha chain variable domain of TCR clone 183615 (TRAV17, TRAJ56)
CATDANTGANSKLTF

SEQ ID NO: 367230 - protein, 13 aa, Homo sapiens
  CDR3 for beta chain variable domain of TCR clone 183615 (TRBV7-3, TRBJ1-2)
CASSLKRGYGYTF

SEQ ID NO: 367231 - protein, 14 aa, Homo sapiens
  CDR3 for alpha chain variable domain of TCR clone 183616 (TRAV1-2, TRAJ8)
CAVREDTGFQKLVF

SEQ ID NO: 367232 - protein, 14 aa, Homo sapiens
  CDR3 for beta chain variable domain of TCR clone 183616 (TRBV7-7, TRBJ2-2)
CATRQDADTGELFY

SEQ ID NO: 367233 - protein, 15 aa, Homo sapiens
  CDR3 for alpha chain variable domain of TCR clone 183617 (TRAV13-1, TRAJ15)
CAASIERQAGTALIF

SEQ ID NO: 367234 - protein, 15 aa, Homo sapiens
  CDR3 for beta chain variable domain of TCR clone 183617 (TRBV20-1, TRBJ2-2)
CSAIPGHSNTGELFF

SEQ ID NO: 367235 - protein, 21 aa, Homo sapiens
  CDR3 for alpha chain variable domain of TCR clone 183618 (TRAV36/DV7, TRAJ39)
TATQTGDSAIYLPNAGNMLTF

SEQ ID NO: 367236 - protein, 14 aa, Homo sapiens
  CDR3 for beta chain variable domain of TCR clone 183618 (TRBV7-2, TRBJ2-2)
CASRGQGAAGELFF

SEQ ID NO: 367237 - protein, 12 aa, Homo sapiens
  CDR3 for alpha chain variable domain of TCR clone 183619 (TRAV13-2, TRAJ23)
CAERHRGGKLIF

SEQ ID NO: 367238 - protein, 15 aa, Homo sapiens
  CDR3 for beta chain variable domain of TCR clone 183619 (TRBV9, TRBJ1-6)
CASSVAGTGESPLHF

SEQ ID NO: 367239 - protein, 17 aa, Homo sapiens
  CDR3 for alpha chain variable domain of TCR clone 183620 (TRAV3, TRAJ38)
CAVRDCLNAGSHRKLIW

SEQ ID NO: 367240 - protein, 13 aa, Homo sapiens
  CDR3 for beta chain variable domain of TCR clone 183620 (TRBV23-1, TRBJ1-4)
CASRGKFNEKLFF

SEQ ID NO: 367241 - protein, 16 aa, Homo sapiens
  CDR3 for alpha chain variable domain of TCR clone 183621 (TRAV21, TRAJ37)
CAVRTAGSSNTAKLVF

SEQ ID NO: 367242 - protein, 13 aa, Homo sapiens
  CDR3 for beta chain variable domain of TCR clone 183621 (TRBV7-9, TRBJ2-5)
CASLPSGRETQYF

SEQ ID NO: 367243 - protein, 15 aa, Homo sapiens
  CDR3 for alpha chain variable domain of TCR clone 183622 (TRAV13-1, TRAJ15)
RAASIELQAGTALIF

SEQ ID NO: 367244 - protein, 13 aa, Homo sapiens
  CDR3 for beta chain variable domain of TCR clone 183622 (TRBV5-1, TRBJ2-7)
CASSATGGNEQYF

SEQ ID NO: 367245 - protein, 13 aa, Homo sapiens
  CDR3 for alpha chain variable domain of TCR clone 183623 (TRAV12-1, TRAJ6)
CVVFPGGSYIPTF

SEQ ID NO: 367246 - protein, 15 aa, Homo sapiens
  CDR3 for beta chain variable domain of TCR clone 183623 (TRBV20-1, TRBJ2-1)
CSARRIGGTYNEQFF

SEQ ID NO: 367247 - protein, 13 aa, Homo sapiens
  CDR3 for alpha chain variable domain of TCR clone 183624 (TRAV8-3, TRAJ28)
CAVGAVGSYQRTF

SEQ ID NO: 367248 - protein, 17 aa, Homo sapiens
  CDR3 for beta chain variable domain of TCR clone 183624 (TRBV11-2, TRBJ2-1)
CASSLYPPGVEYNEQFF

SEQ ID NO: 367249 - protein, 14 aa, Homo sapiens
  CDR3 for alpha chain variable domain of TCR clone 183625 (TRAV8-4, TRAJ38)
CARLNAGNNRKLIW

SEQ ID NO: 367250 - protein, 11 aa, Homo sapiens
  CDR3 for beta chain variable domain of TCR clone 183625 (TRBV23-1, TRBJ2-7)
SSSGTGLEQYF

SEQ ID NO: 367251 - protein, 13 aa, Homo sapiens
  CDR3 for alpha chain variable domain of TCR clone 183626 (TRAV8-3, TRAJ43)
CAVVPYNNNDMRC

SEQ ID NO: 367252 - protein, 17 aa, Homo sapiens
  CDR3 for beta chain variable domain of TCR clone 183626 (TRBV7-7, TRBJ1-1)
CASIGDRPNLGVTEAFF

SEQ ID NO: 367253 - protein, 18 aa, Homo sapiens
  CDR3 for alpha chain variable domain of TCR clone 183627 (TRAV8-4, TRAJ52)
CAVASFNAGGTSYGELTF

SEQ ID NO: 367254 - protein, 14 aa, Homo sapiens
  CDR3 for beta chain variable domain of TCR clone 183627 (TRBV18, TRBJ1-5)
CASSRQQRNQPQHF

SEQ ID NO: 367255 - protein, 13 aa, Homo sapiens
  CDR3 for alpha chain variable domain of TCR clone 183628 (TRAV36/DV7, TRAJ7)
CAGTRYGNNRLAF

SEQ ID NO: 367256 - protein, 14 aa, Homo sapiens
  CDR3 for beta chain variable domain of TCR clone 183628 (TRBV19, TRBJ2-1)
CASPTFVLSDEQFF

SEQ ID NO: 367257 - protein, 11 aa, Homo sapiens
  CDR3 for alpha chain variable domain of TCR clone 183629 (TRAV12-2, TRAJ31)
CAVTRWTRLMF

SEQ ID NO: 367258 - protein, 15 aa, Homo sapiens
  CDR3 for beta chain variable domain of TCR clone 183629 (TRBV19, TRBJ2-7)
CASSIGGGLVNEQYF

SEQ ID NO: 367259 - protein, 14 aa, Homo sapiens
  CDR3 for alpha chain variable domain of TCR clone 183630 (TRAV3, TRAJ17)
FAVRDAAAGNKLTF

SEQ ID NO: 367260 - protein, 13 aa, Homo sapiens
  CDR3 for beta chain variable domain of TCR clone 183630 (TRBV2, TRBJ1-1)
CASSVSGYTEAFF

SEQ ID NO: 367261 - protein, 14 aa, Homo sapiens
  CDR3 for alpha chain variable domain of TCR clone 183631 (TRAV8-4, TRAJ13)
CAVTLSGGYQKVTF

SEQ ID NO: 367262 - protein, 12 aa, Homo sapiens
  CDR3 for beta chain variable domain of TCR clone 183631 (TRBV11-2, TRBJ2-5)
CASSPPAETQYF

SEQ ID NO: 367263 - protein, 14 aa, Homo sapiens
  CDR3 for alpha chain variable domain of TCR clone 183632 (TRAV12-3, TRAJ54)
CAMRGIQGAQKLVF

SEQ ID NO: 367264 - protein, 14 aa, Homo sapiens
  CDR3 for beta chain variable domain of TCR clone 183632 (TRBV25-1, TRBJ1-1)
CDSTHLGGNTEAFF

SEQ ID NO: 367265 - protein, 11 aa, Homo sapiens
  CDR3 for alpha chain variable domain of TCR clone 183633 (TRAV2, TRAJ13)
CASGGYQKVTF

SEQ ID NO: 367266 - protein, 14 aa, Homo sapiens
  CDR3 for beta chain variable domain of TCR clone 183633 (TRBV3-1, TRBJ2-5)
CASSQGPDQETQYF

SEQ ID NO: 367267 - protein, 14 aa, Homo sapiens
  CDR3 for alpha chain variable domain of TCR clone 183634 (TRAV12-2, TRAJ12)
CAVMNRDSSYKLIF

SEQ ID NO: 367268 - protein, 15 aa, Homo sapiens
  CDR3 for beta chain variable domain of TCR clone 183634 (TRBV28, TRBJ2-1)
CASSLDTSSYNEQFF

SEQ ID NO: 367269 - protein, 14 aa, Homo sapiens
  CDR3 for alpha chain variable domain of TCR clone 183635 (TRAV26-1, TRAJ34)
CIVRVAYNTDKPIF

SEQ ID NO: 367270 - protein, 13 aa, Homo sapiens
  CDR3 for beta chain variable domain of TCR clone 183635 (TRBV7-3, TRBJ2-1)
CASSLDSYNEQFF

SEQ ID NO: 367271 - protein, 17 aa, Homo sapiens
  CDR3 for alpha chain variable domain of TCR clone 183636 (TRAV3, TRAJ6)
CAVRDGARAGGSYIPTF

SEQ ID NO: 367272 - protein, 16 aa, Homo sapiens
  CDR3 for beta chain variable domain of TCR clone 183636 (TRBV4-1, TRBJ2-7)
CASSLTAGQATYEQYF

SEQ ID NO: 367273 - protein, 13 aa, Homo sapiens
  CDR3 for alpha chain variable domain of TCR clone 183637 (TRAV20, TRAJ37)
CAGCSSNTDKLIF

SEQ ID NO: 367274 - protein, 15 aa, Homo sapiens
  CDR3 for beta chain variable domain of TCR clone 183637 (TRBV7-2, TRBJ2-1)
CASSFQADEYNEQFF

SEQ ID NO: 367275 - protein, 15 aa, Homo sapiens
  CDR3 for alpha chain variable domain of TCR clone 183638 (TRAV14/DV4, TRAJ46)
CAMREKKRSGDKLTF

SEQ ID NO: 367276 - protein, 13 aa, Homo sapiens
  CDR3 for beta chain variable domain of TCR clone 183638 (TRBV20-1, TRBJ2-5)
CSAREAFQETQYF

SEQ ID NO: 367277 - protein, 15 aa, Homo sapiens
  CDR3 for alpha chain variable domain of TCR clone 183639 (TRAV8-3, TRAJ45)
CASSYSGGVAYGLTF

SEQ ID NO: 367278 - protein, 13 aa, Homo sapiens
  CDR3 for beta chain variable domain of TCR clone 183639 (TRBV10-3, TRBJ2-7)
CASKLAVNYEQYF

SEQ ID NO: 367279 - protein, 14 aa, Homo sapiens
  CDR3 for alpha chain variable domain of TCR clone 183640 (TRAV12-2, TRAJ40)
CAVKIPSGTYKYIF

SEQ ID NO: 367280 - protein, 12 aa, Homo sapiens
  CDR3 for beta chain variable domain of TCR clone 183640 (TRBV7-8, TRBJ2-1)
CASSLGHNEQFF

SEQ ID NO: 367281 - protein, 15 aa, Homo sapiens
  CDR3 for alpha chain variable domain of TCR clone 183641 (TRAV21, TRAJ32)
CAVNSYGGATNKLIF

SEQ ID NO: 367282 - protein, 13 aa, Homo sapiens
  CDR3 for beta chain variable domain of TCR clone 183641 (TRBV5-7, TRBJ2-6)
CASTSSGANVLTF

SEQ ID NO: 367283 - protein, 13 aa, Homo sapiens
  CDR3 for alpha chain variable domain of TCR clone 183642 (TRAV13-2, TRAJ41)
CAESINSGYELNF

SEQ ID NO: 367284 - protein, 14 aa, Homo sapiens
  CDR3 for beta chain variable domain of TCR clone 183642 (TRBV2, TRBJ2-1)
CASSEALDGNEQFL

SEQ ID NO: 367285 - protein, 16 aa, Homo sapiens
  CDR3 for alpha chain variable domain of TCR clone 183643 (TRAV3, TRAJ3)
FAVRDRAKSSASKIIF

SEQ ID NO: 367286 - protein, 16 aa, Homo sapiens
  CDR3 for beta chain variable domain of TCR clone 183643 (TRBV20-1, TRBJ2-4)
CSATSLAELAKNIQYF

SEQ ID NO: 367287 - protein, 15 aa, Homo sapiens
  CDR3 for alpha chain variable domain of TCR clone 183644 (TRAV27, TRAJ45)
CRSPQSGGGADGLTF

SEQ ID NO: 367288 - protein, 12 aa, Homo sapiens
  CDR3 for beta chain variable domain of TCR clone 183644 (TRBV24-1, TRBJ2-7)
CATSEPGYEQYF

SEQ ID NO: 367289 - protein, 12 aa, Homo sapiens
  CDR3 for alpha chain variable domain of TCR clone 183645 (TRAV12-1, TRAJ40)
CVVYSGTYKYIF

SEQ ID NO: 367290 - protein, 14 aa, Homo sapiens
  CDR3 for beta chain variable domain of TCR clone 183645 (TRBV19, TRBJ2-7)
CASSIFAGTYEQYF

SEQ ID NO: 367291 - protein, 11 aa, Homo sapiens
  CDR3 for alpha chain variable domain of TCR clone 183646 (TRAV16, TRAJ31)
CALFNNARLMF

SEQ ID NO: 367292 - protein, 13 aa, Homo sapiens
  CDR3 for beta chain variable domain of TCR clone 183646 (TRBV7-3, TRBJ1-1)
CASSQDWGAEAFF

SEQ ID NO: 367293 - protein, 17 aa, Homo sapiens
  CDR3 for alpha chain variable domain of TCR clone 183647 (TRAV3, TRAJ6)
CAVRDGPRAGGSYIPTF

SEQ ID NO: 367294 - protein, 14 aa, Homo sapiens
  CDR3 for beta chain variable domain of TCR clone 183647 (TRBV7-2, TRBJ2-5)
CAISPRGSSETQYF

SEQ ID NO: 367295 - protein, 16 aa, Homo sapiens
  CDR3 for alpha chain variable domain of TCR clone 183648 (TRAV13-2, TRAJ32)
CAENMNYGGATNKLIF

SEQ ID NO: 367296 - protein, 13 aa, Homo sapiens
  CDR3 for beta chain variable domain of TCR clone 183648 (TRBV15, TRBJ2-5)
CHQQYRVPRDQYF

SEQ ID NO: 367297 - protein, 17 aa, Homo sapiens
  CDR3 for alpha chain variable domain of TCR clone 183649 (TRAV26-1, TRAJ28)
CIVRVPDSGAGNYQLTF

SEQ ID NO: 367298 - protein, 17 aa, Homo sapiens
  CDR3 for beta chain variable domain of TCR clone 183649 (TRBV28, TRBJ2-7)
CASSPLPAGGKSYEQYF

SEQ ID NO: 367299 - protein, 11 aa, Homo sapiens
  CDR3 for alpha chain variable domain of TCR clone 183650 (TRAV1-2, TRAJ31)
CAVNNNARLMF

SEQ ID NO: 367300 - protein, 16 aa, Homo sapiens
  CDR3 for beta chain variable domain of TCR clone 183650 (TRBV2, TRBJ2-3)
CASSTSVEGVTDTQYF

SEQ ID NO: 367301 - protein, 12 aa, Homo sapiens
  CDR3 for alpha chain variable domain of TCR clone 183651 (TRAV41, TRAJ58)
CAVETSGSRLTF

SEQ ID NO: 367302 - protein, 17 aa, Homo sapiens
  CDR3 for beta chain variable domain of TCR clone 183651 (TRBV27, TRBJ2-6)
CASSLTGFASGANVLTF

SEQ ID NO: 367303 - protein, 12 aa, Homo sapiens
  CDR3 for alpha chain variable domain of TCR clone 183652 (TRAV21, TRAJ13)
PVPSGGYQKVTF

SEQ ID NO: 367304 - protein, 14 aa, Homo sapiens
  CDR3 for beta chain variable domain of TCR clone 183652 (TRBV20-1, TRBJ2-7)
CSAKDRKGAYEQYF

SEQ ID NO: 367305 - protein, 14 aa, Homo sapiens
  CDR3 for alpha chain variable domain of TCR clone 183653 (TRAV3, TRAJ21)
CAVRDAYNFNNFYF

SEQ ID NO: 367306 - protein, 17 aa, Homo sapiens
  CDR3 for beta chain variable domain of TCR clone 183653 (TRBV6-5, TRBJ2-1)
CASRKNPRTGGHNEQFF

SEQ ID NO: 367307 - protein, 13 aa, Homo sapiens
  CDR3 for alpha chain variable domain of TCR clone 183654 (TRAV22, TRAJ29)
CALGGSGNTPLVF

SEQ ID NO: 367308 - protein, 16 aa, Homo sapiens
  CDR3 for beta chain variable domain of TCR clone 183654 (TRBV10-3, TRBJ2-1)
CAIRGGGRGDYNEQFF

SEQ ID NO: 367309 - protein, 14 aa, Homo sapiens
  CDR3 for alpha chain variable domain of TCR clone 183655 (TRAV17, TRAJ8)
CATDLNTGFQKLVF

SEQ ID NO: 367310 - protein, 16 aa, Homo sapiens
  CDR3 for beta chain variable domain of TCR clone 183655 (TRBV9, TRBJ2-1)
CASSALGGIGNNEQFF

SEQ ID NO: 367311 - protein, 15 aa, Homo sapiens
  CDR3 for alpha chain variable domain of TCR clone 183656 (TRAV8-2, TRAJ40)
CVVLGTTSGTYKYIF

SEQ ID NO: 367312 - protein, 16 aa, Homo sapiens
  CDR3 for beta chain variable domain of TCR clone 183656 (TRBV7-3, TRBJ2-1)
CASSLEGYRSYNEQCF

SEQ ID NO: 367313 - protein, 13 aa, Homo sapiens
  CDR3 for alpha chain variable domain of TCR clone 183657 (TRAV4, TRAJ37)
CLVGSGNTGQLIF

SEQ ID NO: 367314 - protein, 16 aa, Homo sapiens
  CDR3 for beta chain variable domain of TCR clone 183657 (TRBV11-3, TRBJ2-2)
CASSSRTSPGTGELFF

SEQ ID NO: 367315 - protein, 15 aa, Homo sapiens
  CDR3 for alpha chain variable domain of TCR clone 183658 (TRAV12-2, TRAJ53)
CAVNGGGGSNYKLTL

SEQ ID NO: 367316 - protein, 13 aa, Homo sapiens
  CDR3 for beta chain variable domain of TCR clone 183658 (TRBV12-4, TRBJ1-5)
CASSPDRAQPQHF

SEQ ID NO: 367317 - protein, 13 aa, Homo sapiens
  CDR3 for alpha chain variable domain of TCR clone 183659 (TRAV2, TRAJ15)
CAVASQAGTALIF

SEQ ID NO: 367318 - protein, 15 aa, Homo sapiens
  CDR3 for beta chain variable domain of TCR clone 183659 (TRBV20-1, TRBJ2-7)
CSARDRFSGMDEQYF

SEQ ID NO: 367319 - protein, 14 aa, Homo sapiens
  CDR3 for alpha chain variable domain of TCR clone 183660 (TRAV17, TRAJ16)
CATAAFSDGQKLLF

SEQ ID NO: 367320 - protein, 12 aa, Homo sapiens
  CDR3 for beta chain variable domain of TCR clone 183660 (TRBV11-2, TRBJ2-1)
CASSPGNNEQFF

SEQ ID NO: 367321 - protein, 16 aa, Homo sapiens
  CDR3 for alpha chain variable domain of TCR clone 183661 (TRAV30, TRAJ24)
CGTEIVDADSWGKFQF

SEQ ID NO: 367322 - protein, 15 aa, Homo sapiens
  CDR3 for beta chain variable domain of TCR clone 183661 (TRBV11-2, TRBJ1-3)
CASSLDGTVGNTIYF

SEQ ID NO: 367323 - protein, 14 aa, Homo sapiens
  CDR3 for alpha chain variable domain of TCR clone 183662 (TRAV12-3, TRAJ10)
SHLPLTGGGNKLSF

SEQ ID NO: 367324 - protein, 12 aa, Homo sapiens
  CDR3 for beta chain variable domain of TCR clone 183662 (TRBV7-9, TRBJ2-7)
CATRTDAYEQYF

SEQ ID NO: 367325 - protein, 15 aa, Homo sapiens
  CDR3 for alpha chain variable domain of TCR clone 183663 (TRAV21, TRAJ52)
CAVRGGGTSYGKLTF

SEQ ID NO: 367326 - protein, 14 aa, Homo sapiens
  CDR3 for beta chain variable domain of TCR clone 183663 (TRBV7-3, TRBJ2-1)
CASSLSGSYNEQFF

SEQ ID NO: 367327 - protein, 13 aa, Homo sapiens
  CDR3 for alpha chain variable domain of TCR clone 183664 (TRAV8-3, TRAJ36)
CAVGATGANNLFF

SEQ ID NO: 367328 - protein, 17 aa, Homo sapiens
  CDR3 for beta chain variable domain of TCR clone 183664 (TRBV11-2, TRBJ2-1)
CASSLYPPGVEYNEQFF

SEQ ID NO: 367329 - protein, 16 aa, Homo sapiens
  CDR3 for alpha chain variable domain of TCR clone 183665 (TRAV13-2, TRAJ32)
CAENMNYGGATNKLIF

SEQ ID NO: 367330 - protein, 14 aa, Homo sapiens
  CDR3 for beta chain variable domain of TCR clone 183665 (TRBV15, TRBJ2-5)
RATSSTGYQETQYS

SEQ ID NO: 367331 - protein, 12 aa, Homo sapiens
  CDR3 for alpha chain variable domain of TCR clone 183666 (TRAV3, TRAJ20)
CAVRDPDSKLSF

SEQ ID NO: 367332 - protein, 15 aa, Homo sapiens
  CDR3 for beta chain variable domain of TCR clone 183666 (TRBV6-5, TRBJ2-5)
CASSPLAGGIETQYF

SEQ ID NO: 367333 - protein, 11 aa, Homo sapiens
  CDR3 for alpha chain variable domain of TCR clone 183667 (TRAV23/DV6, TRAJ49)
CAVAPVTSSIL

SEQ ID NO: 367334 - protein, 14 aa, Homo sapiens
  CDR3 for beta chain variable domain of TCR clone 183667 (TRBV20-1, TRBJ1-1)
CSAMGGTANTEAFF

SEQ ID NO: 367335 - protein, 16 aa, Homo sapiens
  CDR3 for alpha chain variable domain of TCR clone 183668 (TRAV3, TRAJ10)
CAVRDMRAGGGNKLTF

SEQ ID NO: 367336 - protein, 16 aa, Homo sapiens
  CDR3 for beta chain variable domain of TCR clone 183668 (TRBV19, TRBJ2-2)
CASSFPGQGLAGALFF

SEQ ID NO: 367337 - protein, 14 aa, Homo sapiens
  CDR3 for alpha chain variable domain of TCR clone 183669 (TRAV12-2, TRAJ49)
CAVTLGLYGNQFYF

SEQ ID NO: 367338 - protein, 16 aa, Homo sapiens
  CDR3 for beta chain variable domain of TCR clone 183669 (TRBV11-3, TRBJ2-5)
CASSSVVAGSTETQYF

SEQ ID NO: 367339 - protein, 13 aa, Homo sapiens
  CDR3 for alpha chain variable domain of TCR clone 183670 (TRAV21, TRAJ52)
CAVRPSPAGGTSY

SEQ ID NO: 367340 - protein, 15 aa, Homo sapiens
  CDR3 for beta chain variable domain of TCR clone 183670 (TRBV7-9, TRBJ2-7)
CASSSSGLAVYEQYF

SEQ ID NO: 367341 - protein, 11 aa, Homo sapiens
  CDR3 for alpha chain variable domain of TCR clone 183671 (TRAV21, TRAJ11)
CAVNGYSTLTF

SEQ ID NO: 367342 - protein, 15 aa, Homo sapiens
  CDR3 for beta chain variable domain of TCR clone 183671 (TRBV5-1, TRBJ2-7)
CASSWATGSSYEQYF

SEQ ID NO: 367343 - protein, 12 aa, Homo sapiens
  CDR3 for alpha chain variable domain of TCR clone 183672 (TRAV35, TRAJ43)
CAGAYNNNDMRF

SEQ ID NO: 367344 - protein, 14 aa, Homo sapiens
  CDR3 for beta chain variable domain of TCR clone 183672 (TRBV2, TRBJ2-2)
CARSWKGEKGEMFF

SEQ ID NO: 367345 - protein, 14 aa, Homo sapiens
  CDR3 for alpha chain variable domain of TCR clone 183673 (TRAV1-2, TRAJ16)
CAVNRFSDCQKLLF

SEQ ID NO: 367346 - protein, 13 aa, Homo sapiens
  CDR3 for beta chain variable domain of TCR clone 183673 (TRBV14, TRBJ2-7)
CASSQDRRYEQYF

SEQ ID NO: 367347 - protein, 11 aa, Homo sapiens
  CDR3 for alpha chain variable domain of TCR clone 183674 (TRAV12-2, TRAJ54)
CAVEGAQKLVF

SEQ ID NO: 367348 - protein, 17 aa, Homo sapiens
  CDR3 for beta chain variable domain of TCR clone 183674 (TRBV18, TRBJ1-3)
CASAPYPTGPSGNTIYF

SEQ ID NO: 367349 - protein, 17 aa, Homo sapiens
  CDR3 for alpha chain variable domain of TCR clone 183675 (TRAV8-6, TRAJ58)
CAVSSWVGETSGSRLTF

SEQ ID NO: 367350 - protein, 14 aa, Homo sapiens
  CDR3 for beta chain variable domain of TCR clone 183675 (TRBV20-1, TRBJ2-1)
CSAQIGWSANEQFF

SEQ ID NO: 367351 - protein, 14 aa, Homo sapiens
  CDR3 for alpha chain variable domain of TCR clone 183676 (TRAV1-2, TRAJ16)
CAVNRFSDGQKLLF

SEQ ID NO: 367352 - protein, 18 aa, Homo sapiens
  CDR3 for beta chain variable domain of TCR clone 183676 (TRBV10-1, TRBJ2-1)
CASSWVGGALFSTMSSSS

SEQ ID NO: 367353 - protein, 16 aa, Homo sapiens
  CDR3 for alpha chain variable domain of TCR clone 183677 (TRAV12-1, TRAJ42)
CVVTPYYGGSQGDLIF

SEQ ID NO: 367354 - protein, 15 aa, Homo sapiens
  CDR3 for beta chain variable domain of TCR clone 183677 (TRBV4-3, TRBJ2-7)
CASSQGGRGIYEQYF

SEQ ID NO: 367355 - protein, 18 aa, Homo sapiens
  CDR3 for alpha chain variable domain of TCR clone 183678 (TRAV12-3, TRAJ52)
CAMSVGGAGGTSYGKLTF

SEQ ID NO: 367356 - protein, 15 aa, Homo sapiens
  CDR3 for beta chain variable domain of TCR clone 183678 (TRBV7-9, TRBJ1-5)
CASSQGHQPDQPQHF

SEQ ID NO: 367357 - protein, 12 aa, Homo sapiens
  CDR3 for alpha chain variable domain of TCR clone 183679 (TRAV25, TRAJ5)
CARGGGRRALTF

SEQ ID NO: 367358 - protein, 15 aa, Homo sapiens
  CDR3 for beta chain variable domain of TCR clone 183679 (TRBV20-1, TRBJ2-7)
CSARDRVSGMDEQYF

SEQ ID NO: 367359 - protein, 16 aa, Homo sapiens
  CDR3 for alpha chain variable domain of TCR clone 183680 (TRAV13-1, TRAJ52)
CAAIMRGGTSYGKLTF

SEQ ID NO: 367360 - protein, 14 aa, Homo sapiens
  CDR3 for beta chain variable domain of TCR clone 183680 (TRBV7-9, TRBJ2-5)
CASSLDTAQETQYF

SEQ ID NO: 367361 - protein, 14 aa, Homo sapiens
  CDR3 for alpha chain variable domain of TCR clone 183681 (TRAV26-1, TRAJ48)
CIVRVGFGNEKLTF

SEQ ID NO: 367362 - protein, 14 aa, Homo sapiens
  CDR3 for beta chain variable domain of TCR clone 183681 (TRBV7-2, TRBJ2-7)
CASRSQWAAYEQYF

SEQ ID NO: 367363 - protein, 13 aa, Homo sapiens
  CDR3 for alpha chain variable domain of TCR clone 183682 (TRAV12-3, TRAJ13)
CAMSSGGYEKVTF

SEQ ID NO: 367364 - protein, 14 aa, Homo sapiens
  CDR3 for beta chain variable domain of TCR clone 183682 (TRBV2, TRBJ2-1)
CASRTGSSYNEQFF

SEQ ID NO: 367365 - protein, 18 aa, Homo sapiens
  CDR3 for alpha chain variable domain of TCR clone 183683 (TRAV1-1, TRAJ13)
LLLLRCEGESGGYQKVTF

SEQ ID NO: 367366 - protein, 13 aa, Homo sapiens
  CDR3 for beta chain variable domain of TCR clone 183683 (TRBV29-1, TRBJ2-1)
CSVEGGRVNEQFF

SEQ ID NO: 367367 - protein, 16 aa, Homo sapiens
  CDR3 for alpha chain variable domain of TCR clone 183684 (TRAV3, TRAJ37)
CAVRPHGSGTTGKLIF

SEQ ID NO: 367368 - protein, 13 aa, Homo sapiens
  CDR3 for beta chain variable domain of TCR clone 183684 (TRBV2, TRBJ1-5)
CASGTGGYQHQHF

SEQ ID NO: 367369 - protein, 13 aa, Homo sapiens
  CDR3 for alpha chain variable domain of TCR clone 183685 (TRAV27, TRAJ11)
CAGARSGYNTLTF

SEQ ID NO: 367370 - protein, 16 aa, Homo sapiens
  CDR3 for beta chain variable domain of TCR clone 183685 (TRBV10-2, TRBJ2-2)
CASSESRDRGSGELFF

SEQ ID NO: 367371 - protein, 12 aa, Homo sapiens
  CDR3 for alpha chain variable domain of TCR clone 183686 (TRAV21, TRAJ37)
CAVRGNTGKLIF

SEQ ID NO: 367372 - protein, 17 aa, Homo sapiens
  CDR3 for beta chain variable domain of TCR clone 183686 (TRBV7-3, TRBJ2-3)
CASSLMKRMRGADTQYF

SEQ ID NO: 367373 - protein, 12 aa, Homo sapiens
  CDR3 for alpha chain variable domain of TCR clone 183687 (TRAV21, TRAJ49)
CAVRNTGNQFYF

SEQ ID NO: 367374 - protein, 15 aa, Homo sapiens
  CDR3 for beta chain variable domain of TCR clone 183687 (TRBV27, TRBJ1-5)
CASSLGQGSVQPQHF

SEQ ID NO: 367375 - protein, 14 aa, Homo sapiens
  CDR3 for alpha chain variable domain of TCR clone 183688 (TRAV8-3, TRAJ9)
CAVVYNTGGFKTIF

SEQ ID NO: 367376 - protein, 13 aa, Homo sapiens
  CDR3 for beta chain variable domain of TCR clone 183688 (TRBV4-2, TRBJ1-1)
CASSQAGNTEAFF

SEQ ID NO: 367377 - protein, 15 aa, Homo sapiens
  CDR3 for alpha chain variable domain of TCR clone 183689 (TRAV21, TRAJ52)
CAVRGGGTSYGKLTF

SEQ ID NO: 367378 - protein, 15 aa, Homo sapiens
  CDR3 for beta chain variable domain of TCR clone 183689 (TRBV20-1, TRBJ2-7)
CSARDRVSGMDEQYF

SEQ ID NO: 367379 - protein, 16 aa, Homo sapiens
  CDR3 for alpha chain variable domain of TCR clone 183690 (TRAV12-2, TRAJ43)
CAGDDMRFGAGTRLTV

SEQ ID NO: 367380 - protein, 15 aa, Homo sapiens
  CDR3 for beta chain variable domain of TCR clone 183690 (TRBV27, TRBJ1-4)
CASSAQQDLNEKLFF

SEQ ID NO: 367381 - protein, 12 aa, Homo sapiens
  CDR3 for alpha chain variable domain of TCR clone 183691 (TRAV36/DV7, TRAJ50)
CAVEPENLLRQG

SEQ ID NO: 367382 - protein, 13 aa, Homo sapiens
  CDR3 for beta chain variable domain of TCR clone 183691 (TRBV7-2, TRBJ2-7)
CAISSPSGSEQYF

SEQ ID NO: 367383 - protein, 15 aa, Homo sapiens
  CDR3 for alpha chain variable domain of TCR clone 183692 (TRAV12-2, TRAJ53)
CAVNGGGGSNYKLTF

SEQ ID NO: 367384 - protein, 17 aa, Homo sapiens
  CDR3 for beta chain variable domain of TCR clone 183692 (TRBV25-1, TRBJ2-7)
CASSDARVVFSSYEQYF

SEQ ID NO: 367385 - protein, 16 aa, Homo sapiens
  CDR3 for alpha chain variable domain of TCR clone 183693 (TRAV30, TRAJ24)
CGKEIVDADSWGKFQF

SEQ ID NO: 367386 - protein, 15 aa, Homo sapiens
  CDR3 for beta chain variable domain of TCR clone 183693 (TRBV6-3, TRBJ2-7)
CASSSPGTVFYEQYF

SEQ ID NO: 367387 - protein, 12 aa, Homo sapiens
  CDR3 for alpha chain variable domain of TCR clone 183694 (TRAV17, TRAJ21)
CALRYNFNKFYF

SEQ ID NO: 367388 - protein, 17 aa, Homo sapiens
  CDR3 for beta chain variable domain of TCR clone 183694 (TRBV20-1, TRBJ2-1)
CSARDPLAGVWDNEQFF

SEQ ID NO: 367389 - protein, 12 aa, Homo sapiens
  CDR3 for alpha chain variable domain of TCR clone 183695 (TRAV12-2, TRAJ10)
WGVTGGGNKLTF

SEQ ID NO: 367390 - protein, 14 aa, Homo sapiens
  CDR3 for beta chain variable domain of TCR clone 183695 (TRBV2, TRBJ2-7)
CASSLTSGGYEQYF

SEQ ID NO: 367391 - protein, 18 aa, Homo sapiens
  CDR3 for alpha chain variable domain of TCR clone 183696 (TRAV12-3, TRAJ52)
CAMSVGGAGGTSYGKLTF

SEQ ID NO: 367392 - protein, 15 aa, Homo sapiens
  CDR3 for beta chain variable domain of TCR clone 183696 (TRBV9, TRBJ2-1)
CASSLAGSSYNEQFF

SEQ ID NO: 367393 - protein, 15 aa, Homo sapiens
  CDR3 for alpha chain variable domain of TCR clone 183697 (TRAV12-1, TRAJ49)
CVVNVLSNTGNQFHF

SEQ ID NO: 367394 - protein, 15 aa, Homo sapiens
  CDR3 for beta chain variable domain of TCR clone 183697 (TRBV27, TRBJ2-1)
CASSNGGGSSNEQFF

SEQ ID NO: 367395 - protein, 15 aa, Homo sapiens
  CDR3 for alpha chain variable domain of TCR clone 183698 (TRAV21, TRAJ53)
CATLNSGGSNYKLTF

SEQ ID NO: 367396 - protein, 16 aa, Homo sapiens
  CDR3 for beta chain variable domain of TCR clone 183698 (TRBV9, TRBJ2-1)
CASSVGGGGRYNEQFF

SEQ ID NO: 367397 - protein, 14 aa, Homo sapiens
  CDR3 for alpha chain variable domain of TCR clone 183699 (TRAV12-2, TRAJ5)
CAVNRSTGRRALTF

SEQ ID NO: 367398 - protein, 13 aa, Homo sapiens
  CDR3 for beta chain variable domain of TCR clone 183699 (TRBV7-6, TRBJ1-2)
CASSLVADYGDTF

SEQ ID NO: 367399 - protein, 14 aa, Homo sapiens
  CDR3 for alpha chain variable domain of TCR clone 183700 (TRAV3, TRAJ9)
CAVRDDTGGFTTIF

SEQ ID NO: 367400 - protein, 13 aa, Homo sapiens
  CDR3 for beta chain variable domain of TCR clone 183700 (TRBV27, TRBJ2-7)
CASSFVSSYEQHF

SEQ ID NO: 367401 - protein, 16 aa, Homo sapiens
  CDR3 for alpha chain variable domain of TCR clone 183701 (TRAV3, TRAJ37)
CAVRPHGSGNKGKLIF

SEQ ID NO: 367402 - protein, 14 aa, Homo sapiens
  CDR3 for beta chain variable domain of TCR clone 183701 (TRBV25-1, TRBJ1-1)
CASTHLGGNTEAFF

SEQ ID NO: 367403 - protein, 16 aa, Homo sapiens
  CDR3 for alpha chain variable domain of TCR clone 183702 (TRAV30, TRAJ24)
CGTEIVDAYSWGKFQF

SEQ ID NO: 367404 - protein, 12 aa, Homo sapiens
  CDR3 for beta chain variable domain of TCR clone 183702 (TRBV7-8, TRBJ2-7)
CASSLGDREQYF

SEQ ID NO: 367405 - protein, 14 aa, Homo sapiens
  CDR3 for alpha chain variable domain of TCR clone 183703 (TRAV12-2, TRAJ13)
CAMKKTGGYQKVTF

SEQ ID NO: 367406 - protein, 14 aa, Homo sapiens
  CDR3 for beta chain variable domain of TCR clone 183703 (TRBV11-1, TRBJ2-7)
CASSFRQGSYEQYF

SEQ ID NO: 367407 - protein, 16 aa, Homo sapiens
  CDR3 for alpha chain variable domain of TCR clone 183704 (TRAV2, TRAJ4)
CAVEDRFSGGYNKLIF

SEQ ID NO: 367408 - protein, 17 aa, Homo sapiens
  CDR3 for beta chain variable domain of TCR clone 183704 (TRBV15, TRBJ1-4)
CATSRYGTGDPNEKLFF

SEQ ID NO: 367409 - protein, 13 aa, Homo sapiens
  CDR3 for alpha chain variable domain of TCR clone 183705 (TRAV12-2, TRAJ4)
CAVRSGGYNKLIF

SEQ ID NO: 367410 - protein, 15 aa, Homo sapiens
  CDR3 for beta chain variable domain of TCR clone 183705 (TRBV10-3, TRBJ2-1)
CAISDVQDRAYEKFF

SEQ ID NO: 367411 - protein, 14 aa, Homo sapiens
  CDR3 for alpha chain variable domain of TCR clone 183706 (TRAV17, TRAJ57)
CATDPQGGSEKQVF

SEQ ID NO: 367412 - protein, 18 aa, Homo sapiens
  CDR3 for beta chain variable domain of TCR clone 183706 (TRBV6-5, TRBJ2-6)
CASSYSGNMESGANVLTF

SEQ ID NO: 367413 - protein, 11 aa, Homo sapiens
  CDR3 for alpha chain variable domain of TCR clone 183707 (TRAV8-4, TRAJ20)
CAVTNVLTTTS

SEQ ID NO: 367414 - protein, 16 aa, Homo sapiens
  CDR3 for beta chain variable domain of TCR clone 183707 (TRBV11-3, TRBJ2-5)
CASSSVVAGSTETQYF

SEQ ID NO: 367415 - protein, 11 aa, Homo sapiens
  CDR3 for alpha chain variable domain of TCR clone 183708 (TRAV1-1, TRAJ22)
CLGGFCKATYL

SEQ ID NO: 367416 - protein, 14 aa, Homo sapiens
  CDR3 for beta chain variable domain of TCR clone 183708 (TRBV27, TRBJ2-7)
CASSLAGLSYEQYF

SEQ ID NO: 367417 - protein, 12 aa, Homo sapiens
  CDR3 for alpha chain variable domain of TCR clone 183709 (TRAV12-3, TRAJ17)
CAMTLTGNKLTF

SEQ ID NO: 367418 - protein, 14 aa, Homo sapiens
  CDR3 for beta chain variable domain of TCR clone 183709 (TRBV20-1, TRBJ1-1)
RSAQTRIGGTEAFF

SEQ ID NO: 367419 - protein, 14 aa, Homo sapiens
  CDR3 for alpha chain variable domain of TCR clone 183710 (TRAV13-1, TRAJ44)
CSAKATGTASKLTF

SEQ ID NO: 367420 - protein, 18 aa, Homo sapiens
  CDR3 for beta chain variable domain of TCR clone 183710 (TRBV4-1, TRBJ2-3)
CASSHQLAGGRSTDTQYF

SEQ ID NO: 367421 - protein, 14 aa, Homo sapiens
  CDR3 for alpha chain variable domain of TCR clone 183711 (TRAV17, TRAJ16)
CATADFSDGQKLLF

SEQ ID NO: 367422 - protein, 14 aa, Homo sapiens
  CDR3 for beta chain variable domain of TCR clone 183711 (TRBV4-3, TRBJ1-5)
CASSQGGQGWPQHF

SEQ ID NO: 367423 - protein, 13 aa, Homo sapiens
  CDR3 for alpha chain variable domain of TCR clone 183712 (TRAV27, TRAJ16)
CAGACSDGQKLLF

SEQ ID NO: 367424 - protein, 16 aa, Homo sapiens
  CDR3 for beta chain variable domain of TCR clone 183712 (TRBV7-9, TRBJ2-1)
CASSSPQGTTRNEQFF

SEQ ID NO: 367425 - protein, 13 aa, Homo sapiens
  CDR3 for alpha chain variable domain of TCR clone 183713 (TRAV12-1, TRAJ29)
CVVNGPGNTPLVF

SEQ ID NO: 367426 - protein, 18 aa, Homo sapiens
  CDR3 for beta chain variable domain of TCR clone 183713 (TRBV11-2, TRBJ2-3)
CASSLGGASRGAPNTQYF

SEQ ID NO: 367427 - protein, 13 aa, Homo sapiens
  CDR3 for alpha chain variable domain of TCR clone 183714 (TRAV12-2, TRAJ4)
CAGFSGGYNKLIF

SEQ ID NO: 367428 - protein, 16 aa, Homo sapiens
  CDR3 for beta chain variable domain of TCR clone 183714 (TRBV4-1, TRBJ1-5)
CASSQGGHTTDQPQHF

SEQ ID NO: 367429 - protein, 15 aa, Homo sapiens
  CDR3 for alpha chain variable domain of TCR clone 183715 (TRAV2, TRAJ9)
CAVEYRGTGGFKTIF

SEQ ID NO: 367430 - protein, 15 aa, Homo sapiens
  CDR3 for beta chain variable domain of TCR clone 183715 (TRBV5-1, TRBJ2-7)
CASSLMTSGSNEQYL

SEQ ID NO: 367431 - protein, 13 aa, Homo sapiens
  CDR3 for alpha chain variable domain of TCR clone 183716 (TRAV12-2, TRAJ49)
CAVKPNTGNQFYF

SEQ ID NO: 367432 - protein, 14 aa, Homo sapiens
  CDR3 for beta chain variable domain of TCR clone 183716 (TRBV7-2, TRBJ2-7)
CASSLYPGRYEQYF

SEQ ID NO: 367433 - protein, 14 aa, Homo sapiens
  CDR3 for alpha chain variable domain of TCR clone 183717 (TRAV23/DV6, TRAJ6)
CAASRSGGSYIPTF

SEQ ID NO: 367434 - protein, 17 aa, Homo sapiens
  CDR3 for beta chain variable domain of TCR clone 183717 (TRBV20-1, TRBJ2-1)
CSASASGLAGSYNEQYF

SEQ ID NO: 367435 - protein, 16 aa, Homo sapiens
  CDR3 for alpha chain variable domain of TCR clone 183718 (TRAV30, TRAJ24)
CGTEIVDADSWGKFQF

SEQ ID NO: 367436 - protein, 13 aa, Homo sapiens
  CDR3 for beta chain variable domain of TCR clone 183718 (TRBV10-3, TRBJ2-7)
CAPKLAVNYEQYF

SEQ ID NO: 367437 - protein, 22 aa, Homo sapiens
  CDR3 for alpha chain variable domain of TCR clone 183719 (TRAV3, TRAJ38)
CAVRDCPNAGNNHIQNPDPAVY

SEQ ID NO: 367438 - protein, 15 aa, Homo sapiens
  CDR3 for beta chain variable domain of TCR clone 183719 (TRBV6-5, TRBJ2-1)
CASSYDAGAGNEQFF

SEQ ID NO: 367439 - protein, 12 aa, Homo sapiens
  CDR3 for alpha chain variable domain of TCR clone 183720 (TRAV10, TRAJ34)
CVVSGKHRQAHL

SEQ ID NO: 367440 - protein, 16 aa, Homo sapiens
  CDR3 for beta chain variable domain of TCR clone 183720 (TRBV12-5, TRBJ2-5)
CASGPRTSGNQETQYF

SEQ ID NO: 367441 - protein, 15 aa, Homo sapiens
  CDR3 for alpha chain variable domain of TCR clone 183721 (TRAV27, TRAJ34)
CRGGVGDYNTDKLIF

SEQ ID NO: 367442 - protein, 15 aa, Homo sapiens
  CDR3 for beta chain variable domain of TCR clone 183721 (TRBV9, TRBJ1-4)
CASSVGGSTNEKLFF

SEQ ID NO: 367443 - protein, 10 aa, Homo sapiens
  CDR3 for alpha chain variable domain of TCR clone 183722 (TRAV2, TRAJ26)
CAVVGLWSEF

SEQ ID NO: 367444 - protein, 15 aa, Homo sapiens
  CDR3 for beta chain variable domain of TCR clone 183722 (TRBV11-2, TRBJ2-2)
CASSSDRVNAGELFF

SEQ ID NO: 367445 - protein, 12 aa, Homo sapiens
  CDR3 for alpha chain variable domain of TCR clone 183723 (TRAV21, TRAJ34)
CAAPYNTDKLIF

SEQ ID NO: 367446 - protein, 13 aa, Homo sapiens
  CDR3 for beta chain variable domain of TCR clone 183723 (TRBV7-9, TRBJ1-2)
CASSLKQNYGYTF

SEQ ID NO: 367447 - protein, 14 aa, Homo sapiens
  CDR3 for alpha chain variable domain of TCR clone 183724 (TRAV27, TRAJ15)
CAGFDNQAGTALIF

SEQ ID NO: 367448 - protein, 11 aa, Homo sapiens
  CDR3 for beta chain variable domain of TCR clone 183724 (TRBV29-1, TRBJ1-1)
CRVEVGTRTFF

SEQ ID NO: 367449 - protein, 14 aa, Homo sapiens
  CDR3 for alpha chain variable domain of TCR clone 183725 (TRAV29/DV5, TRAJ36)
CAARRKTGANNLFF

SEQ ID NO: 367450 - protein, 17 aa, Homo sapiens
  CDR3 for beta chain variable domain of TCR clone 183725 (TRBV7-3, TRBJ2-3)
CASSPGGLAGFGDTQYF

SEQ ID NO: 367451 - protein, 14 aa, Homo sapiens
  CDR3 for alpha chain variable domain of TCR clone 183726 (TRAV12-1, TRAJ17)
CVVNYKAAVNKLTF

SEQ ID NO: 367452 - protein, 14 aa, Homo sapiens
  CDR3 for beta chain variable domain of TCR clone 183726 (TRBV20-1, TRBJ1-1)
CSAQTRIGGTEAFF

SEQ ID NO: 367453 - protein, 20 aa, Homo sapiens
  CDR3 for alpha chain variable domain of TCR clone 183727 (TRAV12-1, TRAJ42)
SSVIQPPTSVKGGSQGNLIF

SEQ ID NO: 367454 - protein, 14 aa, Homo sapiens
  CDR3 for beta chain variable domain of TCR clone 183727 (TRBV7-3, TRBJ1-1)
CASSLKGGSTEAFF

SEQ ID NO: 367455 - protein, 14 aa, Homo sapiens
  CDR3 for alpha chain variable domain of TCR clone 183728 (TRAV21, TRAJ35)
CAVMPIGFGNVLHC

SEQ ID NO: 367456 - protein, 12 aa, Homo sapiens
  CDR3 for beta chain variable domain of TCR clone 183728 (TRBV7-9, TRBJ2-7)
CASIIKRGEQYF

SEQ ID NO: 367457 - protein, 11 aa, Homo sapiens
  CDR3 for alpha chain variable domain of TCR clone 183729 (TRAV3, TRAJ21)
CAVGNFNKFYF

SEQ ID NO: 367458 - protein, 16 aa, Homo sapiens
  CDR3 for beta chain variable domain of TCR clone 183729 (TRBV25-1, TRBJ2-5)
CASSEMGSRAPETQYF

SEQ ID NO: 367459 - protein, 12 aa, Homo sapiens
  CDR3 for alpha chain variable domain of TCR clone 183730 (TRAV2, TRAJ9)
CAVGAGGFKTIF

SEQ ID NO: 367460 - protein, 14 aa, Homo sapiens
  CDR3 for beta chain variable domain of TCR clone 183730 (TRBV18, TRBJ1-2)
YASSPDRVVYGYTF

SEQ ID NO: 367461 - protein, 11 aa, Homo sapiens
  CDR3 for alpha chain variable domain of TCR clone 183731 (TRAV3, TRAJ21)
CAVGNLNKFYF

SEQ ID NO: 367462 - protein, 14 aa, Homo sapiens
  CDR3 for beta chain variable domain of TCR clone 183731 (TRBV20-1, TRBJ2-5)
CSAHRQGLWETQYF

SEQ ID NO: 367463 - protein, 15 aa, Homo sapiens
  CDR3 for alpha chain variable domain of TCR clone 183732 (TRAV26-1, TRAJ42)
CIVRVKGGSQGNLIF

SEQ ID NO: 367464 - protein, 12 aa, Homo sapiens
  CDR3 for beta chain variable domain of TCR clone 183732 (TRBV7-9, TRBJ1-1)
CASSLVRGEAFF

SEQ ID NO: 367465 - protein, 16 aa, Homo sapiens
  CDR3 for alpha chain variable domain of TCR clone 183733 (TRAV27, TRAJ13)
CAGAKSDSGGYQKVTF

SEQ ID NO: 367466 - protein, 14 aa, Homo sapiens
  CDR3 for beta chain variable domain of TCR clone 183733 (TRBV15, TRBJ2-5)
CATSIGGLGETQYF

SEQ ID NO: 367467 - protein, 16 aa, Homo sapiens
  CDR3 for alpha chain variable domain of TCR clone 183734 (TRAV12-1, TRAJ22)
CVVNTISSGSARQLTI

SEQ ID NO: 367468 - protein, 13 aa, Homo sapiens
  CDR3 for beta chain variable domain of TCR clone 183734 (TRBV19, TRBJ2-1)
CASNGGVFSEQFF

SEQ ID NO: 367469 - protein, 13 aa, Homo sapiens
  CDR3 for alpha chain variable domain of TCR clone 183735 (TRAV13-1, TRAJ37)
CAAVSGNTGKLIF

SEQ ID NO: 367470 - protein, 16 aa, Homo sapiens
  CDR3 for beta chain variable domain of TCR clone 183735 (TRBV5-7, TRBJ1-5)
CASSLQQDREYQPQHF

SEQ ID NO: 367471 - protein, 13 aa, Homo sapiens
  CDR3 for alpha chain variable domain of TCR clone 183736 (TRAV41, TRAJ48)
CAVKRFGNEKLTF

SEQ ID NO: 367472 - protein, 12 aa, Homo sapiens
  CDR3 for beta chain variable domain of TCR clone 183736 (TRBV11-2, TRBJ2-2)
CASSLGGGELFF

SEQ ID NO: 367473 - protein, 14 aa, Homo sapiens
  CDR3 for alpha chain variable domain of TCR clone 183737 (TRAV38-1, TRAJ28)
CAFTSGAGSYQLTF

SEQ ID NO: 367474 - protein, 16 aa, Homo sapiens
  CDR3 for beta chain variable domain of TCR clone 183737 (TRBV28, TRBJ2-6)
CASSNRRGSGANVLTF

SEQ ID NO: 367475 - protein, 12 aa, Homo sapiens
  CDR3 for alpha chain variable domain of TCR clone 183738 (TRAV13-1, TRAJ21)
CAAKEGFNKFYF

SEQ ID NO: 367476 - protein, 13 aa, Homo sapiens
  CDR3 for beta chain variable domain of TCR clone 183738 (TRBV19, TRBJ2-5)
CASSTPYGETQYF

SEQ ID NO: 367477 - protein, 15 aa, Homo sapiens
  CDR3 for alpha chain variable domain of TCR clone 183739 (TRAV14/DV4, TRAJ12)
CAMRELMDSSYKLIF

SEQ ID NO: 367478 - protein, 10 aa, Homo sapiens
  CDR3 for beta chain variable domain of TCR clone 183739 (TRBV20-1, TRBJ2-7)
CSEGYYEQCF

SEQ ID NO: 367479 - protein, 10 aa, Homo sapiens
  CDR3 for alpha chain variable domain of TCR clone 183740 (TRAV8-4, TRAJ39)
CAVAGNMLTF

SEQ ID NO: 367480 - protein, 12 aa, Homo sapiens
  CDR3 for beta chain variable domain of TCR clone 183740 (TRBV11-2, TRBJ2-2)
CASSLGGGELFF

SEQ ID NO: 367481 - protein, 17 aa, Homo sapiens
  CDR3 for alpha chain variable domain of TCR clone 183741 (TRAV4, TRAJ42)
CLVGVLNYGGSQGNLIF

SEQ ID NO: 367482 - protein, 12 aa, Homo sapiens
  CDR3 for beta chain variable domain of TCR clone 183741 (TRBV20-1, TRBJ2-1)
CSAQYAYNEQLF

SEQ ID NO: 367483 - protein, 14 aa, Homo sapiens
  CDR3 for alpha chain variable domain of TCR clone 183742 (TRAV35, TRAJ50)
CAGHRKTSYDKVIF

SEQ ID NO: 367484 - protein, 13 aa, Homo sapiens
  CDR3 for beta chain variable domain of TCR clone 183742 (TRBV7-7, TRBJ2-3)
CASGLSRADTQYF

SEQ ID NO: 367485 - protein, 12 aa, Homo sapiens
  CDR3 for alpha chain variable domain of TCR clone 183743 (TRAV12-3, TRAJ17)
CAMTLTDNKLTF

SEQ ID NO: 367486 - protein, 13 aa, Homo sapiens
  CDR3 for beta chain variable domain of TCR clone 183743 (TRBV20-1, TRBJ1-1)
CSAPLGGGTEAFF

SEQ ID NO: 367487 - protein, 13 aa, Homo sapiens
  CDR3 for alpha chain variable domain of TCR clone 183744 (TRAV1-2, TRAJ12)
CAVSMDSSYKLIF

SEQ ID NO: 367488 - protein, 17 aa, Homo sapiens
  CDR3 for beta chain variable domain of TCR clone 183744 (TRBV11-2, TRBJ2-1)
CASSLSPPGVEYNEQFF

SEQ ID NO: 367489 - protein, 13 aa, Homo sapiens
  CDR3 for alpha chain variable domain of TCR clone 183745 (TRAV30, TRAJ24)
CGTVTDSWGKLQF

SEQ ID NO: 367490 - protein, 14 aa, Homo sapiens
  CDR3 for beta chain variable domain of TCR clone 183745 (TRBV6-3, TRBJ2-2)
CTSTYTPDTGELFF

SEQ ID NO: 367491 - protein, 14 aa, Homo sapiens
  CDR3 for alpha chain variable domain of TCR clone 183746 (TRAV12-3, TRAJ9)
CAMSPNTGGFKTIF

SEQ ID NO: 367492 - protein, 15 aa, Homo sapiens
  CDR3 for beta chain variable domain of TCR clone 183746 (TRBV29-1, TRBJ2-2)
CSVTGTGSSNGELFF

SEQ ID NO: 367493 - protein, 14 aa, Homo sapiens
  CDR3 for alpha chain variable domain of TCR clone 183747 (TRAV1-2, TRAJ16)
CAVNRFSDGQKLLF

SEQ ID NO: 367494 - protein, 13 aa, Homo sapiens
  CDR3 for beta chain variable domain of TCR clone 183747 (TRBV19, TRBJ1-2)
CASSVPGQDGYTC

SEQ ID NO: 367495 - protein, 15 aa, Homo sapiens
  CDR3 for alpha chain variable domain of TCR clone 183748 (TRAV34, TRAJ38)
CGADFTPGNNRKLIW

SEQ ID NO: 367496 - protein, 16 aa, Homo sapiens
  CDR3 for beta chain variable domain of TCR clone 183748 (TRBV12-5, TRBJ2-5)
CASDPRTSGNQETQYF

SEQ ID NO: 367497 - protein, 12 aa, Homo sapiens
  CDR3 for alpha chain variable domain of TCR clone 183749 (TRAV13-1, TRAJ21)
CAAKEGFNKFYF

SEQ ID NO: 367498 - protein, 17 aa, Homo sapiens
  CDR3 for beta chain variable domain of TCR clone 183749 (TRBV25-1, TRBJ2-7)
CASSDARVVFSSYEQYF

SEQ ID NO: 367499 - protein, 14 aa, Homo sapiens
  CDR3 for alpha chain variable domain of TCR clone 183750 (TRAV13-1, TRAJ45)
CAAIGGGGADGLTF

SEQ ID NO: 367500 - protein, 14 aa, Homo sapiens
  CDR3 for beta chain variable domain of TCR clone 183750 (TRBV7-2, TRBJ1-1)
CASSFLTGTTEAFF

SEQ ID NO: 367501 - protein, 15 aa, Homo sapiens
  CDR3 for alpha chain variable domain of TCR clone 183751 (TRAV3, TRAJ3)
CAVRDRDSSASKIIF

SEQ ID NO: 367502 - protein, 18 aa, Homo sapiens
  CDR3 for beta chain variable domain of TCR clone 183751 (TRBV25-1, TRBJ1-2)
CASSGLQNGQGLIIGYTF

SEQ ID NO: 367503 - protein, 20 aa, Homo sapiens
  CDR3 for alpha chain variable domain of TCR clone 183752 (TRAV26-1, TRAJ47)
CCVLLHRQSSFMEYGNKLVF

SEQ ID NO: 367504 - protein, 17 aa, Homo sapiens
  CDR3 for beta chain variable domain of TCR clone 183752 (TRBV4-1, TRBJ2-7)
CASSRDPLGVRGGEQYF

SEQ ID NO: 367505 - protein, 15 aa, Homo sapiens
  CDR3 for alpha chain variable domain of TCR clone 183753 (TRAV4, TRAJ39)
CLVGPNNNAGNMLTF

SEQ ID NO: 367506 - protein, 13 aa, Homo sapiens
  CDR3 for beta chain variable domain of TCR clone 183753 (TRBV11-2, TRBJ2-5)
CASSSTGEETQYC

SEQ ID NO: 367507 - protein, 15 aa, Homo sapiens
  CDR3 for alpha chain variable domain of TCR clone 183754 (TRAV25, TRAJ52)
CAGRPGGTSYGKLTF

SEQ ID NO: 367508 - protein, 17 aa, Homo sapiens
  CDR3 for beta chain variable domain of TCR clone 183754 (TRBV7-8, TRBJ2-6)
CASSAGTGGAGANVLTS

SEQ ID NO: 367509 - protein, 14 aa, Homo sapiens
  CDR3 for alpha chain variable domain of TCR clone 183755 (TRAV16, TRAJ57)
CALPTQGGSEKLVF

SEQ ID NO: 367510 - protein, 15 aa, Homo sapiens
  CDR3 for beta chain variable domain of TCR clone 183755 (TRBV28, TRBJ1-3)
CASWGGHLSGNTIYV

SEQ ID NO: 367511 - protein, 14 aa, Homo sapiens
  CDR3 for alpha chain variable domain of TCR clone 183756 (TRAV12-3, TRAJ10)
SHLPLTGGGNKLTF

SEQ ID NO: 367512 - protein, 16 aa, Homo sapiens
  CDR3 for beta chain variable domain of TCR clone 183756 (TRBV12-4, TRBJ2-7)
CASSLIGGTGTYEQYF

SEQ ID NO: 367513 - protein, 12 aa, Homo sapiens
  CDR3 for alpha chain variable domain of TCR clone 183757 (TRAV13-1, TRAJ49)
CAASPMGSQFYF

SEQ ID NO: 367514 - protein, 14 aa, Homo sapiens
  CDR3 for beta chain variable domain of TCR clone 183757 (TRBV20-1, TRBJ2-2)
SAVLVPRAPGSCFF

SEQ ID NO: 367515 - protein, 15 aa, Homo sapiens
  CDR3 for alpha chain variable domain of TCR clone 183758 (TRAV12-1, TRAJ44)
CVVFVNTGTASQLTF

SEQ ID NO: 367516 - protein, 17 aa, Homo sapiens
  CDR3 for beta chain variable domain of TCR clone 183758 (TRBV7-8, TRBJ2-6)
CASSAGTGGAGANVLTF

SEQ ID NO: 367517 - protein, 14 aa, Homo sapiens
  CDR3 for alpha chain variable domain of TCR clone 183759 (TRAV1-2, TRAJ16)
CAVNRFSDGKKLLF

SEQ ID NO: 367518 - protein, 13 aa, Homo sapiens
  CDR3 for beta chain variable domain of TCR clone 183759 (TRBV29-1, TRBJ1-1)
CSVGDSRNTEAFF

SEQ ID NO: 367519 - protein, 12 aa, Homo sapiens
  CDR3 for alpha chain variable domain of TCR clone 183760 (TRAV8-3, TRAJ20)
CAVGANDYKLSF

SEQ ID NO: 367520 - protein, 14 aa, Homo sapiens
  CDR3 for beta chain variable domain of TCR clone 183760 (TRBV12-4, TRBJ1-1)
CASSLGTGGTEAFF

SEQ ID NO: 367521 - protein, 13 aa, Homo sapiens
  CDR3 for alpha chain variable domain of TCR clone 183761 (TRAV36/DV7, TRAJ49)
CAVEANTGNQFYF

SEQ ID NO: 367522 - protein, 13 aa, Homo sapiens
  CDR3 for beta chain variable domain of TCR clone 183761 (TRBV10-3, TRBJ2-7)
CASKLAVTYEQYF

SEQ ID NO: 367523 - protein, 12 aa, Homo sapiens
  CDR3 for alpha chain variable domain of TCR clone 183762 (TRAV12-2, TRAJ52)
IGGGTSYGKLTF

SEQ ID NO: 367524 - protein, 15 aa, Homo sapiens
  CDR3 for beta chain variable domain of TCR clone 183762 (TRBV4-1, TRBJ1-6)
CASSAGQGYNSPLHF

SEQ ID NO: 367525 - protein, 12 aa, Homo sapiens
  CDR3 for alpha chain variable domain of TCR clone 183763 (TRAV13-2, TRAJ39)
CAESRPGNMLTF

SEQ ID NO: 367526 - protein, 12 aa, Homo sapiens
  CDR3 for beta chain variable domain of TCR clone 183763 (TRBV20-1, TRBJ2-7)
CSAITLTKEQYF

SEQ ID NO: 367527 - protein, 18 aa, Homo sapiens
  CDR3 for alpha chain variable domain of TCR clone 183764 (TRAV26-1, TRAJ52)
CIIRVEGAGGTSYGKLTF

SEQ ID NO: 367528 - protein, 13 aa, Homo sapiens
  CDR3 for beta chain variable domain of TCR clone 183764 (TRBV7-3, TRBJ1-2)
CASSLTRGYGYTF

SEQ ID NO: 367529 - protein, 14 aa, Homo sapiens
  CDR3 for alpha chain variable domain of TCR clone 183765 (TRAV35, TRAJ22)
CSGLRPGSARQLTF

SEQ ID NO: 367530 - protein, 13 aa, Homo sapiens
  CDR3 for beta chain variable domain of TCR clone 183765 (TRBV20-1, TRBJ2-7)
CSATHTSGYEQYF

SEQ ID NO: 367531 - protein, 14 aa, Homo sapiens
  CDR3 for alpha chain variable domain of TCR clone 183766 (TRAV21, TRAJ35)
CAVMPIGFGNVLHC

SEQ ID NO: 367532 - protein, 14 aa, Homo sapiens
  CDR3 for beta chain variable domain of TCR clone 183766 (TRBV19, TRBJ2-1)
CASPTFVLSGEQSF

SEQ ID NO: 367533 - protein, 13 aa, Homo sapiens
  CDR3 for alpha chain variable domain of TCR clone 183767 (TRAV3, TRAJ36)
CAVRDTGANNLSF

SEQ ID NO: 367534 - protein, 15 aa, Homo sapiens
  CDR3 for beta chain variable domain of TCR clone 183767 (TRBV24-1, TRBJ2-1)
CATSGSGGFYNEQFF

SEQ ID NO: 367535 - protein, 15 aa, Homo sapiens
  CDR3 for alpha chain variable domain of TCR clone 183768 (TRAV3, TRAJ17)
CAVRDTGAAGNKLTF

SEQ ID NO: 367536 - protein, 15 aa, Homo sapiens
  CDR3 for beta chain variable domain of TCR clone 183768 (TRBV7-8, TRBJ2-7)
CASSLRHFEAYEQYF

SEQ ID NO: 367537 - protein, 16 aa, Homo sapiens
  CDR3 for alpha chain variable domain of TCR clone 183769 (TRAV30, TRAJ24)
CGAEIVDADSWGKFQF

SEQ ID NO: 367538 - protein, 15 aa, Homo sapiens
  CDR3 for beta chain variable domain of TCR clone 183769 (TRBV7-2, TRBJ2-1)
CASSFSGGIYNEQFF

SEQ ID NO: 367539 - protein, 18 aa, Homo sapiens
  CDR3 for alpha chain variable domain of TCR clone 183770 (TRAV13-1, TRAJ52)
CAAKNRNAGGTSYGKLKF

SEQ ID NO: 367540 - protein, 18 aa, Homo sapiens
  CDR3 for beta chain variable domain of TCR clone 183770 (TRBV12-4, TRBJ2-4)
CASSRTGAVDVAKNIQYF

SEQ ID NO: 367541 - protein, 15 aa, Homo sapiens
  CDR3 for alpha chain variable domain of TCR clone 183771 (TRAV36/DV7, TRAJ54)
CAVEKPVQGAQKLVF

SEQ ID NO: 367542 - protein, 17 aa, Homo sapiens
  CDR3 for beta chain variable domain of TCR clone 183771 (TRBV4-2, TRBJ1-1)
CASTQFGGGSGNTEAFF

SEQ ID NO: 367543 - protein, 13 aa, Homo sapiens
  CDR3 for alpha chain variable domain of TCR clone 183772 (TRAV17, TRAJ5)
CALRGTGRRALTF

SEQ ID NO: 367544 - protein, 15 aa, Homo sapiens
  CDR3 for beta chain variable domain of TCR clone 183772 (TRBV19, TRBJ1-2)
CASSVGQVLNYGYTF

SEQ ID NO: 367545 - protein, 11 aa, Homo sapiens
  CDR3 for alpha chain variable domain of TCR clone 183773 (TRAV2, TRAJ13)
FASGGYQKVTF

SEQ ID NO: 367546 - protein, 11 aa, Homo sapiens
  CDR3 for beta chain variable domain of TCR clone 183773 (TRBV12-4, TRBJ2-3)
CASTATDTQYF

SEQ ID NO: 367547 - protein, 14 aa, Homo sapiens
  CDR3 for alpha chain variable domain of TCR clone 183774 (TRAV13-1, TRAJ35)
CAASKGGFGNVLHC

SEQ ID NO: 367548 - protein, 14 aa, Homo sapiens
  CDR3 for beta chain variable domain of TCR clone 183774 (TRBV7-8, TRBJ2-3)
CTSSFPDGQDTQYF

SEQ ID NO: 367549 - protein, 13 aa, Homo sapiens
  CDR3 for alpha chain variable domain of TCR clone 183775 (TRAV26-1, TRAJ36)
CIVVGTGANNLFF

SEQ ID NO: 367550 - protein, 13 aa, Homo sapiens
  CDR3 for beta chain variable domain of TCR clone 183775 (TRBV28, TRBJ2-7)
CASTPGLAGEQYF

SEQ ID NO: 367551 - protein, 16 aa, Homo sapiens
  CDR3 for alpha chain variable domain of TCR clone 183776 (TRAV3, TRAJ37)
CAVRGKGSGNTGKLIF

SEQ ID NO: 367552 - protein, 16 aa, Homo sapiens
  CDR3 for beta chain variable domain of TCR clone 183776 (TRBV11-2, TRBJ1-2)
CASSLDTEGADYGYTF

SEQ ID NO: 367553 - protein, 11 aa, Homo sapiens
  CDR3 for alpha chain variable domain of TCR clone 183777 (TRAV1-2, TRAJ20)
CAVSNDYKLSF

SEQ ID NO: 367554 - protein, 17 aa, Homo sapiens
  CDR3 for beta chain variable domain of TCR clone 183777 (TRBV11-3, TRBJ1-5)
CASSPLTGLRGNQPQHF

SEQ ID NO: 367555 - protein, 13 aa, Homo sapiens
  CDR3 for alpha chain variable domain of TCR clone 183778 (TRAV4, TRAJ34)
CLVPPYNTDKLIF

SEQ ID NO: 367556 - protein, 14 aa, Homo sapiens
  CDR3 for beta chain variable domain of TCR clone 183778 (TRBV12-4, TRBJ1-1)
CASTWTGHDTEAFF

SEQ ID NO: 367557 - protein, 11 aa, Homo sapiens
  CDR3 for alpha chain variable domain of TCR clone 183779 (TRAV21, TRAJ34)
CAHYNTDNLIF

SEQ ID NO: 367558 - protein, 14 aa, Homo sapiens
  CDR3 for beta chain variable domain of TCR clone 183779 (TRBV6-1, TRBJ1-3)
CASVQGGGGNTIYF

SEQ ID NO: 367559 - protein, 13 aa, Homo sapiens
  CDR3 for alpha chain variable domain of TCR clone 183780 (TRAV35, TRAJ36)
CAGPRIGANNPFF

SEQ ID NO: 367560 - protein, 15 aa, Homo sapiens
  CDR3 for beta chain variable domain of TCR clone 183780 (TRBV20-1, TRBJ2-7)
CSARDRVSGMDEQYF

SEQ ID NO: 367561 - protein, 14 aa, Homo sapiens
  CDR3 for alpha chain variable domain of TCR clone 183781 (TRAV1-1, TRAJ27)
CAVIYNTNAGKSTF

SEQ ID NO: 367562 - protein, 16 aa, Homo sapiens
  CDR3 for beta chain variable domain of TCR clone 183781 (TRBV11-2, TRBJ2-5)
CASSGQGYSPQETQYC

SEQ ID NO: 367563 - protein, 14 aa, Homo sapiens
  CDR3 for alpha chain variable domain of TCR clone 183782 (TRAV17, TRAJ45)
CATASGGGADGLTF

SEQ ID NO: 367564 - protein, 17 aa, Homo sapiens
  CDR3 for beta chain variable domain of TCR clone 183782 (TRBV11-3, TRBJ1-5)
CASSPLTGLRGNQPQHF

SEQ ID NO: 367565 - protein, 15 aa, Homo sapiens
  CDR3 for alpha chain variable domain of TCR clone 183783 (TRAV12-1, TRAJ42)
CVVTRDGGSQGNLIF

SEQ ID NO: 367566 - protein, 14 aa, Homo sapiens
  CDR3 for beta chain variable domain of TCR clone 183783 (TRBV11-2, TRBJ2-3)
CASSLDGGANTQYF

SEQ ID NO: 367567 - protein, 14 aa, Homo sapiens
  CDR3 for alpha chain variable domain of TCR clone 183784 (TRAV12-1, TRAJ8)
CVVNSNTGFQKLVF

SEQ ID NO: 367568 - protein, 17 aa, Homo sapiens
  CDR3 for beta chain variable domain of TCR clone 183784 (TRBV7-8, TRBJ2-6)
CASSSGTGGAGANVLTF

SEQ ID NO: 367569 - protein, 13 aa, Homo sapiens
  CDR3 for alpha chain variable domain of TCR clone 183785 (TRAV27, TRAJ6)
CAGGTRGSYIPTF

SEQ ID NO: 367570 - protein, 16 aa, Homo sapiens
  CDR3 for beta chain variable domain of TCR clone 183785 (TRBV6-1, TRBJ2-5)
CASSETLDRGAETQYF

SEQ ID NO: 367571 - protein, 14 aa, Homo sapiens
  CDR3 for alpha chain variable domain of TCR clone 183786 (TRAV1-2, TRAJ8)
CAVREDTGFQKLVF

SEQ ID NO: 367572 - protein, 13 aa, Homo sapiens
  CDR3 for beta chain variable domain of TCR clone 183786 (TRBV19, TRBJ2-1)
CASKVGAGGEQFF

SEQ ID NO: 367573 - protein, 13 aa, Homo sapiens
  CDR3 for alpha chain variable domain of TCR clone 183787 (TRAV20, TRAJ21)
CAVEGYNFNKFYF

SEQ ID NO: 367574 - protein, 15 aa, Homo sapiens
  CDR3 for beta chain variable domain of TCR clone 183787 (TRBV27, TRBJ1-5)
CASRRGDYSNQPQHF

SEQ ID NO: 367575 - protein, 15 aa, Homo sapiens
  CDR3 for alpha chain variable domain of TCR clone 183788 (TRAV3, TRAJ13)
CAVRVYSGGYQKVTF

SEQ ID NO: 367576 - protein, 11 aa, Homo sapiens
  CDR3 for beta chain variable domain of TCR clone 183788 (TRBV12-4, TRBJ2-3)
CASTATDTQYF

SEQ ID NO: 367577 - protein, 21 aa, Homo sapiens
  CDR3 for alpha chain variable domain of TCR clone 183789 (TRAV2, TRAJ15)
ILQVREADAAVYSRGGTALIF

SEQ ID NO: 367578 - protein, 12 aa, Homo sapiens
  CDR3 for beta chain variable domain of TCR clone 183789 (TRBV7-8, TRBJ2-7)
CASSLGDREQYF

SEQ ID NO: 367579 - protein, 13 aa, Homo sapiens
  CDR3 for alpha chain variable domain of TCR clone 183790 (TRAV27, TRAJ45)
CMSSGGGADGLTF

SEQ ID NO: 367580 - protein, 17 aa, Homo sapiens
  CDR3 for beta chain variable domain of TCR clone 183790 (TRBV11-2, TRBJ2-1)
CASSLYPPGVEYDEQFF

SEQ ID NO: 367581 - protein, 13 aa, Homo sapiens
  CDR3 for alpha chain variable domain of TCR clone 183791 (TRAV13-1, TRAJ32)
QVTDDGATNKLIF

SEQ ID NO: 367582 - protein, 15 aa, Homo sapiens
  CDR3 for beta chain variable domain of TCR clone 183791 (TRBV18, TRBJ2-1)
CASSPPSASYNDQFF

SEQ ID NO: 367583 - protein, 17 aa, Homo sapiens
  CDR3 for alpha chain variable domain of TCR clone 183792 (TRAV26-2, TRAJ42)
CILRDVGYGGSQGNLIF

SEQ ID NO: 367584 - protein, 14 aa, Homo sapiens
  CDR3 for beta chain variable domain of TCR clone 183792 (TRBV7-3, TRBJ2-1)
CASSLAGGTNEQFF

SEQ ID NO: 367585 - protein, 17 aa, Homo sapiens
  CDR3 for alpha chain variable domain of TCR clone 183793 (TRAV4, TRAJ13)
CLVGVRGSSGGYQKVTF

SEQ ID NO: 367586 - protein, 15 aa, Homo sapiens
  CDR3 for beta chain variable domain of TCR clone 183793 (TRBV29-1, TRBJ2-1)
CSVEGGPASYNEQFF

SEQ ID NO: 367587 - protein, 13 aa, Homo sapiens
  CDR3 for alpha chain variable domain of TCR clone 183794 (TRAV17, TRAJ26)
CATVDNYGQNFVF

SEQ ID NO: 367588 - protein, 16 aa, Homo sapiens
  CDR3 for beta chain variable domain of TCR clone 183794 (TRBV2, TRBJ2-1)
CASSVGGSLSYNEQVF

SEQ ID NO: 367589 - protein, 14 aa, Homo sapiens
  CDR3 for alpha chain variable domain of TCR clone 183795 (TRAV8-3, TRAJ4)
CAVGASGGYNKLLF

SEQ ID NO: 367590 - protein, 16 aa, Homo sapiens
  CDR3 for beta chain variable domain of TCR clone 183795 (TRBV4-3, TRBJ2-2)
CASSRLQGSGTGELFF

SEQ ID NO: 367591 - protein, 17 aa, Homo sapiens
  CDR3 for alpha chain variable domain of TCR clone 183796 (TRAV20, TRAJ42)
CAVQAGGYGGSQGNLIF

SEQ ID NO: 367592 - protein, 15 aa, Homo sapiens
  CDR3 for beta chain variable domain of TCR clone 183796 (TRBV20-1, TRBJ2-7)
CSARDRVSGMDEQYF

SEQ ID NO: 367593 - protein, 13 aa, Homo sapiens
  CDR3 for alpha chain variable domain of TCR clone 183797 (TRAV17, TRAJ29)
CATDALRKHTSCL

SEQ ID NO: 367594 - protein, 13 aa, Homo sapiens
  CDR3 for beta chain variable domain of TCR clone 183797 (TRBV5-7, TRBJ2-6)
CASTSSGANVLTF

SEQ ID NO: 367595 - protein, 15 aa, Homo sapiens
  CDR3 for alpha chain variable domain of TCR clone 183798 (TRAV3, TRAJ22)
CAVRDRSGFARQQTF

SEQ ID NO: 367596 - protein, 15 aa, Homo sapiens
  CDR3 for beta chain variable domain of TCR clone 183798 (TRBV7-3, TRBJ2-2)
CASSETGQGTGELFF

SEQ ID NO: 367597 - protein, 13 aa, Homo sapiens
  CDR3 for alpha chain variable domain of TCR clone 183799 (TRAV8-3, TRAJ44)
CAVVPGTASKLTF

SEQ ID NO: 367598 - protein, 16 aa, Homo sapiens
  CDR3 for beta chain variable domain of TCR clone 183799 (TRBV20-1, TRBJ1-2)
CSASMGQGVANYGYTF

SEQ ID NO: 367599 - protein, 15 aa, Homo sapiens
  CDR3 for alpha chain variable domain of TCR clone 183800 (TRAV35, TRAJ53)
CAGLTQAGSNYKLTF

SEQ ID NO: 367600 - protein, 11 aa, Homo sapiens
  CDR3 for beta chain variable domain of TCR clone 183800 (TRBV12-4, TRBJ2-3)
CASSSVRGRYF

SEQ ID NO: 367601 - protein, 17 aa, Homo sapiens
  CDR3 for alpha chain variable domain of TCR clone 183801 (TRAV3, TRAJ6)
CAVGDGPGAGGCYIPTF

SEQ ID NO: 367602 - protein, 14 aa, Homo sapiens
  CDR3 for beta chain variable domain of TCR clone 183801 (TRBV7-2, TRBJ2-7)
CASSPKTSFYEQYF

SEQ ID NO: 367603 - protein, 14 aa, Homo sapiens
  CDR3 for alpha chain variable domain of TCR clone 183802 (TRAV9-2, TRAJ39)
CALYIYNAGNMLTF

SEQ ID NO: 367604 - protein, 14 aa, Homo sapiens
  CDR3 for beta chain variable domain of TCR clone 183802 (TRBV12-4, TRBJ2-3)
CASSGQGSTDTQYF

SEQ ID NO: 367605 - protein, 17 aa, Homo sapiens
  CDR3 for alpha chain variable domain of TCR clone 183803 (TRAV1-1, TRAJ28)
CAVDPAYSGAGCYQLTF

SEQ ID NO: 367606 - protein, 14 aa, Homo sapiens
  CDR3 for beta chain variable domain of TCR clone 183803 (TRBV19, TRBJ2-1)
CASPTFVLSGEQFF

SEQ ID NO: 367607 - protein, 14 aa, Homo sapiens
  CDR3 for alpha chain variable domain of TCR clone 183804 (TRAV1-2, TRAJ6)
CAVSLSGGSYIPTF

SEQ ID NO: 367608 - protein, 15 aa, Homo sapiens
  CDR3 for beta chain variable domain of TCR clone 183804 (TRBV28, TRBJ2-7)
CASSPCGRGFYEQYF

SEQ ID NO: 367609 - protein, 17 aa, Homo sapiens
  CDR3 for alpha chain variable domain of TCR clone 183805 (TRAV3, TRAJ6)
CAVRDGPRAGGSYIPTF

SEQ ID NO: 367610 - protein, 13 aa, Homo sapiens
  CDR3 for beta chain variable domain of TCR clone 183805 (TRBV11-3, TRBJ2-3)
CASSHDTKDTQYF

SEQ ID NO: 367611 - protein, 15 aa, Homo sapiens
  CDR3 for alpha chain variable domain of TCR clone 183806 (TRAV17, TRAJ23)
CATDAEDNQGGKLMF

SEQ ID NO: 367612 - protein, 12 aa, Homo sapiens
  CDR3 for beta chain variable domain of TCR clone 183806 (TRBV2, TRBJ2-1)
CAKREGYNEQFF

SEQ ID NO: 367613 - protein, 16 aa, Homo sapiens
  CDR3 for alpha chain variable domain of TCR clone 183807 (TRAV12-1, TRAJ12)
CVMNTLLMDSSYKLIF

SEQ ID NO: 367614 - protein, 13 aa, Homo sapiens
  CDR3 for beta chain variable domain of TCR clone 183807 (TRBV11-2, TRBJ2-1)
CASSSEAYNEQFF

SEQ ID NO: 367615 - protein, 14 aa, Homo sapiens
  CDR3 for alpha chain variable domain of TCR clone 183808 (TRAV12-2, TRAJ17)
CAVLFKAAGNKLTF

SEQ ID NO: 367616 - protein, 14 aa, Homo sapiens
  CDR3 for beta chain variable domain of TCR clone 183808 (TRBV19, TRBJ2-2)
CATTGHANTGELFF

SEQ ID NO: 367617 - protein, 14 aa, Homo sapiens
  CDR3 for alpha chain variable domain of TCR clone 183809 (TRAV13-2, TRAJ22)
GADGTLGSARQLTF

SEQ ID NO: 367618 - protein, 15 aa, Homo sapiens
  CDR3 for beta chain variable domain of TCR clone 183809 (TRBV6-3, TRBJ2-7)
CASSSPGTVFYEQYF

SEQ ID NO: 367619 - protein, 14 aa, Homo sapiens
  CDR3 for alpha chain variable domain of TCR clone 183810 (TRAV8-4, TRAJ8)
CAVSLNTGFQKLVF

SEQ ID NO: 367620 - protein, 13 aa, Homo sapiens
  CDR3 for beta chain variable domain of TCR clone 183810 (TRBV7-9, TRBJ2-3)
CASSAGSTDTQYF

SEQ ID NO: 367621 - protein, 15 aa, Homo sapiens
  CDR3 for alpha chain variable domain of TCR clone 183811 (TRAV23/DV6, TRAJ18)
CAARYTGSTLGRLYF

SEQ ID NO: 367622 - protein, 13 aa, Homo sapiens
  CDR3 for beta chain variable domain of TCR clone 183811 (TRBV7-2, TRBJ2-7)
CASSSPSGSEQYF

SEQ ID NO: 367623 - protein, 16 aa, Homo sapiens
  CDR3 for alpha chain variable domain of TCR clone 183812 (TRAV26-1, TRAJ23)
CIVRVHPYNQGGKLIF

SEQ ID NO: 367624 - protein, 15 aa, Homo sapiens
  CDR3 for beta chain variable domain of TCR clone 183812 (TRBV7-3, TRBJ2-1)
CASSPTGGGEVEQFF

SEQ ID NO: 367625 - protein, 10 aa, Homo sapiens
  CDR3 for alpha chain variable domain of TCR clone 183813 (TRAV8-4, TRAJ30)
VFYRDDKIIF

SEQ ID NO: 367626 - protein, 16 aa, Homo sapiens
  CDR3 for beta chain variable domain of TCR clone 183813 (TRBV20-1, TRBJ1-5)
CSAELPGQQTNQPQYF

SEQ ID NO: 367627 - protein, 14 aa, Homo sapiens
  CDR3 for alpha chain variable domain of TCR clone 183814 (TRAV12-3, TRAJ10)
SHLPLTGGGNKLNF

SEQ ID NO: 367628 - protein, 13 aa, Homo sapiens
  CDR3 for beta chain variable domain of TCR clone 183814 (TRBV7-6, TRBJ1-2)
CASSLVADYGYTF

SEQ ID NO: 367629 - protein, 15 aa, Homo sapiens
  CDR3 for alpha chain variable domain of TCR clone 183815 (TRAV17, TRAJ28)
CATDPSGAGSYQLTF

SEQ ID NO: 367630 - protein, 13 aa, Homo sapiens
  CDR3 for beta chain variable domain of TCR clone 183815 (TRBV4-1, TRBJ2-1)
CASSQEVQYEQFF

SEQ ID NO: 367631 - protein, 13 aa, Homo sapiens
  CDR3 for alpha chain variable domain of TCR clone 183816 (TRAV2, TRAJ40)
CALVTSGTYKYIF

SEQ ID NO: 367632 - protein, 14 aa, Homo sapiens
  CDR3 for beta chain variable domain of TCR clone 183816 (TRBV19, TRBJ2-1)
CASPTFVFSGEQFF

SEQ ID NO: 367633 - protein, 15 aa, Homo sapiens
  CDR3 for alpha chain variable domain of TCR clone 183817 (TRAV26-1, TRAJ29)
CIVRVEGSGDTPLVF

SEQ ID NO: 367634 - protein, 16 aa, Homo sapiens
  CDR3 for beta chain variable domain of TCR clone 183817 (TRBV4-2, TRBJ1-1)
CASSQAGFGMNTEAFF

SEQ ID NO: 367635 - protein, 20 aa, Homo sapiens
  CDR3 for alpha chain variable domain of TCR clone 183818 (TRAV25, TRAJ21)
TATQTTDVGTYPLSFNKFYF

SEQ ID NO: 367636 - protein, 14 aa, Homo sapiens
  CDR3 for beta chain variable domain of TCR clone 183818 (TRBV6-1, TRBJ2-1)
CASAKVGFYNEQFF

SEQ ID NO: 367637 - protein, 12 aa, Homo sapiens
  CDR3 for alpha chain variable domain of TCR clone 183819 (TRAV29/DV5, TRAJ49)
CAATDTGNQFYF

SEQ ID NO: 367638 - protein, 16 aa, Homo sapiens
  CDR3 for beta chain variable domain of TCR clone 183819 (TRBV12-4, TRBJ2-7)
CASSLGGYEQYWAGHQ

SEQ ID NO: 367639 - protein, 15 aa, Homo sapiens
  CDR3 for alpha chain variable domain of TCR clone 183820 (TRAV4, TRAJ29)
CLVGDMDSGNTPLVF

SEQ ID NO: 367640 - protein, 14 aa, Homo sapiens
  CDR3 for beta chain variable domain of TCR clone 183820 (TRBV7-3, TRBJ1-1)
CASSLKGGNTEAFF

SEQ ID NO: 367641 - protein, 14 aa, Homo sapiens
  CDR3 for alpha chain variable domain of TCR clone 183821 (TRAV29/DV5, TRAJ20)
CAASAPIEDYKLSF

SEQ ID NO: 367642 - protein, 12 aa, Homo sapiens
  CDR3 for beta chain variable domain of TCR clone 183821 (TRBV7-9, TRBJ2-7)
CASSIKREEQYF

SEQ ID NO: 367643 - protein, 12 aa, Homo sapiens
  CDR3 for alpha chain variable domain of TCR clone 183822 (TRAV1-1, TRAJ8)
CSGGTGFQKLVF

SEQ ID NO: 367644 - protein, 13 aa, Homo sapiens
  CDR3 for beta chain variable domain of TCR clone 183822 (TRBV7-3, TRBJ1-1)
CASSQDWGAEAFF

SEQ ID NO: 367645 - protein, 12 aa, Homo sapiens
  CDR3 for alpha chain variable domain of TCR clone 183823 (TRAV1-2, TRAJ17)
CAVRAAGNKLTF

SEQ ID NO: 367646 - protein, 16 aa, Homo sapiens
  CDR3 for beta chain variable domain of TCR clone 183823 (TRBV20-1, TRBJ2-1)
CRAPGLAGSYSDEQFF

SEQ ID NO: 367647 - protein, 18 aa, Homo sapiens
  CDR3 for alpha chain variable domain of TCR clone 183824 (TRAV26-2, TRAJ54)
CILRDMEVGIQGAQKLVF

SEQ ID NO: 367648 - protein, 16 aa, Homo sapiens
  CDR3 for beta chain variable domain of TCR clone 183824 (TRBV6-1, TRBJ2-5)
CASSETLDRGAETQYF

SEQ ID NO: 367649 - protein, 14 aa, Homo sapiens
  CDR3 for alpha chain variable domain of TCR clone 183825 (TRAV12-2, TRAJ17)
CDVLFKAAGNKLTF

SEQ ID NO: 367650 - protein, 14 aa, Homo sapiens
  CDR3 for beta chain variable domain of TCR clone 183825 (TRBV12-5, TRBJ2-5)
CASGSRTHQETQYF

SEQ ID NO: 367651 - protein, 14 aa, Homo sapiens
  CDR3 for alpha chain variable domain of TCR clone 183826 (TRAV35, TRAJ22)
CAGLRPGSARQLTF

SEQ ID NO: 367652 - protein, 23 aa, Homo sapiens
  CDR3 for beta chain variable domain of TCR clone 183826 (TRBV20-1, TRBJ1-1)
CPPERHQFLNCSGKGGGNTEAFF

SEQ ID NO: 367653 - protein, 13 aa, Homo sapiens
  CDR3 for alpha chain variable domain of TCR clone 183827 (TRAV2, TRAJ15)
CAVASQAGTALIF

SEQ ID NO: 367654 - protein, 13 aa, Homo sapiens
  CDR3 for beta chain variable domain of TCR clone 183827 (TRBV19, TRBJ2-2)
CASSGRGTGELFF

SEQ ID NO: 367655 - protein, 14 aa, Homo sapiens
  CDR3 for alpha chain variable domain of TCR clone 183828 (TRAV2, TRAJ9)
CAVEDRSGGFKNIF

SEQ ID NO: 367656 - protein, 14 aa, Homo sapiens
  CDR3 for beta chain variable domain of TCR clone 183828 (TRBV18, TRBJ2-7)
CASSPRGGAYEQYF

SEQ ID NO: 367657 - protein, 20 aa, Homo sapiens
  CDR3 for alpha chain variable domain of TCR clone 183829 (TRAV12-3, TRAJ41)
SLLIRDSQPSGSATPEALNF

SEQ ID NO: 367658 - protein, 15 aa, Homo sapiens
  CDR3 for beta chain variable domain of TCR clone 183829 (TRBV5-1, TRBJ2-7)
CASSLDLTSSYEQYF

SEQ ID NO: 367659 - protein, 14 aa, Homo sapiens
  CDR3 for alpha chain variable domain of TCR clone 183830 (TRAV12-3, TRAJ10)
SHLPLTGGGNKITF

SEQ ID NO: 367660 - protein, 15 aa, Homo sapiens
  CDR3 for beta chain variable domain of TCR clone 183830 (TRBV12-4, TRBJ1-1)
CASSLGGLSDTEAFF

SEQ ID NO: 367661 - protein, 12 aa, Homo sapiens
  CDR3 for alpha chain variable domain of TCR clone 183831 (TRAV3, TRAJ17)
CAVKAAGNKLTF

SEQ ID NO: 367662 - protein, 15 aa, Homo sapiens
  CDR3 for beta chain variable domain of TCR clone 183831 (TRBV20-1, TRBJ2-7)
CSARDRVSGMDEQYF

SEQ ID NO: 367663 - protein, 15 aa, Homo sapiens
  CDR3 for alpha chain variable domain of TCR clone 183832 (TRAV23/DV6, TRAJ18)
CAARYRGSNLGRLSF

SEQ ID NO: 367664 - protein, 11 aa, Homo sapiens
  CDR3 for beta chain variable domain of TCR clone 183832 (TRBV29-1, TRBJ2-5)
CSEDRTGTQYF

SEQ ID NO: 367665 - protein, 13 aa, Homo sapiens
  CDR3 for alpha chain variable domain of TCR clone 183833 (TRAV1-2, TRAJ9)
CSALNTGGFKTIF

SEQ ID NO: 367666 - protein, 15 aa, Homo sapiens
  CDR3 for beta chain variable domain of TCR clone 183833 (TRBV24-1, TRBJ2-1)
CATSGSGGFYNEQFF

SEQ ID NO: 367667 - protein, 17 aa, Homo sapiens
  CDR3 for alpha chain variable domain of TCR clone 183834 (TRAV16, TRAJ37)
CAFWPKNGSSSTGKLIF

SEQ ID NO: 367668 - protein, 13 aa, Homo sapiens
  CDR3 for beta chain variable domain of TCR clone 183834 (TRBV7-3, TRBJ1-1)
CASSQDWGAEAFF

SEQ ID NO: 367669 - protein, 12 aa, Homo sapiens
  CDR3 for alpha chain variable domain of TCR clone 183835 (TRAV13-1, TRAJ15)
CAASQAGTGLIF

SEQ ID NO: 367670 - protein, 14 aa, Homo sapiens
  CDR3 for beta chain variable domain of TCR clone 183835 (TRBV19, TRBJ2-2)
CASSTLHRSGELFF

SEQ ID NO: 367671 - protein, 14 aa, Homo sapiens
  CDR3 for alpha chain variable domain of TCR clone 183836 (TRAV12-1, TRAJ45)
CVVNVGGGADGLTF

SEQ ID NO: 367672 - protein, 12 aa, Homo sapiens
  CDR3 for beta chain variable domain of TCR clone 183836 (TRBV7-8, TRBJ2-7)
CASSLGDREQYF

SEQ ID NO: 367673 - protein, 14 aa, Homo sapiens
  CDR3 for alpha chain variable domain of TCR clone 183837 (TRAV8-4, TRAJ48)
CAVSETFGNEKLTF

SEQ ID NO: 367674 - protein, 13 aa, Homo sapiens
  CDR3 for beta chain variable domain of TCR clone 183837 (TRBV2, TRBJ2-5)
CASSDGIQETQYF

SEQ ID NO: 367675 - protein, 13 aa, Homo sapiens
  CDR3 for alpha chain variable domain of TCR clone 183838 (TRAV13-2, TRAJ13)
CAERPGGYQRVTF

SEQ ID NO: 367676 - protein, 15 aa, Homo sapiens
  CDR3 for beta chain variable domain of TCR clone 183838 (TRBV11-3, TRBJ2-7)
CASSPGPASSYEQYF

SEQ ID NO: 367677 - protein, 10 aa, Homo sapiens
  CDR3 for alpha chain variable domain of TCR clone 183839 (TRAV23/DV6, TRAJ57)
CAASSTLSQG

SEQ ID NO: 367678 - protein, 15 aa, Homo sapiens
  CDR3 for beta chain variable domain of TCR clone 183839 (TRBV27, TRBJ2-1)
CASSNGGGSSNEHFF

SEQ ID NO: 367679 - protein, 14 aa, Homo sapiens
  CDR3 for alpha chain variable domain of TCR clone 183840 (TRAV14/DV4, TRAJ54)
CAMREAPGAQKLVF

SEQ ID NO: 367680 - protein, 14 aa, Homo sapiens
  CDR3 for beta chain variable domain of TCR clone 183840 (TRBV7-9, TRBJ1-2)
CASKRGTLTYGYTF

SEQ ID NO: 367681 - protein, 17 aa, Homo sapiens
  CDR3 for alpha chain variable domain of TCR clone 183841 (TRAV3, TRAJ28)
CAVREAYSGAGSYQLTF

SEQ ID NO: 367682 - protein, 13 aa, Homo sapiens
  CDR3 for beta chain variable domain of TCR clone 183841 (TRBV5-5, TRBJ1-2)
CASSFWRGEDYTF

SEQ ID NO: 367683 - protein, 14 aa, Homo sapiens
  CDR3 for alpha chain variable domain of TCR clone 183842 (TRAV12-3, TRAJ58)
CAMRTETSGSRLTF

SEQ ID NO: 367684 - protein, 15 aa, Homo sapiens
  CDR3 for beta chain variable domain of TCR clone 183842 (TRBV4-1, TRBJ1-4)
CASSDTGGTNEKLFF

SEQ ID NO: 367685 - protein, 15 aa, Homo sapiens
  CDR3 for alpha chain variable domain of TCR clone 183843 (TRAV12-1, TRAJ44)
CVADLPTGTACKLTF

SEQ ID NO: 367686 - protein, 13 aa, Homo sapiens
  CDR3 for beta chain variable domain of TCR clone 183843 (TRBV6-5, TRBJ2-5)
CASSPQGGETQYF

SEQ ID NO: 367687 - protein, 12 aa, Homo sapiens
  CDR3 for alpha chain variable domain of TCR clone 183844 (TRAV4, TRAJ6)
CLAPGGSYIPKF

SEQ ID NO: 367688 - protein, 18 aa, Homo sapiens
  CDR3 for beta chain variable domain of TCR clone 183844 (TRBV20-1, TRBJ2-3)
CSASGLAGGPGTTDTQYF

SEQ ID NO: 367689 - protein, 15 aa, Homo sapiens
  CDR3 for alpha chain variable domain of TCR clone 183845 (TRAV13-2, TRAJ10)
CAENRDTGGGNKLTF

SEQ ID NO: 367690 - protein, 20 aa, Homo sapiens
  CDR3 for beta chain variable domain of TCR clone 183845 (TRBV28, TRBJ2-1)
CAITPIGRSPGLAGGNEQFF

SEQ ID NO: 367691 - protein, 15 aa, Homo sapiens
  CDR3 for alpha chain variable domain of TCR clone 183846 (TRAV13-1, TRAJ57)
QVPPLSQGRSEKLVF

SEQ ID NO: 367692 - protein, 17 aa, Homo sapiens
  CDR3 for beta chain variable domain of TCR clone 183846 (TRBV7-3, TRBJ2-3)
CASSLMKRMRGADTQYF

SEQ ID NO: 367693 - protein, 12 aa, Homo sapiens
  CDR3 for alpha chain variable domain of TCR clone 183847 (TRAV13-1, TRAJ15)
CAANQAGTALIF

SEQ ID NO: 367694 - protein, 14 aa, Homo sapiens
  CDR3 for beta chain variable domain of TCR clone 183847 (TRBV7-2, TRBJ2-5)
CASNPLGQSETQYF

SEQ ID NO: 367695 - protein, 14 aa, Homo sapiens
  CDR3 for alpha chain variable domain of TCR clone 183848 (TRAV8-3, TRAJ12)
CAVGARDSSYKLIF

SEQ ID NO: 367696 - protein, 13 aa, Homo sapiens
  CDR3 for beta chain variable domain of TCR clone 183848 (TRBV7-9, TRBJ1-2)
CASSLKQNYGYTF

SEQ ID NO: 367697 - protein, 13 aa, Homo sapiens
  CDR3 for alpha chain variable domain of TCR clone 183849 (TRAV12-1, TRAJ31)
CVVNMNNNARLMF

SEQ ID NO: 367698 - protein, 13 aa, Homo sapiens
  CDR3 for beta chain variable domain of TCR clone 183849 (TRBV7-9, TRBJ1-2)
CASSLTQNYGYTF

SEQ ID NO: 367699 - protein, 18 aa, Homo sapiens
  CDR3 for alpha chain variable domain of TCR clone 183850 (TRAV9-2, TRAJ13)
CQTQRCTEPSGGYQEVTF

SEQ ID NO: 367700 - protein, 13 aa, Homo sapiens
  CDR3 for beta chain variable domain of TCR clone 183850 (TRBV5-7, TRBJ2-5)
CASRTSGGGTQYF

SEQ ID NO: 367701 - protein, 18 aa, Homo sapiens
  CDR3 for alpha chain variable domain of TCR clone 183851 (TRAV26-2, TRAJ54)
CILRDVEVGIQGAQKLVF

SEQ ID NO: 367702 - protein, 17 aa, Homo sapiens
  CDR3 for beta chain variable domain of TCR clone 183851 (TRBV20-1, TRBJ1-5)
CSASVSPGQGGNQPQHF

SEQ ID NO: 367703 - protein, 14 aa, Homo sapiens
  CDR3 for alpha chain variable domain of TCR clone 183852 (TRAV4, TRAJ9)
CLVGSGTGGFKTIF

SEQ ID NO: 367704 - protein, 13 aa, Homo sapiens
  CDR3 for beta chain variable domain of TCR clone 183852 (TRBV15, TRBJ1-6)
CATSGGLNSPLHF

SEQ ID NO: 367705 - protein, 13 aa, Homo sapiens
  CDR3 for alpha chain variable domain of TCR clone 183853 (TRAV12-1, TRAJ31)
CVVNMNNNARLMF

SEQ ID NO: 367706 - protein, 14 aa, Homo sapiens
  CDR3 for beta chain variable domain of TCR clone 183853 (TRBV7-2, TRBJ2-7)
CASSGLAGRGEQYF

SEQ ID NO: 367707 - protein, 11 aa, Homo sapiens
  CDR3 for alpha chain variable domain of TCR clone 183854 (TRAV1-2, TRAJ20)
CAVANDYKLSF

SEQ ID NO: 367708 - protein, 14 aa, Homo sapiens
  CDR3 for beta chain variable domain of TCR clone 183854 (TRBV11-2, TRBJ2-7)
CASSSTGEGYEQYF

SEQ ID NO: 367709 - protein, 13 aa, Homo sapiens
  CDR3 for alpha chain variable domain of TCR clone 183855 (TRAV13-1, TRAJ33)
CAASRAGNYQLIW

SEQ ID NO: 367710 - protein, 16 aa, Homo sapiens
  CDR3 for beta chain variable domain of TCR clone 183855 (TRBV2, TRBJ2-7)
CASSEQYFEPGTRLTV

SEQ ID NO: 367711 - protein, 14 aa, Homo sapiens
  CDR3 for alpha chain variable domain of TCR clone 183856 (TRAV12-3, TRAJ10)
SHLPLTGGGNKLTF

SEQ ID NO: 367712 - protein, 12 aa, Homo sapiens
  CDR3 for beta chain variable domain of TCR clone 183856 (TRBV7-9, TRBJ2-7)
CASSIKREEQYL

SEQ ID NO: 367713 - protein, 14 aa, Homo sapiens
  CDR3 for alpha chain variable domain of TCR clone 183857 (TRAV35, TRAJ40)
CAGSTTSGTYKYIF

SEQ ID NO: 367714 - protein, 17 aa, Homo sapiens
  CDR3 for beta chain variable domain of TCR clone 183857 (TRBV11-2, TRBJ2-1)
CASSLYPPGVEYNEQFF

SEQ ID NO: 367715 - protein, 13 aa, Homo sapiens
  CDR3 for alpha chain variable domain of TCR clone 183858 (TRAV20, TRAJ31)
CAVQAIGGARLMF

SEQ ID NO: 367716 - protein, 17 aa, Homo sapiens
  CDR3 for beta chain variable domain of TCR clone 183858 (TRBV28, TRBJ1-1)
CASSLSGTGYENTEAFF

SEQ ID NO: 367717 - protein, 11 aa, Homo sapiens
  CDR3 for alpha chain variable domain of TCR clone 183859 (TRAV17, TRAJ9)
CGFTGCFKTIF

SEQ ID NO: 367718 - protein, 14 aa, Homo sapiens
  CDR3 for beta chain variable domain of TCR clone 183859 (TRBV7-9, TRBJ2-2)
CASSLVHDTGELFF

SEQ ID NO: 367719 - protein, 15 aa, Homo sapiens
  CDR3 for alpha chain variable domain of TCR clone 183860 (TRAV2, TRAJ37)
CAVGDVSSNTGKLIF

SEQ ID NO: 367720 - protein, 13 aa, Homo sapiens
  CDR3 for beta chain variable domain of TCR clone 183860 (TRBV20-1, TRBJ2-7)
CSAQTGLSYEQYF

SEQ ID NO: 367721 - protein, 13 aa, Homo sapiens
  CDR3 for alpha chain variable domain of TCR clone 183861 (TRAV12-2, TRAJ10)
CAVPTGGGNKLTF

SEQ ID NO: 367722 - protein, 19 aa, Homo sapiens
  CDR3 for beta chain variable domain of TCR clone 183861 (TRBV4-3, TRBJ2-7)
CISAPAAKQPSGTPYEQYF

SEQ ID NO: 367723 - protein, 23 aa, Homo sapiens
  CDR3 for alpha chain variable domain of TCR clone 183862 (TRAV8-4, )
CARLNACNNHIQNPDPAVYQLRD

SEQ ID NO: 367724 - protein, 12 aa, Homo sapiens
  CDR3 for beta chain variable domain of TCR clone 183862 (TRBV6-1, TRBJ2-7)
CASSEPLYEQYF

SEQ ID NO: 367725 - protein, 16 aa, Homo sapiens
  CDR3 for alpha chain variable domain of TCR clone 183863 (TRAV26-1, TRAJ23)
CIVRVHTYNQGGKLIF

SEQ ID NO: 367726 - protein, 15 aa, Homo sapiens
  CDR3 for beta chain variable domain of TCR clone 183863 (TRBV5-7, TRBJ2-7)
CASSPYFEGSYEQYV

SEQ ID NO: 367727 - protein, 17 aa, Homo sapiens
  CDR3 for alpha chain variable domain of TCR clone 183864 (TRAV1-2, TRAJ8)
CAVRDPDENTGFQKLVF

SEQ ID NO: 367728 - protein, 11 aa, Homo sapiens
  CDR3 for beta chain variable domain of TCR clone 183864 (TRBV7-9, TRBJ2-2)
CASSGFGVRTP

SEQ ID NO: 367729 - protein, 15 aa, Homo sapiens
  CDR3 for alpha chain variable domain of TCR clone 183865 (TRAV8-3, TRAJ41)
CAVGSNSNSGYALNF

SEQ ID NO: 367730 - protein, 17 aa, Homo sapiens
  CDR3 for beta chain variable domain of TCR clone 183865 (TRBV25-1, TRBJ2-1)
CASSAYGQGCGVYEQFF

SEQ ID NO: 367731 - protein, 13 aa, Homo sapiens
  CDR3 for alpha chain variable domain of TCR clone 183866 (TRAV12-3, TRAJ9)
CAMRNNGGFKTIF

SEQ ID NO: 367732 - protein, 14 aa, Homo sapiens
  CDR3 for beta chain variable domain of TCR clone 183866 (TRBV11-2, TRBJ2-7)
CASSSAGEGYEQYF

SEQ ID NO: 367733 - protein, 13 aa, Homo sapiens
  CDR3 for alpha chain variable domain of TCR clone 183867 (TRAV2, TRAJ40)
CAVVTSGTYKYIF

SEQ ID NO: 367734 - protein, 14 aa, Homo sapiens
  CDR3 for beta chain variable domain of TCR clone 183867 (TRBV5-7, TRBJ1-1)
CASSLAGDWTEAFF

SEQ ID NO: 367735 - protein, 12 aa, Homo sapiens
  CDR3 for alpha chain variable domain of TCR clone 183868 (TRAV1-1, TRAJ8)
CAGGTGFQKIVF

SEQ ID NO: 367736 - protein, 13 aa, Homo sapiens
  CDR3 for beta chain variable domain of TCR clone 183868 (TRBV7-3, TRBJ1-1)
CASSQDWGAEAFF

SEQ ID NO: 367737 - protein, 12 aa, Homo sapiens
  CDR3 for alpha chain variable domain of TCR clone 183869 (TRAV12-2, TRAJ20)
CAVRPSDYKLSF

SEQ ID NO: 367738 - protein, 14 aa, Homo sapiens
  CDR3 for beta chain variable domain of TCR clone 183869 (TRBV6-1, TRBJ2-7)
CASNRARTDYEQYF

SEQ ID NO: 367739 - protein, 13 aa, Homo sapiens
  CDR3 for alpha chain variable domain of TCR clone 183870 (TRAV27, TRAJ6)
CAGGTRGSYKPTF

SEQ ID NO: 367740 - protein, 15 aa, Homo sapiens
  CDR3 for beta chain variable domain of TCR clone 183870 (TRBV11-2, TRBJ1-3)
CASSLSPLVRDTIYF

SEQ ID NO: 367741 - protein, 17 aa, Homo sapiens
  CDR3 for alpha chain variable domain of TCR clone 183871 (TRAV26-1, TRAJ11)
CIVRVGQSNSGYRTLTF

SEQ ID NO: 367742 - protein, 15 aa, Homo sapiens
  CDR3 for beta chain variable domain of TCR clone 183871 (TRBV27, TRBJ2-5)
CASSLIPSGGETQYF

SEQ ID NO: 367743 - protein, 13 aa, Homo sapiens
  CDR3 for alpha chain variable domain of TCR clone 183872 (TRAV27, TRAJ40)
CAGPPSGTYKYIF

SEQ ID NO: 367744 - protein, 16 aa, Homo sapiens
  CDR3 for beta chain variable domain of TCR clone 183872 (TRBV7-3, TRBJ2-2)
CASSLKRGTLSGELFF

SEQ ID NO: 367745 - protein, 13 aa, Homo sapiens
  CDR3 for alpha chain variable domain of TCR clone 183873 (TRAV8-1, TRAJ23)
YAVTGGQGGKLIF

SEQ ID NO: 367746 - protein, 15 aa, Homo sapiens
  CDR3 for beta chain variable domain of TCR clone 183873 (TRBV20-1, TRBJ2-2)
CSAIPGHSNTGELFF

SEQ ID NO: 367747 - protein, 11 aa, Homo sapiens
  CDR3 for alpha chain variable domain of TCR clone 183874 (TRAV12-1, TRAJ26)
CVVAYGQNFVF

SEQ ID NO: 367748 - protein, 15 aa, Homo sapiens
  CDR3 for beta chain variable domain of TCR clone 183874 (TRBV7-2, TRBJ2-1)
CASSLASGRVNEQFF

SEQ ID NO: 367749 - protein, 11 aa, Homo sapiens
  CDR3 for alpha chain variable domain of TCR clone 183875 (TRAV12-1, TRAJ8)
CVVTGFQKLVF

SEQ ID NO: 367750 - protein, 13 aa, Homo sapiens
  CDR3 for beta chain variable domain of TCR clone 183875 (TRBV19, TRBJ2-1)
CQWEITQYNEQFF

SEQ ID NO: 367751 - protein, 14 aa, Homo sapiens
  CDR3 for alpha chain variable domain of TCR clone 183876 (TRAV26-1, TRAJ45)
CIEVTGGGADGLTF

SEQ ID NO: 367752 - protein, 16 aa, Homo sapiens
  CDR3 for beta chain variable domain of TCR clone 183876 (TRBV12-4, TRBJ2-5)
CASSWRPSGDLETQYF

SEQ ID NO: 367753 - protein, 14 aa, Homo sapiens
  CDR3 for alpha chain variable domain of TCR clone 183877 (TRAV1-2, TRAJ16)
CAVNRFSDGQKLLF

SEQ ID NO: 367754 - protein, 17 aa, Homo sapiens
  CDR3 for beta chain variable domain of TCR clone 183877 (TRBV28, TRBJ2-5)
CSSSTPEGDALQETQYF

SEQ ID NO: 367755 - protein, 21 aa, Homo sapiens
  CDR3 for alpha chain variable domain of TCR clone 183878 (TRAV8-3, TRAJ6)
CAVGGEEATYLHLEEEPDLLF

SEQ ID NO: 367756 - protein, 14 aa, Homo sapiens
  CDR3 for beta chain variable domain of TCR clone 183878 (TRBV5-1, TRBJ2-7)
CASSRGESLYEQYF

SEQ ID NO: 367757 - protein, 14 aa, Homo sapiens
  CDR3 for alpha chain variable domain of TCR clone 183879 (TRAV12-2, TRAJ13)
CAVKKIGAYQKVTF

SEQ ID NO: 367758 - protein, 15 aa, Homo sapiens
  CDR3 for beta chain variable domain of TCR clone 183879 (TRBV27, TRBJ2-1)
CASSNGGGSSNEQFF

SEQ ID NO: 367759 - protein, 15 aa, Homo sapiens
  CDR3 for alpha chain variable domain of TCR clone 183880 (TRAV27, TRAJ38)
CAGRLNAGNNRKLIW

SEQ ID NO: 367760 - protein, 13 aa, Homo sapiens
  CDR3 for beta chain variable domain of TCR clone 183880 (TRBV12-5, TRBJ2-3)
CASQKRGTDTQYF

SEQ ID NO: 367761 - protein, 12 aa, Homo sapiens
  CDR3 for alpha chain variable domain of TCR clone 183881 (TRAV12-3, TRAJ17)
CAMTLTGNKLTF

SEQ ID NO: 367762 - protein, 15 aa, Homo sapiens
  CDR3 for beta chain variable domain of TCR clone 183881 (TRBV20-1, TRBJ2-7)
RSARVRVSGMDEQYF

SEQ ID NO: 367763 - protein, 18 aa, Homo sapiens
  CDR3 for alpha chain variable domain of TCR clone 183882 (TRAV21, TRAJ52)
CAVRPSPVGGTSYGKLTF

SEQ ID NO: 367764 - protein, 14 aa, Homo sapiens
  CDR3 for beta chain variable domain of TCR clone 183882 (TRBV9, TRBJ2-3)
CASSAGGGPDTQYF

SEQ ID NO: 367765 - protein, 13 aa, Homo sapiens
  CDR3 for alpha chain variable domain of TCR clone 183883 (TRAV12-1, TRAJ33)
CGDAPDSNYQLIW

SEQ ID NO: 367766 - protein, 13 aa, Homo sapiens
  CDR3 for beta chain variable domain of TCR clone 183883 (TRBV7-2, TRBJ2-5)
CASSQTGVETQYF

SEQ ID NO: 367767 - protein, 15 aa, Homo sapiens
  CDR3 for alpha chain variable domain of TCR clone 183884 (TRAV8-3, TRAJ11)
CAVGLLNSGYCTLTF

SEQ ID NO: 367768 - protein, 23 aa, Homo sapiens
  CDR3 for beta chain variable domain of TCR clone 183884 (TRBV7-9, TRBJ1-2)
EAQLEKSRLLSDRFSSGEDGYTF

SEQ ID NO: 367769 - protein, 21 aa, Homo sapiens
  CDR3 for alpha chain variable domain of TCR clone 183885 (TRAV3, )
CAVRPTPDIQNPDPPVYQLRD

SEQ ID NO: 367770 - protein, 15 aa, Homo sapiens
  CDR3 for beta chain variable domain of TCR clone 183885 (TRBV11-3, TRBJ2-5)
CASSDTSGGIETQYF

SEQ ID NO: 367771 - protein, 17 aa, Homo sapiens
  CDR3 for alpha chain variable domain of TCR clone 183886 (TRAV4, TRAJ18)
CLVGERSVGLTLGRLYF

SEQ ID NO: 367772 - protein, 16 aa, Homo sapiens
  CDR3 for beta chain variable domain of TCR clone 183886 (TRBV19, TRBJ2-1)
CASSKAGPSSYNEQFF

SEQ ID NO: 367773 - protein, 14 aa, Homo sapiens
  CDR3 for alpha chain variable domain of TCR clone 183887 (TRAV1-2, TRAJ16)
CAVNRFSDGQKLLF

SEQ ID NO: 367774 - protein, 16 aa, Homo sapiens
  CDR3 for beta chain variable domain of TCR clone 183887 (TRBV11-2, TRBJ1-2)
CARSLDTGGADYGYTF

SEQ ID NO: 367775 - protein, 13 aa, Homo sapiens
  CDR3 for alpha chain variable domain of TCR clone 183888 (TRAV12-3, TRAJ44)
CARTTGTASKLTF

SEQ ID NO: 367776 - protein, 15 aa, Homo sapiens
  CDR3 for beta chain variable domain of TCR clone 183888 (TRBV29-1, TRBJ1-2)
CSGLDVRGANYGDTF

SEQ ID NO: 367777 - protein, 13 aa, Homo sapiens
  CDR3 for alpha chain variable domain of TCR clone 183889 (TRAV2, TRAJ15)
CAVEAHAGTALIF

SEQ ID NO: 367778 - protein, 14 aa, Homo sapiens
  CDR3 for beta chain variable domain of TCR clone 183889 (TRBV6-5, TRBJ2-7)
CASVASGGAHEQYF

SEQ ID NO: 367779 - protein, 14 aa, Homo sapiens
  CDR3 for alpha chain variable domain of TCR clone 183890 (TRAV1-2, TRAJ6)
CAVRSSGGSYIPKF

SEQ ID NO: 367780 - protein, 16 aa, Homo sapiens
  CDR3 for beta chain variable domain of TCR clone 183890 (TRBV7-3, TRBJ2-2)
CASSLKRGTLSGELFF

SEQ ID NO: 367781 - protein, 14 aa, Homo sapiens
  CDR3 for alpha chain variable domain of TCR clone 183891 (TRAV30, TRAJ52)
CGTVGGTSYGKLTF

SEQ ID NO: 367782 - protein, 16 aa, Homo sapiens
  CDR3 for beta chain variable domain of TCR clone 183891 (TRBV12-5, TRBJ2-5)
CASGPRTSGNQETQYF

SEQ ID NO: 367783 - protein, 12 aa, Homo sapiens
  CDR3 for alpha chain variable domain of TCR clone 183892 (TRAV13-2, TRAJ23)
CAERHRGGKLIF

SEQ ID NO: 367784 - protein, 15 aa, Homo sapiens
  CDR3 for beta chain variable domain of TCR clone 183892 (TRBV11-3, TRBJ2-2)
CASSSDRVNAGELFF

SEQ ID NO: 367785 - protein, 14 aa, Homo sapiens
  CDR3 for alpha chain variable domain of TCR clone 183893 (TRAV8-3, TRAJ30)
CAVEDMNRDDKIIF

SEQ ID NO: 367786 - protein, 17 aa, Homo sapiens
  CDR3 for beta chain variable domain of TCR clone 183893 (TRBV19, TRBJ2-2)
CASSRNPGGFGTGELFF

SEQ ID NO: 367787 - protein, 16 aa, Homo sapiens
  CDR3 for alpha chain variable domain of TCR clone 183894 (TRAV30, TRAJ24)
CGTEIVDADSWGKFQF

SEQ ID NO: 367788 - protein, 14 aa, Homo sapiens
  CDR3 for beta chain variable domain of TCR clone 183894 (TRBV7-9, TRBJ2-1)
CASSPRDALYEQFF

SEQ ID NO: 367789 - protein, 12 aa, Homo sapiens
  CDR3 for alpha chain variable domain of TCR clone 183895 (TRAV8-6, TRAJ4)
CAVSDHPNKLIF

SEQ ID NO: 367790 - protein, 18 aa, Homo sapiens
  CDR3 for beta chain variable domain of TCR clone 183895 (TRBV12-4, TRBJ2-2)
CASSLVAGTRGRTGELFF

SEQ ID NO: 367791 - protein, 14 aa, Homo sapiens
  CDR3 for alpha chain variable domain of TCR clone 183896 (TRAV23/DV6, TRAJ4)
CAAPRYGGYHKLIF

SEQ ID NO: 367792 - protein, 16 aa, Homo sapiens
  CDR3 for beta chain variable domain of TCR clone 183896 (TRBV19, TRBJ1-1)
CASRFGGPVTGTEAFF

SEQ ID NO: 367793 - protein, 13 aa, Homo sapiens
  CDR3 for alpha chain variable domain of TCR clone 183897 (TRAV12-2, TRAJ6)
CAVNVSRKLHTYI

SEQ ID NO: 367794 - protein, 12 aa, Homo sapiens
  CDR3 for beta chain variable domain of TCR clone 183897 (TRBV29-1, TRBJ2-3)
CSVAGGADTQYF

SEQ ID NO: 367795 - protein, 11 aa, Homo sapiens
  CDR3 for alpha chain variable domain of TCR clone 183898 (TRAV12-3, TRAJ43)
CAMSVSNDMRF

SEQ ID NO: 367796 - protein, 16 aa, Homo sapiens
  CDR3 for beta chain variable domain of TCR clone 183898 (TRBV9, TRBJ2-1)
CASSVGGGGNYNEQFF

SEQ ID NO: 367797 - protein, 15 aa, Homo sapiens
  CDR3 for alpha chain variable domain of TCR clone 183899 (TRAV27, TRAJ38)
CAARRNAVNNRKLIW

SEQ ID NO: 367798 - protein, 13 aa, Homo sapiens
  CDR3 for beta chain variable domain of TCR clone 183899 (TRBV28, TRBJ2-5)
CAGVSRGEETQYF

SEQ ID NO: 367799 - protein, 14 aa, Homo sapiens
  CDR3 for alpha chain variable domain of TCR clone 183900 (TRAV17, TRAJ57)
CATYPQGGSEKLVF

SEQ ID NO: 367800 - protein, 14 aa, Homo sapiens
  CDR3 for beta chain variable domain of TCR clone 183900 (TRBV11-2, TRBJ2-3)
CASSLGGGANTQYF

SEQ ID NO: 367801 - protein, 17 aa, Homo sapiens
  CDR3 for alpha chain variable domain of TCR clone 183901 (TRAV17, TRAJ52)
CATERPSGGTSYGKLTF

SEQ ID NO: 367802 - protein, 15 aa, Homo sapiens
  CDR3 for beta chain variable domain of TCR clone 183901 (TRBV5-1, TRBJ2-1)
CASSLVASSYNEQFF

SEQ ID NO: 367803 - protein, 14 aa, Homo sapiens
  CDR3 for alpha chain variable domain of TCR clone 183902 (TRAV12-1, TRAJ37)
CVVNRSGNTGKLIF

SEQ ID NO: 367804 - protein, 16 aa, Homo sapiens
  CDR3 for beta chain variable domain of TCR clone 183902 (TRBV3-1, TRBJ2-5)
CASSQDWASGQETQYF

SEQ ID NO: 367805 - protein, 14 aa, Homo sapiens
  CDR3 for alpha chain variable domain of TCR clone 183903 (TRAV12-1, TRAJ34)
RVVNLDYNTDKLIF

SEQ ID NO: 367806 - protein, 20 aa, Homo sapiens
  CDR3 for beta chain variable domain of TCR clone 183903 (TRBV7-3, TRBJ2-7)
CARSPRGLAGMVAVLRAGHQ

SEQ ID NO: 367807 - protein, 14 aa, Homo sapiens
  CDR3 for alpha chain variable domain of TCR clone 183904 (TRAV38-2/DV8, TRAJ29)
CAYRSRSGNTPLVF

SEQ ID NO: 367808 - protein, 17 aa, Homo sapiens
  CDR3 for beta chain variable domain of TCR clone 183904 (TRBV6-1, TRBJ1-2)
CASSGTQSQRGNYGYTF

SEQ ID NO: 367809 - protein, 15 aa, Homo sapiens
  CDR3 for alpha chain variable domain of TCR clone 183905 (TRAV17, TRAJ45)
CATAYSGGGADGLTF

SEQ ID NO: 367810 - protein, 13 aa, Homo sapiens
  CDR3 for beta chain variable domain of TCR clone 183905 (TRBV20-1, TRBJ2-4)
CSVGGGAENIQYF

SEQ ID NO: 367811 - protein, 16 aa, Homo sapiens
  CDR3 for alpha chain variable domain of TCR clone 183906 (TRAV30, TRAJ24)
CGTEIVDADSWGKFQF

SEQ ID NO: 367812 - protein, 17 aa, Homo sapiens
  CDR3 for beta chain variable domain of TCR clone 183906 (TRBV20-1, TRBJ2-1)
CSAPPRIAGTRCNEQCF

SEQ ID NO: 367813 - protein, 13 aa, Homo sapiens
  CDR3 for alpha chain variable domain of TCR clone 183907 (TRAV21, TRAJ57)
CAVTQGGSEKLVF

SEQ ID NO: 367814 - protein, 16 aa, Homo sapiens
  CDR3 for beta chain variable domain of TCR clone 183907 (TRBV11-3, TRBJ2-5)
CASSSVVAGSTETQYF

SEQ ID NO: 367815 - protein, 14 aa, Homo sapiens
  CDR3 for alpha chain variable domain of TCR clone 183908 (TRAV29/DV5, TRAJ36)
CAARRKTGANNLFF

SEQ ID NO: 367816 - protein, 16 aa, Homo sapiens
  CDR3 for beta chain variable domain of TCR clone 183908 (TRBV11-2, TRBJ2-2)
CASSLRTGNLIGELFF

SEQ ID NO: 367817 - protein, 16 aa, Homo sapiens
  CDR3 for alpha chain variable domain of TCR clone 183909 (TRAV3, TRAJ37)
CAVRVRGSVNTGKLIF

SEQ ID NO: 367818 - protein, 11 aa, Homo sapiens
  CDR3 for beta chain variable domain of TCR clone 183909 (TRBV11-2, TRBJ2-2)
CASSLPGELFF

SEQ ID NO: 367819 - protein, 14 aa, Homo sapiens
  CDR3 for alpha chain variable domain of TCR clone 183910 (TRAV1-2, TRAJ16)
CAVNRFSDGQKLLF

SEQ ID NO: 367820 - protein, 14 aa, Homo sapiens
  CDR3 for beta chain variable domain of TCR clone 183910 (TRBV7-9, TRBJ2-2)
CASSLGHRTRELFF

SEQ ID NO: 367821 - protein, 16 aa, Homo sapiens
  CDR3 for alpha chain variable domain of TCR clone 183911 (TRAV16, TRAJ4)
FALSRMLSGGYNKLIF

SEQ ID NO: 367822 - protein, 16 aa, Homo sapiens
  CDR3 for beta chain variable domain of TCR clone 183911 (TRBV24-1, TRBJ2-3)
CATSDPGTGATDTQYF

SEQ ID NO: 367823 - protein, 13 aa, Homo sapiens
  CDR3 for alpha chain variable domain of TCR clone 183912 (TRAV13-1, TRAJ6)
CAASRGGSYIPTF

SEQ ID NO: 367824 - protein, 15 aa, Homo sapiens
  CDR3 for beta chain variable domain of TCR clone 183912 (TRBV7-6, TRBJ1-5)
CASSQSSGINQPQHF

SEQ ID NO: 367825 - protein, 14 aa, Homo sapiens
  CDR3 for alpha chain variable domain of TCR clone 183913 (TRAV12-3, TRAJ10)
SHLPLTGGGNKLTF

SEQ ID NO: 367826 - protein, 15 aa, Homo sapiens
  CDR3 for beta chain variable domain of TCR clone 183913 (TRBV11-2, TRBJ1-3)
CASSLDGTVGNTIYY

SEQ ID NO: 367827 - protein, 14 aa, Homo sapiens
  CDR3 for alpha chain variable domain of TCR clone 183914 (TRAV12-2, TRAJ13)
CAVKKTGGYQKVTF

SEQ ID NO: 367828 - protein, 14 aa, Homo sapiens
  CDR3 for beta chain variable domain of TCR clone 183914 (TRBV7-2, TRBJ2-7)
CASSPKTSFDEQYF

SEQ ID NO: 367829 - protein, 15 aa, Homo sapiens
  CDR3 for alpha chain variable domain of TCR clone 183915 (TRAV21, TRAJ24)
CAARSSTDSWGKLQF

SEQ ID NO: 367830 - protein, 15 aa, Homo sapiens
  CDR3 for beta chain variable domain of TCR clone 183915 (TRBV12-4, TRBJ2-1)
CASSRGLAEYNEQFF

SEQ ID NO: 367831 - protein, 14 aa, Homo sapiens
  CDR3 for alpha chain variable domain of TCR clone 183916 (TRAV13-1, TRAJ39)
CAASKNNAGNMLTF

SEQ ID NO: 367832 - protein, 15 aa, Homo sapiens
  CDR3 for beta chain variable domain of TCR clone 183916 (TRBV7-9, TRBJ1-6)
CASSSPVRGNSPLHF

SEQ ID NO: 367833 - protein, 13 aa, Homo sapiens
  CDR3 for alpha chain variable domain of TCR clone 183917 (TRAV3, TRAJ27)
CSVRPLGAGNSTF

SEQ ID NO: 367834 - protein, 13 aa, Homo sapiens
  CDR3 for beta chain variable domain of TCR clone 183917 (TRBV7-9, TRBJ2-3)
CASSPGSTDTQYF

SEQ ID NO: 367835 - protein, 14 aa, Homo sapiens
  CDR3 for alpha chain variable domain of TCR clone 183918 (TRAV8-4, TRAJ54)
CAVSEVLGAQKLVF

SEQ ID NO: 367836 - protein, 14 aa, Homo sapiens
  CDR3 for beta chain variable domain of TCR clone 183918 (TRBV25-1, TRBJ1-1)
RASTHLGGNTEAFF

SEQ ID NO: 367837 - protein, 14 aa, Homo sapiens
  CDR3 for alpha chain variable domain of TCR clone 183919 (TRAV1-2, TRAJ8)
CAVREDTGFQKLVF

SEQ ID NO: 367838 - protein, 14 aa, Homo sapiens
  CDR3 for beta chain variable domain of TCR clone 183919 (TRBV11-2, TRBJ2-1)
CASSLDGRDNEQFF

SEQ ID NO: 367839 - protein, 17 aa, Homo sapiens
  CDR3 for alpha chain variable domain of TCR clone 183920 (TRAV12-2, TRAJ48)
CASNEKLTFGTVTRLTI

SEQ ID NO: 367840 - protein, 15 aa, Homo sapiens
  CDR3 for beta chain variable domain of TCR clone 183920 (TRBV5-1, TRBJ2-1)
CASSQAGYWWNEQFF

SEQ ID NO: 367841 - protein, 16 aa, Homo sapiens
  CDR3 for alpha chain variable domain of TCR clone 183921 (TRAV3, TRAJ10)
CAVRGMRAGGGNKLTF

SEQ ID NO: 367842 - protein, 15 aa, Homo sapiens
  CDR3 for beta chain variable domain of TCR clone 183921 (TRBV20-1, TRBJ2-7)
CSARVPAAYFYEQYF

SEQ ID NO: 367843 - protein, 15 aa, Homo sapiens
  CDR3 for alpha chain variable domain of TCR clone 183922 (TRAV39, TRAJ32)
CAVDMEGGATNKLIF

SEQ ID NO: 367844 - protein, 17 aa, Homo sapiens
  CDR3 for beta chain variable domain of TCR clone 183922 (TRBV7-2, TRBJ1-4)
CASSFTAGPTTNEKLFF

SEQ ID NO: 367845 - protein, 16 aa, Homo sapiens
  CDR3 for alpha chain variable domain of TCR clone 183923 (TRAV12-1, TRAJ45)
CVVIRYSGGGADGLTF

SEQ ID NO: 367846 - protein, 16 aa, Homo sapiens
  CDR3 for beta chain variable domain of TCR clone 183923 (TRBV29-1, TRBJ2-7)
CSVEDAEDGTAYEQYF

SEQ ID NO: 367847 - protein, 14 aa, Homo sapiens
  CDR3 for alpha chain variable domain of TCR clone 183924 (TRAV29/DV5, TRAJ32)
CAAAYGGATNKLIF

SEQ ID NO: 367848 - protein, 15 aa, Homo sapiens
  CDR3 for beta chain variable domain of TCR clone 183924 (TRBV7-3, TRBJ2-2)
CQQLKAGDLVRGAVF

SEQ ID NO: 367849 - protein, 15 aa, Homo sapiens
  CDR3 for alpha chain variable domain of TCR clone 183925 (TRAV23/DV6, TRAJ13)
CAAWPGGGGYQTVTF

SEQ ID NO: 367850 - protein, 14 aa, Homo sapiens
  CDR3 for beta chain variable domain of TCR clone 183925 (TRBV7-2, TRBJ1-1)
CASSFLTGTTEAFF

SEQ ID NO: 367851 - protein, 13 aa, Homo sapiens
  CDR3 for alpha chain variable domain of TCR clone 183926 (TRAV8-6, TRAJ49)
CAVITKTVNQFYF

SEQ ID NO: 367852 - protein, 14 aa, Homo sapiens
  CDR3 for beta chain variable domain of TCR clone 183926 (TRBV5-1, TRBJ2-7)
CASSRGESLYEQYF

SEQ ID NO: 367853 - protein, 14 aa, Homo sapiens
  CDR3 for alpha chain variable domain of TCR clone 183927 (TRAV1-2, TRAJ16)
CAVNQFSDGQELLF

SEQ ID NO: 367854 - protein, 15 aa, Homo sapiens
  CDR3 for beta chain variable domain of TCR clone 183927 (TRBV7-9, TRBJ1-6)
CASSSPGRGNSPLHF

SEQ ID NO: 367855 - protein, 15 aa, Homo sapiens
  CDR3 for alpha chain variable domain of TCR clone 183928 (TRAV8-3, TRAJ45)
CASSYSGGGADGLTF

SEQ ID NO: 367856 - protein, 18 aa, Homo sapiens
  CDR3 for beta chain variable domain of TCR clone 183928 (TRBV18, TRBJ1-3)
CVSSPRGGAGPSGNTIYF

SEQ ID NO: 367857 - protein, 13 aa, Homo sapiens
  CDR3 for alpha chain variable domain of TCR clone 183929 (TRAV20, TRAJ37)
CAGCSSNTGKLIF

SEQ ID NO: 367858 - protein, 11 aa, Homo sapiens
  CDR3 for beta chain variable domain of TCR clone 183929 (TRBV12-4, TRBJ2-3)
CASTPTDTQYF

SEQ ID NO: 367859 - protein, 12 aa, Homo sapiens
  CDR3 for alpha chain variable domain of TCR clone 183930 (TRAV29/DV5, TRAJ49)
CAATDTGNQFYV

SEQ ID NO: 367860 - protein, 12 aa, Homo sapiens
  CDR3 for beta chain variable domain of TCR clone 183930 (TRBV12-4, TRBJ2-7)
CASSLGGYEQYF

SEQ ID NO: 367861 - protein, 15 aa, Homo sapiens
  CDR3 for alpha chain variable domain of TCR clone 183931 (TRAV21, TRAJ53)
CATFNSGGSNYKLTF

SEQ ID NO: 367862 - protein, 15 aa, Homo sapiens
  CDR3 for beta chain variable domain of TCR clone 183931 (TRBV20-1, TRBJ2-7)
CSARDRVSGMDEQYF

SEQ ID NO: 367863 - protein, 13 aa, Homo sapiens
  CDR3 for alpha chain variable domain of TCR clone 183932 (TRAV36/DV7, TRAJ38)
CVANAGNNRKLIW

SEQ ID NO: 367864 - protein, 12 aa, Homo sapiens
  CDR3 for beta chain variable domain of TCR clone 183932 (TRBV9, TRBJ2-2)
CASSARTGELFF

SEQ ID NO: 367865 - protein, 15 aa, Homo sapiens
  CDR3 for alpha chain variable domain of TCR clone 183933 (TRAV35, TRAJ58)
CAGRRQETSGSRLTF

SEQ ID NO: 367866 - protein, 16 aa, Homo sapiens
  CDR3 for beta chain variable domain of TCR clone 183933 (TRBV2, TRBJ2-1)
CASSGGGSLSYNEQFF

SEQ ID NO: 367867 - protein, 12 aa, Homo sapiens
  CDR3 for alpha chain variable domain of TCR clone 183934 (TRAV2, TRAJ9)
CAVGAGGFKTIF

SEQ ID NO: 367868 - protein, 17 aa, Homo sapiens
  CDR3 for beta chain variable domain of TCR clone 183934 (TRBV5-1, TRBJ2-5)
CASSLLGLAANQETQYF

SEQ ID NO: 367869 - protein, 17 aa, Homo sapiens
  CDR3 for alpha chain variable domain of TCR clone 183935 (TRAV3, TRAJ38)
CAVRDCLNAGNNRKLIW

SEQ ID NO: 367870 - protein, 16 aa, Homo sapiens
  CDR3 for beta chain variable domain of TCR clone 183935 (TRBV7-2, TRBJ1-4)
CASSPVGRFDREKLFF

SEQ ID NO: 367871 - protein, 11 aa, Homo sapiens
  CDR3 for alpha chain variable domain of TCR clone 183936 (TRAV2, TRAJ13)
CASGGSQKVTF

SEQ ID NO: 367872 - protein, 16 aa, Homo sapiens
  CDR3 for beta chain variable domain of TCR clone 183936 (TRBV6-1, TRBJ2-5)
CASSETLDRGAETQYF

SEQ ID NO: 367873 - protein, 15 aa, Homo sapiens
  CDR3 for alpha chain variable domain of TCR clone 183937 (TRAV3, TRAJ5)
CAVRYLDTGRRARTF

SEQ ID NO: 367874 - protein, 13 aa, Homo sapiens
  CDR3 for beta chain variable domain of TCR clone 183937 (TRBV12-4, TRBJ2-7)
CASSPTETYEQYF

SEQ ID NO: 367875 - protein, 14 aa, Homo sapiens
  CDR3 for alpha chain variable domain of TCR clone 183938 (TRAV8-4, TRAJ43)
CAVSDPRNNNDMRF

SEQ ID NO: 367876 - protein, 18 aa, Homo sapiens
  CDR3 for beta chain variable domain of TCR clone 183938 (TRBV4-1, TRBJ1-5)
CASSQDPRGQGLNQPQHF

SEQ ID NO: 367877 - protein, 11 aa, Homo sapiens
  CDR3 for alpha chain variable domain of TCR clone 183939 (TRAV12-2, )
CAVASLATTIS

SEQ ID NO: 367878 - protein, 16 aa, Homo sapiens
  CDR3 for beta chain variable domain of TCR clone 183939 (TRBV5-1, TRBJ2-2)
CASGSRTGGRTGELFF

SEQ ID NO: 367879 - protein, 22 aa, Homo sapiens
  CDR3 for alpha chain variable domain of TCR clone 183940 (TRAV3, TRAJ38)
CAVRDCLNAGNNHIQNPDPAVY

SEQ ID NO: 367880 - protein, 19 aa, Homo sapiens
  CDR3 for beta chain variable domain of TCR clone 183940 (TRBV7-2, TRBJ2-3)
CASSFLSQNWGGGTDTQYF

SEQ ID NO: 367881 - protein, 13 aa, Homo sapiens
  CDR3 for alpha chain variable domain of TCR clone 183941 (TRAV8-3, TRAJ20)
CAAGRPNDYKLSF

SEQ ID NO: 367882 - protein, 14 aa, Homo sapiens
  CDR3 for beta chain variable domain of TCR clone 183941 (TRBV12-5, TRBJ2-5)
CASGSRTHQETQYF

SEQ ID NO: 367883 - protein, 11 aa, Homo sapiens
  CDR3 for alpha chain variable domain of TCR clone 183942 (TRAV20, TRAJ34)
CRTKGTDKLIF

SEQ ID NO: 367884 - protein, 17 aa, Homo sapiens
  CDR3 for beta chain variable domain of TCR clone 183942 (TRBV13, TRBJ2-3)
CASSLSRVAGGRNTQYF

SEQ ID NO: 367885 - protein, 11 aa, Homo sapiens
  CDR3 for alpha chain variable domain of TCR clone 183943 (TRAV12-1, TRAJ21)
CVVNNFNKFYF

SEQ ID NO: 367886 - protein, 14 aa, Homo sapiens
  CDR3 for beta chain variable domain of TCR clone 183943 (TRBV15, TRBJ1-5)
CATSREQSNQPQLF

SEQ ID NO: 367887 - protein, 12 aa, Homo sapiens
  CDR3 for alpha chain variable domain of TCR clone 183944 (TRAV12-3, TRAJ17)
CAMTLTGNKLTF

SEQ ID NO: 367888 - protein, 13 aa, Homo sapiens
  CDR3 for beta chain variable domain of TCR clone 183944 (TRBV3-1, TRBJ2-7)
CASSLRDGYEQYF

SEQ ID NO: 367889 - protein, 14 aa, Homo sapiens
  CDR3 for alpha chain variable domain of TCR clone 183945 (TRAV17, TRAJ6)
CATDASGGSYIPTF

SEQ ID NO: 367890 - protein, 14 aa, Homo sapiens
  CDR3 for beta chain variable domain of TCR clone 183945 (TRBV7-2, TRBJ2-7)
CASSPKTSFYEQYF

SEQ ID NO: 367891 - protein, 14 aa, Homo sapiens
  CDR3 for alpha chain variable domain of TCR clone 183946 (TRAV3, TRAJ6)
CAVRRTGGSYIPTF

SEQ ID NO: 367892 - protein, 18 aa, Homo sapiens
  CDR3 for beta chain variable domain of TCR clone 183946 (TRBV25-1, TRBJ1-2)
CASSGLQNGQGLIFGYTF

SEQ ID NO: 367893 - protein, 14 aa, Homo sapiens
  CDR3 for alpha chain variable domain of TCR clone 183947 (TRAV26-1, TRAJ38)
CIADNAGNNRKLIW

SEQ ID NO: 367894 - protein, 15 aa, Homo sapiens
  CDR3 for beta chain variable domain of TCR clone 183947 (TRBV7-2, TRBJ2-1)
CASSLVAGRYNEQFF

SEQ ID NO: 367895 - protein, 10 aa, Homo sapiens
  CDR3 for alpha chain variable domain of TCR clone 183948 (TRAV38-1, TRAJ53)
CAFMKHGLES

SEQ ID NO: 367896 - protein, 12 aa, Homo sapiens
  CDR3 for beta chain variable domain of TCR clone 183948 (TRBV11-2, TRBJ2-2)
CASSLGGGELFF

SEQ ID NO: 367897 - protein, 14 aa, Homo sapiens
  CDR3 for alpha chain variable domain of TCR clone 183949 (TRAV16, TRAJ29)
CALTRNSGNTPLGF

SEQ ID NO: 367898 - protein, 12 aa, Homo sapiens
  CDR3 for beta chain variable domain of TCR clone 183949 (TRBV2, TRBJ2-1)
CAKREGYNEQFF

SEQ ID NO: 367899 - protein, 14 aa, Homo sapiens
  CDR3 for alpha chain variable domain of TCR clone 183950 (TRAV12-2, TRAJ45)
CAVNIGGGADGLTF

SEQ ID NO: 367900 - protein, 15 aa, Homo sapiens
  CDR3 for beta chain variable domain of TCR clone 183950 (TRBV5-1, TRBJ2-1)
CASSPPRAPYNEQFF

SEQ ID NO: 367901 - protein, 13 aa, Homo sapiens
  CDR3 for alpha chain variable domain of TCR clone 183951 (TRAV12-2, TRAJ10)
CAVPTGGGNKLTF

SEQ ID NO: 367902 - protein, 15 aa, Homo sapiens
  CDR3 for beta chain variable domain of TCR clone 183951 (TRBV19, TRBJ2-1)
CASIKGRGPYNEQFF

SEQ ID NO: 367903 - protein, 14 aa, Homo sapiens
  CDR3 for alpha chain variable domain of TCR clone 183952 (TRAV26-1, TRAJ38)
CVPDNAGNNRKLLW

SEQ ID NO: 367904 - protein, 13 aa, Homo sapiens
  CDR3 for beta chain variable domain of TCR clone 183952 (TRBV20-1, TRBJ1-1)
CSARGGGNTEAFF

SEQ ID NO: 367905 - protein, 11 aa, Homo sapiens
  CDR3 for alpha chain variable domain of TCR clone 183953 (TRAV23/DV6, TRAJ48)
CAPRWGEKLTF

SEQ ID NO: 367906 - protein, 14 aa, Homo sapiens
  CDR3 for beta chain variable domain of TCR clone 183953 (TRBV5-1, TRBJ2-1)
CASSLDGDWNEQFF

SEQ ID NO: 367907 - protein, 15 aa, Homo sapiens
  CDR3 for alpha chain variable domain of TCR clone 183954 (TRAV12-1, TRAJ26)
CVVNSWVTMVRILSL

SEQ ID NO: 367908 - protein, 13 aa, Homo sapiens
  CDR3 for beta chain variable domain of TCR clone 183954 (TRBV12-4, TRBJ1-2)
CASSLRQGKGYTF

SEQ ID NO: 367909 - protein, 13 aa, Homo sapiens
  CDR3 for alpha chain variable domain of TCR clone 183955 (TRAV1-2, TRAJ8)
CAVGSTGFQKLVF

SEQ ID NO: 367910 - protein, 16 aa, Homo sapiens
  CDR3 for beta chain variable domain of TCR clone 183955 (TRBV6-1, TRBJ1-3)
CASVQGGVETPYILER

SEQ ID NO: 367911 - protein, 12 aa, Homo sapiens
  CDR3 for alpha chain variable domain of TCR clone 183956 (TRAV35, TRAJ28)
GVEGAGSYQLTF

SEQ ID NO: 367912 - protein, 18 aa, Homo sapiens
  CDR3 for beta chain variable domain of TCR clone 183956 (TRBV11-2, TRBJ2-3)
CASSLGGASRGAPNTQYF

SEQ ID NO: 367913 - protein, 22 aa, Homo sapiens
  CDR3 for alpha chain variable domain of TCR clone 183957 (TRAV13-1, TRAJ9)
CAASALTEASKLSLEQEQDYLL

SEQ ID NO: 367914 - protein, 13 aa, Homo sapiens
  CDR3 for beta chain variable domain of TCR clone 183957 (TRBV20-1, TRBJ1-1)
CSAGTVGNTEAFF

SEQ ID NO: 367915 - protein, 14 aa, Homo sapiens
  CDR3 for alpha chain variable domain of TCR clone 183958 (TRAV38-1, TRAJ45)
CPSHSGGGADGRTF

SEQ ID NO: 367916 - protein, 13 aa, Homo sapiens
  CDR3 for beta chain variable domain of TCR clone 183958 (TRBV10-3, TRBJ1-2)
CAISERDSYGYTF

SEQ ID NO: 367917 - protein, 18 aa, Homo sapiens
  CDR3 for alpha chain variable domain of TCR clone 183959 (TRAV21, TRAJ52)
CAVRTSPAGGTSYGKLTF

SEQ ID NO: 367918 - protein, 17 aa, Homo sapiens
  CDR3 for beta chain variable domain of TCR clone 183959 (TRBV13, TRBJ2-3)
CASILSRVAGGRNTQYF

SEQ ID NO: 367919 - protein, 12 aa, Homo sapiens
  CDR3 for alpha chain variable domain of TCR clone 183960 (TRAV12-2, TRAJ31)
CAVNTPDARLMF

SEQ ID NO: 367920 - protein, 16 aa, Homo sapiens
  CDR3 for beta chain variable domain of TCR clone 183960 (TRBV27, TRBJ2-2)
CASSLSGFGVTGELFF

SEQ ID NO: 367921 - protein, 16 aa, Homo sapiens
  CDR3 for alpha chain variable domain of TCR clone 183961 (TRAV30, TRAJ24)
CGTEIVDADSWGKFQF

SEQ ID NO: 367922 - protein, 14 aa, Homo sapiens
  CDR3 for beta chain variable domain of TCR clone 183961 (TRBV11-2, TRBJ2-7)
CASSSSGEGYEQYF

SEQ ID NO: 367923 - protein, 11 aa, Homo sapiens
  CDR3 for alpha chain variable domain of TCR clone 183962 (TRAV21, TRAJ11)
CAVNGYSTLTF

SEQ ID NO: 367924 - protein, 15 aa, Homo sapiens
  CDR3 for beta chain variable domain of TCR clone 183962 (TRBV7-6, TRBJ2-5)
CASSSGLAGVETQYF

SEQ ID NO: 367925 - protein, 14 aa, Homo sapiens
  CDR3 for alpha chain variable domain of TCR clone 183963 (TRAV12-2, TRAJ13)
CAVKKTGGYQKVTF

SEQ ID NO: 367926 - protein, 13 aa, Homo sapiens
  CDR3 for beta chain variable domain of TCR clone 183963 (TRBV19, TRBJ2-2)
CASSIWSTGDLFF

SEQ ID NO: 367927 - protein, 15 aa, Homo sapiens
  CDR3 for alpha chain variable domain of TCR clone 183964 (TRAV12-1, TRAJ4)
CVVNPFSGGSIKLIF

SEQ ID NO: 367928 - protein, 16 aa, Homo sapiens
  CDR3 for beta chain variable domain of TCR clone 183964 (TRBV5-1, TRBJ1-1)
CASSKTGTEVGTEAFF

SEQ ID NO: 367929 - protein, 22 aa, Homo sapiens
  CDR3 for alpha chain variable domain of TCR clone 183965 (TRAV27, TRAJ41)
CAVRTQIPDIQSPDPAVYQLSD

SEQ ID NO: 367930 - protein, 16 aa, Homo sapiens
  CDR3 for beta chain variable domain of TCR clone 183965 (TRBV28, TRBJ2-7)
CASSLFFETGGPEQYF

SEQ ID NO: 367931 - protein, 11 aa, Homo sapiens
  CDR3 for alpha chain variable domain of TCR clone 183966 (TRAV1-1, TRAJ23)
CAVRQGGKLTF

SEQ ID NO: 367932 - protein, 20 aa, Homo sapiens
  CDR3 for beta chain variable domain of TCR clone 183966 (TRBV7-8, TRBJ2-2)
CASSHLSPGPTIHITGELFF

SEQ ID NO: 367933 - protein, 14 aa, Homo sapiens
  CDR3 for alpha chain variable domain of TCR clone 183967 (TRAV8-3, TRAJ18)
CAVFQRLNPGGAIL

SEQ ID NO: 367934 - protein, 13 aa, Homo sapiens
  CDR3 for beta chain variable domain of TCR clone 183967 (TRBV10-3, TRBJ2-7)
CASKLAVNYEQYF

SEQ ID NO: 367935 - protein, 14 aa, Homo sapiens
  CDR3 for alpha chain variable domain of TCR clone 183968 (TRAV26-1, TRAJ38)
CIADNAGNNRKLIW

SEQ ID NO: 367936 - protein, 15 aa, Homo sapiens
  CDR3 for beta chain variable domain of TCR clone 183968 (TRBV6-6, TRBJ1-5)
CASSSPRGQGQPQHF

SEQ ID NO: 367937 - protein, 14 aa, Homo sapiens
  CDR3 for alpha chain variable domain of TCR clone 183969 (TRAV8-1, TRAJ22)
CAAPSSGPARQLTF

SEQ ID NO: 367938 - protein, 14 aa, Homo sapiens
  CDR3 for beta chain variable domain of TCR clone 183969 (TRBV9, TRBJ2-2)
CASSVGQGAGELFF

SEQ ID NO: 367939 - protein, 11 aa, Homo sapiens
  CDR3 for alpha chain variable domain of TCR clone 183970 (TRAV13-1, TRAJ15)
CAATPGTALIF

SEQ ID NO: 367940 - protein, 15 aa, Homo sapiens
  CDR3 for beta chain variable domain of TCR clone 183970 (TRBV28, TRBJ2-5)
CASSPPWSHQETQYF

SEQ ID NO: 367941 - protein, 14 aa, Homo sapiens
  CDR3 for alpha chain variable domain of TCR clone 183971 (TRAV9-2, TRAJ39)
CALYIYNAGNMLTF

SEQ ID NO: 367942 - protein, 15 aa, Homo sapiens
  CDR3 for beta chain variable domain of TCR clone 183971 (TRBV7-9, TRBJ2-7)
CASSSSGLAVYEQYF

SEQ ID NO: 367943 - protein, 13 aa, Homo sapiens
  CDR3 for alpha chain variable domain of TCR clone 183972 (TRAV12-2, TRAJ4)
CAFRSGGYNKLIF

SEQ ID NO: 367944 - protein, 15 aa, Homo sapiens
  CDR3 for beta chain variable domain of TCR clone 183972 (TRBV10-3, TRBJ2-1)
CAISDVQDRAYEQFF

SEQ ID NO: 367945 - protein, 14 aa, Homo sapiens
  CDR3 for alpha chain variable domain of TCR clone 183973 (TRAV1-2, TRAJ16)
CAVNRFSDGQKLLF

SEQ ID NO: 367946 - protein, 14 aa, Homo sapiens
  CDR3 for beta chain variable domain of TCR clone 183973 (TRBV10-2, TRBJ1-5)
CASSSTGRKQPQHF

SEQ ID NO: 367947 - protein, 14 aa, Homo sapiens
  CDR3 for alpha chain variable domain of TCR clone 183974 (TRAV8-2, TRAJ11)
CVVSEKSGYSTLTF

SEQ ID NO: 367948 - protein, 16 aa, Homo sapiens
  CDR3 for beta chain variable domain of TCR clone 183974 (TRBV28, TRBJ2-1)
CASSSPEFPRDNEQFF

SEQ ID NO: 367949 - protein, 13 aa, Homo sapiens
  CDR3 for alpha chain variable domain of TCR clone 183975 (TRAV12-3, TRAJ49)
CAMSRNTGNQFYF

SEQ ID NO: 367950 - protein, 16 aa, Homo sapiens
  CDR3 for beta chain variable domain of TCR clone 183975 (TRBV5-8, TRBJ2-2)
CGSSLINPGGAGELFF

SEQ ID NO: 367951 - protein, 16 aa, Homo sapiens
  CDR3 for alpha chain variable domain of TCR clone 183976 (TRAV21, TRAJ37)
CAVRTAGSSNTGKLIF

SEQ ID NO: 367952 - protein, 14 aa, Homo sapiens
  CDR3 for beta chain variable domain of TCR clone 183976 (TRBV28, TRBJ1-2)
CASRIQGANYGYTF

SEQ ID NO: 367953 - protein, 12 aa, Homo sapiens
  CDR3 for alpha chain variable domain of TCR clone 183977 (TRAV20, TRAJ33)
CAVRGSNYQLIW

SEQ ID NO: 367954 - protein, 13 aa, Homo sapiens
  CDR3 for beta chain variable domain of TCR clone 183977 (TRBV4-3, TRBJ1-1)
CASSPSGNTEAFF

SEQ ID NO: 367955 - protein, 13 aa, Homo sapiens
  CDR3 for alpha chain variable domain of TCR clone 183978 (TRAV21, TRAJ52)
CAVRPSPAGGTSY

SEQ ID NO: 367956 - protein, 14 aa, Homo sapiens
  CDR3 for beta chain variable domain of TCR clone 183978 (TRBV28, TRBJ1-1)
CASSPRTRWAEAFF

SEQ ID NO: 367957 - protein, 14 aa, Homo sapiens
  CDR3 for alpha chain variable domain of TCR clone 183979 (TRAV1-2, TRAJ8)
CAVREDTGFQKLVF

SEQ ID NO: 367958 - protein, 16 aa, Homo sapiens
  CDR3 for beta chain variable domain of TCR clone 183979 (TRBV12-5, TRBJ2-5)
CASGPRTSGHQETQYF

SEQ ID NO: 367959 - protein, 20 aa, Homo sapiens
  CDR3 for alpha chain variable domain of TCR clone 183980 (TRAV27, TRAJ10)
ASTSVPSRGILTGGGNKLTF

SEQ ID NO: 367960 - protein, 16 aa, Homo sapiens
  CDR3 for beta chain variable domain of TCR clone 183980 (TRBV9, TRBJ2-1)
CASSVGGGGNYNEQFF

SEQ ID NO: 367961 - protein, 12 aa, Homo sapiens
  CDR3 for alpha chain variable domain of TCR clone 183981 (TRAV17, TRAJ4)
CATDGDYNKLIF

SEQ ID NO: 367962 - protein, 13 aa, Homo sapiens
  CDR3 for beta chain variable domain of TCR clone 183981 (TRBV29-1, TRBJ2-2)
CSTTGVNAGELFF

SEQ ID NO: 367963 - protein, 14 aa, Homo sapiens
  CDR3 for alpha chain variable domain of TCR clone 183982 (TRAV12-3, TRAJ10)
SHLPLTGGGNKLTF

SEQ ID NO: 367964 - protein, 13 aa, Homo sapiens
  CDR3 for beta chain variable domain of TCR clone 183982 (TRBV9, TRBJ2-1)
CASSPSGGNEQFL

SEQ ID NO: 367965 - protein, 14 aa, Homo sapiens
  CDR3 for alpha chain variable domain of TCR clone 183983 (TRAV17, TRAJ15)
CATDRGQAGTALIF

SEQ ID NO: 367966 - protein, 13 aa, Homo sapiens
  CDR3 for beta chain variable domain of TCR clone 183983 (TRBV19, TRBJ1-5)
CASSMRGYQHQHF

SEQ ID NO: 367967 - protein, 13 aa, Homo sapiens
  CDR3 for alpha chain variable domain of TCR clone 183984 (TRAV12-3, TRAJ9)
CAMRNTGGFKTIF

SEQ ID NO: 367968 - protein, 15 aa, Homo sapiens
  CDR3 for beta chain variable domain of TCR clone 183984 (TRBV20-1, TRBJ2-7)
CSARERVSGMDEQYF

SEQ ID NO: 367969 - protein, 15 aa, Homo sapiens
  CDR3 for alpha chain variable domain of TCR clone 183985 (TRAV26-2, TRAJ28)
FILVESGAGSYQLTF

SEQ ID NO: 367970 - protein, 16 aa, Homo sapiens
  CDR3 for beta chain variable domain of TCR clone 183985 (TRBV4-2, TRBJ1-2)
FASSQEIGGASYGYSF

SEQ ID NO: 367971 - protein, 14 aa, Homo sapiens
  CDR3 for alpha chain variable domain of TCR clone 183986 (TRAV26-1, TRAJ34)
CIVRVAYNTDKLII

SEQ ID NO: 367972 - protein, 13 aa, Homo sapiens
  CDR3 for beta chain variable domain of TCR clone 183986 (TRBV7-3, TRBJ1-1)
CASSQDWGAEAFF

SEQ ID NO: 367973 - protein, 14 aa, Homo sapiens
  CDR3 for alpha chain variable domain of TCR clone 183987 (TRAV8-2, TRAJ4)
CVVSPSGGYNKRIF

SEQ ID NO: 367974 - protein, 16 aa, Homo sapiens
  CDR3 for beta chain variable domain of TCR clone 183987 (TRBV7-3, TRBJ2-2)
CASSLKRGTLSGELFF

SEQ ID NO: 367975 - protein, 16 aa, Homo sapiens
  CDR3 for alpha chain variable domain of TCR clone 183988 (TRAV23/DV6, TRAJ57)
CSKLYLSQGGSEKLVF

SEQ ID NO: 367976 - protein, 14 aa, Homo sapiens
  CDR3 for beta chain variable domain of TCR clone 183988 (TRBV25-1, TRBJ1-1)
CASTHLGGNAEAFF

SEQ ID NO: 367977 - protein, 13 aa, Homo sapiens
  CDR3 for alpha chain variable domain of TCR clone 183989 (TRAV3, TRAJ20)
CAVRDTPRYKLSF

SEQ ID NO: 367978 - protein, 16 aa, Homo sapiens
  CDR3 for beta chain variable domain of TCR clone 183989 (TRBV6-1, TRBJ2-5)
CASSETLDRGAETQYF

SEQ ID NO: 367979 - protein, 13 aa, Homo sapiens
  CDR3 for alpha chain variable domain of TCR clone 183990 (TRAV12-1, TRAJ33)
CGDAPDSNYQLIL

SEQ ID NO: 367980 - protein, 12 aa, Homo sapiens
  CDR3 for beta chain variable domain of TCR clone 183990 (TRBV11-2, TRBJ2-2)
CASSLGGGELFF

SEQ ID NO: 367981 - protein, 15 aa, Homo sapiens
  CDR3 for alpha chain variable domain of TCR clone 183991 (TRAV26-1, TRAJ31)
CIVRVAMDNNARLMF

SEQ ID NO: 367982 - protein, 16 aa, Homo sapiens
  CDR3 for beta chain variable domain of TCR clone 183991 (TRBV12-5, TRBJ2-5)
CASGPRTSGNQETQYF

SEQ ID NO: 367983 - protein, 14 aa, Homo sapiens
  CDR3 for alpha chain variable domain of TCR clone 183992 (TRAV12-2, TRAJ12)
CAVINWDSSYKLIF

SEQ ID NO: 367984 - protein, 15 aa, Homo sapiens
  CDR3 for beta chain variable domain of TCR clone 183992 (TRBV28, TRBJ2-1)
CASSLDTSSYNEQFF

SEQ ID NO: 367985 - protein, 15 aa, Homo sapiens
  CDR3 for alpha chain variable domain of TCR clone 183993 (TRAV26-1, TRAJ29)
CIVRVEGSGNKHLVF

SEQ ID NO: 367986 - protein, 14 aa, Homo sapiens
  CDR3 for beta chain variable domain of TCR clone 183993 (TRBV18, TRBJ2-5)
CASSPGVSQETQYF

SEQ ID NO: 367987 - protein, 13 aa, Homo sapiens
  CDR3 for alpha chain variable domain of TCR clone 183994 (TRAV30, TRAJ34)
CGTVGYNTDKLIF

SEQ ID NO: 367988 - protein, 16 aa, Homo sapiens
  CDR3 for beta chain variable domain of TCR clone 183994 (TRBV7-9, TRBJ1-2)
CASSLGFSSGEDGFTF

SEQ ID NO: 367989 - protein, 14 aa, Homo sapiens
  CDR3 for alpha chain variable domain of TCR clone 183995 (TRAV36/DV7, TRAJ40)
CAVETTSGTYKYIF

SEQ ID NO: 367990 - protein, 13 aa, Homo sapiens
  CDR3 for beta chain variable domain of TCR clone 183995 (TRBV10-3, TRBJ2-5)
CAMTSGAGESQYF

SEQ ID NO: 367991 - protein, 14 aa, Homo sapiens
  CDR3 for alpha chain variable domain of TCR clone 183996 (TRAV2, TRAJ9)
GAVEDRSGGFKTIF

SEQ ID NO: 367992 - protein, 16 aa, Homo sapiens
  CDR3 for beta chain variable domain of TCR clone 183996 (TRBV15, TRBJ2-7)
CATSRDGGIPSYEQYF

SEQ ID NO: 367993 - protein, 17 aa, Homo sapiens
  CDR3 for alpha chain variable domain of TCR clone 183997 (TRAV27, TRAJ26)
CAGSRAPLDNYGQNFVF

SEQ ID NO: 367994 - protein, 15 aa, Homo sapiens
  CDR3 for beta chain variable domain of TCR clone 183997 (TRBV11-2, TRBJ2-5)
CASSPRSGGLETQYF

SEQ ID NO: 367995 - protein, 13 aa, Homo sapiens
  CDR3 for alpha chain variable domain of TCR clone 183998 (TRAV12-3, TRAJ7)
CAMTPYGNNRLAF

SEQ ID NO: 367996 - protein, 13 aa, Homo sapiens
  CDR3 for beta chain variable domain of TCR clone 183998 (TRBV4-2, TRBJ2-3)
CASSLTTTDTQYF

SEQ ID NO: 367997 - protein, 13 aa, Homo sapiens
  CDR3 for alpha chain variable domain of TCR clone 183999 (TRAV27, TRAJ41)
CAGEGNSGYALNF

SEQ ID NO: 367998 - protein, 15 aa, Homo sapiens
  CDR3 for beta chain variable domain of TCR clone 183999 (TRBV20-1, TRBJ1-4)
CSARREWGVNEKLFF

SEQ ID NO: 367999 - protein, 15 aa, Homo sapiens
  CDR3 for alpha chain variable domain of TCR clone 184000 (TRAV14/DV4, TRAJ12)
CAMREESDSSYKLIF

SEQ ID NO: 368000 - protein, 16 aa, Homo sapiens
  CDR3 for beta chain variable domain of TCR clone 184000 (TRBV11-2, TRBJ1-2)
CASSLDRGGNNYGYTF

SEQ ID NO: 368001 - protein, 14 aa, Homo sapiens
  CDR3 for alpha chain variable domain of TCR clone 184001 (TRAV12-3, TRAJ33)
CAMSAGDSNYQLIW

SEQ ID NO: 368002 - protein, 15 aa, Homo sapiens
  CDR3 for beta chain variable domain of TCR clone 184001 (TRBV29-1, TRBJ2-1)
CSVEAPRGSPNEQFF

SEQ ID NO: 368003 - protein, 18 aa, Homo sapiens
  CDR3 for alpha chain variable domain of TCR clone 184002 (TRAV13-1, TRAJ52)
CAAKNPNAGGTSYGKLTF

SEQ ID NO: 368004 - protein, 14 aa, Homo sapiens
  CDR3 for beta chain variable domain of TCR clone 184002 (TRBV19, TRBJ2-7)
CASSIFTGTYEQYF

SEQ ID NO: 368005 - protein, 13 aa, Homo sapiens
  CDR3 for alpha chain variable domain of TCR clone 184003 (TRAV3, TRAJ3)
CAVADSSASKIIF

SEQ ID NO: 368006 - protein, 13 aa, Homo sapiens
  CDR3 for beta chain variable domain of TCR clone 184003 (TRBV24-1, TRBJ2-2)
CATSDWSTGELFF

SEQ ID NO: 368007 - protein, 17 aa, Homo sapiens
  CDR3 for alpha chain variable domain of TCR clone 184004 (TRAV4, TRAJ18)
CLVGERSVGSTLGRRYF

SEQ ID NO: 368008 - protein, 11 aa, Homo sapiens
  CDR3 for beta chain variable domain of TCR clone 184004 (TRBV29-1, TRBJ2-5)
CSEDRTGTQYF

SEQ ID NO: 368009 - protein, 14 aa, Homo sapiens
  CDR3 for alpha chain variable domain of TCR clone 184005 (TRAV13-1, TRAJ23)
CASSRLGRGGKLIF

SEQ ID NO: 368010 - protein, 13 aa, Homo sapiens
  CDR3 for beta chain variable domain of TCR clone 184005 (TRBV20-1, TRBJ1-1)
CSAPLGGGTEAFF

SEQ ID NO: 368011 - protein, 15 aa, Homo sapiens
  CDR3 for alpha chain variable domain of TCR clone 184006 (TRAV12-1, TRAJ9)
CVVSFGGTGGFKNIF

SEQ ID NO: 368012 - protein, 12 aa, Homo sapiens
  CDR3 for beta chain variable domain of TCR clone 184006 (TRBV12-4, TRBJ2-7)
CASSLGGYEQYF

SEQ ID NO: 368013 - protein, 13 aa, Homo sapiens
  CDR3 for alpha chain variable domain of TCR clone 184007 (TRAV13-1, TRAJ9)
CAASGTGGFKAIF

SEQ ID NO: 368014 - protein, 12 aa, Homo sapiens
  CDR3 for beta chain variable domain of TCR clone 184007 (TRBV12-4, TRBJ2-7)
CQQFRKGEEQYF

SEQ ID NO: 368015 - protein, 14 aa, Homo sapiens
  CDR3 for alpha chain variable domain of TCR clone 184008 (TRAV4, TRAJ10)
CLMGDTGGGNKLTF

SEQ ID NO: 368016 - protein, 13 aa, Homo sapiens
  CDR3 for beta chain variable domain of TCR clone 184008 (TRBV10-2, TRBJ2-5)
CASSVGPQETQYF

SEQ ID NO: 368017 - protein, 15 aa, Homo sapiens
  CDR3 for alpha chain variable domain of TCR clone 184009 (TRAV2, TRAJ15)
CAVEDRGQAGTALIF

SEQ ID NO: 368018 - protein, 12 aa, Homo sapiens
  CDR3 for beta chain variable domain of TCR clone 184009 (TRBV14, TRBJ2-5)
CASSHLKGTQYF

SEQ ID NO: 368019 - protein, 18 aa, Homo sapiens
  CDR3 for alpha chain variable domain of TCR clone 184010 (TRAV29/DV5, TRAJ37)
CSVLLCSEGSGNTGKLIF

SEQ ID NO: 368020 - protein, 14 aa, Homo sapiens
  CDR3 for beta chain variable domain of TCR clone 184010 (TRBV5-1, TRBJ1-1)
CASGLAVGSGEAFF

SEQ ID NO: 368021 - protein, 13 aa, Homo sapiens
  CDR3 for alpha chain variable domain of TCR clone 184011 (TRAV8-4, TRAJ10)
CAAFTGGGNKLTF

SEQ ID NO: 368022 - protein, 13 aa, Homo sapiens
  CDR3 for beta chain variable domain of TCR clone 184011 (TRBV7-9, TRBJ1-2)
CPSSLKQNYGYTF

SEQ ID NO: 368023 - protein, 13 aa, Homo sapiens
  CDR3 for alpha chain variable domain of TCR clone 184012 (TRAV21, TRAJ27)
CAARPGTAGKSTF

SEQ ID NO: 368024 - protein, 14 aa, Homo sapiens
  CDR3 for beta chain variable domain of TCR clone 184012 (TRBV7-8, TRBJ2-7)
CASSPRDRVYEQYS

SEQ ID NO: 368025 - protein, 12 aa, Homo sapiens
  CDR3 for alpha chain variable domain of TCR clone 184013 (TRAV21, TRAJ33)
CAKMDSNYQLIW

SEQ ID NO: 368026 - protein, 15 aa, Homo sapiens
  CDR3 for beta chain variable domain of TCR clone 184013 (TRBV12-4, TRBJ2-5)
CASSPPTGLHETQYF

SEQ ID NO: 368027 - protein, 17 aa, Homo sapiens
  CDR3 for alpha chain variable domain of TCR clone 184014 (TRAV8-6, TRAJ58)
CAVRPWVGETSGSRLTF

SEQ ID NO: 368028 - protein, 14 aa, Homo sapiens
  CDR3 for beta chain variable domain of TCR clone 184014 (TRBV4-2, TRBJ2-1)
CASGLDRAYNEQFF

SEQ ID NO: 368029 - protein, 11 aa, Homo sapiens
  CDR3 for alpha chain variable domain of TCR clone 184015 (TRAV35, TRAJ30)
CAPGGDDKIIF

SEQ ID NO: 368030 - protein, 12 aa, Homo sapiens
  CDR3 for beta chain variable domain of TCR clone 184015 (TRBV11-2, TRBJ2-5)
CASSLGQETQYF

SEQ ID NO: 368031 - protein, 13 aa, Homo sapiens
  CDR3 for alpha chain variable domain of TCR clone 184016 (TRAV19, TRAJ57)
CALLQGGSETLVF

SEQ ID NO: 368032 - protein, 16 aa, Homo sapiens
  CDR3 for beta chain variable domain of TCR clone 184016 (TRBV4-2, TRBJ2-1)
CASSQETATPYNEQFF

SEQ ID NO: 368033 - protein, 12 aa, Homo sapiens
  CDR3 for alpha chain variable domain of TCR clone 184017 (TRAV13-1, TRAJ11)
CAGPSGYITLTL

SEQ ID NO: 368034 - protein, 13 aa, Homo sapiens
  CDR3 for beta chain variable domain of TCR clone 184017 (TRBV12-4, TRBJ1-5)
CASSPDRAQPQHF

SEQ ID NO: 368035 - protein, 13 aa, Homo sapiens
  CDR3 for alpha chain variable domain of TCR clone 184018 (TRAV3, TRAJ26)
CAVRGAEGQNFVF

SEQ ID NO: 368036 - protein, 12 aa, Homo sapiens
  CDR3 for beta chain variable domain of TCR clone 184018 (TRBV7-9, TRBJ2-7)
CASSFGSYEQYF

SEQ ID NO: 368037 - protein, 13 aa, Homo sapiens
  CDR3 for alpha chain variable domain of TCR clone 184019 (TRAV36/DV7, TRAJ7)
CAGTRYGNNRLAF

SEQ ID NO: 368038 - protein, 17 aa, Homo sapiens
  CDR3 for beta chain variable domain of TCR clone 184019 (TRBV11-3, TRBJ2-7)
CASSPGPASPTSSTSGR

SEQ ID NO: 368039 - protein, 14 aa, Homo sapiens
  CDR3 for alpha chain variable domain of TCR clone 184020 (TRAV12-3, TRAJ10)
SHLPLTGGGNKLTF

SEQ ID NO: 368040 - protein, 12 aa, Homo sapiens
  CDR3 for beta chain variable domain of TCR clone 184020 (TRBV7-3, TRBJ2-5)
CASSSPGGTQFF

SEQ ID NO: 368041 - protein, 13 aa, Homo sapiens
  CDR3 for alpha chain variable domain of TCR clone 184021 (TRAV12-1, TRAJ9)
CVVRNTGGFKTIF

SEQ ID NO: 368042 - protein, 14 aa, Homo sapiens
  CDR3 for beta chain variable domain of TCR clone 184021 (TRBV20-1, TRBJ2-1)
CSAQIGGAANEQFF

SEQ ID NO: 368043 - protein, 18 aa, Homo sapiens
  CDR3 for alpha chain variable domain of TCR clone 184022 (TRAV21, TRAJ52)
CAVGPSPAGGTSSGKLTF

SEQ ID NO: 368044 - protein, 17 aa, Homo sapiens
  CDR3 for beta chain variable domain of TCR clone 184022 (TRBV13, TRBJ2-3)
CASSLSRVAGGRNTQYF

SEQ ID NO: 368045 - protein, 12 aa, Homo sapiens
  CDR3 for alpha chain variable domain of TCR clone 184023 (TRAV26-1, TRAJ36)
CIVRVRADNLFL

SEQ ID NO: 368046 - protein, 13 aa, Homo sapiens
  CDR3 for beta chain variable domain of TCR clone 184023 (TRBV11-2, TRBJ2-5)
CASSRGPSETQYF

SEQ ID NO: 368047 - protein, 14 aa, Homo sapiens
  CDR3 for alpha chain variable domain of TCR clone 184024 (TRAV2, TRAJ22)
CAVGRGGSARQLTF

SEQ ID NO: 368048 - protein, 12 aa, Homo sapiens
  CDR3 for beta chain variable domain of TCR clone 184024 (TRBV19, TRBJ2-1)
CASSMQDTKQFF

SEQ ID NO: 368049 - protein, 14 aa, Homo sapiens
  CDR3 for alpha chain variable domain of TCR clone 184025 (TRAV17, TRAJ56)
CATVPAGANSKLTF

SEQ ID NO: 368050 - protein, 20 aa, Homo sapiens
  CDR3 for beta chain variable domain of TCR clone 184025 (TRBV7-8, TRBJ2-2)
CASSHLFPGPTIHITGELFF

SEQ ID NO: 368051 - protein, 12 aa, Homo sapiens
  CDR3 for alpha chain variable domain of TCR clone 184026 (TRAV29/DV5, TRAJ49)
CAATYTGNQFYV

SEQ ID NO: 368052 - protein, 19 aa, Homo sapiens
  CDR3 for beta chain variable domain of TCR clone 184026 (TRBV25-1, TRBJ2-2)
CAILVYRVDRGRKTGELFF

SEQ ID NO: 368053 - protein, 14 aa, Homo sapiens
  CDR3 for alpha chain variable domain of TCR clone 184027 (TRAV12-2, TRAJ13)
CAVKKTGGYQKVTF

SEQ ID NO: 368054 - protein, 15 aa, Homo sapiens
  CDR3 for beta chain variable domain of TCR clone 184027 (TRBV6-3, TRBJ2-7)
CASSSPGTVLYEQYF

SEQ ID NO: 368055 - protein, 14 aa, Homo sapiens
  CDR3 for alpha chain variable domain of TCR clone 184028 (TRAV13-1, TRAJ12)
CAASYMDSSYKLIF

SEQ ID NO: 368056 - protein, 13 aa, Homo sapiens
  CDR3 for beta chain variable domain of TCR clone 184028 (TRBV2, TRBJ2-5)
CASSGGIQESQYF

SEQ ID NO: 368057 - protein, 13 aa, Homo sapiens
  CDR3 for alpha chain variable domain of TCR clone 184029 (TRAV20, TRAJ40)
CAVPFSGTYKYIF

SEQ ID NO: 368058 - protein, 13 aa, Homo sapiens
  CDR3 for beta chain variable domain of TCR clone 184029 (TRBV15, TRBJ2-5)
CATSQIEEETQYF

SEQ ID NO: 368059 - protein, 15 aa, Homo sapiens
  CDR3 for alpha chain variable domain of TCR clone 184030 (TRAV8-3, TRAJ23)
CAVGAVYNQGGKLIF

SEQ ID NO: 368060 - protein, 15 aa, Homo sapiens
  CDR3 for beta chain variable domain of TCR clone 184030 (TRBV3-1, TRBJ2-2)
CASSQDWTRAGELFF

SEQ ID NO: 368061 - protein, 16 aa, Homo sapiens
  CDR3 for alpha chain variable domain of TCR clone 184031 (TRAV16, TRAJ52)
CALSAAGGTSYGKLTF

SEQ ID NO: 368062 - protein, 14 aa, Homo sapiens
  CDR3 for beta chain variable domain of TCR clone 184031 (TRBV7-3, TRBJ2-1)
CASSALAGGPEQFF

SEQ ID NO: 368063 - protein, 15 aa, Homo sapiens
  CDR3 for alpha chain variable domain of TCR clone 184032 (TRAV23/DV6, TRAJ18)
CAARYRGSTRGRLYF

SEQ ID NO: 368064 - protein, 12 aa, Homo sapiens
  CDR3 for beta chain variable domain of TCR clone 184032 (TRBV29-1, TRBJ2-3)
CSVTGGADTQYF

SEQ ID NO: 368065 - protein, 12 aa, Homo sapiens
  CDR3 for alpha chain variable domain of TCR clone 184033 (TRAV13-2, TRAJ23)
CAERHRGRKVIF

SEQ ID NO: 368066 - protein, 16 aa, Homo sapiens
  CDR3 for beta chain variable domain of TCR clone 184033 (TRBV20-1, TRBJ1-4)
CSAPGQGLLTNEKLFF

SEQ ID NO: 368067 - protein, 14 aa, Homo sapiens
  CDR3 for alpha chain variable domain of TCR clone 184034 (TRAV8-3, TRAJ10)
CAVGNAGGGNKFTF

SEQ ID NO: 368068 - protein, 14 aa, Homo sapiens
  CDR3 for beta chain variable domain of TCR clone 184034 (TRBV7-2, TRBJ2-7)
CASRSQGAAYEQYF

SEQ ID NO: 368069 - protein, 16 aa, Homo sapiens
  CDR3 for alpha chain variable domain of TCR clone 184035 (TRAV12-3, TRAJ53)
CAMSPGSGGSNYKLTF

SEQ ID NO: 368070 - protein, 16 aa, Homo sapiens
  CDR3 for beta chain variable domain of TCR clone 184035 (TRBV29-1, TRBJ2-5)
SAARTDGDPVLRARHA

SEQ ID NO: 368071 - protein, 13 aa, Homo sapiens
  CDR3 for alpha chain variable domain of TCR clone 184036 (TRAV3, TRAJ27)
CAVTNTNAGKSTF

SEQ ID NO: 368072 - protein, 17 aa, Homo sapiens
  CDR3 for beta chain variable domain of TCR clone 184036 (TRBV11-3, TRBJ2-5)
CASSLPGVRGGKETQYF

SEQ ID NO: 368073 - protein, 14 aa, Homo sapiens
  CDR3 for alpha chain variable domain of TCR clone 184037 (TRAV12-2, TRAJ45)
CAVYSGGGADGLTF

SEQ ID NO: 368074 - protein, 14 aa, Homo sapiens
  CDR3 for beta chain variable domain of TCR clone 184037 (TRBV6-5, TRBJ1-2)
CASTRGGGSDGHTF

SEQ ID NO: 368075 - protein, 14 aa, Homo sapiens
  CDR3 for alpha chain variable domain of TCR clone 184038 (TRAV3, TRAJ34)
CAVRAPGNTDRLIF

SEQ ID NO: 368076 - protein, 14 aa, Homo sapiens
  CDR3 for beta chain variable domain of TCR clone 184038 (TRBV5-4, TRBJ1-1)
CASSLDSRRDEAFF

SEQ ID NO: 368077 - protein, 15 aa, Homo sapiens
  CDR3 for alpha chain variable domain of TCR clone 184039 (TRAV8-2, TRAJ4)
CVVSEFSGGCNKLIF

SEQ ID NO: 368078 - protein, 19 aa, Homo sapiens
  CDR3 for beta chain variable domain of TCR clone 184039 (TRBV6-3, TRBJ1-5)
CASSYVQGAPFSASQPQHF

SEQ ID NO: 368079 - protein, 13 aa, Homo sapiens
  CDR3 for alpha chain variable domain of TCR clone 184040 (TRAV21, TRAJ27)
CAARPGNAGKSTF

SEQ ID NO: 368080 - protein, 14 aa, Homo sapiens
  CDR3 for beta chain variable domain of TCR clone 184040 (TRBV12-4, TRBJ2-3)
CASSLGQGTDTQYF

SEQ ID NO: 368081 - protein, 14 aa, Homo sapiens
  CDR3 for alpha chain variable domain of TCR clone 184041 (TRAV9-2, TRAJ39)
CARYIYNAGNMLTF

SEQ ID NO: 368082 - protein, 15 aa, Homo sapiens
  CDR3 for beta chain variable domain of TCR clone 184041 (TRBV27, TRBJ1-6)
CASSFDRGLGSPLHF

SEQ ID NO: 368083 - protein, 16 aa, Homo sapiens
  CDR3 for alpha chain variable domain of TCR clone 184042 (TRAV4, TRAJ22)
CLVGDLYSGSARQLTF

SEQ ID NO: 368084 - protein, 13 aa, Homo sapiens
  CDR3 for beta chain variable domain of TCR clone 184042 (TRBV12-5, TRBJ2-3)
CASQKRGTDTQYF

SEQ ID NO: 368085 - protein, 11 aa, Homo sapiens
  CDR3 for alpha chain variable domain of TCR clone 184043 (TRAV3, TRAJ21)
FAVGNFNKFYF

SEQ ID NO: 368086 - protein, 16 aa, Homo sapiens
  CDR3 for beta chain variable domain of TCR clone 184043 (TRBV7-6, TRBJ2-1)
CASSAPGPSSYNEQFF

SEQ ID NO: 368087 - protein, 12 aa, Homo sapiens
  CDR3 for alpha chain variable domain of TCR clone 184044 (TRAV17, TRAJ20)
CATDGDDYKLSF

SEQ ID NO: 368088 - protein, 18 aa, Homo sapiens
  CDR3 for beta chain variable domain of TCR clone 184044 (TRBV6-5, TRBJ2-5)
CASSYSQAGGAYQETQYF

SEQ ID NO: 368089 - protein, 12 aa, Homo sapiens
  CDR3 for alpha chain variable domain of TCR clone 184045 (TRAV1-2, TRAJ33)
CAALDSNYQLIW

SEQ ID NO: 368090 - protein, 16 aa, Homo sapiens
  CDR3 for beta chain variable domain of TCR clone 184045 (TRBV19, TRBJ2-7)
WASSLIAGTYFYEQYF

SEQ ID NO: 368091 - protein, 15 aa, Homo sapiens
  CDR3 for alpha chain variable domain of TCR clone 184046 (TRAV8-3, TRAJ27)
CAVGPSKTNAGKSTV

SEQ ID NO: 368092 - protein, 13 aa, Homo sapiens
  CDR3 for beta chain variable domain of TCR clone 184046 (TRBV20-1, TRBJ1-1)
CSAPLGGGTEAFF

SEQ ID NO: 368093 - protein, 17 aa, Homo sapiens
  CDR3 for alpha chain variable domain of TCR clone 184047 (TRAV1-1, TRAJ11)
CAGYSTLTFGKGTMLLV

SEQ ID NO: 368094 - protein, 13 aa, Homo sapiens
  CDR3 for beta chain variable domain of TCR clone 184047 (TRBV7-3, TRBJ1-1)
CASSQDWGAEAFF

SEQ ID NO: 368095 - protein, 14 aa, Homo sapiens
  CDR3 for alpha chain variable domain of TCR clone 184048 (TRAV13-2, TRAJ32)
CAENHGGATNKLIF

SEQ ID NO: 368096 - protein, 16 aa, Homo sapiens
  CDR3 for beta chain variable domain of TCR clone 184048 (TRBV7-2, TRBJ2-1)
CASSLVAGAGYNEQFF

SEQ ID NO: 368097 - protein, 15 aa, Homo sapiens
  CDR3 for alpha chain variable domain of TCR clone 184049 (TRAV25, TRAJ53)
YAATGGGGSNYKLTF

SEQ ID NO: 368098 - protein, 19 aa, Homo sapiens
  CDR3 for beta chain variable domain of TCR clone 184049 (TRBV7-2, TRBJ2-3)
CASSFLSRNWGGGTDTQYF

SEQ ID NO: 368099 - protein, 12 aa, Homo sapiens
  CDR3 for alpha chain variable domain of TCR clone 184050 (TRAV30, TRAJ43)
CGTEERGNDMRF

SEQ ID NO: 368100 - protein, 13 aa, Homo sapiens
  CDR3 for beta chain variable domain of TCR clone 184050 (TRBV27, TRBJ2-7)
CASSFTQGYEQYF

SEQ ID NO: 368101 - protein, 16 aa, Homo sapiens
  CDR3 for alpha chain variable domain of TCR clone 184051 (TRAV20, TRAJ28)
CAVRDPSGAGSYQLTF

SEQ ID NO: 368102 - protein, 16 aa, Homo sapiens
  CDR3 for beta chain variable domain of TCR clone 184051 (TRBV29-1, TRBJ2-2)
CSVETRASGNTGELFF

SEQ ID NO: 368103 - protein, 12 aa, Homo sapiens
  CDR3 for alpha chain variable domain of TCR clone 184052 (TRAV21, TRAJ11)
CAVRGATSTLTF

SEQ ID NO: 368104 - protein, 15 aa, Homo sapiens
  CDR3 for beta chain variable domain of TCR clone 184052 (TRBV6-1, TRBJ2-7)
CASSEPIAATTEQYF

SEQ ID NO: 368105 - protein, 14 aa, Homo sapiens
  CDR3 for alpha chain variable domain of TCR clone 184053 (TRAV12-2, TRAJ13)
CAVKKTGGDQKVTF

SEQ ID NO: 368106 - protein, 13 aa, Homo sapiens
  CDR3 for beta chain variable domain of TCR clone 184053 (TRBV4-2, TRBJ1-1)
CASSQAGNTEAFF

SEQ ID NO: 368107 - protein, 14 aa, Homo sapiens
  CDR3 for alpha chain variable domain of TCR clone 184054 (TRAV2, TRAJ37)
CAVVFASNTGKLIF

SEQ ID NO: 368108 - protein, 15 aa, Homo sapiens
  CDR3 for beta chain variable domain of TCR clone 184054 (TRBV20-1, TRBJ1-1)
CSASRGVTGNTEAFF

SEQ ID NO: 368109 - protein, 17 aa, Homo sapiens
  CDR3 for alpha chain variable domain of TCR clone 184055 (TRAV13-1, TRAJ28)
CATSPPYSGAGSYQLTF

SEQ ID NO: 368110 - protein, 14 aa, Homo sapiens
  CDR3 for beta chain variable domain of TCR clone 184055 (TRBV12-5, TRBJ2-5)
CASGSRTHQETQYF

SEQ ID NO: 368111 - protein, 21 aa, Homo sapiens
  CDR3 for alpha chain variable domain of TCR clone 184056 (TRAV12-1, TRAJ32)
SSVIQPHTSMNYGGATNKLIF

SEQ ID NO: 368112 - protein, 15 aa, Homo sapiens
  CDR3 for beta chain variable domain of TCR clone 184056 (TRBV7-9, TRBJ2-2)
CASGPLDTFPGELFF

SEQ ID NO: 368113 - protein, 13 aa, Homo sapiens
  CDR3 for alpha chain variable domain of TCR clone 184057 (TRAV27, TRAJ3)
ASLRGSSASKIIF

SEQ ID NO: 368114 - protein, 16 aa, Homo sapiens
  CDR3 for beta chain variable domain of TCR clone 184057 (TRBV7-9, TRBJ2-1)
CASSDVAGGSYNEQFF

SEQ ID NO: 368115 - protein, 13 aa, Homo sapiens
  CDR3 for alpha chain variable domain of TCR clone 184058 (TRAV12-2, TRAJ39)
CAVNNNAGNMLTF

SEQ ID NO: 368116 - protein, 22 aa, Homo sapiens
  CDR3 for beta chain variable domain of TCR clone 184058 (TRBV7-3, TRBJ2-1)
GGTQPCISGPAARGGGGNEQFF

SEQ ID NO: 368117 - protein, 15 aa, Homo sapiens
  CDR3 for alpha chain variable domain of TCR clone 184059 (TRAV25, TRAJ52)
CAGTSGGTSYGKLTF

SEQ ID NO: 368118 - protein, 12 aa, Homo sapiens
  CDR3 for beta chain variable domain of TCR clone 184059 (TRBV7-9, TRBJ2-7)
CASSFGSYEQYF

SEQ ID NO: 368119 - protein, 22 aa, Homo sapiens
  CDR3 for alpha chain variable domain of TCR clone 184060 (TRAV2, TRAJ38)
CAVEDFPNAGNNHIQNPDPAVY

SEQ ID NO: 368120 - protein, 13 aa, Homo sapiens
  CDR3 for beta chain variable domain of TCR clone 184060 (TRBV19, TRBJ2-5)
CASSETAPETQYF

SEQ ID NO: 368121 - protein, 12 aa, Homo sapiens
  CDR3 for alpha chain variable domain of TCR clone 184061 (TRAV12-3, TRAJ3)
CAIDSSASKIIF

SEQ ID NO: 368122 - protein, 14 aa, Homo sapiens
  CDR3 for beta chain variable domain of TCR clone 184061 (TRBV7-9, TRBJ2-3)
CASSLEDGTDTQYF

SEQ ID NO: 368123 - protein, 15 aa, Homo sapiens
  CDR3 for alpha chain variable domain of TCR clone 184062 (TRAV26-1, TRAJ48)
CIAGWSWFGNEKLTF

SEQ ID NO: 368124 - protein, 12 aa, Homo sapiens
  CDR3 for beta chain variable domain of TCR clone 184062 (TRBV19, TRBJ2-5)
CASSISEETQYF

SEQ ID NO: 368125 - protein, 11 aa, Homo sapiens
  CDR3 for alpha chain variable domain of TCR clone 184063 (TRAV12-3, TRAJ43)
CAMSVSNDMRF

SEQ ID NO: 368126 - protein, 15 aa, Homo sapiens
  CDR3 for beta chain variable domain of TCR clone 184063 (TRBV2, TRBJ2-7)
CASSEGLARSYEQYF

SEQ ID NO: 368127 - protein, 12 aa, Homo sapiens
  CDR3 for alpha chain variable domain of TCR clone 184064 (TRAV27, TRAJ58)
CAGDRDTSRLTF

SEQ ID NO: 368128 - protein, 15 aa, Homo sapiens
  CDR3 for beta chain variable domain of TCR clone 184064 (TRBV3-1, TRBJ2-7)
CASSQGAGAQYEQYC

SEQ ID NO: 368129 - protein, 15 aa, Homo sapiens
  CDR3 for alpha chain variable domain of TCR clone 184065 (TRAV26-1, TRAJ29)
CIVRVEGSGNTPLVF

SEQ ID NO: 368130 - protein, 13 aa, Homo sapiens
  CDR3 for beta chain variable domain of TCR clone 184065 (TRBV18, TRBJ2-5)
CQLPGVSQETQYF

SEQ ID NO: 368131 - protein, 14 aa, Homo sapiens
  CDR3 for alpha chain variable domain of TCR clone 184066 (TRAV1-2, TRAJ8)
CAVREDTGFQKLGF

SEQ ID NO: 368132 - protein, 15 aa, Homo sapiens
  CDR3 for beta chain variable domain of TCR clone 184066 (TRBV19, TRBJ2-1)
CASSTGTSSYNEQFF

SEQ ID NO: 368133 - protein, 17 aa, Homo sapiens
  CDR3 for alpha chain variable domain of TCR clone 184067 (TRAV3, TRAJ6)
CAVRDGPRAGGSYIPTL

SEQ ID NO: 368134 - protein, 20 aa, Homo sapiens
  CDR3 for beta chain variable domain of TCR clone 184067 (TRBV28, TRBJ2-1)
CASTPIGRSPGLAGGNEQSF

SEQ ID NO: 368135 - protein, 12 aa, Homo sapiens
  CDR3 for alpha chain variable domain of TCR clone 184068 (TRAV8-3, TRAJ26)
CAGDNYVKNFVF

SEQ ID NO: 368136 - protein, 13 aa, Homo sapiens
  CDR3 for beta chain variable domain of TCR clone 184068 (TRBV20-1, TRBJ2-5)
CSARGDYQETQYF

SEQ ID NO: 368137 - protein, 14 aa, Homo sapiens
  CDR3 for alpha chain variable domain of TCR clone 184069 (TRAV12-1, TRAJ23)
CVVIVYNQGGKLIF

SEQ ID NO: 368138 - protein, 15 aa, Homo sapiens
  CDR3 for beta chain variable domain of TCR clone 184069 (TRBV14, TRBJ2-7)
CQQPRQQGWVYEHYF

SEQ ID NO: 368139 - protein, 13 aa, Homo sapiens
  CDR3 for alpha chain variable domain of TCR clone 184070 (TRAV13-2, TRAJ48)
CVEMDFGNEKLTF

SEQ ID NO: 368140 - protein, 13 aa, Homo sapiens
  CDR3 for beta chain variable domain of TCR clone 184070 (TRBV13, TRBJ2-5)
CASSPEVGETQYF

SEQ ID NO: 368141 - protein, 14 aa, Homo sapiens
  CDR3 for alpha chain variable domain of TCR clone 184071 (TRAV24, TRAJ42)
CAQNYGGSQGNLIF

SEQ ID NO: 368142 - protein, 15 aa, Homo sapiens
  CDR3 for beta chain variable domain of TCR clone 184071 (TRBV19, TRBJ1-5)
CARSIPGGAGQPQHF

SEQ ID NO: 368143 - protein, 12 aa, Homo sapiens
  CDR3 for alpha chain variable domain of TCR clone 184072 (TRAV21, TRAJ23)
CAVMLQGGKLIF

SEQ ID NO: 368144 - protein, 14 aa, Homo sapiens
  CDR3 for beta chain variable domain of TCR clone 184072 (TRBV7-9, TRBJ1-4)
CAITEGEADEKLFF

SEQ ID NO: 368145 - protein, 17 aa, Homo sapiens
  CDR3 for alpha chain variable domain of TCR clone 184073 (TRAV8-4, TRAJ22)
CAVSESPFAGSARQLTF

SEQ ID NO: 368146 - protein, 15 aa, Homo sapiens
  CDR3 for beta chain variable domain of TCR clone 184073 (TRBV7-9, TRBJ1-5)
CASSQGHQPNQPQHF

SEQ ID NO: 368147 - protein, 12 aa, Homo sapiens
  CDR3 for alpha chain variable domain of TCR clone 184074 (TRAV13-2, TRAJ23)
CAERHRGGKLIF

SEQ ID NO: 368148 - protein, 16 aa, Homo sapiens
  CDR3 for beta chain variable domain of TCR clone 184074 (TRBV7-2, TRBJ2-6)
CAILSGVSSGANVLPF

SEQ ID NO: 368149 - protein, 13 aa, Homo sapiens
  CDR3 for alpha chain variable domain of TCR clone 184075 (TRAV8-3, TRAJ31)
CAVGARNNARLMF

SEQ ID NO: 368150 - protein, 14 aa, Homo sapiens
  CDR3 for beta chain variable domain of TCR clone 184075 (TRBV12-5, TRBJ2-5)
CASGSRTHQGTQYF

SEQ ID NO: 368151 - protein, 13 aa, Homo sapiens
  CDR3 for alpha chain variable domain of TCR clone 184076 (TRAV8-3, TRAJ48)
CAVVPFGKEKLTF

SEQ ID NO: 368152 - protein, 14 aa, Homo sapiens
  CDR3 for beta chain variable domain of TCR clone 184076 (TRBV18, TRBJ2-7)
CASSPSGGACEQYF

SEQ ID NO: 368153 - protein, 15 aa, Homo sapiens
  CDR3 for alpha chain variable domain of TCR clone 184077 (TRAV38-1, TRAJ45)
CAFMKGGGGADGLTF

SEQ ID NO: 368154 - protein, 13 aa, Homo sapiens
  CDR3 for beta chain variable domain of TCR clone 184077 (TRBV7-9, TRBJ1-2)
CASSLKQNYGYTC

SEQ ID NO: 368155 - protein, 15 aa, Homo sapiens
  CDR3 for alpha chain variable domain of TCR clone 184078 (TRAV26-1, TRAJ37)
CIVKTGSSNTGKLIF

SEQ ID NO: 368156 - protein, 12 aa, Homo sapiens
  CDR3 for beta chain variable domain of TCR clone 184078 (TRBV7-8, TRBJ2-7)
CASSLGDKEQYF

SEQ ID NO: 368157 - protein, 14 aa, Homo sapiens
  CDR3 for alpha chain variable domain of TCR clone 184079 (TRAV17, TRAJ57)
CATDPQGGSEKLVF

SEQ ID NO: 368158 - protein, 15 aa, Homo sapiens
  CDR3 for beta chain variable domain of TCR clone 184079 (TRBV11-3, TRBJ2-3)
CASLKDGREGDTQYF

SEQ ID NO: 368159 - protein, 16 aa, Homo sapiens
  CDR3 for alpha chain variable domain of TCR clone 184080 (TRAV17, TRAJ52)
CATDPMGGTSYGKLTF

SEQ ID NO: 368160 - protein, 15 aa, Homo sapiens
  CDR3 for beta chain variable domain of TCR clone 184080 (TRBV7-2, TRBJ2-3)
CASSSTGLETDTQYF

SEQ ID NO: 368161 - protein, 13 aa, Homo sapiens
  CDR3 for alpha chain variable domain of TCR clone 184081 (TRAV3, TRAJ21)
CAVREPDFNKFYF

SEQ ID NO: 368162 - protein, 15 aa, Homo sapiens
  CDR3 for beta chain variable domain of TCR clone 184081 (TRBV4-3, TRBJ2-2)
CASSQGQVGTGELFF

SEQ ID NO: 368163 - protein, 12 aa, Homo sapiens
  CDR3 for alpha chain variable domain of TCR clone 184082 (TRAV8-3, TRAJ26)
CSGDNYGQNFVF

SEQ ID NO: 368164 - protein, 15 aa, Homo sapiens
  CDR3 for beta chain variable domain of TCR clone 184082 (TRBV20-1, TRBJ2-3)
CSARRGEAITDTQYF

SEQ ID NO: 368165 - protein, 17 aa, Homo sapiens
  CDR3 for alpha chain variable domain of TCR clone 184083 (TRAV26-1, TRAJ53)
CIFRVEDSGGSNYKLTF

SEQ ID NO: 368166 - protein, 15 aa, Homo sapiens
  CDR3 for beta chain variable domain of TCR clone 184083 (TRBV20-1, TRBJ2-7)
CSARVPAAYFYEQYF

SEQ ID NO: 368167 - protein, 16 aa, Homo sapiens
  CDR3 for alpha chain variable domain of TCR clone 184084 (TRAV12-1, TRAJ42)
CVVTPYYGGSQGNLIF

SEQ ID NO: 368168 - protein, 13 aa, Homo sapiens
  CDR3 for beta chain variable domain of TCR clone 184084 (TRBV6-5, TRBJ2-5)
CASSPQGGETQYF

SEQ ID NO: 368169 - protein, 12 aa, Homo sapiens
  CDR3 for alpha chain variable domain of TCR clone 184085 (TRAV2, TRAJ10)
CASTGGGNKHTF

SEQ ID NO: 368170 - protein, 14 aa, Homo sapiens
  CDR3 for beta chain variable domain of TCR clone 184085 (TRBV7-2, TRBJ2-2)
CASRGQGAAGELFF

SEQ ID NO: 368171 - protein, 15 aa, Homo sapiens
  CDR3 for alpha chain variable domain of TCR clone 184086 (TRAV26-1, TRAJ17)
CIVRVVKAAGNKLTF

SEQ ID NO: 368172 - protein, 17 aa, Homo sapiens
  CDR3 for beta chain variable domain of TCR clone 184086 (TRBV28, TRBJ2-5)
CASSTPEGDALQETQYF

SEQ ID NO: 368173 - protein, 11 aa, Homo sapiens
  CDR3 for alpha chain variable domain of TCR clone 184087 (TRAV3, TRAJ21)
CAVGHFNKFYF

SEQ ID NO: 368174 - protein, 16 aa, Homo sapiens
  CDR3 for beta chain variable domain of TCR clone 184087 (TRBV4-1, TRBJ1-2)
CASSQDAGQVLYGYTF

SEQ ID NO: 368175 - protein, 12 aa, Homo sapiens
  CDR3 for alpha chain variable domain of TCR clone 184088 (TRAV17, TRAJ12)
CATLRSSSKLIF

SEQ ID NO: 368176 - protein, 16 aa, Homo sapiens
  CDR3 for beta chain variable domain of TCR clone 184088 (TRBV28, TRBJ2-7)
CASSLFFETGGPEQHF

SEQ ID NO: 368177 - protein, 15 aa, Homo sapiens
  CDR3 for alpha chain variable domain of TCR clone 184089 (TRAV17, TRAJ56)
CATDANTGANSKLTY

SEQ ID NO: 368178 - protein, 12 aa, Homo sapiens
  CDR3 for beta chain variable domain of TCR clone 184089 (TRBV7-8, TRBJ2-7)
CASSLGDREQYF

SEQ ID NO: 368179 - protein, 12 aa, Homo sapiens
  CDR3 for alpha chain variable domain of TCR clone 184090 (TRAV3, TRAJ20)
CAVRDPDYKLSF

SEQ ID NO: 368180 - protein, 14 aa, Homo sapiens
  CDR3 for beta chain variable domain of TCR clone 184090 (TRBV4-3, TRBJ2-1)
YASGLDRAYNEQFF

SEQ ID NO: 368181 - protein, 12 aa, Homo sapiens
  CDR3 for alpha chain variable domain of TCR clone 184091 (TRAV3, TRAJ43)
CAVRDPNNDMRF

SEQ ID NO: 368182 - protein, 14 aa, Homo sapiens
  CDR3 for beta chain variable domain of TCR clone 184091 (TRBV11-2, TRBJ1-5)
CASSLDRGRQPQHF

SEQ ID NO: 368183 - protein, 15 aa, Homo sapiens
  CDR3 for alpha chain variable domain of TCR clone 184092 (TRAV34, TRAJ38)
CGADFTPGNNRTLIW

SEQ ID NO: 368184 - protein, 16 aa, Homo sapiens
  CDR3 for beta chain variable domain of TCR clone 184092 (TRBV12-5, TRBJ2-5)
CASGPRTSGNQETQCF

SEQ ID NO: 368185 - protein, 14 aa, Homo sapiens
  CDR3 for alpha chain variable domain of TCR clone 184093 (TRAV3, TRAJ28)
CAVRRGAGRYQLTF

SEQ ID NO: 368186 - protein, 16 aa, Homo sapiens
  CDR3 for beta chain variable domain of TCR clone 184093 (TRBV4-1, TRBJ2-7)
CSSSQEWTSGPLEQYF

SEQ ID NO: 368187 - protein, 13 aa, Homo sapiens
  CDR3 for alpha chain variable domain of TCR clone 184094 (TRAV13-2, TRAJ48)
CAEMDFGNEKVTF

SEQ ID NO: 368188 - protein, 15 aa, Homo sapiens
  CDR3 for beta chain variable domain of TCR clone 184094 (TRBV7-3, TRBJ2-1)
CASSQRGGALIEQFF

SEQ ID NO: 368189 - protein, 16 aa, Homo sapiens
  CDR3 for alpha chain variable domain of TCR clone 184095 (TRAV13-1, TRAJ45)
CAARGSRKGGAEGLTF

SEQ ID NO: 368190 - protein, 13 aa, Homo sapiens
  CDR3 for beta chain variable domain of TCR clone 184095 (TRBV12-4, TRBJ2-5)
CASRKRGKETQYF

SEQ ID NO: 368191 - protein, 17 aa, Homo sapiens
  CDR3 for alpha chain variable domain of TCR clone 184096 (TRAV13-1, TRAJ32)
CAASNGWWCDKQAHLWN

SEQ ID NO: 368192 - protein, 14 aa, Homo sapiens
  CDR3 for beta chain variable domain of TCR clone 184096 (TRBV5-1, TRBJ1-1)
CASSRTTGDTEAFF

SEQ ID NO: 368193 - protein, 14 aa, Homo sapiens
  CDR3 for alpha chain variable domain of TCR clone 184097 (TRAV8-2, TRAJ4)
CGVSPSGGANNLIF

SEQ ID NO: 368194 - protein, 15 aa, Homo sapiens
  CDR3 for beta chain variable domain of TCR clone 184097 (TRBV4-1, TRBJ1-4)
CASSDTGGTNEKLFF

SEQ ID NO: 368195 - protein, 13 aa, Homo sapiens
  CDR3 for alpha chain variable domain of TCR clone 184098 (TRAV17, TRAJ13)
CATDSGGYQKVTF

SEQ ID NO: 368196 - protein, 11 aa, Homo sapiens
  CDR3 for beta chain variable domain of TCR clone 184098 (TRBV7-2, TRBJ2-3)
CASSLGDTQYF

SEQ ID NO: 368197 - protein, 15 aa, Homo sapiens
  CDR3 for alpha chain variable domain of TCR clone 184099 (TRAV40, TRAJ48)
CLLFLSNFGNEKLTF

SEQ ID NO: 368198 - protein, 13 aa, Homo sapiens
  CDR3 for beta chain variable domain of TCR clone 184099 (TRBV19, TRBJ1-5)
CASSINLNQPQHF

SEQ ID NO: 368199 - protein, 11 aa, Homo sapiens
  CDR3 for alpha chain variable domain of TCR clone 184100 (TRAV17, TRAJ36)
CAPTGANNLFF

SEQ ID NO: 368200 - protein, 13 aa, Homo sapiens
  CDR3 for beta chain variable domain of TCR clone 184100 (TRBV12-4, TRBJ2-7)
CASSPTETYKQYF

SEQ ID NO: 368201 - protein, 16 aa, Homo sapiens
  CDR3 for alpha chain variable domain of TCR clone 184101 (TRAV26-1, )
CIDIQNPDPAVYQLRD

SEQ ID NO: 368202 - protein, 19 aa, Homo sapiens
  CDR3 for beta chain variable domain of TCR clone 184101 (TRBV19, TRBJ2-5)
CASSIGQVTDFFLGETQYS

SEQ ID NO: 368203 - protein, 13 aa, Homo sapiens
  CDR3 for alpha chain variable domain of TCR clone 184102 (TRAV12-2, TRAJ15)
CAVFNQAGTALIF

SEQ ID NO: 368204 - protein, 23 aa, Homo sapiens
  CDR3 for beta chain variable domain of TCR clone 184102 (TRBV7-8, TRBJ1-5)
RRTPPFISVPAAGGGGADQPQHF

SEQ ID NO: 368205 - protein, 12 aa, Homo sapiens
  CDR3 for alpha chain variable domain of TCR clone 184103 (TRAV12-1, TRAJ34)
CVVAGATDKLIF

SEQ ID NO: 368206 - protein, 15 aa, Homo sapiens
  CDR3 for beta chain variable domain of TCR clone 184103 (TRBV7-9, TRBJ1-2)
CASSLGRTVNYGYTF

SEQ ID NO: 368207 - protein, 16 aa, Homo sapiens
  CDR3 for alpha chain variable domain of TCR clone 184104 (TRAV30, TRAJ24)
CGTEIVDADSWGKFQF

SEQ ID NO: 368208 - protein, 12 aa, Homo sapiens
  CDR3 for beta chain variable domain of TCR clone 184104 (TRBV11-2, TRBJ2-2)
CASSLGGGELSF

SEQ ID NO: 368209 - protein, 13 aa, Homo sapiens
  CDR3 for alpha chain variable domain of TCR clone 184105 (TRAV29/DV5, TRAJ31)
CAASRNNNARLMF

SEQ ID NO: 368210 - protein, 15 aa, Homo sapiens
  CDR3 for beta chain variable domain of TCR clone 184105 (TRBV18, TRBJ1-6)
CASSRIQGRNSPLHF

SEQ ID NO: 368211 - protein, 23 aa, Homo sapiens
  CDR3 for alpha chain variable domain of TCR clone 184106 (TRAV26-1, TRAJ38)
CIADNAGNNHIPNPDPAVYQLRD

SEQ ID NO: 368212 - protein, 13 aa, Homo sapiens
  CDR3 for beta chain variable domain of TCR clone 184106 (TRBV20-1, TRBJ1-1)
CSARGGGNTEDFF

SEQ ID NO: 368213 - protein, 15 aa, Homo sapiens
  CDR3 for alpha chain variable domain of TCR clone 184107 (TRAV36/DV7, TRAJ53)
CAVEGSGGSNHKLTF

SEQ ID NO: 368214 - protein, 16 aa, Homo sapiens
  CDR3 for beta chain variable domain of TCR clone 184107 (TRBV27, TRBJ2-2)
CASSLSGLWVTGELFF

SEQ ID NO: 368215 - protein, 12 aa, Homo sapiens
  CDR3 for alpha chain variable domain of TCR clone 184108 (TRAV17, TRAJ20)
CATQSNDYERNF

SEQ ID NO: 368216 - protein, 13 aa, Homo sapiens
  CDR3 for beta chain variable domain of TCR clone 184108 (TRBV10-3, TRBJ1-1)
CAIIPEGGTEAFF

SEQ ID NO: 368217 - protein, 18 aa, Homo sapiens
  CDR3 for alpha chain variable domain of TCR clone 184109 (TRAV21, TRAJ52)
CAVRPSPAGGTSYGKLTF

SEQ ID NO: 368218 - protein, 17 aa, Homo sapiens
  CDR3 for beta chain variable domain of TCR clone 184109 (TRBV13, TRBJ2-3)
CAISLSRVAGWRNTQYF

SEQ ID NO: 368219 - protein, 17 aa, Homo sapiens
  CDR3 for alpha chain variable domain of TCR clone 184110 (TRAV26-2, TRAJ42)
CILRDESYGGSQGKLIF

SEQ ID NO: 368220 - protein, 15 aa, Homo sapiens
  CDR3 for beta chain variable domain of TCR clone 184110 (TRBV6-6, TRBJ2-7)
CASSYSYGGSYEQYF

SEQ ID NO: 368221 - protein, 13 aa, Homo sapiens
  CDR3 for alpha chain variable domain of TCR clone 184111 (TRAV8-3, TRAJ6)
CAVEKGGSYIPTF

SEQ ID NO: 368222 - protein, 15 aa, Homo sapiens
  CDR3 for beta chain variable domain of TCR clone 184111 (TRBV28, TRBJ2-5)
CASSADRGRRETQYF

SEQ ID NO: 368223 - protein, 14 aa, Homo sapiens
  CDR3 for alpha chain variable domain of TCR clone 184112 (TRAV17, TRAJ12)
CATDGVDSSYKLIF

SEQ ID NO: 368224 - protein, 14 aa, Homo sapiens
  CDR3 for beta chain variable domain of TCR clone 184112 (TRBV19, TRBJ2-7)
CASSIFAGTYEQYF

SEQ ID NO: 368225 - protein, 16 aa, Homo sapiens
  CDR3 for alpha chain variable domain of TCR clone 184113 (TRAV23/DV6, TRAJ9)
CAASIGGNPGGFKTIF

SEQ ID NO: 368226 - protein, 15 aa, Homo sapiens
  CDR3 for beta chain variable domain of TCR clone 184113 (TRBV7-9, TRBJ2-7)
CASSSVGLGGYEQYF

SEQ ID NO: 368227 - protein, 11 aa, Homo sapiens
  CDR3 for alpha chain variable domain of TCR clone 184114 (TRAV27, TRAJ45)
CAGAREEVLTD

SEQ ID NO: 368228 - protein, 17 aa, Homo sapiens
  CDR3 for beta chain variable domain of TCR clone 184114 (TRBV11-2, TRBJ2-1)
CASSLYPPGVEYNEQFF

SEQ ID NO: 368229 - protein, 16 aa, Homo sapiens
  CDR3 for alpha chain variable domain of TCR clone 184115 (TRAV8-3, TRAJ44)
CAVGASNTGTASKLTF

SEQ ID NO: 368230 - protein, 16 aa, Homo sapiens
  CDR3 for beta chain variable domain of TCR clone 184115 (TRBV19, TRBJ2-7)
CASSTPGQASSYKQYF

SEQ ID NO: 368231 - protein, 17 aa, Homo sapiens
  CDR3 for alpha chain variable domain of TCR clone 184116 (TRAV13-2, TRAJ5)
CAESVVIVGHGQESTYF

SEQ ID NO: 368232 - protein, 18 aa, Homo sapiens
  CDR3 for beta chain variable domain of TCR clone 184116 (TRBV4-1, TRBJ2-3)
CASSPQLAGGRSTDTQYF

SEQ ID NO: 368233 - protein, 14 aa, Homo sapiens
  CDR3 for alpha chain variable domain of TCR clone 184117 (TRAV26-1, TRAJ34)
CIVRVAYNTDKHIF

SEQ ID NO: 368234 - protein, 15 aa, Homo sapiens
  CDR3 for beta chain variable domain of TCR clone 184117 (TRBV7-9, TRBJ1-4)
CAGSRTGGFNEKLFF

SEQ ID NO: 368235 - protein, 14 aa, Homo sapiens
  CDR3 for alpha chain variable domain of TCR clone 184118 (TRAV3, TRAJ40)
CAVRDRRGTYMYIF

SEQ ID NO: 368236 - protein, 15 aa, Homo sapiens
  CDR3 for beta chain variable domain of TCR clone 184118 (TRBV11-1, TRBJ1-3)
CASTDPRAFGNTIYF

SEQ ID NO: 368237 - protein, 13 aa, Homo sapiens
  CDR3 for alpha chain variable domain of TCR clone 184119 (TRAV3, TRAJ43)
CAVRDTRGSDMRF

SEQ ID NO: 368238 - protein, 15 aa, Homo sapiens
  CDR3 for beta chain variable domain of TCR clone 184119 (TRBV6-5, TRBJ1-5)
CAGSYSRRSNQPQHF

SEQ ID NO: 368239 - protein, 13 aa, Homo sapiens
  CDR3 for alpha chain variable domain of TCR clone 184120 (TRAV2, TRAJ15)
CAVASQAGTALIF

SEQ ID NO: 368240 - protein, 17 aa, Homo sapiens
  CDR3 for beta chain variable domain of TCR clone 184120 (TRBV4-2, TRBJ2-1)
CASSQVSGLAMNNEQFF

SEQ ID NO: 368241 - protein, 14 aa, Homo sapiens
  CDR3 for alpha chain variable domain of TCR clone 184121 (TRAV1-1, TRAJ27)
CAVIYNTNAGKSTF

SEQ ID NO: 368242 - protein, 14 aa, Homo sapiens
  CDR3 for beta chain variable domain of TCR clone 184121 (TRBV5-1, TRBJ2-1)
CASSALWAGNEQFF

SEQ ID NO: 368243 - protein, 13 aa, Homo sapiens
  CDR3 for alpha chain variable domain of TCR clone 184122 (TRAV1-2, TRAJ9)
CAVLNTGGFKTIF

SEQ ID NO: 368244 - protein, 16 aa, Homo sapiens
  CDR3 for beta chain variable domain of TCR clone 184122 (TRBV6-6, TRBJ2-7)
CASIETGTNSSYEQYF

SEQ ID NO: 368245 - protein, 16 aa, Homo sapiens
  CDR3 for alpha chain variable domain of TCR clone 184123 (TRAV12-3, TRAJ53)
CAMSPGSGGSNYKLTF

SEQ ID NO: 368246 - protein, 14 aa, Homo sapiens
  CDR3 for beta chain variable domain of TCR clone 184123 (TRBV7-2, TRBJ1-1)
CASSFFTGTTEAFF

SEQ ID NO: 368247 - protein, 15 aa, Homo sapiens
  CDR3 for alpha chain variable domain of TCR clone 184124 (TRAV26-1, TRAJ40)
CIVSFAISGTYKYIF

SEQ ID NO: 368248 - protein, 15 aa, Homo sapiens
  CDR3 for beta chain variable domain of TCR clone 184124 (TRBV5-7, TRBJ2-3)
CASSPGLATTDTQYF

SEQ ID NO: 368249 - protein, 14 aa, Homo sapiens
  CDR3 for alpha chain variable domain of TCR clone 184125 (TRAV25, TRAJ53)
CSTGGGGSNYKLTF

SEQ ID NO: 368250 - protein, 19 aa, Homo sapiens
  CDR3 for beta chain variable domain of TCR clone 184125 (TRBV7-2, TRBJ2-3)
CASSFLSRNWGGGTDTQYF

SEQ ID NO: 368251 - protein, 12 aa, Homo sapiens
  CDR3 for alpha chain variable domain of TCR clone 184126 (TRAV20, TRAJ49)
CSLSNTGNQFYF

SEQ ID NO: 368252 - protein, 15 aa, Homo sapiens
  CDR3 for beta chain variable domain of TCR clone 184126 (TRBV7-9, TRBJ1-6)
CASSSPGRGNSPLHF

SEQ ID NO: 368253 - protein, 17 aa, Homo sapiens
  CDR3 for alpha chain variable domain of TCR clone 184127 (TRAV12-3, TRAJ6)
CAMSARGGAGGSYIPTF

SEQ ID NO: 368254 - protein, 16 aa, Homo sapiens
  CDR3 for beta chain variable domain of TCR clone 184127 (TRBV7-2, TRBJ2-5)
CASSSKWLSGQETQYF

SEQ ID NO: 368255 - protein, 18 aa, Homo sapiens
  CDR3 for alpha chain variable domain of TCR clone 184128 (TRAV21, TRAJ52)
CAVRPSPAGGTSYGKLTF

SEQ ID NO: 368256 - protein, 13 aa, Homo sapiens
  CDR3 for beta chain variable domain of TCR clone 184128 (TRBV20-1, TRBJ1-1)
CRARVGGNTEAFC

SEQ ID NO: 368257 - protein, 15 aa, Homo sapiens
  CDR3 for alpha chain variable domain of TCR clone 184129 (TRAV3, TRAJ22)
CAVGDRGGSARQLTF

SEQ ID NO: 368258 - protein, 13 aa, Homo sapiens
  CDR3 for beta chain variable domain of TCR clone 184129 (TRBV10-3, TRBJ2-7)
CASKLAVNYEQYF

SEQ ID NO: 368259 - protein, 15 aa, Homo sapiens
  CDR3 for alpha chain variable domain of TCR clone 184130 (TRAV2, TRAJ37)
CAVEDGSSNTGKLIF

SEQ ID NO: 368260 - protein, 11 aa, Homo sapiens
  CDR3 for beta chain variable domain of TCR clone 184130 (TRBV29-1, TRBJ2-5)
CSEDRTGTQYF

SEQ ID NO: 368261 - protein, 18 aa, Homo sapiens
  CDR3 for alpha chain variable domain of TCR clone 184131 (TRAV13-1, TRAJ52)
CAAKNPNAGGTSYGRLTF

SEQ ID NO: 368262 - protein, 13 aa, Homo sapiens
  CDR3 for beta chain variable domain of TCR clone 184131 (TRBV7-3, TRBJ1-1)
CASSQDWGAEAFF

SEQ ID NO: 368263 - protein, 14 aa, Homo sapiens
  CDR3 for alpha chain variable domain of TCR clone 184132 (TRAV38-2/DV8, TRAJ33)
CAYRILDSNYQLIW

SEQ ID NO: 368264 - protein, 13 aa, Homo sapiens
  CDR3 for beta chain variable domain of TCR clone 184132 (TRBV7-3, TRBJ1-1)
CASSQDWGAEAFF

SEQ ID NO: 368265 - protein, 15 aa, Homo sapiens
  CDR3 for alpha chain variable domain of TCR clone 184133 (TRAV12-2, TRAJ53)
CAVNGGGGSNYKLTF

SEQ ID NO: 368266 - protein, 15 aa, Homo sapiens
  CDR3 for beta chain variable domain of TCR clone 184133 (TRBV28, TRBJ2-1)
CASSLDTSSYNEQFF

SEQ ID NO: 368267 - protein, 15 aa, Homo sapiens
  CDR3 for alpha chain variable domain of TCR clone 184134 (TRAV38-1, TRAJ37)
CAFIFGSGNTGKLIF

SEQ ID NO: 368268 - protein, 17 aa, Homo sapiens
  CDR3 for beta chain variable domain of TCR clone 184134 (TRBV11-2, TRBJ2-1)
CASSLYPPGVEYNEQFF

SEQ ID NO: 368269 - protein, 15 aa, Homo sapiens
  CDR3 for alpha chain variable domain of TCR clone 184135 (TRAV8-3, TRAJ23)
CAVGDRYNQGGKLIF

SEQ ID NO: 368270 - protein, 16 aa, Homo sapiens
  CDR3 for beta chain variable domain of TCR clone 184135 (TRBV7-2, TRBJ1-2)
CASSSNQDRRGHGYTF

SEQ ID NO: 368271 - protein, 15 aa, Homo sapiens
  CDR3 for alpha chain variable domain of TCR clone 184136 (TRAV8-3, TRAJ6)
CAVGPRGGGSYIPTF

SEQ ID NO: 368272 - protein, 14 aa, Homo sapiens
  CDR3 for beta chain variable domain of TCR clone 184136 (TRBV19, TRBJ2-2)
CASSTGQGAGELFF

SEQ ID NO: 368273 - protein, 12 aa, Homo sapiens
  CDR3 for alpha chain variable domain of TCR clone 184137 (TRAV3, TRAJ13)
CAVSPTYQKVTF

SEQ ID NO: 368274 - protein, 13 aa, Homo sapiens
  CDR3 for beta chain variable domain of TCR clone 184137 (TRBV24-1, TRBJ2-2)
CATTAARTGELFF

SEQ ID NO: 368275 - protein, 14 aa, Homo sapiens
  CDR3 for alpha chain variable domain of TCR clone 184138 (TRAV1-2, TRAJ15)
CAVRDRQAGTALIF

SEQ ID NO: 368276 - protein, 15 aa, Homo sapiens
  CDR3 for beta chain variable domain of TCR clone 184138 (TRBV18, TRBJ2-7)
CASSPLQGRTYEQYF

SEQ ID NO: 368277 - protein, 11 aa, Homo sapiens
  CDR3 for alpha chain variable domain of TCR clone 184139 (TRAV26-1, TRAJ27)
CIDPNAGKSTF

SEQ ID NO: 368278 - protein, 18 aa, Homo sapiens
  CDR3 for beta chain variable domain of TCR clone 184139 (TRBV7-9, TRBJ2-6)
CASSFPGAGISGANVLTF

SEQ ID NO: 368279 - protein, 11 aa, Homo sapiens
  CDR3 for alpha chain variable domain of TCR clone 184140 (TRAV2, TRAJ13)
CASGGYQKVTF

SEQ ID NO: 368280 - protein, 17 aa, Homo sapiens
  CDR3 for beta chain variable domain of TCR clone 184140 (TRBV6-6, TRBJ2-5)
CASSYPLAGGPQETQYF

SEQ ID NO: 368281 - protein, 14 aa, Homo sapiens
  CDR3 for alpha chain variable domain of TCR clone 184141 (TRAV1-2, TRAJ16)
CAVNRFSDGQKLLF

SEQ ID NO: 368282 - protein, 13 aa, Homo sapiens
  CDR3 for beta chain variable domain of TCR clone 184141 (TRBV27, TRBJ1-1)
CASSLSIAAEAFF

SEQ ID NO: 368283 - protein, 14 aa, Homo sapiens
  CDR3 for alpha chain variable domain of TCR clone 184142 (TRAV9-2, TRAJ39)
CALYIYNAGNMLTF

SEQ ID NO: 368284 - protein, 13 aa, Homo sapiens
  CDR3 for beta chain variable domain of TCR clone 184142 (TRBV18, TRBJ2-2)
CASSPTRGGELFF

SEQ ID NO: 368285 - protein, 14 aa, Homo sapiens
  CDR3 for alpha chain variable domain of TCR clone 184143 (TRAV2, TRAJ37)
CAVDFTSNTGKLIF

SEQ ID NO: 368286 - protein, 16 aa, Homo sapiens
  CDR3 for beta chain variable domain of TCR clone 184143 (TRBV6-1, TRBJ2-1)
CASILRQGSSYNEQFF

SEQ ID NO: 368287 - protein, 13 aa, Homo sapiens
  CDR3 for alpha chain variable domain of TCR clone 184144 (TRAV12-3, TRAJ40)
CAMSDSGTYKYIF

SEQ ID NO: 368288 - protein, 14 aa, Homo sapiens
  CDR3 for beta chain variable domain of TCR clone 184144 (TRBV7-2, TRBJ1-5)
CAISTQGAGQPQHF

SEQ ID NO: 368289 - protein, 15 aa, Homo sapiens
  CDR3 for alpha chain variable domain of TCR clone 184145 (TRAV3, TRAJ5)
CAVRDLDTGRSALPF

SEQ ID NO: 368290 - protein, 13 aa, Homo sapiens
  CDR3 for beta chain variable domain of TCR clone 184145 (TRBV12-4, TRBJ2-7)
CASSPTETYEQYF

SEQ ID NO: 368291 - protein, 14 aa, Homo sapiens
  CDR3 for alpha chain variable domain of TCR clone 184146 (TRAV20, TRAJ29)
CAEQAWVGNTPLVF

SEQ ID NO: 368292 - protein, 15 aa, Homo sapiens
  CDR3 for beta chain variable domain of TCR clone 184146 (TRBV29-1, TRBJ2-7)
CSVEFFDRGSYEQYF

SEQ ID NO: 368293 - protein, 12 aa, Homo sapiens
  CDR3 for alpha chain variable domain of TCR clone 184147 (TRAV12-3, TRAJ34)
CAMGYNTDKLIF

SEQ ID NO: 368294 - protein, 14 aa, Homo sapiens
  CDR3 for beta chain variable domain of TCR clone 184147 (TRBV4-1, TRBJ2-2)
CASSQAVNPGELFF

SEQ ID NO: 368295 - protein, 15 aa, Homo sapiens
  CDR3 for alpha chain variable domain of TCR clone 184148 (TRAV29/DV5, TRAJ53)
CAASASGGSNYKLTF

SEQ ID NO: 368296 - protein, 17 aa, Homo sapiens
  CDR3 for beta chain variable domain of TCR clone 184148 (TRBV7-8, TRBJ2-6)
CASSAGTGGAGANGLTF

SEQ ID NO: 368297 - protein, 15 aa, Homo sapiens
  CDR3 for alpha chain variable domain of TCR clone 184149 (TRAV17, TRAJ6)
CATDLPSGGSYIPTF

SEQ ID NO: 368298 - protein, 16 aa, Homo sapiens
  CDR3 for beta chain variable domain of TCR clone 184149 (TRBV4-1, TRBJ2-7)
CASSHGPTGYSYEQYF

SEQ ID NO: 368299 - protein, 15 aa, Homo sapiens
  CDR3 for alpha chain variable domain of TCR clone 184150 (TRAV21, TRAJ53)
CATLNSGGSNYKLTF

SEQ ID NO: 368300 - protein, 16 aa, Homo sapiens
  CDR3 for beta chain variable domain of TCR clone 184150 (TRBV12-4, TRBJ2-3)
CASSLRLAETTETQYF

SEQ ID NO: 368301 - protein, 15 aa, Homo sapiens
  CDR3 for alpha chain variable domain of TCR clone 184151 (TRAV25, TRAJ53)
CPTSNSGGSNYKLTF

SEQ ID NO: 368302 - protein, 15 aa, Homo sapiens
  CDR3 for beta chain variable domain of TCR clone 184151 (TRBV28, TRBJ2-7)
CASSPGGRGFYEQYF

SEQ ID NO: 368303 - protein, 13 aa, Homo sapiens
  CDR3 for alpha chain variable domain of TCR clone 184152 (TRAV3, TRAJ41)
CAVSSNSGYALNF

SEQ ID NO: 368304 - protein, 14 aa, Homo sapiens
  CDR3 for beta chain variable domain of TCR clone 184152 (TRBV7-2, TRBJ2-7)
CASSPKTSFYKQYF

SEQ ID NO: 368305 - protein, 13 aa, Homo sapiens
  CDR3 for alpha chain variable domain of TCR clone 184153 (TRAV12-1, TRAJ16)
CVVNGPDGLKLLF

SEQ ID NO: 368306 - protein, 13 aa, Homo sapiens
  CDR3 for beta chain variable domain of TCR clone 184153 (TRBV2, TRBJ1-1)
CARNPTGGFHAFF

SEQ ID NO: 368307 - protein, 16 aa, Homo sapiens
  CDR3 for alpha chain variable domain of TCR clone 184154 (TRAV8-3, TRAJ10)
CAVGPWVTGGGNKLTF

SEQ ID NO: 368308 - protein, 13 aa, Homo sapiens
  CDR3 for beta chain variable domain of TCR clone 184154 (TRBV18, TRBJ1-1)
CASSPGPSGEAFF

SEQ ID NO: 368309 - protein, 12 aa, Homo sapiens
  CDR3 for alpha chain variable domain of TCR clone 184155 (TRAV12-1, TRAJ34)
CVVAGATDKLIF

SEQ ID NO: 368310 - protein, 11 aa, Homo sapiens
  CDR3 for beta chain variable domain of TCR clone 184155 (TRBV11-3, TRBJ1-1)
CASSINTEAFF

SEQ ID NO: 368311 - protein, 16 aa, Homo sapiens
  CDR3 for alpha chain variable domain of TCR clone 184156 (TRAV3, TRAJ10)
CSVRDMRAGGGNKLTF

SEQ ID NO: 368312 - protein, 16 aa, Homo sapiens
  CDR3 for beta chain variable domain of TCR clone 184156 (TRBV9, TRBJ1-2)
CASSVEEKVSPYGYTF

SEQ ID NO: 368313 - protein, 13 aa, Homo sapiens
  CDR3 for alpha chain variable domain of TCR clone 184157 (TRAV12-1, TRAJ21)
CVVILYNFNKFYF

SEQ ID NO: 368314 - protein, 20 aa, Homo sapiens
  CDR3 for beta chain variable domain of TCR clone 184157 (TRBV7-8, TRBJ2-1)
CASSLAHRLAGVRSYNEQFF

SEQ ID NO: 368315 - protein, 13 aa, Homo sapiens
  CDR3 for alpha chain variable domain of TCR clone 184158 (TRAV12-3, TRAJ40)
CAMSDSGTYKYIF

SEQ ID NO: 368316 - protein, 21 aa, Homo sapiens
  CDR3 for beta chain variable domain of TCR clone 184158 (TRBV7-2, TRBJ1-5)
RRTRPCISVPAAQGAGQPQHF

SEQ ID NO: 368317 - protein, 12 aa, Homo sapiens
  CDR3 for alpha chain variable domain of TCR clone 184159 (TRAV12-1, TRAJ31)
CVSWNNNARLIF

SEQ ID NO: 368318 - protein, 15 aa, Homo sapiens
  CDR3 for beta chain variable domain of TCR clone 184159 (TRBV7-2, TRBJ1-5)
CASSLDRGQDQPQHF

SEQ ID NO: 368319 - protein, 13 aa, Homo sapiens
  CDR3 for alpha chain variable domain of TCR clone 184160 (TRAV16, TRAJ27)
CALGRTNAGKSTF

SEQ ID NO: 368320 - protein, 15 aa, Homo sapiens
  CDR3 for beta chain variable domain of TCR clone 184160 (TRBV18, TRBJ2-1)
CASSPPSASYNEQFF

SEQ ID NO: 368321 - protein, 12 aa, Homo sapiens
  CDR3 for alpha chain variable domain of TCR clone 184161 (TRAV16, TRAJ9)
CALSSGGFKTIF

SEQ ID NO: 368322 - protein, 14 aa, Homo sapiens
  CDR3 for beta chain variable domain of TCR clone 184161 (TRBV7-9, TRBJ2-1)
CASSLAGLYNEQFF

SEQ ID NO: 368323 - protein, 12 aa, Homo sapiens
  CDR3 for alpha chain variable domain of TCR clone 184162 (TRAV12-1, TRAJ20)
CVVNPDNYKLSF

SEQ ID NO: 368324 - protein, 12 aa, Homo sapiens
  CDR3 for beta chain variable domain of TCR clone 184162 (TRBV11-2, TRBJ2-2)
CASSLGGGELFF

SEQ ID NO: 368325 - protein, 12 aa, Homo sapiens
  CDR3 for alpha chain variable domain of TCR clone 184163 (TRAV13-1, TRAJ53)
AASGGRNYKLTF

SEQ ID NO: 368326 - protein, 13 aa, Homo sapiens
  CDR3 for beta chain variable domain of TCR clone 184163 (TRBV7-2, TRBJ2-2)
CASSSVRAGELFF

SEQ ID NO: 368327 - protein, 13 aa, Homo sapiens
  CDR3 for alpha chain variable domain of TCR clone 184164 (TRAV12-1, TRAJ37)
CVVNAGNTGKLIF

SEQ ID NO: 368328 - protein, 14 aa, Homo sapiens
  CDR3 for beta chain variable domain of TCR clone 184164 (TRBV7-2, TRBJ2-3)
CASRRGRAADTQYF

SEQ ID NO: 368329 - protein, 14 aa, Homo sapiens
  CDR3 for alpha chain variable domain of TCR clone 184165 (TRAV12-3, TRAJ10)
SHLPLTGGGNKLTF

SEQ ID NO: 368330 - protein, 13 aa, Homo sapiens
  CDR3 for beta chain variable domain of TCR clone 184165 (TRBV28, TRBJ1-5)
CASSERGNQPQHF

SEQ ID NO: 368331 - protein, 15 aa, Homo sapiens
  CDR3 for alpha chain variable domain of TCR clone 184166 (TRAV26-2, TRAJ50)
CILRDEETSYDKVIF

SEQ ID NO: 368332 - protein, 12 aa, Homo sapiens
  CDR3 for beta chain variable domain of TCR clone 184166 (TRBV5-7, TRBJ1-2)
CASSNGPYGYTF

SEQ ID NO: 368333 - protein, 16 aa, Homo sapiens
  CDR3 for alpha chain variable domain of TCR clone 184167 (TRAV30, TRAJ24)
CGTALVDADSWGKFQF

SEQ ID NO: 368334 - protein, 14 aa, Homo sapiens
  CDR3 for beta chain variable domain of TCR clone 184167 (TRBV12-5, TRBJ2-5)
CASGSRTHQETQYF

SEQ ID NO: 368335 - protein, 19 aa, Homo sapiens
  CDR3 for alpha chain variable domain of TCR clone 184168 (TRAV26-1, TRAJ56)
CCVLFIVRVDNGANSKLTF

SEQ ID NO: 368336 - protein, 15 aa, Homo sapiens
  CDR3 for beta chain variable domain of TCR clone 184168 (TRBV20-1, TRBJ2-7)
CSARDPTEVGHEQYF

SEQ ID NO: 368337 - protein, 14 aa, Homo sapiens
  CDR3 for alpha chain variable domain of TCR clone 184169 (TRAV1-2, TRAJ16)
CAVNRFSDGQKLLF

SEQ ID NO: 368338 - protein, 16 aa, Homo sapiens
  CDR3 for beta chain variable domain of TCR clone 184169 (TRBV5-7, TRBJ2-3)
CASSSLGGAITDTQYF

SEQ ID NO: 368339 - protein, 15 aa, Homo sapiens
  CDR3 for alpha chain variable domain of TCR clone 184170 (TRAV1-2, TRAJ9)
CAVIEVNTGGFKTIF

SEQ ID NO: 368340 - protein, 15 aa, Homo sapiens
  CDR3 for beta chain variable domain of TCR clone 184170 (TRBV7-6, TRBJ2-3)
CASSSEGGLAHTQYF

SEQ ID NO: 368341 - protein, 12 aa, Homo sapiens
  CDR3 for alpha chain variable domain of TCR clone 184171 (TRAV12-3, TRAJ17)
CAITLTGNRLTF

SEQ ID NO: 368342 - protein, 15 aa, Homo sapiens
  CDR3 for beta chain variable domain of TCR clone 184171 (TRBV20-1, TRBJ2-7)
CSARDRVSGMDEQYF

SEQ ID NO: 368343 - protein, 16 aa, Homo sapiens
  CDR3 for alpha chain variable domain of TCR clone 184172 (TRAV12-2, TRAJ45)
CAVIFLSGGGADGLTF

SEQ ID NO: 368344 - protein, 15 aa, Homo sapiens
  CDR3 for beta chain variable domain of TCR clone 184172 (TRBV7-2, TRBJ2-1)
CASSSGLAGGNEQFF

SEQ ID NO: 368345 - protein, 14 aa, Homo sapiens
  CDR3 for alpha chain variable domain of TCR clone 184173 (TRAV12-3, TRAJ30)
CAMSLLNRDDRIIF

SEQ ID NO: 368346 - protein, 14 aa, Homo sapiens
  CDR3 for beta chain variable domain of TCR clone 184173 (TRBV19, TRBJ2-1)
CASPTFVLSGEQFF

SEQ ID NO: 368347 - protein, 15 aa, Homo sapiens
  CDR3 for alpha chain variable domain of TCR clone 184174 (TRAV13-2, TRAJ50)
CAEEPLKTSYDKVIF

SEQ ID NO: 368348 - protein, 16 aa, Homo sapiens
  CDR3 for beta chain variable domain of TCR clone 184174 (TRBV5-1, TRBJ1-1)
CASSSGGKSLNTEAFF

SEQ ID NO: 368349 - protein, 14 aa, Homo sapiens
  CDR3 for alpha chain variable domain of TCR clone 184175 (TRAV24, TRAJ30)
SVPPIMNRDDKLIF

SEQ ID NO: 368350 - protein, 17 aa, Homo sapiens
  CDR3 for beta chain variable domain of TCR clone 184175 (TRBV24-1, TRBJ2-1)
CATSDVSTSGTYNEQFF

SEQ ID NO: 368351 - protein, 14 aa, Homo sapiens
  CDR3 for alpha chain variable domain of TCR clone 184176 (TRAV17, TRAJ57)
CATDPQGGSEKLVF

SEQ ID NO: 368352 - protein, 14 aa, Homo sapiens
  CDR3 for beta chain variable domain of TCR clone 184176 (TRBV27, TRBJ2-5)
CSSSSLKGWETQYF

SEQ ID NO: 368353 - protein, 11 aa, Homo sapiens
  CDR3 for alpha chain variable domain of TCR clone 184177 (TRAV29/DV5, TRAJ47)
CAAQQGNKLVF

SEQ ID NO: 368354 - protein, 12 aa, Homo sapiens
  CDR3 for beta chain variable domain of TCR clone 184177 (TRBV11-2, TRBJ2-7)
CASSLPTYEQYF

SEQ ID NO: 368355 - protein, 15 aa, Homo sapiens
  CDR3 for alpha chain variable domain of TCR clone 184178 (TRAV27, TRAJ38)
CAARRNAGNNRTLIW

SEQ ID NO: 368356 - protein, 14 aa, Homo sapiens
  CDR3 for beta chain variable domain of TCR clone 184178 (TRBV7-2, TRBJ2-5)
CASSPRGSSETQYF

SEQ ID NO: 368357 - protein, 16 aa, Homo sapiens
  CDR3 for alpha chain variable domain of TCR clone 184179 (TRAV12-2, TRAJ18)
CAVTTDRGSTLGRLYF

SEQ ID NO: 368358 - protein, 12 aa, Homo sapiens
  CDR3 for beta chain variable domain of TCR clone 184179 (TRBV19, TRBJ2-3)
CHLDKITDTQYF

SEQ ID NO: 368359 - protein, 17 aa, Homo sapiens
  CDR3 for alpha chain variable domain of TCR clone 184180 (TRAV13-1, TRAJ28)
CAASPPYSGAESYQLTF

SEQ ID NO: 368360 - protein, 15 aa, Homo sapiens
  CDR3 for beta chain variable domain of TCR clone 184180 (TRBV20-1, TRBJ2-1)
CSARGGTRYYNEQFF

SEQ ID NO: 368361 - protein, 14 aa, Homo sapiens
  CDR3 for alpha chain variable domain of TCR clone 184181 (TRAV3, TRAJ21)
CALGRGSTNFTLDL

SEQ ID NO: 368362 - protein, 17 aa, Homo sapiens
  CDR3 for beta chain variable domain of TCR clone 184181 (TRBV13, TRBJ2-3)
CASSLSRVAGGRNTQYF

SEQ ID NO: 368363 - protein, 12 aa, Homo sapiens
  CDR3 for alpha chain variable domain of TCR clone 184182 (TRAV12-3, TRAJ17)
CAMTLTGNKLTF

SEQ ID NO: 368364 - protein, 16 aa, Homo sapiens
  CDR3 for beta chain variable domain of TCR clone 184182 (TRBV5-1, TRBJ2-3)
RASSLGLAVYTDTQYF

SEQ ID NO: 368365 - protein, 14 aa, Homo sapiens
  CDR3 for alpha chain variable domain of TCR clone 184183 (TRAV35, TRAJ22)
CAGLRPGSARQLTF

SEQ ID NO: 368366 - protein, 13 aa, Homo sapiens
  CDR3 for beta chain variable domain of TCR clone 184183 (TRBV20-1, TRBJ1-1)
CSASGGGNTEAFF

SEQ ID NO: 368367 - protein, 11 aa, Homo sapiens
  CDR3 for alpha chain variable domain of TCR clone 184184 (TRAV12-2, TRAJ33)
CAVGSNYQLFW

SEQ ID NO: 368368 - protein, 14 aa, Homo sapiens
  CDR3 for beta chain variable domain of TCR clone 184184 (TRBV6-1, TRBJ2-2)
CASVEHIESGELFF

SEQ ID NO: 368369 - protein, 16 aa, Homo sapiens
  CDR3 for alpha chain variable domain of TCR clone 184185 (TRAV12-3, TRAJ53)
CAMRPGSGGSNYKLTF

SEQ ID NO: 368370 - protein, 13 aa, Homo sapiens
  CDR3 for beta chain variable domain of TCR clone 184185 (TRBV10-3, TRBJ2-7)
CASKLAVNYEQYF

SEQ ID NO: 368371 - protein, 17 aa, Homo sapiens
  CDR3 for alpha chain variable domain of TCR clone 184186 (TRAV3, TRAJ6)
CGVRDGPRAGGSYIPTF

SEQ ID NO: 368372 - protein, 16 aa, Homo sapiens
  CDR3 for beta chain variable domain of TCR clone 184186 (TRBV7-8, TRBJ2-3)
CASSTEGQRETDTQYF

SEQ ID NO: 368373 - protein, 16 aa, Homo sapiens
  CDR3 for alpha chain variable domain of TCR clone 184187 (TRAV23/DV6, TRAJ52)
CAARPSGGTSYGNLTF

SEQ ID NO: 368374 - protein, 13 aa, Homo sapiens
  CDR3 for beta chain variable domain of TCR clone 184187 (TRBV7-9, TRBJ1-1)
CASSLSGETEAFF

SEQ ID NO: 368375 - protein, 14 aa, Homo sapiens
  CDR3 for alpha chain variable domain of TCR clone 184188 (TRAV1-2, TRAJ16)
CAVNRFSDGQKLLF

SEQ ID NO: 368376 - protein, 15 aa, Homo sapiens
  CDR3 for beta chain variable domain of TCR clone 184188 (TRBV4-3, TRBJ1-2)
CASSRGQGRNYGYTL

SEQ ID NO: 368377 - protein, 14 aa, Homo sapiens
  CDR3 for alpha chain variable domain of TCR clone 184189 (TRAV21, TRAJ53)
CAPPNGGSNYKLTF

SEQ ID NO: 368378 - protein, 13 aa, Homo sapiens
  CDR3 for beta chain variable domain of TCR clone 184189 (TRBV5-1, TRBJ2-7)
CASSLTQGGEQYF

SEQ ID NO: 368379 - protein, 13 aa, Homo sapiens
  CDR3 for alpha chain variable domain of TCR clone 184190 (TRAV38-1, TRAJ20)
CAFMKPNDYKLSF

SEQ ID NO: 368380 - protein, 16 aa, Homo sapiens
  CDR3 for beta chain variable domain of TCR clone 184190 (TRBV12-4, TRBJ1-1)
CASSHRRERQGTEAFF

SEQ ID NO: 368381 - protein, 14 aa, Homo sapiens
  CDR3 for alpha chain variable domain of TCR clone 184191 (TRAV26-1, TRAJ34)
CIARESYNTDKLIF

SEQ ID NO: 368382 - protein, 14 aa, Homo sapiens
  CDR3 for beta chain variable domain of TCR clone 184191 (TRBV2, TRBJ2-3)
CASSEGQNTDTQYF

SEQ ID NO: 368383 - protein, 17 aa, Homo sapiens
  CDR3 for alpha chain variable domain of TCR clone 184192 (TRAV3, TRAJ42)
CAVRDRDYGGSQGKLIF

SEQ ID NO: 368384 - protein, 12 aa, Homo sapiens
  CDR3 for beta chain variable domain of TCR clone 184192 (TRBV11-2, TRBJ2-1)
CASSPGNNEQFF

SEQ ID NO: 368385 - protein, 14 aa, Homo sapiens
  CDR3 for alpha chain variable domain of TCR clone 184193 (TRAV1-2, TRAJ23)
CLLPLCWPGRKLIF

SEQ ID NO: 368386 - protein, 16 aa, Homo sapiens
  CDR3 for beta chain variable domain of TCR clone 184193 (TRBV11-2, TRBJ1-1)
CASSLRQGGEHSKAFF

SEQ ID NO: 368387 - protein, 18 aa, Homo sapiens
  CDR3 for alpha chain variable domain of TCR clone 184194 (TRAV8-4, TRAJ52)
CALTRANAGGTSYGKLTF

SEQ ID NO: 368388 - protein, 20 aa, Homo sapiens
  CDR3 for beta chain variable domain of TCR clone 184194 (TRBV19, TRBJ2-1)
CASSISRTVTSTRLNNEQFF

SEQ ID NO: 368389 - protein, 16 aa, Homo sapiens
  CDR3 for alpha chain variable domain of TCR clone 184195 (TRAV3, TRAJ3)
CAVRDRAKRSTSKIIF

SEQ ID NO: 368390 - protein, 13 aa, Homo sapiens
  CDR3 for beta chain variable domain of TCR clone 184195 (TRBV10-3, TRBJ2-7)
CASKLAVNYEQYF

SEQ ID NO: 368391 - protein, 16 aa, Homo sapiens
  CDR3 for alpha chain variable domain of TCR clone 184196 (TRAV13-1, TRAJ13)
CTAFFLGVTRKLPFEL

SEQ ID NO: 368392 - protein, 15 aa, Homo sapiens
  CDR3 for beta chain variable domain of TCR clone 184196 (TRBV7-8, TRBJ2-1)
CASSLADSLYNEQFL

SEQ ID NO: 368393 - protein, 15 aa, Homo sapiens
  CDR3 for alpha chain variable domain of TCR clone 184197 (TRAV14/DV4, TRAJ39)
CAMRAVNNAGNMLTF

SEQ ID NO: 368394 - protein, 15 aa, Homo sapiens
  CDR3 for beta chain variable domain of TCR clone 184197 (TRBV18, TRBJ2-1)
CASSPPSASYNEQFF

SEQ ID NO: 368395 - protein, 14 aa, Homo sapiens
  CDR3 for alpha chain variable domain of TCR clone 184198 (TRAV21, TRAJ35)
CAVMPIGVGNVLHC

SEQ ID NO: 368396 - protein, 13 aa, Homo sapiens
  CDR3 for beta chain variable domain of TCR clone 184198 (TRBV23-1, TRBJ1-4)
CASRGKFNEKLFF

SEQ ID NO: 368397 - protein, 12 aa, Homo sapiens
  CDR3 for alpha chain variable domain of TCR clone 184199 (TRAV12-1, TRAJ26)
CVVDNYGQNFVL

SEQ ID NO: 368398 - protein, 14 aa, Homo sapiens
  CDR3 for beta chain variable domain of TCR clone 184199 (TRBV2, TRBJ2-1)
CASSEELAVNRQFF

SEQ ID NO: 368399 - protein, 18 aa, Homo sapiens
  CDR3 for alpha chain variable domain of TCR clone 184200 (TRAV12-3, TRAJ52)
CAMSVGGAGGTSDRKLTF

SEQ ID NO: 368400 - protein, 14 aa, Homo sapiens
  CDR3 for beta chain variable domain of TCR clone 184200 (TRBV7-2, TRBJ2-7)
CASRSQGAAYEQYF

SEQ ID NO: 368401 - protein, 14 aa, Homo sapiens
  CDR3 for alpha chain variable domain of TCR clone 184201 (TRAV8-3, TRAJ22)
CDVKPPGSARQLTF

SEQ ID NO: 368402 - protein, 14 aa, Homo sapiens
  CDR3 for beta chain variable domain of TCR clone 184201 (TRBV12-4, TRBJ2-2)
CASSLSQDTGELFF

SEQ ID NO: 368403 - protein, 14 aa, Homo sapiens
  CDR3 for alpha chain variable domain of TCR clone 184202 (TRAV23/DV6, TRAJ40)
CAASLTSGTYKYIF

SEQ ID NO: 368404 - protein, 13 aa, Homo sapiens
  CDR3 for beta chain variable domain of TCR clone 184202 (TRBV11-2, TRBJ2-5)
CASSSTGEETQYF

SEQ ID NO: 368405 - protein, 14 aa, Homo sapiens
  CDR3 for alpha chain variable domain of TCR clone 184203 (TRAV13-1, TRAJ44)
CAAKATGTAGKLTF

SEQ ID NO: 368406 - protein, 13 aa, Homo sapiens
  CDR3 for beta chain variable domain of TCR clone 184203 (TRBV5-5, TRBJ1-2)
CASSFWRGDDYTF

SEQ ID NO: 368407 - protein, 14 aa, Homo sapiens
  CDR3 for alpha chain variable domain of TCR clone 184204 (TRAV21, TRAJ35)
CAVMPIGFGNVLHC

SEQ ID NO: 368408 - protein, 16 aa, Homo sapiens
  CDR3 for beta chain variable domain of TCR clone 184204 (TRBV7-9, TRBJ1-2)
CASSLGFSSGEDGYTS

SEQ ID NO: 368409 - protein, 17 aa, Homo sapiens
  CDR3 for alpha chain variable domain of TCR clone 184205 (TRAV12-2, TRAJ6)
CAPQGPLRAGGSYIPTF

SEQ ID NO: 368410 - protein, 16 aa, Homo sapiens
  CDR3 for beta chain variable domain of TCR clone 184205 (TRBV19, TRBJ2-2)
CASSTARASNTGELFF

SEQ ID NO: 368411 - protein, 13 aa, Homo sapiens
  CDR3 for alpha chain variable domain of TCR clone 184206 (TRAV12-3, TRAJ13)
CAMSSGGYQEVNF

SEQ ID NO: 368412 - protein, 13 aa, Homo sapiens
  CDR3 for beta chain variable domain of TCR clone 184206 (TRBV20-1, TRBJ1-1)
CSAPPGGHTEAFF

SEQ ID NO: 368413 - protein, 15 aa, Homo sapiens
  CDR3 for alpha chain variable domain of TCR clone 184207 (TRAV12-3, TRAJ6)
CAMSGTTGGSYIPTF

SEQ ID NO: 368414 - protein, 15 aa, Homo sapiens
  CDR3 for beta chain variable domain of TCR clone 184207 (TRBV5-1, TRBJ2-7)
CASSLNGGPAREQYF

SEQ ID NO: 368415 - protein, 14 aa, Homo sapiens
  CDR3 for alpha chain variable domain of TCR clone 184208 (TRAV1-2, TRAJ16)
CAVNRFSDGQKLLF

SEQ ID NO: 368416 - protein, 16 aa, Homo sapiens
  CDR3 for beta chain variable domain of TCR clone 184208 (TRBV7-2, TRBJ2-5)
CASSLAVSGRGETQYF

SEQ ID NO: 368417 - protein, 11 aa, Homo sapiens
  CDR3 for alpha chain variable domain of TCR clone 184209 (TRAV17, TRAJ39)
CATGAGNMLTF

SEQ ID NO: 368418 - protein, 15 aa, Homo sapiens
  CDR3 for beta chain variable domain of TCR clone 184209 (TRBV15, TRBJ1-4)
CATSRDMGSYEKLFF

SEQ ID NO: 368419 - protein, 18 aa, Homo sapiens
  CDR3 for alpha chain variable domain of TCR clone 184210 (TRAV14/DV4, TRAJ3)
CAMREGSGGYSSASKIIF

SEQ ID NO: 368420 - protein, 12 aa, Homo sapiens
  CDR3 for beta chain variable domain of TCR clone 184210 (TRBV12-4, TRBJ2-7)
CASSLGGYEQYF

SEQ ID NO: 368421 - protein, 13 aa, Homo sapiens
  CDR3 for alpha chain variable domain of TCR clone 184211 (TRAV12-1, TRAJ30)
CGPRLNRDDKIIF

SEQ ID NO: 368422 - protein, 14 aa, Homo sapiens
  CDR3 for beta chain variable domain of TCR clone 184211 (TRBV7-2, TRBJ2-1)
CASSLTSGNRRQFF

SEQ ID NO: 368423 - protein, 11 aa, Homo sapiens
  CDR3 for alpha chain variable domain of TCR clone 184212 (TRAV35, TRAJ30)
CAGPGDDKIIF

SEQ ID NO: 368424 - protein, 13 aa, Homo sapiens
  CDR3 for beta chain variable domain of TCR clone 184212 (TRBV7-6, TRBJ1-2)
CASSLVADYGYTF

SEQ ID NO: 368425 - protein, 12 aa, Homo sapiens
  CDR3 for alpha chain variable domain of TCR clone 184213 (TRAV12-3, TRAJ17)
CAMTPTGNKLPF

SEQ ID NO: 368426 - protein, 15 aa, Homo sapiens
  CDR3 for beta chain variable domain of TCR clone 184213 (TRBV20-1, TRBJ2-7)
CSARDRVSGMDEQYF

SEQ ID NO: 368427 - protein, 11 aa, Homo sapiens
  CDR3 for alpha chain variable domain of TCR clone 184214 (TRAV12-2, TRAJ23)
CARGRGGKLIF

SEQ ID NO: 368428 - protein, 18 aa, Homo sapiens
  CDR3 for beta chain variable domain of TCR clone 184214 (TRBV28, TRBJ2-5)
CASSLGDSRDPVLRARHA

SEQ ID NO: 368429 - protein, 13 aa, Homo sapiens
  CDR3 for alpha chain variable domain of TCR clone 184215 (TRAV8-3, TRAJ43)
CAVVPYNNNDMRF

SEQ ID NO: 368430 - protein, 17 aa, Homo sapiens
  CDR3 for beta chain variable domain of TCR clone 184215 (TRBV7-7, TRBJ1-1)
CASMGDRPNLGVTEAFF

SEQ ID NO: 368431 - protein, 14 aa, Homo sapiens
  CDR3 for alpha chain variable domain of TCR clone 184216 (TRAV38-1, TRAJ45)
CAYYSGGGADGLTF

SEQ ID NO: 368432 - protein, 14 aa, Homo sapiens
  CDR3 for beta chain variable domain of TCR clone 184216 (TRBV19, TRBJ2-3)
CASSAPRGTDTQYF

SEQ ID NO: 368433 - protein, 14 aa, Homo sapiens
  CDR3 for alpha chain variable domain of TCR clone 184217 (TRAV12-3, TRAJ58)
CAMSTETSGSRLTF

SEQ ID NO: 368434 - protein, 13 aa, Homo sapiens
  CDR3 for beta chain variable domain of TCR clone 184217 (TRBV27, TRBJ2-3)
CASSWGRTETQYF

SEQ ID NO: 368435 - protein, 15 aa, Homo sapiens
  CDR3 for alpha chain variable domain of TCR clone 184218 (TRAV41, TRAJ45)
CAASYSGGGADGLTF

SEQ ID NO: 368436 - protein, 14 aa, Homo sapiens
  CDR3 for beta chain variable domain of TCR clone 184218 (TRBV27, TRBJ2-2)
YASRPGVNTGELFF

SEQ ID NO: 368437 - protein, 13 aa, Homo sapiens
  CDR3 for alpha chain variable domain of TCR clone 184219 (TRAV39, TRAJ33)
CAANPDSNYQLIW

SEQ ID NO: 368438 - protein, 15 aa, Homo sapiens
  CDR3 for beta chain variable domain of TCR clone 184219 (TRBV4-1, TRBJ2-5)
CASSQWDLYQETQYF

SEQ ID NO: 368439 - protein, 15 aa, Homo sapiens
  CDR3 for alpha chain variable domain of TCR clone 184220 (TRAV23/DV6, TRAJ18)
CAARYRGSTLGRLYF

SEQ ID NO: 368440 - protein, 13 aa, Homo sapiens
  CDR3 for beta chain variable domain of TCR clone 184220 (TRBV7-2, TRBJ2-7)
CASSSSSGSEQYF

SEQ ID NO: 368441 - protein, 18 aa, Homo sapiens
  CDR3 for alpha chain variable domain of TCR clone 184221 (TRAV17, TRAJ45)
CATSLDLYSGGGADGLTF

SEQ ID NO: 368442 - protein, 15 aa, Homo sapiens
  CDR3 for beta chain variable domain of TCR clone 184221 (TRBV11-2, TRBJ2-1)
CASSKNRGRIYEQFF

SEQ ID NO: 368443 - protein, 15 aa, Homo sapiens
  CDR3 for alpha chain variable domain of TCR clone 184222 (TRAV3, TRAJ5)
CAVRDLDTGMRELTF

SEQ ID NO: 368444 - protein, 13 aa, Homo sapiens
  CDR3 for beta chain variable domain of TCR clone 184222 (TRBV20-1, TRBJ2-5)
CSARDSKQATQYF

SEQ ID NO: 368445 - protein, 11 aa, Homo sapiens
  CDR3 for alpha chain variable domain of TCR clone 184223 (TRAV12-2, TRAJ31)
CAVTRWARLMS

SEQ ID NO: 368446 - protein, 14 aa, Homo sapiens
  CDR3 for beta chain variable domain of TCR clone 184223 (TRBV19, TRBJ2-1)
CASPTFVLSGEQFF

SEQ ID NO: 368447 - protein, 11 aa, Homo sapiens
  CDR3 for alpha chain variable domain of TCR clone 184224 (TRAV1-2, TRAJ40)
CAVPGTYKYIF

SEQ ID NO: 368448 - protein, 15 aa, Homo sapiens
  CDR3 for beta chain variable domain of TCR clone 184224 (TRBV7-9, TRBJ1-4)
CASSARTGGNEKLFF

SEQ ID NO: 368449 - protein, 16 aa, Homo sapiens
  CDR3 for alpha chain variable domain of TCR clone 184225 (TRAV23/DV6, )
CADIQNPDPAVYQLRD

SEQ ID NO: 368450 - protein, 13 aa, Homo sapiens
  CDR3 for beta chain variable domain of TCR clone 184225 (TRBV28, TRBJ2-7)
CASRSSGVYEQCF

SEQ ID NO: 368451 - protein, 15 aa, Homo sapiens
  CDR3 for alpha chain variable domain of TCR clone 184226 (TRAV12-3, TRAJ6)
CAMSATTGGSYIPTF

SEQ ID NO: 368452 - protein, 14 aa, Homo sapiens
  CDR3 for beta chain variable domain of TCR clone 184226 (TRBV4-2, TRBJ2-3)
CASSQERGTDTQYF

SEQ ID NO: 368453 - protein, 14 aa, Homo sapiens
  CDR3 for alpha chain variable domain of TCR clone 184227 (TRAV40, TRAJ45)
SSGRSGGGADGLTF

SEQ ID NO: 368454 - protein, 13 aa, Homo sapiens
  CDR3 for beta chain variable domain of TCR clone 184227 (TRBV7-9, TRBJ1-2)
CASSLKQNYGYTF

SEQ ID NO: 368455 - protein, 18 aa, Homo sapiens
  CDR3 for alpha chain variable domain of TCR clone 184228 (TRAV21, TRAJ52)
CAVRPSPAGGTSYGKLTF

SEQ ID NO: 368456 - protein, 16 aa, Homo sapiens
  CDR3 for beta chain variable domain of TCR clone 184228 (TRBV2, TRBJ1-3)
CASSRTGGSTGNTIYF

SEQ ID NO: 368457 - protein, 16 aa, Homo sapiens
  CDR3 for alpha chain variable domain of TCR clone 184229 (TRAV13-2, TRAJ32)
YAENMNYGGATNKLIF

SEQ ID NO: 368458 - protein, 14 aa, Homo sapiens
  CDR3 for beta chain variable domain of TCR clone 184229 (TRBV15, TRBJ2-5)
CATSSTGYQETQYF

SEQ ID NO: 368459 - protein, 11 aa, Homo sapiens
  CDR3 for alpha chain variable domain of TCR clone 184230 (TRAV13-2, TRAJ45)
VTGGGDDGLTF

SEQ ID NO: 368460 - protein, 17 aa, Homo sapiens
  CDR3 for beta chain variable domain of TCR clone 184230 (TRBV19, TRBJ1-1)
CASSIAGRGLMNTEAFF

SEQ ID NO: 368461 - protein, 17 aa, Homo sapiens
  CDR3 for alpha chain variable domain of TCR clone 184231 (TRAV3, TRAJ42)
CAVRHRDYGGSQGNLIF

SEQ ID NO: 368462 - protein, 14 aa, Homo sapiens
  CDR3 for beta chain variable domain of TCR clone 184231 (TRBV7-3, TRBJ2-2)
CASSLNSNTGELFF

SEQ ID NO: 368463 - protein, 11 aa, Homo sapiens
  CDR3 for alpha chain variable domain of TCR clone 184232 (TRAV26-1, TRAJ37)
CIVRVGRELIF

SEQ ID NO: 368464 - protein, 13 aa, Homo sapiens
  CDR3 for beta chain variable domain of TCR clone 184232 (TRBV7-3, TRBJ1-1)
CASSQDWGAEAFF

SEQ ID NO: 368465 - protein, 13 aa, Homo sapiens
  CDR3 for alpha chain variable domain of TCR clone 184233 (TRAV21, TRAJ27)
CAARPGNAGKPTF

SEQ ID NO: 368466 - protein, 15 aa, Homo sapiens
  CDR3 for beta chain variable domain of TCR clone 184233 (TRBV2, TRBJ2-3)
CASSDAGGPPDTQYF

SEQ ID NO: 368467 - protein, 16 aa, Homo sapiens
  CDR3 for alpha chain variable domain of TCR clone 184234 (TRAV30, TRAJ24)
SGTEIVDADSWGKFQF

SEQ ID NO: 368468 - protein, 18 aa, Homo sapiens
  CDR3 for beta chain variable domain of TCR clone 184234 (TRBV11-2, TRBJ2-6)
CASSLNPFLGTGANVLTF

SEQ ID NO: 368469 - protein, 10 aa, Homo sapiens
  CDR3 for alpha chain variable domain of TCR clone 184235 (TRAV20, TRAJ28)
CAVLRGLTGR

SEQ ID NO: 368470 - protein, 17 aa, Homo sapiens
  CDR3 for beta chain variable domain of TCR clone 184235 (TRBV28, TRBJ2-7)
CASSPLPAGGKSYEQYF

SEQ ID NO: 368471 - protein, 15 aa, Homo sapiens
  CDR3 for alpha chain variable domain of TCR clone 184236 (TRAV29/DV5, TRAJ42)
CAAKTDGGSQGNLIF

SEQ ID NO: 368472 - protein, 15 aa, Homo sapiens
  CDR3 for beta chain variable domain of TCR clone 184236 (TRBV5-1, TRBJ2-2)
CASRSQGGNTGELFF

SEQ ID NO: 368473 - protein, 13 aa, Homo sapiens
  CDR3 for alpha chain variable domain of TCR clone 184237 (TRAV17, TRAJ5)
CAPMDTGRRALTF

SEQ ID NO: 368474 - protein, 18 aa, Homo sapiens
  CDR3 for beta chain variable domain of TCR clone 184237 (TRBV10-3, TRBJ2-3)
CAISESRVGPMRGDTQYF

SEQ ID NO: 368475 - protein, 13 aa, Homo sapiens
  CDR3 for alpha chain variable domain of TCR clone 184238 (TRAV2, TRAJ40)
CAVVTSGTYKYIF

SEQ ID NO: 368476 - protein, 14 aa, Homo sapiens
  CDR3 for beta chain variable domain of TCR clone 184238 (TRBV5-4, TRBJ2-1)
CASSLDQGLNEQFF

SEQ ID NO: 368477 - protein, 16 aa, Homo sapiens
  CDR3 for alpha chain variable domain of TCR clone 184239 (TRAV23/DV6, TRAJ9)
CEASIGGNTGGFKTIF

SEQ ID NO: 368478 - protein, 12 aa, Homo sapiens
  CDR3 for beta chain variable domain of TCR clone 184239 (TRBV11-2, TRBJ2-1)
CASSVQREGQFF

SEQ ID NO: 368479 - protein, 14 aa, Homo sapiens
  CDR3 for alpha chain variable domain of TCR clone 184240 (TRAV8-3, TRAJ39)
CAVGTNNAGNMLTF

SEQ ID NO: 368480 - protein, 15 aa, Homo sapiens
  CDR3 for beta chain variable domain of TCR clone 184240 (TRBV4-3, TRBJ1-1)
CSSSQELGRGTEAFF

SEQ ID NO: 368481 - protein, 12 aa, Homo sapiens
  CDR3 for alpha chain variable domain of TCR clone 184241 (TRAV12-3, TRAJ17)
CAMTLTGNKLTF

SEQ ID NO: 368482 - protein, 20 aa, Homo sapiens
  CDR3 for beta chain variable domain of TCR clone 184241 (TRBV7-8, TRBJ2-2)
CASSHLFPGPTIHITGELFS

SEQ ID NO: 368483 - protein, 10 aa, Homo sapiens
  CDR3 for alpha chain variable domain of TCR clone 184242 (TRAV2, TRAJ47)
CAVTGNMETN

SEQ ID NO: 368484 - protein, 17 aa, Homo sapiens
  CDR3 for beta chain variable domain of TCR clone 184242 (TRBV15, TRBJ1-5)
CATSRVKGIYSNQPQHF

SEQ ID NO: 368485 - protein, 15 aa, Homo sapiens
  CDR3 for alpha chain variable domain of TCR clone 184243 (TRAV8-2, TRAJ16)
CVVSDGFSDGKKLLF

SEQ ID NO: 368486 - protein, 15 aa, Homo sapiens
  CDR3 for beta chain variable domain of TCR clone 184243 (TRBV12-4, TRBJ2-5)
CASSPPTGLQETQYF

SEQ ID NO: 368487 - protein, 14 aa, Homo sapiens
  CDR3 for alpha chain variable domain of TCR clone 184244 (TRAV1-2, TRAJ16)
CAVNRFSDGQKLLF

SEQ ID NO: 368488 - protein, 17 aa, Homo sapiens
  CDR3 for beta chain variable domain of TCR clone 184244 (TRBV7-9, TRBJ2-1)
CASSLTPGHHPNNEQFF

SEQ ID NO: 368489 - protein, 15 aa, Homo sapiens
  CDR3 for alpha chain variable domain of TCR clone 184245 (TRAV21, TRAJ53)
CATLNSGGSNYKLTF

SEQ ID NO: 368490 - protein, 13 aa, Homo sapiens
  CDR3 for beta chain variable domain of TCR clone 184245 (TRBV12-5, TRBJ2-1)
CASGVGRGNEQFF

SEQ ID NO: 368491 - protein, 13 aa, Homo sapiens
  CDR3 for alpha chain variable domain of TCR clone 184246 (TRAV29/DV5, TRAJ31)
CSASRNNNARLMF

SEQ ID NO: 368492 - protein, 15 aa, Homo sapiens
  CDR3 for beta chain variable domain of TCR clone 184246 (TRBV7-9, TRBJ1-6)
CASSSPGRGNSPLHF

SEQ ID NO: 368493 - protein, 14 aa, Homo sapiens
  CDR3 for alpha chain variable domain of TCR clone 184247 (TRAV13-1, TRAJ44)
CAAKATGTASKLTF

SEQ ID NO: 368494 - protein, 16 aa, Homo sapiens
  CDR3 for beta chain variable domain of TCR clone 184247 (TRBV4-3, TRBJ2-1)
CASSPALDRGVNEQFF

SEQ ID NO: 368495 - protein, 14 aa, Homo sapiens
  CDR3 for alpha chain variable domain of TCR clone 184248 (TRAV27, TRAJ53)
CAGGDGGSNYKLTF

SEQ ID NO: 368496 - protein, 19 aa, Homo sapiens
  CDR3 for beta chain variable domain of TCR clone 184248 (TRBV25-1, TRBJ2-2)
CAILVYRVDRGRKTGELFF

SEQ ID NO: 368497 - protein, 14 aa, Homo sapiens
  CDR3 for alpha chain variable domain of TCR clone 184249 (TRAV8-3, TRAJ4)
CAVGASGGYNKLIF

SEQ ID NO: 368498 - protein, 15 aa, Homo sapiens
  CDR3 for beta chain variable domain of TCR clone 184249 (TRBV4-1, TRBJ1-4)
CASSDTGGTNEKLFF

SEQ ID NO: 368499 - protein, 11 aa, Homo sapiens
  CDR3 for alpha chain variable domain of TCR clone 184250 (TRAV1-2, TRAJ20)
GAVSNDYKLSF

SEQ ID NO: 368500 - protein, 13 aa, Homo sapiens
  CDR3 for beta chain variable domain of TCR clone 184250 (TRBV7-9, TRBJ1-2)
CASSLKQNYGYTF

SEQ ID NO: 368501 - protein, 11 aa, Homo sapiens
  CDR3 for alpha chain variable domain of TCR clone 184251 (TRAV1-2, TRAJ20)
CAVSNDYKLSF

SEQ ID NO: 368502 - protein, 16 aa, Homo sapiens
  CDR3 for beta chain variable domain of TCR clone 184251 (TRBV29-1, TRBJ2-6)
CSVEDITYTGANVLTF

SEQ ID NO: 368503 - protein, 16 aa, Homo sapiens
  CDR3 for alpha chain variable domain of TCR clone 184252 (TRAV21, TRAJ52)
RALTNAGGTSYGKLTF

SEQ ID NO: 368504 - protein, 13 aa, Homo sapiens
  CDR3 for beta chain variable domain of TCR clone 184252 (TRBV20-1, TRBJ2-3)
CSARLAGTDTQYF

SEQ ID NO: 368505 - protein, 12 aa, Homo sapiens
  CDR3 for alpha chain variable domain of TCR clone 184253 (TRAV12-3, TRAJ17)
CAMTLTGNKLTF

SEQ ID NO: 368506 - protein, 17 aa, Homo sapiens
  CDR3 for beta chain variable domain of TCR clone 184253 (TRBV7-3, TRBJ2-3)
CASSLMKTVRGADTQYF

SEQ ID NO: 368507 - protein, 17 aa, Homo sapiens
  CDR3 for alpha chain variable domain of TCR clone 184254 (TRAV3, TRAJ6)
CAVRDGPRAGGSYIPTF

SEQ ID NO: 368508 - protein, 15 aa, Homo sapiens
  CDR3 for beta chain variable domain of TCR clone 184254 (TRBV13, TRBJ1-5)
CASSFGQGGVQPQHF

SEQ ID NO: 368509 - protein, 13 aa, Homo sapiens
  CDR3 for alpha chain variable domain of TCR clone 184255 (TRAV13-1, TRAJ39)
CSKYSNAGNMLTF

SEQ ID NO: 368510 - protein, 18 aa, Homo sapiens
  CDR3 for beta chain variable domain of TCR clone 184255 (TRBV10-2, TRBJ2-2)
CISATAVHRQADAGELFF

SEQ ID NO: 368511 - protein, 14 aa, Homo sapiens
  CDR3 for alpha chain variable domain of TCR clone 184256 (TRAV17, TRAJ39)
GATDPVRAGNMLTF

SEQ ID NO: 368512 - protein, 15 aa, Homo sapiens
  CDR3 for beta chain variable domain of TCR clone 184256 (TRBV13, TRBJ1-5)
CASSFGQGGVQPQHF

SEQ ID NO: 368513 - protein, 10 aa, Homo sapiens
  CDR3 for alpha chain variable domain of TCR clone 184257 (TRAV5, TRAJ34)
CAADTDKLIF

SEQ ID NO: 368514 - protein, 12 aa, Homo sapiens
  CDR3 for beta chain variable domain of TCR clone 184257 (TRBV11-2, TRBJ2-2)
CASSLGGGELFF

SEQ ID NO: 368515 - protein, 18 aa, Homo sapiens
  CDR3 for alpha chain variable domain of TCR clone 184258 (TRAV21, TRAJ52)
CSVRPSPAGGTSYGKLTF

SEQ ID NO: 368516 - protein, 13 aa, Homo sapiens
  CDR3 for beta chain variable domain of TCR clone 184258 (TRBV10-3, TRBJ2-7)
CASKLAVNYEQYF

SEQ ID NO: 368517 - protein, 13 aa, Homo sapiens
  CDR3 for alpha chain variable domain of TCR clone 184259 (TRAV38-1, TRAJ34)
CVVTGYNADKLIF

SEQ ID NO: 368518 - protein, 13 aa, Homo sapiens
  CDR3 for beta chain variable domain of TCR clone 184259 (TRBV28, TRBJ2-7)
CASKAGGVYEQYF

SEQ ID NO: 368519 - protein, 13 aa, Homo sapiens
  CDR3 for alpha chain variable domain of TCR clone 184260 (TRAV13-1, TRAJ4)
CAASIGGYNKLMF

SEQ ID NO: 368520 - protein, 16 aa, Homo sapiens
  CDR3 for beta chain variable domain of TCR clone 184260 (TRBV20-1, TRBJ2-1)
CSAPGLAGSYSDEQFF

SEQ ID NO: 368521 - protein, 15 aa, Homo sapiens
  CDR3 for alpha chain variable domain of TCR clone 184261 (TRAV21, TRAJ32)
CAAAPYGGATNKLIF

SEQ ID NO: 368522 - protein, 17 aa, Homo sapiens
  CDR3 for beta chain variable domain of TCR clone 184261 (TRBV18, TRBJ2-3)
CASSPFGDVGFTDTQYF

SEQ ID NO: 368523 - protein, 12 aa, Homo sapiens
  CDR3 for alpha chain variable domain of TCR clone 184262 (TRAV8-3, TRAJ42)
CAVDPVQGNLIF

SEQ ID NO: 368524 - protein, 13 aa, Homo sapiens
  CDR3 for beta chain variable domain of TCR clone 184262 (TRBV10-3, TRBJ2-7)
CASKLAVNYEQYF

SEQ ID NO: 368525 - protein, 14 aa, Homo sapiens
  CDR3 for alpha chain variable domain of TCR clone 184263 (TRAV12-3, TRAJ10)
SHLPLTGGGNKLTF

SEQ ID NO: 368526 - protein, 16 aa, Homo sapiens
  CDR3 for beta chain variable domain of TCR clone 184263 (TRBV4-3, TRBJ2-1)
CASGPALDRGVNEQFF

SEQ ID NO: 368527 - protein, 19 aa, Homo sapiens
  CDR3 for alpha chain variable domain of TCR clone 184264 (TRAV8-3, TRAJ4)
LWVRDPTSNDPGGYNKLIF

SEQ ID NO: 368528 - protein, 13 aa, Homo sapiens
  CDR3 for beta chain variable domain of TCR clone 184264 (TRBV20-1, TRBJ1-2)
CSATGIQGSGYTF

SEQ ID NO: 368529 - protein, 14 aa, Homo sapiens
  CDR3 for alpha chain variable domain of TCR clone 184265 (TRAV8-4, TRAJ13)
CAVTLSGGYQKVTF

SEQ ID NO: 368530 - protein, 15 aa, Homo sapiens
  CDR3 for beta chain variable domain of TCR clone 184265 (TRBV7-2, TRBJ2-1)
CASSSGLAGGNEQFF

SEQ ID NO: 368531 - protein, 15 aa, Homo sapiens
  CDR3 for alpha chain variable domain of TCR clone 184266 (TRAV1-2, TRAJ17)
CAVRGYGAAGNKLTF

SEQ ID NO: 368532 - protein, 17 aa, Homo sapiens
  CDR3 for beta chain variable domain of TCR clone 184266 (TRBV11-2, TRBJ2-5)
PAAPQGGRERPQETQYF

SEQ ID NO: 368533 - protein, 13 aa, Homo sapiens
  CDR3 for alpha chain variable domain of TCR clone 184267 (TRAV1-2, TRAJ9)
CAVLNTGGFKTIF

SEQ ID NO: 368534 - protein, 17 aa, Homo sapiens
  CDR3 for beta chain variable domain of TCR clone 184267 (TRBV13, TRBJ2-3)
CASRLSRVAGGRNTQYF

SEQ ID NO: 368535 - protein, 17 aa, Homo sapiens
  CDR3 for alpha chain variable domain of TCR clone 184268 (TRAV13-1, TRAJ10)
CAASIWRGTGGGNKLTF

SEQ ID NO: 368536 - protein, 17 aa, Homo sapiens
  CDR3 for beta chain variable domain of TCR clone 184268 (TRBV11-2, TRBJ2-1)
CASSLYPPGVEYNEQFF

SEQ ID NO: 368537 - protein, 15 aa, Homo sapiens
  CDR3 for alpha chain variable domain of TCR clone 184269 (TRAV12-1, TRAJ45)
CVVLSGGGGADGLTF

SEQ ID NO: 368538 - protein, 13 aa, Homo sapiens
  CDR3 for beta chain variable domain of TCR clone 184269 (TRBV18, TRBJ2-5)
CASSLQGQETQYF

SEQ ID NO: 368539 - protein, 11 aa, Homo sapiens
  CDR3 for alpha chain variable domain of TCR clone 184270 (TRAV1-2, TRAJ40)
CAVPGTYKYII

SEQ ID NO: 368540 - protein, 16 aa, Homo sapiens
  CDR3 for beta chain variable domain of TCR clone 184270 (TRBV29-1, TRBJ2-7)
CSVEVVGTSGSYEQYF

SEQ ID NO: 368541 - protein, 13 aa, Homo sapiens
  CDR3 for alpha chain variable domain of TCR clone 184271 (TRAV25, TRAJ34)
CAGCQYNTDKLIF

SEQ ID NO: 368542 - protein, 12 aa, Homo sapiens
  CDR3 for beta chain variable domain of TCR clone 184271 (TRBV27, TRBJ2-7)
CASSGGFYEQYV

SEQ ID NO: 368543 - protein, 13 aa, Homo sapiens
  CDR3 for alpha chain variable domain of TCR clone 184272 (TRAV13-1, TRAJ5)
CAASDTGRRALTF

SEQ ID NO: 368544 - protein, 14 aa, Homo sapiens
  CDR3 for beta chain variable domain of TCR clone 184272 (TRBV28, TRBJ1-5)
CASIPYGLEQPQHF

SEQ ID NO: 368545 - protein, 14 aa, Homo sapiens
  CDR3 for alpha chain variable domain of TCR clone 184273 (TRAV26-1, TRAJ22)
CIVRVSGSARQLTF

SEQ ID NO: 368546 - protein, 17 aa, Homo sapiens
  CDR3 for beta chain variable domain of TCR clone 184273 (TRBV7-3, TRBJ2-3)
CASSPGGLAGFGDTQYF

SEQ ID NO: 368547 - protein, 11 aa, Homo sapiens
  CDR3 for alpha chain variable domain of TCR clone 184274 (TRAV2, TRAJ13)
CATGGYQKVTF

SEQ ID NO: 368548 - protein, 14 aa, Homo sapiens
  CDR3 for beta chain variable domain of TCR clone 184274 (TRBV7-3, TRBJ2-1)
CASSLAGGTNEQFF

SEQ ID NO: 368549 - protein, 13 aa, Homo sapiens
  CDR3 for alpha chain variable domain of TCR clone 184275 (TRAV2, TRAJ40)
CAVVTSGTYKYIF

SEQ ID NO: 368550 - protein, 14 aa, Homo sapiens
  CDR3 for beta chain variable domain of TCR clone 184275 (TRBV7-2, TRBJ2-5)
CASSPRGSSETQYF

SEQ ID NO: 368551 - protein, 15 aa, Homo sapiens
  CDR3 for alpha chain variable domain of TCR clone 184276 (TRAV21, TRAJ53)
CATLTSGGSNYKLTF

SEQ ID NO: 368552 - protein, 13 aa, Homo sapiens
  CDR3 for beta chain variable domain of TCR clone 184276 (TRBV11-2, TRBJ2-5)
CASSSTGEETQYF

SEQ ID NO: 368553 - protein, 13 aa, Homo sapiens
  CDR3 for alpha chain variable domain of TCR clone 184277 (TRAV12-3, TRAJ7)
CAMSASGNNRLAF

SEQ ID NO: 368554 - protein, 14 aa, Homo sapiens
  CDR3 for beta chain variable domain of TCR clone 184277 (TRBV5-1, TRBJ1-2)
CASNIGTGDYGYTF

SEQ ID NO: 368555 - protein, 13 aa, Homo sapiens
  CDR3 for alpha chain variable domain of TCR clone 184278 (TRAV25, TRAJ54)
CAGTIQGAQKLVF

SEQ ID NO: 368556 - protein, 14 aa, Homo sapiens
  CDR3 for beta chain variable domain of TCR clone 184278 (TRBV27, TRBJ2-2)
CASRPGVNTGELFF

SEQ ID NO: 368557 - protein, 16 aa, Homo sapiens
  CDR3 for alpha chain variable domain of TCR clone 184279 (TRAV3, TRAJ37)
CAVRPHGSGNTGKLIF

SEQ ID NO: 368558 - protein, 17 aa, Homo sapiens
  CDR3 for beta chain variable domain of TCR clone 184279 (TRBV20-1, TRBJ2-1)
GSASSAGLAGSYNEQFF

SEQ ID NO: 368559 - protein, 15 aa, Homo sapiens
  CDR3 for alpha chain variable domain of TCR clone 184280 (TRAV23/DV6, TRAJ13)
CAAWPGGGGYQKVTF

SEQ ID NO: 368560 - protein, 17 aa, Homo sapiens
  CDR3 for beta chain variable domain of TCR clone 184280 (TRBV19, TRBJ2-7)
CASSICFYDSYPYEQYF

SEQ ID NO: 368561 - protein, 15 aa, Homo sapiens
  CDR3 for alpha chain variable domain of TCR clone 184281 (TRAV27, TRAJ38)
CAARRNAGNNRKLIW

SEQ ID NO: 368562 - protein, 15 aa, Homo sapiens
  CDR3 for beta chain variable domain of TCR clone 184281 (TRBV5-1, TRBJ2-7)
CASSLNGGPAREQYF

SEQ ID NO: 368563 - protein, 12 aa, Homo sapiens
  CDR3 for alpha chain variable domain of TCR clone 184282 (TRAV2, TRAJ26)
CAASPGRLWSEF

SEQ ID NO: 368564 - protein, 17 aa, Homo sapiens
  CDR3 for beta chain variable domain of TCR clone 184282 (TRBV11-2, TRBJ2-1)
CASSLYPPGVEYNEQFF

SEQ ID NO: 368565 - protein, 22 aa, Homo sapiens
  CDR3 for alpha chain variable domain of TCR clone 184283 (TRAV4, )
CLGGRVKPHIQNPDPAVYQLRD

SEQ ID NO: 368566 - protein, 14 aa, Homo sapiens
  CDR3 for beta chain variable domain of TCR clone 184283 (TRBV19, TRBJ2-1)
CASPTFVLSGEQFF

SEQ ID NO: 368567 - protein, 14 aa, Homo sapiens
  CDR3 for alpha chain variable domain of TCR clone 184284 (TRAV17, TRAJ57)
CATDASGGSEKLVF

SEQ ID NO: 368568 - protein, 14 aa, Homo sapiens
  CDR3 for beta chain variable domain of TCR clone 184284 (TRBV4-2, TRBJ2-1)
CASGLDRAYNEQFC

SEQ ID NO: 368569 - protein, 15 aa, Homo sapiens
  CDR3 for alpha chain variable domain of TCR clone 184285 (TRAV27, TRAJ38)
CAARRNAGNNRKLIW

SEQ ID NO: 368570 - protein, 15 aa, Homo sapiens
  CDR3 for beta chain variable domain of TCR clone 184285 (TRBV19, TRBJ2-7)
CASRPTPGLSIEQYF

SEQ ID NO: 368571 - protein, 14 aa, Homo sapiens
  CDR3 for alpha chain variable domain of TCR clone 184286 (TRAV23/DV6, TRAJ13)
CAAMYSGGYTKVTF

SEQ ID NO: 368572 - protein, 16 aa, Homo sapiens
  CDR3 for beta chain variable domain of TCR clone 184286 (TRBV9, TRBJ2-1)
CASSALGGIGNNEQFF

SEQ ID NO: 368573 - protein, 14 aa, Homo sapiens
  CDR3 for alpha chain variable domain of TCR clone 184287 (TRAV12-2, TRAJ13)
CAVKKTGGYQKVTF

SEQ ID NO: 368574 - protein, 15 aa, Homo sapiens
  CDR3 for beta chain variable domain of TCR clone 184287 (TRBV19, TRBJ2-1)
CASSLETSGYNEQFF

SEQ ID NO: 368575 - protein, 14 aa, Homo sapiens
  CDR3 for alpha chain variable domain of TCR clone 184288 (TRAV12-3, TRAJ10)
SHLPLTGGGNKLTF

SEQ ID NO: 368576 - protein, 14 aa, Homo sapiens
  CDR3 for beta chain variable domain of TCR clone 184288 (TRBV6-5, TRBJ2-1)
CQQLRCGAGNEQFF

SEQ ID NO: 368577 - protein, 13 aa, Homo sapiens
  CDR3 for alpha chain variable domain of TCR clone 184289 (TRAV17, TRAJ15)
CATDARAGTALIF

SEQ ID NO: 368578 - protein, 15 aa, Homo sapiens
  CDR3 for beta chain variable domain of TCR clone 184289 (TRBV20-1, TRBJ2-7)
CSASDRVSGMDEQYF

SEQ ID NO: 368579 - protein, 16 aa, Homo sapiens
  CDR3 for alpha chain variable domain of TCR clone 184290 (TRAV3, TRAJ10)
CAVRDMRAGGGNKLTF

SEQ ID NO: 368580 - protein, 14 aa, Homo sapiens
  CDR3 for beta chain variable domain of TCR clone 184290 (TRBV4-2, TRBJ1-2)
CASSQVGQNYGYTF

SEQ ID NO: 368581 - protein, 13 aa, Homo sapiens
  CDR3 for alpha chain variable domain of TCR clone 184291 (TRAV13-1, TRAJ21)
CAASIYNFNKFYF

SEQ ID NO: 368582 - protein, 13 aa, Homo sapiens
  CDR3 for beta chain variable domain of TCR clone 184291 (TRBV27, TRBJ1-4)
CASSVMGDENLFF

SEQ ID NO: 368583 - protein, 16 aa, Homo sapiens
  CDR3 for alpha chain variable domain of TCR clone 184292 (TRAV30, TRAJ24)
CGTEIVDDDSWGKFQF

SEQ ID NO: 368584 - protein, 14 aa, Homo sapiens
  CDR3 for beta chain variable domain of TCR clone 184292 (TRBV7-2, TRBJ1-2)
CASSQTGSTYGYTF

SEQ ID NO: 368585 - protein, 13 aa, Homo sapiens
  CDR3 for alpha chain variable domain of TCR clone 184293 (TRAV12-2, TRAJ15)
CAVFNQAGTALLF

SEQ ID NO: 368586 - protein, 15 aa, Homo sapiens
  CDR3 for beta chain variable domain of TCR clone 184293 (TRBV7-8, TRBJ1-5)
CASSRGGGADQPQHF

SEQ ID NO: 368587 - protein, 11 aa, Homo sapiens
  CDR3 for alpha chain variable domain of TCR clone 184294 (TRAV1-2, TRAJ11)
CAVRGYSTLTF

SEQ ID NO: 368588 - protein, 13 aa, Homo sapiens
  CDR3 for beta chain variable domain of TCR clone 184294 (TRBV10-3, TRBJ2-7)
CASKLAVNYEQYS

SEQ ID NO: 368589 - protein, 15 aa, Homo sapiens
  CDR3 for alpha chain variable domain of TCR clone 184295 (TRAV25, TRAJ53)
CPTSNSGCSNYKLTF

SEQ ID NO: 368590 - protein, 14 aa, Homo sapiens
  CDR3 for beta chain variable domain of TCR clone 184295 (TRBV11-2, TRBJ2-3)
CASSRLARTDTQYF

SEQ ID NO: 368591 - protein, 14 aa, Homo sapiens
  CDR3 for alpha chain variable domain of TCR clone 184296 (TRAV20, TRAJ42)
CAVQAGGGQGNLIF

SEQ ID NO: 368592 - protein, 13 aa, Homo sapiens
  CDR3 for beta chain variable domain of TCR clone 184296 (TRBV6-4, TRBJ1-5)
CASSADLNQPQHF

SEQ ID NO: 368593 - protein, 15 aa, Homo sapiens
  CDR3 for alpha chain variable domain of TCR clone 184297 (TRAV8-3, TRAJ15)
CAVCAANQAGTALIF

SEQ ID NO: 368594 - protein, 14 aa, Homo sapiens
  CDR3 for beta chain variable domain of TCR clone 184297 (TRBV20-1, TRBJ2-1)
CSPNDEASYNEQFF

SEQ ID NO: 368595 - protein, 14 aa, Homo sapiens
  CDR3 for alpha chain variable domain of TCR clone 184298 (TRAV12-2, TRAJ13)
CAVKKTGGYQKVTF

SEQ ID NO: 368596 - protein, 14 aa, Homo sapiens
  CDR3 for beta chain variable domain of TCR clone 184298 (TRBV19, TRBJ2-1)
CAIPTFVLSGEQFF

SEQ ID NO: 368597 - protein, 12 aa, Homo sapiens
  CDR3 for alpha chain variable domain of TCR clone 184299 (TRAV12-3, TRAJ17)
CAMTLTGNKLTF

SEQ ID NO: 368598 - protein, 13 aa, Homo sapiens
  CDR3 for beta chain variable domain of TCR clone 184299 (TRBV27, TRBJ2-1)
CASRTLGVDEQFF

SEQ ID NO: 368599 - protein, 13 aa, Homo sapiens
  CDR3 for alpha chain variable domain of TCR clone 184300 (TRAV20, TRAJ20)
CAVRWVRDYKLSF

SEQ ID NO: 368600 - protein, 16 aa, Homo sapiens
  CDR3 for beta chain variable domain of TCR clone 184300 (TRBV19, TRBJ2-3)
CASSPGAASRTDTQYF

SEQ ID NO: 368601 - protein, 10 aa, Homo sapiens
  CDR3 for alpha chain variable domain of TCR clone 184301 (TRAV2, TRAJ40)
CAGYLRNLQI

SEQ ID NO: 368602 - protein, 16 aa, Homo sapiens
  CDR3 for beta chain variable domain of TCR clone 184301 (TRBV29-1, TRBJ1-2)
CSVEANRDIANYGYTF

SEQ ID NO: 368603 - protein, 15 aa, Homo sapiens
  CDR3 for alpha chain variable domain of TCR clone 184302 (TRAV26-1, TRAJ44)
CIVRANTGTASKLTL

SEQ ID NO: 368604 - protein, 12 aa, Homo sapiens
  CDR3 for beta chain variable domain of TCR clone 184302 (TRBV11-2, TRBJ2-2)
CASSLGGGELFF

SEQ ID NO: 368605 - protein, 12 aa, Homo sapiens
  CDR3 for alpha chain variable domain of TCR clone 184303 (TRAV21, TRAJ33)
CAKMDSNYQLIW

SEQ ID NO: 368606 - protein, 16 aa, Homo sapiens
  CDR3 for beta chain variable domain of TCR clone 184303 (TRBV28, TRBJ2-7)
CASSFPDRRLTYEQYF

SEQ ID NO: 368607 - protein, 15 aa, Homo sapiens
  CDR3 for alpha chain variable domain of TCR clone 184304 (TRAV20, TRAJ42)
CAVQTTRGSQGNLIF

SEQ ID NO: 368608 - protein, 11 aa, Homo sapiens
  CDR3 for beta chain variable domain of TCR clone 184304 (TRBV12-4, TRBJ2-1)
CASSKFNEQFF

SEQ ID NO: 368609 - protein, 17 aa, Homo sapiens
  CDR3 for alpha chain variable domain of TCR clone 184305 (TRAV13-1, TRAJ31)
CAPRDRLMFGDGTQLGV

SEQ ID NO: 368610 - protein, 12 aa, Homo sapiens
  CDR3 for beta chain variable domain of TCR clone 184305 (TRBV7-9, TRBJ2-7)
CASSLQGYEQYF

SEQ ID NO: 368611 - protein, 12 aa, Homo sapiens
  CDR3 for alpha chain variable domain of TCR clone 184306 (TRAV2, TRAJ9)
CAVGAGGFKTIF

SEQ ID NO: 368612 - protein, 15 aa, Homo sapiens
  CDR3 for beta chain variable domain of TCR clone 184306 (TRBV7-8, TRBJ2-7)
CASSLGTGNPYEQYF

SEQ ID NO: 368613 - protein, 15 aa, Homo sapiens
  CDR3 for alpha chain variable domain of TCR clone 184307 (TRAV23/DV6, TRAJ12)
CAAIYLGAMDSSYKL

SEQ ID NO: 368614 - protein, 14 aa, Homo sapiens
  CDR3 for beta chain variable domain of TCR clone 184307 (TRBV20-1, TRBJ2-1)
CSARRGGSYNEQFF

SEQ ID NO: 368615 - protein, 12 aa, Homo sapiens
  CDR3 for alpha chain variable domain of TCR clone 184308 (TRAV2, TRAJ33)
CAFMDSNYQLIW

SEQ ID NO: 368616 - protein, 16 aa, Homo sapiens
  CDR3 for beta chain variable domain of TCR clone 184308 (TRBV7-3, TRBJ2-2)
CASSLKRGTLSGELFF

SEQ ID NO: 368617 - protein, 13 aa, Homo sapiens
  CDR3 for alpha chain variable domain of TCR clone 184309 (TRAV12-1, TRAJ6)
CVVFPGGSYIPTF

SEQ ID NO: 368618 - protein, 15 aa, Homo sapiens
  CDR3 for beta chain variable domain of TCR clone 184309 (TRBV4-1, TRBJ2-7)
CASSQNTGRLYEQYF

SEQ ID NO: 368619 - protein, 15 aa, Homo sapiens
  CDR3 for alpha chain variable domain of TCR clone 184310 (TRAV12-2, TRAJ53)
CAVNGGGGSTYKLTF

SEQ ID NO: 368620 - protein, 14 aa, Homo sapiens
  CDR3 for beta chain variable domain of TCR clone 184310 (TRBV18, TRBJ2-7)
CASSPRGGAYEQYF

SEQ ID NO: 368621 - protein, 15 aa, Homo sapiens
  CDR3 for alpha chain variable domain of TCR clone 184311 (TRAV17, TRAJ57)
CATGPSQGGSEKLVF

SEQ ID NO: 368622 - protein, 15 aa, Homo sapiens
  CDR3 for beta chain variable domain of TCR clone 184311 (TRBV6-3, TRBJ2-7)
CASSSPGTVFYGQYF

SEQ ID NO: 368623 - protein, 13 aa, Homo sapiens
  CDR3 for alpha chain variable domain of TCR clone 184312 (TRAV26-1, TRAJ34)
CIVRPWITDKLIF

SEQ ID NO: 368624 - protein, 14 aa, Homo sapiens
  CDR3 for beta chain variable domain of TCR clone 184312 (TRBV5-8, TRBJ2-3)
CASSLGQGTDTQYF

SEQ ID NO: 368625 - protein, 14 aa, Homo sapiens
  CDR3 for alpha chain variable domain of TCR clone 184313 (TRAV23/DV6, TRAJ37)
CAASTSSNTGKLIF

SEQ ID NO: 368626 - protein, 13 aa, Homo sapiens
  CDR3 for beta chain variable domain of TCR clone 184313 (TRBV7-7, TRBJ1-1)
CTSSLGANTEAFF

SEQ ID NO: 368627 - protein, 12 aa, Homo sapiens
  CDR3 for alpha chain variable domain of TCR clone 184314 (TRAV12-3, TRAJ17)
CAMTLKGNKLTF

SEQ ID NO: 368628 - protein, 15 aa, Homo sapiens
  CDR3 for beta chain variable domain of TCR clone 184314 (TRBV20-1, TRBJ2-7)
CSARDRVSGMDEQYL

SEQ ID NO: 368629 - protein, 14 aa, Homo sapiens
  CDR3 for alpha chain variable domain of TCR clone 184315 (TRAV26-1, TRAJ39)
CIVRGSRSGNMLTF

SEQ ID NO: 368630 - protein, 14 aa, Homo sapiens
  CDR3 for beta chain variable domain of TCR clone 184315 (TRBV20-1, TRBJ2-1)
CSAQIGGSANEQFF

SEQ ID NO: 368631 - protein, 14 aa, Homo sapiens
  CDR3 for alpha chain variable domain of TCR clone 184316 (TRAV3, TRAJ33)
CAVRDMGSNYQLVW

SEQ ID NO: 368632 - protein, 17 aa, Homo sapiens
  CDR3 for beta chain variable domain of TCR clone 184316 (TRBV19, TRBJ2-1)
CASSIWSAQPTHNEQFF

SEQ ID NO: 368633 - protein, 16 aa, Homo sapiens
  CDR3 for alpha chain variable domain of TCR clone 184317 (TRAV23/DV6, TRAJ57)
CAASSTLSQGGSEKLF

SEQ ID NO: 368634 - protein, 14 aa, Homo sapiens
  CDR3 for beta chain variable domain of TCR clone 184317 (TRBV25-1, TRBJ1-1)
CASTHLVGNTEAFF

SEQ ID NO: 368635 - protein, 13 aa, Homo sapiens
  CDR3 for alpha chain variable domain of TCR clone 184318 (TRAV3, TRAJ30)
CAVRDRGDDKIIF

SEQ ID NO: 368636 - protein, 14 aa, Homo sapiens
  CDR3 for beta chain variable domain of TCR clone 184318 (TRBV13, TRBJ2-5)
CASSLGPRGETQYF

SEQ ID NO: 368637 - protein, 18 aa, Homo sapiens
  CDR3 for alpha chain variable domain of TCR clone 184319 (TRAV13-1, TRAJ52)
CVARKRSAGGTSYGKLTF

SEQ ID NO: 368638 - protein, 13 aa, Homo sapiens
  CDR3 for beta chain variable domain of TCR clone 184319 (TRBV12-4, TRBJ1-2)
CASSLRQGKGYTF

SEQ ID NO: 368639 - protein, 13 aa, Homo sapiens
  CDR3 for alpha chain variable domain of TCR clone 184320 (TRAV2, TRAJ40)
CAVVTSGTYKYVF

SEQ ID NO: 368640 - protein, 14 aa, Homo sapiens
  CDR3 for beta chain variable domain of TCR clone 184320 (TRBV19, TRBJ2-1)
CASPTFVLSGEQCF

SEQ ID NO: 368641 - protein, 12 aa, Homo sapiens
  CDR3 for alpha chain variable domain of TCR clone 184321 (TRAV8-3, TRAJ26)
CAGDNYVQNFFF

SEQ ID NO: 368642 - protein, 12 aa, Homo sapiens
  CDR3 for beta chain variable domain of TCR clone 184321 (TRBV11-2, TRBJ2-1)
CASSPGNNEQFF

SEQ ID NO: 368643 - protein, 12 aa, Homo sapiens
  CDR3 for alpha chain variable domain of TCR clone 184322 (TRAV2, TRAJ36)
CAELTGANNLFF

SEQ ID NO: 368644 - protein, 14 aa, Homo sapiens
  CDR3 for beta chain variable domain of TCR clone 184322 (TRBV18, TRBJ2-7)
CASSPRGGAYGQYF

SEQ ID NO: 368645 - protein, 13 aa, Homo sapiens
  CDR3 for alpha chain variable domain of TCR clone 184323 (TRAV23/DV6, TRAJ47)
CAASIRNGIWKQT

SEQ ID NO: 368646 - protein, 13 aa, Homo sapiens
  CDR3 for beta chain variable domain of TCR clone 184323 (TRBV19, TRBJ1-2)
CASSQGQVYGYSF

SEQ ID NO: 368647 - protein, 12 aa, Homo sapiens
  CDR3 for alpha chain variable domain of TCR clone 184324 (TRAV12-3, TRAJ17)
CAMTLTGNKLTF

SEQ ID NO: 368648 - protein, 13 aa, Homo sapiens
  CDR3 for beta chain variable domain of TCR clone 184324 (TRBV7-3, TRBJ1-1)
WASSQDWGAEAFF

SEQ ID NO: 368649 - protein, 16 aa, Homo sapiens
  CDR3 for alpha chain variable domain of TCR clone 184325 (TRAV8-3, TRAJ8)
CAVPRDGNTGFQKLVF

SEQ ID NO: 368650 - protein, 15 aa, Homo sapiens
  CDR3 for beta chain variable domain of TCR clone 184325 (TRBV28, TRBJ1-1)
CASTSTRGLNTEAFF

SEQ ID NO: 368651 - protein, 14 aa, Homo sapiens
  CDR3 for alpha chain variable domain of TCR clone 184326 (TRAV29/DV5, TRAJ36)
CAARRKTGANHPFF

SEQ ID NO: 368652 - protein, 14 aa, Homo sapiens
  CDR3 for beta chain variable domain of TCR clone 184326 (TRBV12-5, TRBJ2-5)
CASGSRTHQETQYF

SEQ ID NO: 368653 - protein, 14 aa, Homo sapiens
  CDR3 for alpha chain variable domain of TCR clone 184327 (TRAV12-2, TRAJ13)
CAVKKTGGYQKVTF

SEQ ID NO: 368654 - protein, 15 aa, Homo sapiens
  CDR3 for beta chain variable domain of TCR clone 184327 (TRBV27, TRBJ2-2)
CASSSETAFTGELFF

SEQ ID NO: 368655 - protein, 17 aa, Homo sapiens
  CDR3 for alpha chain variable domain of TCR clone 184328 (TRAV36/DV7, TRAJ42)
CAGGGMNYGGSQGKLIF

SEQ ID NO: 368656 - protein, 13 aa, Homo sapiens
  CDR3 for beta chain variable domain of TCR clone 184328 (TRBV19, TRBJ2-5)
CASSIHSQETQYF

SEQ ID NO: 368657 - protein, 14 aa, Homo sapiens
  CDR3 for alpha chain variable domain of TCR clone 184329 (TRAV12-3, TRAJ3)
CNERGNSSASKIIF

SEQ ID NO: 368658 - protein, 14 aa, Homo sapiens
  CDR3 for beta chain variable domain of TCR clone 184329 (TRBV12-4, TRBJ2-2)
CASNQGANTGELFF

SEQ ID NO: 368659 - protein, 14 aa, Homo sapiens
  CDR3 for alpha chain variable domain of TCR clone 184330 (TRAV1-2, TRAJ16)
CAVNRFSDGQQLLF

SEQ ID NO: 368660 - protein, 15 aa, Homo sapiens
  CDR3 for beta chain variable domain of TCR clone 184330 (TRBV9, TRBJ1-6)
CASSVAGTGESPLHF

SEQ ID NO: 368661 - protein, 14 aa, Homo sapiens
  CDR3 for alpha chain variable domain of TCR clone 184331 (TRAV8-4, TRAJ8)
CAVSVGTGFLKLVF

SEQ ID NO: 368662 - protein, 15 aa, Homo sapiens
  CDR3 for beta chain variable domain of TCR clone 184331 (TRBV2, TRBJ2-3)
CASSGEGTGTDTQYF

SEQ ID NO: 368663 - protein, 14 aa, Homo sapiens
  CDR3 for alpha chain variable domain of TCR clone 184332 (TRAV8-2, TRAJ4)
CVVSPSGGYNKLIF

SEQ ID NO: 368664 - protein, 13 aa, Homo sapiens
  CDR3 for beta chain variable domain of TCR clone 184332 (TRBV7-9, TRBJ2-7)
CASSFAGAYEQYF

SEQ ID NO: 368665 - protein, 15 aa, Homo sapiens
  CDR3 for alpha chain variable domain of TCR clone 184333 (TRAV1-2, TRAJ15)
CAVDVMGSSGTALIF

SEQ ID NO: 368666 - protein, 13 aa, Homo sapiens
  CDR3 for beta chain variable domain of TCR clone 184333 (TRBV20-1, TRBJ1-1)
CSAFDRENTAAFF

SEQ ID NO: 368667 - protein, 13 aa, Homo sapiens
  CDR3 for alpha chain variable domain of TCR clone 184334 (TRAV21, TRAJ20)
CAVGLRVDYKLSF

SEQ ID NO: 368668 - protein, 14 aa, Homo sapiens
  CDR3 for beta chain variable domain of TCR clone 184334 (TRBV6-6, TRBJ1-3)
CASSRQGSGNTIYF

SEQ ID NO: 368669 - protein, 16 aa, Homo sapiens
  CDR3 for alpha chain variable domain of TCR clone 184335 (TRAV27, TRAJ13)
CAGAKSDSGGYQKVTF

SEQ ID NO: 368670 - protein, 15 aa, Homo sapiens
  CDR3 for beta chain variable domain of TCR clone 184335 (TRBV19, TRBJ1-1)
CASTSGQIQNTEAFF

SEQ ID NO: 368671 - protein, 12 aa, Homo sapiens
  CDR3 for alpha chain variable domain of TCR clone 184336 (TRAV2, TRAJ32)
CAVGGATNKLIF

SEQ ID NO: 368672 - protein, 15 aa, Homo sapiens
  CDR3 for beta chain variable domain of TCR clone 184336 (TRBV7-2, TRBJ2-1)
CASSSRTSRKDEQFF

SEQ ID NO: 368673 - protein, 15 aa, Homo sapiens
  CDR3 for alpha chain variable domain of TCR clone 184337 (TRAV2, TRAJ30)
CAVEDPLNRDDKIIF

SEQ ID NO: 368674 - protein, 14 aa, Homo sapiens
  CDR3 for beta chain variable domain of TCR clone 184337 (TRBV11-2, TRBJ2-7)
CASSSTGEGYEQYF

SEQ ID NO: 368675 - protein, 13 aa, Homo sapiens
  CDR3 for alpha chain variable domain of TCR clone 184338 (TRAV13-1, TRAJ5)
CAAEHKGRRALTF

SEQ ID NO: 368676 - protein, 13 aa, Homo sapiens
  CDR3 for beta chain variable domain of TCR clone 184338 (TRBV2, TRBJ1-4)
CASNRGTNEKLFF

SEQ ID NO: 368677 - protein, 11 aa, Homo sapiens
  CDR3 for alpha chain variable domain of TCR clone 184339 (TRAV2, TRAJ13)
CASGVYQKVTF

SEQ ID NO: 368678 - protein, 13 aa, Homo sapiens
  CDR3 for beta chain variable domain of TCR clone 184339 (TRBV24-1, TRBJ2-3)
CATSTGGTDTQYF

SEQ ID NO: 368679 - protein, 13 aa, Homo sapiens
  CDR3 for alpha chain variable domain of TCR clone 184340 (TRAV3, TRAJ21)
CAVGEPDFNKFYF

SEQ ID NO: 368680 - protein, 15 aa, Homo sapiens
  CDR3 for beta chain variable domain of TCR clone 184340 (TRBV9, TRBJ1-6)
CASSVAGTGDSPLHF

SEQ ID NO: 368681 - protein, 13 aa, Homo sapiens
  CDR3 for alpha chain variable domain of TCR clone 184341 (TRAV4, TRAJ42)
CLVGGGSQGNLIF

SEQ ID NO: 368682 - protein, 16 aa, Homo sapiens
  CDR3 for beta chain variable domain of TCR clone 184341 (TRBV6-1, TRBJ2-5)
CASSETLYRGAETQYF

SEQ ID NO: 368683 - protein, 14 aa, Homo sapiens
  CDR3 for alpha chain variable domain of TCR clone 184342 (TRAV1-2, TRAJ16)
CAVNRFSDGQKLLF

SEQ ID NO: 368684 - protein, 15 aa, Homo sapiens
  CDR3 for beta chain variable domain of TCR clone 184342 (TRBV27, TRBJ1-6)
CASSFDRGLGSTLHF

SEQ ID NO: 368685 - protein, 15 aa, Homo sapiens
  CDR3 for alpha chain variable domain of TCR clone 184343 (TRAV20, TRAJ53)
CAVQASGGSNYKLTF

SEQ ID NO: 368686 - protein, 17 aa, Homo sapiens
  CDR3 for beta chain variable domain of TCR clone 184343 (TRBV20-1, TRBJ2-2)
CSASGSGQGGLTGELFF

SEQ ID NO: 368687 - protein, 14 aa, Homo sapiens
  CDR3 for alpha chain variable domain of TCR clone 184344 (TRAV12-3, TRAJ54)
CAMRGIQGAQKLVF

SEQ ID NO: 368688 - protein, 15 aa, Homo sapiens
  CDR3 for beta chain variable domain of TCR clone 184344 (TRBV28, TRBJ2-6)
CASSHRGFGANVLTF

SEQ ID NO: 368689 - protein, 17 aa, Homo sapiens
  CDR3 for alpha chain variable domain of TCR clone 184345 (TRAV38-1, TRAJ45)
CAFMKHYMGGGDDGLTF

SEQ ID NO: 368690 - protein, 13 aa, Homo sapiens
  CDR3 for beta chain variable domain of TCR clone 184345 (TRBV2, TRBJ1-4)
CASSERAGEKLFF

SEQ ID NO: 368691 - protein, 14 aa, Homo sapiens
  CDR3 for alpha chain variable domain of TCR clone 184346 (TRAV12-3, TRAJ10)
SHLPLTGGGNKLTF

SEQ ID NO: 368692 - protein, 15 aa, Homo sapiens
  CDR3 for beta chain variable domain of TCR clone 184346 (TRBV5-1, TRBJ2-2)
CASSLAAGGSGELFF

SEQ ID NO: 368693 - protein, 14 aa, Homo sapiens
  CDR3 for alpha chain variable domain of TCR clone 184347 (TRAV9-2, TRAJ39)
CALYIYNAGNMLTF

SEQ ID NO: 368694 - protein, 14 aa, Homo sapiens
  CDR3 for beta chain variable domain of TCR clone 184347 (TRBV12-4, TRBJ2-5)
CASSAGLVSETQYF

SEQ ID NO: 368695 - protein, 14 aa, Homo sapiens
  CDR3 for alpha chain variable domain of TCR clone 184348 (TRAV1-2, TRAJ16)
RAVNRFSDGQKLLF

SEQ ID NO: 368696 - protein, 13 aa, Homo sapiens
  CDR3 for beta chain variable domain of TCR clone 184348 (TRBV10-3, TRBJ2-7)
CASKLAVNYEQYF

SEQ ID NO: 368697 - protein, 16 aa, Homo sapiens
  CDR3 for alpha chain variable domain of TCR clone 184349 (TRAV12-3, TRAJ53)
CAMSVGSGGSNYKLTF

SEQ ID NO: 368698 - protein, 11 aa, Homo sapiens
  CDR3 for beta chain variable domain of TCR clone 184349 (TRBV29-1, TRBJ2-5)
CSVDSGETQYF

SEQ ID NO: 368699 - protein, 15 aa, Homo sapiens
  CDR3 for alpha chain variable domain of TCR clone 184350 (TRAV30, TRAJ13)
YGTQGVTGGYQKVTF

SEQ ID NO: 368700 - protein, 17 aa, Homo sapiens
  CDR3 for beta chain variable domain of TCR clone 184350 (TRBV20-1, TRBJ2-2)
CSARVKRTHVRSGELFF

SEQ ID NO: 368701 - protein, 13 aa, Homo sapiens
  CDR3 for alpha chain variable domain of TCR clone 184351 (TRAV12-2, TRAJ57)
CAGHQGGSEKLVF

SEQ ID NO: 368702 - protein, 17 aa, Homo sapiens
  CDR3 for beta chain variable domain of TCR clone 184351 (TRBV7-8, TRBJ2-6)
CASSAGTGGAGANVLTF

SEQ ID NO: 368703 - protein, 12 aa, Homo sapiens
  CDR3 for alpha chain variable domain of TCR clone 184352 (TRAV12-3, TRAJ17)
CSMTLTGNKLTF

SEQ ID NO: 368704 - protein, 15 aa, Homo sapiens
  CDR3 for beta chain variable domain of TCR clone 184352 (TRBV5-1, TRBJ2-1)
CASSPPRAPYNEQFF

SEQ ID NO: 368705 - protein, 12 aa, Homo sapiens
  CDR3 for alpha chain variable domain of TCR clone 184353 (TRAV1-1, TRAJ30)
CAVRGRDDKIIF

SEQ ID NO: 368706 - protein, 15 aa, Homo sapiens
  CDR3 for beta chain variable domain of TCR clone 184353 (TRBV11-2, TRBJ2-2)
CASSSDRVNAGELFF

SEQ ID NO: 368707 - protein, 15 aa, Homo sapiens
  CDR3 for alpha chain variable domain of TCR clone 184354 (TRAV12-3, TRAJ3)
CAMSEGYGSASKIIF

SEQ ID NO: 368708 - protein, 14 aa, Homo sapiens
  CDR3 for beta chain variable domain of TCR clone 184354 (TRBV6-1, TRBJ1-3)
CASVQGGGGNTIYF

SEQ ID NO: 368709 - protein, 13 aa, Homo sapiens
  CDR3 for alpha chain variable domain of TCR clone 184355 (TRAV1-2, TRAJ9)
CAALNTGGFKTIF

SEQ ID NO: 368710 - protein, 14 aa, Homo sapiens
  CDR3 for beta chain variable domain of TCR clone 184355 (TRBV7-9, TRBJ2-7)
CASSLDRPTDEQYF

SEQ ID NO: 368711 - protein, 16 aa, Homo sapiens
  CDR3 for alpha chain variable domain of TCR clone 184356 (TRAV3, TRAJ37)
CAVRPHGSGNTGKLLF

SEQ ID NO: 368712 - protein, 17 aa, Homo sapiens
  CDR3 for beta chain variable domain of TCR clone 184356 (TRBV5-1, TRBJ2-5)
CASSPVALGQNQETQYF

SEQ ID NO: 368713 - protein, 17 aa, Homo sapiens
  CDR3 for alpha chain variable domain of TCR clone 184357 (TRAV38-2/DV8, TRAJ38)
CAYRSARGAGNNRKRIG

SEQ ID NO: 368714 - protein, 13 aa, Homo sapiens
  CDR3 for beta chain variable domain of TCR clone 184357 (TRBV6-5, TRBJ2-1)
CASRGRVGNEQFF

SEQ ID NO: 368715 - protein, 14 aa, Homo sapiens
  CDR3 for alpha chain variable domain of TCR clone 184358 (TRAV12-3, TRAJ10)
SHLPLTGGGNKLTF

SEQ ID NO: 368716 - protein, 16 aa, Homo sapiens
  CDR3 for beta chain variable domain of TCR clone 184358 (TRBV4-1, TRBJ1-4)
CASSQDLRRGGEKLFF

SEQ ID NO: 368717 - protein, 15 aa, Homo sapiens
  CDR3 for alpha chain variable domain of TCR clone 184359 (TRAV26-1, TRAJ39)
CIVRDGSNAANMLTF

SEQ ID NO: 368718 - protein, 14 aa, Homo sapiens
  CDR3 for beta chain variable domain of TCR clone 184359 (TRBV10-3, TRBJ1-2)
CAIRAGTGDYGYTF

SEQ ID NO: 368719 - protein, 18 aa, Homo sapiens
  CDR3 for alpha chain variable domain of TCR clone 184360 (TRAV26-1, TRAJ37)
CIFRVDMHGSSNTGKLIF

SEQ ID NO: 368720 - protein, 15 aa, Homo sapiens
  CDR3 for beta chain variable domain of TCR clone 184360 (TRBV20-1, TRBJ2-7)
CSARVLASPLYEQYF

SEQ ID NO: 368721 - protein, 14 aa, Homo sapiens
  CDR3 for alpha chain variable domain of TCR clone 184361 (TRAV12-2, TRAJ8)
CAVKENTGFQKLVF

SEQ ID NO: 368722 - protein, 18 aa, Homo sapiens
  CDR3 for beta chain variable domain of TCR clone 184361 (TRBV11-2, TRBJ2-3)
CASSLGGASRGAPNTQYF

SEQ ID NO: 368723 - protein, 13 aa, Homo sapiens
  CDR3 for alpha chain variable domain of TCR clone 184362 (TRAV17, TRAJ9)
CATAITGGFKTIF

SEQ ID NO: 368724 - protein, 17 aa, Homo sapiens
  CDR3 for beta chain variable domain of TCR clone 184362 (TRBV13, TRBJ2-3)
CASSLSRVAGGRNTQYF

SEQ ID NO: 368725 - protein, 10 aa, Homo sapiens
  CDR3 for alpha chain variable domain of TCR clone 184363 (TRAV26-1, TRAJ22)
RSGSARQLTF

SEQ ID NO: 368726 - protein, 11 aa, Homo sapiens
  CDR3 for beta chain variable domain of TCR clone 184363 (TRBV19, TRBJ1-1)
CASSIGSEAFF

SEQ ID NO: 368727 - protein, 15 aa, Homo sapiens
  CDR3 for alpha chain variable domain of TCR clone 184364 (TRAV25, TRAJ41)
CSGPWNSNSGYALNF

SEQ ID NO: 368728 - protein, 13 aa, Homo sapiens
  CDR3 for beta chain variable domain of TCR clone 184364 (TRBV15, TRBJ1-1)
CATSRGIQARAFF

SEQ ID NO: 368729 - protein, 11 aa, Homo sapiens
  CDR3 for alpha chain variable domain of TCR clone 184365 (TRAV17, TRAJ9)
CATTGGFKTIF

SEQ ID NO: 368730 - protein, 11 aa, Homo sapiens
  CDR3 for beta chain variable domain of TCR clone 184365 (TRBV19, TRBJ1-1)
CASSIGSEAFF

SEQ ID NO: 368731 - protein, 11 aa, Homo sapiens
  CDR3 for alpha chain variable domain of TCR clone 184366 (TRAV3, TRAJ21)
CAVGNFNKFYF

SEQ ID NO: 368732 - protein, 17 aa, Homo sapiens
  CDR3 for beta chain variable domain of TCR clone 184366 (TRBV4-1, TRBJ2-3)
CASSQDPAGGPLDTQYF

SEQ ID NO: 368733 - protein, 15 aa, Homo sapiens
  CDR3 for alpha chain variable domain of TCR clone 184367 (TRAV17, TRAJ4)
CATGTWSGGYNKLIF

SEQ ID NO: 368734 - protein, 15 aa, Homo sapiens
  CDR3 for beta chain variable domain of TCR clone 184367 (TRBV20-1, TRBJ2-7)
CSARERGSGMDEQYF

SEQ ID NO: 368735 - protein, 15 aa, Homo sapiens
  CDR3 for alpha chain variable domain of TCR clone 184368 (TRAV6, TRAJ52)
CALTAGGASYGKLTF

SEQ ID NO: 368736 - protein, 14 aa, Homo sapiens
  CDR3 for beta chain variable domain of TCR clone 184368 (TRBV11-2, TRBJ2-1)
CASTTGQGNNEQFF

SEQ ID NO: 368737 - protein, 15 aa, Homo sapiens
  CDR3 for alpha chain variable domain of TCR clone 184369 (TRAV26-1, TRAJ44)
CIVRANIGTASKLNF

SEQ ID NO: 368738 - protein, 12 aa, Homo sapiens
  CDR3 for beta chain variable domain of TCR clone 184369 (TRBV2, TRBJ2-1)
GRGLPSYNEQFF

SEQ ID NO: 368739 - protein, 12 aa, Homo sapiens
  CDR3 for alpha chain variable domain of TCR clone 184370 (TRAV12-3, TRAJ17)
CAMTLTGNKLTC

SEQ ID NO: 368740 - protein, 15 aa, Homo sapiens
  CDR3 for beta chain variable domain of TCR clone 184370 (TRBV20-1, TRBJ2-7)
CSARGRVSGMDEQYF

SEQ ID NO: 368741 - protein, 16 aa, Homo sapiens
  CDR3 for alpha chain variable domain of TCR clone 184371 (TRAV21, TRAJ45)
CAVSWGPGGGADGVTF

SEQ ID NO: 368742 - protein, 14 aa, Homo sapiens
  CDR3 for beta chain variable domain of TCR clone 184371 (TRBV4-2, TRBJ1-2)
CASSPGGSNYGYTF

SEQ ID NO: 368743 - protein, 14 aa, Homo sapiens
  CDR3 for alpha chain variable domain of TCR clone 184372 (TRAV26-1, TRAJ38)
CIADNAGNNRKLIC

SEQ ID NO: 368744 - protein, 13 aa, Homo sapiens
  CDR3 for beta chain variable domain of TCR clone 184372 (TRBV20-1, TRBJ1-1)
CSARGGWNTEAFF

SEQ ID NO: 368745 - protein, 17 aa, Homo sapiens
  CDR3 for alpha chain variable domain of TCR clone 184373 (TRAV3, TRAJ38)
CAVRDCLNAGNNRKRIC

SEQ ID NO: 368746 - protein, 14 aa, Homo sapiens
  CDR3 for beta chain variable domain of TCR clone 184373 (TRBV5-5, TRBJ1-5)
CASSGQGVDQPQHF

SEQ ID NO: 368747 - protein, 10 aa, Homo sapiens
  CDR3 for alpha chain variable domain of TCR clone 184374 (TRAV1-2, TRAJ23)
CAGQGGKLIF

SEQ ID NO: 368748 - protein, 13 aa, Homo sapiens
  CDR3 for beta chain variable domain of TCR clone 184374 (TRBV20-1, TRBJ1-1)
CSARVGGNTEAFF

SEQ ID NO: 368749 - protein, 17 aa, Homo sapiens
  CDR3 for alpha chain variable domain of TCR clone 184375 (TRAV26-1, TRAJ27)
CIVSTPWTNTNAGKSTF

SEQ ID NO: 368750 - protein, 16 aa, Homo sapiens
  CDR3 for beta chain variable domain of TCR clone 184375 (TRBV7-9, TRBJ2-1)
CASSLDPGLAIDEQFF

SEQ ID NO: 368751 - protein, 13 aa, Homo sapiens
  CDR3 for alpha chain variable domain of TCR clone 184376 (TRAV2, TRAJ40)
CSVVTSRTYKYIF

SEQ ID NO: 368752 - protein, 14 aa, Homo sapiens
  CDR3 for beta chain variable domain of TCR clone 184376 (TRBV19, TRBJ2-1)
CASPTFVLSGEQFF

SEQ ID NO: 368753 - protein, 15 aa, Homo sapiens
  CDR3 for alpha chain variable domain of TCR clone 184377 (TRAV20, TRAJ40)
CAVQRGTSGTYKYIF

SEQ ID NO: 368754 - protein, 19 aa, Homo sapiens
  CDR3 for beta chain variable domain of TCR clone 184377 (TRBV28, TRBJ2-7)
CASRYSGPSRLGWVYEQYF

SEQ ID NO: 368755 - protein, 16 aa, Homo sapiens
  CDR3 for alpha chain variable domain of TCR clone 184378 (TRAV8-3, TRAJ52)
CAVQPAGGTSYGNLTF

SEQ ID NO: 368756 - protein, 15 aa, Homo sapiens
  CDR3 for beta chain variable domain of TCR clone 184378 (TRBV11-2, TRBJ2-7)
CASSLAGGVATEQYF

SEQ ID NO: 368757 - protein, 14 aa, Homo sapiens
  CDR3 for alpha chain variable domain of TCR clone 184379 (TRAV12-2, TRAJ9)
CAVNMEGGGFKTIF

SEQ ID NO: 368758 - protein, 16 aa, Homo sapiens
  CDR3 for beta chain variable domain of TCR clone 184379 (TRBV29-1, TRBJ1-2)
CSVEANRDIANYGYTF

SEQ ID NO: 368759 - protein, 15 aa, Homo sapiens
  CDR3 for alpha chain variable domain of TCR clone 184380 (TRAV34, TRAJ38)
CGADFTPGNNRKLIW

SEQ ID NO: 368760 - protein, 13 aa, Homo sapiens
  CDR3 for beta chain variable domain of TCR clone 184380 (TRBV20-1, TRBJ1-2)
CSASLGVGYGYTF

SEQ ID NO: 368761 - protein, 13 aa, Homo sapiens
  CDR3 for alpha chain variable domain of TCR clone 184381 (TRAV12-1, TRAJ16)
CVVNGPDGQKLLF

SEQ ID NO: 368762 - protein, 15 aa, Homo sapiens
  CDR3 for beta chain variable domain of TCR clone 184381 (TRBV7-3, TRBJ2-1)
CASSLSSGSFDEQFF

SEQ ID NO: 368763 - protein, 14 aa, Homo sapiens
  CDR3 for alpha chain variable domain of TCR clone 184382 (TRAV12-2, TRAJ53)
CAGKGGGSNDKLTF

SEQ ID NO: 368764 - protein, 18 aa, Homo sapiens
  CDR3 for beta chain variable domain of TCR clone 184382 (TRBV7-9, TRBJ2-7)
CASSLTTSGSRTWYEQYF

SEQ ID NO: 368765 - protein, 11 aa, Homo sapiens
  CDR3 for alpha chain variable domain of TCR clone 184383 (TRAV4, TRAJ31)
CLVGDNARLMF

SEQ ID NO: 368766 - protein, 16 aa, Homo sapiens
  CDR3 for beta chain variable domain of TCR clone 184383 (TRBV7-2, TRBJ2-5)
FASSSKWLSGQETQYF

SEQ ID NO: 368767 - protein, 14 aa, Homo sapiens
  CDR3 for alpha chain variable domain of TCR clone 184384 (TRAV21, TRAJ45)
CAVSSGGGADGLTF

SEQ ID NO: 368768 - protein, 12 aa, Homo sapiens
  CDR3 for beta chain variable domain of TCR clone 184384 (TRBV19, TRBJ2-1)
CASSQISNEQFF

SEQ ID NO: 368769 - protein, 15 aa, Homo sapiens
  CDR3 for alpha chain variable domain of TCR clone 184385 (TRAV21, TRAJ53)
CATFNSGGSNYKLTF

SEQ ID NO: 368770 - protein, 17 aa, Homo sapiens
  CDR3 for beta chain variable domain of TCR clone 184385 (TRBV7-8, TRBJ2-6)
CASSAGTGGAGANVLTF

SEQ ID NO: 368771 - protein, 11 aa, Homo sapiens
  CDR3 for alpha chain variable domain of TCR clone 184386 (TRAV12-3, TRAJ20)
CAMSYDYKLSF

SEQ ID NO: 368772 - protein, 14 aa, Homo sapiens
  CDR3 for beta chain variable domain of TCR clone 184386 (TRBV19, TRBJ2-2)
CASTVTANTGELFF

SEQ ID NO: 368773 - protein, 15 aa, Homo sapiens
  CDR3 for alpha chain variable domain of TCR clone 184387 (TRAV12-1, TRAJ44)
CVVETPQGTASKLTF

SEQ ID NO: 368774 - protein, 14 aa, Homo sapiens
  CDR3 for beta chain variable domain of TCR clone 184387 (TRBV7-9, TRBJ2-1)
CASSPRDSLYEQFF

SEQ ID NO: 368775 - protein, 13 aa, Homo sapiens
  CDR3 for alpha chain variable domain of TCR clone 184388 (TRAV12-1, TRAJ34)
GVVTGYNTDKPIF

SEQ ID NO: 368776 - protein, 13 aa, Homo sapiens
  CDR3 for beta chain variable domain of TCR clone 184388 (TRBV28, TRBJ2-7)
CASKAGGVYEQYF

SEQ ID NO: 368777 - protein, 18 aa, Homo sapiens
  CDR3 for alpha chain variable domain of TCR clone 184389 (TRAV26-1, TRAJ56)
CIVRVASRVTGANSKLTF

SEQ ID NO: 368778 - protein, 15 aa, Homo sapiens
  CDR3 for beta chain variable domain of TCR clone 184389 (TRBV7-9, TRBJ2-5)
CASSDTGRGRETQCF

SEQ ID NO: 368779 - protein, 13 aa, Homo sapiens
  CDR3 for alpha chain variable domain of TCR clone 184390 (TRAV13-1, TRAJ37)
CAAVSGNTGKLSF

SEQ ID NO: 368780 - protein, 17 aa, Homo sapiens
  CDR3 for beta chain variable domain of TCR clone 184390 (TRBV10-2, TRBJ1-6)
CASSENRGSSYNSPLHF

SEQ ID NO: 368781 - protein, 16 aa, Homo sapiens
  CDR3 for alpha chain variable domain of TCR clone 184391 (TRAV13-1, TRAJ48)
CAASIFGNFGNEKLNF

SEQ ID NO: 368782 - protein, 11 aa, Homo sapiens
  CDR3 for beta chain variable domain of TCR clone 184391 (TRBV27, TRBJ2-3)
CASSLGDTQYF

SEQ ID NO: 368783 - protein, 16 aa, Homo sapiens
  CDR3 for alpha chain variable domain of TCR clone 184392 (TRAV13-1, TRAJ13)
CTAFFLGVTRKLPLEL

SEQ ID NO: 368784 - protein, 15 aa, Homo sapiens
  CDR3 for beta chain variable domain of TCR clone 184392 (TRBV7-8, TRBJ2-1)
CASSLADSLYNEQFS

SEQ ID NO: 368785 - protein, 15 aa, Homo sapiens
  CDR3 for alpha chain variable domain of TCR clone 184393 (TRAV8-1, TRAJ37)
CAVKKGSGNTGKLIF

SEQ ID NO: 368786 - protein, 13 aa, Homo sapiens
  CDR3 for beta chain variable domain of TCR clone 184393 (TRBV12-4, TRBJ1-2)
CASSSGPNYGYTL

SEQ ID NO: 368787 - protein, 14 aa, Homo sapiens
  CDR3 for alpha chain variable domain of TCR clone 184394 (TRAV26-2, TRAJ38)
CILYNAGNNRKLIW

SEQ ID NO: 368788 - protein, 14 aa, Homo sapiens
  CDR3 for beta chain variable domain of TCR clone 184394 (TRBV19, TRBJ2-1)
CASPSFVLSGEQFF

SEQ ID NO: 368789 - protein, 14 aa, Homo sapiens
  CDR3 for alpha chain variable domain of TCR clone 184395 (TRAV27, TRAJ23)
CAGLSYNQGGKLIF

SEQ ID NO: 368790 - protein, 15 aa, Homo sapiens
  CDR3 for beta chain variable domain of TCR clone 184395 (TRBV19, TRBJ2-2)
CASSLNREVAGELFF

SEQ ID NO: 368791 - protein, 16 aa, Homo sapiens
  CDR3 for alpha chain variable domain of TCR clone 184396 (TRAV21, TRAJ37)
CAVRTAGSSNTGKLIF

SEQ ID NO: 368792 - protein, 13 aa, Homo sapiens
  CDR3 for beta chain variable domain of TCR clone 184396 (TRBV2, TRBJ1-4)
CASSERAGEKLFF

SEQ ID NO: 368793 - protein, 10 aa, Homo sapiens
  CDR3 for alpha chain variable domain of TCR clone 184397 (TRAV23/DV6, TRAJ4)
CAVRDFWSRD

SEQ ID NO: 368794 - protein, 13 aa, Homo sapiens
  CDR3 for beta chain variable domain of TCR clone 184397 (TRBV7-2, TRBJ1-1)
CASSRNTNTEASF

SEQ ID NO: 368795 - protein, 13 aa, Homo sapiens
  CDR3 for alpha chain variable domain of TCR clone 184398 (TRAV2, TRAJ40)
CAVVTSGTYKYIF

SEQ ID NO: 368796 - protein, 13 aa, Homo sapiens
  CDR3 for beta chain variable domain of TCR clone 184398 (TRBV6-5, TRBJ2-2)
CASSLPGVGELFF

SEQ ID NO: 368797 - protein, 14 aa, Homo sapiens
  CDR3 for alpha chain variable domain of TCR clone 184399 (TRAV12-2, TRAJ13)
CAVKKTGGYQTVTF

SEQ ID NO: 368798 - protein, 13 aa, Homo sapiens
  CDR3 for beta chain variable domain of TCR clone 184399 (TRBV28, TRBJ2-3)
CASSLPQVDTQYF

SEQ ID NO: 368799 - protein, 15 aa, Homo sapiens
  CDR3 for alpha chain variable domain of TCR clone 184400 (TRAV12-3, TRAJ6)
CAMRAASGGSYIPTF

SEQ ID NO: 368800 - protein, 13 aa, Homo sapiens
  CDR3 for beta chain variable domain of TCR clone 184400 (TRBV20-1, TRBJ1-2)
CSASTERIYGYTF

SEQ ID NO: 368801 - protein, 12 aa, Homo sapiens
  CDR3 for alpha chain variable domain of TCR clone 184401 (TRAV21, TRAJ13)
PGPSGGYKKVTF

SEQ ID NO: 368802 - protein, 15 aa, Homo sapiens
  CDR3 for beta chain variable domain of TCR clone 184401 (TRBV7-9, TRBJ1-6)
CASSSPGRGNSPLHF

SEQ ID NO: 368803 - protein, 11 aa, Homo sapiens
  CDR3 for alpha chain variable domain of TCR clone 184402 (TRAV2, TRAJ21)
CAVFNFNKFYF

SEQ ID NO: 368804 - protein, 11 aa, Homo sapiens
  CDR3 for beta chain variable domain of TCR clone 184402 (TRBV7-8, TRBJ2-7)
CASSLSREQYF

SEQ ID NO: 368805 - protein, 15 aa, Homo sapiens
  CDR3 for alpha chain variable domain of TCR clone 184403 (TRAV29/DV5, TRAJ24)
CAASGATYSWGKFQF

SEQ ID NO: 368806 - protein, 12 aa, Homo sapiens
  CDR3 for beta chain variable domain of TCR clone 184403 (TRBV11-2, TRBJ2-2)
CASSLPTGELFF

SEQ ID NO: 368807 - protein, 16 aa, Homo sapiens
  CDR3 for alpha chain variable domain of TCR clone 184404 (TRAV14/DV4, TRAJ54)
CAMREGRIQGAQKLVF

SEQ ID NO: 368808 - protein, 13 aa, Homo sapiens
  CDR3 for beta chain variable domain of TCR clone 184404 (TRBV11-3, TRBJ2-7)
CASSLDKLYEQYF

SEQ ID NO: 368809 - protein, 13 aa, Homo sapiens
  CDR3 for alpha chain variable domain of TCR clone 184405 (TRAV3, TRAJ21)
CAVREPDFNKFYF

SEQ ID NO: 368810 - protein, 13 aa, Homo sapiens
  CDR3 for beta chain variable domain of TCR clone 184405 (TRBV9, TRBJ2-1)
CDSSPSGGNEEFF

SEQ ID NO: 368811 - protein, 13 aa, Homo sapiens
  CDR3 for alpha chain variable domain of TCR clone 184406 (TRAV12-2, TRAJ20)
CAVYPSNDYKLSC

SEQ ID NO: 368812 - protein, 15 aa, Homo sapiens
  CDR3 for beta chain variable domain of TCR clone 184406 (TRBV27, TRBJ2-5)
CASSLYPRGGETQYF

SEQ ID NO: 368813 - protein, 14 aa, Homo sapiens
  CDR3 for alpha chain variable domain of TCR clone 184407 (TRAV12-2, TRAJ40)
CAVKIPSGAYKYIF

SEQ ID NO: 368814 - protein, 11 aa, Homo sapiens
  CDR3 for beta chain variable domain of TCR clone 184407 (TRBV27, TRBJ2-3)
CASSLGDTQYF

SEQ ID NO: 368815 - protein, 14 aa, Homo sapiens
  CDR3 for alpha chain variable domain of TCR clone 184408 (TRAV12-2, TRAJ17)
CALNIKAAGNKLTF

SEQ ID NO: 368816 - protein, 16 aa, Homo sapiens
  CDR3 for beta chain variable domain of TCR clone 184408 (TRBV20-1, TRBJ2-6)
CSASSQGYDGANDLTF

SEQ ID NO: 368817 - protein, 15 aa, Homo sapiens
  CDR3 for alpha chain variable domain of TCR clone 184409 (TRAV17, TRAJ57)
CSTGPPQGGPEKLVF

SEQ ID NO: 368818 - protein, 16 aa, Homo sapiens
  CDR3 for beta chain variable domain of TCR clone 184409 (TRBV12-4, TRBJ1-5)
CASSRPVGGSNQPQHF

SEQ ID NO: 368819 - protein, 13 aa, Homo sapiens
  CDR3 for alpha chain variable domain of TCR clone 184410 (TRAV39, TRAJ58)
CAGEETSGSRLTF

SEQ ID NO: 368820 - protein, 13 aa, Homo sapiens
  CDR3 for beta chain variable domain of TCR clone 184410 (TRBV20-1, TRBJ1-2)
CSATGIQGSGYTF

SEQ ID NO: 368821 - protein, 14 aa, Homo sapiens
  CDR3 for alpha chain variable domain of TCR clone 184411 (TRAV1-2, TRAJ8)
CAVREDTGFQKLVF

SEQ ID NO: 368822 - protein, 15 aa, Homo sapiens
  CDR3 for beta chain variable domain of TCR clone 184411 (TRBV6-3, TRBJ2-7)
CACSAPGTVFYEQYF

SEQ ID NO: 368823 - protein, 15 aa, Homo sapiens
  CDR3 for alpha chain variable domain of TCR clone 184412 (TRAV34, TRAJ38)
CGADFTPGNNRKLIW

SEQ ID NO: 368824 - protein, 12 aa, Homo sapiens
  CDR3 for beta chain variable domain of TCR clone 184412 (TRBV7-9, TRBJ2-7)
CATRTDAYEQYY

SEQ ID NO: 368825 - protein, 14 aa, Homo sapiens
  CDR3 for alpha chain variable domain of TCR clone 184413 (TRAV23/DV6, TRAJ37)
CAASTSSNTGRLIF

SEQ ID NO: 368826 - protein, 13 aa, Homo sapiens
  CDR3 for beta chain variable domain of TCR clone 184413 (TRBV7-7, TRBJ1-1)
CASSLGANTEAFF

SEQ ID NO: 368827 - protein, 14 aa, Homo sapiens
  CDR3 for alpha chain variable domain of TCR clone 184414 (TRAV12-2, TRAJ40)
CAVKISSGTYKYIF

SEQ ID NO: 368828 - protein, 17 aa, Homo sapiens
  CDR3 for beta chain variable domain of TCR clone 184414 (TRBV20-1, TRBJ2-1)
CSAFSGTSGSLYNEQFF

SEQ ID NO: 368829 - protein, 13 aa, Homo sapiens
  CDR3 for alpha chain variable domain of TCR clone 184415 (TRAV3, TRAJ21)
CAVREPDFNKFYF

SEQ ID NO: 368830 - protein, 13 aa, Homo sapiens
  CDR3 for beta chain variable domain of TCR clone 184415 (TRBV7-2, TRBJ2-3)
CASSLAGVDTQYF

SEQ ID NO: 368831 - protein, 11 aa, Homo sapiens
  CDR3 for alpha chain variable domain of TCR clone 184416 (TRAV17, TRAJ9)
CATTGGFKTIF

SEQ ID NO: 368832 - protein, 14 aa, Homo sapiens
  CDR3 for beta chain variable domain of TCR clone 184416 (TRBV4-1, TRBJ2-2)
CASSQAVNTGELFF

SEQ ID NO: 368833 - protein, 12 aa, Homo sapiens
  CDR3 for alpha chain variable domain of TCR clone 184417 (TRAV2, TRAJ10)
CASTGGGNKLTF

SEQ ID NO: 368834 - protein, 16 aa, Homo sapiens
  CDR3 for beta chain variable domain of TCR clone 184417 (TRBV7-3, TRBJ2-1)
CASSLEGYRSYNEQFF

SEQ ID NO: 368835 - protein, 13 aa, Homo sapiens
  CDR3 for alpha chain variable domain of TCR clone 184418 (TRAV21, TRAJ33)
CAVAGDSNYQLIW

SEQ ID NO: 368836 - protein, 16 aa, Homo sapiens
  CDR3 for beta chain variable domain of TCR clone 184418 (TRBV7-9, TRBJ2-1)
CASSDVAGGSYNEQFF

SEQ ID NO: 368837 - protein, 14 aa, Homo sapiens
  CDR3 for alpha chain variable domain of TCR clone 184419 (TRAV17, TRAJ57)
CATDPQGGSEKLVF

SEQ ID NO: 368838 - protein, 13 aa, Homo sapiens
  CDR3 for beta chain variable domain of TCR clone 184419 (TRBV20-1, TRBJ1-1)
CSARVGGNTEAFF

SEQ ID NO: 368839 - protein, 14 aa, Homo sapiens
  CDR3 for alpha chain variable domain of TCR clone 184420 (TRAV12-2, TRAJ15)
CAPHTGQAGTALIF

SEQ ID NO: 368840 - protein, 15 aa, Homo sapiens
  CDR3 for beta chain variable domain of TCR clone 184420 (TRBV5-1, TRBJ2-7)
CASSLNGGPAREQYF

SEQ ID NO: 368841 - protein, 14 aa, Homo sapiens
  CDR3 for alpha chain variable domain of TCR clone 184421 (TRAV35, TRAJ13)
CAGSPSGGYQKVTF

SEQ ID NO: 368842 - protein, 12 aa, Homo sapiens
  CDR3 for beta chain variable domain of TCR clone 184421 (TRBV19, TRBJ2-1)
CASSRQGAEQFF

SEQ ID NO: 368843 - protein, 15 aa, Homo sapiens
  CDR3 for alpha chain variable domain of TCR clone 184422 (TRAV4, TRAJ31)
CLVGGFLNNNARLMF

SEQ ID NO: 368844 - protein, 13 aa, Homo sapiens
  CDR3 for beta chain variable domain of TCR clone 184422 (TRBV7-2, TRBJ1-5)
CASSTQGSQPQHF

SEQ ID NO: 368845 - protein, 12 aa, Homo sapiens
  CDR3 for alpha chain variable domain of TCR clone 184423 (TRAV1-1, TRAJ24)
CAVRGSWGKFQF

SEQ ID NO: 368846 - protein, 15 aa, Homo sapiens
  CDR3 for beta chain variable domain of TCR clone 184423 (TRBV12-4, TRBJ2-5)
CASSPPTGLQETQYF

SEQ ID NO: 368847 - protein, 14 aa, Homo sapiens
  CDR3 for alpha chain variable domain of TCR clone 184424 (TRAV20, TRAJ20)
CAVRRGYDDYKLSF

SEQ ID NO: 368848 - protein, 13 aa, Homo sapiens
  CDR3 for beta chain variable domain of TCR clone 184424 (TRBV19, TRBJ2-5)
CASSETAPETQYF

SEQ ID NO: 368849 - protein, 17 aa, Homo sapiens
  CDR3 for alpha chain variable domain of TCR clone 184425 (TRAV3, TRAJ6)
CAVRDGPRAGGSYIPTF

SEQ ID NO: 368850 - protein, 12 aa, Homo sapiens
  CDR3 for beta chain variable domain of TCR clone 184425 (TRBV7-9, TRBJ2-3)
CASSFITDTQYF

SEQ ID NO: 368851 - protein, 14 aa, Homo sapiens
  CDR3 for alpha chain variable domain of TCR clone 184426 (TRAV16, TRAJ33)
CALSAMDSNYQLIW

SEQ ID NO: 368852 - protein, 13 aa, Homo sapiens
  CDR3 for beta chain variable domain of TCR clone 184426 (TRBV9, TRBJ2-1)
CASSPSGGNEQFF

SEQ ID NO: 368853 - protein, 12 aa, Homo sapiens
  CDR3 for alpha chain variable domain of TCR clone 184427 (TRAV8-6, TRAJ57)
CDVQGGSEKRVF

SEQ ID NO: 368854 - protein, 11 aa, Homo sapiens
  CDR3 for beta chain variable domain of TCR clone 184427 (TRBV19, TRBJ1-1)
CASSIGSEAFF

SEQ ID NO: 368855 - protein, 14 aa, Homo sapiens
  CDR3 for alpha chain variable domain of TCR clone 184428 (TRAV8-1, TRAJ13)
CAVKRSGGYQKGTF

SEQ ID NO: 368856 - protein, 14 aa, Homo sapiens
  CDR3 for beta chain variable domain of TCR clone 184428 (TRBV12-5, TRBJ2-5)
CASGSRTHQETQYF

SEQ ID NO: 368857 - protein, 14 aa, Homo sapiens
  CDR3 for alpha chain variable domain of TCR clone 184429 (TRAV17, TRAJ15)
CATDRGQAGTALIS

SEQ ID NO: 368858 - protein, 13 aa, Homo sapiens
  CDR3 for beta chain variable domain of TCR clone 184429 (TRBV19, TRBJ1-5)
CASSMRGYQPQHF

SEQ ID NO: 368859 - protein, 13 aa, Homo sapiens
  CDR3 for alpha chain variable domain of TCR clone 184430 (TRAV2, TRAJ16)
CAVERSDGQKLLF

SEQ ID NO: 368860 - protein, 15 aa, Homo sapiens
  CDR3 for beta chain variable domain of TCR clone 184430 (TRBV20-1, TRBJ2-5)
CSALKGQGSQETQYF

SEQ ID NO: 368861 - protein, 10 aa, Homo sapiens
  CDR3 for alpha chain variable domain of TCR clone 184431 (TRAV1-2, TRAJ23)
CVGQGGKLIF

SEQ ID NO: 368862 - protein, 16 aa, Homo sapiens
  CDR3 for beta chain variable domain of TCR clone 184431 (TRBV11-2, TRBJ1-1)
CASSLRQGGEHSKAFF

SEQ ID NO: 368863 - protein, 13 aa, Homo sapiens
  CDR3 for alpha chain variable domain of TCR clone 184432 (TRAV27, TRAJ16)
CAGALSDGQKLLF

SEQ ID NO: 368864 - protein, 17 aa, Homo sapiens
  CDR3 for beta chain variable domain of TCR clone 184432 (TRBV19, TRBJ1-5)
CASSRDRILSRFQPQHF

SEQ ID NO: 368865 - protein, 15 aa, Homo sapiens
  CDR3 for alpha chain variable domain of TCR clone 184433 (TRAV10, TRAJ6)
CVVRTDSGGSYIPTF

SEQ ID NO: 368866 - protein, 11 aa, Homo sapiens
  CDR3 for beta chain variable domain of TCR clone 184433 (TRBV19, TRBJ2-2)
CASRYSGELFF

SEQ ID NO: 368867 - protein, 14 aa, Homo sapiens
  CDR3 for alpha chain variable domain of TCR clone 184434 (TRAV12-2, TRAJ17)
CAVLFRAAGNKLTF

SEQ ID NO: 368868 - protein, 16 aa, Homo sapiens
  CDR3 for beta chain variable domain of TCR clone 184434 (TRBV7-3, TRBJ2-1)
CASSLEGYRSYNEQFF

SEQ ID NO: 368869 - protein, 11 aa, Homo sapiens
  CDR3 for alpha chain variable domain of TCR clone 184435 (TRAV3, TRAJ21)
CAVGNFNKFYF

SEQ ID NO: 368870 - protein, 16 aa, Homo sapiens
  CDR3 for beta chain variable domain of TCR clone 184435 (TRBV19, TRBJ2-1)
SASSKAGPRSYNEQFF

SEQ ID NO: 368871 - protein, 13 aa, Homo sapiens
  CDR3 for alpha chain variable domain of TCR clone 184436 (TRAV20, TRAJ26)
CAVPTSYGQNFVF

SEQ ID NO: 368872 - protein, 15 aa, Homo sapiens
  CDR3 for beta chain variable domain of TCR clone 184436 (TRBV28, TRBJ2-7)
CSSSPQGRDVYEQYF

SEQ ID NO: 368873 - protein, 15 aa, Homo sapiens
  CDR3 for alpha chain variable domain of TCR clone 184437 (TRAV3, TRAJ17)
CAVRDTGAAGNNQTF

SEQ ID NO: 368874 - protein, 14 aa, Homo sapiens
  CDR3 for beta chain variable domain of TCR clone 184437 (TRBV6-3, TRBJ1-1)
CASSNLLPGAEAFF

SEQ ID NO: 368875 - protein, 19 aa, Homo sapiens
  CDR3 for alpha chain variable domain of TCR clone 184438 (TRAV2, TRAJ20)
ILQVREADAAVYRDCKLSF

SEQ ID NO: 368876 - protein, 13 aa, Homo sapiens
  CDR3 for beta chain variable domain of TCR clone 184438 (TRBV15, TRBJ1-6)
CATSGGLNSHLLF

SEQ ID NO: 368877 - protein, 11 aa, Homo sapiens
  CDR3 for alpha chain variable domain of TCR clone 184439 (TRAV3, TRAJ21)
CAVGNFNKFYF

SEQ ID NO: 368878 - protein, 13 aa, Homo sapiens
  CDR3 for beta chain variable domain of TCR clone 184439 (TRBV5-7, TRBJ1-2)
CASSLIRAPGYTF

SEQ ID NO: 368879 - protein, 14 aa, Homo sapiens
  CDR3 for alpha chain variable domain of TCR clone 184440 (TRAV12-2, TRAJ40)
CAVKIPSGTYKYIF

SEQ ID NO: 368880 - protein, 12 aa, Homo sapiens
  CDR3 for beta chain variable domain of TCR clone 184440 (TRBV11-2, TRBJ2-2)
CGSSLGGGELFF

SEQ ID NO: 368881 - protein, 14 aa, Homo sapiens
  CDR3 for alpha chain variable domain of TCR clone 184441 (TRAV12-3, TRAJ13)
CAMRNSGGYQKVTF

SEQ ID NO: 368882 - protein, 16 aa, Homo sapiens
  CDR3 for beta chain variable domain of TCR clone 184441 (TRBV5-4, TRBJ2-3)
CASQQPGAGGADTQYF

SEQ ID NO: 368883 - protein, 14 aa, Homo sapiens
  CDR3 for alpha chain variable domain of TCR clone 184442 (TRAV13-1, TRAJ35)
CAASKGGFGNVLHC

SEQ ID NO: 368884 - protein, 15 aa, Homo sapiens
  CDR3 for beta chain variable domain of TCR clone 184442 (TRBV27, TRBJ1-6)
CASSFDRGLGSPLHF

SEQ ID NO: 368885 - protein, 13 aa, Homo sapiens
  CDR3 for alpha chain variable domain of TCR clone 184443 (TRAV21, TRAJ57)
CAVTQGGPEKLVF

SEQ ID NO: 368886 - protein, 16 aa, Homo sapiens
  CDR3 for beta chain variable domain of TCR clone 184443 (TRBV29-1, TRBJ2-7)
CSVEDAEDGKAYEQYF

SEQ ID NO: 368887 - protein, 14 aa, Homo sapiens
  CDR3 for alpha chain variable domain of TCR clone 184444 (TRAV12-2, TRAJ9)
CAVKMEGGGFKTIF

SEQ ID NO: 368888 - protein, 14 aa, Homo sapiens
  CDR3 for beta chain variable domain of TCR clone 184444 (TRBV2, TRBJ2-5)
CASSEVLAQETQYF

SEQ ID NO: 368889 - protein, 16 aa, Homo sapiens
  CDR3 for alpha chain variable domain of TCR clone 184445 (TRAV12-3, TRAJ53)
CAMSPGSGGSNYKLTF

SEQ ID NO: 368890 - protein, 18 aa, Homo sapiens
  CDR3 for beta chain variable domain of TCR clone 184445 (TRBV5-5, TRBJ1-5)
CASSLRQVKGSSNQPQHF

SEQ ID NO: 368891 - protein, 14 aa, Homo sapiens
  CDR3 for alpha chain variable domain of TCR clone 184446 (TRAV26-1, TRAJ30)
CIVRPRNRDDKIIF

SEQ ID NO: 368892 - protein, 15 aa, Homo sapiens
  CDR3 for beta chain variable domain of TCR clone 184446 (TRBV6-1, TRBJ1-1)
CASSVDRNTEAFLDK

SEQ ID NO: 368893 - protein, 14 aa, Homo sapiens
  CDR3 for alpha chain variable domain of TCR clone 184447 (TRAV2, TRAJ37)
CAVDFTSNTGKLIF

SEQ ID NO: 368894 - protein, 16 aa, Homo sapiens
  CDR3 for beta chain variable domain of TCR clone 184447 (TRBV7-8, TRBJ2-3)
CASSTEGQRETDTQYF

SEQ ID NO: 368895 - protein, 15 aa, Homo sapiens
  CDR3 for alpha chain variable domain of TCR clone 184448 (TRAV29/DV5, TRAJ48)
FAARLGGLGNEKLTF

SEQ ID NO: 368896 - protein, 11 aa, Homo sapiens
  CDR3 for beta chain variable domain of TCR clone 184448 (TRBV20-1, TRBJ2-3)
CSGTSSTTQYF

SEQ ID NO: 368897 - protein, 16 aa, Homo sapiens
  CDR3 for alpha chain variable domain of TCR clone 184449 (TRAV26-1, TRAJ33)
FIVPFWGDDSNYQLIW

SEQ ID NO: 368898 - protein, 14 aa, Homo sapiens
  CDR3 for beta chain variable domain of TCR clone 184449 (TRBV6-3, TRBJ1-1)
CASSYHSKNTEAFF

SEQ ID NO: 368899 - protein, 14 aa, Homo sapiens
  CDR3 for alpha chain variable domain of TCR clone 184450 (TRAV1-2, TRAJ8)
CAVREDTGFKKLLF

SEQ ID NO: 368900 - protein, 15 aa, Homo sapiens
  CDR3 for beta chain variable domain of TCR clone 184450 (TRBV19, TRBJ1-1)
CASTSGQIQNTEAFF

SEQ ID NO: 368901 - protein, 19 aa, Homo sapiens
  CDR3 for alpha chain variable domain of TCR clone 184451 (TRAV2, TRAJ32)
TTVLSTPPSQGGATNKLIF

SEQ ID NO: 368902 - protein, 12 aa, Homo sapiens
  CDR3 for beta chain variable domain of TCR clone 184451 (TRBV20-1, TRBJ2-7)
CSAITPTKDQYF

SEQ ID NO: 368903 - protein, 14 aa, Homo sapiens
  CDR3 for alpha chain variable domain of TCR clone 184452 (TRAV1-2, TRAJ8)
CAAREDTGFQKLVF

SEQ ID NO: 368904 - protein, 12 aa, Homo sapiens
  CDR3 for beta chain variable domain of TCR clone 184452 (TRBV12-5, TRBJ2-5)
CASGQGVETQYF

SEQ ID NO: 368905 - protein, 14 aa, Homo sapiens
  CDR3 for alpha chain variable domain of TCR clone 184453 (TRAV13-1, TRAJ9)
CSASALTGGFKTIF

SEQ ID NO: 368906 - protein, 16 aa, Homo sapiens
  CDR3 for beta chain variable domain of TCR clone 184453 (TRBV7-8, TRBJ2-4)
CASSAERTLAKNIQYF

SEQ ID NO: 368907 - protein, 16 aa, Homo sapiens
  CDR3 for alpha chain variable domain of TCR clone 184454 (TRAV12-3, TRAJ53)
CAMSPGSGGSNYKLTY

SEQ ID NO: 368908 - protein, 13 aa, Homo sapiens
  CDR3 for beta chain variable domain of TCR clone 184454 (TRBV12-5, TRBJ2-3)
CASGDRQSDTQYF

SEQ ID NO: 368909 - protein, 11 aa, Homo sapiens
  CDR3 for alpha chain variable domain of TCR clone 184455 (TRAV12-3, TRAJ43)
CARSVSNDMRF

SEQ ID NO: 368910 - protein, 13 aa, Homo sapiens
  CDR3 for beta chain variable domain of TCR clone 184455 (TRBV20-1, TRBJ1-1)
CSAPLGGGTEAFF

SEQ ID NO: 368911 - protein, 12 aa, Homo sapiens
  CDR3 for alpha chain variable domain of TCR clone 184456 (TRAV8-3, TRAJ26)
CAGDNYGQNFFF

SEQ ID NO: 368912 - protein, 14 aa, Homo sapiens
  CDR3 for beta chain variable domain of TCR clone 184456 (TRBV19, TRBJ2-1)
CASPTFVLSGEQFF

SEQ ID NO: 368913 - protein, 15 aa, Homo sapiens
  CDR3 for alpha chain variable domain of TCR clone 184457 (TRAV27, TRAJ50)
CAEFGRGTSYDKVIF

SEQ ID NO: 368914 - protein, 14 aa, Homo sapiens
  CDR3 for beta chain variable domain of TCR clone 184457 (TRBV7-2, TRBJ1-1)
CASSFYDLNTEAFF

SEQ ID NO: 368915 - protein, 14 aa, Homo sapiens
  CDR3 for alpha chain variable domain of TCR clone 184458 (TRAV13-1, TRAJ52)
CAANGGTSYGKLTF

SEQ ID NO: 368916 - protein, 14 aa, Homo sapiens
  CDR3 for beta chain variable domain of TCR clone 184458 (TRBV7-6, TRBJ2-3)
CASSLGTVTDTQYF

SEQ ID NO: 368917 - protein, 19 aa, Homo sapiens
  CDR3 for alpha chain variable domain of TCR clone 184459 (TRAV1-2, TRAJ26)
CLLPLRCERPDNYGQNFVF

SEQ ID NO: 368918 - protein, 11 aa, Homo sapiens
  CDR3 for beta chain variable domain of TCR clone 184459 (TRBV12-4, TRBJ2-3)
CASTATDTQYF

SEQ ID NO: 368919 - protein, 13 aa, Homo sapiens
  CDR3 for alpha chain variable domain of TCR clone 184460 (TRAV20, TRAJ48)
CAVQGVGNEKLTF

SEQ ID NO: 368920 - protein, 14 aa, Homo sapiens
  CDR3 for beta chain variable domain of TCR clone 184460 (TRBV27, TRBJ2-7)
CASSFRDGPYGQYF

SEQ ID NO: 368921 - protein, 17 aa, Homo sapiens
  CDR3 for alpha chain variable domain of TCR clone 184461 (TRAV26-1, TRAJ37)
CIVRVITVSSNTGKLIF

SEQ ID NO: 368922 - protein, 17 aa, Homo sapiens
  CDR3 for beta chain variable domain of TCR clone 184461 (TRBV11-2, TRBJ2-1)
CASSLYPPGVEYNEQFF

SEQ ID NO: 368923 - protein, 15 aa, Homo sapiens
  CDR3 for alpha chain variable domain of TCR clone 184462 (TRAV2, TRAJ15)
CAVEDRGHAGTALIF

SEQ ID NO: 368924 - protein, 15 aa, Homo sapiens
  CDR3 for beta chain variable domain of TCR clone 184462 (TRBV20-1, TRBJ1-5)
CSATSDRGLGQPQHF

SEQ ID NO: 368925 - protein, 14 aa, Homo sapiens
  CDR3 for alpha chain variable domain of TCR clone 184463 (TRAV16, TRAJ31)
CSKWRRGDNARLMF

SEQ ID NO: 368926 - protein, 16 aa, Homo sapiens
  CDR3 for beta chain variable domain of TCR clone 184463 (TRBV28, TRBJ2-7)
CASSLFFETGGPEQYL

SEQ ID NO: 368927 - protein, 16 aa, Homo sapiens
  CDR3 for alpha chain variable domain of TCR clone 184464 (TRAV13-1, TRAJ48)
CAASIFGNFGNEKLTF

SEQ ID NO: 368928 - protein, 16 aa, Homo sapiens
  CDR3 for beta chain variable domain of TCR clone 184464 (TRBV5-1, TRBJ1-1)
CASSSGGNSLNTEAFF

SEQ ID NO: 368929 - protein, 14 aa, Homo sapiens
  CDR3 for alpha chain variable domain of TCR clone 184465 (TRAV12-3, TRAJ10)
SHLPLTGGGNKLTF

SEQ ID NO: 368930 - protein, 14 aa, Homo sapiens
  CDR3 for beta chain variable domain of TCR clone 184465 (TRBV6-1, TRBJ2-2)
CASTWQGNTGELFF

SEQ ID NO: 368931 - protein, 10 aa, Homo sapiens
  CDR3 for alpha chain variable domain of TCR clone 184466 (TRAV1-2, TRAJ31)
CVSEDARLMF

SEQ ID NO: 368932 - protein, 14 aa, Homo sapiens
  CDR3 for beta chain variable domain of TCR clone 184466 (TRBV19, TRBJ2-1)
CASPTFVLSGEQFI

SEQ ID NO: 368933 - protein, 14 aa, Homo sapiens
  CDR3 for alpha chain variable domain of TCR clone 184467 (TRAV38-1, TRAJ40)
CALRPTSGTYNYNF

SEQ ID NO: 368934 - protein, 14 aa, Homo sapiens
  CDR3 for beta chain variable domain of TCR clone 184467 (TRBV25-1, TRBJ1-1)
CASTHLGGNTEAFF

SEQ ID NO: 368935 - protein, 13 aa, Homo sapiens
  CDR3 for alpha chain variable domain of TCR clone 184468 (TRAV13-1, TRAJ6)
CAARRGGSYIPPF

SEQ ID NO: 368936 - protein, 16 aa, Homo sapiens
  CDR3 for beta chain variable domain of TCR clone 184468 (TRBV7-9, TRBJ2-2)
CASSLATGVGTGELFF

SEQ ID NO: 368937 - protein, 14 aa, Homo sapiens
  CDR3 for alpha chain variable domain of TCR clone 184469 (TRAV3, TRAJ7)
CAVREEEREQQTRF

SEQ ID NO: 368938 - protein, 12 aa, Homo sapiens
  CDR3 for beta chain variable domain of TCR clone 184469 (TRBV6-3, TRBJ2-7)
CASSLTPYEQDF

SEQ ID NO: 368939 - protein, 14 aa, Homo sapiens
  CDR3 for alpha chain variable domain of TCR clone 184470 (TRAV3, TRAJ7)
CAVREEEREQQTRF

SEQ ID NO: 368940 - protein, 15 aa, Homo sapiens
  CDR3 for beta chain variable domain of TCR clone 184470 (TRBV5-7, TRBJ1-5)
CAGSYGKLWDQPQHF

SEQ ID NO: 368941 - protein, 13 aa, Homo sapiens
  CDR3 for alpha chain variable domain of TCR clone 184471 (TRAV27, TRAJ6)
CAGGTRGSCIPTF

SEQ ID NO: 368942 - protein, 14 aa, Homo sapiens
  CDR3 for beta chain variable domain of TCR clone 184471 (TRBV6-3, TRBJ1-1)
CASSYQRRDTEAFF

SEQ ID NO: 368943 - protein, 11 aa, Homo sapiens
  CDR3 for alpha chain variable domain of TCR clone 184472 (TRAV2, TRAJ20)
CAVLNDYKLSF

SEQ ID NO: 368944 - protein, 12 aa, Homo sapiens
  CDR3 for beta chain variable domain of TCR clone 184472 (TRBV7-8, TRBJ2-7)
CASSLGDREQYF

SEQ ID NO: 368945 - protein, 14 aa, Homo sapiens
  CDR3 for alpha chain variable domain of TCR clone 184473 (TRAV3, TRAJ13)
CAVSYSGGYQKVTF

SEQ ID NO: 368946 - protein, 14 aa, Homo sapiens
  CDR3 for beta chain variable domain of TCR clone 184473 (TRBV4-1, TRBJ2-7)
CASSPVAGGDEQYF

SEQ ID NO: 368947 - protein, 15 aa, Homo sapiens
  CDR3 for alpha chain variable domain of TCR clone 184474 (TRAV17, TRAJ56)
CASEPFTGANSKLTF

SEQ ID NO: 368948 - protein, 14 aa, Homo sapiens
  CDR3 for beta chain variable domain of TCR clone 184474 (TRBV19, TRBJ2-1)
CASPTFVLSGEQFF

SEQ ID NO: 368949 - protein, 18 aa, Homo sapiens
  CDR3 for alpha chain variable domain of TCR clone 184475 (TRAV26-1, TRAJ56)
CIVRVASRVTGANSKLTF

SEQ ID NO: 368950 - protein, 16 aa, Homo sapiens
  CDR3 for beta chain variable domain of TCR clone 184475 (TRBV7-9, TRBJ2-5)
CASSETLDRGAETQYF

SEQ ID NO: 368951 - protein, 11 aa, Homo sapiens
  CDR3 for alpha chain variable domain of TCR clone 184476 (TRAV1-2, TRAJ40)
CAVPGTYKYIF

SEQ ID NO: 368952 - protein, 15 aa, Homo sapiens
  CDR3 for beta chain variable domain of TCR clone 184476 (TRBV25-1, TRBJ1-4)
CTSRPGDSTNEKLFF

SEQ ID NO: 368953 - protein, 15 aa, Homo sapiens
  CDR3 for alpha chain variable domain of TCR clone 184477 (TRAV8-3, TRAJ11)
CVVGLLNSGYSNLTF

SEQ ID NO: 368954 - protein, 16 aa, Homo sapiens
  CDR3 for beta chain variable domain of TCR clone 184477 (TRBV7-9, TRBJ1-2)
CASSLGFSSGEDGYTF

SEQ ID NO: 368955 - protein, 13 aa, Homo sapiens
  CDR3 for alpha chain variable domain of TCR clone 184478 (TRAV35, TRAJ42)
CAGFPGSQGNLIF

SEQ ID NO: 368956 - protein, 13 aa, Homo sapiens
  CDR3 for beta chain variable domain of TCR clone 184478 (TRBV29-1, TRBJ2-1)
CIVEGGRVNEQVF

SEQ ID NO: 368957 - protein, 12 aa, Homo sapiens
  CDR3 for alpha chain variable domain of TCR clone 184479 (TRAV1-2, TRAJ29)
CAVRNLNTPLVF

SEQ ID NO: 368958 - protein, 16 aa, Homo sapiens
  CDR3 for beta chain variable domain of TCR clone 184479 (TRBV19, TRBJ2-1)
CASSKAGPSSYNEQFF

SEQ ID NO: 368959 - protein, 14 aa, Homo sapiens
  CDR3 for alpha chain variable domain of TCR clone 184480 (TRAV20, TRAJ29)
CAVQAGVGNKPLVF

SEQ ID NO: 368960 - protein, 15 aa, Homo sapiens
  CDR3 for beta chain variable domain of TCR clone 184480 (TRBV29-1, TRBJ2-7)
CSVEFFDRGSYEQYF

SEQ ID NO: 368961 - protein, 12 aa, Homo sapiens
  CDR3 for alpha chain variable domain of TCR clone 184481 (TRAV13-1, TRAJ21)
CAAKEGFNKFYF

SEQ ID NO: 368962 - protein, 13 aa, Homo sapiens
  CDR3 for beta chain variable domain of TCR clone 184481 (TRBV6-1, TRBJ1-2)
CASSEGTHYGYTF

SEQ ID NO: 368963 - protein, 14 aa, Homo sapiens
  CDR3 for alpha chain variable domain of TCR clone 184482 (TRAV12-3, TRAJ57)
CAMSARGGSEKLVF

SEQ ID NO: 368964 - protein, 15 aa, Homo sapiens
  CDR3 for beta chain variable domain of TCR clone 184482 (TRBV6-3, TRBJ2-7)
CASSSPGTVFYEQYF

SEQ ID NO: 368965 - protein, 14 aa, Homo sapiens
  CDR3 for alpha chain variable domain of TCR clone 184483 (TRAV12-2, TRAJ13)
CAVKKTGGYQKVTF

SEQ ID NO: 368966 - protein, 13 aa, Homo sapiens
  CDR3 for beta chain variable domain of TCR clone 184483 (TRBV15, TRBJ1-6)
CATTGGLNSTLHF

SEQ ID NO: 368967 - protein, 13 aa, Homo sapiens
  CDR3 for alpha chain variable domain of TCR clone 184484 (TRAV19, TRAJ57)
CALLQGGSEKLFF

SEQ ID NO: 368968 - protein, 14 aa, Homo sapiens
  CDR3 for beta chain variable domain of TCR clone 184484 (TRBV7-8, TRBJ2-7)
CASSPRDRVYEQYF

SEQ ID NO: 368969 - protein, 14 aa, Homo sapiens
  CDR3 for alpha chain variable domain of TCR clone 184485 (TRAV17, TRAJ57)
CATDPQGGSEKLVF

SEQ ID NO: 368970 - protein, 18 aa, Homo sapiens
  CDR3 for beta chain variable domain of TCR clone 184485 (TRBV6-6, TRBJ1-3)
CASSYSKWDLISGNTIYF

SEQ ID NO: 368971 - protein, 14 aa, Homo sapiens
  CDR3 for alpha chain variable domain of TCR clone 184486 (TRAV12-1, TRAJ12)
CVVTRMDSSYKLIF

SEQ ID NO: 368972 - protein, 13 aa, Homo sapiens
  CDR3 for beta chain variable domain of TCR clone 184486 (TRBV11-2, TRBJ2-5)
CASSSTGEETQYF

SEQ ID NO: 368973 - protein, 12 aa, Homo sapiens
  CDR3 for alpha chain variable domain of TCR clone 184487 (TRAV17, TRAJ36)
CATLNGANNLFF

SEQ ID NO: 368974 - protein, 15 aa, Homo sapiens
  CDR3 for beta chain variable domain of TCR clone 184487 (TRBV19, TRBJ1-2)
CASSTKTDTNYGYTF

SEQ ID NO: 368975 - protein, 14 aa, Homo sapiens
  CDR3 for alpha chain variable domain of TCR clone 184488 (TRAV16, TRAJ42)
CALSGMGSQGNLIF

SEQ ID NO: 368976 - protein, 13 aa, Homo sapiens
  CDR3 for beta chain variable domain of TCR clone 184488 (TRBV2, TRBJ1-5)
CATAGPGNQPQHF

SEQ ID NO: 368977 - protein, 14 aa, Homo sapiens
  CDR3 for alpha chain variable domain of TCR clone 184489 (TRAV12-3, TRAJ11)
CNERRKFRIQHLTF

SEQ ID NO: 368978 - protein, 13 aa, Homo sapiens
  CDR3 for beta chain variable domain of TCR clone 184489 (TRBV7-2, TRBJ1-1)
CASSVQGYTEAFF

SEQ ID NO: 368979 - protein, 12 aa, Homo sapiens
  CDR3 for alpha chain variable domain of TCR clone 184490 (TRAV27, TRAJ13)
CAGAGGYQKVTF

SEQ ID NO: 368980 - protein, 16 aa, Homo sapiens
  CDR3 for beta chain variable domain of TCR clone 184490 (TRBV12-5, TRBJ2-5)
CASGPRTSGNQETQYF

SEQ ID NO: 368981 - protein, 12 aa, Homo sapiens
  CDR3 for alpha chain variable domain of TCR clone 184491 (TRAV21, TRAJ33)
CAKMDSNYQLIW

SEQ ID NO: 368982 - protein, 15 aa, Homo sapiens
  CDR3 for beta chain variable domain of TCR clone 184491 (TRBV28, TRBJ2-5)
CASSPPWSYQETQYF

SEQ ID NO: 368983 - protein, 14 aa, Homo sapiens
  CDR3 for alpha chain variable domain of TCR clone 184492 (TRAV12-2, TRAJ17)
CAVLFKAAGNKLTF

SEQ ID NO: 368984 - protein, 16 aa, Homo sapiens
  CDR3 for beta chain variable domain of TCR clone 184492 (TRBV2, TRBJ2-1)
CASSVGGPLSYNEQFF

SEQ ID NO: 368985 - protein, 15 aa, Homo sapiens
  CDR3 for alpha chain variable domain of TCR clone 184493 (TRAV3, TRAJ12)
CTSVPWMDSSYKLIF

SEQ ID NO: 368986 - protein, 13 aa, Homo sapiens
  CDR3 for beta chain variable domain of TCR clone 184493 (TRBV7-3, TRBJ2-2)
CASSLNVLGELFF

SEQ ID NO: 368987 - protein, 14 aa, Homo sapiens
  CDR3 for alpha chain variable domain of TCR clone 184494 (TRAV13-2, TRAJ15)
CAENPNQAGTALIF

SEQ ID NO: 368988 - protein, 16 aa, Homo sapiens
  CDR3 for beta chain variable domain of TCR clone 184494 (TRBV12-4, TRBJ1-2)
CASSATATGKTRGYTF

SEQ ID NO: 368989 - protein, 16 aa, Homo sapiens
  CDR3 for alpha chain variable domain of TCR clone 184495 (TRAV12-3, TRAJ28)
CAMRDNSGAGSYQLTF

SEQ ID NO: 368990 - protein, 16 aa, Homo sapiens
  CDR3 for beta chain variable domain of TCR clone 184495 (TRBV7-2, TRBJ1-3)
CASSRLEASSGNTIYF

SEQ ID NO: 368991 - protein, 13 aa, Homo sapiens
  CDR3 for alpha chain variable domain of TCR clone 184496 (TRAV29/DV5, TRAJ31)
CAASRNNNARFMF

SEQ ID NO: 368992 - protein, 12 aa, Homo sapiens
  CDR3 for beta chain variable domain of TCR clone 184496 (TRBV14, TRBJ2-5)
CASSQLKETQYF

SEQ ID NO: 368993 - protein, 15 aa, Homo sapiens
  CDR3 for alpha chain variable domain of TCR clone 184497 (TRAV17, TRAJ40)
CATVSSTSGTYKYIF

SEQ ID NO: 368994 - protein, 15 aa, Homo sapiens
  CDR3 for beta chain variable domain of TCR clone 184497 (TRBV7-8, TRBJ2-1)
CASSLHGGPYNEQFF

SEQ ID NO: 368995 - protein, 13 aa, Homo sapiens
  CDR3 for alpha chain variable domain of TCR clone 184498 (TRAV27, TRAJ56)
CAGKPGANSKLTI

SEQ ID NO: 368996 - protein, 15 aa, Homo sapiens
  CDR3 for beta chain variable domain of TCR clone 184498 (TRBV6-1, TRBJ2-3)
CASSERWDSTDTQYF

SEQ ID NO: 368997 - protein, 13 aa, Homo sapiens
  CDR3 for alpha chain variable domain of TCR clone 184499 (TRAV12-1, TRAJ16)
CVVNGPDGQKLLL

SEQ ID NO: 368998 - protein, 13 aa, Homo sapiens
  CDR3 for beta chain variable domain of TCR clone 184499 (TRBV2, TRBJ1-1)
CARNPTGGFHAFS

SEQ ID NO: 368999 - protein, 16 aa, Homo sapiens
  CDR3 for alpha chain variable domain of TCR clone 184500 (TRAV3, TRAJ37)
CAVRGKGFGNTGKLIF

SEQ ID NO: 369000 - protein, 13 aa, Homo sapiens
  CDR3 for beta chain variable domain of TCR clone 184500 (TRBV7-3, TRBJ1-1)
CASSQDWGAEAFF

SEQ ID NO: 369001 - protein, 13 aa, Homo sapiens
  CDR3 for alpha chain variable domain of TCR clone 184501 (TRAV12-3, TRAJ31)
CAMSATNNARLMF

SEQ ID NO: 369002 - protein, 16 aa, Homo sapiens
  CDR3 for beta chain variable domain of TCR clone 184501 (TRBV7-9, TRBJ1-2)
CASSLGFSSGEDGYTF

SEQ ID NO: 369003 - protein, 11 aa, Homo sapiens
  CDR3 for alpha chain variable domain of TCR clone 184502 (TRAV2, TRAJ21)
CAVFNFNKFYF

SEQ ID NO: 369004 - protein, 14 aa, Homo sapiens
  CDR3 for beta chain variable domain of TCR clone 184502 (TRBV15, TRBJ2-3)
CATRSGTSADTQYF

SEQ ID NO: 369005 - protein, 10 aa, Homo sapiens
  CDR3 for alpha chain variable domain of TCR clone 184503 (TRAV12-2, TRAJ41)
CAVTGYALNF

SEQ ID NO: 369006 - protein, 15 aa, Homo sapiens
  CDR3 for beta chain variable domain of TCR clone 184503 (TRBV4-2, TRBJ2-1)
CASSQDVGLAGEPFF

SEQ ID NO: 369007 - protein, 13 aa, Homo sapiens
  CDR3 for alpha chain variable domain of TCR clone 184504 (TRAV14/DV4, TRAJ23)
CAMREVKGGKLIF

SEQ ID NO: 369008 - protein, 15 aa, Homo sapiens
  CDR3 for beta chain variable domain of TCR clone 184504 (TRBV6-1, TRBJ2-3)
CASSERGGITDTQYF

SEQ ID NO: 369009 - protein, 12 aa, Homo sapiens
  CDR3 for alpha chain variable domain of TCR clone 184505 (TRAV16, TRAJ10)
CSHTGGGNKLTF

SEQ ID NO: 369010 - protein, 19 aa, Homo sapiens
  CDR3 for beta chain variable domain of TCR clone 184505 (TRBV28, TRBJ2-1)
CASSFSIRGSGRTRYEQFF

SEQ ID NO: 369011 - protein, 12 aa, Homo sapiens
  CDR3 for alpha chain variable domain of TCR clone 184506 (TRAV12-2, TRAJ43)
CAVNVNNNDMSF

SEQ ID NO: 369012 - protein, 14 aa, Homo sapiens
  CDR3 for beta chain variable domain of TCR clone 184506 (TRBV7-2, TRBJ2-7)
CASSFLGRVYEQYF

SEQ ID NO: 369013 - protein, 14 aa, Homo sapiens
  CDR3 for alpha chain variable domain of TCR clone 184507 (TRAV27, TRAJ22)
CAGLPSGSARQLTF

SEQ ID NO: 369014 - protein, 13 aa, Homo sapiens
  CDR3 for beta chain variable domain of TCR clone 184507 (TRBV7-2, TRBJ2-7)
CASSAPSGSEQYF

SEQ ID NO: 369015 - protein, 14 aa, Homo sapiens
  CDR3 for alpha chain variable domain of TCR clone 184508 (TRAV1-2, TRAJ16)
CAVNRFSDGQKLLF

SEQ ID NO: 369016 - protein, 15 aa, Homo sapiens
  CDR3 for beta chain variable domain of TCR clone 184508 (TRBV7-3, TRBJ1-1)
CASSQDWGAELSLDK

SEQ ID NO: 369017 - protein, 17 aa, Homo sapiens
  CDR3 for alpha chain variable domain of TCR clone 184509 (TRAV13-1, TRAJ3)
CAASPAPSTAVLPRYSL

SEQ ID NO: 369018 - protein, 18 aa, Homo sapiens
  CDR3 for beta chain variable domain of TCR clone 184509 (TRBV15, TRBJ2-3)
CATSRDGARSWDTDTQYF

SEQ ID NO: 369019 - protein, 16 aa, Homo sapiens
  CDR3 for alpha chain variable domain of TCR clone 184510 (TRAV30, TRAJ24)
CGTEIVDADSWGKFQF

SEQ ID NO: 369020 - protein, 14 aa, Homo sapiens
  CDR3 for beta chain variable domain of TCR clone 184510 (TRBV7-2, TRBJ2-7)
CQQLKGALTYEQYF

SEQ ID NO: 369021 - protein, 14 aa, Homo sapiens
  CDR3 for alpha chain variable domain of TCR clone 184511 (TRAV23/DV6, TRAJ58)
CAGMRETRGSSLTF

SEQ ID NO: 369022 - protein, 13 aa, Homo sapiens
  CDR3 for beta chain variable domain of TCR clone 184511 (TRBV28, TRBJ2-7)
CASRSSGVYEQYF

SEQ ID NO: 369023 - protein, 14 aa, Homo sapiens
  CDR3 for alpha chain variable domain of TCR clone 184512 (TRAV8-2, TRAJ45)
CVVSAGGGADGLTF

SEQ ID NO: 369024 - protein, 12 aa, Homo sapiens
  CDR3 for beta chain variable domain of TCR clone 184512 (TRBV12-4, TRBJ2-1)
CASSVVRVGQFF

SEQ ID NO: 369025 - protein, 17 aa, Homo sapiens
  CDR3 for alpha chain variable domain of TCR clone 184513 (TRAV3, TRAJ6)
CDVRDGPRAGGSYKPTF

SEQ ID NO: 369026 - protein, 14 aa, Homo sapiens
  CDR3 for beta chain variable domain of TCR clone 184513 (TRBV7-2, TRBJ2-7)
CASSPKTSFYEQYF

SEQ ID NO: 369027 - protein, 13 aa, Homo sapiens
  CDR3 for alpha chain variable domain of TCR clone 184514 (TRAV12-1, TRAJ33)
CGDAPDSNYQLIW

SEQ ID NO: 369028 - protein, 15 aa, Homo sapiens
  CDR3 for beta chain variable domain of TCR clone 184514 (TRBV27, TRBJ2-1)
CASSNGGGSSNVQFF

SEQ ID NO: 369029 - protein, 16 aa, Homo sapiens
  CDR3 for alpha chain variable domain of TCR clone 184515 (TRAV38-2/DV8, TRAJ47)
CAYRSAIMEYGNKLVF

SEQ ID NO: 369030 - protein, 15 aa, Homo sapiens
  CDR3 for beta chain variable domain of TCR clone 184515 (TRBV12-4, TRBJ2-7)
CASSRGLAGTYEQYF

SEQ ID NO: 369031 - protein, 16 aa, Homo sapiens
  CDR3 for alpha chain variable domain of TCR clone 184516 (TRAV26-1, TRAJ45)
CIVEKYSGGGADGLTF

SEQ ID NO: 369032 - protein, 17 aa, Homo sapiens
  CDR3 for beta chain variable domain of TCR clone 184516 (TRBV20-1, TRBJ2-1)
CSASSSGLAGSYNEQFF

SEQ ID NO: 369033 - protein, 12 aa, Homo sapiens
  CDR3 for alpha chain variable domain of TCR clone 184517 (TRAV20, TRAJ34)
CAVKDNTDKLIF

SEQ ID NO: 369034 - protein, 16 aa, Homo sapiens
  CDR3 for beta chain variable domain of TCR clone 184517 (TRBV19, TRBJ1-1)
CASRFGGPVTGTEAFF

SEQ ID NO: 369035 - protein, 13 aa, Homo sapiens
  CDR3 for alpha chain variable domain of TCR clone 184518 (TRAV21, TRAJ27)
CAALNTNAGKSTF

SEQ ID NO: 369036 - protein, 16 aa, Homo sapiens
  CDR3 for beta chain variable domain of TCR clone 184518 (TRBV11-2, TRBJ2-3)
CASSSRTSGGAGTQYF

SEQ ID NO: 369037 - protein, 11 aa, Homo sapiens
  CDR3 for alpha chain variable domain of TCR clone 184519 (TRAV2, TRAJ13)
CASGGYQKVTF

SEQ ID NO: 369038 - protein, 13 aa, Homo sapiens
  CDR3 for beta chain variable domain of TCR clone 184519 (TRBV6-5, TRBJ2-1)
CASRGRVGNEQFF

SEQ ID NO: 369039 - protein, 17 aa, Homo sapiens
  CDR3 for alpha chain variable domain of TCR clone 184520 (TRAV1-1, TRAJ4)
CALYNKLIFGAGTRLAV

SEQ ID NO: 369040 - protein, 13 aa, Homo sapiens
  CDR3 for beta chain variable domain of TCR clone 184520 (TRBV15, TRBJ2-5)
CATSQIGEETQYF

SEQ ID NO: 369041 - protein, 16 aa, Homo sapiens
  CDR3 for alpha chain variable domain of TCR clone 184521 (TRAV8-3, TRAJ13)
CAVGAYPSVCYQKFTF

SEQ ID NO: 369042 - protein, 15 aa, Homo sapiens
  CDR3 for beta chain variable domain of TCR clone 184521 (TRBV19, TRBJ1-5)
CASSIVWADNQPQHF

SEQ ID NO: 369043 - protein, 14 aa, Homo sapiens
  CDR3 for alpha chain variable domain of TCR clone 184522 (TRAV23/DV6, TRAJ24)
CAASLSDSCGKLQF

SEQ ID NO: 369044 - protein, 15 aa, Homo sapiens
  CDR3 for beta chain variable domain of TCR clone 184522 (TRBV9, TRBJ1-6)
CASSVAGTGDSPLHF

SEQ ID NO: 369045 - protein, 14 aa, Homo sapiens
  CDR3 for alpha chain variable domain of TCR clone 184523 (TRAV12-3, TRAJ10)
SHLPLTGGGNKLTF

SEQ ID NO: 369046 - protein, 14 aa, Homo sapiens
  CDR3 for beta chain variable domain of TCR clone 184523 (TRBV7-3, TRBJ2-2)
CASSLNSNTGELFF

SEQ ID NO: 369047 - protein, 16 aa, Homo sapiens
  CDR3 for alpha chain variable domain of TCR clone 184524 (TRAV16, TRAJ4)
CALSRMFSGSNNKLIF

SEQ ID NO: 369048 - protein, 16 aa, Homo sapiens
  CDR3 for beta chain variable domain of TCR clone 184524 (TRBV24-1, TRBJ2-3)
CATSDHGTGATDTQYF

SEQ ID NO: 369049 - protein, 14 aa, Homo sapiens
  CDR3 for alpha chain variable domain of TCR clone 184525 (TRAV13-1, TRAJ22)
CSASYSGSARQLTF

SEQ ID NO: 369050 - protein, 13 aa, Homo sapiens
  CDR3 for beta chain variable domain of TCR clone 184525 (TRBV6-3, TRBJ1-2)
CASSLTGDYGYTF

SEQ ID NO: 369051 - protein, 11 aa, Homo sapiens
  CDR3 for alpha chain variable domain of TCR clone 184526 (TRAV27, TRAJ47)
CAGAYGNKLVF

SEQ ID NO: 369052 - protein, 13 aa, Homo sapiens
  CDR3 for beta chain variable domain of TCR clone 184526 (TRBV28, TRBJ2-5)
CASSFAGGETQYF

SEQ ID NO: 369053 - protein, 15 aa, Homo sapiens
  CDR3 for alpha chain variable domain of TCR clone 184527 (TRAV25, TRAJ53)
CPTSNSGGSNYKLTF

SEQ ID NO: 369054 - protein, 14 aa, Homo sapiens
  CDR3 for beta chain variable domain of TCR clone 184527 (TRBV11-2, TRBJ2-3)
CASSRLARIDTQYF

SEQ ID NO: 369055 - protein, 12 aa, Homo sapiens
  CDR3 for alpha chain variable domain of TCR clone 184528 (TRAV21, TRAJ31)
FVLAGNNARLMF

SEQ ID NO: 369056 - protein, 16 aa, Homo sapiens
  CDR3 for beta chain variable domain of TCR clone 184528 (TRBV27, TRBJ2-5)
CASSFGPGGTKETQYF

SEQ ID NO: 369057 - protein, 11 aa, Homo sapiens
  CDR3 for alpha chain variable domain of TCR clone 184529 (TRAV35, TRAJ34)
CWARNTDKLVF

SEQ ID NO: 369058 - protein, 12 aa, Homo sapiens
  CDR3 for beta chain variable domain of TCR clone 184529 (TRBV12-5, TRBJ2-5)
CASGQGVETQYF

SEQ ID NO: 369059 - protein, 14 aa, Homo sapiens
  CDR3 for alpha chain variable domain of TCR clone 184530 (TRAV1-2, TRAJ16)
CAVNRVSDGQKLLF

SEQ ID NO: 369060 - protein, 13 aa, Homo sapiens
  CDR3 for beta chain variable domain of TCR clone 184530 (TRBV10-3, TRBJ1-2)
CAISERDSYGYTF

SEQ ID NO: 369061 - protein, 14 aa, Homo sapiens
  CDR3 for alpha chain variable domain of TCR clone 184531 (TRAV8-3, TRAJ4)
CAVGAAGGYNKLIF

SEQ ID NO: 369062 - protein, 16 aa, Homo sapiens
  CDR3 for beta chain variable domain of TCR clone 184531 (TRBV11-3, TRBJ2-5)
CASSSVVAGSTETQYF

SEQ ID NO: 369063 - protein, 13 aa, Homo sapiens
  CDR3 for alpha chain variable domain of TCR clone 184532 (TRAV12-2, TRAJ15)
CAVFNQAGNALIF

SEQ ID NO: 369064 - protein, 15 aa, Homo sapiens
  CDR3 for beta chain variable domain of TCR clone 184532 (TRBV7-8, TRBJ1-5)
CASSRGGGAGQPQHF

SEQ ID NO: 369065 - protein, 13 aa, Homo sapiens
  CDR3 for alpha chain variable domain of TCR clone 184533 (TRAV3, TRAJ36)
CAVRGTGANNLCF

SEQ ID NO: 369066 - protein, 15 aa, Homo sapiens
  CDR3 for beta chain variable domain of TCR clone 184533 (TRBV24-1, TRBJ2-1)
CATSGSGGFYNEQFF

SEQ ID NO: 369067 - protein, 15 aa, Homo sapiens
  CDR3 for alpha chain variable domain of TCR clone 184534 (TRAV3, TRAJ5)
CAVRDLDTGRRALTF

SEQ ID NO: 369068 - protein, 15 aa, Homo sapiens
  CDR3 for beta chain variable domain of TCR clone 184534 (TRBV5-1, TRBJ2-3)
CTSSVTSGSTETQYF

SEQ ID NO: 369069 - protein, 16 aa, Homo sapiens
  CDR3 for alpha chain variable domain of TCR clone 184535 (TRAV12-2, TRAJ18)
CAVFAGRGSTLGRLYF

SEQ ID NO: 369070 - protein, 14 aa, Homo sapiens
  CDR3 for beta chain variable domain of TCR clone 184535 (TRBV19, TRBJ2-1)
CASPTFVLSGEQFF

SEQ ID NO: 369071 - protein, 14 aa, Homo sapiens
  CDR3 for alpha chain variable domain of TCR clone 184536 (TRAV12-2, TRAJ4)
CAEDLSGGYNKLIF

SEQ ID NO: 369072 - protein, 13 aa, Homo sapiens
  CDR3 for beta chain variable domain of TCR clone 184536 (TRBV7-3, TRBJ1-1)
CASSQDWGAEAFF

SEQ ID NO: 369073 - protein, 15 aa, Homo sapiens
  CDR3 for alpha chain variable domain of TCR clone 184537 (TRAV13-1, TRAJ57)
QVPPLSQGGSEKLVF

SEQ ID NO: 369074 - protein, 17 aa, Homo sapiens
  CDR3 for beta chain variable domain of TCR clone 184537 (TRBV7-3, TRBJ2-3)
CASSVMKRMRGADTQYF

SEQ ID NO: 369075 - protein, 11 aa, Homo sapiens
  CDR3 for alpha chain variable domain of TCR clone 184538 (TRAV12-2, TRAJ36)
CAADGENNLFF

SEQ ID NO: 369076 - protein, 13 aa, Homo sapiens
  CDR3 for beta chain variable domain of TCR clone 184538 (TRBV28, TRBJ2-5)
CAGVSRGEETQYF

SEQ ID NO: 369077 - protein, 13 aa, Homo sapiens
  CDR3 for alpha chain variable domain of TCR clone 184539 (TRAV13-1, TRAJ12)
CAASPDSSYRLIF

SEQ ID NO: 369078 - protein, 13 aa, Homo sapiens
  CDR3 for beta chain variable domain of TCR clone 184539 (TRBV10-3, TRBJ2-7)
CASKLAVNYEQYF

SEQ ID NO: 369079 - protein, 15 aa, Homo sapiens
  CDR3 for alpha chain variable domain of TCR clone 184540 (TRAV8-3, TRAJ27)
CAVGAAKTNAGKSTF

SEQ ID NO: 369080 - protein, 15 aa, Homo sapiens
  CDR3 for beta chain variable domain of TCR clone 184540 (TRBV7-2, TRBJ2-1)
CASSSGLAGGNEQFF

SEQ ID NO: 369081 - protein, 14 aa, Homo sapiens
  CDR3 for alpha chain variable domain of TCR clone 184541 (TRAV30, TRAJ33)
CGTVAPRSNYQLIG

SEQ ID NO: 369082 - protein, 16 aa, Homo sapiens
  CDR3 for beta chain variable domain of TCR clone 184541 (TRBV3-1, TRBJ2-5)
CASSPGQFNGFGTQYF

SEQ ID NO: 369083 - protein, 14 aa, Homo sapiens
  CDR3 for alpha chain variable domain of TCR clone 184542 (TRAV12-3, TRAJ9)
CAMSPNTGGFKPIF

SEQ ID NO: 369084 - protein, 11 aa, Homo sapiens
  CDR3 for beta chain variable domain of TCR clone 184542 (TRBV29-1, TRBJ2-5)
CSEDRTGTQYF

SEQ ID NO: 369085 - protein, 13 aa, Homo sapiens
  CDR3 for alpha chain variable domain of TCR clone 184543 (TRAV12-2, TRAJ7)
CAGLIYGNNRLAF

SEQ ID NO: 369086 - protein, 15 aa, Homo sapiens
  CDR3 for beta chain variable domain of TCR clone 184543 (TRBV11-3, TRBJ2-3)
CASLKDGREGDTQYF

SEQ ID NO: 369087 - protein, 12 aa, Homo sapiens
  CDR3 for alpha chain variable domain of TCR clone 184544 (TRAV17, TRAJ53)
CATEGSNYKLTF

SEQ ID NO: 369088 - protein, 17 aa, Homo sapiens
  CDR3 for beta chain variable domain of TCR clone 184544 (TRBV11-2, TRBJ2-1)
CASSLYPPGVEYNEQFF

SEQ ID NO: 369089 - protein, 15 aa, Homo sapiens
  CDR3 for alpha chain variable domain of TCR clone 184545 (TRAV23/DV6, TRAJ38)
CAASGGAGNHRKLIW

SEQ ID NO: 369090 - protein, 13 aa, Homo sapiens
  CDR3 for beta chain variable domain of TCR clone 184545 (TRBV7-2, TRBJ1-2)
CASSLPGLYGYTF

SEQ ID NO: 369091 - protein, 15 aa, Homo sapiens
  CDR3 for alpha chain variable domain of TCR clone 184546 (TRAV8-3, TRAJ23)
CAVGDRYNQGGKLIF

SEQ ID NO: 369092 - protein, 17 aa, Homo sapiens
  CDR3 for beta chain variable domain of TCR clone 184546 (TRBV7-6, TRBJ2-5)
CASSPGLADPWGETQYF

SEQ ID NO: 369093 - protein, 11 aa, Homo sapiens
  CDR3 for alpha chain variable domain of TCR clone 184547 (TRAV26-2, TRAJ33)
CILRSLQATIS

SEQ ID NO: 369094 - protein, 13 aa, Homo sapiens
  CDR3 for beta chain variable domain of TCR clone 184547 (TRBV24-1, TRBJ2-2)
CATSDWSTGELFF

SEQ ID NO: 369095 - protein, 14 aa, Homo sapiens
  CDR3 for alpha chain variable domain of TCR clone 184548 (TRAV17, TRAJ35)
CATDRPVFGNVLHC

SEQ ID NO: 369096 - protein, 19 aa, Homo sapiens
  CDR3 for beta chain variable domain of TCR clone 184548 (TRBV11-3, TRBJ2-2)
CASSTRPGAKTTNTGELFF

SEQ ID NO: 369097 - protein, 13 aa, Homo sapiens
  CDR3 for alpha chain variable domain of TCR clone 184549 (TRAV3, TRAJ43)
CAVKASNNNDIRF

SEQ ID NO: 369098 - protein, 16 aa, Homo sapiens
  CDR3 for beta chain variable domain of TCR clone 184549 (TRBV7-9, TRBJ2-3)
CASSFSVAGGTDTQYF

SEQ ID NO: 369099 - protein, 11 aa, Homo sapiens
  CDR3 for alpha chain variable domain of TCR clone 184550 (TRAV12-3, TRAJ27)
CAMANAGKSTF

SEQ ID NO: 369100 - protein, 13 aa, Homo sapiens
  CDR3 for beta chain variable domain of TCR clone 184550 (TRBV20-1, TRBJ1-1)
CSARVGGNTEAFF

SEQ ID NO: 369101 - protein, 15 aa, Homo sapiens
  CDR3 for alpha chain variable domain of TCR clone 184551 (TRAV12-3, TRAJ47)
CAMSALVEYGNKLVF

SEQ ID NO: 369102 - protein, 15 aa, Homo sapiens
  CDR3 for beta chain variable domain of TCR clone 184551 (TRBV4-1, TRBJ1-4)
CASSDTGGTNEKLFF

SEQ ID NO: 369103 - protein, 15 aa, Homo sapiens
  CDR3 for alpha chain variable domain of TCR clone 184552 (TRAV14/DV4, TRAJ33)
CAMREGRDSNYQLIW

SEQ ID NO: 369104 - protein, 15 aa, Homo sapiens
  CDR3 for beta chain variable domain of TCR clone 184552 (TRBV5-5, TRBJ1-5)
CASSPTPGSNQPQHF

SEQ ID NO: 369105 - protein, 14 aa, Homo sapiens
  CDR3 for alpha chain variable domain of TCR clone 184553 (TRAV12-1, TRAJ17)
CVVNYKAAGNKLTF

SEQ ID NO: 369106 - protein, 13 aa, Homo sapiens
  CDR3 for beta chain variable domain of TCR clone 184553 (TRBV5-5, TRBJ1-2)
CASSSGRGEDYTF

SEQ ID NO: 369107 - protein, 13 aa, Homo sapiens
  CDR3 for alpha chain variable domain of TCR clone 184554 (TRAV3, TRAJ3)
CAMADSRASKIIF

SEQ ID NO: 369108 - protein, 12 aa, Homo sapiens
  CDR3 for beta chain variable domain of TCR clone 184554 (TRBV7-8, TRBJ2-7)
CASEGGPHGQYF

SEQ ID NO: 369109 - protein, 14 aa, Homo sapiens
  CDR3 for alpha chain variable domain of TCR clone 184555 (TRAV12-2, TRAJ13)
CAVKKTGGYQKFTF

SEQ ID NO: 369110 - protein, 13 aa, Homo sapiens
  CDR3 for beta chain variable domain of TCR clone 184555 (TRBV20-1, TRBJ1-1)
CSARGGGNTEAFF

SEQ ID NO: 369111 - protein, 13 aa, Homo sapiens
  CDR3 for alpha chain variable domain of TCR clone 184556 (TRAV12-1, TRAJ29)
CVVDTSGNTPLVF

SEQ ID NO: 369112 - protein, 15 aa, Homo sapiens
  CDR3 for beta chain variable domain of TCR clone 184556 (TRBV13, TRBJ1-3)
CASSPNRGSGNTIYF

SEQ ID NO: 369113 - protein, 14 aa, Homo sapiens
  CDR3 for alpha chain variable domain of TCR clone 184557 (TRAV8-3, TRAJ35)
CAVVPQGFGNVLQC

SEQ ID NO: 369114 - protein, 15 aa, Homo sapiens
  CDR3 for beta chain variable domain of TCR clone 184557 (TRBV27, TRBJ2-1)
CASSNGGGSSNEQFF

SEQ ID NO: 369115 - protein, 16 aa, Homo sapiens
  CDR3 for alpha chain variable domain of TCR clone 184558 (TRAV30, TRAJ24)
CGTVIVDADSWGKFQF

SEQ ID NO: 369116 - protein, 14 aa, Homo sapiens
  CDR3 for beta chain variable domain of TCR clone 184558 (TRBV7-2, TRBJ1-1)
CASSFLTGTAEAFF

SEQ ID NO: 369117 - protein, 21 aa, Homo sapiens
  CDR3 for alpha chain variable domain of TCR clone 184559 (TRAV1-2, TRAJ18)
CAVRGEAQPWGGYTLEEELSC

SEQ ID NO: 369118 - protein, 15 aa, Homo sapiens
  CDR3 for beta chain variable domain of TCR clone 184559 (TRBV9, TRBJ1-6)
CASSVAGTGDSPLHF

SEQ ID NO: 369119 - protein, 12 aa, Homo sapiens
  CDR3 for alpha chain variable domain of TCR clone 184560 (TRAV9-2, TRAJ9)
CALATGGFKTIF

SEQ ID NO: 369120 - protein, 13 aa, Homo sapiens
  CDR3 for beta chain variable domain of TCR clone 184560 (TRBV12-4, TRBJ2-1)
CASSLVPGNEQFF

SEQ ID NO: 369121 - protein, 11 aa, Homo sapiens
  CDR3 for alpha chain variable domain of TCR clone 184561 (TRAV13-1, TRAJ39)
CASHAGNMLTF

SEQ ID NO: 369122 - protein, 13 aa, Homo sapiens
  CDR3 for beta chain variable domain of TCR clone 184561 (TRBV19, TRBJ2-5)
CASSIPYGETQYF

SEQ ID NO: 369123 - protein, 14 aa, Homo sapiens
  CDR3 for alpha chain variable domain of TCR clone 184562 (TRAV8-4, TRAJ13)
CAVTLSGGYQKVTF

SEQ ID NO: 369124 - protein, 17 aa, Homo sapiens
  CDR3 for beta chain variable domain of TCR clone 184562 (TRBV28, TRBJ2-5)
CASSTPEGDALQETQYF

SEQ ID NO: 369125 - protein, 14 aa, Homo sapiens
  CDR3 for alpha chain variable domain of TCR clone 184563 (TRAV2, TRAJ9)
CAVEDRSGGFKTIF

SEQ ID NO: 369126 - protein, 18 aa, Homo sapiens
  CDR3 for beta chain variable domain of TCR clone 184563 (TRBV20-1, TRBJ2-5)
CSQTGDSGRLGRKDTQYF

SEQ ID NO: 369127 - protein, 14 aa, Homo sapiens
  CDR3 for alpha chain variable domain of TCR clone 184564 (TRAV13-1, TRAJ35)
CAASKGGFGNVLHC

SEQ ID NO: 369128 - protein, 13 aa, Homo sapiens
  CDR3 for beta chain variable domain of TCR clone 184564 (TRBV7-3, TRBJ1-1)
CASSQDWGAESFF

SEQ ID NO: 369129 - protein, 14 aa, Homo sapiens
  CDR3 for alpha chain variable domain of TCR clone 184565 (TRAV29/DV5, TRAJ36)
CAARRKTGANNLFF

SEQ ID NO: 369130 - protein, 16 aa, Homo sapiens
  CDR3 for beta chain variable domain of TCR clone 184565 (TRBV28, TRBJ2-7)
CASSLFFETGGPEQYF

SEQ ID NO: 369131 - protein, 12 aa, Homo sapiens
  CDR3 for alpha chain variable domain of TCR clone 184566 (TRAV23/DV6, TRAJ49)
CAATYTGNKFYF

SEQ ID NO: 369132 - protein, 17 aa, Homo sapiens
  CDR3 for beta chain variable domain of TCR clone 184566 (TRBV4-1, TRBJ2-3)
CASSQVLQGGGTDTQYF

SEQ ID NO: 369133 - protein, 16 aa, Homo sapiens
  CDR3 for alpha chain variable domain of TCR clone 184567 (TRAV26-1, TRAJ37)
CIVRGDGSGNTVKLIF

SEQ ID NO: 369134 - protein, 17 aa, Homo sapiens
  CDR3 for beta chain variable domain of TCR clone 184567 (TRBV4-1, TRBJ2-7)
CASSQDPLGVRGGEQYF

SEQ ID NO: 369135 - protein, 14 aa, Homo sapiens
  CDR3 for alpha chain variable domain of TCR clone 184568 (TRAV26-1, TRAJ30)
CIVRVAYRDDKIIF

SEQ ID NO: 369136 - protein, 14 aa, Homo sapiens
  CDR3 for beta chain variable domain of TCR clone 184568 (TRBV5-4, TRBJ1-1)
CASSLDSRRDEAFF

SEQ ID NO: 369137 - protein, 11 aa, Homo sapiens
  CDR3 for alpha chain variable domain of TCR clone 184569 (TRAV6, TRAJ4)
PISGCYNKLIF

SEQ ID NO: 369138 - protein, 13 aa, Homo sapiens
  CDR3 for beta chain variable domain of TCR clone 184569 (TRBV11-3, TRBJ2-7)
CASSLDKLYEQYF

SEQ ID NO: 369139 - protein, 12 aa, Homo sapiens
  CDR3 for alpha chain variable domain of TCR clone 184570 (TRAV12-2, TRAJ36)
CAAPRGANNLFF

SEQ ID NO: 369140 - protein, 19 aa, Homo sapiens
  CDR3 for beta chain variable domain of TCR clone 184570 (TRBV19, TRBJ2-5)
CASSIGQVTDFFLGETQYF

SEQ ID NO: 369141 - protein, 12 aa, Homo sapiens
  CDR3 for alpha chain variable domain of TCR clone 184571 (TRAV13-1, TRAJ4)
CSSKGGYNKLIF

SEQ ID NO: 369142 - protein, 16 aa, Homo sapiens
  CDR3 for beta chain variable domain of TCR clone 184571 (TRBV5-1, TRBJ2-5)
CASSFQGLADQETQYF

SEQ ID NO: 369143 - protein, 16 aa, Homo sapiens
  CDR3 for alpha chain variable domain of TCR clone 184572 (TRAV38-2/DV8, TRAJ45)
CAYTTTSGGGADALTF

SEQ ID NO: 369144 - protein, 14 aa, Homo sapiens
  CDR3 for beta chain variable domain of TCR clone 184572 (TRBV7-9, TRBJ2-2)
CASSLGHRTGELFF

SEQ ID NO: 369145 - protein, 15 aa, Homo sapiens
  CDR3 for alpha chain variable domain of TCR clone 184573 (TRAV14/DV4, TRAJ12)
CAMTPPVDSSYKLIF

SEQ ID NO: 369146 - protein, 14 aa, Homo sapiens
  CDR3 for beta chain variable domain of TCR clone 184573 (TRBV19, TRBJ2-1)
CASSDNQGADEQFF

SEQ ID NO: 369147 - protein, 13 aa, Homo sapiens
  CDR3 for alpha chain variable domain of TCR clone 184574 (TRAV1-2, TRAJ12)
CAVSMDSSYKLIF

SEQ ID NO: 369148 - protein, 15 aa, Homo sapiens
  CDR3 for beta chain variable domain of TCR clone 184574 (TRBV27, TRBJ2-5)
CASSLIPSGGETQFF

SEQ ID NO: 369149 - protein, 12 aa, Homo sapiens
  CDR3 for alpha chain variable domain of TCR clone 184575 (TRAV4, TRAJ26)
CLVGDYGQNFVF

SEQ ID NO: 369150 - protein, 12 aa, Homo sapiens
  CDR3 for beta chain variable domain of TCR clone 184575 (TRBV11-3, TRBJ2-2)
CSSSLGGGELFF

SEQ ID NO: 369151 - protein, 16 aa, Homo sapiens
  CDR3 for alpha chain variable domain of TCR clone 184576 (TRAV30, TRAJ24)
CGTEIVDSDSWGKFQF

SEQ ID NO: 369152 - protein, 13 aa, Homo sapiens
  CDR3 for beta chain variable domain of TCR clone 184576 (TRBV18, TRBJ1-2)
CASSASATEGYTF

SEQ ID NO: 369153 - protein, 13 aa, Homo sapiens
  CDR3 for alpha chain variable domain of TCR clone 184577 (TRAV1-2, TRAJ16)
CAVNRFSWPEAAL

SEQ ID NO: 369154 - protein, 15 aa, Homo sapiens
  CDR3 for beta chain variable domain of TCR clone 184577 (TRBV27, TRBJ2-1)
CASSNGGGSSNEQFF

SEQ ID NO: 369155 - protein, 12 aa, Homo sapiens
  CDR3 for alpha chain variable domain of TCR clone 184578 (TRAV2, TRAJ33)
CAFMDSNYQLIW

SEQ ID NO: 369156 - protein, 16 aa, Homo sapiens
  CDR3 for beta chain variable domain of TCR clone 184578 (TRBV2, TRBJ2-7)
CASSESWTGPSYEQYF

SEQ ID NO: 369157 - protein, 11 aa, Homo sapiens
  CDR3 for alpha chain variable domain of TCR clone 184579 (TRAV13-1, TRAJ6)
CATLGSYIPTF

SEQ ID NO: 369158 - protein, 12 aa, Homo sapiens
  CDR3 for beta chain variable domain of TCR clone 184579 (TRBV11-2, TRBJ2-1)
CASSPGNNELFF

SEQ ID NO: 369159 - protein, 13 aa, Homo sapiens
  CDR3 for alpha chain variable domain of TCR clone 184580 (TRAV12-3, TRAJ47)
CAMKKEYGNKMVF

SEQ ID NO: 369160 - protein, 16 aa, Homo sapiens
  CDR3 for beta chain variable domain of TCR clone 184580 (TRBV3-1, TRBJ2-6)
CASSLTWVSGANVLTF

SEQ ID NO: 369161 - protein, 14 aa, Homo sapiens
  CDR3 for alpha chain variable domain of TCR clone 184581 (TRAV17, TRAJ54)
CATEANQGAQKLVF

SEQ ID NO: 369162 - protein, 12 aa, Homo sapiens
  CDR3 for beta chain variable domain of TCR clone 184581 (TRBV6-3, TRBJ2-1)
CASSGSYSEQFF

SEQ ID NO: 369163 - protein, 14 aa, Homo sapiens
  CDR3 for alpha chain variable domain of TCR clone 184582 (TRAV17, TRAJ17)
CATDDATAGNKLTF

SEQ ID NO: 369164 - protein, 16 aa, Homo sapiens
  CDR3 for beta chain variable domain of TCR clone 184582 (TRBV19, TRBJ2-1)
CASSIETGSPYNEQFF

SEQ ID NO: 369165 - protein, 11 aa, Homo sapiens
  CDR3 for alpha chain variable domain of TCR clone 184583 (TRAV1-1, TRAJ23)
CAVRQGGKLIF

SEQ ID NO: 369166 - protein, 13 aa, Homo sapiens
  CDR3 for beta chain variable domain of TCR clone 184583 (TRBV5-1, TRBJ1-2)
CASSIDRPEGYTF

SEQ ID NO: 369167 - protein, 11 aa, Homo sapiens
  CDR3 for alpha chain variable domain of TCR clone 184584 (TRAV1-2, TRAJ11)
CAVRGYSTLTF

SEQ ID NO: 369168 - protein, 15 aa, Homo sapiens
  CDR3 for beta chain variable domain of TCR clone 184584 (TRBV3-1, TRBJ2-1)
CASSQQPSGGNEQFF

SEQ ID NO: 369169 - protein, 17 aa, Homo sapiens
  CDR3 for alpha chain variable domain of TCR clone 184585 (TRAV8-6, TRAJ8)
CAVKEGIEKKGFQKPVF

SEQ ID NO: 369170 - protein, 12 aa, Homo sapiens
  CDR3 for beta chain variable domain of TCR clone 184585 (TRBV19, TRBJ1-4)
CASKDWPGGLFF

SEQ ID NO: 369171 - protein, 14 aa, Homo sapiens
  CDR3 for alpha chain variable domain of TCR clone 184586 (TRAV1-2, TRAJ8)
CAVREDTGFQKLVF

SEQ ID NO: 369172 - protein, 12 aa, Homo sapiens
  CDR3 for beta chain variable domain of TCR clone 184586 (TRBV7-8, TRBJ2-7)
CASSLGDRGQYF

SEQ ID NO: 369173 - protein, 14 aa, Homo sapiens
  CDR3 for alpha chain variable domain of TCR clone 184587 (TRAV17, TRAJ57)
CATDPQGGSEKLVF

SEQ ID NO: 369174 - protein, 17 aa, Homo sapiens
  CDR3 for beta chain variable domain of TCR clone 184587 (TRBV25-1, TRBJ2-5)
CASSRRGGRGGQETQYF

SEQ ID NO: 369175 - protein, 16 aa, Homo sapiens
  CDR3 for alpha chain variable domain of TCR clone 184588 (TRAV3, TRAJ21)
CAVRDIERGNFNKFYF

SEQ ID NO: 369176 - protein, 12 aa, Homo sapiens
  CDR3 for beta chain variable domain of TCR clone 184588 (TRBV27, TRBJ2-7)
CQQLTTGYEQYF

SEQ ID NO: 369177 - protein, 14 aa, Homo sapiens
  CDR3 for alpha chain variable domain of TCR clone 184589 (TRAV21, TRAJ32)
CCGDYGGATNRLIF

SEQ ID NO: 369178 - protein, 13 aa, Homo sapiens
  CDR3 for beta chain variable domain of TCR clone 184589 (TRBV2, TRBJ1-6)
CASGRGGISPLHL

SEQ ID NO: 369179 - protein, 11 aa, Homo sapiens
  CDR3 for alpha chain variable domain of TCR clone 184590 (TRAV4, TRAJ31)
CLVGPNARLMF

SEQ ID NO: 369180 - protein, 16 aa, Homo sapiens
  CDR3 for beta chain variable domain of TCR clone 184590 (TRBV15, TRBJ2-6)
CATSVNGGFLANVLTF

SEQ ID NO: 369181 - protein, 12 aa, Homo sapiens
  CDR3 for alpha chain variable domain of TCR clone 184591 (TRAV13-1, TRAJ21)
CAAKEGFNKFSF

SEQ ID NO: 369182 - protein, 16 aa, Homo sapiens
  CDR3 for beta chain variable domain of TCR clone 184591 (TRBV25-1, TRBJ2-7)
CASSELTGGGIYEQYF

SEQ ID NO: 369183 - protein, 17 aa, Homo sapiens
  CDR3 for alpha chain variable domain of TCR clone 184592 (TRAV3, TRAJ42)
CAVRDRDYGGSQGNRIF

SEQ ID NO: 369184 - protein, 15 aa, Homo sapiens
  CDR3 for beta chain variable domain of TCR clone 184592 (TRBV2, TRBJ2-1)
CASSEEREGDNEQFF

SEQ ID NO: 369185 - protein, 16 aa, Homo sapiens
  CDR3 for alpha chain variable domain of TCR clone 184593 (TRAV3, TRAJ28)
CAVLPRSGAGSYQLTF

SEQ ID NO: 369186 - protein, 13 aa, Homo sapiens
  CDR3 for beta chain variable domain of TCR clone 184593 (TRBV12-4, TRBJ2-5)
CARRLAVQETQYF

SEQ ID NO: 369187 - protein, 17 aa, Homo sapiens
  CDR3 for alpha chain variable domain of TCR clone 184594 (TRAV26-2, TRAJ42)
CILRDVGYGGSQGNLIF

SEQ ID NO: 369188 - protein, 15 aa, Homo sapiens
  CDR3 for beta chain variable domain of TCR clone 184594 (TRBV27, TRBJ1-4)
CASSAQQDLNEKLFF

SEQ ID NO: 369189 - protein, 14 aa, Homo sapiens
  CDR3 for alpha chain variable domain of TCR clone 184595 (TRAV12-1, TRAJ13)
CVGIDSGGYQKVTF

SEQ ID NO: 369190 - protein, 12 aa, Homo sapiens
  CDR3 for beta chain variable domain of TCR clone 184595 (TRBV29-1, TRBJ2-3)
CSVTGGADTQYF

SEQ ID NO: 369191 - protein, 14 aa, Homo sapiens
  CDR3 for alpha chain variable domain of TCR clone 184596 (TRAV16, TRAJ8)
CALLLNTGFQKLEF

SEQ ID NO: 369192 - protein, 15 aa, Homo sapiens
  CDR3 for beta chain variable domain of TCR clone 184596 (TRBV7-7, TRBJ2-2)
CATSKLAKNTGELFF

SEQ ID NO: 369193 - protein, 14 aa, Homo sapiens
  CDR3 for alpha chain variable domain of TCR clone 184597 (TRAV1-2, TRAJ16)
CAVNRFPDGQKLLF

SEQ ID NO: 369194 - protein, 12 aa, Homo sapiens
  CDR3 for beta chain variable domain of TCR clone 184597 (TRBV7-9, TRBJ2-7)
CASSLEGYEQYF

SEQ ID NO: 369195 - protein, 13 aa, Homo sapiens
  CDR3 for alpha chain variable domain of TCR clone 184598 (TRAV30, TRAJ24)
CDTVTDSWGKLQV

SEQ ID NO: 369196 - protein, 14 aa, Homo sapiens
  CDR3 for beta chain variable domain of TCR clone 184598 (TRBV6-3, TRBJ2-2)
CASTYTPDTGELFF

SEQ ID NO: 369197 - protein, 11 aa, Homo sapiens
  CDR3 for alpha chain variable domain of TCR clone 184599 (TRAV1-2, TRAJ40)
CAVPGTYNYIF

SEQ ID NO: 369198 - protein, 16 aa, Homo sapiens
  CDR3 for beta chain variable domain of TCR clone 184599 (TRBV29-1, TRBJ2-7)
CSVEVVGTSGSYEQFF

SEQ ID NO: 369199 - protein, 14 aa, Homo sapiens
  CDR3 for alpha chain variable domain of TCR clone 184600 (TRAV12-1, TRAJ17)
CVVNYKAAGNKLTF

SEQ ID NO: 369200 - protein, 15 aa, Homo sapiens
  CDR3 for beta chain variable domain of TCR clone 184600 (TRBV19, TRBJ1-5)
CASSIVWADNQPQHF

SEQ ID NO: 369201 - protein, 12 aa, Homo sapiens
  CDR3 for alpha chain variable domain of TCR clone 184601 (TRAV16, TRAJ12)
CALEDSSDKLIF

SEQ ID NO: 369202 - protein, 14 aa, Homo sapiens
  CDR3 for beta chain variable domain of TCR clone 184601 (TRBV12-4, TRBJ1-5)
CASSPTGPRGGTYF

SEQ ID NO: 369203 - protein, 20 aa, Homo sapiens
  CDR3 for alpha chain variable domain of TCR clone 184602 (TRAV12-3, TRAJ41)
SLFIRDSQPSDSATPEALNF

SEQ ID NO: 369204 - protein, 17 aa, Homo sapiens
  CDR3 for beta chain variable domain of TCR clone 184602 (TRBV28, TRBJ2-5)
CASSRQGGLAGAETQYF

SEQ ID NO: 369205 - protein, 12 aa, Homo sapiens
  CDR3 for alpha chain variable domain of TCR clone 184603 (TRAV2, TRAJ9)
CAVGAGGFKTIF

SEQ ID NO: 369206 - protein, 13 aa, Homo sapiens
  CDR3 for beta chain variable domain of TCR clone 184603 (TRBV7-2, TRBJ2-3)
CASSFPGTDTQYF

SEQ ID NO: 369207 - protein, 13 aa, Homo sapiens
  CDR3 for alpha chain variable domain of TCR clone 184604 (TRAV12-3, TRAJ40)
CAMSARGTYKYIF

SEQ ID NO: 369208 - protein, 16 aa, Homo sapiens
  CDR3 for beta chain variable domain of TCR clone 184604 (TRBV7-9, TRBJ2-3)
CASSPWREVGTDTQYF

SEQ ID NO: 369209 - protein, 15 aa, Homo sapiens
  CDR3 for alpha chain variable domain of TCR clone 184605 (TRAV17, TRAJ57)
CATGPSQGGAEKLVC

SEQ ID NO: 369210 - protein, 16 aa, Homo sapiens
  CDR3 for beta chain variable domain of TCR clone 184605 (TRBV12-4, TRBJ1-5)
CASSRPVGGSNQHQHF

SEQ ID NO: 369211 - protein, 16 aa, Homo sapiens
  CDR3 for alpha chain variable domain of TCR clone 184606 (TRAV2, TRAJ4)
GAVEDRFSGGYNKLIF

SEQ ID NO: 369212 - protein, 13 aa, Homo sapiens
  CDR3 for beta chain variable domain of TCR clone 184606 (TRBV7-7, TRBJ2-5)
CASSRSGQETQYF

SEQ ID NO: 369213 - protein, 12 aa, Homo sapiens
  CDR3 for alpha chain variable domain of TCR clone 184607 (TRAV26-1, TRAJ31)
CIVRNNNARLMF

SEQ ID NO: 369214 - protein, 15 aa, Homo sapiens
  CDR3 for beta chain variable domain of TCR clone 184607 (TRBV20-1, TRBJ2-4)
CSARYLTGGPNMQYF

SEQ ID NO: 369215 - protein, 17 aa, Homo sapiens
  CDR3 for alpha chain variable domain of TCR clone 184608 (TRAV4, TRAJ18)
RLVGERSVGSTLGRLYF

SEQ ID NO: 369216 - protein, 16 aa, Homo sapiens
  CDR3 for beta chain variable domain of TCR clone 184608 (TRBV15, TRBJ1-4)
CATSRDSPPGREKLFF

SEQ ID NO: 369217 - protein, 14 aa, Homo sapiens
  CDR3 for alpha chain variable domain of TCR clone 184609 (TRAV12-2, TRAJ13)
CAVTKTGGYQEVTF

SEQ ID NO: 369218 - protein, 15 aa, Homo sapiens
  CDR3 for beta chain variable domain of TCR clone 184609 (TRBV27, TRBJ2-1)
CASSNGGGSSNEQFF

SEQ ID NO: 369219 - protein, 14 aa, Homo sapiens
  CDR3 for alpha chain variable domain of TCR clone 184610 (TRAV26-2, TRAJ28)
CILVESGWELPTHF

SEQ ID NO: 369220 - protein, 16 aa, Homo sapiens
  CDR3 for beta chain variable domain of TCR clone 184610 (TRBV4-2, TRBJ1-2)
CASSQEIGGASYGYTF

SEQ ID NO: 369221 - protein, 14 aa, Homo sapiens
  CDR3 for alpha chain variable domain of TCR clone 184611 (TRAV13-1, TRAJ44)
CAAKATGTASKLTF

SEQ ID NO: 369222 - protein, 14 aa, Homo sapiens
  CDR3 for beta chain variable domain of TCR clone 184611 (TRBV25-1, TRBJ1-1)
CASTHLGGNTAAFF

SEQ ID NO: 369223 - protein, 13 aa, Homo sapiens
  CDR3 for alpha chain variable domain of TCR clone 184612 (TRAV26-1, TRAJ34)
CIGRPWITDKLIF

SEQ ID NO: 369224 - protein, 14 aa, Homo sapiens
  CDR3 for beta chain variable domain of TCR clone 184612 (TRBV7-2, TRBJ2-7)
CASRSQGAAYEQYF

SEQ ID NO: 369225 - protein, 14 aa, Homo sapiens
  CDR3 for alpha chain variable domain of TCR clone 184613 (TRAV1-2, TRAJ8)
CAVREDTGFQKLVF

SEQ ID NO: 369226 - protein, 16 aa, Homo sapiens
  CDR3 for beta chain variable domain of TCR clone 184613 (TRBV7-9, TRBJ2-1)
CASSDVAGGSYNEQFL

SEQ ID NO: 369227 - protein, 17 aa, Homo sapiens
  CDR3 for alpha chain variable domain of TCR clone 184614 (TRAV23/DV6, TRAJ57)
CAASSTLSQGGSEKLVF

SEQ ID NO: 369228 - protein, 17 aa, Homo sapiens
  CDR3 for beta chain variable domain of TCR clone 184614 (TRBV13, TRBJ2-3)
CASSLSRVAGGRNTQYF

SEQ ID NO: 369229 - protein, 12 aa, Homo sapiens
  CDR3 for alpha chain variable domain of TCR clone 184615 (TRAV12-1, TRAJ20)
CVVKPDDYKLSF

SEQ ID NO: 369230 - protein, 12 aa, Homo sapiens
  CDR3 for beta chain variable domain of TCR clone 184615 (TRBV11-2, TRBJ2-2)
CASSLGGGELFF

SEQ ID NO: 369231 - protein, 13 aa, Homo sapiens
  CDR3 for alpha chain variable domain of TCR clone 184616 (TRAV24, TRAJ15)
CAFKDQAGTAPIF

SEQ ID NO: 369232 - protein, 14 aa, Homo sapiens
  CDR3 for beta chain variable domain of TCR clone 184616 (TRBV2, TRBJ2-1)
CASSLSGSQGEQFF

SEQ ID NO: 369233 - protein, 11 aa, Homo sapiens
  CDR3 for alpha chain variable domain of TCR clone 184617 (TRAV13-2, TRAJ20)
CADSNYYKLSF

SEQ ID NO: 369234 - protein, 15 aa, Homo sapiens
  CDR3 for beta chain variable domain of TCR clone 184617 (TRBV7-9, TRBJ1-5)
CASSQGHQPNQPQHF

SEQ ID NO: 369235 - protein, 11 aa, Homo sapiens
  CDR3 for alpha chain variable domain of TCR clone 184618 (TRAV12-1, TRAJ26)
CVVAYGQNFIF

SEQ ID NO: 369236 - protein, 13 aa, Homo sapiens
  CDR3 for beta chain variable domain of TCR clone 184618 (TRBV7-2, TRBJ2-4)
CASSREHANIQYF

SEQ ID NO: 369237 - protein, 12 aa, Homo sapiens
  CDR3 for alpha chain variable domain of TCR clone 184619 (TRAV13-1, TRAJ49)
CAASKRSNQFYF

SEQ ID NO: 369238 - protein, 14 aa, Homo sapiens
  CDR3 for beta chain variable domain of TCR clone 184619 (TRBV7-2, TRBJ2-1)
CASSPGLAGNEQFF

SEQ ID NO: 369239 - protein, 11 aa, Homo sapiens
  CDR3 for alpha chain variable domain of TCR clone 184620 (TRAV17, TRAJ9)
CGFTGGFKTIF

SEQ ID NO: 369240 - protein, 16 aa, Homo sapiens
  CDR3 for beta chain variable domain of TCR clone 184620 (TRBV28, TRBJ2-7)
CASSPWVATGDLSQYF

SEQ ID NO: 369241 - protein, 14 aa, Homo sapiens
  CDR3 for alpha chain variable domain of TCR clone 184621 (TRAV34, TRAJ44)
CGADGTGTASKLTF

SEQ ID NO: 369242 - protein, 17 aa, Homo sapiens
  CDR3 for beta chain variable domain of TCR clone 184621 (TRBV11-2, TRBJ2-1)
CASSLYPQGVEYNEQFF

SEQ ID NO: 369243 - protein, 12 aa, Homo sapiens
  CDR3 for alpha chain variable domain of TCR clone 184622 (TRAV12-3, TRAJ20)
CAMVRGDYKLHF

SEQ ID NO: 369244 - protein, 12 aa, Homo sapiens
  CDR3 for beta chain variable domain of TCR clone 184622 (TRBV6-1, TRBJ2-7)
CASSDYSYEQYF

SEQ ID NO: 369245 - protein, 11 aa, Homo sapiens
  CDR3 for alpha chain variable domain of TCR clone 184623 (TRAV13-1, TRAJ6)
CATLGSCIPTF

SEQ ID NO: 369246 - protein, 13 aa, Homo sapiens
  CDR3 for beta chain variable domain of TCR clone 184623 (TRBV6-6, TRBJ2-1)
CASSLHQGDEQFF

SEQ ID NO: 369247 - protein, 15 aa, Homo sapiens
  CDR3 for alpha chain variable domain of TCR clone 184624 (TRAV8-3, TRAJ11)
CAVGLLNSGYSTLTF

SEQ ID NO: 369248 - protein, 14 aa, Homo sapiens
  CDR3 for beta chain variable domain of TCR clone 184624 (TRBV4-1, TRBJ2-5)
CASSRSGRGETQYF

SEQ ID NO: 369249 - protein, 12 aa, Homo sapiens
  CDR3 for alpha chain variable domain of TCR clone 184625 (TRAV23/DV6, TRAJ53)
CAASKLGSGGSN

SEQ ID NO: 369250 - protein, 14 aa, Homo sapiens
  CDR3 for beta chain variable domain of TCR clone 184625 (TRBV7-9, TRBJ2-3)
CASSSEQGTNTQYF

SEQ ID NO: 369251 - protein, 13 aa, Homo sapiens
  CDR3 for alpha chain variable domain of TCR clone 184626 (TRAV36/DV7, TRAJ17)
CARASAAGNKLTF

SEQ ID NO: 369252 - protein, 13 aa, Homo sapiens
  CDR3 for beta chain variable domain of TCR clone 184626 (TRBV12-4, TRBJ1-2)
CASSLRQGKGYTF

SEQ ID NO: 369253 - protein, 15 aa, Homo sapiens
  CDR3 for alpha chain variable domain of TCR clone 184627 (TRAV3, TRAJ5)
CAVRDRKTGRRALTF

SEQ ID NO: 369254 - protein, 15 aa, Homo sapiens
  CDR3 for beta chain variable domain of TCR clone 184627 (TRBV7-8, TRBJ2-1)
CASSLADILYNEQFF

SEQ ID NO: 369255 - protein, 18 aa, Homo sapiens
  CDR3 for alpha chain variable domain of TCR clone 184628 (TRAV17, TRAJ45)
CATSLDLYSGGGADGLTF

SEQ ID NO: 369256 - protein, 15 aa, Homo sapiens
  CDR3 for beta chain variable domain of TCR clone 184628 (TRBV20-1, TRBJ2-1)
CSARGIGGTYNEQFF

SEQ ID NO: 369257 - protein, 15 aa, Homo sapiens
  CDR3 for alpha chain variable domain of TCR clone 184629 (TRAV8-6, TRAJ26)
CAVSDQSPGGQNFCF

SEQ ID NO: 369258 - protein, 13 aa, Homo sapiens
  CDR3 for beta chain variable domain of TCR clone 184629 (TRBV27, TRBJ2-7)
CASSLRHRYEQYF

SEQ ID NO: 369259 - protein, 13 aa, Homo sapiens
  CDR3 for alpha chain variable domain of TCR clone 184630 (TRAV21, TRAJ27)
CAVRPGNAGKSTI

SEQ ID NO: 369260 - protein, 14 aa, Homo sapiens
  CDR3 for beta chain variable domain of TCR clone 184630 (TRBV7-6, TRBJ2-3)
CASSLGTVTDTQYF

SEQ ID NO: 369261 - protein, 14 aa, Homo sapiens
  CDR3 for alpha chain variable domain of TCR clone 184631 (TRAV2, TRAJ29)
CAGPFQYGNTPLVF

SEQ ID NO: 369262 - protein, 16 aa, Homo sapiens
  CDR3 for beta chain variable domain of TCR clone 184631 (TRBV9, TRBJ2-1)
CASSVGGGGNYNEQFF

SEQ ID NO: 369263 - protein, 13 aa, Homo sapiens
  CDR3 for alpha chain variable domain of TCR clone 184632 (TRAV13-2, TRAJ5)
CAVLDTGRRALTF

SEQ ID NO: 369264 - protein, 12 aa, Homo sapiens
  CDR3 for beta chain variable domain of TCR clone 184632 (TRBV28, TRBJ2-7)
CASSFSSYEQYF

SEQ ID NO: 369265 - protein, 16 aa, Homo sapiens
  CDR3 for alpha chain variable domain of TCR clone 184633 (TRAV20, TRAJ38)
CAVQASNAGINRKLIW

SEQ ID NO: 369266 - protein, 16 aa, Homo sapiens
  CDR3 for beta chain variable domain of TCR clone 184633 (TRBV7-8, TRBJ2-6)
CASRVGDSSGANVLTF

SEQ ID NO: 369267 - protein, 13 aa, Homo sapiens
  CDR3 for alpha chain variable domain of TCR clone 184634 (TRAV30, TRAJ34)
CGTVGYNSDKPIF

SEQ ID NO: 369268 - protein, 16 aa, Homo sapiens
  CDR3 for beta chain variable domain of TCR clone 184634 (TRBV7-9, TRBJ1-2)
CASSLGFSSGEDGYTF

SEQ ID NO: 369269 - protein, 14 aa, Homo sapiens
  CDR3 for alpha chain variable domain of TCR clone 184635 (TRAV1-2, TRAJ16)
CAVNRFSDGQKLLF

SEQ ID NO: 369270 - protein, 11 aa, Homo sapiens
  CDR3 for beta chain variable domain of TCR clone 184635 (TRBV7-8, TRBJ2-7)
CARSLSREQYF

SEQ ID NO: 369271 - protein, 18 aa, Homo sapiens
  CDR3 for alpha chain variable domain of TCR clone 184636 (TRAV21, TRAJ52)
CAVRPSPAGGTSYGKLTF

SEQ ID NO: 369272 - protein, 17 aa, Homo sapiens
  CDR3 for beta chain variable domain of TCR clone 184636 (TRBV13, TRBJ2-3)
CASSRCRVAGGRNTQYF

SEQ ID NO: 369273 - protein, 16 aa, Homo sapiens
  CDR3 for alpha chain variable domain of TCR clone 184637 (TRAV26-1, TRAJ42)
CIVRPIMDEAKEISSF

SEQ ID NO: 369274 - protein, 16 aa, Homo sapiens
  CDR3 for beta chain variable domain of TCR clone 184637 (TRBV7-3, TRBJ2-2)
CASSLKRGTLSGELFF

SEQ ID NO: 369275 - protein, 14 aa, Homo sapiens
  CDR3 for alpha chain variable domain of TCR clone 184638 (TRAV26-1, TRAJ34)
CIVRVAYNTDKLIF

SEQ ID NO: 369276 - protein, 14 aa, Homo sapiens
  CDR3 for beta chain variable domain of TCR clone 184638 (TRBV7-3, TRBJ2-1)
CASSLSGSYNEQFF

SEQ ID NO: 369277 - protein, 15 aa, Homo sapiens
  CDR3 for alpha chain variable domain of TCR clone 184639 (TRAV4, TRAJ12)
CLVGDLMDSSYKLIF

SEQ ID NO: 369278 - protein, 14 aa, Homo sapiens
  CDR3 for beta chain variable domain of TCR clone 184639 (TRBV7-2, TRBJ1-1)
CASSHRQGRAEAFF

SEQ ID NO: 369279 - protein, 13 aa, Homo sapiens
  CDR3 for alpha chain variable domain of TCR clone 184640 (TRAV1-1, TRAJ9)
CAAKNTGGFKTIF

SEQ ID NO: 369280 - protein, 13 aa, Homo sapiens
  CDR3 for beta chain variable domain of TCR clone 184640 (TRBV7-3, TRBJ1-1)
CASSQDWGAEASF

SEQ ID NO: 369281 - protein, 14 aa, Homo sapiens
  CDR3 for alpha chain variable domain of TCR clone 184641 (TRAV2, TRAJ9)
CAVEDRSGGFKTIF

SEQ ID NO: 369282 - protein, 15 aa, Homo sapiens
  CDR3 for beta chain variable domain of TCR clone 184641 (TRBV2, TRBJ2-1)
CASSEEREGDNEQFF

SEQ ID NO: 369283 - protein, 21 aa, Homo sapiens
  CDR3 for alpha chain variable domain of TCR clone 184642 (TRAV1-2, TRAJ37)
CLLPLCCERFHGSGNTGKLIF

SEQ ID NO: 369284 - protein, 14 aa, Homo sapiens
  CDR3 for beta chain variable domain of TCR clone 184642 (TRBV2, TRBJ2-5)
CASSEVLAKETQYF

SEQ ID NO: 369285 - protein, 14 aa, Homo sapiens
  CDR3 for alpha chain variable domain of TCR clone 184643 (TRAV1-2, TRAJ16)
CAVNRFSDGQKLLF

SEQ ID NO: 369286 - protein, 14 aa, Homo sapiens
  CDR3 for beta chain variable domain of TCR clone 184643 (TRBV7-9, TRBJ2-1)
CASSLGVADNEQFF

SEQ ID NO: 369287 - protein, 15 aa, Homo sapiens
  CDR3 for alpha chain variable domain of TCR clone 184644 (TRAV2, TRAJ9)
CAVEDRGTGGFKTIF

SEQ ID NO: 369288 - protein, 17 aa, Homo sapiens
  CDR3 for beta chain variable domain of TCR clone 184644 (TRBV4-1, TRBJ2-2)
CASSHPHDGSKVGELFF

SEQ ID NO: 369289 - protein, 15 aa, Homo sapiens
  CDR3 for alpha chain variable domain of TCR clone 184645 (TRAV17, TRAJ10)
CATDASGGGGNKITF

SEQ ID NO: 369290 - protein, 14 aa, Homo sapiens
  CDR3 for beta chain variable domain of TCR clone 184645 (TRBV20-1, TRBJ2-5)
CSVPYRGRAETQYF

SEQ ID NO: 369291 - protein, 14 aa, Homo sapiens
  CDR3 for alpha chain variable domain of TCR clone 184646 (TRAV1-2, TRAJ16)
CAVNRFSDGQKRLF

SEQ ID NO: 369292 - protein, 15 aa, Homo sapiens
  CDR3 for beta chain variable domain of TCR clone 184646 (TRBV10-2, TRBJ2-6)
CASSEQGTGANVLTF

SEQ ID NO: 369293 - protein, 16 aa, Homo sapiens
  CDR3 for alpha chain variable domain of TCR clone 184647 (TRAV23/DV6, TRAJ9)
CAASIGGNTGGFKTIF

SEQ ID NO: 369294 - protein, 13 aa, Homo sapiens
  CDR3 for beta chain variable domain of TCR clone 184647 (TRBV20-1, TRBJ1-2)
CSARDQGAYGYTS

SEQ ID NO: 369295 - protein, 12 aa, Homo sapiens
  CDR3 for alpha chain variable domain of TCR clone 184648 (TRAV12-1, TRAJ40)
CVVYSGTYKYIF

SEQ ID NO: 369296 - protein, 16 aa, Homo sapiens
  CDR3 for beta chain variable domain of TCR clone 184648 (TRBV28, TRBJ2-1)
CASSSPEYPRDNEQFF

SEQ ID NO: 369297 - protein, 20 aa, Homo sapiens
  CDR3 for alpha chain variable domain of TCR clone 184649 (TRAV27, TRAJ41)
CAVRTQIPDIQNPDPAVYQL

SEQ ID NO: 369298 - protein, 19 aa, Homo sapiens
  CDR3 for beta chain variable domain of TCR clone 184649 (TRBV19, TRBJ2-5)
CASSIGQVTDFFLGETQYF

SEQ ID NO: 369299 - protein, 15 aa, Homo sapiens
  CDR3 for alpha chain variable domain of TCR clone 184650 (TRAV21, TRAJ40)
RAVRPQTSGTYKYIF

SEQ ID NO: 369300 - protein, 13 aa, Homo sapiens
  CDR3 for beta chain variable domain of TCR clone 184650 (TRBV7-2, TRBJ2-2)
CASSSVRAGELFF

SEQ ID NO: 369301 - protein, 14 aa, Homo sapiens
  CDR3 for alpha chain variable domain of TCR clone 184651 (TRAV2, TRAJ37)
CAVDFTSNPGKLIF

SEQ ID NO: 369302 - protein, 13 aa, Homo sapiens
  CDR3 for beta chain variable domain of TCR clone 184651 (TRBV20-1, TRBJ1-1)
CSAPLGGGTEAFF

SEQ ID NO: 369303 - protein, 14 aa, Homo sapiens
  CDR3 for alpha chain variable domain of TCR clone 184652 (TRAV8-3, TRAJ4)
CAVGAAGGYNTLIF

SEQ ID NO: 369304 - protein, 21 aa, Homo sapiens
  CDR3 for beta chain variable domain of TCR clone 184652 (TRBV24-1, TRBJ2-5)
ESAIPNQTALYFCATRETQYF

SEQ ID NO: 369305 - protein, 13 aa, Homo sapiens
  CDR3 for alpha chain variable domain of TCR clone 184653 (TRAV13-1, TRAJ11)
FAASIRGYSTLTF

SEQ ID NO: 369306 - protein, 14 aa, Homo sapiens
  CDR3 for beta chain variable domain of TCR clone 184653 (TRBV4-2, TRBJ2-1)
CASGLDRAYNEQFF

SEQ ID NO: 369307 - protein, 13 aa, Homo sapiens
  CDR3 for alpha chain variable domain of TCR clone 184654 (TRAV2, TRAJ15)
CAVASQAGTALIF

SEQ ID NO: 369308 - protein, 13 aa, Homo sapiens
  CDR3 for beta chain variable domain of TCR clone 184654 (TRBV6-6, TRBJ2-7)
CASSPKHLAEQYF

SEQ ID NO: 369309 - protein, 14 aa, Homo sapiens
  CDR3 for alpha chain variable domain of TCR clone 184655 (TRAV12-2, TRAJ13)
CAVKKTGGYQEVTF

SEQ ID NO: 369310 - protein, 17 aa, Homo sapiens
  CDR3 for beta chain variable domain of TCR clone 184655 (TRBV20-1, TRBJ2-1)
CSASSSGLAGSYNEQFF

SEQ ID NO: 369311 - protein, 15 aa, Homo sapiens
  CDR3 for alpha chain variable domain of TCR clone 184656 (TRAV17, TRAJ10)
CATDASGGGGNKLTF

SEQ ID NO: 369312 - protein, 13 aa, Homo sapiens
  CDR3 for beta chain variable domain of TCR clone 184656 (TRBV7-2, TRBJ2-7)
CASSSPSGSEQYF

SEQ ID NO: 369313 - protein, 15 aa, Homo sapiens
  CDR3 for alpha chain variable domain of TCR clone 184657 (TRAV8-3, TRAJ40)
CAAPSLGSGTYKYIF

SEQ ID NO: 369314 - protein, 16 aa, Homo sapiens
  CDR3 for beta chain variable domain of TCR clone 184657 (TRBV7-3, TRBJ2-3)
CASSLSGYRREDTQYF

SEQ ID NO: 369315 - protein, 15 aa, Homo sapiens
  CDR3 for alpha chain variable domain of TCR clone 184658 (TRAV3, TRAJ5)
CAVIDLDTGRRALTF

SEQ ID NO: 369316 - protein, 14 aa, Homo sapiens
  CDR3 for beta chain variable domain of TCR clone 184658 (TRBV6-1, TRBJ1-3)
CASVQGGGGNTIYF

SEQ ID NO: 369317 - protein, 16 aa, Homo sapiens
  CDR3 for alpha chain variable domain of TCR clone 184659 (TRAV30, TRAJ24)
RGTEIVYADSWWKFQF

SEQ ID NO: 369318 - protein, 14 aa, Homo sapiens
  CDR3 for beta chain variable domain of TCR clone 184659 (TRBV12-5, TRBJ2-5)
CASGSRTHQETQYF

SEQ ID NO: 369319 - protein, 11 aa, Homo sapiens
  CDR3 for alpha chain variable domain of TCR clone 184660 (TRAV12-2, TRAJ54)
CAVEGARELVF

SEQ ID NO: 369320 - protein, 17 aa, Homo sapiens
  CDR3 for beta chain variable domain of TCR clone 184660 (TRBV18, TRBJ1-3)
CASSPYPTGPSGNTIYF

SEQ ID NO: 369321 - protein, 12 aa, Homo sapiens
  CDR3 for alpha chain variable domain of TCR clone 184661 (TRAV12-2, TRAJ3)
CAVWSSASQIIF

SEQ ID NO: 369322 - protein, 12 aa, Homo sapiens
  CDR3 for beta chain variable domain of TCR clone 184661 (TRBV11-2, TRBJ2-1)
CASSPGNNEQFF

SEQ ID NO: 369323 - protein, 13 aa, Homo sapiens
  CDR3 for alpha chain variable domain of TCR clone 184662 (TRAV2, TRAJ40)
CAVVTSGTYKYIF

SEQ ID NO: 369324 - protein, 14 aa, Homo sapiens
  CDR3 for beta chain variable domain of TCR clone 184662 (TRBV19, TRBJ2-3)
CASSAPRGTDTQYV

SEQ ID NO: 369325 - protein, 15 aa, Homo sapiens
  CDR3 for alpha chain variable domain of TCR clone 184663 (TRAV13-1, TRAJ10)
CAATILTRGGNKPTF

SEQ ID NO: 369326 - protein, 15 aa, Homo sapiens
  CDR3 for beta chain variable domain of TCR clone 184663 (TRBV2, TRBJ2-7)
CASTLLGSGATEQYF

SEQ ID NO: 369327 - protein, 15 aa, Homo sapiens
  CDR3 for alpha chain variable domain of TCR clone 184664 (TRAV27, TRAJ45)
CAPVDSRGGADGLTF

SEQ ID NO: 369328 - protein, 15 aa, Homo sapiens
  CDR3 for beta chain variable domain of TCR clone 184664 (TRBV23-1, TRBJ1-5)
CASSQSRGQGWGAYI

SEQ ID NO: 369329 - protein, 14 aa, Homo sapiens
  CDR3 for alpha chain variable domain of TCR clone 184665 (TRAV1-2, TRAJ16)
CAVNRFSDCQKLLF

SEQ ID NO: 369330 - protein, 15 aa, Homo sapiens
  CDR3 for beta chain variable domain of TCR clone 184665 (TRBV6-3, TRBJ2-7)
CASSSPGTVFYEQYF

SEQ ID NO: 369331 - protein, 14 aa, Homo sapiens
  CDR3 for alpha chain variable domain of TCR clone 184666 (TRAV12-3, TRAJ57)
CAMSAWGGSEKLVF

SEQ ID NO: 369332 - protein, 14 aa, Homo sapiens
  CDR3 for beta chain variable domain of TCR clone 184666 (TRBV4-2, TRBJ1-4)
CASSPSSGNEKLFF

SEQ ID NO: 369333 - protein, 16 aa, Homo sapiens
  CDR3 for alpha chain variable domain of TCR clone 184667 (TRAV3, TRAJ28)
CAVLPRSGAGSYQLTF

SEQ ID NO: 369334 - protein, 18 aa, Homo sapiens
  CDR3 for beta chain variable domain of TCR clone 184667 (TRBV23-1, TRBJ2-7)
CASGQYRRTDSTSSTSGR

SEQ ID NO: 369335 - protein, 19 aa, Homo sapiens
  CDR3 for alpha chain variable domain of TCR clone 184668 (TRAV29/DV5, TRAJ49)
CSVLLCSKLTVDTGNQFYF

SEQ ID NO: 369336 - protein, 17 aa, Homo sapiens
  CDR3 for beta chain variable domain of TCR clone 184668 (TRBV13, TRBJ2-3)
CASCLSRVAGGRNTQYF

SEQ ID NO: 369337 - protein, 13 aa, Homo sapiens
  CDR3 for alpha chain variable domain of TCR clone 184669 (TRAV21, TRAJ27)
CAARPGNAGKSTF

SEQ ID NO: 369338 - protein, 15 aa, Homo sapiens
  CDR3 for beta chain variable domain of TCR clone 184669 (TRBV5-1, TRBJ2-1)
CASSFVANSYNEQFF

SEQ ID NO: 369339 - protein, 12 aa, Homo sapiens
  CDR3 for alpha chain variable domain of TCR clone 184670 (TRAV12-3, TRAJ17)
CAMTLTGNKLTF

SEQ ID NO: 369340 - protein, 13 aa, Homo sapiens
  CDR3 for beta chain variable domain of TCR clone 184670 (TRBV5-3, TRBJ2-2)
CISVVGGTGELFF

SEQ ID NO: 369341 - protein, 16 aa, Homo sapiens
  CDR3 for alpha chain variable domain of TCR clone 184671 (TRAV30, TRAJ24)
CGTEIVDADSWGKFQV

SEQ ID NO: 369342 - protein, 14 aa, Homo sapiens
  CDR3 for beta chain variable domain of TCR clone 184671 (TRBV11-1, TRBJ2-7)
CASSFRQGSYEQYF

SEQ ID NO: 369343 - protein, 12 aa, Homo sapiens
  CDR3 for alpha chain variable domain of TCR clone 184672 (TRAV26-2, TRAJ21)
CILKGNFNKFYF

SEQ ID NO: 369344 - protein, 13 aa, Homo sapiens
  CDR3 for beta chain variable domain of TCR clone 184672 (TRBV5-5, TRBJ1-2)
CASSFWRGEDYTF

SEQ ID NO: 369345 - protein, 14 aa, Homo sapiens
  CDR3 for alpha chain variable domain of TCR clone 184673 (TRAV1-2, TRAJ8)
CAVREDTGFQKLVF

SEQ ID NO: 369346 - protein, 15 aa, Homo sapiens
  CDR3 for beta chain variable domain of TCR clone 184673 (TRBV11-2, TRBJ2-2)
CASRGLAASTGELFF

SEQ ID NO: 369347 - protein, 14 aa, Homo sapiens
  CDR3 for alpha chain variable domain of TCR clone 184674 (TRAV13-1, TRAJ26)
CAASRGNYGQNFVF

SEQ ID NO: 369348 - protein, 17 aa, Homo sapiens
  CDR3 for beta chain variable domain of TCR clone 184674 (TRBV20-1, TRBJ2-1)
CSASSSGLAGSYNEQFF

SEQ ID NO: 369349 - protein, 14 aa, Homo sapiens
  CDR3 for alpha chain variable domain of TCR clone 184675 (TRAV26-1, TRAJ39)
CIVRGSRAGNMLTF

SEQ ID NO: 369350 - protein, 15 aa, Homo sapiens
  CDR3 for beta chain variable domain of TCR clone 184675 (TRBV7-9, TRBJ1-5)
CASSQGHQPNEPQHF

SEQ ID NO: 369351 - protein, 12 aa, Homo sapiens
  CDR3 for alpha chain variable domain of TCR clone 184676 (TRAV27, TRAJ13)
CAGVRGYRKVTF

SEQ ID NO: 369352 - protein, 16 aa, Homo sapiens
  CDR3 for beta chain variable domain of TCR clone 184676 (TRBV28, TRBJ2-1)
SASSSSYSGSLNEQFF

SEQ ID NO: 369353 - protein, 13 aa, Homo sapiens
  CDR3 for alpha chain variable domain of TCR clone 184677 (TRAV1-2, TRAJ9)
CAVLNTGGFKTIF

SEQ ID NO: 369354 - protein, 16 aa, Homo sapiens
  CDR3 for beta chain variable domain of TCR clone 184677 (TRBV4-1, TRBJ1-5)
CASSPRGGLSPSILVM

SEQ ID NO: 369355 - protein, 14 aa, Homo sapiens
  CDR3 for alpha chain variable domain of TCR clone 184678 (TRAV27, TRAJ41)
CAVRTQIPGMHSTS

SEQ ID NO: 369356 - protein, 16 aa, Homo sapiens
  CDR3 for beta chain variable domain of TCR clone 184678 (TRBV5-1, TRBJ2-3)
CASSWGLAVYTDTQYF

SEQ ID NO: 369357 - protein, 14 aa, Homo sapiens
  CDR3 for alpha chain variable domain of TCR clone 184679 (TRAV1-2, TRAJ16)
CAVNRFSDGQKLLF

SEQ ID NO: 369358 - protein, 15 aa, Homo sapiens
  CDR3 for beta chain variable domain of TCR clone 184679 (TRBV29-1, TRBJ2-7)
CSVEFFDRGSFEQYF

SEQ ID NO: 369359 - protein, 14 aa, Homo sapiens
  CDR3 for alpha chain variable domain of TCR clone 184680 (TRAV12-1, TRAJ6)
CVVARIRTKLHTYI

SEQ ID NO: 369360 - protein, 15 aa, Homo sapiens
  CDR3 for beta chain variable domain of TCR clone 184680 (TRBV7-3, TRBJ2-1)
CASSLKASEYNERFF

SEQ ID NO: 369361 - protein, 16 aa, Homo sapiens
  CDR3 for alpha chain variable domain of TCR clone 184681 (TRAV12-2, TRAJ6)
CAAPLAGSGRSYIPTF

SEQ ID NO: 369362 - protein, 13 aa, Homo sapiens
  CDR3 for beta chain variable domain of TCR clone 184681 (TRBV6-9, TRBJ2-5)
CASKGDGRRTQYF

SEQ ID NO: 369363 - protein, 12 aa, Homo sapiens
  CDR3 for alpha chain variable domain of TCR clone 184682 (TRAV1-1, TRAJ30)
CAVRGRDDKIIF

SEQ ID NO: 369364 - protein, 13 aa, Homo sapiens
  CDR3 for beta chain variable domain of TCR clone 184682 (TRBV5-7, TRBJ2-1)
CASSLVESVEQFF

SEQ ID NO: 369365 - protein, 16 aa, Homo sapiens
  CDR3 for alpha chain variable domain of TCR clone 184683 (TRAV21, TRAJ52)
CAVTNAGGTIYGKLTF

SEQ ID NO: 369366 - protein, 17 aa, Homo sapiens
  CDR3 for beta chain variable domain of TCR clone 184683 (TRBV28, TRBJ2-5)
CASSRQGGLAGAETQYF

SEQ ID NO: 369367 - protein, 15 aa, Homo sapiens
  CDR3 for alpha chain variable domain of TCR clone 184684 (TRAV13-2, TRAJ16)
CAENDRFSDGKKLLF

SEQ ID NO: 369368 - protein, 14 aa, Homo sapiens
  CDR3 for beta chain variable domain of TCR clone 184684 (TRBV4-2, TRBJ1-5)
CASSRDRGNQPQHF

SEQ ID NO: 369369 - protein, 16 aa, Homo sapiens
  CDR3 for alpha chain variable domain of TCR clone 184685 (TRAV30, TRAJ26)
CGTESVGDNYGQSFVF

SEQ ID NO: 369370 - protein, 13 aa, Homo sapiens
  CDR3 for beta chain variable domain of TCR clone 184685 (TRBV19, TRBJ1-2)
CASSISEDYGYTF

SEQ ID NO: 369371 - protein, 14 aa, Homo sapiens
  CDR3 for alpha chain variable domain of TCR clone 184686 (TRAV23/DV6, TRAJ11)
FAELIGGGYSTLTF

SEQ ID NO: 369372 - protein, 13 aa, Homo sapiens
  CDR3 for beta chain variable domain of TCR clone 184686 (TRBV11-3, TRBJ1-1)
CASSLGGNTEAFF

SEQ ID NO: 369373 - protein, 14 aa, Homo sapiens
  CDR3 for alpha chain variable domain of TCR clone 184687 (TRAV1-2, TRAJ16)
CAVNRFSDGQKLLF

SEQ ID NO: 369374 - protein, 14 aa, Homo sapiens
  CDR3 for beta chain variable domain of TCR clone 184687 (TRBV27, TRBJ2-3)
CASRKGGRTDTQYF

SEQ ID NO: 369375 - protein, 13 aa, Homo sapiens
  CDR3 for alpha chain variable domain of TCR clone 184688 (TRAV8-3, TRAJ5)
CAVGLRGRRALTF

SEQ ID NO: 369376 - protein, 16 aa, Homo sapiens
  CDR3 for beta chain variable domain of TCR clone 184688 (TRBV11-3, TRBJ2-3)
CASSPGGLLGTDTQYF

SEQ ID NO: 369377 - protein, 13 aa, Homo sapiens
  CDR3 for alpha chain variable domain of TCR clone 184689 (TRAV8-6, TRAJ40)
CAVSVTGTYKYIF

SEQ ID NO: 369378 - protein, 14 aa, Homo sapiens
  CDR3 for beta chain variable domain of TCR clone 184689 (TRBV7-8, TRBJ2-3)
CASSSEARTDTQYF

SEQ ID NO: 369379 - protein, 17 aa, Homo sapiens
  CDR3 for alpha chain variable domain of TCR clone 184690 (TRAV13-1, TRAJ28)
CAASPPYSGAGSYQLPF

SEQ ID NO: 369380 - protein, 14 aa, Homo sapiens
  CDR3 for beta chain variable domain of TCR clone 184690 (TRBV24-1, TRBJ1-1)
CATSIPRGDTEAFF

SEQ ID NO: 369381 - protein, 18 aa, Homo sapiens
  CDR3 for alpha chain variable domain of TCR clone 184691 (TRAV13-1, TRAJ52)
CAAKYPNAGGTSYGKLTF

SEQ ID NO: 369382 - protein, 14 aa, Homo sapiens
  CDR3 for beta chain variable domain of TCR clone 184691 (TRBV7-3, TRBJ2-1)
CASSLAGGTNEQFF

SEQ ID NO: 369383 - protein, 14 aa, Homo sapiens
  CDR3 for alpha chain variable domain of TCR clone 184692 (TRAV1-2, TRAJ16)
CAVNRFSDGQKLLL

SEQ ID NO: 369384 - protein, 17 aa, Homo sapiens
  CDR3 for beta chain variable domain of TCR clone 184692 (TRBV10-3, TRBJ2-4)
CTSVPSVNKGAKNIQYV

SEQ ID NO: 369385 - protein, 13 aa, Homo sapiens
  CDR3 for alpha chain variable domain of TCR clone 184693 (TRAV1-2, TRAJ9)
CAALNTGGFKTIF

SEQ ID NO: 369386 - protein, 13 aa, Homo sapiens
  CDR3 for beta chain variable domain of TCR clone 184693 (TRBV2, TRBJ1-1)
CARNPTGGFHAFF

SEQ ID NO: 369387 - protein, 21 aa, Homo sapiens
  CDR3 for alpha chain variable domain of TCR clone 184694 (TRAV1-1, TRAJ6)
CAVRREEATYLHLEEEPALMF

SEQ ID NO: 369388 - protein, 15 aa, Homo sapiens
  CDR3 for beta chain variable domain of TCR clone 184694 (TRBV6-6, TRBJ2-1)
CATRQGVSSYNEQFF

SEQ ID NO: 369389 - protein, 15 aa, Homo sapiens
  CDR3 for alpha chain variable domain of TCR clone 184695 (TRAV16, TRAJ16)
CALQGGGSDGQKLLF

SEQ ID NO: 369390 - protein, 15 aa, Homo sapiens
  CDR3 for beta chain variable domain of TCR clone 184695 (TRBV20-1, TRBJ2-7)
CSARDRFSGMDEQYF

SEQ ID NO: 369391 - protein, 12 aa, Homo sapiens
  CDR3 for alpha chain variable domain of TCR clone 184696 (TRAV12-2, TRAJ8)
CAVNTGFQKLVF

SEQ ID NO: 369392 - protein, 15 aa, Homo sapiens
  CDR3 for beta chain variable domain of TCR clone 184696 (TRBV7-8, TRBJ1-5)
CASSLERRGLEPQNF

SEQ ID NO: 369393 - protein, 14 aa, Homo sapiens
  CDR3 for alpha chain variable domain of TCR clone 184697 (TRAV12-2, TRAJ13)
CAGKKTGGYQKVTF

SEQ ID NO: 369394 - protein, 18 aa, Homo sapiens
  CDR3 for beta chain variable domain of TCR clone 184697 (TRBV24-1, TRBJ2-2)
CATSDSGQGTANTGELFF

SEQ ID NO: 369395 - protein, 14 aa, Homo sapiens
  CDR3 for alpha chain variable domain of TCR clone 184698 (TRAV8-3, TRAJ40)
CAVALTSGTYKYIF

SEQ ID NO: 369396 - protein, 16 aa, Homo sapiens
  CDR3 for beta chain variable domain of TCR clone 184698 (TRBV20-1, TRBJ1-4)
CSAPGQGLLTNEKLFF

SEQ ID NO: 369397 - protein, 20 aa, Homo sapiens
  CDR3 for alpha chain variable domain of TCR clone 184699 (TRAV21, TRAJ30)
CAVRRRMTRSSLEKGHDFIF

SEQ ID NO: 369398 - protein, 14 aa, Homo sapiens
  CDR3 for beta chain variable domain of TCR clone 184699 (TRBV12-4, TRBJ2-5)
CASSSRQGAETQYF

SEQ ID NO: 369399 - protein, 14 aa, Homo sapiens
  CDR3 for alpha chain variable domain of TCR clone 184700 (TRAV12-2, TRAJ17)
CTVLFKAAGNKLTF

SEQ ID NO: 369400 - protein, 11 aa, Homo sapiens
  CDR3 for beta chain variable domain of TCR clone 184700 (TRBV29-1, TRBJ2-5)
CSEDRTGTQYF

SEQ ID NO: 369401 - protein, 16 aa, Homo sapiens
  CDR3 for alpha chain variable domain of TCR clone 184701 (TRAV35, TRAJ28)
CAGQRYSGAGSYQLTF

SEQ ID NO: 369402 - protein, 16 aa, Homo sapiens
  CDR3 for beta chain variable domain of TCR clone 184701 (TRBV3-1, TRBJ2-5)
CASSPGQFNGFGTQYF

SEQ ID NO: 369403 - protein, 15 aa, Homo sapiens
  CDR3 for alpha chain variable domain of TCR clone 184702 (TRAV27, TRAJ38)
CAARRNAGNNRKLIW

SEQ ID NO: 369404 - protein, 16 aa, Homo sapiens
  CDR3 for beta chain variable domain of TCR clone 184702 (TRBV10-3, TRBJ2-1)
CAISLTSGNSYNEQFF

SEQ ID NO: 369405 - protein, 18 aa, Homo sapiens
  CDR3 for alpha chain variable domain of TCR clone 184703 (TRAV8-4, TRAJ52)
CAVTRANAGGTSYRKLTF

SEQ ID NO: 369406 - protein, 15 aa, Homo sapiens
  CDR3 for beta chain variable domain of TCR clone 184703 (TRBV10-3, TRBJ2-1)
CAIRNGTSGHNEQFF

SEQ ID NO: 369407 - protein, 12 aa, Homo sapiens
  CDR3 for alpha chain variable domain of TCR clone 184704 (TRAV13-1, TRAJ21)
CAAKECFNKFYF

SEQ ID NO: 369408 - protein, 15 aa, Homo sapiens
  CDR3 for beta chain variable domain of TCR clone 184704 (TRBV20-1, TRBJ2-7)
CSARDRVSGMDEQYF

SEQ ID NO: 369409 - protein, 16 aa, Homo sapiens
  CDR3 for alpha chain variable domain of TCR clone 184705 (TRAV3, TRAJ37)
CAVRGEGSGNTGKLIF

SEQ ID NO: 369410 - protein, 15 aa, Homo sapiens
  CDR3 for beta chain variable domain of TCR clone 184705 (TRBV7-9, TRBJ1-6)
CASSSPGRGNSPLHF

SEQ ID NO: 369411 - protein, 13 aa, Homo sapiens
  CDR3 for alpha chain variable domain of TCR clone 184706 (TRAV21, TRAJ27)
CAARPGNAGKSTF

SEQ ID NO: 369412 - protein, 12 aa, Homo sapiens
  CDR3 for beta chain variable domain of TCR clone 184706 (TRBV5-7, TRBJ1-2)
CASSLVQNGYTF

SEQ ID NO: 369413 - protein, 13 aa, Homo sapiens
  CDR3 for alpha chain variable domain of TCR clone 184707 (TRAV8-3, TRAJ36)
CAVGATGANNLFF

SEQ ID NO: 369414 - protein, 15 aa, Homo sapiens
  CDR3 for beta chain variable domain of TCR clone 184707 (TRBV28, TRBJ2-2)
CASRLQGVGTGELFF

SEQ ID NO: 369415 - protein, 12 aa, Homo sapiens
  CDR3 for alpha chain variable domain of TCR clone 184708 (TRAV12-3, TRAJ42)
CAPGGSQGNLIF

SEQ ID NO: 369416 - protein, 18 aa, Homo sapiens
  CDR3 for beta chain variable domain of TCR clone 184708 (TRBV11-2, TRBJ2-3)
CASSLGGASRGAPNTQYF

SEQ ID NO: 369417 - protein, 13 aa, Homo sapiens
  CDR3 for alpha chain variable domain of TCR clone 184709 (TRAV6, TRAJ22)
CAPFSGSARQLTF

SEQ ID NO: 369418 - protein, 14 aa, Homo sapiens
  CDR3 for beta chain variable domain of TCR clone 184709 (TRBV7-8, TRBJ2-3)
CASSFKSSTDTQYF

SEQ ID NO: 369419 - protein, 11 aa, Homo sapiens
  CDR3 for alpha chain variable domain of TCR clone 184710 (TRAV1-1, TRAJ23)
CAVRQGGKLIF

SEQ ID NO: 369420 - protein, 15 aa, Homo sapiens
  CDR3 for beta chain variable domain of TCR clone 184710 (TRBV11-2, TRBJ2-1)
CASSKNRGLIYEQFF

SEQ ID NO: 369421 - protein, 11 aa, Homo sapiens
  CDR3 for alpha chain variable domain of TCR clone 184711 (TRAV21, TRAJ27)
CAVRMQANQPL

SEQ ID NO: 369422 - protein, 14 aa, Homo sapiens
  CDR3 for beta chain variable domain of TCR clone 184711 (TRBV2, TRBJ2-1)
CASSDRAYYDEQFF

SEQ ID NO: 369423 - protein, 20 aa, Homo sapiens
  CDR3 for alpha chain variable domain of TCR clone 184712 (TRAV26-1, TRAJ42)
CCVLLHRQTYYGGSQGNLIF

SEQ ID NO: 369424 - protein, 20 aa, Homo sapiens
  CDR3 for beta chain variable domain of TCR clone 184712 (TRBV7-3, TRBJ2-2)
CASSHLFPGPTIHITGELFF

SEQ ID NO: 369425 - protein, 12 aa, Homo sapiens
  CDR3 for alpha chain variable domain of TCR clone 184713 (TRAV12-3, TRAJ17)
CAMPLTGNNLTF

SEQ ID NO: 369426 - protein, 15 aa, Homo sapiens
  CDR3 for beta chain variable domain of TCR clone 184713 (TRBV20-1, TRBJ2-7)
CSARDRVSGMDEQYF

SEQ ID NO: 369427 - protein, 11 aa, Homo sapiens
  CDR3 for alpha chain variable domain of TCR clone 184714 (TRAV35, TRAJ34)
CWARNTDKLIF

SEQ ID NO: 369428 - protein, 16 aa, Homo sapiens
  CDR3 for beta chain variable domain of TCR clone 184714 (TRBV12-5, TRBJ2-5)
CANGPRTSGNQETQYF

SEQ ID NO: 369429 - protein, 21 aa, Homo sapiens
  CDR3 for alpha chain variable domain of TCR clone 184715 (TRAV8-3, TRAJ10)
CAVGHTHGRRKQTNLWDRHSA

SEQ ID NO: 369430 - protein, 10 aa, Homo sapiens
  CDR3 for beta chain variable domain of TCR clone 184715 (TRBV20-1, TRBJ2-5)
CSARFETQYF

SEQ ID NO: 369431 - protein, 14 aa, Homo sapiens
  CDR3 for alpha chain variable domain of TCR clone 184716 (TRAV12-3, TRAJ10)
SHLHLTGGGNKLTF

SEQ ID NO: 369432 - protein, 13 aa, Homo sapiens
  CDR3 for beta chain variable domain of TCR clone 184716 (TRBV4-1, TRBJ2-1)
CASSQAGGDEQFF

SEQ ID NO: 369433 - protein, 13 aa, Homo sapiens
  CDR3 for alpha chain variable domain of TCR clone 184717 (TRAV20, TRAJ49)
CAVQARTGNQFYF

SEQ ID NO: 369434 - protein, 14 aa, Homo sapiens
  CDR3 for beta chain variable domain of TCR clone 184717 (TRBV5-1, TRBJ1-1)
CASSLQGASTEAFS

SEQ ID NO: 369435 - protein, 14 aa, Homo sapiens
  CDR3 for alpha chain variable domain of TCR clone 184718 (TRAV13-1, TRAJ40)
CAASMTTGTYKYIF

SEQ ID NO: 369436 - protein, 13 aa, Homo sapiens
  CDR3 for beta chain variable domain of TCR clone 184718 (TRBV4-1, TRBJ2-5)
CASSQEVQETQYF

SEQ ID NO: 369437 - protein, 11 aa, Homo sapiens
  CDR3 for alpha chain variable domain of TCR clone 184719 (TRAV1-1, TRAJ23)
CAVRQGGKLIF

SEQ ID NO: 369438 - protein, 15 aa, Homo sapiens
  CDR3 for beta chain variable domain of TCR clone 184719 (TRBV11-2, TRBJ2-7)
CASRFPGTGGYEQYF

SEQ ID NO: 369439 - protein, 13 aa, Homo sapiens
  CDR3 for alpha chain variable domain of TCR clone 184720 (TRAV20, TRAJ56)
CCEFGGANSKLTF

SEQ ID NO: 369440 - protein, 14 aa, Homo sapiens
  CDR3 for beta chain variable domain of TCR clone 184720 (TRBV20-1, TRBJ2-7)
CSAKRGRSSYEQYF

SEQ ID NO: 369441 - protein, 14 aa, Homo sapiens
  CDR3 for alpha chain variable domain of TCR clone 184721 (TRAV3, TRAJ22)
CAVRDYGSARQLTF

SEQ ID NO: 369442 - protein, 16 aa, Homo sapiens
  CDR3 for beta chain variable domain of TCR clone 184721 (TRBV29-1, TRBJ2-7)
CSVEDAEDGTAYEQYF

SEQ ID NO: 369443 - protein, 13 aa, Homo sapiens
  CDR3 for alpha chain variable domain of TCR clone 184722 (TRAV13-2, TRAJ16)
CADARTDGQKLLF

SEQ ID NO: 369444 - protein, 17 aa, Homo sapiens
  CDR3 for beta chain variable domain of TCR clone 184722 (TRBV7-2, TRBJ2-3)
CASSLEARGTSTDTQYF

SEQ ID NO: 369445 - protein, 13 aa, Homo sapiens
  CDR3 for alpha chain variable domain of TCR clone 184723 (TRAV26-1, TRAJ48)
CIVRGVGDEKLTF

SEQ ID NO: 369446 - protein, 13 aa, Homo sapiens
  CDR3 for beta chain variable domain of TCR clone 184723 (TRBV7-3, TRBJ2-2)
CASSLNVLGELFF

SEQ ID NO: 369447 - protein, 11 aa, Homo sapiens
  CDR3 for alpha chain variable domain of TCR clone 184724 (TRAV2, TRAJ33)
CAVESNYQLIW

SEQ ID NO: 369448 - protein, 12 aa, Homo sapiens
  CDR3 for beta chain variable domain of TCR clone 184724 (TRBV28, TRBJ2-6)
CAIQAGANVLTF

SEQ ID NO: 369449 - protein, 15 aa, Homo sapiens
  CDR3 for alpha chain variable domain of TCR clone 184725 (TRAV27, TRAJ53)
CSSRGSGGSNYKLTF

SEQ ID NO: 369450 - protein, 14 aa, Homo sapiens
  CDR3 for beta chain variable domain of TCR clone 184725 (TRBV4-3, TRBJ1-5)
CASSQGGQGWPQHF

SEQ ID NO: 369451 - protein, 20 aa, Homo sapiens
  CDR3 for alpha chain variable domain of TCR clone 184726 (TRAV12-1, TRAJ42)
SSVIQPPTSAKGGSQGNLIF

SEQ ID NO: 369452 - protein, 14 aa, Homo sapiens
  CDR3 for beta chain variable domain of TCR clone 184726 (TRBV7-2, TRBJ2-7)
CASSPKTSFYEQYF

SEQ ID NO: 369453 - protein, 13 aa, Homo sapiens
  CDR3 for alpha chain variable domain of TCR clone 184727 (TRAV23/DV6, TRAJ47)
CAASMTRGNKLVF

SEQ ID NO: 369454 - protein, 12 aa, Homo sapiens
  CDR3 for beta chain variable domain of TCR clone 184727 (TRBV28, TRBJ2-7)
CASSFCSYEQYF

SEQ ID NO: 369455 - protein, 12 aa, Homo sapiens
  CDR3 for alpha chain variable domain of TCR clone 184728 (TRAV8-3, TRAJ20)
CAVGANDYKLSF

SEQ ID NO: 369456 - protein, 15 aa, Homo sapiens
  CDR3 for beta chain variable domain of TCR clone 184728 (TRBV5-1, TRBJ2-3)
CASSYTSGSTDTQYF

SEQ ID NO: 369457 - protein, 12 aa, Homo sapiens
  CDR3 for alpha chain variable domain of TCR clone 184729 (TRAV12-3, TRAJ17)
RTMTLTGNKLTF

SEQ ID NO: 369458 - protein, 15 aa, Homo sapiens
  CDR3 for beta chain variable domain of TCR clone 184729 (TRBV20-1, TRBJ2-7)
CSARDRVSGMDEQYF

SEQ ID NO: 369459 - protein, 16 aa, Homo sapiens
  CDR3 for alpha chain variable domain of TCR clone 184730 (TRAV12-3, TRAJ53)
CALSPGSGGSNYKLTF

SEQ ID NO: 369460 - protein, 15 aa, Homo sapiens
  CDR3 for beta chain variable domain of TCR clone 184730 (TRBV25-1, TRBJ1-4)
CASSKRIATNEKLFF

SEQ ID NO: 369461 - protein, 15 aa, Homo sapiens
  CDR3 for alpha chain variable domain of TCR clone 184731 (TRAV13-2, TRAJ6)
CAENIGAGGSYIPTF

SEQ ID NO: 369462 - protein, 14 aa, Homo sapiens
  CDR3 for beta chain variable domain of TCR clone 184731 (TRBV7-6, TRBJ2-3)
CASSLGTVTDTQYF

SEQ ID NO: 369463 - protein, 15 aa, Homo sapiens
  CDR3 for alpha chain variable domain of TCR clone 184732 (TRAV27, TRAJ38)
CAARRNAGNNRKLIW

SEQ ID NO: 369464 - protein, 13 aa, Homo sapiens
  CDR3 for beta chain variable domain of TCR clone 184732 (TRBV10-2, TRBJ2-1)
CASGASGDAKPFF

SEQ ID NO: 369465 - protein, 13 aa, Homo sapiens
  CDR3 for alpha chain variable domain of TCR clone 184733 (TRAV36/DV7, TRAJ49)
CAGDSNTGNQFYF

SEQ ID NO: 369466 - protein, 17 aa, Homo sapiens
  CDR3 for beta chain variable domain of TCR clone 184733 (TRBV5-1, TRBJ2-5)
CASSPVALGQNQETQYF

SEQ ID NO: 369467 - protein, 13 aa, Homo sapiens
  CDR3 for alpha chain variable domain of TCR clone 184734 (TRAV27, TRAJ45)
CRSSGGGADGLTF

SEQ ID NO: 369468 - protein, 15 aa, Homo sapiens
  CDR3 for beta chain variable domain of TCR clone 184734 (TRBV7-6, TRBJ1-5)
CASSQSSGINQPQHF

SEQ ID NO: 369469 - protein, 15 aa, Homo sapiens
  CDR3 for alpha chain variable domain of TCR clone 184735 (TRAV29/DV5, TRAJ24)
FAASWATDSWGKFQF

SEQ ID NO: 369470 - protein, 12 aa, Homo sapiens
  CDR3 for beta chain variable domain of TCR clone 184735 (TRBV11-2, TRBJ2-2)
CASSLPTGELFF

SEQ ID NO: 369471 - protein, 16 aa, Homo sapiens
  CDR3 for alpha chain variable domain of TCR clone 184736 (TRAV27, TRAJ52)
CAGAGAGGTSYGKLTF

SEQ ID NO: 369472 - protein, 19 aa, Homo sapiens
  CDR3 for beta chain variable domain of TCR clone 184736 (TRBV24-1, TRBJ2-3)
CATSDLPSGRTQIRSILAQ

SEQ ID NO: 369473 - protein, 13 aa, Homo sapiens
  CDR3 for alpha chain variable domain of TCR clone 184737 (TRAV21, TRAJ6)
CAGGSGGSYIPTF

SEQ ID NO: 369474 - protein, 18 aa, Homo sapiens
  CDR3 for beta chain variable domain of TCR clone 184737 (TRBV28, TRBJ2-5)
CASSFPNFGPGGGETQYF

SEQ ID NO: 369475 - protein, 15 aa, Homo sapiens
  CDR3 for alpha chain variable domain of TCR clone 184738 (TRAV20, TRAJ6)
CAVRLQSGGSYISTF

SEQ ID NO: 369476 - protein, 14 aa, Homo sapiens
  CDR3 for beta chain variable domain of TCR clone 184738 (TRBV12-4, TRBJ2-7)
CASSASGGWYEQYF

SEQ ID NO: 369477 - protein, 12 aa, Homo sapiens
  CDR3 for alpha chain variable domain of TCR clone 184739 (TRAV16, TRAJ22)
CALAVSARQLTF

SEQ ID NO: 369478 - protein, 14 aa, Homo sapiens
  CDR3 for beta chain variable domain of TCR clone 184739 (TRBV11-2, TRBJ2-3)
CASSSIASTDTQYF

SEQ ID NO: 369479 - protein, 14 aa, Homo sapiens
  CDR3 for alpha chain variable domain of TCR clone 184740 (TRAV30, TRAJ33)
CGTVAPRSNYQLIW

SEQ ID NO: 369480 - protein, 15 aa, Homo sapiens
  CDR3 for beta chain variable domain of TCR clone 184740 (TRBV6-5, TRBJ1-6)
CASSYGGYYNSPLHF

SEQ ID NO: 369481 - protein, 14 aa, Homo sapiens
  CDR3 for alpha chain variable domain of TCR clone 184741 (TRAV1-2, TRAJ8)
CAVREDTGFQKLVF

SEQ ID NO: 369482 - protein, 16 aa, Homo sapiens
  CDR3 for beta chain variable domain of TCR clone 184741 (TRBV7-3, TRBJ2-3)
CASSLSGYQPEDTQYF

SEQ ID NO: 369483 - protein, 14 aa, Homo sapiens
  CDR3 for alpha chain variable domain of TCR clone 184742 (TRAV12-2, TRAJ13)
CAVKKTGGYQKVTF

SEQ ID NO: 369484 - protein, 14 aa, Homo sapiens
  CDR3 for beta chain variable domain of TCR clone 184742 (TRBV12-4, TRBJ1-1)
CASSSARGYTEAFF

SEQ ID NO: 369485 - protein, 14 aa, Homo sapiens
  CDR3 for alpha chain variable domain of TCR clone 184743 (TRAV27, TRAJ44)
CAASFTGTASKLTF

SEQ ID NO: 369486 - protein, 13 aa, Homo sapiens
  CDR3 for beta chain variable domain of TCR clone 184743 (TRBV27, TRBJ2-3)
CATSGGGLYTQYF

SEQ ID NO: 369487 - protein, 13 aa, Homo sapiens
  CDR3 for alpha chain variable domain of TCR clone 184744 (TRAV20, TRAJ21)
CAVEGYNFNKFYF

SEQ ID NO: 369488 - protein, 18 aa, Homo sapiens
  CDR3 for beta chain variable domain of TCR clone 184744 (TRBV11-2, TRBJ2-6)
CASSLNPFLGTGANVLTF

SEQ ID NO: 369489 - protein, 14 aa, Homo sapiens
  CDR3 for alpha chain variable domain of TCR clone 184745 (TRAV17, TRAJ32)
CATDPGGATNKLIF

SEQ ID NO: 369490 - protein, 16 aa, Homo sapiens
  CDR3 for beta chain variable domain of TCR clone 184745 (TRBV6-1, TRBJ2-5)
CASSETLDRGAETQYF

SEQ ID NO: 369491 - protein, 10 aa, Homo sapiens
  CDR3 for alpha chain variable domain of TCR clone 184746 (TRAV27, TRAJ43)
CAGANNDMRF

SEQ ID NO: 369492 - protein, 13 aa, Homo sapiens
  CDR3 for beta chain variable domain of TCR clone 184746 (TRBV4-2, TRBJ1-1)
CASSQAGNTEAFF

SEQ ID NO: 369493 - protein, 14 aa, Homo sapiens
  CDR3 for alpha chain variable domain of TCR clone 184747 (TRAV20, TRAJ10)
CAVRVEGGGNKLTF

SEQ ID NO: 369494 - protein, 13 aa, Homo sapiens
  CDR3 for beta chain variable domain of TCR clone 184747 (TRBV13, TRBJ2-2)
CASSPGLTGELFF

SEQ ID NO: 369495 - protein, 14 aa, Homo sapiens
  CDR3 for alpha chain variable domain of TCR clone 184748 (TRAV8-4, TRAJ17)
CAVSDQAAGNKLTF

SEQ ID NO: 369496 - protein, 15 aa, Homo sapiens
  CDR3 for beta chain variable domain of TCR clone 184748 (TRBV7-8, TRBJ1-2)
CASSLAPDRGLGYTF

SEQ ID NO: 369497 - protein, 15 aa, Homo sapiens
  CDR3 for alpha chain variable domain of TCR clone 184749 (TRAV13-1, TRAJ17)
CAASIERAAGNKLTF

SEQ ID NO: 369498 - protein, 13 aa, Homo sapiens
  CDR3 for beta chain variable domain of TCR clone 184749 (TRBV20-1, TRBJ1-1)
CSAGTVGNTEAFF

SEQ ID NO: 369499 - protein, 22 aa, Homo sapiens
  CDR3 for alpha chain variable domain of TCR clone 184750 (TRAV21, )
CAVRQDVGNNHIQNPDPAVYQL

SEQ ID NO: 369500 - protein, 16 aa, Homo sapiens
  CDR3 for beta chain variable domain of TCR clone 184750 (TRBV4-2, TRBJ1-1)
CASRPLDGGGDTEAFF

SEQ ID NO: 369501 - protein, 12 aa, Homo sapiens
  CDR3 for alpha chain variable domain of TCR clone 184751 (TRAV12-3, TRAJ20)
CAMVRGDYKLSF

SEQ ID NO: 369502 - protein, 16 aa, Homo sapiens
  CDR3 for beta chain variable domain of TCR clone 184751 (TRBV9, TRBJ2-1)
CASSVGGGGNYNEQFF

SEQ ID NO: 369503 - protein, 14 aa, Homo sapiens
  CDR3 for alpha chain variable domain of TCR clone 184752 (TRAV1-2, TRAJ24)
CAVLTTDSWGKCQF

SEQ ID NO: 369504 - protein, 21 aa, Homo sapiens
  CDR3 for beta chain variable domain of TCR clone 184752 (TRBV6-5, TRBJ1-3)
CASSYWEKIAQGMSSGNTIYF

SEQ ID NO: 369505 - protein, 12 aa, Homo sapiens
  CDR3 for alpha chain variable domain of TCR clone 184753 (TRAV12-3, TRAJ17)
CAMTLTGNKLTF

SEQ ID NO: 369506 - protein, 15 aa, Homo sapiens
  CDR3 for beta chain variable domain of TCR clone 184753 (TRBV20-1, TRBJ2-7)
CSARDRVYGMGEQYF

SEQ ID NO: 369507 - protein, 13 aa, Homo sapiens
  CDR3 for alpha chain variable domain of TCR clone 184754 (TRAV8-6, TRAJ8)
CAFMNTGFQKLVF

SEQ ID NO: 369508 - protein, 15 aa, Homo sapiens
  CDR3 for beta chain variable domain of TCR clone 184754 (TRBV28, TRBJ2-5)
CASSSGRVIQETQCF

SEQ ID NO: 369509 - protein, 14 aa, Homo sapiens
  CDR3 for alpha chain variable domain of TCR clone 184755 (TRAV12-1, TRAJ12)
CAVTRMDSSYKLIF

SEQ ID NO: 369510 - protein, 18 aa, Homo sapiens
  CDR3 for beta chain variable domain of TCR clone 184755 (TRBV20-1, TRBJ2-6)
CSAETTPTHGSGANVLTF

SEQ ID NO: 369511 - protein, 14 aa, Homo sapiens
  CDR3 for alpha chain variable domain of TCR clone 184756 (TRAV16, TRAJ33)
CALSAMDSNYQLIW

SEQ ID NO: 369512 - protein, 15 aa, Homo sapiens
  CDR3 for beta chain variable domain of TCR clone 184756 (TRBV9, TRBJ1-6)
CASSVAGTGDSHLHF

SEQ ID NO: 369513 - protein, 12 aa, Homo sapiens
  CDR3 for alpha chain variable domain of TCR clone 184757 (TRAV26-1, TRAJ13)
CIVSRGYKKVTF

SEQ ID NO: 369514 - protein, 14 aa, Homo sapiens
  CDR3 for beta chain variable domain of TCR clone 184757 (TRBV7-2, TRBJ2-7)
CASSPKTSFYEQYF

SEQ ID NO: 369515 - protein, 14 aa, Homo sapiens
  CDR3 for alpha chain variable domain of TCR clone 184758 (TRAV12-2, TRAJ12)
CAVINRDSSYKLIF

SEQ ID NO: 369516 - protein, 13 aa, Homo sapiens
  CDR3 for beta chain variable domain of TCR clone 184758 (TRBV15, TRBJ1-6)
CATSGGLNSPLHF

SEQ ID NO: 369517 - protein, 14 aa, Homo sapiens
  CDR3 for alpha chain variable domain of TCR clone 184759 (TRAV1-2, TRAJ12)
CAVSGTDSSYKLIF

SEQ ID NO: 369518 - protein, 15 aa, Homo sapiens
  CDR3 for beta chain variable domain of TCR clone 184759 (TRBV2, TRBJ2-4)
CASSGTNLAKNVQYS

SEQ ID NO: 369519 - protein, 14 aa, Homo sapiens
  CDR3 for alpha chain variable domain of TCR clone 184760 (TRAV23/DV6, TRAJ8)
CAASKSTGFQKLVF

SEQ ID NO: 369520 - protein, 16 aa, Homo sapiens
  CDR3 for beta chain variable domain of TCR clone 184760 (TRBV4-1, TRBJ2-6)
CASSQVGDPGANVLTF

SEQ ID NO: 369521 - protein, 17 aa, Homo sapiens
  CDR3 for alpha chain variable domain of TCR clone 184761 (TRAV3, TRAJ6)
CAVSDGPRAGGSYIPSF

SEQ ID NO: 369522 - protein, 14 aa, Homo sapiens
  CDR3 for beta chain variable domain of TCR clone 184761 (TRBV7-2, TRBJ2-7)
CASSPKTSFYEQYF

SEQ ID NO: 369523 - protein, 14 aa, Homo sapiens
  CDR3 for alpha chain variable domain of TCR clone 184762 (TRAV12-3, TRAJ10)
SHLPLTGGGNKLTF

SEQ ID NO: 369524 - protein, 14 aa, Homo sapiens
  CDR3 for beta chain variable domain of TCR clone 184762 (TRBV12-5, TRBJ2-7)
CASGQTGNSYEQYF

SEQ ID NO: 369525 - protein, 12 aa, Homo sapiens
  CDR3 for alpha chain variable domain of TCR clone 184763 (TRAV13-2, TRAJ23)
CAERHRGGKLIF

SEQ ID NO: 369526 - protein, 16 aa, Homo sapiens
  CDR3 for beta chain variable domain of TCR clone 184763 (TRBV2, TRBJ2-3)
CASSTSVERVTDTQYF

SEQ ID NO: 369527 - protein, 12 aa, Homo sapiens
  CDR3 for alpha chain variable domain of TCR clone 184764 (TRAV21, TRAJ30)
CAVMTRDDKIIF

SEQ ID NO: 369528 - protein, 17 aa, Homo sapiens
  CDR3 for beta chain variable domain of TCR clone 184764 (TRBV5-1, TRBJ1-1)
CASRPIRTGGVNTEAFF

SEQ ID NO: 369529 - protein, 14 aa, Homo sapiens
  CDR3 for alpha chain variable domain of TCR clone 184765 (TRAV8-3, TRAJ23)
CAVIIYNQGGKLIF

SEQ ID NO: 369530 - protein, 15 aa, Homo sapiens
  CDR3 for beta chain variable domain of TCR clone 184765 (TRBV18, TRBJ2-1)
CTSSPPSASYNEQFF

SEQ ID NO: 369531 - protein, 17 aa, Homo sapiens
  CDR3 for alpha chain variable domain of TCR clone 184766 (TRAV12-1, )
CVISRTLTLPCTSGETL

SEQ ID NO: 369532 - protein, 14 aa, Homo sapiens
  CDR3 for beta chain variable domain of TCR clone 184766 (TRBV11-3, TRBJ1-6)
CASSFSGGDSPLHF

SEQ ID NO: 369533 - protein, 10 aa, Homo sapiens
  CDR3 for alpha chain variable domain of TCR clone 184767 (TRAV8-4, TRAJ43)
CAVSADDMRF

SEQ ID NO: 369534 - protein, 13 aa, Homo sapiens
  CDR3 for beta chain variable domain of TCR clone 184767 (TRBV19, TRBJ2-5)
CASSIPYGETQYF

SEQ ID NO: 369535 - protein, 14 aa, Homo sapiens
  CDR3 for alpha chain variable domain of TCR clone 184768 (TRAV9-2, TRAJ39)
CALYIYNAGNMLTF

SEQ ID NO: 369536 - protein, 13 aa, Homo sapiens
  CDR3 for beta chain variable domain of TCR clone 184768 (TRBV20-1, TRBJ1-2)
CSATGIQGSGYTC

SEQ ID NO: 369537 - protein, 13 aa, Homo sapiens
  CDR3 for alpha chain variable domain of TCR clone 184769 (TRAV24, TRAJ42)
WAFSTGSQGNLIF

SEQ ID NO: 369538 - protein, 19 aa, Homo sapiens
  CDR3 for beta chain variable domain of TCR clone 184769 (TRBV5-1, TRBJ2-3)
CASSLWLAGGITTTDTQYF

SEQ ID NO: 369539 - protein, 16 aa, Homo sapiens
  CDR3 for alpha chain variable domain of TCR clone 184770 (TRAV12-3, TRAJ53)
CAMSPGSGGSNYKLTF

SEQ ID NO: 369540 - protein, 11 aa, Homo sapiens
  CDR3 for beta chain variable domain of TCR clone 184770 (TRBV12-4, TRBJ2-2)
CASSSAGELFF

SEQ ID NO: 369541 - protein, 14 aa, Homo sapiens
  CDR3 for alpha chain variable domain of TCR clone 184771 (TRAV2, TRAJ37)
CAVEDLGNTGTLIF

SEQ ID NO: 369542 - protein, 11 aa, Homo sapiens
  CDR3 for beta chain variable domain of TCR clone 184771 (TRBV25-1, TRBJ2-2)
CASSAQGDEHR

SEQ ID NO: 369543 - protein, 14 aa, Homo sapiens
  CDR3 for alpha chain variable domain of TCR clone 184772 (TRAV13-1, TRAJ21)
CAAFFNFNKFYFDF

SEQ ID NO: 369544 - protein, 14 aa, Homo sapiens
  CDR3 for beta chain variable domain of TCR clone 184772 (TRBV4-1, TRBJ2-7)
CASRLTSGSYEQYF

SEQ ID NO: 369545 - protein, 17 aa, Homo sapiens
  CDR3 for alpha chain variable domain of TCR clone 184773 (TRAV3, TRAJ6)
CAVRDGPRAGGSYIPTF

SEQ ID NO: 369546 - protein, 13 aa, Homo sapiens
  CDR3 for beta chain variable domain of TCR clone 184773 (TRBV7-6, TRBJ2-7)
CASSLDHTHEQYF

SEQ ID NO: 369547 - protein, 13 aa, Homo sapiens
  CDR3 for alpha chain variable domain of TCR clone 184774 (TRAV12-1, TRAJ21)
CVVIGYNLNKFYF

SEQ ID NO: 369548 - protein, 14 aa, Homo sapiens
  CDR3 for beta chain variable domain of TCR clone 184774 (TRBV7-3, TRBJ2-2)
CASSLYPLTGELFF

SEQ ID NO: 369549 - protein, 12 aa, Homo sapiens
  CDR3 for alpha chain variable domain of TCR clone 184775 (TRAV3, TRAJ26)
CAVRDYGQNFVF

SEQ ID NO: 369550 - protein, 14 aa, Homo sapiens
  CDR3 for beta chain variable domain of TCR clone 184775 (TRBV2, TRBJ2-3)
CASSEGQNTDTQYF

SEQ ID NO: 369551 - protein, 13 aa, Homo sapiens
  CDR3 for alpha chain variable domain of TCR clone 184776 (TRAV26-1, TRAJ34)
CIVRPWITDKLIF

SEQ ID NO: 369552 - protein, 14 aa, Homo sapiens
  CDR3 for beta chain variable domain of TCR clone 184776 (TRBV7-2, TRBJ2-7)
CASRAQGAAYEQYF

SEQ ID NO: 369553 - protein, 15 aa, Homo sapiens
  CDR3 for alpha chain variable domain of TCR clone 184777 (TRAV2, TRAJ13)
CATPSYSGGYQKVTF

SEQ ID NO: 369554 - protein, 16 aa, Homo sapiens
  CDR3 for beta chain variable domain of TCR clone 184777 (TRBV5-1, TRBJ1-1)
CASSSGGNSLNTEAFF

SEQ ID NO: 369555 - protein, 14 aa, Homo sapiens
  CDR3 for alpha chain variable domain of TCR clone 184778 (TRAV1-2, TRAJ8)
CAAREDTGFQKLVF

SEQ ID NO: 369556 - protein, 14 aa, Homo sapiens
  CDR3 for beta chain variable domain of TCR clone 184778 (TRBV7-3, TRBJ2-2)
CASSSGGYTGELFF

SEQ ID NO: 369557 - protein, 14 aa, Homo sapiens
  CDR3 for alpha chain variable domain of TCR clone 184779 (TRAV8-1, TRAJ5)
CAVSMDTGRRALTF

SEQ ID NO: 369558 - protein, 15 aa, Homo sapiens
  CDR3 for beta chain variable domain of TCR clone 184779 (TRBV19, TRBJ2-4)
CASRGPRRGENIQYI

SEQ ID NO: 369559 - protein, 16 aa, Homo sapiens
  CDR3 for alpha chain variable domain of TCR clone 184780 (TRAV16, TRAJ52)
CALSAAGVPSYGKLTF

SEQ ID NO: 369560 - protein, 12 aa, Homo sapiens
  CDR3 for beta chain variable domain of TCR clone 184780 (TRBV12-4, TRBJ1-3)
CASSFSGNTIYF

SEQ ID NO: 369561 - protein, 13 aa, Homo sapiens
  CDR3 for alpha chain variable domain of TCR clone 184781 (TRAV14/DV4, TRAJ23)
CAMREVKAGKLIF

SEQ ID NO: 369562 - protein, 15 aa, Homo sapiens
  CDR3 for beta chain variable domain of TCR clone 184781 (TRBV6-3, TRBJ2-1)
CASSYASDSYNEQFF

SEQ ID NO: 369563 - protein, 15 aa, Homo sapiens
  CDR3 for alpha chain variable domain of TCR clone 184782 (TRAV3, TRAJ22)
CAVRDRGGSARQLTF

SEQ ID NO: 369564 - protein, 15 aa, Homo sapiens
  CDR3 for beta chain variable domain of TCR clone 184782 (TRBV20-1, TRBJ1-5)
GSAREGGYSNQPQHF

SEQ ID NO: 369565 - protein, 14 aa, Homo sapiens
  CDR3 for alpha chain variable domain of TCR clone 184783 (TRAV1-2, TRAJ8)
CAVREDTDFQKLVF

SEQ ID NO: 369566 - protein, 14 aa, Homo sapiens
  CDR3 for beta chain variable domain of TCR clone 184783 (TRBV12-5, TRBJ2-5)
CASGSRTHQETQYF

SEQ ID NO: 369567 - protein, 14 aa, Homo sapiens
  CDR3 for alpha chain variable domain of TCR clone 184784 (TRAV27, TRAJ45)
CAGAQEEGRTDSPL

SEQ ID NO: 369568 - protein, 17 aa, Homo sapiens
  CDR3 for beta chain variable domain of TCR clone 184784 (TRBV11-2, TRBJ2-1)
CASSLYPPGVEYNEQFF

SEQ ID NO: 369569 - protein, 15 aa, Homo sapiens
  CDR3 for alpha chain variable domain of TCR clone 184785 (TRAV17, TRAJ16)
CATALRFSDGQKLLF

SEQ ID NO: 369570 - protein, 17 aa, Homo sapiens
  CDR3 for beta chain variable domain of TCR clone 184785 (TRBV13, TRBJ2-7)
CASSLKPGASGTYEQYF

SEQ ID NO: 369571 - protein, 12 aa, Homo sapiens
  CDR3 for alpha chain variable domain of TCR clone 184786 (TRAV13-1, TRAJ17)
CAAPRCRQQANF

SEQ ID NO: 369572 - protein, 15 aa, Homo sapiens
  CDR3 for beta chain variable domain of TCR clone 184786 (TRBV28, TRBJ2-3)
CAPSFRDWSTDTQYF

SEQ ID NO: 369573 - protein, 17 aa, Homo sapiens
  CDR3 for alpha chain variable domain of TCR clone 184787 (TRAV3, TRAJ42)
CAVRDRDYGGSQGNLIL

SEQ ID NO: 369574 - protein, 12 aa, Homo sapiens
  CDR3 for beta chain variable domain of TCR clone 184787 (TRBV11-2, TRBJ2-2)
CASSLGGGELFF

SEQ ID NO: 369575 - protein, 13 aa, Homo sapiens
  CDR3 for alpha chain variable domain of TCR clone 184788 (TRAV3, TRAJ15)
CAMRDLAGTALIF

SEQ ID NO: 369576 - protein, 15 aa, Homo sapiens
  CDR3 for beta chain variable domain of TCR clone 184788 (TRBV11-1, TRBJ2-7)
CASSLNYGASYEQYF

SEQ ID NO: 369577 - protein, 14 aa, Homo sapiens
  CDR3 for alpha chain variable domain of TCR clone 184789 (TRAV3, TRAJ6)
FAVRDSRRKLHTYI

SEQ ID NO: 369578 - protein, 15 aa, Homo sapiens
  CDR3 for beta chain variable domain of TCR clone 184789 (TRBV18, TRBJ2-7)
CASSPLQGRTYEQYF

SEQ ID NO: 369579 - protein, 11 aa, Homo sapiens
  CDR3 for alpha chain variable domain of TCR clone 184790 (TRAV8-4, TRAJ34)
CAVSWTDKRIF

SEQ ID NO: 369580 - protein, 11 aa, Homo sapiens
  CDR3 for beta chain variable domain of TCR clone 184790 (TRBV19, TRBJ2-2)
CASRYSGELFF

SEQ ID NO: 369581 - protein, 14 aa, Homo sapiens
  CDR3 for alpha chain variable domain of TCR clone 184791 (TRAV12-3, TRAJ29)
CAMILLSGNTPLVF

SEQ ID NO: 369582 - protein, 15 aa, Homo sapiens
  CDR3 for beta chain variable domain of TCR clone 184791 (TRBV6-1, TRBJ2-2)
CASSRLRGDTGELFF

SEQ ID NO: 369583 - protein, 13 aa, Homo sapiens
  CDR3 for alpha chain variable domain of TCR clone 184792 (TRAV12-1, TRAJ22)
CVVYSGSARQLTF

SEQ ID NO: 369584 - protein, 10 aa, Homo sapiens
  CDR3 for beta chain variable domain of TCR clone 184792 (TRBV6-3, TRBJ2-2)
CASRDGALFF

SEQ ID NO: 369585 - protein, 23 aa, Homo sapiens
  CDR3 for alpha chain variable domain of TCR clone 184793 (TRAV21, TRAJ56)
SLVTQPPTSVLGGYTGANSKLTF

SEQ ID NO: 369586 - protein, 14 aa, Homo sapiens
  CDR3 for beta chain variable domain of TCR clone 184793 (TRBV19, TRBJ2-1)
CASEVTGARNEQFF

SEQ ID NO: 369587 - protein, 14 aa, Homo sapiens
  CDR3 for alpha chain variable domain of TCR clone 184794 (TRAV36/DV7, TRAJ57)
CAVGFPGGSEKLVF

SEQ ID NO: 369588 - protein, 14 aa, Homo sapiens
  CDR3 for beta chain variable domain of TCR clone 184794 (TRBV5-7, TRBJ1-1)
CASSLAGDWTEAFF

SEQ ID NO: 369589 - protein, 13 aa, Homo sapiens
  CDR3 for alpha chain variable domain of TCR clone 184795 (TRAV13-1, TRAJ17)
CAAEGAAGNKLTF

SEQ ID NO: 369590 - protein, 14 aa, Homo sapiens
  CDR3 for beta chain variable domain of TCR clone 184795 (TRBV11-2, TRBJ1-3)
CASSLTQGRNTIYF

SEQ ID NO: 369591 - protein, 12 aa, Homo sapiens
  CDR3 for alpha chain variable domain of TCR clone 184796 (TRAV27, TRAJ37)
CADSGSTGKLIF

SEQ ID NO: 369592 - protein, 18 aa, Homo sapiens
  CDR3 for beta chain variable domain of TCR clone 184796 (TRBV7-9, TRBJ1-1)
CASSKPWDTMGMNTESFF

SEQ ID NO: 369593 - protein, 14 aa, Homo sapiens
  CDR3 for alpha chain variable domain of TCR clone 184797 (TRAV29/DV5, TRAJ28)
CAATEGAGSYQLTF

SEQ ID NO: 369594 - protein, 15 aa, Homo sapiens
  CDR3 for beta chain variable domain of TCR clone 184797 (TRBV12-4, TRBJ2-1)
CASSPLSGRNSEQFF

SEQ ID NO: 369595 - protein, 18 aa, Homo sapiens
  CDR3 for alpha chain variable domain of TCR clone 184798 (TRAV26-2, TRAJ45)
CILRDRVDQEEVLTDSLL

SEQ ID NO: 369596 - protein, 15 aa, Homo sapiens
  CDR3 for beta chain variable domain of TCR clone 184798 (TRBV7-6, TRBJ2-5)
CASSKPTGPQETQYF

SEQ ID NO: 369597 - protein, 12 aa, Homo sapiens
  CDR3 for alpha chain variable domain of TCR clone 184799 (TRAV16, TRAJ10)
CSRTGGGNKLTF

SEQ ID NO: 369598 - protein, 16 aa, Homo sapiens
  CDR3 for beta chain variable domain of TCR clone 184799 (TRBV4-3, TRBJ2-1)
CASSKVASGSYNEQFF

SEQ ID NO: 369599 - protein, 15 aa, Homo sapiens
  CDR3 for alpha chain variable domain of TCR clone 184800 (TRAV3, TRAJ27)
CAVRGFTQMQANQPL

SEQ ID NO: 369600 - protein, 12 aa, Homo sapiens
  CDR3 for beta chain variable domain of TCR clone 184800 (TRBV11-2, TRBJ2-2)
CASSLGGGELFF

SEQ ID NO: 369601 - protein, 15 aa, Homo sapiens
  CDR3 for alpha chain variable domain of TCR clone 184801 (TRAV26-1, TRAJ29)
CIVRVEGSGNTPLVF

SEQ ID NO: 369602 - protein, 19 aa, Homo sapiens
  CDR3 for beta chain variable domain of TCR clone 184801 (TRBV25-1, TRBJ2-2)
CATLVYRVDRGRKTGELFF

SEQ ID NO: 369603 - protein, 15 aa, Homo sapiens
  CDR3 for alpha chain variable domain of TCR clone 184802 (TRAV17, TRAJ52)
CATEAGGTSYGKLTF

SEQ ID NO: 369604 - protein, 15 aa, Homo sapiens
  CDR3 for beta chain variable domain of TCR clone 184802 (TRBV28, TRBJ2-1)
CASSGLAEVDNEQFF

SEQ ID NO: 369605 - protein, 14 aa, Homo sapiens
  CDR3 for alpha chain variable domain of TCR clone 184803 (TRAV12-2, TRAJ15)
CAPHTGQAGTALIF

SEQ ID NO: 369606 - protein, 17 aa, Homo sapiens
  CDR3 for beta chain variable domain of TCR clone 184803 (TRBV5-5, TRBJ1-2)
CASSLGSLDGQSEGYTS

SEQ ID NO: 369607 - protein, 12 aa, Homo sapiens
  CDR3 for alpha chain variable domain of TCR clone 184804 (TRAV30, TRAJ13)
TASQLSYQKVTF

SEQ ID NO: 369608 - protein, 15 aa, Homo sapiens
  CDR3 for beta chain variable domain of TCR clone 184804 (TRBV10-2, TRBJ2-6)
CASSEQGTGANVLTF

SEQ ID NO: 369609 - protein, 13 aa, Homo sapiens
  CDR3 for alpha chain variable domain of TCR clone 184805 (TRAV8-4, TRAJ48)
CAVSLFGNEKLTF

SEQ ID NO: 369610 - protein, 15 aa, Homo sapiens
  CDR3 for beta chain variable domain of TCR clone 184805 (TRBV10-3, TRBJ2-2)
CAMGEGKTNTGELFF

SEQ ID NO: 369611 - protein, 14 aa, Homo sapiens
  CDR3 for alpha chain variable domain of TCR clone 184806 (TRAV21, TRAJ28)
CAVGSGAGSYQLTF

SEQ ID NO: 369612 - protein, 14 aa, Homo sapiens
  CDR3 for beta chain variable domain of TCR clone 184806 (TRBV18, TRBJ1-4)
CASSPGPDGEKLFF

SEQ ID NO: 369613 - protein, 13 aa, Homo sapiens
  CDR3 for alpha chain variable domain of TCR clone 184807 (TRAV2, TRAJ40)
CAVVTSGTYKYFF

SEQ ID NO: 369614 - protein, 14 aa, Homo sapiens
  CDR3 for beta chain variable domain of TCR clone 184807 (TRBV7-3, TRBJ1-1)
CASSLKGGNTEAFF

SEQ ID NO: 369615 - protein, 16 aa, Homo sapiens
  CDR3 for alpha chain variable domain of TCR clone 184808 (TRAV16, TRAJ52)
CALSGVGGTSYGKLTF

SEQ ID NO: 369616 - protein, 13 aa, Homo sapiens
  CDR3 for beta chain variable domain of TCR clone 184808 (TRBV7-9, TRBJ2-3)
CASSLGWHIYAVF

SEQ ID NO: 369617 - protein, 15 aa, Homo sapiens
  CDR3 for alpha chain variable domain of TCR clone 184809 (TRAV17, TRAJ13)
CATVPNSGGYQKVTF

SEQ ID NO: 369618 - protein, 13 aa, Homo sapiens
  CDR3 for beta chain variable domain of TCR clone 184809 (TRBV20-1, TRBJ1-1)
CSARVGGNTEAFF

SEQ ID NO: 369619 - protein, 14 aa, Homo sapiens
  CDR3 for alpha chain variable domain of TCR clone 184810 (TRAV21, TRAJ22)
CAVFFSGSAMQLTF

SEQ ID NO: 369620 - protein, 14 aa, Homo sapiens
  CDR3 for beta chain variable domain of TCR clone 184810 (TRBV19, TRBJ1-1)
CASSIREMNTEAFF

SEQ ID NO: 369621 - protein, 12 aa, Homo sapiens
  CDR3 for alpha chain variable domain of TCR clone 184811 (TRAV12-3, TRAJ42)
CAPGGSQGNLIF

SEQ ID NO: 369622 - protein, 14 aa, Homo sapiens
  CDR3 for beta chain variable domain of TCR clone 184811 (TRBV5-4, TRBJ1-1)
CASSLVSRRDEAFF

SEQ ID NO: 369623 - protein, 16 aa, Homo sapiens
  CDR3 for alpha chain variable domain of TCR clone 184812 (TRAV3, TRAJ37)
CAVRGKGSGNTGKLIF

SEQ ID NO: 369624 - protein, 16 aa, Homo sapiens
  CDR3 for beta chain variable domain of TCR clone 184812 (TRBV6-1, TRBJ2-5)
CASSETLDRGAETQYF

SEQ ID NO: 369625 - protein, 12 aa, Homo sapiens
  CDR3 for alpha chain variable domain of TCR clone 184813 (TRAV36/DV7, TRAJ13)
CVSSGGYQKVTF

SEQ ID NO: 369626 - protein, 15 aa, Homo sapiens
  CDR3 for beta chain variable domain of TCR clone 184813 (TRBV20-1, TRBJ2-7)
CSARDRVSGMDEQYF

SEQ ID NO: 369627 - protein, 15 aa, Homo sapiens
  CDR3 for alpha chain variable domain of TCR clone 184814 (TRAV10, TRAJ3)
CVVSVRYSSASKIIF

SEQ ID NO: 369628 - protein, 11 aa, Homo sapiens
  CDR3 for beta chain variable domain of TCR clone 184814 (TRBV19, TRBJ1-2)
CASSISSGYTF

SEQ ID NO: 369629 - protein, 16 aa, Homo sapiens
  CDR3 for alpha chain variable domain of TCR clone 184815 (TRAV1-2, TRAJ10)
CAVRGVLTGGGNKLPF

SEQ ID NO: 369630 - protein, 15 aa, Homo sapiens
  CDR3 for beta chain variable domain of TCR clone 184815 (TRBV5-1, TRBJ2-1)
CASSPPRAPYNEQFF

SEQ ID NO: 369631 - protein, 11 aa, Homo sapiens
  CDR3 for alpha chain variable domain of TCR clone 184816 (TRAV13-1, TRAJ43)
CAAHNNNDMRF

SEQ ID NO: 369632 - protein, 15 aa, Homo sapiens
  CDR3 for beta chain variable domain of TCR clone 184816 (TRBV6-1, TRBJ2-2)
CASSRLRGETGELFF

SEQ ID NO: 369633 - protein, 14 aa, Homo sapiens
  CDR3 for alpha chain variable domain of TCR clone 184817 (TRAV17, TRAJ23)
CATASYNQGGKLIF

SEQ ID NO: 369634 - protein, 16 aa, Homo sapiens
  CDR3 for beta chain variable domain of TCR clone 184817 (TRBV12-4, TRBJ1-5)
CASSRPVGGSNQPQHS

SEQ ID NO: 369635 - protein, 17 aa, Homo sapiens
  CDR3 for alpha chain variable domain of TCR clone 184818 (TRAV4, TRAJ13)
CLVGVQGSSGGYHKVTF

SEQ ID NO: 369636 - protein, 18 aa, Homo sapiens
  CDR3 for beta chain variable domain of TCR clone 184818 (TRBV15, TRBJ2-3)
CATSRDGARSWDTDTQYF

SEQ ID NO: 369637 - protein, 10 aa, Homo sapiens
  CDR3 for alpha chain variable domain of TCR clone 184819 (TRAV12-1, TRAJ20)
CVVNPRKLSF

SEQ ID NO: 369638 - protein, 12 aa, Homo sapiens
  CDR3 for beta chain variable domain of TCR clone 184819 (TRBV29-1, TRBJ2-3)
CSVTGGADTQYF

SEQ ID NO: 369639 - protein, 12 aa, Homo sapiens
  CDR3 for alpha chain variable domain of TCR clone 184820 (TRAV3, TRAJ43)
CAVRDPNNDMRF

SEQ ID NO: 369640 - protein, 15 aa, Homo sapiens
  CDR3 for beta chain variable domain of TCR clone 184820 (TRBV4-1, TRBJ2-7)
CASSQQGQGFDEQYF

SEQ ID NO: 369641 - protein, 15 aa, Homo sapiens
  CDR3 for alpha chain variable domain of TCR clone 184821 (TRAV2, TRAJ13)
CAVEANSGGYQKVTF

SEQ ID NO: 369642 - protein, 13 aa, Homo sapiens
  CDR3 for beta chain variable domain of TCR clone 184821 (TRBV11-2, TRBJ2-7)
CASSGTRPYEQYF

SEQ ID NO: 369643 - protein, 15 aa, Homo sapiens
  CDR3 for alpha chain variable domain of TCR clone 184822 (TRAV26-1, TRAJ29)
CIIRVEGSVNTPLVF

SEQ ID NO: 369644 - protein, 14 aa, Homo sapiens
  CDR3 for beta chain variable domain of TCR clone 184822 (TRBV18, TRBJ2-5)
CASSPGVSQETQYF

SEQ ID NO: 369645 - protein, 14 aa, Homo sapiens
  CDR3 for alpha chain variable domain of TCR clone 184823 (TRAV1-2, TRAJ8)
CAVREDTGFQKLVF

SEQ ID NO: 369646 - protein, 16 aa, Homo sapiens
  CDR3 for beta chain variable domain of TCR clone 184823 (TRBV4-1, TRBJ2-3)
FASSQSTSGAEDTQYF

SEQ ID NO: 369647 - protein, 13 aa, Homo sapiens
  CDR3 for alpha chain variable domain of TCR clone 184824 (TRAV12-3, TRAJ7)
CAMTPYGNNSLAI

SEQ ID NO: 369648 - protein, 16 aa, Homo sapiens
  CDR3 for beta chain variable domain of TCR clone 184824 (TRBV20-1, TRBJ1-4)
CSARPYGGELNEKLFF

SEQ ID NO: 369649 - protein, 15 aa, Homo sapiens
  CDR3 for alpha chain variable domain of TCR clone 184825 (TRAV16, TRAJ16)
CAPPGGGSDGQKLLF

SEQ ID NO: 369650 - protein, 15 aa, Homo sapiens
  CDR3 for beta chain variable domain of TCR clone 184825 (TRBV20-1, TRBJ2-7)
CSARDRVSGMDEQYF

SEQ ID NO: 369651 - protein, 14 aa, Homo sapiens
  CDR3 for alpha chain variable domain of TCR clone 184826 (TRAV26-1, TRAJ38)
CIADNAGNNRKLIW

SEQ ID NO: 369652 - protein, 15 aa, Homo sapiens
  CDR3 for beta chain variable domain of TCR clone 184826 (TRBV7-2, TRBJ2-2)
CASRRPGQNTGELFF

SEQ ID NO: 369653 - protein, 13 aa, Homo sapiens
  CDR3 for alpha chain variable domain of TCR clone 184827 (TRAV26-1, TRAJ29)
YIVRRSGNTPLVF

SEQ ID NO: 369654 - protein, 16 aa, Homo sapiens
  CDR3 for beta chain variable domain of TCR clone 184827 (TRBV11-2, TRBJ2-7)
CASSLAPTGVNYEQYF

SEQ ID NO: 369655 - protein, 15 aa, Homo sapiens
  CDR3 for alpha chain variable domain of TCR clone 184828 (TRAV26-1, TRAJ48)
CIFRVGDFGNEKLTF

SEQ ID NO: 369656 - protein, 16 aa, Homo sapiens
  CDR3 for beta chain variable domain of TCR clone 184828 (TRBV4-1, TRBJ2-3)
CASSQRAGGLTDTQYF

SEQ ID NO: 369657 - protein, 13 aa, Homo sapiens
  CDR3 for alpha chain variable domain of TCR clone 184829 (TRAV12-1, TRAJ6)
CVVFPGGSYIPTF

SEQ ID NO: 369658 - protein, 14 aa, Homo sapiens
  CDR3 for beta chain variable domain of TCR clone 184829 (TRBV7-2, TRBJ2-3)
CASRRGLAADTQYF

SEQ ID NO: 369659 - protein, 13 aa, Homo sapiens
  CDR3 for alpha chain variable domain of TCR clone 184830 (TRAV30, TRAJ49)
CGTESQPVTSSIL

SEQ ID NO: 369660 - protein, 11 aa, Homo sapiens
  CDR3 for beta chain variable domain of TCR clone 184830 (TRBV2, TRBJ1-1)
CASREGTEAFF

SEQ ID NO: 369661 - protein, 14 aa, Homo sapiens
  CDR3 for alpha chain variable domain of TCR clone 184831 (TRAV12-3, TRAJ22)
CAMSLFGSARQLTF

SEQ ID NO: 369662 - protein, 13 aa, Homo sapiens
  CDR3 for beta chain variable domain of TCR clone 184831 (TRBV15, TRBJ1-6)
CATSGGLNSPLHF

SEQ ID NO: 369663 - protein, 15 aa, Homo sapiens
  CDR3 for alpha chain variable domain of TCR clone 184832 (TRAV8-3, TRAJ40)
CAAPSLGSGTYRYIV

SEQ ID NO: 369664 - protein, 16 aa, Homo sapiens
  CDR3 for beta chain variable domain of TCR clone 184832 (TRBV7-3, TRBJ2-3)
CASSLSGYRPEDTQYF

SEQ ID NO: 369665 - protein, 13 aa, Homo sapiens
  CDR3 for alpha chain variable domain of TCR clone 184833 (TRAV21, TRAJ36)
CAVINTGANNLFF

SEQ ID NO: 369666 - protein, 13 aa, Homo sapiens
  CDR3 for beta chain variable domain of TCR clone 184833 (TRBV29-1, TRBJ2-3)
CSATRGGRDTQYF

SEQ ID NO: 369667 - protein, 18 aa, Homo sapiens
  CDR3 for alpha chain variable domain of TCR clone 184834 (TRAV12-2, )
CAVEDIQNLDPAVYQLRD

SEQ ID NO: 369668 - protein, 16 aa, Homo sapiens
  CDR3 for beta chain variable domain of TCR clone 184834 (TRBV6-1, TRBJ1-2)
CASSGAWQGRSHGYTS

SEQ ID NO: 369669 - protein, 12 aa, Homo sapiens
  CDR3 for alpha chain variable domain of TCR clone 184835 (TRAV27, TRAJ35)
CEGADFGNVLHC

SEQ ID NO: 369670 - protein, 16 aa, Homo sapiens
  CDR3 for beta chain variable domain of TCR clone 184835 (TRBV6-1, TRBJ2-1)
CASILRQGSSYNEQFF

SEQ ID NO: 369671 - protein, 11 aa, Homo sapiens
  CDR3 for alpha chain variable domain of TCR clone 184836 (TRAV1-1, TRAJ20)
CAVSGDYKLSF

SEQ ID NO: 369672 - protein, 12 aa, Homo sapiens
  CDR3 for beta chain variable domain of TCR clone 184836 (TRBV6-3, TRBJ2-7)
CASSEPGCEQYF

SEQ ID NO: 369673 - protein, 13 aa, Homo sapiens
  CDR3 for alpha chain variable domain of TCR clone 184837 (TRAV8-1, TRAJ28)
CAVSGAGSYQLTF

SEQ ID NO: 369674 - protein, 14 aa, Homo sapiens
  CDR3 for beta chain variable domain of TCR clone 184837 (TRBV7-2, TRBJ2-2)
CASRGQGAAGELFF

SEQ ID NO: 369675 - protein, 16 aa, Homo sapiens
  CDR3 for alpha chain variable domain of TCR clone 184838 (TRAV12-1, TRAJ12)
CVVNTLLMDSSYKLIF

SEQ ID NO: 369676 - protein, 14 aa, Homo sapiens
  CDR3 for beta chain variable domain of TCR clone 184838 (TRBV10-3, TRBJ1-1)
CAISDTDRGVEAFF

SEQ ID NO: 369677 - protein, 12 aa, Homo sapiens
  CDR3 for alpha chain variable domain of TCR clone 184839 (TRAV1-2, TRAJ29)
CAVPSGNTPLVF

SEQ ID NO: 369678 - protein, 15 aa, Homo sapiens
  CDR3 for beta chain variable domain of TCR clone 184839 (TRBV20-1, TRBJ2-7)
CSARDRVSGMDEQYF

SEQ ID NO: 369679 - protein, 11 aa, Homo sapiens
  CDR3 for alpha chain variable domain of TCR clone 184840 (TRAV35, TRAJ30)
CAPGGDDKIIF

SEQ ID NO: 369680 - protein, 15 aa, Homo sapiens
  CDR3 for beta chain variable domain of TCR clone 184840 (TRBV9, TRBJ1-6)
CASSVAGTGDSALHF

SEQ ID NO: 369681 - protein, 14 aa, Homo sapiens
  CDR3 for alpha chain variable domain of TCR clone 184841 (TRAV1-2, TRAJ16)
CAVNRFSDGQKPLF

SEQ ID NO: 369682 - protein, 13 aa, Homo sapiens
  CDR3 for beta chain variable domain of TCR clone 184841 (TRBV10-2, TRBJ2-7)
CASGASGGYEQYF

SEQ ID NO: 369683 - protein, 16 aa, Homo sapiens
  CDR3 for alpha chain variable domain of TCR clone 184842 (TRAV30, TRAJ24)
CGTEIVDADSWGKFQF

SEQ ID NO: 369684 - protein, 16 aa, Homo sapiens
  CDR3 for beta chain variable domain of TCR clone 184842 (TRBV4-2, TRBJ1-1)
CASSQAGFGMNTEAFF

SEQ ID NO: 369685 - protein, 16 aa, Homo sapiens
  CDR3 for alpha chain variable domain of TCR clone 184843 (TRAV8-3, TRAJ8)
CAVPRDGNKGFQKLVF

SEQ ID NO: 369686 - protein, 16 aa, Homo sapiens
  CDR3 for beta chain variable domain of TCR clone 184843 (TRBV28, TRBJ2-3)
CASSLATRAPTDTQYF

SEQ ID NO: 369687 - protein, 17 aa, Homo sapiens
  CDR3 for alpha chain variable domain of TCR clone 184844 (TRAV17, TRAJ52)
CATERPSGGTSYGKLTL

SEQ ID NO: 369688 - protein, 13 aa, Homo sapiens
  CDR3 for beta chain variable domain of TCR clone 184844 (TRBV6-4, TRBJ1-5)
CASSADLNQPQHF

SEQ ID NO: 369689 - protein, 12 aa, Homo sapiens
  CDR3 for alpha chain variable domain of TCR clone 184845 (TRAV13-1, TRAJ21)
CAAKEGFNKFYF

SEQ ID NO: 369690 - protein, 14 aa, Homo sapiens
  CDR3 for beta chain variable domain of TCR clone 184845 (TRBV7-2, TRBJ2-7)
CASSGLAGRGEQYF

SEQ ID NO: 369691 - protein, 14 aa, Homo sapiens
  CDR3 for alpha chain variable domain of TCR clone 184846 (TRAV16, TRAJ15)
YALSGPQAGTALIF

SEQ ID NO: 369692 - protein, 17 aa, Homo sapiens
  CDR3 for beta chain variable domain of TCR clone 184846 (TRBV7-8, TRBJ2-6)
CASSAGTGGAGANVLTF

SEQ ID NO: 369693 - protein, 16 aa, Homo sapiens
  CDR3 for alpha chain variable domain of TCR clone 184847 (TRAV17, TRAJ52)
CATGIIGGTSYGKLTF

SEQ ID NO: 369694 - protein, 14 aa, Homo sapiens
  CDR3 for beta chain variable domain of TCR clone 184847 (TRBV4-1, TRBJ1-1)
CASSRSGQSFEAFF

SEQ ID NO: 369695 - protein, 13 aa, Homo sapiens
  CDR3 for alpha chain variable domain of TCR clone 184848 (TRAV12-1, TRAJ12)
CVVNIESSYKLIF

SEQ ID NO: 369696 - protein, 15 aa, Homo sapiens
  CDR3 for beta chain variable domain of TCR clone 184848 (TRBV2, TRBJ2-5)
CASSSSGAGGETQYF

SEQ ID NO: 369697 - protein, 16 aa, Homo sapiens
  CDR3 for alpha chain variable domain of TCR clone 184849 (TRAV3, TRAJ37)
CAVRPHGSGNTGKLIF

SEQ ID NO: 369698 - protein, 15 aa, Homo sapiens
  CDR3 for beta chain variable domain of TCR clone 184849 (TRBV2, TRBJ2-7)
CASSEGLARSYEQYF

SEQ ID NO: 369699 - protein, 16 aa, Homo sapiens
  CDR3 for alpha chain variable domain of TCR clone 184850 (TRAV8-3, TRAJ13)
CAVGAYPSGGYQKVTF

SEQ ID NO: 369700 - protein, 18 aa, Homo sapiens
  CDR3 for beta chain variable domain of TCR clone 184850 (TRBV20-1, TRBJ2-3)
CSASGLAGGPGTTDTQYF

SEQ ID NO: 369701 - protein, 12 aa, Homo sapiens
  CDR3 for alpha chain variable domain of TCR clone 184851 (TRAV12-2, TRAJ9)
CAVTGGGFKTIF

SEQ ID NO: 369702 - protein, 17 aa, Homo sapiens
  CDR3 for beta chain variable domain of TCR clone 184851 (TRBV13, TRBJ2-3)
CASSLSRVAGGRNTQYF

SEQ ID NO: 369703 - protein, 11 aa, Homo sapiens
  CDR3 for alpha chain variable domain of TCR clone 184852 (TRAV35, TRAJ22)
CAGPGVGQLTF

SEQ ID NO: 369704 - protein, 14 aa, Homo sapiens
  CDR3 for beta chain variable domain of TCR clone 184852 (TRBV11-2, TRBJ2-3)
CASSRLARTDTQYF

SEQ ID NO: 369705 - protein, 16 aa, Homo sapiens
  CDR3 for alpha chain variable domain of TCR clone 184853 (TRAV30, TRAJ24)
CGTEIVDADSWGKFQF

SEQ ID NO: 369706 - protein, 13 aa, Homo sapiens
  CDR3 for beta chain variable domain of TCR clone 184853 (TRBV6-6, TRBJ1-5)
CASSTGGLQPQHS

SEQ ID NO: 369707 - protein, 13 aa, Homo sapiens
  CDR3 for alpha chain variable domain of TCR clone 184854 (TRAV12-2, TRAJ13)
CREKTGGYQKVTF

SEQ ID NO: 369708 - protein, 15 aa, Homo sapiens
  CDR3 for beta chain variable domain of TCR clone 184854 (TRBV27, TRBJ2-1)
CASSNGGGSSNEQFF

SEQ ID NO: 369709 - protein, 16 aa, Homo sapiens
  CDR3 for alpha chain variable domain of TCR clone 184855 (TRAV12-1, TRAJ4)
CVVNMGPLGGYNKLIF

SEQ ID NO: 369710 - protein, 14 aa, Homo sapiens
  CDR3 for beta chain variable domain of TCR clone 184855 (TRBV7-2, TRBJ2-7)
CASSPKTSFYEQYF

SEQ ID NO: 369711 - protein, 12 aa, Homo sapiens
  CDR3 for alpha chain variable domain of TCR clone 184856 (TRAV13-1, TRAJ21)
CAAKEGVNKFYF

SEQ ID NO: 369712 - protein, 13 aa, Homo sapiens
  CDR3 for beta chain variable domain of TCR clone 184856 (TRBV19, TRBJ2-7)
CASSPRQSYEQYF

SEQ ID NO: 369713 - protein, 12 aa, Homo sapiens
  CDR3 for alpha chain variable domain of TCR clone 184857 (TRAV2, TRAJ31)
CAVEDNNARLMV

SEQ ID NO: 369714 - protein, 14 aa, Homo sapiens
  CDR3 for beta chain variable domain of TCR clone 184857 (TRBV7-3, TRBJ1-1)
CASSLGTGYTEAFF

SEQ ID NO: 369715 - protein, 14 aa, Homo sapiens
  CDR3 for alpha chain variable domain of TCR clone 184858 (TRAV13-1, TRAJ13)
CAASRVGGYQKVTF

SEQ ID NO: 369716 - protein, 17 aa, Homo sapiens
  CDR3 for beta chain variable domain of TCR clone 184858 (TRBV15, TRBJ1-5)
CATSRTPPGTRNQPQHF

SEQ ID NO: 369717 - protein, 11 aa, Homo sapiens
  CDR3 for alpha chain variable domain of TCR clone 184859 (TRAV21, TRAJ27)
CAVRMQANQPL

SEQ ID NO: 369718 - protein, 16 aa, Homo sapiens
  CDR3 for beta chain variable domain of TCR clone 184859 (TRBV7-3, TRBJ2-2)
CASSLKRETLSGELFF

SEQ ID NO: 369719 - protein, 13 aa, Homo sapiens
  CDR3 for alpha chain variable domain of TCR clone 184860 (TRAV12-1, TRAJ29)
CVVDTSGNTPLVF

SEQ ID NO: 369720 - protein, 15 aa, Homo sapiens
  CDR3 for beta chain variable domain of TCR clone 184860 (TRBV7-2, TRBJ1-2)
CASSPRAGWNYGYTF

SEQ ID NO: 369721 - protein, 13 aa, Homo sapiens
  CDR3 for alpha chain variable domain of TCR clone 184861 (TRAV35, TRAJ33)
CAGRHDSNYQLIW

SEQ ID NO: 369722 - protein, 19 aa, Homo sapiens
  CDR3 for beta chain variable domain of TCR clone 184861 (TRBV6-3, TRBJ2-1)
CASSYSWTSGRATYNEQFF

SEQ ID NO: 369723 - protein, 12 aa, Homo sapiens
  CDR3 for alpha chain variable domain of TCR clone 184862 (TRAV2, TRAJ9)
CAVGAGGFKTIF

SEQ ID NO: 369724 - protein, 16 aa, Homo sapiens
  CDR3 for beta chain variable domain of TCR clone 184862 (TRBV12-4, TRBJ2-5)
CASSWRPSGDLETQYF

SEQ ID NO: 369725 - protein, 14 aa, Homo sapiens
  CDR3 for alpha chain variable domain of TCR clone 184863 (TRAV12-1, TRAJ30)
CVVNIGGRDDKIIF

SEQ ID NO: 369726 - protein, 13 aa, Homo sapiens
  CDR3 for beta chain variable domain of TCR clone 184863 (TRBV12-5, TRBJ2-1)
CASGLGGGNEQFF

SEQ ID NO: 369727 - protein, 12 aa, Homo sapiens
  CDR3 for alpha chain variable domain of TCR clone 184864 (TRAV12-3, TRAJ17)
CAMTLTGNKLNF

SEQ ID NO: 369728 - protein, 16 aa, Homo sapiens
  CDR3 for beta chain variable domain of TCR clone 184864 (TRBV12-5, TRBJ2-5)
CASGPRTSGNQETQYF

SEQ ID NO: 369729 - protein, 11 aa, Homo sapiens
  CDR3 for alpha chain variable domain of TCR clone 184865 (TRAV20, TRAJ23)
CACNQGGKLIF

SEQ ID NO: 369730 - protein, 18 aa, Homo sapiens
  CDR3 for beta chain variable domain of TCR clone 184865 (TRBV23-1, TRBJ2-3)
CISAPAVNRPASTDTRYF

SEQ ID NO: 369731 - protein, 15 aa, Homo sapiens
  CDR3 for alpha chain variable domain of TCR clone 184866 (TRAV14/DV4, TRAJ10)
CAMRELTGGGNKLTF

SEQ ID NO: 369732 - protein, 18 aa, Homo sapiens
  CDR3 for beta chain variable domain of TCR clone 184866 (TRBV7-9, TRBJ2-7)
CASSITTSGSRTWYEQYF

SEQ ID NO: 369733 - protein, 14 aa, Homo sapiens
  CDR3 for alpha chain variable domain of TCR clone 184867 (TRAV1-2, TRAJ8)
CAVREDTGFQKLVF

SEQ ID NO: 369734 - protein, 12 aa, Homo sapiens
  CDR3 for beta chain variable domain of TCR clone 184867 (TRBV12-4, TRBJ1-2)
CASSFIWLHLRF

SEQ ID NO: 369735 - protein, 14 aa, Homo sapiens
  CDR3 for alpha chain variable domain of TCR clone 184868 (TRAV1-2, TRAJ24)
CAVLTTDSWGKFQF

SEQ ID NO: 369736 - protein, 15 aa, Homo sapiens
  CDR3 for beta chain variable domain of TCR clone 184868 (TRBV7-9, TRBJ1-2)
CASSLDREPNYGYTF

SEQ ID NO: 369737 - protein, 12 aa, Homo sapiens
  CDR3 for alpha chain variable domain of TCR clone 184869 (TRAV1-1, TRAJ23)
CAVTNQGGKLIF

SEQ ID NO: 369738 - protein, 14 aa, Homo sapiens
  CDR3 for beta chain variable domain of TCR clone 184869 (TRBV12-4, TRBJ1-6)
CASNLQGKGSPLHF

SEQ ID NO: 369739 - protein, 14 aa, Homo sapiens
  CDR3 for alpha chain variable domain of TCR clone 184870 (TRAV4, TRAJ26)
CLVGPHNYGQNFVL

SEQ ID NO: 369740 - protein, 17 aa, Homo sapiens
  CDR3 for beta chain variable domain of TCR clone 184870 (TRBV24-1, TRBJ2-1)
CATSDVSTSGTYNEQFF

SEQ ID NO: 369741 - protein, 14 aa, Homo sapiens
  CDR3 for alpha chain variable domain of TCR clone 184871 (TRAV3, TRAJ34)
CAVRAPGNTDKLIF

SEQ ID NO: 369742 - protein, 12 aa, Homo sapiens
  CDR3 for beta chain variable domain of TCR clone 184871 (TRBV11-2, TRBJ2-2)
CASSLGGGELFF

SEQ ID NO: 369743 - protein, 15 aa, Homo sapiens
  CDR3 for alpha chain variable domain of TCR clone 184872 (TRAV35, TRAJ44)
CAGQFKAGTASKLTF

SEQ ID NO: 369744 - protein, 15 aa, Homo sapiens
  CDR3 for beta chain variable domain of TCR clone 184872 (TRBV20-1, TRBJ2-7)
CSARDRVSGMDEQYF

SEQ ID NO: 369745 - protein, 14 aa, Homo sapiens
  CDR3 for alpha chain variable domain of TCR clone 184873 (TRAV29/DV5, TRAJ45)
CAASFRGGADGLTF

SEQ ID NO: 369746 - protein, 16 aa, Homo sapiens
  CDR3 for beta chain variable domain of TCR clone 184873 (TRBV15, TRBJ2-3)
CATSRDLGIVTDTQYF

SEQ ID NO: 369747 - protein, 15 aa, Homo sapiens
  CDR3 for alpha chain variable domain of TCR clone 184874 (TRAV12-1, TRAJ44)
CVVFVNTGTASKLTF

SEQ ID NO: 369748 - protein, 16 aa, Homo sapiens
  CDR3 for beta chain variable domain of TCR clone 184874 (TRBV18, TRBJ1-2)
CASSPPERVTIYGYTF

SEQ ID NO: 369749 - protein, 10 aa, Homo sapiens
  CDR3 for alpha chain variable domain of TCR clone 184875 (TRAV30, TRAJ34)
CGTNPDKLIF

SEQ ID NO: 369750 - protein, 12 aa, Homo sapiens
  CDR3 for beta chain variable domain of TCR clone 184875 (TRBV19, TRBJ1-1)
CASSRSDTEAFF

SEQ ID NO: 369751 - protein, 12 aa, Homo sapiens
  CDR3 for alpha chain variable domain of TCR clone 184876 (TRAV12-2, TRAJ8)
CAVATGFQQLVF

SEQ ID NO: 369752 - protein, 12 aa, Homo sapiens
  CDR3 for beta chain variable domain of TCR clone 184876 (TRBV14, TRBJ1-1)
CASSQLKGLAFF

SEQ ID NO: 369753 - protein, 18 aa, Homo sapiens
  CDR3 for alpha chain variable domain of TCR clone 184877 (TRAV1-2, TRAJ33)
CLLPLCCERLGSNYQLIW

SEQ ID NO: 369754 - protein, 17 aa, Homo sapiens
  CDR3 for beta chain variable domain of TCR clone 184877 (TRBV7-8, TRBJ2-6)
CASSAGTGGAGANVLTF

SEQ ID NO: 369755 - protein, 18 aa, Homo sapiens
  CDR3 for alpha chain variable domain of TCR clone 184878 (TRAV21, TRAJ52)
CAVRPSPAGGTIYGKLTF

SEQ ID NO: 369756 - protein, 17 aa, Homo sapiens
  CDR3 for beta chain variable domain of TCR clone 184878 (TRBV20-1, TRBJ2-2)
CSASGSGQGGLTGELFF

SEQ ID NO: 369757 - protein, 13 aa, Homo sapiens
  CDR3 for alpha chain variable domain of TCR clone 184879 (TRAV21, TRAJ27)
CAARPGNAGKSTF

SEQ ID NO: 369758 - protein, 13 aa, Homo sapiens
  CDR3 for beta chain variable domain of TCR clone 184879 (TRBV18, TRBJ2-7)
CASQSGGGYEQYF

SEQ ID NO: 369759 - protein, 14 aa, Homo sapiens
  CDR3 for alpha chain variable domain of TCR clone 184880 (TRAV13-1, TRAJ29)
CAASSNSGNTPLVF

SEQ ID NO: 369760 - protein, 13 aa, Homo sapiens
  CDR3 for beta chain variable domain of TCR clone 184880 (TRBV10-2, TRBJ1-1)
CASNDQMYTEAFF

SEQ ID NO: 369761 - protein, 11 aa, Homo sapiens
  CDR3 for alpha chain variable domain of TCR clone 184881 (TRAV1-2, TRAJ11)
CAVRGYSTLTF

SEQ ID NO: 369762 - protein, 15 aa, Homo sapiens
  CDR3 for beta chain variable domain of TCR clone 184881 (TRBV28, TRBJ2-1)
CASSIIAGGRSEQFF

SEQ ID NO: 369763 - protein, 14 aa, Homo sapiens
  CDR3 for alpha chain variable domain of TCR clone 184882 (TRAV3, TRAJ36)
CAVIDGTGANNLFF

SEQ ID NO: 369764 - protein, 16 aa, Homo sapiens
  CDR3 for beta chain variable domain of TCR clone 184882 (TRBV20-1, TRBJ2-6)
CSAREGPGVGANVLTF

SEQ ID NO: 369765 - protein, 12 aa, Homo sapiens
  CDR3 for alpha chain variable domain of TCR clone 184883 (TRAV29/DV5, TRAJ49)
CAASAIGNQFYL

SEQ ID NO: 369766 - protein, 13 aa, Homo sapiens
  CDR3 for beta chain variable domain of TCR clone 184883 (TRBV7-2, TRBJ2-2)
CASSLAVTGELFF

SEQ ID NO: 369767 - protein, 12 aa, Homo sapiens
  CDR3 for alpha chain variable domain of TCR clone 184884 (TRAV1-1, TRAJ29)
CAVISGNKPLVF

SEQ ID NO: 369768 - protein, 17 aa, Homo sapiens
  CDR3 for beta chain variable domain of TCR clone 184884 (TRBV20-1, TRBJ2-2)
CSASGSGQGGLTGELFF

SEQ ID NO: 369769 - protein, 14 aa, Homo sapiens
  CDR3 for alpha chain variable domain of TCR clone 184885 (TRAV13-1, TRAJ17)
LSSRSKAAGNKLTF

SEQ ID NO: 369770 - protein, 14 aa, Homo sapiens
  CDR3 for beta chain variable domain of TCR clone 184885 (TRBV7-9, TRBJ2-1)
CASSSMVVFGEQFF

SEQ ID NO: 369771 - protein, 20 aa, Homo sapiens
  CDR3 for alpha chain variable domain of TCR clone 184886 (TRAV1-1, TRAJ4)
CLLLLRCEPSFSGGYNKLIF

SEQ ID NO: 369772 - protein, 16 aa, Homo sapiens
  CDR3 for beta chain variable domain of TCR clone 184886 (TRBV6-1, TRBJ2-1)
CASILRQGSSYNEQFF

SEQ ID NO: 369773 - protein, 12 aa, Homo sapiens
  CDR3 for alpha chain variable domain of TCR clone 184887 (TRAV35, TRAJ49)
CAGWNTGNQFYF

SEQ ID NO: 369774 - protein, 16 aa, Homo sapiens
  CDR3 for beta chain variable domain of TCR clone 184887 (TRBV5-1, TRBJ2-2)
CASSLWDTTYTGELFF

SEQ ID NO: 369775 - protein, 16 aa, Homo sapiens
  CDR3 for alpha chain variable domain of TCR clone 184888 (TRAV3, TRAJ42)
CAVRDIEGGSQGNHIF

SEQ ID NO: 369776 - protein, 15 aa, Homo sapiens
  CDR3 for beta chain variable domain of TCR clone 184888 (TRBV9, TRBJ2-2)
CASSDFAGASGELFF

SEQ ID NO: 369777 - protein, 12 aa, Homo sapiens
  CDR3 for alpha chain variable domain of TCR clone 184889 (TRAV27, TRAJ9)
CAGESGGFKTIF

SEQ ID NO: 369778 - protein, 14 aa, Homo sapiens
  CDR3 for beta chain variable domain of TCR clone 184889 (TRBV4-2, TRBJ2-7)
CASSQDGRKGEQYF

SEQ ID NO: 369779 - protein, 13 aa, Homo sapiens
  CDR3 for alpha chain variable domain of TCR clone 184890 (TRAV26-1, )
CIVSHRVEGFWNQ

SEQ ID NO: 369780 - protein, 14 aa, Homo sapiens
  CDR3 for beta chain variable domain of TCR clone 184890 (TRBV20-1, TRBJ2-7)
SSAWTALSSYEQYF

SEQ ID NO: 369781 - protein, 10 aa, Homo sapiens
  CDR3 for alpha chain variable domain of TCR clone 184891 (TRAV26-1, TRAJ40)
CIAGTYKYVF

SEQ ID NO: 369782 - protein, 13 aa, Homo sapiens
  CDR3 for beta chain variable domain of TCR clone 184891 (TRBV4-2, TRBJ1-1)
CASSQAGNTEAFF

SEQ ID NO: 369783 - protein, 11 aa, Homo sapiens
  CDR3 for alpha chain variable domain of TCR clone 184892 (TRAV2, TRAJ13)
CASGGYQKVTF

SEQ ID NO: 369784 - protein, 17 aa, Homo sapiens
  CDR3 for beta chain variable domain of TCR clone 184892 (TRBV7-3, TRBJ2-3)
CASSLMKMMRGADTQYF

SEQ ID NO: 369785 - protein, 12 aa, Homo sapiens
  CDR3 for alpha chain variable domain of TCR clone 184893 (TRAV12-2, TRAJ31)
CTVNTPDASLMF

SEQ ID NO: 369786 - protein, 15 aa, Homo sapiens
  CDR3 for beta chain variable domain of TCR clone 184893 (TRBV4-2, TRBJ1-1)
CASSQDQGLNTEAFF

SEQ ID NO: 369787 - protein, 12 aa, Homo sapiens
  CDR3 for alpha chain variable domain of TCR clone 184894 (TRAV1-1, TRAJ8)
CAGGTGFQKLVF

SEQ ID NO: 369788 - protein, 11 aa, Homo sapiens
  CDR3 for beta chain variable domain of TCR clone 184894 (TRBV11-2, TRBJ2-2)
CASSLPGELFF

SEQ ID NO: 369789 - protein, 16 aa, Homo sapiens
  CDR3 for alpha chain variable domain of TCR clone 184895 (TRAV3, TRAJ37)
CAVRGKGSGNTGKLIF

SEQ ID NO: 369790 - protein, 14 aa, Homo sapiens
  CDR3 for beta chain variable domain of TCR clone 184895 (TRBV18, TRBJ2-1)
CASSPQGRFNEQFF

SEQ ID NO: 369791 - protein, 15 aa, Homo sapiens
  CDR3 for alpha chain variable domain of TCR clone 184896 (TRAV26-1, TRAJ29)
CIVRAEGSGNTPLVC

SEQ ID NO: 369792 - protein, 15 aa, Homo sapiens
  CDR3 for beta chain variable domain of TCR clone 184896 (TRBV7-9, TRBJ1-5)
CASSQGHQPNQPQHF

SEQ ID NO: 369793 - protein, 18 aa, Homo sapiens
  CDR3 for alpha chain variable domain of TCR clone 184897 (TRAV35, TRAJ45)
CAGQSTMYSGGGADGLTF

SEQ ID NO: 369794 - protein, 13 aa, Homo sapiens
  CDR3 for beta chain variable domain of TCR clone 184897 (TRBV20-1, TRBJ2-2)
CSASAAGTGELFF

SEQ ID NO: 369795 - protein, 13 aa, Homo sapiens
  CDR3 for alpha chain variable domain of TCR clone 184898 (TRAV8-3, TRAJ50)
CAVDQTSYDKVIF

SEQ ID NO: 369796 - protein, 17 aa, Homo sapiens
  CDR3 for beta chain variable domain of TCR clone 184898 (TRBV18, TRBJ2-1)
CASSKGLSGGADNEQFF

SEQ ID NO: 369797 - protein, 15 aa, Homo sapiens
  CDR3 for alpha chain variable domain of TCR clone 184899 (TRAV12-1, TRAJ44)
CVVDTPQGTAGTLTF

SEQ ID NO: 369798 - protein, 13 aa, Homo sapiens
  CDR3 for beta chain variable domain of TCR clone 184899 (TRBV27, TRBJ2-1)
CASSSGSYNEQFF

SEQ ID NO: 369799 - protein, 12 aa, Homo sapiens
  CDR3 for alpha chain variable domain of TCR clone 184900 (TRAV12-3, TRAJ17)
CAMKLTGNKLTF

SEQ ID NO: 369800 - protein, 15 aa, Homo sapiens
  CDR3 for beta chain variable domain of TCR clone 184900 (TRBV20-1, TRBJ2-7)
CSARDRVSGMGEQYF

SEQ ID NO: 369801 - protein, 17 aa, Homo sapiens
  CDR3 for alpha chain variable domain of TCR clone 184901 (TRAV12-3, TRAJ18)
CAMIRADRGSTLGRLYF

SEQ ID NO: 369802 - protein, 14 aa, Homo sapiens
  CDR3 for beta chain variable domain of TCR clone 184901 (TRBV5-7, TRBJ1-6)
CASTPWPADSPRHF

SEQ ID NO: 369803 - protein, 14 aa, Homo sapiens
  CDR3 for alpha chain variable domain of TCR clone 184902 (TRAV12-3, TRAJ10)
SHLHLTGGGNKLTF

SEQ ID NO: 369804 - protein, 13 aa, Homo sapiens
  CDR3 for beta chain variable domain of TCR clone 184902 (TRBV7-7, TRBJ2-5)
CASSRSGQETQYF

SEQ ID NO: 369805 - protein, 16 aa, Homo sapiens
  CDR3 for alpha chain variable domain of TCR clone 184903 (TRAV4, TRAJ22)
CLVGDLYSGSARQLTF

SEQ ID NO: 369806 - protein, 16 aa, Homo sapiens
  CDR3 for beta chain variable domain of TCR clone 184903 (TRBV24-1, TRBJ2-3)
CATSDPGTGATDTQYF

SEQ ID NO: 369807 - protein, 12 aa, Homo sapiens
  CDR3 for alpha chain variable domain of TCR clone 184904 (TRAV12-2, TRAJ52)
IGGGTSYGKLTF

SEQ ID NO: 369808 - protein, 14 aa, Homo sapiens
  CDR3 for beta chain variable domain of TCR clone 184904 (TRBV25-1, TRBJ1-1)
CASTHLGGNTEAFF

SEQ ID NO: 369809 - protein, 12 aa, Homo sapiens
  CDR3 for alpha chain variable domain of TCR clone 184905 (TRAV2, TRAJ5)
CALDTGRRALTF

SEQ ID NO: 369810 - protein, 17 aa, Homo sapiens
  CDR3 for beta chain variable domain of TCR clone 184905 (TRBV11-2, TRBJ2-1)
CASSLYPPGVEYNEQFF

SEQ ID NO: 369811 - protein, 14 aa, Homo sapiens
  CDR3 for alpha chain variable domain of TCR clone 184906 (TRAV1-2, TRAJ27)
CAVRSGTNAGKSTL

SEQ ID NO: 369812 - protein, 15 aa, Homo sapiens
  CDR3 for beta chain variable domain of TCR clone 184906 (TRBV18, TRBJ2-7)
CASSPLQGRTYEQYF

SEQ ID NO: 369813 - protein, 14 aa, Homo sapiens
  CDR3 for alpha chain variable domain of TCR clone 184907 (TRAV3, TRAJ34)
CAVRDINNTDTLIF

SEQ ID NO: 369814 - protein, 15 aa, Homo sapiens
  CDR3 for beta chain variable domain of TCR clone 184907 (TRBV20-1, TRBJ2-7)
CSARDRVSGMDEQYF

SEQ ID NO: 369815 - protein, 14 aa, Homo sapiens
  CDR3 for alpha chain variable domain of TCR clone 184908 (TRAV1-2, TRAJ8)
CAVREDTGFQKLVF

SEQ ID NO: 369816 - protein, 14 aa, Homo sapiens
  CDR3 for beta chain variable domain of TCR clone 184908 (TRBV19, TRBJ2-1)
CASKDPCSYNEQFF

SEQ ID NO: 369817 - protein, 12 aa, Homo sapiens
  CDR3 for alpha chain variable domain of TCR clone 184909 (TRAV8-3, TRAJ20)
CAVGANDYKLSF

SEQ ID NO: 369818 - protein, 16 aa, Homo sapiens
  CDR3 for beta chain variable domain of TCR clone 184909 (TRBV4-2, TRBJ2-7)
CASSQDRGTSSYEQYF

SEQ ID NO: 369819 - protein, 13 aa, Homo sapiens
  CDR3 for alpha chain variable domain of TCR clone 184910 (TRAV21, TRAJ20)
CAVGLRVDYKLSF

SEQ ID NO: 369820 - protein, 13 aa, Homo sapiens
  CDR3 for beta chain variable domain of TCR clone 184910 (TRBV6-1, TRBJ1-1)
CASSRQGNPEAVF

SEQ ID NO: 369821 - protein, 14 aa, Homo sapiens
  CDR3 for alpha chain variable domain of TCR clone 184911 (TRAV12-3, TRAJ53)
CWATSGGSNYKLTF

SEQ ID NO: 369822 - protein, 13 aa, Homo sapiens
  CDR3 for beta chain variable domain of TCR clone 184911 (TRBV19, TRBJ1-5)
CASSTRDGQPQHF

SEQ ID NO: 369823 - protein, 16 aa, Homo sapiens
  CDR3 for alpha chain variable domain of TCR clone 184912 (TRAV17, TRAJ28)
CATASVSGAGSYQLTF

SEQ ID NO: 369824 - protein, 16 aa, Homo sapiens
  CDR3 for beta chain variable domain of TCR clone 184912 (TRBV12-5, TRBJ2-5)
CASGPRTSGNQETQYF

SEQ ID NO: 369825 - protein, 14 aa, Homo sapiens
  CDR3 for alpha chain variable domain of TCR clone 184913 (TRAV13-1, TRAJ9)
CAASAITGGFKTIF

SEQ ID NO: 369826 - protein, 16 aa, Homo sapiens
  CDR3 for beta chain variable domain of TCR clone 184913 (TRBV12-4, TRBJ2-3)
CASSFGTGGISDTQYF

SEQ ID NO: 369827 - protein, 15 aa, Homo sapiens
  CDR3 for alpha chain variable domain of TCR clone 184914 (TRAV21, TRAJ24)
CAARSSTDSWGKLQF

SEQ ID NO: 369828 - protein, 15 aa, Homo sapiens
  CDR3 for beta chain variable domain of TCR clone 184914 (TRBV6-6, TRBJ1-5)
CASSSIQGTNQPQHF

SEQ ID NO: 369829 - protein, 14 aa, Homo sapiens
  CDR3 for alpha chain variable domain of TCR clone 184915 (TRAV1-2, TRAJ16)
CAVNRFSDGQKLLF

SEQ ID NO: 369830 - protein, 14 aa, Homo sapiens
  CDR3 for beta chain variable domain of TCR clone 184915 (TRBV11-2, TRBJ2-1)
CASTTGQGNNEQFF

SEQ ID NO: 369831 - protein, 11 aa, Homo sapiens
  CDR3 for alpha chain variable domain of TCR clone 184916 (TRAV12-1, TRAJ8)
CVVTGFQKLVF

SEQ ID NO: 369832 - protein, 14 aa, Homo sapiens
  CDR3 for beta chain variable domain of TCR clone 184916 (TRBV28, TRBJ1-5)
CASSGQALYQPQHF

SEQ ID NO: 369833 - protein, 17 aa, Homo sapiens
  CDR3 for alpha chain variable domain of TCR clone 184917 (TRAV4, TRAJ18)
CLVGERSVGSTMGRLYF

SEQ ID NO: 369834 - protein, 14 aa, Homo sapiens
  CDR3 for beta chain variable domain of TCR clone 184917 (TRBV6-5, TRBJ1-2)
CASSYDGTGGGYTF

SEQ ID NO: 369835 - protein, 12 aa, Homo sapiens
  CDR3 for alpha chain variable domain of TCR clone 184918 (TRAV12-2, TRAJ10)
WGVTGGGNKLTF

SEQ ID NO: 369836 - protein, 12 aa, Homo sapiens
  CDR3 for beta chain variable domain of TCR clone 184918 (TRBV7-9, TRBJ2-7)
CASSFGSYEQYF

SEQ ID NO: 369837 - protein, 15 aa, Homo sapiens
  CDR3 for alpha chain variable domain of TCR clone 184919 (TRAV12-2, TRAJ43)
CAFDMRFGAGTRLTV

SEQ ID NO: 369838 - protein, 18 aa, Homo sapiens
  CDR3 for beta chain variable domain of TCR clone 184919 (TRBV14, TRBJ2-3)
CASRQDRGVSQIRSILAQ

SEQ ID NO: 369839 - protein, 12 aa, Homo sapiens
  CDR3 for alpha chain variable domain of TCR clone 184920 (TRAV27, TRAJ42)
CAGGGSQRNLIF

SEQ ID NO: 369840 - protein, 13 aa, Homo sapiens
  CDR3 for beta chain variable domain of TCR clone 184920 (TRBV19, TRBJ2-7)
CASSIRSSYEQYF

SEQ ID NO: 369841 - protein, 14 aa, Homo sapiens
  CDR3 for alpha chain variable domain of TCR clone 184921 (TRAV35, TRAJ38)
CAGSNAGNNRKLIW

SEQ ID NO: 369842 - protein, 15 aa, Homo sapiens
  CDR3 for beta chain variable domain of TCR clone 184921 (TRBV20-1, TRBJ2-1)
CSARGIGGTYNEQFF

SEQ ID NO: 369843 - protein, 14 aa, Homo sapiens
  CDR3 for alpha chain variable domain of TCR clone 184922 (TRAV12-3, TRAJ42)
CAMNYGGSQGNPIF

SEQ ID NO: 369844 - protein, 12 aa, Homo sapiens
  CDR3 for beta chain variable domain of TCR clone 184922 (TRBV5-4, TRBJ2-5)
CASSSTRETQYF

SEQ ID NO: 369845 - protein, 19 aa, Homo sapiens
  CDR3 for alpha chain variable domain of TCR clone 184923 (TRAV1-2, TRAJ26)
CLLPLCCERTDNYGQNFVF

SEQ ID NO: 369846 - protein, 11 aa, Homo sapiens
  CDR3 for beta chain variable domain of TCR clone 184923 (TRBV29-1, TRBJ2-5)
CSEDRTGTQYF

SEQ ID NO: 369847 - protein, 15 aa, Homo sapiens
  CDR3 for alpha chain variable domain of TCR clone 184924 (TRAV13-1, TRAJ17)
CAASIERAAGNKPTF

SEQ ID NO: 369848 - protein, 14 aa, Homo sapiens
  CDR3 for beta chain variable domain of TCR clone 184924 (TRBV20-1, TRBJ2-5)
CSALVPGYQETQYF

SEQ ID NO: 369849 - protein, 14 aa, Homo sapiens
  CDR3 for alpha chain variable domain of TCR clone 184925 (TRAV13-1, TRAJ44)
CAAKATGTASKLTF

SEQ ID NO: 369850 - protein, 17 aa, Homo sapiens
  CDR3 for beta chain variable domain of TCR clone 184925 (TRBV7-3, TRBJ2-3)
RASSLMNRMRGADTQYF

SEQ ID NO: 369851 - protein, 21 aa, Homo sapiens
  CDR3 for alpha chain variable domain of TCR clone 184926 (TRAV3, TRAJ26)
CAVVRILSLVPEPDCPSCPIS

SEQ ID NO: 369852 - protein, 17 aa, Homo sapiens
  CDR3 for beta chain variable domain of TCR clone 184926 (TRBV28, TRBJ2-5)
CASSTPEGDALQETQYF

SEQ ID NO: 369853 - protein, 14 aa, Homo sapiens
  CDR3 for alpha chain variable domain of TCR clone 184927 (TRAV12-2, TRAJ3)
CAVKGYSSASKIIF

SEQ ID NO: 369854 - protein, 14 aa, Homo sapiens
  CDR3 for beta chain variable domain of TCR clone 184927 (TRBV4-2, TRBJ2-1)
CPSGLDRAYNEQFF

SEQ ID NO: 369855 - protein, 12 aa, Homo sapiens
  CDR3 for alpha chain variable domain of TCR clone 184928 (TRAV21, TRAJ33)
CAKMDSNHQLIW

SEQ ID NO: 369856 - protein, 15 aa, Homo sapiens
  CDR3 for beta chain variable domain of TCR clone 184928 (TRBV7-9, TRBJ2-7)
CASSSSGLAVYEQYF

SEQ ID NO: 369857 - protein, 15 aa, Homo sapiens
  CDR3 for alpha chain variable domain of TCR clone 184929 (TRAV3, TRAJ32)
CAVSSYGGATNKLIF

SEQ ID NO: 369858 - protein, 13 aa, Homo sapiens
  CDR3 for beta chain variable domain of TCR clone 184929 (TRBV20-1, TRBJ2-7)
CSARPSTSDEQYF

SEQ ID NO: 369859 - protein, 13 aa, Homo sapiens
  CDR3 for alpha chain variable domain of TCR clone 184930 (TRAV13-2, TRAJ10)
CAENTGGGNKLTF

SEQ ID NO: 369860 - protein, 13 aa, Homo sapiens
  CDR3 for beta chain variable domain of TCR clone 184930 (TRBV7-9, TRBJ1-2)
CASSLKQNYGYTF

SEQ ID NO: 369861 - protein, 14 aa, Homo sapiens
  CDR3 for alpha chain variable domain of TCR clone 184931 (TRAV17, TRAJ6)
CATDERRGSYIPTF

SEQ ID NO: 369862 - protein, 16 aa, Homo sapiens
  CDR3 for beta chain variable domain of TCR clone 184931 (TRBV19, TRBJ2-1)
CASSKAGPSSYNEQFF

SEQ ID NO: 369863 - protein, 14 aa, Homo sapiens
  CDR3 for alpha chain variable domain of TCR clone 184932 (TRAV12-2, TRAJ24)
CAVTPADSWGKLQF

SEQ ID NO: 369864 - protein, 16 aa, Homo sapiens
  CDR3 for beta chain variable domain of TCR clone 184932 (TRBV12-4, TRBJ2-5)
CASSFFVRGRQETQYF

SEQ ID NO: 369865 - protein, 12 aa, Homo sapiens
  CDR3 for alpha chain variable domain of TCR clone 184933 (TRAV13-1, TRAJ9)
CASHTGGFKTIL

SEQ ID NO: 369866 - protein, 13 aa, Homo sapiens
  CDR3 for beta chain variable domain of TCR clone 184933 (TRBV12-4, TRBJ1-2)
CASSSGSKDGYTF

SEQ ID NO: 369867 - protein, 15 aa, Homo sapiens
  CDR3 for alpha chain variable domain of TCR clone 184934 (TRAV35, TRAJ58)
CAGRRQETSGSRLTF

SEQ ID NO: 369868 - protein, 13 aa, Homo sapiens
  CDR3 for beta chain variable domain of TCR clone 184934 (TRBV20-1, TRBJ2-5)
CSASLTGRETQYF

SEQ ID NO: 369869 - protein, 12 aa, Homo sapiens
  CDR3 for alpha chain variable domain of TCR clone 184935 (TRAV12-1, TRAJ40)
CVVYSGTYKYIF

SEQ ID NO: 369870 - protein, 15 aa, Homo sapiens
  CDR3 for beta chain variable domain of TCR clone 184935 (TRBV28, TRBJ2-7)
CASSLISGGSYEQYF

SEQ ID NO: 369871 - protein, 13 aa, Homo sapiens
  CDR3 for alpha chain variable domain of TCR clone 184936 (TRAV21, TRAJ20)
CAVGLRVDYKRSF

SEQ ID NO: 369872 - protein, 16 aa, Homo sapiens
  CDR3 for beta chain variable domain of TCR clone 184936 (TRBV6-1, TRBJ2-5)
CASSETLDRGAETQYF

SEQ ID NO: 369873 - protein, 14 aa, Homo sapiens
  CDR3 for alpha chain variable domain of TCR clone 184937 (TRAV8-3, TRAJ17)
CAVGAQTAGNKLTF

SEQ ID NO: 369874 - protein, 10 aa, Homo sapiens
  CDR3 for beta chain variable domain of TCR clone 184937 (TRBV29-1, TRBJ1-4)
CSVSSGEKLF

SEQ ID NO: 369875 - protein, 11 aa, Homo sapiens
  CDR3 for alpha chain variable domain of TCR clone 184938 (TRAV12-3, TRAJ49)
CAANTGNQFYF

SEQ ID NO: 369876 - protein, 12 aa, Homo sapiens
  CDR3 for beta chain variable domain of TCR clone 184938 (TRBV6-3, TRBJ2-7)
CASSEPGFEQYF

SEQ ID NO: 369877 - protein, 14 aa, Homo sapiens
  CDR3 for alpha chain variable domain of TCR clone 184939 (TRAV8-3, TRAJ44)
CAVGNTGTASKLTC

SEQ ID NO: 369878 - protein, 15 aa, Homo sapiens
  CDR3 for beta chain variable domain of TCR clone 184939 (TRBV28, TRBJ2-7)
CASSFRGQGRYEQYF

SEQ ID NO: 369879 - protein, 14 aa, Homo sapiens
  CDR3 for alpha chain variable domain of TCR clone 184940 (TRAV29/DV5, TRAJ45)
CAASFRGGADGLTF

SEQ ID NO: 369880 - protein, 16 aa, Homo sapiens
  CDR3 for beta chain variable domain of TCR clone 184940 (TRBV11-2, TRBJ2-1)
CASSVGGSLSYNEQFF

SEQ ID NO: 369881 - protein, 14 aa, Homo sapiens
  CDR3 for alpha chain variable domain of TCR clone 184941 (TRAV8-3, TRAJ45)
WGYYSGGGADGLTF

SEQ ID NO: 369882 - protein, 11 aa, Homo sapiens
  CDR3 for beta chain variable domain of TCR clone 184941 (TRBV20-1, TRBJ2-5)
CSADRAETQYF

SEQ ID NO: 369883 - protein, 19 aa, Homo sapiens
  CDR3 for alpha chain variable domain of TCR clone 184942 (TRAV26-1, TRAJ52)
CIVRAHRNARGTSYGRLTF

SEQ ID NO: 369884 - protein, 15 aa, Homo sapiens
  CDR3 for beta chain variable domain of TCR clone 184942 (TRBV29-1, TRBJ2-1)
CSGRDRKSSYNEQFF

SEQ ID NO: 369885 - protein, 12 aa, Homo sapiens
  CDR3 for alpha chain variable domain of TCR clone 184943 (TRAV21, TRAJ31)
CVLAGNNARLMF

SEQ ID NO: 369886 - protein, 16 aa, Homo sapiens
  CDR3 for beta chain variable domain of TCR clone 184943 (TRBV27, TRBJ2-5)
CASSSGPGGTKETQYF

SEQ ID NO: 369887 - protein, 13 aa, Homo sapiens
  CDR3 for alpha chain variable domain of TCR clone 184944 (TRAV38-1, TRAJ42)
CARWGGGQGNLIF

SEQ ID NO: 369888 - protein, 17 aa, Homo sapiens
  CDR3 for beta chain variable domain of TCR clone 184944 (TRBV20-1, TRBJ2-1)
CSARDPLAGVRDNEQFF

SEQ ID NO: 369889 - protein, 15 aa, Homo sapiens
  CDR3 for alpha chain variable domain of TCR clone 184945 (TRAV3, TRAJ22)
CAVRDRGGSARQLTF

SEQ ID NO: 369890 - protein, 15 aa, Homo sapiens
  CDR3 for beta chain variable domain of TCR clone 184945 (TRBV7-3, TRBJ2-1)
CASSPTGGGEVEQFF

SEQ ID NO: 369891 - protein, 16 aa, Homo sapiens
  CDR3 for alpha chain variable domain of TCR clone 184946 (TRAV12-3, TRAJ53)
CAMSPVSGGSNYKLTF

SEQ ID NO: 369892 - protein, 11 aa, Homo sapiens
  CDR3 for beta chain variable domain of TCR clone 184946 (TRBV29-1, TRBJ2-5)
CSEDRTGIQYF

SEQ ID NO: 369893 - protein, 13 aa, Homo sapiens
  CDR3 for alpha chain variable domain of TCR clone 184947 (TRAV2, TRAJ41)
CAVEEYSGYALNF

SEQ ID NO: 369894 - protein, 13 aa, Homo sapiens
  CDR3 for beta chain variable domain of TCR clone 184947 (TRBV7-3, TRBJ1-1)
CASSQDWGAEAFF

SEQ ID NO: 369895 - protein, 17 aa, Homo sapiens
  CDR3 for alpha chain variable domain of TCR clone 184948 (TRAV13-1, TRAJ52)
CAAGRNAGGTSYGKLTF

SEQ ID NO: 369896 - protein, 13 aa, Homo sapiens
  CDR3 for beta chain variable domain of TCR clone 184948 (TRBV7-2, TRBJ1-1)
CASNLKGAKVAFI

SEQ ID NO: 369897 - protein, 20 aa, Homo sapiens
  CDR3 for alpha chain variable domain of TCR clone 184949 (TRAV12-1, TRAJ42)
SSVIQPPTSVKGGSQGNLIF

SEQ ID NO: 369898 - protein, 18 aa, Homo sapiens
  CDR3 for beta chain variable domain of TCR clone 184949 (TRBV11-2, TRBJ2-3)
CAGSVGGASRGAPNTQYF

SEQ ID NO: 369899 - protein, 12 aa, Homo sapiens
  CDR3 for alpha chain variable domain of TCR clone 184950 (TRAV8-3, TRAJ26)
CAGDNYGQNFVF

SEQ ID NO: 369900 - protein, 17 aa, Homo sapiens
  CDR3 for beta chain variable domain of TCR clone 184950 (TRBV7-8, TRBJ2-6)
CASSAGTGGAGANSLTF

SEQ ID NO: 369901 - protein, 14 aa, Homo sapiens
  CDR3 for alpha chain variable domain of TCR clone 184951 (TRAV13-1, TRAJ35)
CAASKGGVGNVLHC

SEQ ID NO: 369902 - protein, 13 aa, Homo sapiens
  CDR3 for beta chain variable domain of TCR clone 184951 (TRBV7-3, TRBJ1-1)
CASSQDWGAEAFF

SEQ ID NO: 369903 - protein, 14 aa, Homo sapiens
  CDR3 for alpha chain variable domain of TCR clone 184952 (TRAV8-4, TRAJ38)
CARLNAGNNRKLFW

SEQ ID NO: 369904 - protein, 12 aa, Homo sapiens
  CDR3 for beta chain variable domain of TCR clone 184952 (TRBV6-1, TRBJ2-7)
CASSEPLYEQYF

SEQ ID NO: 369905 - protein, 14 aa, Homo sapiens
  CDR3 for alpha chain variable domain of TCR clone 184953 (TRAV29/DV5, TRAJ57)
CAARPQGGSEKLVF

SEQ ID NO: 369906 - protein, 14 aa, Homo sapiens
  CDR3 for beta chain variable domain of TCR clone 184953 (TRBV6-5, TRBJ1-1)
CASSFGQGLTEAFF

SEQ ID NO: 369907 - protein, 14 aa, Homo sapiens
  CDR3 for alpha chain variable domain of TCR clone 184954 (TRAV1-2, TRAJ16)
CAVNLFSDGQKLLF

SEQ ID NO: 369908 - protein, 12 aa, Homo sapiens
  CDR3 for beta chain variable domain of TCR clone 184954 (TRBV20-1, TRBJ2-5)
CSAPRSQETQYF

SEQ ID NO: 369909 - protein, 12 aa, Homo sapiens
  CDR3 for alpha chain variable domain of TCR clone 184955 (TRAV3, TRAJ20)
CAVRDGDYKLSF

SEQ ID NO: 369910 - protein, 13 aa, Homo sapiens
  CDR3 for beta chain variable domain of TCR clone 184955 (TRBV7-2, TRBJ2-7)
CASSSPGGSEQYF

SEQ ID NO: 369911 - protein, 12 aa, Homo sapiens
  CDR3 for alpha chain variable domain of TCR clone 184956 (TRAV25, TRAJ11)
CAGASGYSTLTF

SEQ ID NO: 369912 - protein, 15 aa, Homo sapiens
  CDR3 for beta chain variable domain of TCR clone 184956 (TRBV7-6, TRBJ1-5)
CASSQSSGINQPQHF

SEQ ID NO: 369913 - protein, 13 aa, Homo sapiens
  CDR3 for alpha chain variable domain of TCR clone 184957 (TRAV16, TRAJ22)
SAMLAVSARQLTF

SEQ ID NO: 369914 - protein, 18 aa, Homo sapiens
  CDR3 for beta chain variable domain of TCR clone 184957 (TRBV7-2, TRBJ2-3)
CASSLETSRGRKADTQYF

SEQ ID NO: 369915 - protein, 13 aa, Homo sapiens
  CDR3 for alpha chain variable domain of TCR clone 184958 (TRAV13-1, TRAJ21)
CAASIYNFNKFYF

SEQ ID NO: 369916 - protein, 17 aa, Homo sapiens
  CDR3 for beta chain variable domain of TCR clone 184958 (TRBV20-1, TRBJ2-1)
CSASSSGLAGSYNEQFF

SEQ ID NO: 369917 - protein, 14 aa, Homo sapiens
  CDR3 for alpha chain variable domain of TCR clone 184959 (TRAV26-1, TRAJ34)
SIVRVAYNTDKLIF

SEQ ID NO: 369918 - protein, 15 aa, Homo sapiens
  CDR3 for beta chain variable domain of TCR clone 184959 (TRBV20-1, TRBJ2-7)
CSARVPAAYFYEQYF

SEQ ID NO: 369919 - protein, 15 aa, Homo sapiens
  CDR3 for alpha chain variable domain of TCR clone 184960 (TRAV23/DV6, TRAJ12)
CAAIDLGAMESSYKL

SEQ ID NO: 369920 - protein, 15 aa, Homo sapiens
  CDR3 for beta chain variable domain of TCR clone 184960 (TRBV12-4, TRBJ2-5)
CASTLNSGRGETQYF

SEQ ID NO: 369921 - protein, 12 aa, Homo sapiens
  CDR3 for alpha chain variable domain of TCR clone 184961 (TRAV12-3, TRAJ20)
CSMVRGDYKLSF

SEQ ID NO: 369922 - protein, 14 aa, Homo sapiens
  CDR3 for beta chain variable domain of TCR clone 184961 (TRBV20-1, TRBJ2-7)
CSAISREASYEQYF

SEQ ID NO: 369923 - protein, 13 aa, Homo sapiens
  CDR3 for alpha chain variable domain of TCR clone 184962 (TRAV36/DV7, TRAJ53)
CALSGGSNYKLTF

SEQ ID NO: 369924 - protein, 13 aa, Homo sapiens
  CDR3 for beta chain variable domain of TCR clone 184962 (TRBV28, TRBJ2-7)
CASSLPSPYEQYF

SEQ ID NO: 369925 - protein, 18 aa, Homo sapiens
  CDR3 for alpha chain variable domain of TCR clone 184963 (TRAV21, TRAJ53)
CAVKGGENSGGSNYKLTF

SEQ ID NO: 369926 - protein, 15 aa, Homo sapiens
  CDR3 for beta chain variable domain of TCR clone 184963 (TRBV2, TRBJ2-7)
CASSEGLARSYEQYF

SEQ ID NO: 369927 - protein, 16 aa, Homo sapiens
  CDR3 for alpha chain variable domain of TCR clone 184964 (TRAV12-2, TRAJ32)
CAVNLGQGGATNKLIF

SEQ ID NO: 369928 - protein, 13 aa, Homo sapiens
  CDR3 for beta chain variable domain of TCR clone 184964 (TRBV9, TRBJ2-2)
CASSPRPAGDLFF

SEQ ID NO: 369929 - protein, 15 aa, Homo sapiens
  CDR3 for alpha chain variable domain of TCR clone 184965 (TRAV20, TRAJ4)
CAVEGSSGGYNQLIF

SEQ ID NO: 369930 - protein, 14 aa, Homo sapiens
  CDR3 for beta chain variable domain of TCR clone 184965 (TRBV7-8, TRBJ2-7)
CASTLGGARGEQYF

SEQ ID NO: 369931 - protein, 16 aa, Homo sapiens
  CDR3 for alpha chain variable domain of TCR clone 184966 (TRAV3, TRAJ37)
CAVRVRGSGNTGKLIF

SEQ ID NO: 369932 - protein, 16 aa, Homo sapiens
  CDR3 for beta chain variable domain of TCR clone 184966 (TRBV19, TRBJ2-1)
CASSKAGPSSYNEQLF

SEQ ID NO: 369933 - protein, 15 aa, Homo sapiens
  CDR3 for alpha chain variable domain of TCR clone 184967 (TRAV26-1, TRAJ15)
CIVRAANQAGTALIF

SEQ ID NO: 369934 - protein, 15 aa, Homo sapiens
  CDR3 for beta chain variable domain of TCR clone 184967 (TRBV20-1, TRBJ1-1)
CSARSAATSNTVAFF

SEQ ID NO: 369935 - protein, 15 aa, Homo sapiens
  CDR3 for alpha chain variable domain of TCR clone 184968 (TRAV21, TRAJ40)
CAVRPQTSGTYKYIF

SEQ ID NO: 369936 - protein, 13 aa, Homo sapiens
  CDR3 for beta chain variable domain of TCR clone 184968 (TRBV7-2, TRBJ2-2)
CASSSGRAGELFF

SEQ ID NO: 369937 - protein, 14 aa, Homo sapiens
  CDR3 for alpha chain variable domain of TCR clone 184969 (TRAV1-2, TRAJ16)
CAVNRFSDGQKLLF

SEQ ID NO: 369938 - protein, 16 aa, Homo sapiens
  CDR3 for beta chain variable domain of TCR clone 184969 (TRBV7-3, TRBJ2-2)
CASSLKRGTLSEELFF

SEQ ID NO: 369939 - protein, 14 aa, Homo sapiens
  CDR3 for alpha chain variable domain of TCR clone 184970 (TRAV17, TRAJ31)
CATVLRNNNARLMF

SEQ ID NO: 369940 - protein, 16 aa, Homo sapiens
  CDR3 for beta chain variable domain of TCR clone 184970 (TRBV4-2, TRBJ2-2)
CASSQDPSGREGELFF

SEQ ID NO: 369941 - protein, 12 aa, Homo sapiens
  CDR3 for alpha chain variable domain of TCR clone 184971 (TRAV3, TRAJ27)
CAVSDKAGKSTF

SEQ ID NO: 369942 - protein, 13 aa, Homo sapiens
  CDR3 for beta chain variable domain of TCR clone 184971 (TRBV6-5, TRBJ2-5)
CASSPQGGETQYF

SEQ ID NO: 369943 - protein, 12 aa, Homo sapiens
  CDR3 for alpha chain variable domain of TCR clone 184972 (TRAV36/DV7, TRAJ54)
CAVVRGALKLVF

SEQ ID NO: 369944 - protein, 18 aa, Homo sapiens
  CDR3 for beta chain variable domain of TCR clone 184972 (TRBV20-1, TRBJ2-3)
CSASGLAGGPGTTDTQYF

SEQ ID NO: 369945 - protein, 11 aa, Homo sapiens
  CDR3 for alpha chain variable domain of TCR clone 184973 (TRAV1-1, TRAJ23)
CAVRQGGKLIF

SEQ ID NO: 369946 - protein, 14 aa, Homo sapiens
  CDR3 for beta chain variable domain of TCR clone 184973 (TRBV7-8, TRBJ2-3)
CASSLEAGTDTEYF

SEQ ID NO: 369947 - protein, 14 aa, Homo sapiens
  CDR3 for alpha chain variable domain of TCR clone 184974 (TRAV12-2, TRAJ44)
CAVNPAGTASKLTF

SEQ ID NO: 369948 - protein, 14 aa, Homo sapiens
  CDR3 for beta chain variable domain of TCR clone 184974 (TRBV6-1, TRBJ2-7)
CASTRTGDYYEQYF

SEQ ID NO: 369949 - protein, 15 aa, Homo sapiens
  CDR3 for alpha chain variable domain of TCR clone 184975 (TRAV20, TRAJ4)
CAVEGSSGGYNKLIF

SEQ ID NO: 369950 - protein, 14 aa, Homo sapiens
  CDR3 for beta chain variable domain of TCR clone 184975 (TRBV7-8, TRBJ2-7)
CPSTLGGALGEQYF

SEQ ID NO: 369951 - protein, 12 aa, Homo sapiens
  CDR3 for alpha chain variable domain of TCR clone 184976 (TRAV12-3, TRAJ40)
CAMSSGTYKYIF

SEQ ID NO: 369952 - protein, 15 aa, Homo sapiens
  CDR3 for beta chain variable domain of TCR clone 184976 (TRBV7-3, TRBJ2-2)
CASSETGQGTEELFF

SEQ ID NO: 369953 - protein, 17 aa, Homo sapiens
  CDR3 for alpha chain variable domain of TCR clone 184977 (TRAV4, TRAJ18)
CLVGERSVGSTLGRLYF

SEQ ID NO: 369954 - protein, 14 aa, Homo sapiens
  CDR3 for beta chain variable domain of TCR clone 184977 (TRBV7-8, TRBJ2-7)
CASTFRGGPNEQYF

SEQ ID NO: 369955 - protein, 14 aa, Homo sapiens
  CDR3 for alpha chain variable domain of TCR clone 184978 (TRAV12-3, TRAJ40)
CAMSSGTYKYILEQ

SEQ ID NO: 369956 - protein, 15 aa, Homo sapiens
  CDR3 for beta chain variable domain of TCR clone 184978 (TRBV7-3, TRBJ2-2)
CASSETGQGTGELFF

SEQ ID NO: 369957 - protein, 15 aa, Homo sapiens
  CDR3 for alpha chain variable domain of TCR clone 184979 (TRAV8-3, TRAJ23)
CAVGDRYNQGGKLIF

SEQ ID NO: 369958 - protein, 14 aa, Homo sapiens
  CDR3 for beta chain variable domain of TCR clone 184979 (TRBV7-8, TRBJ2-3)
CASSLEAGTDTQYF

SEQ ID NO: 369959 - protein, 17 aa, Homo sapiens
  CDR3 for alpha chain variable domain of TCR clone 184980 (TRAV3, TRAJ42)
CAVRDRDYGGSQGNLIF

SEQ ID NO: 369960 - protein, 13 aa, Homo sapiens
  CDR3 for beta chain variable domain of TCR clone 184980 (TRBV20-1, TRBJ2-5)
RSARRGTGATQYF

SEQ ID NO: 369961 - protein, 14 aa, Homo sapiens
  CDR3 for alpha chain variable domain of TCR clone 184981 (TRAV26-1, TRAJ45)
CIVRVVGGADRLTF

SEQ ID NO: 369962 - protein, 16 aa, Homo sapiens
  CDR3 for beta chain variable domain of TCR clone 184981 (TRBV7-9, TRBJ1-1)
CASSLTQVRSNTEDFF

SEQ ID NO: 369963 - protein, 13 aa, Homo sapiens
  CDR3 for alpha chain variable domain of TCR clone 184982 (TRAV25, TRAJ30)
CAGRVDRDDKIIF

SEQ ID NO: 369964 - protein, 17 aa, Homo sapiens
  CDR3 for beta chain variable domain of TCR clone 184982 (TRBV7-9, TRBJ2-6)
CASSFGAGYSGANVLSF

SEQ ID NO: 369965 - protein, 16 aa, Homo sapiens
  CDR3 for alpha chain variable domain of TCR clone 184983 (TRAV16, TRAJ21)
CACGWATTSTNFTLDL

SEQ ID NO: 369966 - protein, 15 aa, Homo sapiens
  CDR3 for beta chain variable domain of TCR clone 184983 (TRBV19, TRBJ2-1)
CASSIQATSYNEQFS

SEQ ID NO: 369967 - protein, 12 aa, Homo sapiens
  CDR3 for alpha chain variable domain of TCR clone 184984 (TRAV22, TRAJ29)
CAPPSGNTPLVF

SEQ ID NO: 369968 - protein, 14 aa, Homo sapiens
  CDR3 for beta chain variable domain of TCR clone 184984 (TRBV11-2, TRBJ2-7)
CASGLGAGAYEQYF

SEQ ID NO: 369969 - protein, 14 aa, Homo sapiens
  CDR3 for alpha chain variable domain of TCR clone 184985 (TRAV35, TRAJ22)
CAGLRPGSASQLTF

SEQ ID NO: 369970 - protein, 14 aa, Homo sapiens
  CDR3 for beta chain variable domain of TCR clone 184985 (TRBV4-1, TRBJ2-7)
CASSPVAGGDEQYF

SEQ ID NO: 369971 - protein, 16 aa, Homo sapiens
  CDR3 for alpha chain variable domain of TCR clone 184986 (TRAV3, TRAJ37)
CAVRGKGSGNTGKLIF

SEQ ID NO: 369972 - protein, 14 aa, Homo sapiens
  CDR3 for beta chain variable domain of TCR clone 184986 (TRBV20-1, TRBJ2-3)
CSARGGTSTDPQYF

SEQ ID NO: 369973 - protein, 14 aa, Homo sapiens
  CDR3 for alpha chain variable domain of TCR clone 184987 (TRAV1-2, TRAJ16)
CAVNRFSDVQKLLF

SEQ ID NO: 369974 - protein, 16 aa, Homo sapiens
  CDR3 for beta chain variable domain of TCR clone 184987 (TRBV13, TRBJ2-2)
CASSPRTGEHTGELFF

SEQ ID NO: 369975 - protein, 17 aa, Homo sapiens
  CDR3 for alpha chain variable domain of TCR clone 184988 (TRAV3, TRAJ6)
CAVREGPRAGGSYIPTF

SEQ ID NO: 369976 - protein, 16 aa, Homo sapiens
  CDR3 for beta chain variable domain of TCR clone 184988 (TRBV7-2, TRBJ2-7)
CASSPKTSFYESTSGR

SEQ ID NO: 369977 - protein, 18 aa, Homo sapiens
  CDR3 for alpha chain variable domain of TCR clone 184989 (TRAV26-1, TRAJ23)
FIVRVGLEVWNQGGKPIF

SEQ ID NO: 369978 - protein, 16 aa, Homo sapiens
  CDR3 for beta chain variable domain of TCR clone 184989 (TRBV12-4, TRBJ2-5)
CASSFFVRGRQETQYF

SEQ ID NO: 369979 - protein, 15 aa, Homo sapiens
  CDR3 for alpha chain variable domain of TCR clone 184990 (TRAV12-3, TRAJ18)
CAMSGGGSTLGRLYF

SEQ ID NO: 369980 - protein, 15 aa, Homo sapiens
  CDR3 for beta chain variable domain of TCR clone 184990 (TRBV7-3, TRBJ2-1)
CASSLSSGSFDEQFF

SEQ ID NO: 369981 - protein, 14 aa, Homo sapiens
  CDR3 for alpha chain variable domain of TCR clone 184991 (TRAV9-2, TRAJ39)
CALYIYNAGNMLTF

SEQ ID NO: 369982 - protein, 16 aa, Homo sapiens
  CDR3 for beta chain variable domain of TCR clone 184991 (TRBV15, TRBJ2-7)
CATSRDGGIPSYEQYF

SEQ ID NO: 369983 - protein, 12 aa, Homo sapiens
  CDR3 for alpha chain variable domain of TCR clone 184992 (TRAV22, TRAJ22)
CAPGGSARQLTF

SEQ ID NO: 369984 - protein, 11 aa, Homo sapiens
  CDR3 for beta chain variable domain of TCR clone 184992 (TRBV5-5, TRBJ2-3)
CASSLTDTQYF

SEQ ID NO: 369985 - protein, 14 aa, Homo sapiens
  CDR3 for alpha chain variable domain of TCR clone 184993 (TRAV21, TRAJ15)
CRSYHNQAGTALIF

SEQ ID NO: 369986 - protein, 14 aa, Homo sapiens
  CDR3 for beta chain variable domain of TCR clone 184993 (TRBV25-1, TRBJ1-1)
CASTHLGGNTEAFF

SEQ ID NO: 369987 - protein, 12 aa, Homo sapiens
  CDR3 for alpha chain variable domain of TCR clone 184994 (TRAV12-1, TRAJ39)
CVVRESGNMLTF

SEQ ID NO: 369988 - protein, 15 aa, Homo sapiens
  CDR3 for beta chain variable domain of TCR clone 184994 (TRBV5-1, TRBJ2-2)
CASSLRQGDTGELFF

SEQ ID NO: 369989 - protein, 15 aa, Homo sapiens
  CDR3 for alpha chain variable domain of TCR clone 184995 (TRAV3, TRAJ9)
CAVRDSNTGGFKTIF

SEQ ID NO: 369990 - protein, 16 aa, Homo sapiens
  CDR3 for beta chain variable domain of TCR clone 184995 (TRBV5-4, TRBJ2-3)
CASQQPGAGGADTQYF

SEQ ID NO: 369991 - protein, 14 aa, Homo sapiens
  CDR3 for alpha chain variable domain of TCR clone 184996 (TRAV16, TRAJ33)
CALSAMDTNYQLIW

SEQ ID NO: 369992 - protein, 16 aa, Homo sapiens
  CDR3 for beta chain variable domain of TCR clone 184996 (TRBV25-1, TRBJ2-7)
CASSELTGGGIYEQYF

SEQ ID NO: 369993 - protein, 13 aa, Homo sapiens
  CDR3 for alpha chain variable domain of TCR clone 184997 (TRAV16, TRAJ28)
CALTGAGSYQLTF

SEQ ID NO: 369994 - protein, 16 aa, Homo sapiens
  CDR3 for beta chain variable domain of TCR clone 184997 (TRBV28, TRBJ1-5)
CASSLTGQGWNKPQHF

SEQ ID NO: 369995 - protein, 16 aa, Homo sapiens
  CDR3 for alpha chain variable domain of TCR clone 184998 (TRAV26-2, TRAJ45)
CTTASPIGGGADGLTF

SEQ ID NO: 369996 - protein, 14 aa, Homo sapiens
  CDR3 for beta chain variable domain of TCR clone 184998 (TRBV19, TRBJ1-2)
CASSLQGQAYGYTF

SEQ ID NO: 369997 - protein, 15 aa, Homo sapiens
  CDR3 for alpha chain variable domain of TCR clone 184999 (TRAV36/DV7, TRAJ53)
CAVEGSGGSNYKLTF

SEQ ID NO: 369998 - protein, 16 aa, Homo sapiens
  CDR3 for beta chain variable domain of TCR clone 184999 (TRBV27, TRBJ2-2)
CASSLSGFWVTGELVF

SEQ ID NO: 369999 - protein, 17 aa, Homo sapiens
  CDR3 for alpha chain variable domain of TCR clone 185000 (TRAV13-1, TRAJ31)
CAPRDRLMFGDGTQLVV

SEQ ID NO: 370000 - protein, 14 aa, Homo sapiens
  CDR3 for beta chain variable domain of TCR clone 185000 (TRBV11-2, TRBJ2-5)
CASSRTGGIETQYF

SEQ ID NO: 370001 - protein, 12 aa, Homo sapiens
  CDR3 for alpha chain variable domain of TCR clone 185001 (TRAV35, TRAJ30)
CAGLNRDDKIIF

SEQ ID NO: 370002 - protein, 15 aa, Homo sapiens
  CDR3 for beta chain variable domain of TCR clone 185001 (TRBV18, TRBJ2-3)
CASSPLAGETDTQYS

SEQ ID NO: 370003 - protein, 11 aa, Homo sapiens
  CDR3 for alpha chain variable domain of TCR clone 185002 (TRAV2, TRAJ13)
CASVGYQKVTF

SEQ ID NO: 370004 - protein, 17 aa, Homo sapiens
  CDR3 for beta chain variable domain of TCR clone 185002 (TRBV5-1, TRBJ2-5)
CASSLLGLAANQETQYF

SEQ ID NO: 370005 - protein, 15 aa, Homo sapiens
  CDR3 for alpha chain variable domain of TCR clone 185003 (TRAV23/DV6, TRAJ30)
CAASSQESRDDKIIF

SEQ ID NO: 370006 - protein, 14 aa, Homo sapiens
  CDR3 for beta chain variable domain of TCR clone 185003 (TRBV7-3, TRBJ2-1)
CASSLSGSYNEQFF

SEQ ID NO: 370007 - protein, 15 aa, Homo sapiens
  CDR3 for alpha chain variable domain of TCR clone 185004 (TRAV8-4, TRAJ36)
CAVRKSWTGANNLFF

SEQ ID NO: 370008 - protein, 17 aa, Homo sapiens
  CDR3 for beta chain variable domain of TCR clone 185004 (TRBV3-1, TRBJ2-2)
CASSQDSQGPKTGELFF

SEQ ID NO: 370009 - protein, 12 aa, Homo sapiens
  CDR3 for alpha chain variable domain of TCR clone 185005 (TRAV3, TRAJ31)
CAVRDGNARLMF

SEQ ID NO: 370010 - protein, 17 aa, Homo sapiens
  CDR3 for beta chain variable domain of TCR clone 185005 (TRBV7-8, TRBJ2-6)
CASSAGTGGAGANVLTF

SEQ ID NO: 370011 - protein, 13 aa, Homo sapiens
  CDR3 for alpha chain variable domain of TCR clone 185006 (TRAV35, TRAJ42)
CAGFPGSQGNLIF

SEQ ID NO: 370012 - protein, 13 aa, Homo sapiens
  CDR3 for beta chain variable domain of TCR clone 185006 (TRBV10-3, TRBJ2-7)
CASKLTVNYEQYF

SEQ ID NO: 370013 - protein, 17 aa, Homo sapiens
  CDR3 for alpha chain variable domain of TCR clone 185007 (TRAV38-1, TRAJ45)
CAFMRVYSGGGADGLTF

SEQ ID NO: 370014 - protein, 15 aa, Homo sapiens
  CDR3 for beta chain variable domain of TCR clone 185007 (TRBV24-1, TRBJ1-4)
CATSDPQGADEKLFF

SEQ ID NO: 370015 - protein, 11 aa, Homo sapiens
  CDR3 for alpha chain variable domain of TCR clone 185008 (TRAV26-1, TRAJ27)
CIDPNAGKLTF

SEQ ID NO: 370016 - protein, 18 aa, Homo sapiens
  CDR3 for beta chain variable domain of TCR clone 185008 (TRBV7-9, TRBJ2-6)
CASSFPGAGISGANVLTF

SEQ ID NO: 370017 - protein, 18 aa, Homo sapiens
  CDR3 for alpha chain variable domain of TCR clone 185009 (TRAV13-1, TRAJ52)
CAAKNPNAGGTSYGKTTF

SEQ ID NO: 370018 - protein, 14 aa, Homo sapiens
  CDR3 for beta chain variable domain of TCR clone 185009 (TRBV7-3, TRBJ2-1)
CASSLAGGTNEQFF

SEQ ID NO: 370019 - protein, 13 aa, Homo sapiens
  CDR3 for alpha chain variable domain of TCR clone 185010 (TRAV27, TRAJ27)
CAGGITNAGKSTF

SEQ ID NO: 370020 - protein, 13 aa, Homo sapiens
  CDR3 for beta chain variable domain of TCR clone 185010 (TRBV7-3, TRBJ1-1)
CASSQDWGAEAFF

SEQ ID NO: 370021 - protein, 15 aa, Homo sapiens
  CDR3 for alpha chain variable domain of TCR clone 185011 (TRAV1-2, TRAJ35)
CAVRDREGFGNVLHC

SEQ ID NO: 370022 - protein, 14 aa, Homo sapiens
  CDR3 for beta chain variable domain of TCR clone 185011 (TRBV25-1, TRBJ1-1)
CASTHLGWNTEAFF

SEQ ID NO: 370023 - protein, 15 aa, Homo sapiens
  CDR3 for alpha chain variable domain of TCR clone 185012 (TRAV21, TRAJ53)
CATLNSGGSNYKLTF

SEQ ID NO: 370024 - protein, 16 aa, Homo sapiens
  CDR3 for beta chain variable domain of TCR clone 185012 (TRBV20-1, TRBJ2-2)
SASGSGQGGLTGELFF

SEQ ID NO: 370025 - protein, 12 aa, Homo sapiens
  CDR3 for alpha chain variable domain of TCR clone 185013 (TRAV12-1, TRAJ40)
CVFYSGTYKYIF

SEQ ID NO: 370026 - protein, 18 aa, Homo sapiens
  CDR3 for beta chain variable domain of TCR clone 185013 (TRBV7-9, TRBJ2-7)
CASSLTTSGSRTWYEQYF

SEQ ID NO: 370027 - protein, 16 aa, Homo sapiens
  CDR3 for alpha chain variable domain of TCR clone 185014 (TRAV2, TRAJ20)
TTVLWSFRSNDYKLSF

SEQ ID NO: 370028 - protein, 14 aa, Homo sapiens
  CDR3 for beta chain variable domain of TCR clone 185014 (TRBV12-4, TRBJ1-1)
CASSLGTGGTEAFF

SEQ ID NO: 370029 - protein, 14 aa, Homo sapiens
  CDR3 for alpha chain variable domain of TCR clone 185015 (TRAV20, TRAJ22)
CAVQVSGSARQLTF

SEQ ID NO: 370030 - protein, 15 aa, Homo sapiens
  CDR3 for beta chain variable domain of TCR clone 185015 (TRBV9, TRBJ2-5)
CASSARLGSGETQYF

SEQ ID NO: 370031 - protein, 14 aa, Homo sapiens
  CDR3 for alpha chain variable domain of TCR clone 185016 (TRAV12-1, TRAJ22)
CVVTTSGSARQLTF

SEQ ID NO: 370032 - protein, 16 aa, Homo sapiens
  CDR3 for beta chain variable domain of TCR clone 185016 (TRBV6-6, TRBJ2-1)
CASSLLSESSYNEQFF

SEQ ID NO: 370033 - protein, 10 aa, Homo sapiens
  CDR3 for alpha chain variable domain of TCR clone 185017 (TRAV8-4, TRAJ39)
CAVSGNMLTF

SEQ ID NO: 370034 - protein, 15 aa, Homo sapiens
  CDR3 for beta chain variable domain of TCR clone 185017 (TRBV5-1, TRBJ2-3)
CASSSTSGSTYTQYF

SEQ ID NO: 370035 - protein, 13 aa, Homo sapiens
  CDR3 for alpha chain variable domain of TCR clone 185018 (TRAV8-4, TRAJ49)
CAVTEGSGNQFYF

SEQ ID NO: 370036 - protein, 14 aa, Homo sapiens
  CDR3 for beta chain variable domain of TCR clone 185018 (TRBV7-9, TRBJ2-3)
CASSLEDGTDTQYF

SEQ ID NO: 370037 - protein, 14 aa, Homo sapiens
  CDR3 for alpha chain variable domain of TCR clone 185019 (TRAV17, TRAJ57)
CATDPQGGSEKLFF

SEQ ID NO: 370038 - protein, 18 aa, Homo sapiens
  CDR3 for beta chain variable domain of TCR clone 185019 (TRBV20-1, TRBJ2-3)
CSASGLAGGPGTTDTQYF

SEQ ID NO: 370039 - protein, 14 aa, Homo sapiens
  CDR3 for alpha chain variable domain of TCR clone 185020 (TRAV29/DV5, TRAJ36)
CAARHKTGANNLFF

SEQ ID NO: 370040 - protein, 12 aa, Homo sapiens
  CDR3 for beta chain variable domain of TCR clone 185020 (TRBV11-2, TRBJ2-2)
CASSLGGGELFF

SEQ ID NO: 370041 - protein, 14 aa, Homo sapiens
  CDR3 for alpha chain variable domain of TCR clone 185021 (TRAV12-2, TRAJ13)
CAVKQTGGYQKVTF

SEQ ID NO: 370042 - protein, 13 aa, Homo sapiens
  CDR3 for beta chain variable domain of TCR clone 185021 (TRBV27, TRBJ2-2)
CASSQENTGELFF

SEQ ID NO: 370043 - protein, 13 aa, Homo sapiens
  CDR3 for alpha chain variable domain of TCR clone 185022 (TRAV34, TRAJ33)
CGADMNSNYQLIW

SEQ ID NO: 370044 - protein, 16 aa, Homo sapiens
  CDR3 for beta chain variable domain of TCR clone 185022 (TRBV29-1, TRBJ2-7)
CSVEDAEDGTAYEQYF

SEQ ID NO: 370045 - protein, 10 aa, Homo sapiens
  CDR3 for alpha chain variable domain of TCR clone 185023 (TRAV13-1, TRAJ7)
LIGGNNRIAF

SEQ ID NO: 370046 - protein, 16 aa, Homo sapiens
  CDR3 for beta chain variable domain of TCR clone 185023 (TRBV4-1, TRBJ1-2)
CASSQDAGQVLYGYTF

SEQ ID NO: 370047 - protein, 18 aa, Homo sapiens
  CDR3 for alpha chain variable domain of TCR clone 185024 (TRAV21, TRAJ52)
CAVRPSPAGGTSYGKLTF

SEQ ID NO: 370048 - protein, 17 aa, Homo sapiens
  CDR3 for beta chain variable domain of TCR clone 185024 (TRBV4-1, TRBJ1-4)
CASSQEGHRGVEEKLFF

SEQ ID NO: 370049 - protein, 13 aa, Homo sapiens
  CDR3 for alpha chain variable domain of TCR clone 185025 (TRAV21, TRAJ57)
CAVTQGGSQKLVF

SEQ ID NO: 370050 - protein, 15 aa, Homo sapiens
  CDR3 for beta chain variable domain of TCR clone 185025 (TRBV5-1, TRBJ1-1)
CASSSTTGTNTEAFF

SEQ ID NO: 370051 - protein, 12 aa, Homo sapiens
  CDR3 for alpha chain variable domain of TCR clone 185026 (TRAV8-3, TRAJ26)
CAGDNYGQNFAF

SEQ ID NO: 370052 - protein, 12 aa, Homo sapiens
  CDR3 for beta chain variable domain of TCR clone 185026 (TRBV11-2, TRBJ2-1)
CASSPGNNEQFF

SEQ ID NO: 370053 - protein, 15 aa, Homo sapiens
  CDR3 for alpha chain variable domain of TCR clone 185027 (TRAV34, TRAJ38)
CGADFTPGNNRKLIW

SEQ ID NO: 370054 - protein, 14 aa, Homo sapiens
  CDR3 for beta chain variable domain of TCR clone 185027 (TRBV11-2, TRBJ2-3)
CASSLGAGANTQYF

SEQ ID NO: 370055 - protein, 13 aa, Homo sapiens
  CDR3 for alpha chain variable domain of TCR clone 185028 (TRAV12-2, TRAJ42)
CAVKRGSQGDLIF

SEQ ID NO: 370056 - protein, 16 aa, Homo sapiens
  CDR3 for beta chain variable domain of TCR clone 185028 (TRBV9, TRBJ2-2)
CASSAMGKGNTGELFF

SEQ ID NO: 370057 - protein, 12 aa, Homo sapiens
  CDR3 for alpha chain variable domain of TCR clone 185029 (TRAV17, TRAJ20)
CATDSNDYKLSF

SEQ ID NO: 370058 - protein, 14 aa, Homo sapiens
  CDR3 for beta chain variable domain of TCR clone 185029 (TRBV4-1, TRBJ2-2)
CASSQAVNTGELFF

SEQ ID NO: 370059 - protein, 14 aa, Homo sapiens
  CDR3 for alpha chain variable domain of TCR clone 185030 (TRAV2, TRAJ37)
CAVDFTSNTGKLIV

SEQ ID NO: 370060 - protein, 13 aa, Homo sapiens
  CDR3 for beta chain variable domain of TCR clone 185030 (TRBV7-8, TRBJ2-7)
CTSSFAGLYEQYF

SEQ ID NO: 370061 - protein, 14 aa, Homo sapiens
  CDR3 for alpha chain variable domain of TCR clone 185031 (TRAV35, TRAJ22)
CAGLRPGSARHLTF

SEQ ID NO: 370062 - protein, 13 aa, Homo sapiens
  CDR3 for beta chain variable domain of TCR clone 185031 (TRBV20-1, TRBJ2-7)
CSATHTSGYEQYF

SEQ ID NO: 370063 - protein, 14 aa, Homo sapiens
  CDR3 for alpha chain variable domain of TCR clone 185032 (TRAV27, TRAJ49)
CAGRPEGTGNPFYF

SEQ ID NO: 370064 - protein, 16 aa, Homo sapiens
  CDR3 for beta chain variable domain of TCR clone 185032 (TRBV12-5, TRBJ2-5)
CASGPRTSGNQETQYF

SEQ ID NO: 370065 - protein, 15 aa, Homo sapiens
  CDR3 for alpha chain variable domain of TCR clone 185033 (TRAV3, TRAJ4)
CAVRDGTGGYNKLIF

SEQ ID NO: 370066 - protein, 15 aa, Homo sapiens
  CDR3 for beta chain variable domain of TCR clone 185033 (TRBV28, TRBJ2-7)
CASSHGGRGFYEQYF

SEQ ID NO: 370067 - protein, 15 aa, Homo sapiens
  CDR3 for alpha chain variable domain of TCR clone 185034 (TRAV35, TRAJ58)
CAGRRQETSGSRLTS

SEQ ID NO: 370068 - protein, 13 aa, Homo sapiens
  CDR3 for beta chain variable domain of TCR clone 185034 (TRBV11-2, TRBJ1-1)
CASSINTEASLDK

SEQ ID NO: 370069 - protein, 14 aa, Homo sapiens
  CDR3 for alpha chain variable domain of TCR clone 185035 (TRAV1-1, TRAJ27)
CAVIYNTNAGKSTF

SEQ ID NO: 370070 - protein, 15 aa, Homo sapiens
  CDR3 for beta chain variable domain of TCR clone 185035 (TRBV4-1, TRBJ1-4)
CASSDTGGTNEKLFF

SEQ ID NO: 370071 - protein, 17 aa, Homo sapiens
  CDR3 for alpha chain variable domain of TCR clone 185036 (TRAV3, TRAJ6)
CAVRDGPRAGGNYIPTF

SEQ ID NO: 370072 - protein, 13 aa, Homo sapiens
  CDR3 for beta chain variable domain of TCR clone 185036 (TRBV20-1, TRBJ1-6)
CSAPLGVGSPLHF

SEQ ID NO: 370073 - protein, 14 aa, Homo sapiens
  CDR3 for alpha chain variable domain of TCR clone 185037 (TRAV12-3, TRAJ56)
CAMSVTGANSKLTF

SEQ ID NO: 370074 - protein, 16 aa, Homo sapiens
  CDR3 for beta chain variable domain of TCR clone 185037 (TRBV6-3, TRBJ2-2)
CASSSPDRGDTGELFF

SEQ ID NO: 370075 - protein, 12 aa, Homo sapiens
  CDR3 for alpha chain variable domain of TCR clone 185038 (TRAV3, TRAJ43)
CAVIDPNNYMRF

SEQ ID NO: 370076 - protein, 15 aa, Homo sapiens
  CDR3 for beta chain variable domain of TCR clone 185038 (TRBV27, TRBJ1-5)
CASSLGTGFDQPQHF

SEQ ID NO: 370077 - protein, 18 aa, Homo sapiens
  CDR3 for alpha chain variable domain of TCR clone 185039 (TRAV12-3, TRAJ52)
CAMSRTNAGGTSYGKLTF

SEQ ID NO: 370078 - protein, 13 aa, Homo sapiens
  CDR3 for beta chain variable domain of TCR clone 185039 (TRBV19, TRBJ2-5)
CASSIPYGETQYF

SEQ ID NO: 370079 - protein, 16 aa, Homo sapiens
  CDR3 for alpha chain variable domain of TCR clone 185040 (TRAV30, TRAJ24)
CGTEIMDADSWGKFQF

SEQ ID NO: 370080 - protein, 15 aa, Homo sapiens
  CDR3 for beta chain variable domain of TCR clone 185040 (TRBV28, TRBJ2-1)
CASSIIAGGRSEQFF

SEQ ID NO: 370081 - protein, 15 aa, Homo sapiens
  CDR3 for alpha chain variable domain of TCR clone 185041 (TRAV13-1, TRAJ8)
CAASIPNTGFQKLVF

SEQ ID NO: 370082 - protein, 14 aa, Homo sapiens
  CDR3 for beta chain variable domain of TCR clone 185041 (TRBV4-2, TRBJ2-1)
CASGLDRAYNEQFF

SEQ ID NO: 370083 - protein, 12 aa, Homo sapiens
  CDR3 for alpha chain variable domain of TCR clone 185042 (TRAV3, TRAJ26)
CAVRDYGQNVVF

SEQ ID NO: 370084 - protein, 16 aa, Homo sapiens
  CDR3 for beta chain variable domain of TCR clone 185042 (TRBV11-2, TRBJ1-2)
CASSPSGREANYGYTF

SEQ ID NO: 370085 - protein, 13 aa, Homo sapiens
  CDR3 for alpha chain variable domain of TCR clone 185043 (TRAV35, TRAJ44)
CAGLSGTASKLTF

SEQ ID NO: 370086 - protein, 16 aa, Homo sapiens
  CDR3 for beta chain variable domain of TCR clone 185043 (TRBV7-2, TRBJ2-7)
CASSFPLAGGPLEQYF

SEQ ID NO: 370087 - protein, 13 aa, Homo sapiens
  CDR3 for alpha chain variable domain of TCR clone 185044 (TRAV13-2, TRAJ48)
CAEMDFGTEKLTF

SEQ ID NO: 370088 - protein, 15 aa, Homo sapiens
  CDR3 for beta chain variable domain of TCR clone 185044 (TRBV7-9, TRBJ1-6)
CASSSPVRGNSPLHF

SEQ ID NO: 370089 - protein, 14 aa, Homo sapiens
  CDR3 for alpha chain variable domain of TCR clone 185045 (TRAV12-2, TRAJ17)
CAVLFKAAGNKLTF

SEQ ID NO: 370090 - protein, 14 aa, Homo sapiens
  CDR3 for beta chain variable domain of TCR clone 185045 (TRBV19, TRBJ2-1)
CAGPAFVLSGEQFF

SEQ ID NO: 370091 - protein, 21 aa, Homo sapiens
  CDR3 for alpha chain variable domain of TCR clone 185046 (TRAV1-1, TRAJ6)
CLLLLRCERLERTGGSYIPTF

SEQ ID NO: 370092 - protein, 13 aa, Homo sapiens
  CDR3 for beta chain variable domain of TCR clone 185046 (TRBV7-9, TRBJ1-2)
CASSLKQNYGYTF

SEQ ID NO: 370093 - protein, 12 aa, Homo sapiens
  CDR3 for alpha chain variable domain of TCR clone 185047 (TRAV2, TRAJ5)
CALDTGRRALTF

SEQ ID NO: 370094 - protein, 19 aa, Homo sapiens
  CDR3 for beta chain variable domain of TCR clone 185047 (TRBV5-1, TRBJ2-3)
CASSLWLAGGITTTDTQYF

SEQ ID NO: 370095 - protein, 15 aa, Homo sapiens
  CDR3 for alpha chain variable domain of TCR clone 185048 (TRAV17, TRAJ57)
CATGPSQGGSEKLVF

SEQ ID NO: 370096 - protein, 14 aa, Homo sapiens
  CDR3 for beta chain variable domain of TCR clone 185048 (TRBV12-5, TRBJ2-5)
CASGSRTHQETQFF

SEQ ID NO: 370097 - protein, 14 aa, Homo sapiens
  CDR3 for alpha chain variable domain of TCR clone 185049 (TRAV38-2/DV8, TRAJ28)
CAFTSGAGSYQLTF

SEQ ID NO: 370098 - protein, 15 aa, Homo sapiens
  CDR3 for beta chain variable domain of TCR clone 185049 (TRBV3-1, TRBJ2-5)
CASSANLGGPETQYF

SEQ ID NO: 370099 - protein, 14 aa, Homo sapiens
  CDR3 for alpha chain variable domain of TCR clone 185050 (TRAV1-2, TRAJ16)
CAVNRFSGGQKLLF

SEQ ID NO: 370100 - protein, 15 aa, Homo sapiens
  CDR3 for beta chain variable domain of TCR clone 185050 (TRBV20-1, TRBJ1-1)
CSASRGVTGNTEAFF

SEQ ID NO: 370101 - protein, 14 aa, Homo sapiens
  CDR3 for alpha chain variable domain of TCR clone 185051 (TRAV12-2, TRAJ40)
CAVKIPSGTYKYIF

SEQ ID NO: 370102 - protein, 16 aa, Homo sapiens
  CDR3 for beta chain variable domain of TCR clone 185051 (TRBV14, TRBJ2-7)
CASSPDSGTVAREQYF

SEQ ID NO: 370103 - protein, 16 aa, Homo sapiens
  CDR3 for alpha chain variable domain of TCR clone 185052 (TRAV30, TRAJ24)
CGTEIVDVDSWGKFKF

SEQ ID NO: 370104 - protein, 14 aa, Homo sapiens
  CDR3 for beta chain variable domain of TCR clone 185052 (TRBV7-9, TRBJ2-4)
CASSLAMGGNIQYF

SEQ ID NO: 370105 - protein, 16 aa, Homo sapiens
  CDR3 for alpha chain variable domain of TCR clone 185053 (TRAV3, TRAJ37)
CAVRPHGSGNTGKLIF

SEQ ID NO: 370106 - protein, 15 aa, Homo sapiens
  CDR3 for beta chain variable domain of TCR clone 185053 (TRBV10-2, TRBJ2-6)
CASSEQGTGANVLTF

SEQ ID NO: 370107 - protein, 14 aa, Homo sapiens
  CDR3 for alpha chain variable domain of TCR clone 185054 (TRAV12-1, TRAJ12)
CVVTRMDSSYKLIF

SEQ ID NO: 370108 - protein, 13 aa, Homo sapiens
  CDR3 for beta chain variable domain of TCR clone 185054 (TRBV20-1, TRBJ1-1)
SSARGGGNTEAFF

SEQ ID NO: 370109 - protein, 12 aa, Homo sapiens
  CDR3 for alpha chain variable domain of TCR clone 185055 (TRAV3, TRAJ20)
CAVRDPDYKLSF

SEQ ID NO: 370110 - protein, 13 aa, Homo sapiens
  CDR3 for beta chain variable domain of TCR clone 185055 (TRBV9, TRBJ2-1)
CASSVGQGSEQFF

SEQ ID NO: 370111 - protein, 10 aa, Homo sapiens
  CDR3 for alpha chain variable domain of TCR clone 185056 (TRAV8-4, TRAJ43)
CAVSAEDMRF

SEQ ID NO: 370112 - protein, 15 aa, Homo sapiens
  CDR3 for beta chain variable domain of TCR clone 185056 (TRBV5-1, TRBJ2-3)
CASSVTSESTDTQYF

SEQ ID NO: 370113 - protein, 15 aa, Homo sapiens
  CDR3 for alpha chain variable domain of TCR clone 185057 (TRAV17, TRAJ57)
CATGPSQGGSEKLVF

SEQ ID NO: 370114 - protein, 15 aa, Homo sapiens
  CDR3 for beta chain variable domain of TCR clone 185057 (TRBV7-3, TRBJ2-2)
CASSETGRGTGELFF

SEQ ID NO: 370115 - protein, 14 aa, Homo sapiens
  CDR3 for alpha chain variable domain of TCR clone 185058 (TRAV1-1, TRAJ27)
CAVIYNTNAGKSTF

SEQ ID NO: 370116 - protein, 15 aa, Homo sapiens
  CDR3 for beta chain variable domain of TCR clone 185058 (TRBV7-2, TRBJ2-1)
CARSSGLAGGNEQFF

SEQ ID NO: 370117 - protein, 15 aa, Homo sapiens
  CDR3 for alpha chain variable domain of TCR clone 185059 (TRAV23/DV6, TRAJ7)
CAASVGRSGNNRLAC

SEQ ID NO: 370118 - protein, 15 aa, Homo sapiens
  CDR3 for beta chain variable domain of TCR clone 185059 (TRBV12-4, TRBJ1-6)
CASSLLGGSNSPLHF

SEQ ID NO: 370119 - protein, 17 aa, Homo sapiens
  CDR3 for alpha chain variable domain of TCR clone 185060 (TRAV8-3, TRAJ40)
CAAPSLAQEPTDTSLEQ

SEQ ID NO: 370120 - protein, 12 aa, Homo sapiens
  CDR3 for beta chain variable domain of TCR clone 185060 (TRBV11-2, TRBJ2-2)
CASSLGGGELFF

SEQ ID NO: 370121 - protein, 12 aa, Homo sapiens
  CDR3 for alpha chain variable domain of TCR clone 185061 (TRAV12-2, TRAJ10)
WGVTGGGNKLTL

SEQ ID NO: 370122 - protein, 14 aa, Homo sapiens
  CDR3 for beta chain variable domain of TCR clone 185061 (TRBV12-4, TRBJ1-4)
CASSRQGANEKLFF

SEQ ID NO: 370123 - protein, 18 aa, Homo sapiens
  CDR3 for alpha chain variable domain of TCR clone 185062 (TRAV26-1, TRAJ52)
CIVRVAGAGGTSHGKLTF

SEQ ID NO: 370124 - protein, 13 aa, Homo sapiens
  CDR3 for beta chain variable domain of TCR clone 185062 (TRBV7-8, TRBJ1-2)
CASSAQSYYGYTF

SEQ ID NO: 370125 - protein, 17 aa, Homo sapiens
  CDR3 for alpha chain variable domain of TCR clone 185063 (TRAV23/DV6, TRAJ57)
CAASSTLSQGGSEKLVF

SEQ ID NO: 370126 - protein, 14 aa, Homo sapiens
  CDR3 for beta chain variable domain of TCR clone 185063 (TRBV25-1, TRBJ1-1)
CASTHLGGYTEAFV

SEQ ID NO: 370127 - protein, 14 aa, Homo sapiens
  CDR3 for alpha chain variable domain of TCR clone 185064 (TRAV26-1, TRAJ8)
IASSESTGFQKLVF

SEQ ID NO: 370128 - protein, 13 aa, Homo sapiens
  CDR3 for beta chain variable domain of TCR clone 185064 (TRBV19, TRBJ1-2)
CASSQGQVYGYTF

SEQ ID NO: 370129 - protein, 17 aa, Homo sapiens
  CDR3 for alpha chain variable domain of TCR clone 185065 (TRAV8-6, TRAJ58)
WAVSSWVGETSGARLTF

SEQ ID NO: 370130 - protein, 14 aa, Homo sapiens
  CDR3 for beta chain variable domain of TCR clone 185065 (TRBV4-2, TRBJ2-1)
CASGLDRAYNEQFF

SEQ ID NO: 370131 - protein, 12 aa, Homo sapiens
  CDR3 for alpha chain variable domain of TCR clone 185066 (TRAV8-3, TRAJ20)
CAVDFNDYKLSF

SEQ ID NO: 370132 - protein, 17 aa, Homo sapiens
  CDR3 for beta chain variable domain of TCR clone 185066 (TRBV4-3, TRBJ1-2)
CASSSRLQAGGSVGYTF

SEQ ID NO: 370133 - protein, 16 aa, Homo sapiens
  CDR3 for alpha chain variable domain of TCR clone 185067 (TRAV3, TRAJ18)
CAVRDGRGSTLGRLYF

SEQ ID NO: 370134 - protein, 17 aa, Homo sapiens
  CDR3 for beta chain variable domain of TCR clone 185067 (TRBV5-1, TRBJ2-3)
CASSKIVLADRTDTQYF

SEQ ID NO: 370135 - protein, 16 aa, Homo sapiens
  CDR3 for alpha chain variable domain of TCR clone 185068 (TRAV3, TRAJ4)
CAVRAFFSGGYNKLIF

SEQ ID NO: 370136 - protein, 12 aa, Homo sapiens
  CDR3 for beta chain variable domain of TCR clone 185068 (TRBV11-2, TRBJ2-5)
CASSPPAETQYF

SEQ ID NO: 370137 - protein, 12 aa, Homo sapiens
  CDR3 for alpha chain variable domain of TCR clone 185069 (TRAV16, TRAJ15)
CALKPGRNCSDL

SEQ ID NO: 370138 - protein, 14 aa, Homo sapiens
  CDR3 for beta chain variable domain of TCR clone 185069 (TRBV25-1, TRBJ1-1)
CASTHLGGNTEAFF

SEQ ID NO: 370139 - protein, 22 aa, Homo sapiens
  CDR3 for alpha chain variable domain of TCR clone 185070 (TRAV2, TRAJ22)
CSSLLILQVREADAAEQRQLTF

SEQ ID NO: 370140 - protein, 16 aa, Homo sapiens
  CDR3 for beta chain variable domain of TCR clone 185070 (TRBV2, TRBJ2-5)
CASSETQGVGEETQYF

SEQ ID NO: 370141 - protein, 14 aa, Homo sapiens
  CDR3 for alpha chain variable domain of TCR clone 185071 (TRAV12-2, TRAJ17)
CAVNIKAAGNKLTF

SEQ ID NO: 370142 - protein, 14 aa, Homo sapiens
  CDR3 for beta chain variable domain of TCR clone 185071 (TRBV5-7, TRBJ2-3)
CASSYFGQVHTQYF

SEQ ID NO: 370143 - protein, 14 aa, Homo sapiens
  CDR3 for alpha chain variable domain of TCR clone 185072 (TRAV12-2, TRAJ40)
CAVKIPSGTYKYIF

SEQ ID NO: 370144 - protein, 18 aa, Homo sapiens
  CDR3 for beta chain variable domain of TCR clone 185072 (TRBV20-1, TRBJ2-6)
CSAETTPTHGSGASVLTF

SEQ ID NO: 370145 - protein, 18 aa, Homo sapiens
  CDR3 for alpha chain variable domain of TCR clone 185073 (TRAV21, TRAJ52)
CAVRPSPAGGTISVKLTF

SEQ ID NO: 370146 - protein, 13 aa, Homo sapiens
  CDR3 for beta chain variable domain of TCR clone 185073 (TRBV7-3, TRBJ1-1)
CASSQDWGAEAFF

SEQ ID NO: 370147 - protein, 18 aa, Homo sapiens
  CDR3 for alpha chain variable domain of TCR clone 185074 (TRAV26-2, TRAJ54)
CILRDVEVGIQGAQRLVF

SEQ ID NO: 370148 - protein, 16 aa, Homo sapiens
  CDR3 for beta chain variable domain of TCR clone 185074 (TRBV6-1, TRBJ2-5)
CASSGTLDRGAETQYF

SEQ ID NO: 370149 - protein, 12 aa, Homo sapiens
  CDR3 for alpha chain variable domain of TCR clone 185075 (TRAV17, TRAJ39)
CATGAAGNMLTF

SEQ ID NO: 370150 - protein, 15 aa, Homo sapiens
  CDR3 for beta chain variable domain of TCR clone 185075 (TRBV9, TRBJ2-1)
CASSLAGSSYNEQFF

SEQ ID NO: 370151 - protein, 14 aa, Homo sapiens
  CDR3 for alpha chain variable domain of TCR clone 185076 (TRAV1-2, TRAJ16)
CAVNRFSDGPKLLF

SEQ ID NO: 370152 - protein, 14 aa, Homo sapiens
  CDR3 for beta chain variable domain of TCR clone 185076 (TRBV6-6, TRBJ2-7)
CASSDSGAGYEQYF

SEQ ID NO: 370153 - protein, 13 aa, Homo sapiens
  CDR3 for alpha chain variable domain of TCR clone 185077 (TRAV13-1, TRAJ5)
CAASDTGRRALTF

SEQ ID NO: 370154 - protein, 15 aa, Homo sapiens
  CDR3 for beta chain variable domain of TCR clone 185077 (TRBV11-3, TRBJ2-2)
CASSLGGRPTGELFF

SEQ ID NO: 370155 - protein, 15 aa, Homo sapiens
  CDR3 for alpha chain variable domain of TCR clone 185078 (TRAV14/DV4, TRAJ12)
CAMREERDSSYKLIF

SEQ ID NO: 370156 - protein, 14 aa, Homo sapiens
  CDR3 for beta chain variable domain of TCR clone 185078 (TRBV7-6, TRBJ2-3)
CASSLGTVTDTQYF

SEQ ID NO: 370157 - protein, 17 aa, Homo sapiens
  CDR3 for alpha chain variable domain of TCR clone 185079 (TRAV3, TRAJ6)
CAVRDGLRAGGSYIPTF

SEQ ID NO: 370158 - protein, 14 aa, Homo sapiens
  CDR3 for beta chain variable domain of TCR clone 185079 (TRBV15, TRBJ2-3)
CATRSGTSTDTQYF

SEQ ID NO: 370159 - protein, 13 aa, Homo sapiens
  CDR3 for alpha chain variable domain of TCR clone 185080 (TRAV1-2, TRAJ34)
CAVRDRDTDKLLL

SEQ ID NO: 370160 - protein, 13 aa, Homo sapiens
  CDR3 for beta chain variable domain of TCR clone 185080 (TRBV29-1, TRBJ2-1)
CSVEGGRVNEQFF

SEQ ID NO: 370161 - protein, 18 aa, Homo sapiens
  CDR3 for alpha chain variable domain of TCR clone 185081 (TRAV26-2, TRAJ54)
CILRDVEGGIQGAQKLVF

SEQ ID NO: 370162 - protein, 16 aa, Homo sapiens
  CDR3 for beta chain variable domain of TCR clone 185081 (TRBV6-1, TRBJ2-5)
CASSEALDRGAETQYF

SEQ ID NO: 370163 - protein, 15 aa, Homo sapiens
  CDR3 for alpha chain variable domain of TCR clone 185082 (TRAV26-1, TRAJ22)
CIVRASFWFCKATDL

SEQ ID NO: 370164 - protein, 13 aa, Homo sapiens
  CDR3 for beta chain variable domain of TCR clone 185082 (TRBV19, TRBJ1-2)
CASSVPGQDGYTF

SEQ ID NO: 370165 - protein, 15 aa, Homo sapiens
  CDR3 for alpha chain variable domain of TCR clone 185083 (TRAV17, TRAJ57)
CATGPSQGGSEKPVF

SEQ ID NO: 370166 - protein, 15 aa, Homo sapiens
  CDR3 for beta chain variable domain of TCR clone 185083 (TRBV6-3, TRBJ2-7)
CASSSPGTVFYEQYF

SEQ ID NO: 370167 - protein, 14 aa, Homo sapiens
  CDR3 for alpha chain variable domain of TCR clone 185084 (TRAV17, TRAJ6)
CATDASGGSYIPTF

SEQ ID NO: 370168 - protein, 15 aa, Homo sapiens
  CDR3 for beta chain variable domain of TCR clone 185084 (TRBV3-1, TRBJ2-2)
CASSQDWTRAGELFF

SEQ ID NO: 370169 - protein, 16 aa, Homo sapiens
  CDR3 for alpha chain variable domain of TCR clone 185085 (TRAV17, TRAJ35)
CATADGGIGFGNVLHC

SEQ ID NO: 370170 - protein, 17 aa, Homo sapiens
  CDR3 for beta chain variable domain of TCR clone 185085 (TRBV7-3, TRBJ2-2)
CASSLSGTSGGTGELFF

SEQ ID NO: 370171 - protein, 15 aa, Homo sapiens
  CDR3 for alpha chain variable domain of TCR clone 185086 (TRAV2, TRAJ20)
CAPLNSFGAGTTVTV

SEQ ID NO: 370172 - protein, 13 aa, Homo sapiens
  CDR3 for beta chain variable domain of TCR clone 185086 (TRBV19, TRBJ2-1)
CAASRGVYNEQFF

SEQ ID NO: 370173 - protein, 15 aa, Homo sapiens
  CDR3 for alpha chain variable domain of TCR clone 185087 (TRAV3, TRAJ22)
CAVRDRGGSAKQLTF

SEQ ID NO: 370174 - protein, 16 aa, Homo sapiens
  CDR3 for beta chain variable domain of TCR clone 185087 (TRBV5-4, TRBJ2-3)
CASQQLGAGGADTQYF

SEQ ID NO: 370175 - protein, 18 aa, Homo sapiens
  CDR3 for alpha chain variable domain of TCR clone 185088 (TRAV21, TRAJ52)
CAVRPSPAGGTSYGKLTF

SEQ ID NO: 370176 - protein, 14 aa, Homo sapiens
  CDR3 for beta chain variable domain of TCR clone 185088 (TRBV9, TRBJ1-2)
CASSVKGDNYGYTF

SEQ ID NO: 370177 - protein, 13 aa, Homo sapiens
  CDR3 for alpha chain variable domain of TCR clone 185089 (TRAV8-3, TRAJ30)
CALGGWRDDKIIF

SEQ ID NO: 370178 - protein, 14 aa, Homo sapiens
  CDR3 for beta chain variable domain of TCR clone 185089 (TRBV20-1, TRBJ1-1)
CSAPPADMNTEAFF

SEQ ID NO: 370179 - protein, 12 aa, Homo sapiens
  CDR3 for alpha chain variable domain of TCR clone 185090 (TRAV26-2, TRAJ47)
CILVEYGNKLVF

SEQ ID NO: 370180 - protein, 14 aa, Homo sapiens
  CDR3 for beta chain variable domain of TCR clone 185090 (TRBV7-2, TRBJ1-1)
CASSFLTGTTEAFF

SEQ ID NO: 370181 - protein, 14 aa, Homo sapiens
  CDR3 for alpha chain variable domain of TCR clone 185091 (TRAV12-1, TRAJ17)
CVVNYKAAGNKLTF

SEQ ID NO: 370182 - protein, 14 aa, Homo sapiens
  CDR3 for beta chain variable domain of TCR clone 185091 (TRBV7-9, TRBJ2-4)
CASSLAMGGNIQYF

SEQ ID NO: 370183 - protein, 11 aa, Homo sapiens
  CDR3 for alpha chain variable domain of TCR clone 185092 (TRAV26-2, TRAJ8)
CILTGFQKLVF

SEQ ID NO: 370184 - protein, 15 aa, Homo sapiens
  CDR3 for beta chain variable domain of TCR clone 185092 (TRBV6-1, TRBJ2-3)
CASSERGGITDTQYF

SEQ ID NO: 370185 - protein, 19 aa, Homo sapiens
  CDR3 for alpha chain variable domain of TCR clone 185093 (TRAV2, TRAJ20)
ILQVREADAAVYRDCKLSF

SEQ ID NO: 370186 - protein, 14 aa, Homo sapiens
  CDR3 for beta chain variable domain of TCR clone 185093 (TRBV4-1, TRBJ2-2)
CASSQAVNTGELFF

SEQ ID NO: 370187 - protein, 11 aa, Homo sapiens
  CDR3 for alpha chain variable domain of TCR clone 185094 (TRAV3, TRAJ21)
CAVGNSNKFYF

SEQ ID NO: 370188 - protein, 16 aa, Homo sapiens
  CDR3 for beta chain variable domain of TCR clone 185094 (TRBV19, TRBJ2-1)
CASSKAGPSSYNAQFF

SEQ ID NO: 370189 - protein, 15 aa, Homo sapiens
  CDR3 for alpha chain variable domain of TCR clone 185095 (TRAV35, TRAJ50)
CAGQLCKTSYDKAIF

SEQ ID NO: 370190 - protein, 12 aa, Homo sapiens
  CDR3 for beta chain variable domain of TCR clone 185095 (TRBV5-1, TRBJ2-5)
CASSVGLETQYF

SEQ ID NO: 370191 - protein, 15 aa, Homo sapiens
  CDR3 for alpha chain variable domain of TCR clone 185096 (TRAV2, TRAJ13)
CCLLLCFRGYQKVTF

SEQ ID NO: 370192 - protein, 15 aa, Homo sapiens
  CDR3 for beta chain variable domain of TCR clone 185096 (TRBV29-1, TRBJ2-1)
CSGRDRKSSYNEQFF

SEQ ID NO: 370193 - protein, 11 aa, Homo sapiens
  CDR3 for alpha chain variable domain of TCR clone 185097 (TRAV1-2, TRAJ20)
CAVANDYKLSF

SEQ ID NO: 370194 - protein, 15 aa, Homo sapiens
  CDR3 for beta chain variable domain of TCR clone 185097 (TRBV2, TRBJ2-1)
CASSELAGSYNEKFF

SEQ ID NO: 370195 - protein, 16 aa, Homo sapiens
  CDR3 for alpha chain variable domain of TCR clone 185098 (TRAV13-1, TRAJ17)
CAASKGVKAAGNKLTF

SEQ ID NO: 370196 - protein, 16 aa, Homo sapiens
  CDR3 for beta chain variable domain of TCR clone 185098 (TRBV29-1, TRBJ2-6)
CSVEDITYSGANVLTF

SEQ ID NO: 370197 - protein, 14 aa, Homo sapiens
  CDR3 for alpha chain variable domain of TCR clone 185099 (TRAV9-2, TRAJ35)
CALRSIGFGNVLHC

SEQ ID NO: 370198 - protein, 11 aa, Homo sapiens
  CDR3 for beta chain variable domain of TCR clone 185099 (TRBV5-4, TRBJ2-5)
CQQLDQGDQYF

SEQ ID NO: 370199 - protein, 13 aa, Homo sapiens
  CDR3 for alpha chain variable domain of TCR clone 185100 (TRAV12-3, TRAJ33)
CAMSVNSNYQLIW

SEQ ID NO: 370200 - protein, 13 aa, Homo sapiens
  CDR3 for beta chain variable domain of TCR clone 185100 (TRBV7-2, TRBJ2-2)
CASSLAVSGELFF

SEQ ID NO: 370201 - protein, 13 aa, Homo sapiens
  CDR3 for alpha chain variable domain of TCR clone 185101 (TRAV38-2/DV8, TRAJ34)
CAYRTWNTDKLTF

SEQ ID NO: 370202 - protein, 19 aa, Homo sapiens
  CDR3 for beta chain variable domain of TCR clone 185101 (TRBV25-1, TRBJ2-2)
CAILVYRVDRGRKTGELFF

SEQ ID NO: 370203 - protein, 16 aa, Homo sapiens
  CDR3 for alpha chain variable domain of TCR clone 185102 (TRAV3, TRAJ10)
CAVRDMRAGGGNKLTV

SEQ ID NO: 370204 - protein, 17 aa, Homo sapiens
  CDR3 for beta chain variable domain of TCR clone 185102 (TRBV20-1, TRBJ2-2)
CSASGSGQGGLTGELFF

SEQ ID NO: 370205 - protein, 15 aa, Homo sapiens
  CDR3 for alpha chain variable domain of TCR clone 185103 (TRAV3, TRAJ22)
CAVRDRGGSSRQLTF

SEQ ID NO: 370206 - protein, 16 aa, Homo sapiens
  CDR3 for beta chain variable domain of TCR clone 185103 (TRBV25-1, TRBJ1-1)
CASSGDRDRGRIEAFF

SEQ ID NO: 370207 - protein, 23 aa, Homo sapiens
  CDR3 for alpha chain variable domain of TCR clone 185104 (TRAV12-2, TRAJ22)
CAVSFRAHPGPPIVSGSASQLTF

SEQ ID NO: 370208 - protein, 13 aa, Homo sapiens
  CDR3 for beta chain variable domain of TCR clone 185104 (TRBV12-4, TRBJ1-2)
CASSLDSNYGYTF

SEQ ID NO: 370209 - protein, 18 aa, Homo sapiens
  CDR3 for alpha chain variable domain of TCR clone 185105 (TRAV29/DV5, TRAJ52)
CAAGFRGAGGTSYGKLTF

SEQ ID NO: 370210 - protein, 14 aa, Homo sapiens
  CDR3 for beta chain variable domain of TCR clone 185105 (TRBV11-2, TRBJ1-2)
CASSLGTANYGYTF

SEQ ID NO: 370211 - protein, 12 aa, Homo sapiens
  CDR3 for alpha chain variable domain of TCR clone 185106 (TRAV17, TRAJ49)
CATVATGNQFYF

SEQ ID NO: 370212 - protein, 12 aa, Homo sapiens
  CDR3 for beta chain variable domain of TCR clone 185106 (TRBV7-2, TRBJ2-2)
CQQLSSHRELFF

SEQ ID NO: 370213 - protein, 14 aa, Homo sapiens
  CDR3 for alpha chain variable domain of TCR clone 185107 (TRAV36/DV7, TRAJ49)
CAVGDWNTGNQFYF

SEQ ID NO: 370214 - protein, 15 aa, Homo sapiens
  CDR3 for beta chain variable domain of TCR clone 185107 (TRBV19, TRBJ1-2)
CASSVGQVLNYGYTF

SEQ ID NO: 370215 - protein, 14 aa, Homo sapiens
  CDR3 for alpha chain variable domain of TCR clone 185108 (TRAV12-2, TRAJ13)
CAVKKTGGYQKVTF

SEQ ID NO: 370216 - protein, 13 aa, Homo sapiens
  CDR3 for beta chain variable domain of TCR clone 185108 (TRBV19, TRBJ2-7)
CASRKADGSEQYF

SEQ ID NO: 370217 - protein, 16 aa, Homo sapiens
  CDR3 for alpha chain variable domain of TCR clone 185109 (TRAV20, TRAJ4)
CAVAAPFSGGYNKLIF

SEQ ID NO: 370218 - protein, 15 aa, Homo sapiens
  CDR3 for beta chain variable domain of TCR clone 185109 (TRBV7-9, TRBJ1-5)
CASSQGHQPNQPQHF

SEQ ID NO: 370219 - protein, 13 aa, Homo sapiens
  CDR3 for alpha chain variable domain of TCR clone 185110 (TRAV21, TRAJ27)
CAARPGNAGKLTF

SEQ ID NO: 370220 - protein, 15 aa, Homo sapiens
  CDR3 for beta chain variable domain of TCR clone 185110 (TRBV20-1, TRBJ2-7)
CSAGDRVSGMDEQYF

SEQ ID NO: 370221 - protein, 18 aa, Homo sapiens
  CDR3 for alpha chain variable domain of TCR clone 185111 (TRAV12-2, )
CAFEDIQNPDPAVYQLRD

SEQ ID NO: 370222 - protein, 15 aa, Homo sapiens
  CDR3 for beta chain variable domain of TCR clone 185111 (TRBV7-2, TRBJ2-3)
CASSLRGGSTDTQYF

SEQ ID NO: 370223 - protein, 15 aa, Homo sapiens
  CDR3 for alpha chain variable domain of TCR clone 185112 (TRAV16, TRAJ17)
CALSQIKAAGNKLTF

SEQ ID NO: 370224 - protein, 14 aa, Homo sapiens
  CDR3 for beta chain variable domain of TCR clone 185112 (TRBV7-2, TRBJ1-2)
CASSQTGSTYGYTF

SEQ ID NO: 370225 - protein, 12 aa, Homo sapiens
  CDR3 for alpha chain variable domain of TCR clone 185113 (TRAV1-1, TRAJ39)
CAVPVVGNMLTF

SEQ ID NO: 370226 - protein, 12 aa, Homo sapiens
  CDR3 for beta chain variable domain of TCR clone 185113 (TRBV2, TRBJ1-2)
CASSGQTYGYTV

SEQ ID NO: 370227 - protein, 13 aa, Homo sapiens
  CDR3 for alpha chain variable domain of TCR clone 185114 (TRAV27, TRAJ54)
CAGAGQGAQKLGF

SEQ ID NO: 370228 - protein, 14 aa, Homo sapiens
  CDR3 for beta chain variable domain of TCR clone 185114 (TRBV18, TRBJ2-7)
CASSPRGGVYEQYF

SEQ ID NO: 370229 - protein, 13 aa, Homo sapiens
  CDR3 for alpha chain variable domain of TCR clone 185115 (TRAV5, TRAJ44)
CAEKPGTASKLTF

SEQ ID NO: 370230 - protein, 16 aa, Homo sapiens
  CDR3 for beta chain variable domain of TCR clone 185115 (TRBV10-3, TRBJ2-7)
CAISADFADRPYEQYF

SEQ ID NO: 370231 - protein, 13 aa, Homo sapiens
  CDR3 for alpha chain variable domain of TCR clone 185116 (TRAV21, TRAJ20)
CAVGLRVDYKLSF

SEQ ID NO: 370232 - protein, 13 aa, Homo sapiens
  CDR3 for beta chain variable domain of TCR clone 185116 (TRBV18, TRBJ2-7)
CASQSGGGYEQYF

SEQ ID NO: 370233 - protein, 15 aa, Homo sapiens
  CDR3 for alpha chain variable domain of TCR clone 185117 (TRAV23/DV6, TRAJ18)
CAARYRGSTLGRLYF

SEQ ID NO: 370234 - protein, 13 aa, Homo sapiens
  CDR3 for beta chain variable domain of TCR clone 185117 (TRBV12-4, TRBJ1-1)
CASSLAGRAQAFF

SEQ ID NO: 370235 - protein, 13 aa, Homo sapiens
  CDR3 for alpha chain variable domain of TCR clone 185118 (TRAV12-3, TRAJ7)
CAMTPYGNNRLAF

SEQ ID NO: 370236 - protein, 16 aa, Homo sapiens
  CDR3 for beta chain variable domain of TCR clone 185118 (TRBV12-4, TRBJ2-2)
CASSFWIVGNTGELFF

SEQ ID NO: 370237 - protein, 14 aa, Homo sapiens
  CDR3 for alpha chain variable domain of TCR clone 185119 (TRAV13-1, TRAJ35)
CAASKGGIGNVLHC

SEQ ID NO: 370238 - protein, 13 aa, Homo sapiens
  CDR3 for beta chain variable domain of TCR clone 185119 (TRBV7-3, TRBJ1-1)
CASTQDWGAEAFF

SEQ ID NO: 370239 - protein, 11 aa, Homo sapiens
  CDR3 for alpha chain variable domain of TCR clone 185120 (TRAV17, TRAJ49)
CATDAGNQFYF

SEQ ID NO: 370240 - protein, 13 aa, Homo sapiens
  CDR3 for beta chain variable domain of TCR clone 185120 (TRBV19, TRBJ2-1)
CATSRGVYNEQFF

SEQ ID NO: 370241 - protein, 16 aa, Homo sapiens
  CDR3 for alpha chain variable domain of TCR clone 185121 (TRAV17, TRAJ43)
CFLLLCYGRVPADMRF

SEQ ID NO: 370242 - protein, 14 aa, Homo sapiens
  CDR3 for beta chain variable domain of TCR clone 185121 (TRBV20-1, TRBJ2-3)
CSARDGGSTDTQYF

SEQ ID NO: 370243 - protein, 16 aa, Homo sapiens
  CDR3 for alpha chain variable domain of TCR clone 185122 (TRAV17, TRAJ52)
CATSNAGGTSYGKLTF

SEQ ID NO: 370244 - protein, 11 aa, Homo sapiens
  CDR3 for beta chain variable domain of TCR clone 185122 (TRBV11-2, TRBJ2-2)
CASSLPGELFF

SEQ ID NO: 370245 - protein, 16 aa, Homo sapiens
  CDR3 for alpha chain variable domain of TCR clone 185123 (TRAV14/DV4, TRAJ53)
CVMREGGGGSNYKLTF

SEQ ID NO: 370246 - protein, 14 aa, Homo sapiens
  CDR3 for beta chain variable domain of TCR clone 185123 (TRBV12-5, TRBJ2-5)
CASGSRTHQETQYF

SEQ ID NO: 370247 - protein, 18 aa, Homo sapiens
  CDR3 for alpha chain variable domain of TCR clone 185124 (TRAV26-1, TRAJ23)
CIVRVGLEVWSQGGRLIF

SEQ ID NO: 370248 - protein, 15 aa, Homo sapiens
  CDR3 for beta chain variable domain of TCR clone 185124 (TRBV10-3, TRBJ2-3)
CAISDWDRDTDTQYF

SEQ ID NO: 370249 - protein, 15 aa, Homo sapiens
  CDR3 for alpha chain variable domain of TCR clone 185125 (TRAV2, TRAJ37)
CAVGDGSSNTGKLIF

SEQ ID NO: 370250 - protein, 13 aa, Homo sapiens
  CDR3 for beta chain variable domain of TCR clone 185125 (TRBV20-1, TRBJ2-7)
CSAQTGLSYEQYC

SEQ ID NO: 370251 - protein, 14 aa, Homo sapiens
  CDR3 for alpha chain variable domain of TCR clone 185126 (TRAV16, TRAJ32)
CALKSGGATTKLIF

SEQ ID NO: 370252 - protein, 13 aa, Homo sapiens
  CDR3 for beta chain variable domain of TCR clone 185126 (TRBV15, TRBJ1-6)
CATSGGLNSPLHF

SEQ ID NO: 370253 - protein, 15 aa, Homo sapiens
  CDR3 for alpha chain variable domain of TCR clone 185127 (TRAV8-2, TRAJ16)
CVVSDGFSDGQKLLF

SEQ ID NO: 370254 - protein, 13 aa, Homo sapiens
  CDR3 for beta chain variable domain of TCR clone 185127 (TRBV20-1, TRBJ1-1)
CSAGTVGNTEAFF

SEQ ID NO: 370255 - protein, 13 aa, Homo sapiens
  CDR3 for alpha chain variable domain of TCR clone 185128 (TRAV12-2, TRAJ50)
CAVIVNSYDKVIF

SEQ ID NO: 370256 - protein, 14 aa, Homo sapiens
  CDR3 for beta chain variable domain of TCR clone 185128 (TRBV9, TRBJ2-1)
CASSVDPRGKEQFF

SEQ ID NO: 370257 - protein, 17 aa, Homo sapiens
  CDR3 for alpha chain variable domain of TCR clone 185129 (TRAV4, TRAJ18)
CLVGERSVGSTLGRLYF

SEQ ID NO: 370258 - protein, 15 aa, Homo sapiens
  CDR3 for beta chain variable domain of TCR clone 185129 (TRBV28, TRBJ2-5)
CASSPGQGSIETQYF

SEQ ID NO: 370259 - protein, 18 aa, Homo sapiens
  CDR3 for alpha chain variable domain of TCR clone 185130 (TRAV3, TRAJ52)
CAVRPSPAGGTRYGKLTF

SEQ ID NO: 370260 - protein, 17 aa, Homo sapiens
  CDR3 for beta chain variable domain of TCR clone 185130 (TRBV13, TRBJ2-3)
CASSLSRVAGGRNTQYF

SEQ ID NO: 370261 - protein, 14 aa, Homo sapiens
  CDR3 for alpha chain variable domain of TCR clone 185131 (TRAV23/DV6, TRAJ37)
CAASTSSNTGKLIF

SEQ ID NO: 370262 - protein, 15 aa, Homo sapiens
  CDR3 for beta chain variable domain of TCR clone 185131 (TRBV19, TRBJ1-2)
CASSVGQVLNYGYTF

SEQ ID NO: 370263 - protein, 14 aa, Homo sapiens
  CDR3 for alpha chain variable domain of TCR clone 185132 (TRAV1-2, TRAJ16)
CAVNRFSDGQKLLF

SEQ ID NO: 370264 - protein, 15 aa, Homo sapiens
  CDR3 for beta chain variable domain of TCR clone 185132 (TRBV18, TRBJ2-1)
CASSPPSAADNEQFF

SEQ ID NO: 370265 - protein, 14 aa, Homo sapiens
  CDR3 for alpha chain variable domain of TCR clone 185133 (TRAV38-1, TRAJ45)
CAYFSGGGADGLTF

SEQ ID NO: 370266 - protein, 20 aa, Homo sapiens
  CDR3 for beta chain variable domain of TCR clone 185133 (TRBV28, TRBJ2-1)
CASTPIGRSPGLAGGNEQFF

SEQ ID NO: 370267 - protein, 12 aa, Homo sapiens
  CDR3 for alpha chain variable domain of TCR clone 185134 (TRAV4, TRAJ26)
CLVGDYGQNFVF

SEQ ID NO: 370268 - protein, 16 aa, Homo sapiens
  CDR3 for beta chain variable domain of TCR clone 185134 (TRBV7-2, TRBJ1-2)
CASSSNQDTRGHGYTF

SEQ ID NO: 370269 - protein, 21 aa, Homo sapiens
  CDR3 for alpha chain variable domain of TCR clone 185135 (TRAV26-1, )
CIADNAGNSHIQNPDPAVYQL

SEQ ID NO: 370270 - protein, 13 aa, Homo sapiens
  CDR3 for beta chain variable domain of TCR clone 185135 (TRBV20-1, TRBJ1-1)
CSARGGGNTEAFF

SEQ ID NO: 370271 - protein, 14 aa, Homo sapiens
  CDR3 for alpha chain variable domain of TCR clone 185136 (TRAV14/DV4, TRAJ42)
CPRGSLRSQGNLIF

SEQ ID NO: 370272 - protein, 12 aa, Homo sapiens
  CDR3 for beta chain variable domain of TCR clone 185136 (TRBV12-4, TRBJ2-1)
CASSLQGSEQFF

SEQ ID NO: 370273 - protein, 12 aa, Homo sapiens
  CDR3 for alpha chain variable domain of TCR clone 185137 (TRAV12-3, TRAJ17)
CAMTLTGNKLTF

SEQ ID NO: 370274 - protein, 14 aa, Homo sapiens
  CDR3 for beta chain variable domain of TCR clone 185137 (TRBV7-7, TRBJ2-1)
CASSSGLASSEQFF

SEQ ID NO: 370275 - protein, 16 aa, Homo sapiens
  CDR3 for alpha chain variable domain of TCR clone 185138 (TRAV27, TRAJ53)
CAAPAGSGGSIYKLTF

SEQ ID NO: 370276 - protein, 14 aa, Homo sapiens
  CDR3 for beta chain variable domain of TCR clone 185138 (TRBV4-3, TRBJ1-5)
CASSQGGQGWPQHF

SEQ ID NO: 370277 - protein, 14 aa, Homo sapiens
  CDR3 for alpha chain variable domain of TCR clone 185139 (TRAV12-2, TRAJ17)
CAVPFKAAGNKLTF

SEQ ID NO: 370278 - protein, 14 aa, Homo sapiens
  CDR3 for beta chain variable domain of TCR clone 185139 (TRBV7-8, TRBJ2-5)
CASSATGGQETQYF

SEQ ID NO: 370279 - protein, 17 aa, Homo sapiens
  CDR3 for alpha chain variable domain of TCR clone 185140 (TRAV21, TRAJ13)
CAVPRSFWGLPESYLWN

SEQ ID NO: 370280 - protein, 15 aa, Homo sapiens
  CDR3 for beta chain variable domain of TCR clone 185140 (TRBV27, TRBJ2-5)
CASSLYPRGGETQYF

SEQ ID NO: 370281 - protein, 11 aa, Homo sapiens
  CDR3 for alpha chain variable domain of TCR clone 185141 (TRAV2, TRAJ33)
CAVESNYQLIW

SEQ ID NO: 370282 - protein, 17 aa, Homo sapiens
  CDR3 for beta chain variable domain of TCR clone 185141 (TRBV7-2, TRBJ2-2)
CAGSPRGAGEGTGELFF

SEQ ID NO: 370283 - protein, 14 aa, Homo sapiens
  CDR3 for alpha chain variable domain of TCR clone 185142 (TRAV27, TRAJ36)
CARPPKRGANNLFF

SEQ ID NO: 370284 - protein, 15 aa, Homo sapiens
  CDR3 for beta chain variable domain of TCR clone 185142 (TRBV18, TRBJ2-7)
CASSPASTPNYEQYF

SEQ ID NO: 370285 - protein, 17 aa, Homo sapiens
  CDR3 for alpha chain variable domain of TCR clone 185143 (TRAV20, TRAJ42)
CAVQDWGYGGSQGNLIF

SEQ ID NO: 370286 - protein, 16 aa, Homo sapiens
  CDR3 for beta chain variable domain of TCR clone 185143 (TRBV29-1, TRBJ2-5)
CSVEGLAGDYQETQYF

SEQ ID NO: 370287 - protein, 21 aa, Homo sapiens
  CDR3 for alpha chain variable domain of TCR clone 185144 (TRAV21, )
CAVRQDAGNNHIQNHDPAVNK

SEQ ID NO: 370288 - protein, 16 aa, Homo sapiens
  CDR3 for beta chain variable domain of TCR clone 185144 (TRBV4-2, TRBJ1-1)
CASRPLDGGGDTEAFF

SEQ ID NO: 370289 - protein, 17 aa, Homo sapiens
  CDR3 for alpha chain variable domain of TCR clone 185145 (TRAV23/DV6, TRAJ18)
CAASMNHRGSTLGRLYL

SEQ ID NO: 370290 - protein, 15 aa, Homo sapiens
  CDR3 for beta chain variable domain of TCR clone 185145 (TRBV27, TRBJ2-7)
CASSPDQGRLYEQYF

SEQ ID NO: 370291 - protein, 15 aa, Homo sapiens
  CDR3 for alpha chain variable domain of TCR clone 185146 (TRAV8-3, TRAJ35)
CAVGATIGFGNVLHC

SEQ ID NO: 370292 - protein, 17 aa, Homo sapiens
  CDR3 for beta chain variable domain of TCR clone 185146 (TRBV13, TRBJ2-3)
CASSLSRVAGGRNTQYF

SEQ ID NO: 370293 - protein, 11 aa, Homo sapiens
  CDR3 for alpha chain variable domain of TCR clone 185147 (TRAV2, TRAJ31)
CAVYNNAGLMF

SEQ ID NO: 370294 - protein, 16 aa, Homo sapiens
  CDR3 for beta chain variable domain of TCR clone 185147 (TRBV28, TRBJ1-6)
CASSSLLEGDNSPLHF

SEQ ID NO: 370295 - protein, 16 aa, Homo sapiens
  CDR3 for alpha chain variable domain of TCR clone 185148 (TRAV12-2, TRAJ43)
CAGDDMRFGAGTRLTV

SEQ ID NO: 370296 - protein, 16 aa, Homo sapiens
  CDR3 for beta chain variable domain of TCR clone 185148 (TRBV2, TRBJ2-4)
CASSEAPGGGQNIQYF

SEQ ID NO: 370297 - protein, 10 aa, Homo sapiens
  CDR3 for alpha chain variable domain of TCR clone 185149 (TRAV25, TRAJ53)
CAGSNYKLTF

SEQ ID NO: 370298 - protein, 16 aa, Homo sapiens
  CDR3 for beta chain variable domain of TCR clone 185149 (TRBV4-1, TRBJ2-1)
CASSQEAGQGSDEQFF

SEQ ID NO: 370299 - protein, 16 aa, Homo sapiens
  CDR3 for alpha chain variable domain of TCR clone 185150 (TRAV14/DV4, TRAJ53)
CAMREGGGGGNYKLTF

SEQ ID NO: 370300 - protein, 17 aa, Homo sapiens
  CDR3 for beta chain variable domain of TCR clone 185150 (TRBV13, TRBJ2-3)
CASSLSRVAGGRNTQYF

SEQ ID NO: 370301 - protein, 13 aa, Homo sapiens
  CDR3 for alpha chain variable domain of TCR clone 185151 (TRAV38-1, TRAJ49)
CAFMKYTGNQFYF

SEQ ID NO: 370302 - protein, 15 aa, Homo sapiens
  CDR3 for beta chain variable domain of TCR clone 185151 (TRBV11-3, TRBJ2-3)
CASLKDGREGDTQYF

SEQ ID NO: 370303 - protein, 11 aa, Homo sapiens
  CDR3 for alpha chain variable domain of TCR clone 185152 (TRAV2, TRAJ23)
CAVVTRGKLIF

SEQ ID NO: 370304 - protein, 17 aa, Homo sapiens
  CDR3 for beta chain variable domain of TCR clone 185152 (TRBV20-1, TRBJ2-1)
CSASSSGLAGSYNEQFF

SEQ ID NO: 370305 - protein, 13 aa, Homo sapiens
  CDR3 for alpha chain variable domain of TCR clone 185153 (TRAV13-1, TRAJ6)
CAASSGGSYIPTF

SEQ ID NO: 370306 - protein, 15 aa, Homo sapiens
  CDR3 for beta chain variable domain of TCR clone 185153 (TRBV12-4, TRBJ2-5)
CASIPPTGLQETQYF

SEQ ID NO: 370307 - protein, 16 aa, Homo sapiens
  CDR3 for alpha chain variable domain of TCR clone 185154 (TRAV26-1, TRAJ48)
IASSDLSNFGHEKLTF

SEQ ID NO: 370308 - protein, 14 aa, Homo sapiens
  CDR3 for beta chain variable domain of TCR clone 185154 (TRBV13, TRBJ2-7)
CASSLKGASYEQYF

SEQ ID NO: 370309 - protein, 10 aa, Homo sapiens
  CDR3 for alpha chain variable domain of TCR clone 185155 (TRAV12-3, TRAJ49)
CAMNDDQFYF

SEQ ID NO: 370310 - protein, 15 aa, Homo sapiens
  CDR3 for beta chain variable domain of TCR clone 185155 (TRBV12-4, TRBJ1-1)
CASSPGTGFEAFLDK

SEQ ID NO: 370311 - protein, 11 aa, Homo sapiens
  CDR3 for alpha chain variable domain of TCR clone 185156 (TRAV2, TRAJ13)
CASAGYQKVTF

SEQ ID NO: 370312 - protein, 11 aa, Homo sapiens
  CDR3 for beta chain variable domain of TCR clone 185156 (TRBV6-3, TRBJ2-3)
CATGQADTQYF

SEQ ID NO: 370313 - protein, 14 aa, Homo sapiens
  CDR3 for alpha chain variable domain of TCR clone 185157 (TRAV13-1, TRAJ9)
CAASALTGGFKTIF

SEQ ID NO: 370314 - protein, 13 aa, Homo sapiens
  CDR3 for beta chain variable domain of TCR clone 185157 (TRBV20-1, TRBJ1-1)
CSAGTVGNTQAFF

SEQ ID NO: 370315 - protein, 13 aa, Homo sapiens
  CDR3 for alpha chain variable domain of TCR clone 185158 (TRAV29/DV5, TRAJ31)
CAASRNNNARLMI

SEQ ID NO: 370316 - protein, 12 aa, Homo sapiens
  CDR3 for beta chain variable domain of TCR clone 185158 (TRBV11-2, TRBJ2-2)
CASSLGGGELFF

SEQ ID NO: 370317 - protein, 15 aa, Homo sapiens
  CDR3 for alpha chain variable domain of TCR clone 185159 (TRAV3, TRAJ3)
CAVRDRDSSASKIIF

SEQ ID NO: 370318 - protein, 16 aa, Homo sapiens
  CDR3 for beta chain variable domain of TCR clone 185159 (TRBV19, TRBJ1-1)
CASSPTRFWPGTEAFF

SEQ ID NO: 370319 - protein, 15 aa, Homo sapiens
  CDR3 for alpha chain variable domain of TCR clone 185160 (TRAV3, TRAJ45)
CAVRTPWGGADGLTF

SEQ ID NO: 370320 - protein, 16 aa, Homo sapiens
  CDR3 for beta chain variable domain of TCR clone 185160 (TRBV6-1, TRBJ2-2)
CASSFGQGGNTGELFF

SEQ ID NO: 370321 - protein, 14 aa, Homo sapiens
  CDR3 for alpha chain variable domain of TCR clone 185161 (TRAV1-2, TRAJ16)
CAVNRFSDGQKLLF

SEQ ID NO: 370322 - protein, 18 aa, Homo sapiens
  CDR3 for beta chain variable domain of TCR clone 185161 (TRBV20-1, TRBJ2-6)
CSAETTATHGSGANVLTF

SEQ ID NO: 370323 - protein, 13 aa, Homo sapiens
  CDR3 for alpha chain variable domain of TCR clone 185162 (TRAV21, TRAJ35)
CAVVGGFGNVLHC

SEQ ID NO: 370324 - protein, 15 aa, Homo sapiens
  CDR3 for beta chain variable domain of TCR clone 185162 (TRBV10-3, TRBJ2-3)
CAISLTSGGTDTQYF

SEQ ID NO: 370325 - protein, 14 aa, Homo sapiens
  CDR3 for alpha chain variable domain of TCR clone 185163 (TRAV38-1, TRAJ45)
CAYYSGGGADGLTF

SEQ ID NO: 370326 - protein, 20 aa, Homo sapiens
  CDR3 for beta chain variable domain of TCR clone 185163 (TRBV24-1, TRBJ2-1)
TSVPPVLYTTSGRGDNEQFF

SEQ ID NO: 370327 - protein, 18 aa, Homo sapiens
  CDR3 for alpha chain variable domain of TCR clone 185164 (TRAV29/DV5, TRAJ26)
CSVLLCSKRKPEGQNFVF

SEQ ID NO: 370328 - protein, 17 aa, Homo sapiens
  CDR3 for beta chain variable domain of TCR clone 185164 (TRBV20-1, TRBJ2-2)
CSASGSGQGGVTGELFF

SEQ ID NO: 370329 - protein, 13 aa, Homo sapiens
  CDR3 for alpha chain variable domain of TCR clone 185165 (TRAV12-1, TRAJ7)
CLVNMRGNNRLAF

SEQ ID NO: 370330 - protein, 15 aa, Homo sapiens
  CDR3 for beta chain variable domain of TCR clone 185165 (TRBV27, TRBJ2-3)
CASSLGLAATDTQYF

SEQ ID NO: 370331 - protein, 14 aa, Homo sapiens
  CDR3 for alpha chain variable domain of TCR clone 185166 (TRAV21, TRAJ21)
CAVKGFVNFNKFYF

SEQ ID NO: 370332 - protein, 13 aa, Homo sapiens
  CDR3 for beta chain variable domain of TCR clone 185166 (TRBV18, TRBJ1-1)
CASSPETKPEAFF

SEQ ID NO: 370333 - protein, 14 aa, Homo sapiens
  CDR3 for alpha chain variable domain of TCR clone 185167 (TRAV29/DV5, TRAJ45)
CAASFRGGADGLTF

SEQ ID NO: 370334 - protein, 10 aa, Homo sapiens
  CDR3 for beta chain variable domain of TCR clone 185167 (TRBV11-2, TRBJ2-2)
CQSLPGELFF

SEQ ID NO: 370335 - protein, 14 aa, Homo sapiens
  CDR3 for alpha chain variable domain of TCR clone 185168 (TRAV12-3, TRAJ10)
SHLPLTGRGNKLTF

SEQ ID NO: 370336 - protein, 16 aa, Homo sapiens
  CDR3 for beta chain variable domain of TCR clone 185168 (TRBV18, TRBJ1-3)
CASSLGILNGENTIYF

SEQ ID NO: 370337 - protein, 14 aa, Homo sapiens
  CDR3 for alpha chain variable domain of TCR clone 185169 (TRAV13-1, TRAJ44)
CAAQAAGTASKLTF

SEQ ID NO: 370338 - protein, 13 aa, Homo sapiens
  CDR3 for beta chain variable domain of TCR clone 185169 (TRBV5-5, TRBJ1-2)
CASSFWRGEDYTF

SEQ ID NO: 370339 - protein, 13 aa, Homo sapiens
  CDR3 for alpha chain variable domain of TCR clone 185170 (TRAV1-2, TRAJ9)
CAALNTGGFQTIF

SEQ ID NO: 370340 - protein, 15 aa, Homo sapiens
  CDR3 for beta chain variable domain of TCR clone 185170 (TRBV7-9, TRBJ1-5)
CASSQGHQPNQPQHF

SEQ ID NO: 370341 - protein, 15 aa, Homo sapiens
  CDR3 for alpha chain variable domain of TCR clone 185171 (TRAV4, TRAJ39)
CLVGPNNNAGNMLTF

SEQ ID NO: 370342 - protein, 14 aa, Homo sapiens
  CDR3 for beta chain variable domain of TCR clone 185171 (TRBV19, TRBJ2-1)
CDSPTFVLSGEQFF

SEQ ID NO: 370343 - protein, 13 aa, Homo sapiens
  CDR3 for alpha chain variable domain of TCR clone 185172 (TRAV13-1, TRAJ5)
CAASDTGRRALTF

SEQ ID NO: 370344 - protein, 16 aa, Homo sapiens
  CDR3 for beta chain variable domain of TCR clone 185172 (TRBV27, TRBJ2-2)
CASSLRPGGAPGELFF

SEQ ID NO: 370345 - protein, 14 aa, Homo sapiens
  CDR3 for alpha chain variable domain of TCR clone 185173 (TRAV1-1, TRAJ27)
CAVIYNTNAGKSTF

SEQ ID NO: 370346 - protein, 15 aa, Homo sapiens
  CDR3 for beta chain variable domain of TCR clone 185173 (TRBV20-1, TRBJ1-5)
CSAKPPGQGPQPQHF

SEQ ID NO: 370347 - protein, 11 aa, Homo sapiens
  CDR3 for alpha chain variable domain of TCR clone 185174 (TRAV2, TRAJ13)
CASGGYQKVTF

SEQ ID NO: 370348 - protein, 12 aa, Homo sapiens
  CDR3 for beta chain variable domain of TCR clone 185174 (TRBV11-2, TRBJ2-3)
CASSPPEDTQYF

SEQ ID NO: 370349 - protein, 16 aa, Homo sapiens
  CDR3 for alpha chain variable domain of TCR clone 185175 (TRAV23/DV6, TRAJ3)
CSKNAVSYSSASKIIF

SEQ ID NO: 370350 - protein, 16 aa, Homo sapiens
  CDR3 for beta chain variable domain of TCR clone 185175 (TRBV9, TRBJ2-1)
CASSVGGGGNYNEQFF

SEQ ID NO: 370351 - protein, 14 aa, Homo sapiens
  CDR3 for alpha chain variable domain of TCR clone 185176 (TRAV13-1, TRAJ26)
CAASSAHYGQSFVF

SEQ ID NO: 370352 - protein, 17 aa, Homo sapiens
  CDR3 for beta chain variable domain of TCR clone 185176 (TRBV25-1, TRBJ2-5)
CASSRRGGRGGQETQYF

SEQ ID NO: 370353 - protein, 15 aa, Homo sapiens
  CDR3 for alpha chain variable domain of TCR clone 185177 (TRAV2, TRAJ9)
CAVAALNTGGFKTIF

SEQ ID NO: 370354 - protein, 17 aa, Homo sapiens
  CDR3 for beta chain variable domain of TCR clone 185177 (TRBV25-1, TRBJ1-1)
CASSTPPAGAMNTEAFF

SEQ ID NO: 370355 - protein, 13 aa, Homo sapiens
  CDR3 for alpha chain variable domain of TCR clone 185178 (TRAV12-3, TRAJ31)
CAMSANNNARLMF

SEQ ID NO: 370356 - protein, 16 aa, Homo sapiens
  CDR3 for beta chain variable domain of TCR clone 185178 (TRBV7-9, TRBJ1-2)
CARSLGFSSGEDGYTF

SEQ ID NO: 370357 - protein, 11 aa, Homo sapiens
  CDR3 for alpha chain variable domain of TCR clone 185179 (TRAV23/DV6, TRAJ4)
APAGGYNKLIF

SEQ ID NO: 370358 - protein, 14 aa, Homo sapiens
  CDR3 for beta chain variable domain of TCR clone 185179 (TRBV7-9, TRBJ2-1)
CASSPRDSLYEQFF

SEQ ID NO: 370359 - protein, 12 aa, Homo sapiens
  CDR3 for alpha chain variable domain of TCR clone 185180 (TRAV3, TRAJ26)
CAVRDYGQNFVF

SEQ ID NO: 370360 - protein, 16 aa, Homo sapiens
  CDR3 for beta chain variable domain of TCR clone 185180 (TRBV11-2, TRBJ1-2)
CAGSPSGREANYGYIF

SEQ ID NO: 370361 - protein, 12 aa, Homo sapiens
  CDR3 for alpha chain variable domain of TCR clone 185181 (TRAV30, TRAJ20)
CGTESTDYKLSF

SEQ ID NO: 370362 - protein, 15 aa, Homo sapiens
  CDR3 for beta chain variable domain of TCR clone 185181 (TRBV20-1, TRBJ2-7)
CSARDRVSGMDEQYF

SEQ ID NO: 370363 - protein, 10 aa, Homo sapiens
  CDR3 for alpha chain variable domain of TCR clone 185182 (TRAV23/DV6, TRAJ57)
CAASSTLSQG

SEQ ID NO: 370364 - protein, 17 aa, Homo sapiens
  CDR3 for beta chain variable domain of TCR clone 185182 (TRBV28, TRBJ2-1)
CASSSARQALTYNEQFF

SEQ ID NO: 370365 - protein, 12 aa, Homo sapiens
  CDR3 for alpha chain variable domain of TCR clone 185183 (TRAV13-1, TRAJ21)
CAAKEGFNKFYF

SEQ ID NO: 370366 - protein, 20 aa, Homo sapiens
  CDR3 for beta chain variable domain of TCR clone 185183 (TRBV7-8, TRBJ2-2)
CASSHLFPGPTIHITGELFF

SEQ ID NO: 370367 - protein, 16 aa, Homo sapiens
  CDR3 for alpha chain variable domain of TCR clone 185184 (TRAV3, TRAJ10)
CAVRDMRAGGGNKLTF

SEQ ID NO: 370368 - protein, 14 aa, Homo sapiens
  CDR3 for beta chain variable domain of TCR clone 185184 (TRBV25-1, TRBJ1-1)
CASPHLGGNTEAFF

SEQ ID NO: 370369 - protein, 15 aa, Homo sapiens
  CDR3 for alpha chain variable domain of TCR clone 185185 (TRAV29/DV5, TRAJ24)
CAASGATDSWGKFQF

SEQ ID NO: 370370 - protein, 15 aa, Homo sapiens
  CDR3 for beta chain variable domain of TCR clone 185185 (TRBV19, TRBJ2-7)
CASSFNSGGVWEQYF

SEQ ID NO: 370371 - protein, 23 aa, Homo sapiens
  CDR3 for alpha chain variable domain of TCR clone 185186 (TRAV25, TRAJ26)
PAHHSHPDYRCRNRGVYGQNFVF

SEQ ID NO: 370372 - protein, 16 aa, Homo sapiens
  CDR3 for beta chain variable domain of TCR clone 185186 (TRBV7-3, TRBJ2-2)
CASSLKRGTLSGELFF

SEQ ID NO: 370373 - protein, 11 aa, Homo sapiens
  CDR3 for alpha chain variable domain of TCR clone 185187 (TRAV12-1, TRAJ34)
CVVNKGRELTF

SEQ ID NO: 370374 - protein, 12 aa, Homo sapiens
  CDR3 for beta chain variable domain of TCR clone 185187 (TRBV11-2, TRBJ2-2)
CASSLGGGELFF

SEQ ID NO: 370375 - protein, 14 aa, Homo sapiens
  CDR3 for alpha chain variable domain of TCR clone 185188 (TRAV8-4, TRAJ13)
CAVTLSGAYQKVTF

SEQ ID NO: 370376 - protein, 13 aa, Homo sapiens
  CDR3 for beta chain variable domain of TCR clone 185188 (TRBV2, TRBJ1-6)
CASGRGGISPLHF

SEQ ID NO: 370377 - protein, 13 aa, Homo sapiens
  CDR3 for alpha chain variable domain of TCR clone 185189 (TRAV12-2, TRAJ9)
CAVKWAGGFKTIF

SEQ ID NO: 370378 - protein, 12 aa, Homo sapiens
  CDR3 for beta chain variable domain of TCR clone 185189 (TRBV11-2, TRBJ2-5)
CASSLVGETQYF

SEQ ID NO: 370379 - protein, 15 aa, Homo sapiens
  CDR3 for alpha chain variable domain of TCR clone 185190 (TRAV4, TRAJ10)
CLVGDEEGGGNKLTF

SEQ ID NO: 370380 - protein, 15 aa, Homo sapiens
  CDR3 for beta chain variable domain of TCR clone 185190 (TRBV7-2, TRBJ2-7)
CASSLTGRGTYEQYF

SEQ ID NO: 370381 - protein, 14 aa, Homo sapiens
  CDR3 for alpha chain variable domain of TCR clone 185191 (TRAV26-1, TRAJ38)
CIADNAGNKRKLIW

SEQ ID NO: 370382 - protein, 15 aa, Homo sapiens
  CDR3 for beta chain variable domain of TCR clone 185191 (TRBV6-1, TRBJ2-1)
CASSEAAYSYNEQFF

SEQ ID NO: 370383 - protein, 14 aa, Homo sapiens
  CDR3 for alpha chain variable domain of TCR clone 185192 (TRAV8-4, TRAJ16)
CAVSPVGRWPEAAL

SEQ ID NO: 370384 - protein, 12 aa, Homo sapiens
  CDR3 for beta chain variable domain of TCR clone 185192 (TRBV11-2, TRBJ2-2)
CASSLPTGELFF

SEQ ID NO: 370385 - protein, 13 aa, Homo sapiens
  CDR3 for alpha chain variable domain of TCR clone 185193 (TRAV16, TRAJ58)
FALSIPSGPSLTF

SEQ ID NO: 370386 - protein, 14 aa, Homo sapiens
  CDR3 for beta chain variable domain of TCR clone 185193 (TRBV6-5, TRBJ2-7)
CASSPHRGLREQYF

SEQ ID NO: 370387 - protein, 15 aa, Homo sapiens
  CDR3 for alpha chain variable domain of TCR clone 185194 (TRAV21, TRAJ38)
CAVRQDAGNHRKLIW

SEQ ID NO: 370388 - protein, 16 aa, Homo sapiens
  CDR3 for beta chain variable domain of TCR clone 185194 (TRBV4-2, TRBJ1-1)
CASRPLDGGGDTEAFF

SEQ ID NO: 370389 - protein, 12 aa, Homo sapiens
  CDR3 for alpha chain variable domain of TCR clone 185195 (TRAV35, TRAJ49)
CAGWNTGNQFYF

SEQ ID NO: 370390 - protein, 15 aa, Homo sapiens
  CDR3 for beta chain variable domain of TCR clone 185195 (TRBV4-1, TRBJ2-1)
CASSQDAGGLYEQFF

SEQ ID NO: 370391 - protein, 12 aa, Homo sapiens
  CDR3 for alpha chain variable domain of TCR clone 185196 (TRAV8-3, TRAJ20)
CAVGANDYKLSF

SEQ ID NO: 370392 - protein, 14 aa, Homo sapiens
  CDR3 for beta chain variable domain of TCR clone 185196 (TRBV7-2, TRBJ2-5)
CASSFTQGQETQYF

SEQ ID NO: 370393 - protein, 16 aa, Homo sapiens
  CDR3 for alpha chain variable domain of TCR clone 185197 (TRAV4, TRAJ18)
CCVLLIGGSTLGRLYF

SEQ ID NO: 370394 - protein, 12 aa, Homo sapiens
  CDR3 for beta chain variable domain of TCR clone 185197 (TRBV12-5, TRBJ2-5)
CASGQGVETQYF

SEQ ID NO: 370395 - protein, 14 aa, Homo sapiens
  CDR3 for alpha chain variable domain of TCR clone 185198 (TRAV8-6, TRAJ6)
CAVSEGGGSYIPTF

SEQ ID NO: 370396 - protein, 14 aa, Homo sapiens
  CDR3 for beta chain variable domain of TCR clone 185198 (TRBV7-3, TRBJ2-2)
CASSSGGYTGELFF

SEQ ID NO: 370397 - protein, 15 aa, Homo sapiens
  CDR3 for alpha chain variable domain of TCR clone 185199 (TRAV12-2, TRAJ43)
CAFDMRFGAGTRLTV

SEQ ID NO: 370398 - protein, 19 aa, Homo sapiens
  CDR3 for beta chain variable domain of TCR clone 185199 (TRBV25-1, TRBJ2-2)
CAILVYRVDRGRKTGELFF

SEQ ID NO: 370399 - protein, 13 aa, Homo sapiens
  CDR3 for alpha chain variable domain of TCR clone 185200 (TRAV30, TRAJ16)
CGTFGGDGQKLLF

SEQ ID NO: 370400 - protein, 20 aa, Homo sapiens
  CDR3 for beta chain variable domain of TCR clone 185200 (TRBV7-8, TRBJ2-2)
CASSHLFPGPTIHITGELFF

SEQ ID NO: 370401 - protein, 14 aa, Homo sapiens
  CDR3 for alpha chain variable domain of TCR clone 185201 (TRAV1-1, TRAJ27)
SAVIYNTNAGKSTF

SEQ ID NO: 370402 - protein, 15 aa, Homo sapiens
  CDR3 for beta chain variable domain of TCR clone 185201 (TRBV9, TRBJ1-6)
CASSVAGTGDSPLHF

SEQ ID NO: 370403 - protein, 16 aa, Homo sapiens
  CDR3 for alpha chain variable domain of TCR clone 185202 (TRAV20, TRAJ38)
CAVQASNAGKNRKLIW

SEQ ID NO: 370404 - protein, 16 aa, Homo sapiens
  CDR3 for beta chain variable domain of TCR clone 185202 (TRBV7-8, TRBJ2-6)
CASRVGDSSGANVLTF

SEQ ID NO: 370405 - protein, 16 aa, Homo sapiens
  CDR3 for alpha chain variable domain of TCR clone 185203 (TRAV14/DV4, TRAJ20)
CAMREGRSRDDYKLSF

SEQ ID NO: 370406 - protein, 17 aa, Homo sapiens
  CDR3 for beta chain variable domain of TCR clone 185203 (TRBV7-3, TRBJ2-3)
CASSLMKRMRGADTQYF

SEQ ID NO: 370407 - protein, 14 aa, Homo sapiens
  CDR3 for alpha chain variable domain of TCR clone 185204 (TRAV16, TRAJ8)
CALLMNTGFQKLVF

SEQ ID NO: 370408 - protein, 12 aa, Homo sapiens
  CDR3 for beta chain variable domain of TCR clone 185204 (TRBV19, TRBJ2-7)
CASTDRGYEQYF

SEQ ID NO: 370409 - protein, 14 aa, Homo sapiens
  CDR3 for alpha chain variable domain of TCR clone 185205 (TRAV25, TRAJ27)
CAGPGNTDAGKSTF

SEQ ID NO: 370410 - protein, 16 aa, Homo sapiens
  CDR3 for beta chain variable domain of TCR clone 185205 (TRBV4-1, TRBJ2-6)
CASSQDGGPGANVLTF

SEQ ID NO: 370411 - protein, 12 aa, Homo sapiens
  CDR3 for alpha chain variable domain of TCR clone 185206 (TRAV13-1, TRAJ48)
CAANFVNEKLTF

SEQ ID NO: 370412 - protein, 13 aa, Homo sapiens
  CDR3 for beta chain variable domain of TCR clone 185206 (TRBV7-3, TRBJ1-1)
CASSQDWGAEAFF

SEQ ID NO: 370413 - protein, 15 aa, Homo sapiens
  CDR3 for alpha chain variable domain of TCR clone 185207 (TRAV21, TRAJ12)
CAVRDIRDSSYKLIF

SEQ ID NO: 370414 - protein, 15 aa, Homo sapiens
  CDR3 for beta chain variable domain of TCR clone 185207 (TRBV27, TRBJ2-7)
CASSLRNEQGYEQYF

SEQ ID NO: 370415 - protein, 13 aa, Homo sapiens
  CDR3 for alpha chain variable domain of TCR clone 185208 (TRAV20, TRAJ37)
CAGCSSKTGQLIF

SEQ ID NO: 370416 - protein, 11 aa, Homo sapiens
  CDR3 for beta chain variable domain of TCR clone 185208 (TRBV12-4, TRBJ2-3)
CASTATDTQYF

SEQ ID NO: 370417 - protein, 14 aa, Homo sapiens
  CDR3 for alpha chain variable domain of TCR clone 185209 (TRAV3, TRAJ6)
CAVRDPWGSYIPTF

SEQ ID NO: 370418 - protein, 13 aa, Homo sapiens
  CDR3 for beta chain variable domain of TCR clone 185209 (TRBV19, TRBJ1-2)
CASSVPGQDGYTF

SEQ ID NO: 370419 - protein, 18 aa, Homo sapiens
  CDR3 for alpha chain variable domain of TCR clone 185210 (TRAV13-1, TRAJ52)
CAASKRSAGGTSYGKLTF

SEQ ID NO: 370420 - protein, 13 aa, Homo sapiens
  CDR3 for beta chain variable domain of TCR clone 185210 (TRBV7-2, TRBJ1-6)
CASSLKFDSPLHF

SEQ ID NO: 370421 - protein, 17 aa, Homo sapiens
  CDR3 for alpha chain variable domain of TCR clone 185211 (TRAV3, TRAJ6)
CAVRDGPRAGGSYVPTF

SEQ ID NO: 370422 - protein, 14 aa, Homo sapiens
  CDR3 for beta chain variable domain of TCR clone 185211 (TRBV7-2, TRBJ2-7)
CASGPKTSFYEQYF

SEQ ID NO: 370423 - protein, 12 aa, Homo sapiens
  CDR3 for alpha chain variable domain of TCR clone 185212 (TRAV27, TRAJ35)
CAGADFGNVLHC

SEQ ID NO: 370424 - protein, 15 aa, Homo sapiens
  CDR3 for beta chain variable domain of TCR clone 185212 (TRBV20-1, TRBJ2-7)
CSARVPAAYFYEQYF

SEQ ID NO: 370425 - protein, 14 aa, Homo sapiens
  CDR3 for alpha chain variable domain of TCR clone 185213 (TRAV35, TRAJ22)
CAGLRPGSARQLTF

SEQ ID NO: 370426 - protein, 12 aa, Homo sapiens
  CDR3 for beta chain variable domain of TCR clone 185213 (TRBV19, TRBJ1-1)
CASSTTGIEAFF

SEQ ID NO: 370427 - protein, 14 aa, Homo sapiens
  CDR3 for alpha chain variable domain of TCR clone 185214 (TRAV2, TRAJ9)
CAVEDRGGGFKTIF

SEQ ID NO: 370428 - protein, 17 aa, Homo sapiens
  CDR3 for beta chain variable domain of TCR clone 185214 (TRBV18, TRBJ2-2)
CASSQRSSGQGPGELFF

SEQ ID NO: 370429 - protein, 12 aa, Homo sapiens
  CDR3 for alpha chain variable domain of TCR clone 185215 (TRAV13-2, TRAJ8)
CAPWLGFQKLVF

SEQ ID NO: 370430 - protein, 11 aa, Homo sapiens
  CDR3 for beta chain variable domain of TCR clone 185215 (TRBV6-4, TRBJ2-1)
CASSDSYAQFF

SEQ ID NO: 370431 - protein, 12 aa, Homo sapiens
  CDR3 for alpha chain variable domain of TCR clone 185216 (TRAV12-3, TRAJ17)
CAMTLTGNKLTF

SEQ ID NO: 370432 - protein, 12 aa, Homo sapiens
  CDR3 for beta chain variable domain of TCR clone 185216 (TRBV2, TRBJ2-1)
CAYGPAGNEQFF

SEQ ID NO: 370433 - protein, 15 aa, Homo sapiens
  CDR3 for alpha chain variable domain of TCR clone 185217 (TRAV12-3, TRAJ6)
CAMSATSGGSYIPTF

SEQ ID NO: 370434 - protein, 12 aa, Homo sapiens
  CDR3 for beta chain variable domain of TCR clone 185217 (TRBV19, TRBJ1-5)
CASSIAQQPQHF

SEQ ID NO: 370435 - protein, 16 aa, Homo sapiens
  CDR3 for alpha chain variable domain of TCR clone 185218 (TRAV27, TRAJ13)
CAGAKSDSGGYQKVTF

SEQ ID NO: 370436 - protein, 14 aa, Homo sapiens
  CDR3 for beta chain variable domain of TCR clone 185218 (TRBV7-9, TRBJ2-1)
CASSLASGSNEQFF

SEQ ID NO: 370437 - protein, 13 aa, Homo sapiens
  CDR3 for alpha chain variable domain of TCR clone 185219 (TRAV8-6, TRAJ16)
CAVSSPDGQKLLF

SEQ ID NO: 370438 - protein, 16 aa, Homo sapiens
  CDR3 for beta chain variable domain of TCR clone 185219 (TRBV5-7, TRBJ2-3)
CASSALGGAITDTQYF

SEQ ID NO: 370439 - protein, 15 aa, Homo sapiens
  CDR3 for alpha chain variable domain of TCR clone 185220 (TRAV26-1, TRAJ44)
CIVRANTGTGSKLTF

SEQ ID NO: 370440 - protein, 16 aa, Homo sapiens
  CDR3 for beta chain variable domain of TCR clone 185220 (TRBV7-7, TRBJ2-1)
CASSLASGTSYNEQFF

SEQ ID NO: 370441 - protein, 11 aa, Homo sapiens
  CDR3 for alpha chain variable domain of TCR clone 185221 (TRAV6, TRAJ41)
CALNSWYALNF

SEQ ID NO: 370442 - protein, 15 aa, Homo sapiens
  CDR3 for beta chain variable domain of TCR clone 185221 (TRBV20-1, TRBJ1-5)
CSAFKNGQRNQPQHF

SEQ ID NO: 370443 - protein, 14 aa, Homo sapiens
  CDR3 for alpha chain variable domain of TCR clone 185222 (TRAV38-1, TRAJ40)
CALRPTSGTYKYIF

SEQ ID NO: 370444 - protein, 14 aa, Homo sapiens
  CDR3 for beta chain variable domain of TCR clone 185222 (TRBV25-1, TRBJ1-1)
CASTRLGGNAEAFF

SEQ ID NO: 370445 - protein, 14 aa, Homo sapiens
  CDR3 for alpha chain variable domain of TCR clone 185223 (TRAV12-2, TRAJ13)
CAVKKTGGYQKVNF

SEQ ID NO: 370446 - protein, 14 aa, Homo sapiens
  CDR3 for beta chain variable domain of TCR clone 185223 (TRBV5-5, TRBJ2-7)
CASSLGQGTYEQYF

SEQ ID NO: 370447 - protein, 13 aa, Homo sapiens
  CDR3 for alpha chain variable domain of TCR clone 185224 (TRAV17, TRAJ9)
CATDYTGGFKTIF

SEQ ID NO: 370448 - protein, 13 aa, Homo sapiens
  CDR3 for beta chain variable domain of TCR clone 185224 (TRBV7-9, TRBJ2-1)
CASSLGTVNEQFF

SEQ ID NO: 370449 - protein, 13 aa, Homo sapiens
  CDR3 for alpha chain variable domain of TCR clone 185225 (TRAV27, TRAJ49)
CAPLPYTGNQFYF

SEQ ID NO: 370450 - protein, 14 aa, Homo sapiens
  CDR3 for beta chain variable domain of TCR clone 185225 (TRBV7-9, TRBJ2-2)
CASSGLADTGELFF

SEQ ID NO: 370451 - protein, 14 aa, Homo sapiens
  CDR3 for alpha chain variable domain of TCR clone 185226 (TRAV12-1, TRAJ39)
CVVNFNNAGNMLTF

SEQ ID NO: 370452 - protein, 13 aa, Homo sapiens
  CDR3 for beta chain variable domain of TCR clone 185226 (TRBV4-2, TRBJ1-1)
CASSQAGNTDAFF

SEQ ID NO: 370453 - protein, 17 aa, Homo sapiens
  CDR3 for alpha chain variable domain of TCR clone 185227 (TRAV26-1, TRAJ53)
CIVRVDDSGGSNYKLTF

SEQ ID NO: 370454 - protein, 15 aa, Homo sapiens
  CDR3 for beta chain variable domain of TCR clone 185227 (TRBV20-1, TRBJ2-3)
CSARVPAAYFYEQYF

SEQ ID NO: 370455 - protein, 12 aa, Homo sapiens
  CDR3 for alpha chain variable domain of TCR clone 185228 (TRAV13-2, TRAJ23)
CVGRHRGGKLIF

SEQ ID NO: 370456 - protein, 16 aa, Homo sapiens
  CDR3 for beta chain variable domain of TCR clone 185228 (TRBV20-1, TRBJ1-4)
CSAPGQGLLTNEKLFF

SEQ ID NO: 370457 - protein, 14 aa, Homo sapiens
  CDR3 for alpha chain variable domain of TCR clone 185229 (TRAV23/DV6, TRAJ9)
CAASTDTGGFKTLF

SEQ ID NO: 370458 - protein, 12 aa, Homo sapiens
  CDR3 for beta chain variable domain of TCR clone 185229 (TRBV20-1, TRBJ2-1)
CSASGGANEQFF

SEQ ID NO: 370459 - protein, 15 aa, Homo sapiens
  CDR3 for alpha chain variable domain of TCR clone 185230 (TRAV8-4, TRAJ29)
CAVREDFRGNTPLVF

SEQ ID NO: 370460 - protein, 18 aa, Homo sapiens
  CDR3 for beta chain variable domain of TCR clone 185230 (TRBV20-1, TRBJ2-6)
CSARTLAGGPSGANVLTF

SEQ ID NO: 370461 - protein, 10 aa, Homo sapiens
  CDR3 for alpha chain variable domain of TCR clone 185231 (TRAV26-1, TRAJ22)
CIAGSRQLTF

SEQ ID NO: 370462 - protein, 14 aa, Homo sapiens
  CDR3 for beta chain variable domain of TCR clone 185231 (TRBV4-1, TRBJ2-2)
CASSQAVNTGELFF

SEQ ID NO: 370463 - protein, 13 aa, Homo sapiens
  CDR3 for alpha chain variable domain of TCR clone 185232 (TRAV26-2, TRAJ43)
CILRAVNNNDIRF

SEQ ID NO: 370464 - protein, 15 aa, Homo sapiens
  CDR3 for beta chain variable domain of TCR clone 185232 (TRBV7-2, TRBJ2-1)
CASTPGTGIYNEQFF

SEQ ID NO: 370465 - protein, 14 aa, Homo sapiens
  CDR3 for alpha chain variable domain of TCR clone 185233 (TRAV29/DV5, TRAJ20)
CDATIRSNDYKLSF

SEQ ID NO: 370466 - protein, 15 aa, Homo sapiens
  CDR3 for beta chain variable domain of TCR clone 185233 (TRBV20-1, TRBJ2-1)
CSASSAGSSYNEQFF

SEQ ID NO: 370467 - protein, 13 aa, Homo sapiens
  CDR3 for alpha chain variable domain of TCR clone 185234 (TRAV36/DV7, TRAJ53)
CALSGGSNYKLTF

SEQ ID NO: 370468 - protein, 13 aa, Homo sapiens
  CDR3 for beta chain variable domain of TCR clone 185234 (TRBV28, TRBJ2-7)
GASSLPSRYEQYF

SEQ ID NO: 370469 - protein, 21 aa, Homo sapiens
  CDR3 for alpha chain variable domain of TCR clone 185235 (TRAV12-1, TRAJ43)
SSVIQPPTSVWCTNNNNDMRF

SEQ ID NO: 370470 - protein, 14 aa, Homo sapiens
  CDR3 for beta chain variable domain of TCR clone 185235 (TRBV7-9, TRBJ2-2)
CASSLVQDTGELFF

SEQ ID NO: 370471 - protein, 12 aa, Homo sapiens
  CDR3 for alpha chain variable domain of TCR clone 185236 (TRAV4, TRAJ26)
CLVGDYGQNFVF

SEQ ID NO: 370472 - protein, 14 aa, Homo sapiens
  CDR3 for beta chain variable domain of TCR clone 185236 (TRBV7-3, TRBJ2-1)
CASSLAGGTNEQFF

SEQ ID NO: 370473 - protein, 15 aa, Homo sapiens
  CDR3 for alpha chain variable domain of TCR clone 185237 (TRAV8-2, TRAJ24)
CVVSDRTDSWGKLQF

SEQ ID NO: 370474 - protein, 11 aa, Homo sapiens
  CDR3 for beta chain variable domain of TCR clone 185237 (TRBV20-1, TRBJ1-2)
CSVQVAGGYTF

SEQ ID NO: 370475 - protein, 12 aa, Homo sapiens
  CDR3 for alpha chain variable domain of TCR clone 185238 (TRAV12-3, TRAJ43)
CAISSNNNDMRF

SEQ ID NO: 370476 - protein, 15 aa, Homo sapiens
  CDR3 for beta chain variable domain of TCR clone 185238 (TRBV11-1, TRBJ1-4)
CASSPRHATNEKLFF

SEQ ID NO: 370477 - protein, 15 aa, Homo sapiens
  CDR3 for alpha chain variable domain of TCR clone 185239 (TRAV4, TRAJ39)
CPVGPNNNAGNMLTF

SEQ ID NO: 370478 - protein, 14 aa, Homo sapiens
  CDR3 for beta chain variable domain of TCR clone 185239 (TRBV27, TRBJ2-2)
CASSLGAATGELFC

SEQ ID NO: 370479 - protein, 14 aa, Homo sapiens
  CDR3 for alpha chain variable domain of TCR clone 185240 (TRAV8-3, TRAJ4)
CAVGASGGYNKLIF

SEQ ID NO: 370480 - protein, 16 aa, Homo sapiens
  CDR3 for beta chain variable domain of TCR clone 185240 (TRBV7-9, TRBJ1-2)
CASSLGFSSGEDGYTF

SEQ ID NO: 370481 - protein, 14 aa, Homo sapiens
  CDR3 for alpha chain variable domain of TCR clone 185241 (TRAV35, TRAJ22)
CSGLRPGSARQLTF

SEQ ID NO: 370482 - protein, 13 aa, Homo sapiens
  CDR3 for beta chain variable domain of TCR clone 185241 (TRBV20-1, TRBJ2-7)
CSATHTSGYGQYF

SEQ ID NO: 370483 - protein, 15 aa, Homo sapiens
  CDR3 for alpha chain variable domain of TCR clone 185242 (TRAV21, TRAJ53)
CATFNSGGSNYKLTF

SEQ ID NO: 370484 - protein, 13 aa, Homo sapiens
  CDR3 for beta chain variable domain of TCR clone 185242 (TRBV4-1, TRBJ2-2)
CASSQENTGELFF

SEQ ID NO: 370485 - protein, 18 aa, Homo sapiens
  CDR3 for alpha chain variable domain of TCR clone 185243 (TRAV21, TRAJ52)
CAVRPSPAGGTSFGKLTC

SEQ ID NO: 370486 - protein, 13 aa, Homo sapiens
  CDR3 for beta chain variable domain of TCR clone 185243 (TRBV10-3, TRBJ2-1)
CAISEFSGREQFF

SEQ ID NO: 370487 - protein, 10 aa, Homo sapiens
  CDR3 for alpha chain variable domain of TCR clone 185244 (TRAV8-4, TRAJ43)
CAVSADDMRF

SEQ ID NO: 370488 - protein, 15 aa, Homo sapiens
  CDR3 for beta chain variable domain of TCR clone 185244 (TRBV28, TRBJ2-1)
CASSIIAGGRSEQFF

SEQ ID NO: 370489 - protein, 17 aa, Homo sapiens
  CDR3 for alpha chain variable domain of TCR clone 185245 (TRAV26-1, TRAJ28)
CIVRVPDSRAGSYQLTF

SEQ ID NO: 370490 - protein, 17 aa, Homo sapiens
  CDR3 for beta chain variable domain of TCR clone 185245 (TRBV28, TRBJ2-7)
CASSPLPAGGKSYEQYF

SEQ ID NO: 370491 - protein, 14 aa, Homo sapiens
  CDR3 for alpha chain variable domain of TCR clone 185246 (TRAV12-3, TRAJ54)
RAMRGIQGAQKLVF

SEQ ID NO: 370492 - protein, 13 aa, Homo sapiens
  CDR3 for beta chain variable domain of TCR clone 185246 (TRBV19, TRBJ1-1)
CASSPSNGGEAFF

SEQ ID NO: 370493 - protein, 15 aa, Homo sapiens
  CDR3 for alpha chain variable domain of TCR clone 185247 (TRAV35, TRAJ23)
CAGPLGNNQGGKLIL

SEQ ID NO: 370494 - protein, 14 aa, Homo sapiens
  CDR3 for beta chain variable domain of TCR clone 185247 (TRBV7-9, TRBJ1-1)
CASPPLQSYTEAFF

SEQ ID NO: 370495 - protein, 15 aa, Homo sapiens
  CDR3 for alpha chain variable domain of TCR clone 185248 (TRAV10, TRAJ3)
CVVSVRYSSASKIIF

SEQ ID NO: 370496 - protein, 17 aa, Homo sapiens
  CDR3 for beta chain variable domain of TCR clone 185248 (TRBV19, TRBJ2-6)
CASSTGQVFSGANVLTF

SEQ ID NO: 370497 - protein, 14 aa, Homo sapiens
  CDR3 for alpha chain variable domain of TCR clone 185249 (TRAV12-1, TRAJ17)
CVVNPKAAGNKLTF

SEQ ID NO: 370498 - protein, 15 aa, Homo sapiens
  CDR3 for beta chain variable domain of TCR clone 185249 (TRBV13, TRBJ2-1)
CASSLLSGLNNEQFF

SEQ ID NO: 370499 - protein, 18 aa, Homo sapiens
  CDR3 for alpha chain variable domain of TCR clone 185250 (TRAV21, TRAJ52)
CAVRPSPAGGTSYGKLTF

SEQ ID NO: 370500 - protein, 16 aa, Homo sapiens
  CDR3 for beta chain variable domain of TCR clone 185250 (TRBV12-4, TRBJ1-3)
CASSPRTGRSGNTIYF

SEQ ID NO: 370501 - protein, 15 aa, Homo sapiens
  CDR3 for alpha chain variable domain of TCR clone 185251 (TRAV35, TRAJ58)
CAGRRQETSGSRLTF

SEQ ID NO: 370502 - protein, 12 aa, Homo sapiens
  CDR3 for beta chain variable domain of TCR clone 185251 (TRBV28, TRBJ2-7)
CASSFSSYEQYF

SEQ ID NO: 370503 - protein, 13 aa, Homo sapiens
  CDR3 for alpha chain variable domain of TCR clone 185252 (TRAV21, TRAJ3)
CCEPYSSASKIIF

SEQ ID NO: 370504 - protein, 16 aa, Homo sapiens
  CDR3 for beta chain variable domain of TCR clone 185252 (TRBV7-3, TRBJ2-3)
CASSSGVAGGTDTQYF

SEQ ID NO: 370505 - protein, 12 aa, Homo sapiens
  CDR3 for alpha chain variable domain of TCR clone 185253 (TRAV2, TRAJ36)
CAELTGANNLFF

SEQ ID NO: 370506 - protein, 18 aa, Homo sapiens
  CDR3 for beta chain variable domain of TCR clone 185253 (TRBV19, TRBJ1-1)
CASSIHGGDYTGNTEAFF

SEQ ID NO: 370507 - protein, 14 aa, Homo sapiens
  CDR3 for alpha chain variable domain of TCR clone 185254 (TRAV21, TRAJ52)
CGRAGGTSYGRLTF

SEQ ID NO: 370508 - protein, 14 aa, Homo sapiens
  CDR3 for beta chain variable domain of TCR clone 185254 (TRBV19, TRBJ1-2)
CASSVLGYNYGYAF

SEQ ID NO: 370509 - protein, 15 aa, Homo sapiens
  CDR3 for alpha chain variable domain of TCR clone 185255 (TRAV26-1, TRAJ38)
CIVRAEGGNNRKRIW

SEQ ID NO: 370510 - protein, 14 aa, Homo sapiens
  CDR3 for beta chain variable domain of TCR clone 185255 (TRBV7-6, TRBJ2-5)
CASSSPSGSETQYF

SEQ ID NO: 370511 - protein, 13 aa, Homo sapiens
  CDR3 for alpha chain variable domain of TCR clone 185256 (TRAV13-1, TRAJ13)
CTASKGGYQKVTF

SEQ ID NO: 370512 - protein, 16 aa, Homo sapiens
  CDR3 for beta chain variable domain of TCR clone 185256 (TRBV18, TRBJ1-2)
CASSPPERVTIYGYTF

SEQ ID NO: 370513 - protein, 16 aa, Homo sapiens
  CDR3 for alpha chain variable domain of TCR clone 185257 (TRAV30, TRAJ24)
CGTEIVDADSWGKFQL

SEQ ID NO: 370514 - protein, 15 aa, Homo sapiens
  CDR3 for beta chain variable domain of TCR clone 185257 (TRBV9, TRBJ1-6)
CASSVAGTGDSPLHF

SEQ ID NO: 370515 - protein, 15 aa, Homo sapiens
  CDR3 for alpha chain variable domain of TCR clone 185258 (TRAV3, TRAJ5)
CAVRDLDTGRRALTF

SEQ ID NO: 370516 - protein, 16 aa, Homo sapiens
  CDR3 for beta chain variable domain of TCR clone 185258 (TRBV24-1, TRBJ2-3)
CATSDAISGITDTQYF

SEQ ID NO: 370517 - protein, 14 aa, Homo sapiens
  CDR3 for alpha chain variable domain of TCR clone 185259 (TRAV12-3, TRAJ7)
CAMSEIGGNNRLAF

SEQ ID NO: 370518 - protein, 14 aa, Homo sapiens
  CDR3 for beta chain variable domain of TCR clone 185259 (TRBV7-8, TRBJ2-3)
CASSLEAGTDTQYF

SEQ ID NO: 370519 - protein, 12 aa, Homo sapiens
  CDR3 for alpha chain variable domain of TCR clone 185260 (TRAV2, TRAJ33)
CADLDSNYQLIW

SEQ ID NO: 370520 - protein, 15 aa, Homo sapiens
  CDR3 for beta chain variable domain of TCR clone 185260 (TRBV15, TRBJ1-5)
CATSRDPVSNQPQHF

SEQ ID NO: 370521 - protein, 12 aa, Homo sapiens
  CDR3 for alpha chain variable domain of TCR clone 185261 (TRAV12-3, TRAJ17)
CAMTLTGNKLTF

SEQ ID NO: 370522 - protein, 15 aa, Homo sapiens
  CDR3 for beta chain variable domain of TCR clone 185261 (TRBV11-3, TRBJ2-3)
CASRKDGREGDTQYF

SEQ ID NO: 370523 - protein, 13 aa, Homo sapiens
  CDR3 for alpha chain variable domain of TCR clone 185262 (TRAV20, TRAJ54)
CAVQAGGAQKLVF

SEQ ID NO: 370524 - protein, 14 aa, Homo sapiens
  CDR3 for beta chain variable domain of TCR clone 185262 (TRBV20-1, TRBJ2-7)
CTAKTGTGGYEQYF

SEQ ID NO: 370525 - protein, 14 aa, Homo sapiens
  CDR3 for alpha chain variable domain of TCR clone 185263 (TRAV12-2, TRAJ40)
CAVKIPSGTYKYIF

SEQ ID NO: 370526 - protein, 17 aa, Homo sapiens
  CDR3 for beta chain variable domain of TCR clone 185263 (TRBV5-1, TRBJ2-1)
CASSLGQISFSYNEQFF

SEQ ID NO: 370527 - protein, 16 aa, Homo sapiens
  CDR3 for alpha chain variable domain of TCR clone 185264 (TRAV30, TRAJ24)
CGTEIVDADSWGKFQF

SEQ ID NO: 370528 - protein, 16 aa, Homo sapiens
  CDR3 for beta chain variable domain of TCR clone 185264 (TRBV4-1, TRBJ2-3)
CASSQRAGGLTDTQYF

SEQ ID NO: 370529 - protein, 13 aa, Homo sapiens
  CDR3 for alpha chain variable domain of TCR clone 185265 (TRAV27, TRAJ41)
CAGEGNSGYALNS

SEQ ID NO: 370530 - protein, 16 aa, Homo sapiens
  CDR3 for beta chain variable domain of TCR clone 185265 (TRBV7-3, TRBJ2-2)
CASSLKRGTLSGELFF

SEQ ID NO: 370531 - protein, 13 aa, Homo sapiens
  CDR3 for alpha chain variable domain of TCR clone 185266 (TRAV2, TRAJ40)
CAVVTSGTYKYIF

SEQ ID NO: 370532 - protein, 15 aa, Homo sapiens
  CDR3 for beta chain variable domain of TCR clone 185266 (TRBV28, TRBJ1-2)
CASIPQGSDDYGYTF

SEQ ID NO: 370533 - protein, 12 aa, Homo sapiens
  CDR3 for alpha chain variable domain of TCR clone 185267 (TRAV13-1, TRAJ21)
CAAKEGFNKFYF

SEQ ID NO: 370534 - protein, 14 aa, Homo sapiens
  CDR3 for beta chain variable domain of TCR clone 185267 (TRBV5-4, TRBJ1-1)
CASSMDSRRDEAFF

SEQ ID NO: 370535 - protein, 14 aa, Homo sapiens
  CDR3 for alpha chain variable domain of TCR clone 185268 (TRAV38-1, TRAJ40)
CALRPTSGTYKYIF

SEQ ID NO: 370536 - protein, 13 aa, Homo sapiens
  CDR3 for beta chain variable domain of TCR clone 185268 (TRBV11-2, TRBJ2-5)
CASSRGPSETQYF

SEQ ID NO: 370537 - protein, 15 aa, Homo sapiens
  CDR3 for alpha chain variable domain of TCR clone 185269 (TRAV26-1, TRAJ58)
CIVRIQETSGSRLTF

SEQ ID NO: 370538 - protein, 13 aa, Homo sapiens
  CDR3 for beta chain variable domain of TCR clone 185269 (TRBV6-5, TRBJ2-1)
CASIGDTSKREFF

SEQ ID NO: 370539 - protein, 13 aa, Homo sapiens
  CDR3 for alpha chain variable domain of TCR clone 185270 (TRAV8-4, TRAJ30)
CAVSVNRDDKIIF

SEQ ID NO: 370540 - protein, 17 aa, Homo sapiens
  CDR3 for beta chain variable domain of TCR clone 185270 (TRBV20-1, TRBJ2-1)
CSASSSGLAGSYNEQFF

SEQ ID NO: 370541 - protein, 14 aa, Homo sapiens
  CDR3 for alpha chain variable domain of TCR clone 185271 (TRAV26-1, TRAJ34)
CIVRVAYNTDKLIF

SEQ ID NO: 370542 - protein, 15 aa, Homo sapiens
  CDR3 for beta chain variable domain of TCR clone 185271 (TRBV20-1, TRBJ2-7)
CSARVRAAYFYEQYF

SEQ ID NO: 370543 - protein, 13 aa, Homo sapiens
  CDR3 for alpha chain variable domain of TCR clone 185272 (TRAV17, TRAJ45)
CATPGGGADGLTF

SEQ ID NO: 370544 - protein, 14 aa, Homo sapiens
  CDR3 for beta chain variable domain of TCR clone 185272 (TRBV4-1, TRBJ1-1)
CASSPTGIHTEAFS

SEQ ID NO: 370545 - protein, 14 aa, Homo sapiens
  CDR3 for alpha chain variable domain of TCR clone 185273 (TRAV13-1, TRAJ10)
CAAKEPGGGNKLTF

SEQ ID NO: 370546 - protein, 14 aa, Homo sapiens
  CDR3 for beta chain variable domain of TCR clone 185273 (TRBV6-6, TRBJ2-7)
CASSESGAGYEQYF

SEQ ID NO: 370547 - protein, 13 aa, Homo sapiens
  CDR3 for alpha chain variable domain of TCR clone 185274 (TRAV12-2, TRAJ47)
CAVFMEYGNKLVS

SEQ ID NO: 370548 - protein, 14 aa, Homo sapiens
  CDR3 for beta chain variable domain of TCR clone 185274 (TRBV4-1, TRBJ1-5)
CASSQGPTNQPQHF

SEQ ID NO: 370549 - protein, 14 aa, Homo sapiens
  CDR3 for alpha chain variable domain of TCR clone 185275 (TRAV1-2, TRAJ8)
CAVREDTGFQKLVF

SEQ ID NO: 370550 - protein, 13 aa, Homo sapiens
  CDR3 for beta chain variable domain of TCR clone 185275 (TRBV5-1, TRBJ1-5)
CASSLGAGQPQHF

SEQ ID NO: 370551 - protein, 19 aa, Homo sapiens
  CDR3 for alpha chain variable domain of TCR clone 185276 (TRAV3, TRAJ6)
CACRDRNPSRSGGSYIPTF

SEQ ID NO: 370552 - protein, 15 aa, Homo sapiens
  CDR3 for beta chain variable domain of TCR clone 185276 (TRBV18, TRBJ2-7)
CASSPTFMDSYEQYF

SEQ ID NO: 370553 - protein, 13 aa, Homo sapiens
  CDR3 for alpha chain variable domain of TCR clone 185277 (TRAV23/DV6, TRAJ21)
CAASIGNFNKFYF

SEQ ID NO: 370554 - protein, 14 aa, Homo sapiens
  CDR3 for beta chain variable domain of TCR clone 185277 (TRBV6-1, TRBJ1-3)
CANVQGGGGNTIYF

SEQ ID NO: 370555 - protein, 13 aa, Homo sapiens
  CDR3 for alpha chain variable domain of TCR clone 185278 (TRAV13-2, TRAJ21)
CAENLYNFNKFYF

SEQ ID NO: 370556 - protein, 16 aa, Homo sapiens
  CDR3 for beta chain variable domain of TCR clone 185278 (TRBV2, TRBJ2-4)
CASSEAPGGEQNIQYF

SEQ ID NO: 370557 - protein, 13 aa, Homo sapiens
  CDR3 for alpha chain variable domain of TCR clone 185279 (TRAV4, TRAJ42)
CLVGGGSQGNPIF

SEQ ID NO: 370558 - protein, 16 aa, Homo sapiens
  CDR3 for beta chain variable domain of TCR clone 185279 (TRBV5-1, TRBJ2-3)
CDSSLQGRVGADTQYF

SEQ ID NO: 370559 - protein, 13 aa, Homo sapiens
  CDR3 for alpha chain variable domain of TCR clone 185280 (TRAV3, TRAJ27)
CAVRPLGAGKSTF

SEQ ID NO: 370560 - protein, 13 aa, Homo sapiens
  CDR3 for beta chain variable domain of TCR clone 185280 (TRBV4-2, TRBJ1-1)
CASGQAGNTEAFF

SEQ ID NO: 370561 - protein, 11 aa, Homo sapiens
  CDR3 for alpha chain variable domain of TCR clone 185281 (TRAV3, TRAJ21)
CAVGNFNKFYF

SEQ ID NO: 370562 - protein, 12 aa, Homo sapiens
  CDR3 for beta chain variable domain of TCR clone 185281 (TRBV19, TRBJ2-1)
CASNRQGAEQFF

SEQ ID NO: 370563 - protein, 10 aa, Homo sapiens
  CDR3 for alpha chain variable domain of TCR clone 185282 (TRAV20, TRAJ28)
CAVLRGLTGR

SEQ ID NO: 370564 - protein, 17 aa, Homo sapiens
  CDR3 for beta chain variable domain of TCR clone 185282 (TRBV28, TRBJ2-7)
CASSPRPAGGKSYEQYF

SEQ ID NO: 370565 - protein, 14 aa, Homo sapiens
  CDR3 for alpha chain variable domain of TCR clone 185283 (TRAV1-2, TRAJ16)
CAVNRFSDGQKLLF

SEQ ID NO: 370566 - protein, 11 aa, Homo sapiens
  CDR3 for beta chain variable domain of TCR clone 185283 (TRBV29-1, TRBJ2-5)
CSEDRTGNQYF

SEQ ID NO: 370567 - protein, 14 aa, Homo sapiens
  CDR3 for alpha chain variable domain of TCR clone 185284 (TRAV13-1, TRAJ35)
CAASKGGFGNVLHC

SEQ ID NO: 370568 - protein, 15 aa, Homo sapiens
  CDR3 for beta chain variable domain of TCR clone 185284 (TRBV7-9, TRBJ1-6)
CASSSPGRGDSPLHF

SEQ ID NO: 370569 - protein, 14 aa, Homo sapiens
  CDR3 for alpha chain variable domain of TCR clone 185285 (TRAV3, TRAJ21)
CALGRCSTNFTLDL

SEQ ID NO: 370570 - protein, 14 aa, Homo sapiens
  CDR3 for beta chain variable domain of TCR clone 185285 (TRBV7-9, TRBJ2-4)
CASSLAMGGNIQYF

SEQ ID NO: 370571 - protein, 16 aa, Homo sapiens
  CDR3 for alpha chain variable domain of TCR clone 185286 (TRAV23/DV6, TRAJ9)
CAASIGGNTGGFKTIF

SEQ ID NO: 370572 - protein, 16 aa, Homo sapiens
  CDR3 for beta chain variable domain of TCR clone 185286 (TRBV20-1, TRBJ1-1)
CSARALTQGMNTEAFF

SEQ ID NO: 370573 - protein, 10 aa, Homo sapiens
  CDR3 for alpha chain variable domain of TCR clone 185287 (TRAV26-1, TRAJ22)
CIVSLNFFWF

SEQ ID NO: 370574 - protein, 15 aa, Homo sapiens
  CDR3 for beta chain variable domain of TCR clone 185287 (TRBV4-2, TRBJ1-2)
CASSQRTGGRDDYTF

SEQ ID NO: 370575 - protein, 14 aa, Homo sapiens
  CDR3 for alpha chain variable domain of TCR clone 185288 (TRAV14/DV4, TRAJ57)
CAMREEGGSEKLGF

SEQ ID NO: 370576 - protein, 17 aa, Homo sapiens
  CDR3 for beta chain variable domain of TCR clone 185288 (TRBV10-3, TRBJ1-2)
CAISETRDRGLEYGYTF

SEQ ID NO: 370577 - protein, 14 aa, Homo sapiens
  CDR3 for alpha chain variable domain of TCR clone 185289 (TRAV9-2, TRAJ36)
CALTWRTGANNLFF

SEQ ID NO: 370578 - protein, 14 aa, Homo sapiens
  CDR3 for beta chain variable domain of TCR clone 185289 (TRBV2, TRBJ1-2)
CASSELQVNYGYTF

SEQ ID NO: 370579 - protein, 14 aa, Homo sapiens
  CDR3 for alpha chain variable domain of TCR clone 185290 (TRAV12-2, TRAJ10)
CAVMPIGFGNVLHC

SEQ ID NO: 370580 - protein, 12 aa, Homo sapiens
  CDR3 for beta chain variable domain of TCR clone 185290 (TRBV7-9, TRBJ2-7)
CASSIKREEQYF

SEQ ID NO: 370581 - protein, 15 aa, Homo sapiens
  CDR3 for alpha chain variable domain of TCR clone 185291 (TRAV12-2, TRAJ23)
CAVKPIYNQGGKLIF

SEQ ID NO: 370582 - protein, 14 aa, Homo sapiens
  CDR3 for beta chain variable domain of TCR clone 185291 (TRBV7-3, TRBJ2-2)
CASSLNSNTGELFF

SEQ ID NO: 370583 - protein, 16 aa, Homo sapiens
  CDR3 for alpha chain variable domain of TCR clone 185292 (TRAV22, TRAJ45)
CAVERGKRGGAEGLTF

SEQ ID NO: 370584 - protein, 13 aa, Homo sapiens
  CDR3 for beta chain variable domain of TCR clone 185292 (TRBV24-1, TRBJ1-1)
CATSDLNSVEAFF

SEQ ID NO: 370585 - protein, 12 aa, Homo sapiens
  CDR3 for alpha chain variable domain of TCR clone 185293 (TRAV20, TRAJ33)
CAARGSNYQLIW

SEQ ID NO: 370586 - protein, 13 aa, Homo sapiens
  CDR3 for beta chain variable domain of TCR clone 185293 (TRBV4-3, TRBJ1-1)
CASSPAGNTEAFF

SEQ ID NO: 370587 - protein, 13 aa, Homo sapiens
  CDR3 for alpha chain variable domain of TCR clone 185294 (TRAV3, TRAJ20)
CCEAFWNDYKLSF

SEQ ID NO: 370588 - protein, 15 aa, Homo sapiens
  CDR3 for beta chain variable domain of TCR clone 185294 (TRBV19, TRBJ2-6)
CASVRRDSGANVLTF

SEQ ID NO: 370589 - protein, 17 aa, Homo sapiens
  CDR3 for alpha chain variable domain of TCR clone 185295 (TRAV3, TRAJ6)
CAVRDGPRAGGSYIPTF

SEQ ID NO: 370590 - protein, 13 aa, Homo sapiens
  CDR3 for beta chain variable domain of TCR clone 185295 (TRBV20-1, TRBJ2-3)
CSASRQAADTQYF

SEQ ID NO: 370591 - protein, 13 aa, Homo sapiens
  CDR3 for alpha chain variable domain of TCR clone 185296 (TRAV13-1, TRAJ39)
CAASIWAGNMLTF

SEQ ID NO: 370592 - protein, 17 aa, Homo sapiens
  CDR3 for beta chain variable domain of TCR clone 185296 (TRBV19, TRBJ2-7)
CASSISFYDSYPYEQYF

SEQ ID NO: 370593 - protein, 11 aa, Homo sapiens
  CDR3 for alpha chain variable domain of TCR clone 185297 (TRAV16, TRAJ33)
CALHSNYQLIW

SEQ ID NO: 370594 - protein, 15 aa, Homo sapiens
  CDR3 for beta chain variable domain of TCR clone 185297 (TRBV4-1, TRBJ2-7)
CASSQQGQGFDEQYY

SEQ ID NO: 370595 - protein, 14 aa, Homo sapiens
  CDR3 for alpha chain variable domain of TCR clone 185298 (TRAV12-3, TRAJ10)
SHLPLTGGGNKLTF

SEQ ID NO: 370596 - protein, 12 aa, Homo sapiens
  CDR3 for beta chain variable domain of TCR clone 185298 (TRBV2, TRBJ2-3)
CASSGRFDTQYF

SEQ ID NO: 370597 - protein, 17 aa, Homo sapiens
  CDR3 for alpha chain variable domain of TCR clone 185299 (TRAV26-2, TRAJ42)
CILRDVGYGGSQGNLIF

SEQ ID NO: 370598 - protein, 16 aa, Homo sapiens
  CDR3 for beta chain variable domain of TCR clone 185299 (TRBV20-1, TRBJ2-2)
CSASASGIPGAGELFF

SEQ ID NO: 370599 - protein, 16 aa, Homo sapiens
  CDR3 for alpha chain variable domain of TCR clone 185300 (TRAV3, TRAJ10)
CAVRDARAGGGNKLTF

SEQ ID NO: 370600 - protein, 17 aa, Homo sapiens
  CDR3 for beta chain variable domain of TCR clone 185300 (TRBV28, TRBJ2-5)
CASSTPEGDALQETQYF

SEQ ID NO: 370601 - protein, 14 aa, Homo sapiens
  CDR3 for alpha chain variable domain of TCR clone 185301 (TRAV12-2, TRAJ24)
CAVTPADSWGKLRF

SEQ ID NO: 370602 - protein, 15 aa, Homo sapiens
  CDR3 for beta chain variable domain of TCR clone 185301 (TRBV20-1, TRBJ2-7)
CSARDRVSGTDEQYF

SEQ ID NO: 370603 - protein, 13 aa, Homo sapiens
  CDR3 for alpha chain variable domain of TCR clone 185302 (TRAV3, TRAJ21)
CAVREPDFNKFYF

SEQ ID NO: 370604 - protein, 13 aa, Homo sapiens
  CDR3 for beta chain variable domain of TCR clone 185302 (TRBV19, TRBJ2-7)
CASSTKQGYEQYF

SEQ ID NO: 370605 - protein, 12 aa, Homo sapiens
  CDR3 for alpha chain variable domain of TCR clone 185303 (TRAV35, TRAJ31)
CAAASNNARLMF

SEQ ID NO: 370606 - protein, 14 aa, Homo sapiens
  CDR3 for beta chain variable domain of TCR clone 185303 (TRBV2, TRBJ2-2)
CASSLFGGNGELFV

SEQ ID NO: 370607 - protein, 13 aa, Homo sapiens
  CDR3 for alpha chain variable domain of TCR clone 185304 (TRAV2, TRAJ40)
CAVVTSGTYKYIF

SEQ ID NO: 370608 - protein, 13 aa, Homo sapiens
  CDR3 for beta chain variable domain of TCR clone 185304 (TRBV19, TRBJ2-7)
CASSIDRTYEQYF

SEQ ID NO: 370609 - protein, 11 aa, Homo sapiens
  CDR3 for alpha chain variable domain of TCR clone 185305 (TRAV1-2, TRAJ11)
CAVRGYSTVTF

SEQ ID NO: 370610 - protein, 13 aa, Homo sapiens
  CDR3 for beta chain variable domain of TCR clone 185305 (TRBV10-3, TRBJ2-7)
CASKLAVNYEQYF

SEQ ID NO: 370611 - protein, 14 aa, Homo sapiens
  CDR3 for alpha chain variable domain of TCR clone 185306 (TRAV1-2, TRAJ8)
CAEREDTGFQTLVF

SEQ ID NO: 370612 - protein, 15 aa, Homo sapiens
  CDR3 for beta chain variable domain of TCR clone 185306 (TRBV6-3, TRBJ2-7)
CASSSPGTVFYEQYF

SEQ ID NO: 370613 - protein, 13 aa, Homo sapiens
  CDR3 for alpha chain variable domain of TCR clone 185307 (TRAV12-2, TRAJ34)
CAVRGYNTDKLIF

SEQ ID NO: 370614 - protein, 18 aa, Homo sapiens
  CDR3 for beta chain variable domain of TCR clone 185307 (TRBV11-2, TRBJ2-3)
CASSLGGAWRGAPNTQYF

SEQ ID NO: 370615 - protein, 10 aa, Homo sapiens
  CDR3 for alpha chain variable domain of TCR clone 185308 (TRAV1-2, TRAJ20)
CALNDYKLSF

SEQ ID NO: 370616 - protein, 11 aa, Homo sapiens
  CDR3 for beta chain variable domain of TCR clone 185308 (TRBV12-4, TRBJ2-3)
CASTATDTQYF

SEQ ID NO: 370617 - protein, 11 aa, Homo sapiens
  CDR3 for alpha chain variable domain of TCR clone 185309 (TRAV13-1, TRAJ20)
CSPHGLYKLSF

SEQ ID NO: 370618 - protein, 14 aa, Homo sapiens
  CDR3 for beta chain variable domain of TCR clone 185309 (TRBV28, TRBJ2-5)
CDSTGAGGVETQYF

SEQ ID NO: 370619 - protein, 16 aa, Homo sapiens
  CDR3 for alpha chain variable domain of TCR clone 185310 (TRAV27, TRAJ53)
CAATEGSGGSNYKLTF

SEQ ID NO: 370620 - protein, 14 aa, Homo sapiens
  CDR3 for beta chain variable domain of TCR clone 185310 (TRBV4-3, TRBJ1-5)
CASSQGGQGWPQHF

SEQ ID NO: 370621 - protein, 14 aa, Homo sapiens
  CDR3 for alpha chain variable domain of TCR clone 185311 (TRAV12-2, TRAJ13)
CAMKKTGGYQKVTF

SEQ ID NO: 370622 - protein, 17 aa, Homo sapiens
  CDR3 for beta chain variable domain of TCR clone 185311 (TRBV15, TRBJ2-4)
CATSRDNPQTGLDIQYF

SEQ ID NO: 370623 - protein, 16 aa, Homo sapiens
  CDR3 for alpha chain variable domain of TCR clone 185312 (TRAV27, TRAJ28)
CAGIAYSGAGSYQLTF

SEQ ID NO: 370624 - protein, 11 aa, Homo sapiens
  CDR3 for beta chain variable domain of TCR clone 185312 (TRBV28, TRBJ1-1)
CASSQTGEAFF

SEQ ID NO: 370625 - protein, 14 aa, Homo sapiens
  CDR3 for alpha chain variable domain of TCR clone 185313 (TRAV12-2, TRAJ13)
CAVKKTGGYQKVTF

SEQ ID NO: 370626 - protein, 17 aa, Homo sapiens
  CDR3 for beta chain variable domain of TCR clone 185313 (TRBV20-1, TRBJ2-2)
CSASGSGQGGLTGELFC

SEQ ID NO: 370627 - protein, 13 aa, Homo sapiens
  CDR3 for alpha chain variable domain of TCR clone 185314 (TRAV3, TRAJ3)
CAVADSSASKIIF

SEQ ID NO: 370628 - protein, 12 aa, Homo sapiens
  CDR3 for beta chain variable domain of TCR clone 185314 (TRBV19, TRBJ1-5)
CASSIAQQPQHF

SEQ ID NO: 370629 - protein, 13 aa, Homo sapiens
  CDR3 for alpha chain variable domain of TCR clone 185315 (TRAV9-2, TRAJ9)
CALSKAGGFKTIF

SEQ ID NO: 370630 - protein, 12 aa, Homo sapiens
  CDR3 for beta chain variable domain of TCR clone 185315 (TRBV28, TRBJ2-6)
CAIQAGANDLTF

SEQ ID NO: 370631 - protein, 12 aa, Homo sapiens
  CDR3 for alpha chain variable domain of TCR clone 185316 (TRAV27, TRAJ20)
CAENLGDYKLSF

SEQ ID NO: 370632 - protein, 18 aa, Homo sapiens
  CDR3 for beta chain variable domain of TCR clone 185316 (TRBV18, TRBJ1-3)
CASSPRGGAGPSGNTIYF

SEQ ID NO: 370633 - protein, 12 aa, Homo sapiens
  CDR3 for alpha chain variable domain of TCR clone 185317 (TRAV1-2, TRAJ29)
CAVPSGNTPLVF

SEQ ID NO: 370634 - protein, 12 aa, Homo sapiens
  CDR3 for beta chain variable domain of TCR clone 185317 (TRBV7-9, TRBJ2-7)
CASSVGSYEQYF

SEQ ID NO: 370635 - protein, 14 aa, Homo sapiens
  CDR3 for alpha chain variable domain of TCR clone 185318 (TRAV8-2, TRAJ23)
CVVSDDNQGGKLIF

SEQ ID NO: 370636 - protein, 16 aa, Homo sapiens
  CDR3 for beta chain variable domain of TCR clone 185318 (TRBV4-2, TRBJ2-5)
CASSQDLVGSQETQYF

SEQ ID NO: 370637 - protein, 14 aa, Homo sapiens
  CDR3 for alpha chain variable domain of TCR clone 185319 (TRAV8-2, TRAJ4)
CVVSPSGGYNRLIF

SEQ ID NO: 370638 - protein, 17 aa, Homo sapiens
  CDR3 for beta chain variable domain of TCR clone 185319 (TRBV4-1, TRBJ1-4)
CASSDTGGLMKNCFLAV

SEQ ID NO: 370639 - protein, 11 aa, Homo sapiens
  CDR3 for alpha chain variable domain of TCR clone 185320 (TRAV21, TRAJ20)
CAVRDDYKLSF

SEQ ID NO: 370640 - protein, 15 aa, Homo sapiens
  CDR3 for beta chain variable domain of TCR clone 185320 (TRBV20-1, TRBJ1-5)
CSARSGPSMNQPQHF

SEQ ID NO: 370641 - protein, 12 aa, Homo sapiens
  CDR3 for alpha chain variable domain of TCR clone 185321 (TRAV2, TRAJ5)
CALDTCRRALTF

SEQ ID NO: 370642 - protein, 15 aa, Homo sapiens
  CDR3 for beta chain variable domain of TCR clone 185321 (TRBV10-3, TRBJ2-1)
CAISDVQDRAYEQLF

SEQ ID NO: 370643 - protein, 15 aa, Homo sapiens
  CDR3 for alpha chain variable domain of TCR clone 185322 (TRAV8-3, TRAJ45)
CASSYSGGGADGLTF

SEQ ID NO: 370644 - protein, 15 aa, Homo sapiens
  CDR3 for beta chain variable domain of TCR clone 185322 (TRBV11-3, TRBJ2-7)
CASSPGPARSYEQYF

SEQ ID NO: 370645 - protein, 13 aa, Homo sapiens
  CDR3 for alpha chain variable domain of TCR clone 185323 (TRAV12-2, TRAJ37)
CAGGSGNTGKLIF

SEQ ID NO: 370646 - protein, 15 aa, Homo sapiens
  CDR3 for beta chain variable domain of TCR clone 185323 (TRBV5-1, TRBJ2-7)
CASSLDLTSSYEQYF

SEQ ID NO: 370647 - protein, 14 aa, Homo sapiens
  CDR3 for alpha chain variable domain of TCR clone 185324 (TRAV8-1, TRAJ5)
CAVSMDTGRRALTF

SEQ ID NO: 370648 - protein, 11 aa, Homo sapiens
  CDR3 for beta chain variable domain of TCR clone 185324 (TRBV20-1, TRBJ1-2)
CSVQGAGGYTF

SEQ ID NO: 370649 - protein, 14 aa, Homo sapiens
  CDR3 for alpha chain variable domain of TCR clone 185325 (TRAV16, TRAJ17)
CALSGRAAGNKLTF

SEQ ID NO: 370650 - protein, 14 aa, Homo sapiens
  CDR3 for beta chain variable domain of TCR clone 185325 (TRBV12-4, TRBJ2-5)
CASSFGASGGTQYF

SEQ ID NO: 370651 - protein, 18 aa, Homo sapiens
  CDR3 for alpha chain variable domain of TCR clone 185326 (TRAV21, TRAJ52)
CAVRPSPAGGTIYGQLTF

SEQ ID NO: 370652 - protein, 13 aa, Homo sapiens
  CDR3 for beta chain variable domain of TCR clone 185326 (TRBV7-3, TRBJ1-1)
CASSQDWGAEAFF

SEQ ID NO: 370653 - protein, 18 aa, Homo sapiens
  CDR3 for alpha chain variable domain of TCR clone 185327 (TRAV12-1, TRAJ26)
SSVIQPPTSVPYGQNFVF

SEQ ID NO: 370654 - protein, 15 aa, Homo sapiens
  CDR3 for beta chain variable domain of TCR clone 185327 (TRBV6-3, TRBJ2-7)
CASSSPGTVFYEQYF

SEQ ID NO: 370655 - protein, 13 aa, Homo sapiens
  CDR3 for alpha chain variable domain of TCR clone 185328 (TRAV2, TRAJ40)
CAVVTSGAYKYIF

SEQ ID NO: 370656 - protein, 12 aa, Homo sapiens
  CDR3 for beta chain variable domain of TCR clone 185328 (TRBV19, TRBJ2-1)
CASSMQDTEQFF

SEQ ID NO: 370657 - protein, 17 aa, Homo sapiens
  CDR3 for alpha chain variable domain of TCR clone 185329 (TRAV8-6, TRAJ4)
CAVSDLGVAGGYNKLIF

SEQ ID NO: 370658 - protein, 15 aa, Homo sapiens
  CDR3 for beta chain variable domain of TCR clone 185329 (TRBV10-3, TRBJ2-1)
CAIRNGTSGHNDQFF

SEQ ID NO: 370659 - protein, 14 aa, Homo sapiens
  CDR3 for alpha chain variable domain of TCR clone 185330 (TRAV12-3, TRAJ10)
SHLPLTGGGNKLTF

SEQ ID NO: 370660 - protein, 16 aa, Homo sapiens
  CDR3 for beta chain variable domain of TCR clone 185330 (TRBV19, TRBJ2-1)
CASSKAGPSSYNEQFC

SEQ ID NO: 370661 - protein, 14 aa, Homo sapiens
  CDR3 for alpha chain variable domain of TCR clone 185331 (TRAV26-1, TRAJ38)
CIADNAGNNRKLIW

SEQ ID NO: 370662 - protein, 12 aa, Homo sapiens
  CDR3 for beta chain variable domain of TCR clone 185331 (TRBV14, TRBJ2-7)
CASSLYKDEQYF

SEQ ID NO: 370663 - protein, 18 aa, Homo sapiens
  CDR3 for alpha chain variable domain of TCR clone 185332 (TRAV26-1, TRAJ52)
CIVRVEGAGSTSYGKLTF

SEQ ID NO: 370664 - protein, 16 aa, Homo sapiens
  CDR3 for beta chain variable domain of TCR clone 185332 (TRBV7-3, TRBJ2-1)
CASSLEGYRSYNEQFF

SEQ ID NO: 370665 - protein, 15 aa, Homo sapiens
  CDR3 for alpha chain variable domain of TCR clone 185333 (TRAV17, TRAJ57)
CASGPSQGGSEKLVF

SEQ ID NO: 370666 - protein, 11 aa, Homo sapiens
  CDR3 for beta chain variable domain of TCR clone 185333 (TRBV29-1, TRBJ2-5)
CSEDRTGTQYF

SEQ ID NO: 370667 - protein, 12 aa, Homo sapiens
  CDR3 for alpha chain variable domain of TCR clone 185334 (TRAV12-3, TRAJ3)
CAIDSSASKIIF

SEQ ID NO: 370668 - protein, 15 aa, Homo sapiens
  CDR3 for beta chain variable domain of TCR clone 185334 (TRBV6-1, TRBJ2-2)
CASIVTSGITGELFF

SEQ ID NO: 370669 - protein, 13 aa, Homo sapiens
  CDR3 for alpha chain variable domain of TCR clone 185335 (TRAV2, TRAJ15)
CAVASQAGTALIF

SEQ ID NO: 370670 - protein, 14 aa, Homo sapiens
  CDR3 for beta chain variable domain of TCR clone 185335 (TRBV7-8, TRBJ2-7)
CASSPRDRVYEQYF

SEQ ID NO: 370671 - protein, 14 aa, Homo sapiens
  CDR3 for alpha chain variable domain of TCR clone 185336 (TRAV12-3, TRAJ22)
CAMSLFGSARQLTF

SEQ ID NO: 370672 - protein, 13 aa, Homo sapiens
  CDR3 for beta chain variable domain of TCR clone 185336 (TRBV2, TRBJ1-5)
CASGTGGYQPQHF

SEQ ID NO: 370673 - protein, 18 aa, Homo sapiens
  CDR3 for alpha chain variable domain of TCR clone 185337 (TRAV29/DV5, TRAJ52)
CAAGFRGAGGTSYGKLTF

SEQ ID NO: 370674 - protein, 16 aa, Homo sapiens
  CDR3 for beta chain variable domain of TCR clone 185337 (TRBV7-3, TRBJ2-2)
CASSLKRGTWSGELFF

SEQ ID NO: 370675 - protein, 12 aa, Homo sapiens
  CDR3 for alpha chain variable domain of TCR clone 185338 (TRAV8-3, TRAJ20)
CAVGANDYKLSF

SEQ ID NO: 370676 - protein, 14 aa, Homo sapiens
  CDR3 for beta chain variable domain of TCR clone 185338 (TRBV7-9, TRBJ2-5)
CASSLVGGEETQYF

SEQ ID NO: 370677 - protein, 14 aa, Homo sapiens
  CDR3 for alpha chain variable domain of TCR clone 185339 (TRAV17, TRAJ57)
CATDPQGGSEKLVF

SEQ ID NO: 370678 - protein, 16 aa, Homo sapiens
  CDR3 for beta chain variable domain of TCR clone 185339 (TRBV7-8, TRBJ2-7)
CASSPGTGSTSSTSGR

SEQ ID NO: 370679 - protein, 15 aa, Homo sapiens
  CDR3 for alpha chain variable domain of TCR clone 185340 (TRAV8-3, TRAJ45)
CASSYSGRGADGLTF

SEQ ID NO: 370680 - protein, 13 aa, Homo sapiens
  CDR3 for beta chain variable domain of TCR clone 185340 (TRBV7-9, TRBJ2-7)
CASSFAGAYEQYF

SEQ ID NO: 370681 - protein, 12 aa, Homo sapiens
  CDR3 for alpha chain variable domain of TCR clone 185341 (TRAV12-3, TRAJ17)
CAMTLTGNKLTF

SEQ ID NO: 370682 - protein, 14 aa, Homo sapiens
  CDR3 for beta chain variable domain of TCR clone 185341 (TRBV5-7, TRBJ1-2)
CASSAVGVSGGYTF

SEQ ID NO: 370683 - protein, 16 aa, Homo sapiens
  CDR3 for alpha chain variable domain of TCR clone 185342 (TRAV1-2, TRAJ10)
CAVRGELTGGGNKLTF

SEQ ID NO: 370684 - protein, 15 aa, Homo sapiens
  CDR3 for beta chain variable domain of TCR clone 185342 (TRBV5-1, TRBJ2-1)
CASSPPRAPYNEQFF

SEQ ID NO: 370685 - protein, 13 aa, Homo sapiens
  CDR3 for alpha chain variable domain of TCR clone 185343 (TRAV21, TRAJ27)
CAARPGNAGKSTF

SEQ ID NO: 370686 - protein, 15 aa, Homo sapiens
  CDR3 for beta chain variable domain of TCR clone 185343 (TRBV12-4, TRBJ2-5)
CASSPPTGRQETQYF

SEQ ID NO: 370687 - protein, 12 aa, Homo sapiens
  CDR3 for alpha chain variable domain of TCR clone 185344 (TRAV13-1, TRAJ20)
CAARQNDYKLSF

SEQ ID NO: 370688 - protein, 14 aa, Homo sapiens
  CDR3 for beta chain variable domain of TCR clone 185344 (TRBV5-1, TRBJ2-7)
CASGFASGVNEQYF

SEQ ID NO: 370689 - protein, 17 aa, Homo sapiens
  CDR3 for alpha chain variable domain of TCR clone 185345 (TRAV3, TRAJ6)
CAVRDGPRAGGSYIPTF

SEQ ID NO: 370690 - protein, 15 aa, Homo sapiens
  CDR3 for beta chain variable domain of TCR clone 185345 (TRBV4-1, TRBJ1-1)
CASSQAPGLNTEAFF

SEQ ID NO: 370691 - protein, 15 aa, Homo sapiens
  CDR3 for alpha chain variable domain of TCR clone 185346 (TRAV35, TRAJ40)
CAGQLGQAGTYIYIF

SEQ ID NO: 370692 - protein, 14 aa, Homo sapiens
  CDR3 for beta chain variable domain of TCR clone 185346 (TRBV7-3, TRBJ2-1)
CASSLTGGANEQFF

SEQ ID NO: 370693 - protein, 14 aa, Homo sapiens
  CDR3 for alpha chain variable domain of TCR clone 185347 (TRAV12-1, TRAJ17)
CVVNYKAAGNKLTL

SEQ ID NO: 370694 - protein, 17 aa, Homo sapiens
  CDR3 for beta chain variable domain of TCR clone 185347 (TRBV20-1, TRBJ2-1)
CSASSSGLAGSNNEQFF

SEQ ID NO: 370695 - protein, 14 aa, Homo sapiens
  CDR3 for alpha chain variable domain of TCR clone 185348 (TRAV16, TRAJ48)
CALTHGFGNEKLTF

SEQ ID NO: 370696 - protein, 14 aa, Homo sapiens
  CDR3 for beta chain variable domain of TCR clone 185348 (TRBV7-2, TRBJ2-7)
CASSSISGFSEQYF

SEQ ID NO: 370697 - protein, 17 aa, Homo sapiens
  CDR3 for alpha chain variable domain of TCR clone 185349 (TRAV3, TRAJ6)
FAVRDGPRAGGSSITTF

SEQ ID NO: 370698 - protein, 14 aa, Homo sapiens
  CDR3 for beta chain variable domain of TCR clone 185349 (TRBV7-2, TRBJ2-7)
CASSPKTSFYEQYF

SEQ ID NO: 370699 - protein, 16 aa, Homo sapiens
  CDR3 for alpha chain variable domain of TCR clone 185350 (TRAV23/DV6, TRAJ9)
CAASIGGNTGGFETIF

SEQ ID NO: 370700 - protein, 15 aa, Homo sapiens
  CDR3 for beta chain variable domain of TCR clone 185350 (TRBV7-3, TRBJ2-2)
CASKANGANTGELFF

SEQ ID NO: 370701 - protein, 13 aa, Homo sapiens
  CDR3 for alpha chain variable domain of TCR clone 185351 (TRAV16, TRAJ34)
CITVLSHTDKLIF

SEQ ID NO: 370702 - protein, 12 aa, Homo sapiens
  CDR3 for beta chain variable domain of TCR clone 185351 (TRBV11-2, TRBJ2-2)
CASSLGGGELFF

SEQ ID NO: 370703 - protein, 12 aa, Homo sapiens
  CDR3 for alpha chain variable domain of TCR clone 185352 (TRAV12-3, TRAJ17)
CAMTLTGNKLTF

SEQ ID NO: 370704 - protein, 15 aa, Homo sapiens
  CDR3 for beta chain variable domain of TCR clone 185352 (TRBV10-2, TRBJ2-6)
CASSEPGTGANDLTF

SEQ ID NO: 370705 - protein, 14 aa, Homo sapiens
  CDR3 for alpha chain variable domain of TCR clone 185353 (TRAV38-1, TRAJ29)
CAFITPSGNTPLVF

SEQ ID NO: 370706 - protein, 14 aa, Homo sapiens
  CDR3 for beta chain variable domain of TCR clone 185353 (TRBV7-8, TRBJ2-3)
CASSLEAGTDTQYF

SEQ ID NO: 370707 - protein, 14 aa, Homo sapiens
  CDR3 for alpha chain variable domain of TCR clone 185354 (TRAV17, TRAJ37)
CATDGSSNTGKLIF

SEQ ID NO: 370708 - protein, 13 aa, Homo sapiens
  CDR3 for beta chain variable domain of TCR clone 185354 (TRBV11-3, TRBJ2-1)
CASSLDLVNEQFF

SEQ ID NO: 370709 - protein, 10 aa, Homo sapiens
  CDR3 for alpha chain variable domain of TCR clone 185355 (TRAV21, TRAJ31)
CAVDNARLMF

SEQ ID NO: 370710 - protein, 14 aa, Homo sapiens
  CDR3 for beta chain variable domain of TCR clone 185355 (TRBV11-2, TRBJ2-1)
CASTTGQGNNEQFF

SEQ ID NO: 370711 - protein, 13 aa, Homo sapiens
  CDR3 for alpha chain variable domain of TCR clone 185356 (TRAV12-1, TRAJ26)
CVVNPVYGQNFVF

SEQ ID NO: 370712 - protein, 14 aa, Homo sapiens
  CDR3 for beta chain variable domain of TCR clone 185356 (TRBV7-8, TRBJ2-7)
CASSPGLADYEQYF

SEQ ID NO: 370713 - protein, 17 aa, Homo sapiens
  CDR3 for alpha chain variable domain of TCR clone 185357 (TRAV3, TRAJ6)
CAVRDGPTAGGSYIPTF

SEQ ID NO: 370714 - protein, 20 aa, Homo sapiens
  CDR3 for beta chain variable domain of TCR clone 185357 (TRBV28, TRBJ2-1)
CASTPIGRSPGLAGGNEQFF

SEQ ID NO: 370715 - protein, 13 aa, Homo sapiens
  CDR3 for alpha chain variable domain of TCR clone 185358 (TRAV13-2, TRAJ48)
CAEMDFGNGKLTF

SEQ ID NO: 370716 - protein, 13 aa, Homo sapiens
  CDR3 for beta chain variable domain of TCR clone 185358 (TRBV7-9, TRBJ1-2)
CASSLKQNYGDTF

SEQ ID NO: 370717 - protein, 14 aa, Homo sapiens
  CDR3 for alpha chain variable domain of TCR clone 185359 (TRAV12-2, TRAJ3)
CAFSLYSRASKIIF

SEQ ID NO: 370718 - protein, 14 aa, Homo sapiens
  CDR3 for beta chain variable domain of TCR clone 185359 (TRBV27, TRBJ2-1)
CAGSIAETYNEQFF

SEQ ID NO: 370719 - protein, 15 aa, Homo sapiens
  CDR3 for alpha chain variable domain of TCR clone 185360 (TRAV2, TRAJ24)
CAVVRLKNSWGKLQF

SEQ ID NO: 370720 - protein, 16 aa, Homo sapiens
  CDR3 for beta chain variable domain of TCR clone 185360 (TRBV7-7, TRBJ2-3)
CASSPGTSGPTDTQYF

SEQ ID NO: 370721 - protein, 15 aa, Homo sapiens
  CDR3 for alpha chain variable domain of TCR clone 185361 (TRAV14/DV4, TRAJ33)
CAMREGRDSNYQLIW

SEQ ID NO: 370722 - protein, 13 aa, Homo sapiens
  CDR3 for beta chain variable domain of TCR clone 185361 (TRBV7-7, TRBJ2-5)
CASSRSGQETQYF

SEQ ID NO: 370723 - protein, 15 aa, Homo sapiens
  CDR3 for alpha chain variable domain of TCR clone 185362 (TRAV35, TRAJ58)
CAGRRQETSGSRLTF

SEQ ID NO: 370724 - protein, 16 aa, Homo sapiens
  CDR3 for beta chain variable domain of TCR clone 185362 (TRBV19, TRBJ2-1)
CASSKAGPSSYNEQFF

SEQ ID NO: 370725 - protein, 13 aa, Homo sapiens
  CDR3 for alpha chain variable domain of TCR clone 185363 (TRAV13-1, TRAJ47)
CAATLTGGDKLVF

SEQ ID NO: 370726 - protein, 14 aa, Homo sapiens
  CDR3 for beta chain variable domain of TCR clone 185363 (TRBV12-4, TRBJ1-2)
CASSNLRGNYGYTF

SEQ ID NO: 370727 - protein, 14 aa, Homo sapiens
  CDR3 for alpha chain variable domain of TCR clone 185364 (TRAV12-3, TRAJ50)
CAMSPKTSYDKVIF

SEQ ID NO: 370728 - protein, 13 aa, Homo sapiens
  CDR3 for beta chain variable domain of TCR clone 185364 (TRBV6-4, TRBJ2-3)
CASSVSWADTQYF

SEQ ID NO: 370729 - protein, 18 aa, Homo sapiens
  CDR3 for alpha chain variable domain of TCR clone 185365 (TRAV12-3, TRAJ52)
CAMSVGGAGGTSYGKLTF

SEQ ID NO: 370730 - protein, 13 aa, Homo sapiens
  CDR3 for beta chain variable domain of TCR clone 185365 (TRBV5-5, TRBJ1-2)
CASSLKQNYGYTF

SEQ ID NO: 370731 - protein, 14 aa, Homo sapiens
  CDR3 for alpha chain variable domain of TCR clone 185366 (TRAV1-2, TRAJ16)
CAVNRFSDGQKLLF

SEQ ID NO: 370732 - protein, 15 aa, Homo sapiens
  CDR3 for beta chain variable domain of TCR clone 185366 (TRBV9, TRBJ1-6)
CASSVAGTGESALYF

SEQ ID NO: 370733 - protein, 12 aa, Homo sapiens
  CDR3 for alpha chain variable domain of TCR clone 185367 (TRAV12-3, TRAJ17)
CAMTLTGNKLTF

SEQ ID NO: 370734 - protein, 15 aa, Homo sapiens
  CDR3 for beta chain variable domain of TCR clone 185367 (TRBV12-4, TRBJ2-5)
CASSPPTGRQETQYF

SEQ ID NO: 370735 - protein, 18 aa, Homo sapiens
  CDR3 for alpha chain variable domain of TCR clone 185368 (TRAV13-1, TRAJ52)
CAAKNPNAGGTSYGKLTF

SEQ ID NO: 370736 - protein, 15 aa, Homo sapiens
  CDR3 for beta chain variable domain of TCR clone 185368 (TRBV7-2, TRBJ1-5)
CASSLDRGQDQPQHF

SEQ ID NO: 370737 - protein, 13 aa, Homo sapiens
  CDR3 for alpha chain variable domain of TCR clone 185369 (TRAV3, TRAJ20)
CAVIDTGDYKLSF

SEQ ID NO: 370738 - protein, 15 aa, Homo sapiens
  CDR3 for beta chain variable domain of TCR clone 185369 (TRBV6-1, TRBJ2-7)
CASSEGGGVSYEQYF

SEQ ID NO: 370739 - protein, 14 aa, Homo sapiens
  CDR3 for alpha chain variable domain of TCR clone 185370 (TRAV30, TRAJ9)
CGTDGNTGGFKTIF

SEQ ID NO: 370740 - protein, 14 aa, Homo sapiens
  CDR3 for beta chain variable domain of TCR clone 185370 (TRBV19, TRBJ2-1)
CASPTFVLSGEQFF

SEQ ID NO: 370741 - protein, 14 aa, Homo sapiens
  CDR3 for alpha chain variable domain of TCR clone 185371 (TRAV17, TRAJ42)
CAQNYGGSEGNLIF

SEQ ID NO: 370742 - protein, 13 aa, Homo sapiens
  CDR3 for beta chain variable domain of TCR clone 185371 (TRBV20-1, TRBJ1-2)
CSAPRSGRYGYTF

SEQ ID NO: 370743 - protein, 10 aa, Homo sapiens
  CDR3 for alpha chain variable domain of TCR clone 185372 (TRAV23/DV6, TRAJ57)
CAASSTLSQG

SEQ ID NO: 370744 - protein, 16 aa, Homo sapiens
  CDR3 for beta chain variable domain of TCR clone 185372 (TRBV7-9, TRBJ2-1)
CASSDVAGGSYNEQFF

SEQ ID NO: 370745 - protein, 13 aa, Homo sapiens
  CDR3 for alpha chain variable domain of TCR clone 185373 (TRAV27, TRAJ41)
CAGEGNSGYALNF

SEQ ID NO: 370746 - protein, 13 aa, Homo sapiens
  CDR3 for beta chain variable domain of TCR clone 185373 (TRBV19, TRBJ2-2)
CASRTLGTGELFF

SEQ ID NO: 370747 - protein, 16 aa, Homo sapiens
  CDR3 for alpha chain variable domain of TCR clone 185374 (TRAV30, TRAJ24)
CGTEIVDADSWGKFQF

SEQ ID NO: 370748 - protein, 18 aa, Homo sapiens
  CDR3 for beta chain variable domain of TCR clone 185374 (TRBV12-4, TRBJ2-2)
CASSLVAGTRGRTGELVF

SEQ ID NO: 370749 - protein, 15 aa, Homo sapiens
  CDR3 for alpha chain variable domain of TCR clone 185375 (TRAV38-1, TRAJ57)
CAFMDTQGGSEKLVF

SEQ ID NO: 370750 - protein, 16 aa, Homo sapiens
  CDR3 for beta chain variable domain of TCR clone 185375 (TRBV10-3, TRBJ2-1)
CAIRGGGRGDYNEQFF

SEQ ID NO: 370751 - protein, 12 aa, Homo sapiens
  CDR3 for alpha chain variable domain of TCR clone 185376 (TRAV10, TRAJ34)
CVVSGKHRQAHL

SEQ ID NO: 370752 - protein, 14 aa, Homo sapiens
  CDR3 for beta chain variable domain of TCR clone 185376 (TRBV19, TRBJ2-1)
CASPTFGLSGEQFF

SEQ ID NO: 370753 - protein, 12 aa, Homo sapiens
  CDR3 for alpha chain variable domain of TCR clone 185377 (TRAV12-2, TRAJ8)
CAVNTGFQELVF

SEQ ID NO: 370754 - protein, 14 aa, Homo sapiens
  CDR3 for beta chain variable domain of TCR clone 185377 (TRBV20-1, TRBJ1-1)
CSAQTRIGGTEAFF

SEQ ID NO: 370755 - protein, 16 aa, Homo sapiens
  CDR3 for alpha chain variable domain of TCR clone 185378 (TRAV30, TRAJ24)
CGTEIVDADSWGKFQF

SEQ ID NO: 370756 - protein, 16 aa, Homo sapiens
  CDR3 for beta chain variable domain of TCR clone 185378 (TRBV12-5, TRBJ2-5)
CASVPRTSGNQETQYF

SEQ ID NO: 370757 - protein, 16 aa, Homo sapiens
  CDR3 for alpha chain variable domain of TCR clone 185379 (TRAV3, TRAJ10)
CAVRDMRAGGGNKLTF

SEQ ID NO: 370758 - protein, 13 aa, Homo sapiens
  CDR3 for beta chain variable domain of TCR clone 185379 (TRBV19, TRBJ1-2)
CASSQGQVYGCTF

SEQ ID NO: 370759 - protein, 16 aa, Homo sapiens
  CDR3 for alpha chain variable domain of TCR clone 185380 (TRAV8-3, TRAJ8)
CVVPRDGNTGFQKLVF

SEQ ID NO: 370760 - protein, 14 aa, Homo sapiens
  CDR3 for beta chain variable domain of TCR clone 185380 (TRBV28, TRBJ1-1)
CASSESGRGTEAFF

SEQ ID NO: 370761 - protein, 14 aa, Homo sapiens
  CDR3 for alpha chain variable domain of TCR clone 185381 (TRAV1-2, TRAJ8)
CAVREDTGFQKLVL

SEQ ID NO: 370762 - protein, 15 aa, Homo sapiens
  CDR3 for beta chain variable domain of TCR clone 185381 (TRBV5-1, TRBJ2-1)
CASSPPRAPYNEQFF

SEQ ID NO: 370763 - protein, 14 aa, Homo sapiens
  CDR3 for alpha chain variable domain of TCR clone 185382 (TRAV16, TRAJ33)
CALSAMDSNYQLIW

SEQ ID NO: 370764 - protein, 16 aa, Homo sapiens
  CDR3 for beta chain variable domain of TCR clone 185382 (TRBV20-1, TRBJ2-2)
CSASASGIPGAGELFF

SEQ ID NO: 370765 - protein, 17 aa, Homo sapiens
  CDR3 for alpha chain variable domain of TCR clone 185383 (TRAV5, TRAJ47)
CAESIEASGEYGNKLVF

SEQ ID NO: 370766 - protein, 11 aa, Homo sapiens
  CDR3 for beta chain variable domain of TCR clone 185383 (TRBV7-2, TRBJ1-2)
CASSQTGSTYG

SEQ ID NO: 370767 - protein, 15 aa, Homo sapiens
  CDR3 for alpha chain variable domain of TCR clone 185384 (TRAV8-3, TRAJ45)
CASSYSGGGADGLTF

SEQ ID NO: 370768 - protein, 15 aa, Homo sapiens
  CDR3 for beta chain variable domain of TCR clone 185384 (TRBV10-3, TRBJ2-7)
CASKLAVNYSSTSGR

SEQ ID NO: 370769 - protein, 13 aa, Homo sapiens
  CDR3 for alpha chain variable domain of TCR clone 185385 (TRAV2, TRAJ40)
CAVVTSGTYKYIF

SEQ ID NO: 370770 - protein, 14 aa, Homo sapiens
  CDR3 for beta chain variable domain of TCR clone 185385 (TRBV20-1, TRBJ2-1)
CSAHPGLPDNEQFF

SEQ ID NO: 370771 - protein, 15 aa, Homo sapiens
  CDR3 for alpha chain variable domain of TCR clone 185386 (TRAV17, TRAJ57)
CATGPSQGGSAKLVF

SEQ ID NO: 370772 - protein, 15 aa, Homo sapiens
  CDR3 for beta chain variable domain of TCR clone 185386 (TRBV9, TRBJ1-6)
CASSVAGTGDSPLHF

SEQ ID NO: 370773 - protein, 14 aa, Homo sapiens
  CDR3 for alpha chain variable domain of TCR clone 185387 (TRAV35, TRAJ22)
CAGLGPGSARQLTF

SEQ ID NO: 370774 - protein, 15 aa, Homo sapiens
  CDR3 for beta chain variable domain of TCR clone 185387 (TRBV12-4, TRBJ2-5)
CASSPPTGLQETKYF

SEQ ID NO: 370775 - protein, 10 aa, Homo sapiens
  CDR3 for alpha chain variable domain of TCR clone 185388 (TRAV3, TRAJ18)
CAGPTEAQPW

SEQ ID NO: 370776 - protein, 15 aa, Homo sapiens
  CDR3 for beta chain variable domain of TCR clone 185388 (TRBV6-3, TRBJ2-7)
CASSFPGTVFYEQYF

SEQ ID NO: 370777 - protein, 15 aa, Homo sapiens
  CDR3 for alpha chain variable domain of TCR clone 185389 (TRAV8-4, TRAJ37)
CAVSRGSGNTGKLIF

SEQ ID NO: 370778 - protein, 16 aa, Homo sapiens
  CDR3 for beta chain variable domain of TCR clone 185389 (TRBV7-3, TRBJ2-3)
CASSLSGDRPEDTQYF

SEQ ID NO: 370779 - protein, 14 aa, Homo sapiens
  CDR3 for alpha chain variable domain of TCR clone 185390 (TRAV19, TRAJ5)
CALKKDTGRRAITF

SEQ ID NO: 370780 - protein, 15 aa, Homo sapiens
  CDR3 for beta chain variable domain of TCR clone 185390 (TRBV2, TRBJ2-5)
CASSEAGTRQETQYF

SEQ ID NO: 370781 - protein, 15 aa, Homo sapiens
  CDR3 for alpha chain variable domain of TCR clone 185391 (TRAV21, TRAJ32)
CAVNSYGGATNKLIF

SEQ ID NO: 370782 - protein, 14 aa, Homo sapiens
  CDR3 for beta chain variable domain of TCR clone 185391 (TRBV7-3, TRBJ1-1)
CASSLKGGNTEALF

SEQ ID NO: 370783 - protein, 12 aa, Homo sapiens
  CDR3 for alpha chain variable domain of TCR clone 185392 (TRAV35, TRAJ49)
CAGWNTGNQFYF

SEQ ID NO: 370784 - protein, 14 aa, Homo sapiens
  CDR3 for beta chain variable domain of TCR clone 185392 (TRBV25-1, TRBJ1-1)
CASTHLGGNTEAFF

SEQ ID NO: 370785 - protein, 13 aa, Homo sapiens
  CDR3 for alpha chain variable domain of TCR clone 185393 (TRAV26-2, TRAJ57)
CILSPGGSEKLVF

SEQ ID NO: 370786 - protein, 16 aa, Homo sapiens
  CDR3 for beta chain variable domain of TCR clone 185393 (TRBV18, TRBJ1-5)
CASSPRTGGGNQPQHF

SEQ ID NO: 370787 - protein, 13 aa, Homo sapiens
  CDR3 for alpha chain variable domain of TCR clone 185394 (TRAV8-3, TRAJ48)
CAVVSFGNEKLTF

SEQ ID NO: 370788 - protein, 14 aa, Homo sapiens
  CDR3 for beta chain variable domain of TCR clone 185394 (TRBV18, TRBJ2-7)
CASSPRGGAYEQYF

SEQ ID NO: 370789 - protein, 14 aa, Homo sapiens
  CDR3 for alpha chain variable domain of TCR clone 185395 (TRAV35, TRAJ22)
CAGLRPGSARQLTF

SEQ ID NO: 370790 - protein, 15 aa, Homo sapiens
  CDR3 for beta chain variable domain of TCR clone 185395 (TRBV20-1, TRBJ2-7)
CSATDRVSGMDEQYF

SEQ ID NO: 370791 - protein, 13 aa, Homo sapiens
  CDR3 for alpha chain variable domain of TCR clone 185396 (TRAV3, TRAJ43)
CAVRGVGTMTCAF

SEQ ID NO: 370792 - protein, 12 aa, Homo sapiens
  CDR3 for beta chain variable domain of TCR clone 185396 (TRBV5-1, TRBJ2-7)
CASSLDSYEQYF

SEQ ID NO: 370793 - protein, 17 aa, Homo sapiens
  CDR3 for alpha chain variable domain of TCR clone 185397 (TRAV3, TRAJ6)
CAVRDGPRAGGSYIPTF

SEQ ID NO: 370794 - protein, 13 aa, Homo sapiens
  CDR3 for beta chain variable domain of TCR clone 185397 (TRBV27, TRBJ2-1)
CASRTHGVGEQFF

SEQ ID NO: 370795 - protein, 14 aa, Homo sapiens
  CDR3 for alpha chain variable domain of TCR clone 185398 (TRAV12-2, TRAJ32)
CAHPKSGATNKLIF

SEQ ID NO: 370796 - protein, 14 aa, Homo sapiens
  CDR3 for beta chain variable domain of TCR clone 185398 (TRBV4-2, TRBJ2-3)
CASRETRAPGMQYF

SEQ ID NO: 370797 - protein, 15 aa, Homo sapiens
  CDR3 for alpha chain variable domain of TCR clone 185399 (TRAV3, TRAJ8)
CAVRDNETGFQKLVF

SEQ ID NO: 370798 - protein, 12 aa, Homo sapiens
  CDR3 for beta chain variable domain of TCR clone 185399 (TRBV5-1, TRBJ1-2)
CASSQDTYGYTF

SEQ ID NO: 370799 - protein, 12 aa, Homo sapiens
  CDR3 for alpha chain variable domain of TCR clone 185400 (TRAV21, TRAJ11)
CAATSGYSALTF

SEQ ID NO: 370800 - protein, 14 aa, Homo sapiens
  CDR3 for beta chain variable domain of TCR clone 185400 (TRBV20-1, TRBJ2-7)
CSAPGLAGVGEQYF

SEQ ID NO: 370801 - protein, 13 aa, Homo sapiens
  CDR3 for alpha chain variable domain of TCR clone 185401 (TRAV17, TRAJ26)
CATVDNYGQNFVF

SEQ ID NO: 370802 - protein, 12 aa, Homo sapiens
  CDR3 for beta chain variable domain of TCR clone 185401 (TRBV12-4, TRBJ2-1)
CASSPGRNEQFF

SEQ ID NO: 370803 - protein, 12 aa, Homo sapiens
  CDR3 for alpha chain variable domain of TCR clone 185402 (TRAV12-3, TRAJ17)
CAMTLTGNKLTF

SEQ ID NO: 370804 - protein, 13 aa, Homo sapiens
  CDR3 for beta chain variable domain of TCR clone 185402 (TRBV19, TRBJ1-2)
RASSVPGQDGYTF

SEQ ID NO: 370805 - protein, 15 aa, Homo sapiens
  CDR3 for alpha chain variable domain of TCR clone 185403 (TRAV26-1, TRAJ44)
CTVRANTGTASKLSF

SEQ ID NO: 370806 - protein, 16 aa, Homo sapiens
  CDR3 for beta chain variable domain of TCR clone 185403 (TRBV7-7, TRBJ2-1)
CASSLASGTSYNEQFF

SEQ ID NO: 370807 - protein, 14 aa, Homo sapiens
  CDR3 for alpha chain variable domain of TCR clone 185404 (TRAV1-2, TRAJ16)
CAVNRFSDGQKLLF

SEQ ID NO: 370808 - protein, 16 aa, Homo sapiens
  CDR3 for beta chain variable domain of TCR clone 185404 (TRBV27, TRBJ2-2)
CASSFRGLVRTGELVF

SEQ ID NO: 370809 - protein, 13 aa, Homo sapiens
  CDR3 for alpha chain variable domain of TCR clone 185405 (TRAV12-1, TRAJ21)
CVVIGDNFNKFYF

SEQ ID NO: 370810 - protein, 14 aa, Homo sapiens
  CDR3 for beta chain variable domain of TCR clone 185405 (TRBV7-3, TRBJ2-2)
CASSLYPRTGELFF

SEQ ID NO: 370811 - protein, 13 aa, Homo sapiens
  CDR3 for alpha chain variable domain of TCR clone 185406 (TRAV13-2, TRAJ48)
CAETDFGNEKLTF

SEQ ID NO: 370812 - protein, 15 aa, Homo sapiens
  CDR3 for beta chain variable domain of TCR clone 185406 (TRBV20-1, TRBJ2-7)
CSARDRVSGMDEQYF

SEQ ID NO: 370813 - protein, 14 aa, Homo sapiens
  CDR3 for alpha chain variable domain of TCR clone 185407 (TRAV8-3, TRAJ4)
CAVGAAGGSYKLIF

SEQ ID NO: 370814 - protein, 15 aa, Homo sapiens
  CDR3 for beta chain variable domain of TCR clone 185407 (TRBV6-5, TRBJ2-1)
CASSYDAGAGNEQFF

SEQ ID NO: 370815 - protein, 14 aa, Homo sapiens
  CDR3 for alpha chain variable domain of TCR clone 185408 (TRAV12-3, TRAJ12)
CASVRMDSSYKLIF

SEQ ID NO: 370816 - protein, 16 aa, Homo sapiens
  CDR3 for beta chain variable domain of TCR clone 185408 (TRBV10-3, TRBJ2-5)
CAISPLGQGEAETQYF

SEQ ID NO: 370817 - protein, 15 aa, Homo sapiens
  CDR3 for alpha chain variable domain of TCR clone 185409 (TRAV23/DV6, TRAJ45)
CAASARGGGADGLTF

SEQ ID NO: 370818 - protein, 20 aa, Homo sapiens
  CDR3 for beta chain variable domain of TCR clone 185409 (TRBV7-8, TRBJ2-2)
CASSHLFPGPTIHITGELFF

SEQ ID NO: 370819 - protein, 14 aa, Homo sapiens
  CDR3 for alpha chain variable domain of TCR clone 185410 (TRAV12-2, TRAJ9)
CAVNALEGGFKTIF

SEQ ID NO: 370820 - protein, 16 aa, Homo sapiens
  CDR3 for beta chain variable domain of TCR clone 185410 (TRBV19, TRBJ1-6)
CASSVTPVAGNSPLHF

SEQ ID NO: 370821 - protein, 16 aa, Homo sapiens
  CDR3 for alpha chain variable domain of TCR clone 185411 (TRAV12-2, TRAJ45)
CAVNMYSGVGADGLPF

SEQ ID NO: 370822 - protein, 17 aa, Homo sapiens
  CDR3 for beta chain variable domain of TCR clone 185411 (TRBV6-3, TRBJ2-2)
CASSYRGRDFYTGELFF

SEQ ID NO: 370823 - protein, 13 aa, Homo sapiens
  CDR3 for alpha chain variable domain of TCR clone 185412 (TRAV12-1, TRAJ3)
CVVNPRGPSKIIF

SEQ ID NO: 370824 - protein, 13 aa, Homo sapiens
  CDR3 for beta chain variable domain of TCR clone 185412 (TRBV28, TRBJ1-5)
CASSDRGNQPQHF

SEQ ID NO: 370825 - protein, 13 aa, Homo sapiens
  CDR3 for alpha chain variable domain of TCR clone 185413 (TRAV12-2, TRAJ45)
CAARGGGADGLTF

SEQ ID NO: 370826 - protein, 13 aa, Homo sapiens
  CDR3 for beta chain variable domain of TCR clone 185413 (TRBV6-5, TRBJ2-5)
CASRTAGRETQCF

SEQ ID NO: 370827 - protein, 14 aa, Homo sapiens
  CDR3 for alpha chain variable domain of TCR clone 185414 (TRAV1-2, TRAJ16)
CAVNRFSDGQKLLF

SEQ ID NO: 370828 - protein, 15 aa, Homo sapiens
  CDR3 for beta chain variable domain of TCR clone 185414 (TRBV20-1, TRBJ2-7)
YSARDRVSGMDEQYF

SEQ ID NO: 370829 - protein, 14 aa, Homo sapiens
  CDR3 for alpha chain variable domain of TCR clone 185415 (TRAV12-3, TRAJ21)
CAAPDLYNFNKFYF

SEQ ID NO: 370830 - protein, 13 aa, Homo sapiens
  CDR3 for beta chain variable domain of TCR clone 185415 (TRBV19, TRBJ2-2)
CASSSKNTGELFF

SEQ ID NO: 370831 - protein, 12 aa, Homo sapiens
  CDR3 for alpha chain variable domain of TCR clone 185416 (TRAV27, TRAJ36)
CAGMTGANNHFF

SEQ ID NO: 370832 - protein, 14 aa, Homo sapiens
  CDR3 for beta chain variable domain of TCR clone 185416 (TRBV12-4, TRBJ2-3)
CASSLVPSTDTQYF

SEQ ID NO: 370833 - protein, 15 aa, Homo sapiens
  CDR3 for alpha chain variable domain of TCR clone 185417 (TRAV12-1, TRAJ4)
CVVNPFSGGYNKLIF

SEQ ID NO: 370834 - protein, 13 aa, Homo sapiens
  CDR3 for beta chain variable domain of TCR clone 185417 (TRBV20-1, TRBJ1-2)
CSARGTADYGHTF

SEQ ID NO: 370835 - protein, 12 aa, Homo sapiens
  CDR3 for alpha chain variable domain of TCR clone 185418 (TRAV17, TRAJ20)
CATDGDDYKLSF

SEQ ID NO: 370836 - protein, 18 aa, Homo sapiens
  CDR3 for beta chain variable domain of TCR clone 185418 (TRBV6-5, TRBJ2-5)
CASSYSQAGGSYQETQFF

SEQ ID NO: 370837 - protein, 13 aa, Homo sapiens
  CDR3 for alpha chain variable domain of TCR clone 185419 (TRAV26-2, TRAJ49)
CILNRNTGNQFYF

SEQ ID NO: 370838 - protein, 15 aa, Homo sapiens
  CDR3 for beta chain variable domain of TCR clone 185419 (TRBV2, TRBJ2-1)
CASSELAGSYDEQFF

SEQ ID NO: 370839 - protein, 12 aa, Homo sapiens
  CDR3 for alpha chain variable domain of TCR clone 185420 (TRAV12-2, TRAJ20)
CAVTRNDYKLSF

SEQ ID NO: 370840 - protein, 14 aa, Homo sapiens
  CDR3 for beta chain variable domain of TCR clone 185420 (TRBV7-3, TRBJ2-1)
CASSLAGGTNEQFF

SEQ ID NO: 370841 - protein, 14 aa, Homo sapiens
  CDR3 for alpha chain variable domain of TCR clone 185421 (TRAV12-1, TRAJ17)
CVVNYKAAGNKLTF

SEQ ID NO: 370842 - protein, 15 aa, Homo sapiens
  CDR3 for beta chain variable domain of TCR clone 185421 (TRBV7-2, TRBJ2-1)
CASNHGTGIYNEQFF

SEQ ID NO: 370843 - protein, 15 aa, Homo sapiens
  CDR3 for alpha chain variable domain of TCR clone 185422 (TRAV8-3, TRAJ45)
CASSYSGGGADGLTF

SEQ ID NO: 370844 - protein, 17 aa, Homo sapiens
  CDR3 for beta chain variable domain of TCR clone 185422 (TRBV7-7, TRBJ1-1)
CASIGDRPNLGVTEAFF

SEQ ID NO: 370845 - protein, 17 aa, Homo sapiens
  CDR3 for alpha chain variable domain of TCR clone 185423 (TRAV36/DV7, TRAJ52)
CAVAQRAGGTSYGKLTF

SEQ ID NO: 370846 - protein, 15 aa, Homo sapiens
  CDR3 for beta chain variable domain of TCR clone 185423 (TRBV4-2, TRBJ1-1)
CASSKPGTLKLSLDK

SEQ ID NO: 370847 - protein, 12 aa, Homo sapiens
  CDR3 for alpha chain variable domain of TCR clone 185424 (TRAV21, TRAJ33)
CAKMDSNYQLIW

SEQ ID NO: 370848 - protein, 13 aa, Homo sapiens
  CDR3 for beta chain variable domain of TCR clone 185424 (TRBV11-3, TRBJ2-3)
CASSHDTKDTQYF

SEQ ID NO: 370849 - protein, 14 aa, Homo sapiens
  CDR3 for alpha chain variable domain of TCR clone 185425 (TRAV29/DV5, TRAJ36)
CAARRKTGANNLLF

SEQ ID NO: 370850 - protein, 15 aa, Homo sapiens
  CDR3 for beta chain variable domain of TCR clone 185425 (TRBV29-1, TRBJ2-1)
CSGRDRKSSYNEQFF

SEQ ID NO: 370851 - protein, 14 aa, Homo sapiens
  CDR3 for alpha chain variable domain of TCR clone 185426 (TRAV17, TRAJ6)
CATIPAGGSYIPTF

SEQ ID NO: 370852 - protein, 15 aa, Homo sapiens
  CDR3 for beta chain variable domain of TCR clone 185426 (TRBV2, TRBJ2-5)
CASSGTVAAGETQYF

SEQ ID NO: 370853 - protein, 14 aa, Homo sapiens
  CDR3 for alpha chain variable domain of TCR clone 185427 (TRAV8-3, TRAJ31)
CAVGRGLNNARLMF

SEQ ID NO: 370854 - protein, 15 aa, Homo sapiens
  CDR3 for beta chain variable domain of TCR clone 185427 (TRBV7-2, TRBJ2-2)
CASSLARGLTGELFF

SEQ ID NO: 370855 - protein, 13 aa, Homo sapiens
  CDR3 for alpha chain variable domain of TCR clone 185428 (TRAV12-3, TRAJ54)
CAITLQGAQKLVF

SEQ ID NO: 370856 - protein, 14 aa, Homo sapiens
  CDR3 for beta chain variable domain of TCR clone 185428 (TRBV4-1, TRBJ2-2)
CASSQAVNTGELFF

SEQ ID NO: 370857 - protein, 11 aa, Homo sapiens
  CDR3 for alpha chain variable domain of TCR clone 185429 (TRAV13-1, TRAJ49)
CSFFLFNQFYF

SEQ ID NO: 370858 - protein, 16 aa, Homo sapiens
  CDR3 for beta chain variable domain of TCR clone 185429 (TRBV11-2, TRBJ2-2)
CASSLRTGNLIGELFF

SEQ ID NO: 370859 - protein, 14 aa, Homo sapiens
  CDR3 for alpha chain variable domain of TCR clone 185430 (TRAV1-2, TRAJ8)
CAVREDTGFQNLVF

SEQ ID NO: 370860 - protein, 13 aa, Homo sapiens
  CDR3 for beta chain variable domain of TCR clone 185430 (TRBV7-9, TRBJ1-2)
CASSLKQNYGYTF

SEQ ID NO: 370861 - protein, 15 aa, Homo sapiens
  CDR3 for alpha chain variable domain of TCR clone 185431 (TRAV20, TRAJ43)
CAVQAGKSSNNDMRF

SEQ ID NO: 370862 - protein, 13 aa, Homo sapiens
  CDR3 for beta chain variable domain of TCR clone 185431 (TRBV7-9, TRBJ2-3)
CASSPGSTDTQYF

SEQ ID NO: 370863 - protein, 13 aa, Homo sapiens
  CDR3 for alpha chain variable domain of TCR clone 185432 (TRAV9-2, TRAJ37)
CALHSSDTGKLIF

SEQ ID NO: 370864 - protein, 15 aa, Homo sapiens
  CDR3 for beta chain variable domain of TCR clone 185432 (TRBV7-2, TRBJ2-7)
CASSTPGLTRGEQYF

SEQ ID NO: 370865 - protein, 11 aa, Homo sapiens
  CDR3 for alpha chain variable domain of TCR clone 185433 (TRAV12-2, TRAJ29)
CAVTLRSPLVF

SEQ ID NO: 370866 - protein, 16 aa, Homo sapiens
  CDR3 for beta chain variable domain of TCR clone 185433 (TRBV19, TRBJ1-5)
CASSTDRGGPRQPQHF

SEQ ID NO: 370867 - protein, 14 aa, Homo sapiens
  CDR3 for alpha chain variable domain of TCR clone 185434 (TRAV8-4, TRAJ34)
CAVSDPGDTDKLIF

SEQ ID NO: 370868 - protein, 15 aa, Homo sapiens
  CDR3 for beta chain variable domain of TCR clone 185434 (TRBV11-3, TRBJ2-3)
CASLKDGREGDTQYF

SEQ ID NO: 370869 - protein, 11 aa, Homo sapiens
  CDR3 for alpha chain variable domain of TCR clone 185435 (TRAV13-1, TRAJ23)
CEASSRGKLIF

SEQ ID NO: 370870 - protein, 21 aa, Homo sapiens
  CDR3 for beta chain variable domain of TCR clone 185435 (TRBV7-3, TRBJ2-5)
GGTQPCIFGPAASGGGETQYF

SEQ ID NO: 370871 - protein, 18 aa, Homo sapiens
  CDR3 for alpha chain variable domain of TCR clone 185436 (TRAV1-2, TRAJ8)
CLLPLCCERDTGFQKLVF

SEQ ID NO: 370872 - protein, 15 aa, Homo sapiens
  CDR3 for beta chain variable domain of TCR clone 185436 (TRBV20-1, TRBJ2-7)
CSARDRVSGMDEQYF

SEQ ID NO: 370873 - protein, 15 aa, Homo sapiens
  CDR3 for alpha chain variable domain of TCR clone 185437 (TRAV36/DV7, TRAJ53)
CAVEGSGGSNYKLTF

SEQ ID NO: 370874 - protein, 13 aa, Homo sapiens
  CDR3 for beta chain variable domain of TCR clone 185437 (TRBV4-1, TRBJ2-2)
CASSQENTGELFF

SEQ ID NO: 370875 - protein, 11 aa, Homo sapiens
  CDR3 for alpha chain variable domain of TCR clone 185438 (TRAV4, TRAJ31)
CLVVDNARLMF

SEQ ID NO: 370876 - protein, 15 aa, Homo sapiens
  CDR3 for beta chain variable domain of TCR clone 185438 (TRBV10-2, TRBJ2-6)
CASSEQGTGANVLTS

SEQ ID NO: 370877 - protein, 11 aa, Homo sapiens
  CDR3 for alpha chain variable domain of TCR clone 185439 (TRAV2, TRAJ20)
CAVLNNYKLSF

SEQ ID NO: 370878 - protein, 16 aa, Homo sapiens
  CDR3 for beta chain variable domain of TCR clone 185439 (TRBV12-5, TRBJ2-5)
CASGPRTSGNQETQYF

SEQ ID NO: 370879 - protein, 17 aa, Homo sapiens
  CDR3 for alpha chain variable domain of TCR clone 185440 (TRAV23/DV6, TRAJ57)
CAASSTLSQGGSEKLVF

SEQ ID NO: 370880 - protein, 13 aa, Homo sapiens
  CDR3 for beta chain variable domain of TCR clone 185440 (TRBV6-4, TRBJ1-5)
CASSADLNQPQHF

SEQ ID NO: 370881 - protein, 16 aa, Homo sapiens
  CDR3 for alpha chain variable domain of TCR clone 185441 (TRAV30, TRAJ24)
CGTAIVDADSWGKFQF

SEQ ID NO: 370882 - protein, 15 aa, Homo sapiens
  CDR3 for beta chain variable domain of TCR clone 185441 (TRBV20-1, TRBJ2-4)
CSARDLTGGPNIQYF

SEQ ID NO: 370883 - protein, 15 aa, Homo sapiens
  CDR3 for alpha chain variable domain of TCR clone 185442 (TRAV8-3, TRAJ45)
CASSYSGGGADGLTF

SEQ ID NO: 370884 - protein, 13 aa, Homo sapiens
  CDR3 for beta chain variable domain of TCR clone 185442 (TRBV7-8, TRBJ2-7)
CASSVTGGREQYF

SEQ ID NO: 370885 - protein, 15 aa, Homo sapiens
  CDR3 for alpha chain variable domain of TCR clone 185443 (TRAV8-3, TRAJ45)
CASSYSGGGADGLTF

SEQ ID NO: 370886 - protein, 17 aa, Homo sapiens
  CDR3 for beta chain variable domain of TCR clone 185443 (TRBV20-1, TRBJ2-1)
CSASSSGLAGSYNEQFF

SEQ ID NO: 370887 - protein, 14 aa, Homo sapiens
  CDR3 for alpha chain variable domain of TCR clone 185444 (TRAV12-2, TRAJ13)
CDVKKTGGYQKVTF

SEQ ID NO: 370888 - protein, 12 aa, Homo sapiens
  CDR3 for beta chain variable domain of TCR clone 185444 (TRBV12-4, TRBJ1-2)
CASSFIWLRLRF

SEQ ID NO: 370889 - protein, 16 aa, Homo sapiens
  CDR3 for alpha chain variable domain of TCR clone 185445 (TRAV13-1, TRAJ39)
CAASIVMQATCSPLEG

SEQ ID NO: 370890 - protein, 13 aa, Homo sapiens
  CDR3 for beta chain variable domain of TCR clone 185445 (TRBV20-1, TRBJ1-1)
CSARGGGNTEAFF

SEQ ID NO: 370891 - protein, 11 aa, Homo sapiens
  CDR3 for alpha chain variable domain of TCR clone 185446 (TRAV12-1, TRAJ31)
CVGRVQRQTHV

SEQ ID NO: 370892 - protein, 14 aa, Homo sapiens
  CDR3 for beta chain variable domain of TCR clone 185446 (TRBV28, TRBJ2-1)
CASSYYTAYNEQFL

SEQ ID NO: 370893 - protein, 14 aa, Homo sapiens
  CDR3 for alpha chain variable domain of TCR clone 185447 (TRAV12-2, TRAJ32)
CAHPESGATNKLIF

SEQ ID NO: 370894 - protein, 15 aa, Homo sapiens
  CDR3 for beta chain variable domain of TCR clone 185447 (TRBV28, TRBJ2-1)
CASSIIAGGRSEQFF

SEQ ID NO: 370895 - protein, 13 aa, Homo sapiens
  CDR3 for alpha chain variable domain of TCR clone 185448 (TRAV8-3, TRAJ43)
CAVGPDNNNDIRF

SEQ ID NO: 370896 - protein, 13 aa, Homo sapiens
  CDR3 for beta chain variable domain of TCR clone 185448 (TRBV29-1, TRBJ2-1)
CSVEGGRVNEQFF

SEQ ID NO: 370897 - protein, 15 aa, Homo sapiens
  CDR3 for alpha chain variable domain of TCR clone 185449 (TRAV4, TRAJ10)
CLVGDEEGGGNKLTF

SEQ ID NO: 370898 - protein, 15 aa, Homo sapiens
  CDR3 for beta chain variable domain of TCR clone 185449 (TRBV7-3, TRBJ2-2)
CASSETGQGTGELFF

SEQ ID NO: 370899 - protein, 13 aa, Homo sapiens
  CDR3 for alpha chain variable domain of TCR clone 185450 (TRAV12-1, TRAJ11)
CVVNRAGYSTLTF

SEQ ID NO: 370900 - protein, 15 aa, Homo sapiens
  CDR3 for beta chain variable domain of TCR clone 185450 (TRBV2, TRBJ2-1)
CASSVVGSSGNEQFF

SEQ ID NO: 370901 - protein, 12 aa, Homo sapiens
  CDR3 for alpha chain variable domain of TCR clone 185451 (TRAV13-1, TRAJ34)
CAASKGTDKLIF

SEQ ID NO: 370902 - protein, 15 aa, Homo sapiens
  CDR3 for beta chain variable domain of TCR clone 185451 (TRBV5-1, TRBJ2-7)
CASSLNGGPAREQYF

SEQ ID NO: 370903 - protein, 15 aa, Homo sapiens
  CDR3 for alpha chain variable domain of TCR clone 185452 (TRAV8-3, TRAJ45)
CASSYSGGGADGLTF

SEQ ID NO: 370904 - protein, 13 aa, Homo sapiens
  CDR3 for beta chain variable domain of TCR clone 185452 (TRBV10-3, TRBJ2-7)
CGAKLAVNYEQYF

SEQ ID NO: 370905 - protein, 16 aa, Homo sapiens
  CDR3 for alpha chain variable domain of TCR clone 185453 (TRAV30, TRAJ24)
CGTEIVDADGWGKFQF

SEQ ID NO: 370906 - protein, 13 aa, Homo sapiens
  CDR3 for beta chain variable domain of TCR clone 185453 (TRBV7-9, TRBJ1-2)
CASSLKQNYGYTF

SEQ ID NO: 370907 - protein, 16 aa, Homo sapiens
  CDR3 for alpha chain variable domain of TCR clone 185454 (TRAV30, TRAJ24)
CSTEIVDADSWGKFQF

SEQ ID NO: 370908 - protein, 14 aa, Homo sapiens
  CDR3 for beta chain variable domain of TCR clone 185454 (TRBV12-5, TRBJ2-5)
CASGSRTHQGTQYF

SEQ ID NO: 370909 - protein, 13 aa, Homo sapiens
  CDR3 for alpha chain variable domain of TCR clone 185455 (TRAV27, TRAJ3)
ASLRGSSASKIIF

SEQ ID NO: 370910 - protein, 13 aa, Homo sapiens
  CDR3 for beta chain variable domain of TCR clone 185455 (TRBV7-3, TRBJ1-2)
CASSPDRNYGYTF

SEQ ID NO: 370911 - protein, 14 aa, Homo sapiens
  CDR3 for alpha chain variable domain of TCR clone 185456 (TRAV8-2, TRAJ4)
GVVSPSGGYNKLIF

SEQ ID NO: 370912 - protein, 14 aa, Homo sapiens
  CDR3 for beta chain variable domain of TCR clone 185456 (TRBV19, TRBJ2-5)
CASSSSGIQETQYF

SEQ ID NO: 370913 - protein, 14 aa, Homo sapiens
  CDR3 for alpha chain variable domain of TCR clone 185457 (TRAV1-2, TRAJ16)
CAGNRFSDGQKLLF

SEQ ID NO: 370914 - protein, 13 aa, Homo sapiens
  CDR3 for beta chain variable domain of TCR clone 185457 (TRBV15, TRBJ1-6)
CATSGGLNSPLHF

SEQ ID NO: 370915 - protein, 13 aa, Homo sapiens
  CDR3 for alpha chain variable domain of TCR clone 185458 (TRAV8-6, TRAJ21)
CALSPSSLNKFYF

SEQ ID NO: 370916 - protein, 14 aa, Homo sapiens
  CDR3 for beta chain variable domain of TCR clone 185458 (TRBV7-9, TRBJ2-5)
CASSLDTAQETQYF

SEQ ID NO: 370917 - protein, 15 aa, Homo sapiens
  CDR3 for alpha chain variable domain of TCR clone 185459 (TRAV20, TRAJ4)
CAVEGSSGCYNKLIF

SEQ ID NO: 370918 - protein, 14 aa, Homo sapiens
  CDR3 for beta chain variable domain of TCR clone 185459 (TRBV7-8, TRBJ2-7)
CASTLGGALGEQYF

SEQ ID NO: 370919 - protein, 16 aa, Homo sapiens
  CDR3 for alpha chain variable domain of TCR clone 185460 (TRAV2, TRAJ6)
CAVPWGPSGGSYIPTF

SEQ ID NO: 370920 - protein, 14 aa, Homo sapiens
  CDR3 for beta chain variable domain of TCR clone 185460 (TRBV2, TRBJ2-1)
CASSEQMRESGQFF

SEQ ID NO: 370921 - protein, 13 aa, Homo sapiens
  CDR3 for alpha chain variable domain of TCR clone 185461 (TRAV13-1, TRAJ9)
CAARGTGGFKTIF

SEQ ID NO: 370922 - protein, 14 aa, Homo sapiens
  CDR3 for beta chain variable domain of TCR clone 185461 (TRBV7-2, TRBJ2-7)
CASRSQGAAYEQYF

SEQ ID NO: 370923 - protein, 13 aa, Homo sapiens
  CDR3 for alpha chain variable domain of TCR clone 185462 (TRAV12-1, TRAJ7)
CVVNMRGHNRLAF

SEQ ID NO: 370924 - protein, 15 aa, Homo sapiens
  CDR3 for beta chain variable domain of TCR clone 185462 (TRBV27, TRBJ2-3)
CASSLGLAATDTQYF

SEQ ID NO: 370925 - protein, 14 aa, Homo sapiens
  CDR3 for alpha chain variable domain of TCR clone 185463 (TRAV12-2, TRAJ53)
CAVKGGGSNYKLTF

SEQ ID NO: 370926 - protein, 14 aa, Homo sapiens
  CDR3 for beta chain variable domain of TCR clone 185463 (TRBV19, TRBJ2-1)
CASPTFVLGGEQFF

SEQ ID NO: 370927 - protein, 12 aa, Homo sapiens
  CDR3 for alpha chain variable domain of TCR clone 185464 (TRAV22, TRAJ29)
CAPPSGNTPLVF

SEQ ID NO: 370928 - protein, 14 aa, Homo sapiens
  CDR3 for beta chain variable domain of TCR clone 185464 (TRBV11-2, TRBJ2-7)
CSSSLGAGAYEQYF

SEQ ID NO: 370929 - protein, 12 aa, Homo sapiens
  CDR3 for alpha chain variable domain of TCR clone 185465 (TRAV1-2, TRAJ33)
CAALDSNYQLIW

SEQ ID NO: 370930 - protein, 14 aa, Homo sapiens
  CDR3 for beta chain variable domain of TCR clone 185465 (TRBV27, TRBJ2-1)
CAGSIAETYNEQFF

SEQ ID NO: 370931 - protein, 18 aa, Homo sapiens
  CDR3 for alpha chain variable domain of TCR clone 185466 (TRAV26-2, TRAJ54)
CILRDVGVGVQGAQKLVF

SEQ ID NO: 370932 - protein, 17 aa, Homo sapiens
  CDR3 for beta chain variable domain of TCR clone 185466 (TRBV20-1, TRBJ1-5)
CSASLSPGQGGNQPQHF

SEQ ID NO: 370933 - protein, 13 aa, Homo sapiens
  CDR3 for alpha chain variable domain of TCR clone 185467 (TRAV35, TRAJ32)
CAGVGGATNKLIF

SEQ ID NO: 370934 - protein, 13 aa, Homo sapiens
  CDR3 for beta chain variable domain of TCR clone 185467 (TRBV7-8, TRBJ2-7)
RRVRLTEMGEQYF

SEQ ID NO: 370935 - protein, 14 aa, Homo sapiens
  CDR3 for alpha chain variable domain of TCR clone 185468 (TRAV1-2, TRAJ33)
CAVRAPDSNYTLIW

SEQ ID NO: 370936 - protein, 14 aa, Homo sapiens
  CDR3 for beta chain variable domain of TCR clone 185468 (TRBV11-3, TRBJ1-6)
CASSFSGGDSPLHF

SEQ ID NO: 370937 - protein, 12 aa, Homo sapiens
  CDR3 for alpha chain variable domain of TCR clone 185469 (TRAV21, TRAJ33)
CAKMDSNYQLIW

SEQ ID NO: 370938 - protein, 16 aa, Homo sapiens
  CDR3 for beta chain variable domain of TCR clone 185469 (TRBV5-1, TRBJ2-3)
CACSFALAVVSDTQYF

SEQ ID NO: 370939 - protein, 12 aa, Homo sapiens
  CDR3 for alpha chain variable domain of TCR clone 185470 (TRAV13-1, TRAJ21)
CAAKEGFNKFYF

SEQ ID NO: 370940 - protein, 17 aa, Homo sapiens
  CDR3 for beta chain variable domain of TCR clone 185470 (TRBV18, TRBJ1-5)
CASSPTMGQGTNQPQHF

SEQ ID NO: 370941 - protein, 17 aa, Homo sapiens
  CDR3 for alpha chain variable domain of TCR clone 185471 (TRAV3, TRAJ42)
CAVSDRDYGGSLGNLIF

SEQ ID NO: 370942 - protein, 14 aa, Homo sapiens
  CDR3 for beta chain variable domain of TCR clone 185471 (TRBV7-2, TRBJ1-1)
CASSFLTGTTEAFF

SEQ ID NO: 370943 - protein, 11 aa, Homo sapiens
  CDR3 for alpha chain variable domain of TCR clone 185472 (TRAV12-3, TRAJ6)
CAMSGSYIPTF

SEQ ID NO: 370944 - protein, 13 aa, Homo sapiens
  CDR3 for beta chain variable domain of TCR clone 185472 (TRBV7-9, TRBJ1-2)
CASSLKQNYGYTF

SEQ ID NO: 370945 - protein, 15 aa, Homo sapiens
  CDR3 for alpha chain variable domain of TCR clone 185473 (TRAV23/DV6, TRAJ18)
CAARYSGSTLGRLYF

SEQ ID NO: 370946 - protein, 16 aa, Homo sapiens
  CDR3 for beta chain variable domain of TCR clone 185473 (TRBV20-1, TRBJ1-2)
CSASMGQGVANYGYTF

SEQ ID NO: 370947 - protein, 15 aa, Homo sapiens
  CDR3 for alpha chain variable domain of TCR clone 185474 (TRAV13-2, TRAJ5)
CAENPHWAGRRALTF

SEQ ID NO: 370948 - protein, 16 aa, Homo sapiens
  CDR3 for beta chain variable domain of TCR clone 185474 (TRBV7-9, TRBJ1-3)
CASSQTSGLRMGTIYF

SEQ ID NO: 370949 - protein, 11 aa, Homo sapiens
  CDR3 for alpha chain variable domain of TCR clone 185475 (TRAV4, TRAJ31)
CLEGDNARLMF

SEQ ID NO: 370950 - protein, 16 aa, Homo sapiens
  CDR3 for beta chain variable domain of TCR clone 185475 (TRBV7-2, TRBJ2-5)
CASSSKWLSGQETQYF

SEQ ID NO: 370951 - protein, 12 aa, Homo sapiens
  CDR3 for alpha chain variable domain of TCR clone 185476 (TRAV23/DV6, TRAJ30)
CAASKGDEKIIF

SEQ ID NO: 370952 - protein, 18 aa, Homo sapiens
  CDR3 for beta chain variable domain of TCR clone 185476 (TRBV10-3, TRBJ2-3)
CAISESRVGPMRGDTQYF

SEQ ID NO: 370953 - protein, 16 aa, Homo sapiens
  CDR3 for alpha chain variable domain of TCR clone 185477 (TRAV12-2, TRAJ10)
CAVNRVLTGGGNKLTF

SEQ ID NO: 370954 - protein, 12 aa, Homo sapiens
  CDR3 for beta chain variable domain of TCR clone 185477 (TRBV28, TRBJ2-7)
CASSFSSDEQYF

SEQ ID NO: 370955 - protein, 15 aa, Homo sapiens
  CDR3 for alpha chain variable domain of TCR clone 185478 (TRAV17, TRAJ35)
CATAFVIGFGNVLHC

SEQ ID NO: 370956 - protein, 15 aa, Homo sapiens
  CDR3 for beta chain variable domain of TCR clone 185478 (TRBV7-9, TRBJ2-7)
CASGLALAEAYEQYF

SEQ ID NO: 370957 - protein, 13 aa, Homo sapiens
  CDR3 for alpha chain variable domain of TCR clone 185479 (TRAV12-2, TRAJ42)
CAVQRGSQGNLIF

SEQ ID NO: 370958 - protein, 12 aa, Homo sapiens
  CDR3 for beta chain variable domain of TCR clone 185479 (TRBV5-7, TRBJ1-2)
CASSLVQNGYTF

SEQ ID NO: 370959 - protein, 13 aa, Homo sapiens
  CDR3 for alpha chain variable domain of TCR clone 185480 (TRAV2, TRAJ23)
CAVMGNQGGKLIF

SEQ ID NO: 370960 - protein, 14 aa, Homo sapiens
  CDR3 for beta chain variable domain of TCR clone 185480 (TRBV11-2, TRBJ2-1)
CASSRSTSYNEQFF

SEQ ID NO: 370961 - protein, 17 aa, Homo sapiens
  CDR3 for alpha chain variable domain of TCR clone 185481 (TRAV3, TRAJ42)
CAVRDRDYGGSQGNLIF

SEQ ID NO: 370962 - protein, 13 aa, Homo sapiens
  CDR3 for beta chain variable domain of TCR clone 185481 (TRBV7-9, TRBJ2-5)
CASTPVGQETQYF

SEQ ID NO: 370963 - protein, 14 aa, Homo sapiens
  CDR3 for alpha chain variable domain of TCR clone 185482 (TRAV8-4, TRAJ9)
CAVSDRTGGFKTIF

SEQ ID NO: 370964 - protein, 13 aa, Homo sapiens
  CDR3 for beta chain variable domain of TCR clone 185482 (TRBV11-2, TRBJ2-7)
RASSLGDSYEQYF

SEQ ID NO: 370965 - protein, 13 aa, Homo sapiens
  CDR3 for alpha chain variable domain of TCR clone 185483 (TRAV39, TRAJ58)
CAGEETSGSRLTF

SEQ ID NO: 370966 - protein, 17 aa, Homo sapiens
  CDR3 for beta chain variable domain of TCR clone 185483 (TRBV28, TRBJ2-5)
CASSRQGGLAGAETQYF

SEQ ID NO: 370967 - protein, 12 aa, Homo sapiens
  CDR3 for alpha chain variable domain of TCR clone 185484 (TRAV2, TRAJ9)
CAVGAGGFKTIF

SEQ ID NO: 370968 - protein, 14 aa, Homo sapiens
  CDR3 for beta chain variable domain of TCR clone 185484 (TRBV7-8, TRBJ2-7)
CASSPGLADYEQYF

SEQ ID NO: 370969 - protein, 14 aa, Homo sapiens
  CDR3 for alpha chain variable domain of TCR clone 185485 (TRAV16, TRAJ33)
CALSAMDSNYQLIW

SEQ ID NO: 370970 - protein, 14 aa, Homo sapiens
  CDR3 for beta chain variable domain of TCR clone 185485 (TRBV7-3, TRBJ1-1)
CASSRQGGDTEAFF

SEQ ID NO: 370971 - protein, 18 aa, Homo sapiens
  CDR3 for alpha chain variable domain of TCR clone 185486 (TRAV21, TRAJ45)
CCGGPQGGSGGGAEGLTF

SEQ ID NO: 370972 - protein, 12 aa, Homo sapiens
  CDR3 for beta chain variable domain of TCR clone 185486 (TRBV29-1, TRBJ1-3)
CSTRDSGNTIYF

SEQ ID NO: 370973 - protein, 14 aa, Homo sapiens
  CDR3 for alpha chain variable domain of TCR clone 185487 (TRAV26-1, TRAJ44)
CIFRPTGTASKLTF

SEQ ID NO: 370974 - protein, 12 aa, Homo sapiens
  CDR3 for beta chain variable domain of TCR clone 185487 (TRBV11-3, TRBJ1-1)
CASSLRDSEAFF

SEQ ID NO: 370975 - protein, 17 aa, Homo sapiens
  CDR3 for alpha chain variable domain of TCR clone 185488 (TRAV3, TRAJ6)
CAVRDGPRAGGSYIPTF

SEQ ID NO: 370976 - protein, 15 aa, Homo sapiens
  CDR3 for beta chain variable domain of TCR clone 185488 (TRBV12-4, TRBJ2-5)
CASSGTGQAQETQYF

SEQ ID NO: 370977 - protein, 15 aa, Homo sapiens
  CDR3 for alpha chain variable domain of TCR clone 185489 (TRAV8-1, TRAJ23)
CAVNSHYNQGGKLIF

SEQ ID NO: 370978 - protein, 14 aa, Homo sapiens
  CDR3 for beta chain variable domain of TCR clone 185489 (TRBV4-1, TRBJ2-2)
CASSQAVNTGELFF

SEQ ID NO: 370979 - protein, 14 aa, Homo sapiens
  CDR3 for alpha chain variable domain of TCR clone 185490 (TRAV8-4, TRAJ16)
CAVSPVGRWPEAAL

SEQ ID NO: 370980 - protein, 14 aa, Homo sapiens
  CDR3 for beta chain variable domain of TCR clone 185490 (TRBV7-2, TRBJ2-3)
CASSLRSSTDTQYF

SEQ ID NO: 370981 - protein, 13 aa, Homo sapiens
  CDR3 for alpha chain variable domain of TCR clone 185491 (TRAV13-1, TRAJ11)
CAASKEGYSTLTF

SEQ ID NO: 370982 - protein, 15 aa, Homo sapiens
  CDR3 for beta chain variable domain of TCR clone 185491 (TRBV7-2, TRBJ1-2)
CASSPRAGWNYGYTF

SEQ ID NO: 370983 - protein, 16 aa, Homo sapiens
  CDR3 for alpha chain variable domain of TCR clone 185492 (TRAV1-1, TRAJ45)
FAVRAYSGGGADGLTF

SEQ ID NO: 370984 - protein, 13 aa, Homo sapiens
  CDR3 for beta chain variable domain of TCR clone 185492 (TRBV20-1, TRBJ1-2)
CSARGTADYGYTF

SEQ ID NO: 370985 - protein, 12 aa, Homo sapiens
  CDR3 for alpha chain variable domain of TCR clone 185493 (TRAV27, TRAJ13)
FAGVRGYQKVTF

SEQ ID NO: 370986 - protein, 16 aa, Homo sapiens
  CDR3 for beta chain variable domain of TCR clone 185493 (TRBV28, TRBJ2-1)
CASSSSYSGSLNEQFF

SEQ ID NO: 370987 - protein, 13 aa, Homo sapiens
  CDR3 for alpha chain variable domain of TCR clone 185494 (TRAV8-4, TRAJ30)
CAVSVNRDDTIIF

SEQ ID NO: 370988 - protein, 13 aa, Homo sapiens
  CDR3 for beta chain variable domain of TCR clone 185494 (TRBV3-1, TRBJ2-2)
CASLARGSGELFF

SEQ ID NO: 370989 - protein, 13 aa, Homo sapiens
  CDR3 for alpha chain variable domain of TCR clone 185495 (TRAV13-1, TRAJ5)
WAASDTGRRALTF

SEQ ID NO: 370990 - protein, 12 aa, Homo sapiens
  CDR3 for beta chain variable domain of TCR clone 185495 (TRBV28, TRBJ2-3)
CASSLYRDTQYF

SEQ ID NO: 370991 - protein, 18 aa, Homo sapiens
  CDR3 for alpha chain variable domain of TCR clone 185496 (TRAV9-2, TRAJ52)
CALSRHNAGGTSYGKLTF

SEQ ID NO: 370992 - protein, 13 aa, Homo sapiens
  CDR3 for beta chain variable domain of TCR clone 185496 (TRBV7-9, TRBJ1-2)
CASSLKQNCGYTF

SEQ ID NO: 370993 - protein, 15 aa, Homo sapiens
  CDR3 for alpha chain variable domain of TCR clone 185497 (TRAV12-2, TRAJ43)
CAFDMRFGAGTRLTV

SEQ ID NO: 370994 - protein, 18 aa, Homo sapiens
  CDR3 for beta chain variable domain of TCR clone 185497 (TRBV20-1, TRBJ2-3)
CSASGLVGGPGTTDTQYF

SEQ ID NO: 370995 - protein, 15 aa, Homo sapiens
  CDR3 for alpha chain variable domain of TCR clone 185498 (TRAV12-1, TRAJ44)
CVVFVNTGTASKLTF

SEQ ID NO: 370996 - protein, 11 aa, Homo sapiens
  CDR3 for beta chain variable domain of TCR clone 185498 (TRBV20-1, TRBJ2-1)
CSLSSGSEQFF

SEQ ID NO: 370997 - protein, 16 aa, Homo sapiens
  CDR3 for alpha chain variable domain of TCR clone 185499 (TRAV30, TRAJ48)
CGTEIKTNFGNEKLTF

SEQ ID NO: 370998 - protein, 17 aa, Homo sapiens
  CDR3 for beta chain variable domain of TCR clone 185499 (TRBV27, TRBJ2-1)
CASSSERGGQSADEQFF

SEQ ID NO: 370999 - protein, 16 aa, Homo sapiens
  CDR3 for alpha chain variable domain of TCR clone 185500 (TRAV3, TRAJ10)
CAVRDMRAGGGNKLTF

SEQ ID NO: 371000 - protein, 13 aa, Homo sapiens
  CDR3 for beta chain variable domain of TCR clone 185500 (TRBV5-4, TRBJ1-2)
CASSNRGTYGYTF

SEQ ID NO: 371001 - protein, 13 aa, Homo sapiens
  CDR3 for alpha chain variable domain of TCR clone 185501 (TRAV13-1, TRAJ12)
CSKYMGSSYKLIF

SEQ ID NO: 371002 - protein, 15 aa, Homo sapiens
  CDR3 for beta chain variable domain of TCR clone 185501 (TRBV7-9, TRBJ1-6)
CASSSPGRGNSPLHF

SEQ ID NO: 371003 - protein, 15 aa, Homo sapiens
  CDR3 for alpha chain variable domain of TCR clone 185502 (TRAV27, TRAJ33)
RAGADIMDSNYQLIW

SEQ ID NO: 371004 - protein, 13 aa, Homo sapiens
  CDR3 for beta chain variable domain of TCR clone 185502 (TRBV28, TRBJ1-2)
CATSLQGRGGYTF

SEQ ID NO: 371005 - protein, 14 aa, Homo sapiens
  CDR3 for alpha chain variable domain of TCR clone 185503 (TRAV17, TRAJ22)
CATSPSGSARQLTF

SEQ ID NO: 371006 - protein, 13 aa, Homo sapiens
  CDR3 for beta chain variable domain of TCR clone 185503 (TRBV7-2, TRBJ2-2)
CASSLAVTGELFF

SEQ ID NO: 371007 - protein, 15 aa, Homo sapiens
  CDR3 for alpha chain variable domain of TCR clone 185504 (TRAV8-2, TRAJ40)
CVVLGTTSGTYKYIF

SEQ ID NO: 371008 - protein, 15 aa, Homo sapiens
  CDR3 for beta chain variable domain of TCR clone 185504 (TRBV9, TRBJ1-6)
CASSVAGTGDSPLHF

SEQ ID NO: 371009 - protein, 12 aa, Homo sapiens
  CDR3 for alpha chain variable domain of TCR clone 185505 (TRAV1-2, TRAJ29)
CAVPSGNTPLVF

SEQ ID NO: 371010 - protein, 12 aa, Homo sapiens
  CDR3 for beta chain variable domain of TCR clone 185505 (TRBV12-4, TRBJ2-7)
CASSLGGYEQDF

SEQ ID NO: 371011 - protein, 14 aa, Homo sapiens
  CDR3 for alpha chain variable domain of TCR clone 185506 (TRAV12-1, TRAJ38)
CVVNDAGNNRKLIW

SEQ ID NO: 371012 - protein, 12 aa, Homo sapiens
  CDR3 for beta chain variable domain of TCR clone 185506 (TRBV11-2, TRBJ2-1)
CASSPGNNEQFF

SEQ ID NO: 371013 - protein, 12 aa, Homo sapiens
  CDR3 for alpha chain variable domain of TCR clone 185507 (TRAV12-3, TRAJ42)
CAPGGSQGNLIF

SEQ ID NO: 371014 - protein, 14 aa, Homo sapiens
  CDR3 for beta chain variable domain of TCR clone 185507 (TRBV11-3, TRBJ2-3)
CASSLDPATDTQYF

SEQ ID NO: 371015 - protein, 12 aa, Homo sapiens
  CDR3 for alpha chain variable domain of TCR clone 185508 (TRAV3, TRAJ20)
CAVRDGDYKLSF

SEQ ID NO: 371016 - protein, 16 aa, Homo sapiens
  CDR3 for beta chain variable domain of TCR clone 185508 (TRBV20-1, TRBJ1-4)
CSARPYGGELNEKLFF

SEQ ID NO: 371017 - protein, 12 aa, Homo sapiens
  CDR3 for alpha chain variable domain of TCR clone 185509 (TRAV23/DV6, TRAJ58)
CAARLLRGETSV

SEQ ID NO: 371018 - protein, 13 aa, Homo sapiens
  CDR3 for beta chain variable domain of TCR clone 185509 (TRBV6-4, TRBJ1-5)
CASSADLNQPQHF

SEQ ID NO: 371019 - protein, 16 aa, Homo sapiens
  CDR3 for alpha chain variable domain of TCR clone 185510 (TRAV26-1, TRAJ58)
IASSESGETSGSRLTF

SEQ ID NO: 371020 - protein, 14 aa, Homo sapiens
  CDR3 for beta chain variable domain of TCR clone 185510 (TRBV9, TRBJ2-1)
CASSVDHRGKEQFF

SEQ ID NO: 371021 - protein, 12 aa, Homo sapiens
  CDR3 for alpha chain variable domain of TCR clone 185511 (TRAV3, TRAJ20)
CAVRDGDDKLSF

SEQ ID NO: 371022 - protein, 13 aa, Homo sapiens
  CDR3 for beta chain variable domain of TCR clone 185511 (TRBV9, TRBJ2-1)
CASSVGQGGEQFF

SEQ ID NO: 371023 - protein, 17 aa, Homo sapiens
  CDR3 for alpha chain variable domain of TCR clone 185512 (TRAV8-6, TRAJ58)
CAVSSWVGETSGSRLTF

SEQ ID NO: 371024 - protein, 13 aa, Homo sapiens
  CDR3 for beta chain variable domain of TCR clone 185512 (TRBV7-6, TRBJ1-2)
CASSSRTLAGYTF

SEQ ID NO: 371025 - protein, 15 aa, Homo sapiens
  CDR3 for alpha chain variable domain of TCR clone 185513 (TRAV13-1, TRAJ8)
CAASIPNTGFQKLVF

SEQ ID NO: 371026 - protein, 15 aa, Homo sapiens
  CDR3 for beta chain variable domain of TCR clone 185513 (TRBV28, TRBJ2-1)
CASSIIAGGRSEQFF

SEQ ID NO: 371027 - protein, 11 aa, Homo sapiens
  CDR3 for alpha chain variable domain of TCR clone 185514 (TRAV1-1, TRAJ30)
CAQNRDDKIIF

SEQ ID NO: 371028 - protein, 17 aa, Homo sapiens
  CDR3 for beta chain variable domain of TCR clone 185514 (TRBV13, TRBJ2-3)
CASSLSRVAGGRNTQYF

SEQ ID NO: 371029 - protein, 14 aa, Homo sapiens
  CDR3 for alpha chain variable domain of TCR clone 185515 (TRAV12-2, TRAJ53)
CAVKGGGSNYKPKF

SEQ ID NO: 371030 - protein, 17 aa, Homo sapiens
  CDR3 for beta chain variable domain of TCR clone 185515 (TRBV7-2, TRBJ1-4)
CASSFKAGPTTNEKLFF

SEQ ID NO: 371031 - protein, 12 aa, Homo sapiens
  CDR3 for alpha chain variable domain of TCR clone 185516 (TRAV13-2, TRAJ23)
CAERHRGGKLIF

SEQ ID NO: 371032 - protein, 13 aa, Homo sapiens
  CDR3 for beta chain variable domain of TCR clone 185516 (TRBV15, TRBJ1-6)
CATSGCLNSPLHF

SEQ ID NO: 371033 - protein, 15 aa, Homo sapiens
  CDR3 for alpha chain variable domain of TCR clone 185517 (TRAV13-1, TRAJ10)
CAAAILTGGGNKLTF

SEQ ID NO: 371034 - protein, 15 aa, Homo sapiens
  CDR3 for beta chain variable domain of TCR clone 185517 (TRBV2, TRBJ2-7)
CASTLLGSGATEQYF

SEQ ID NO: 371035 - protein, 17 aa, Homo sapiens
  CDR3 for alpha chain variable domain of TCR clone 185518 (TRAV29/DV5, TRAJ45)
CAADGPFSGGGADGLTF

SEQ ID NO: 371036 - protein, 13 aa, Homo sapiens
  CDR3 for beta chain variable domain of TCR clone 185518 (TRBV20-1, TRBJ1-1)
CSARVGGNTEAFF

SEQ ID NO: 371037 - protein, 16 aa, Homo sapiens
  CDR3 for alpha chain variable domain of TCR clone 185519 (TRAV12-3, TRAJ53)
CAMSPGSGGSNYKLTF

SEQ ID NO: 371038 - protein, 14 aa, Homo sapiens
  CDR3 for beta chain variable domain of TCR clone 185519 (TRBV7-6, TRBJ2-3)
CASSLTGGTDTQYF

SEQ ID NO: 371039 - protein, 15 aa, Homo sapiens
  CDR3 for alpha chain variable domain of TCR clone 185520 (TRAV12-3, TRAJ11)
CSMSEENSGYSTLTF

SEQ ID NO: 371040 - protein, 16 aa, Homo sapiens
  CDR3 for beta chain variable domain of TCR clone 185520 (TRBV5-1, TRBJ2-7)
CTSSLEGLAGLYEQYF

SEQ ID NO: 371041 - protein, 12 aa, Homo sapiens
  CDR3 for alpha chain variable domain of TCR clone 185521 (TRAV13-1, TRAJ53)
AASGGSNYKLTF

SEQ ID NO: 371042 - protein, 13 aa, Homo sapiens
  CDR3 for beta chain variable domain of TCR clone 185521 (TRBV19, TRBJ1-2)
CASSVPGQDGYTF

SEQ ID NO: 371043 - protein, 14 aa, Homo sapiens
  CDR3 for alpha chain variable domain of TCR clone 185522 (TRAV35, TRAJ13)
CAGSPSGGYQKVTF

SEQ ID NO: 371044 - protein, 15 aa, Homo sapiens
  CDR3 for beta chain variable domain of TCR clone 185522 (TRBV11-3, TRBJ2-3)
CASLKDGLEGDTQYF

SEQ ID NO: 371045 - protein, 12 aa, Homo sapiens
  CDR3 for alpha chain variable domain of TCR clone 185523 (TRAV12-2, TRAJ42)
CAVGGSQGNLIF

SEQ ID NO: 371046 - protein, 15 aa, Homo sapiens
  CDR3 for beta chain variable domain of TCR clone 185523 (TRBV7-3, TRBJ2-2)
CQQLKAGGLVRGAVF

SEQ ID NO: 371047 - protein, 12 aa, Homo sapiens
  CDR3 for alpha chain variable domain of TCR clone 185524 (TRAV25, TRAJ5)
CAGGGGRRAFTF

SEQ ID NO: 371048 - protein, 15 aa, Homo sapiens
  CDR3 for beta chain variable domain of TCR clone 185524 (TRBV19, TRBJ2-4)
CASRGPRRGENIQYF

SEQ ID NO: 371049 - protein, 16 aa, Homo sapiens
  CDR3 for alpha chain variable domain of TCR clone 185525 (TRAV26-1, TRAJ46)
CIVRVGKEKQRRQADF

SEQ ID NO: 371050 - protein, 15 aa, Homo sapiens
  CDR3 for beta chain variable domain of TCR clone 185525 (TRBV20-1, TRBJ2-7)
CSAGDRVSGMDEQYF

SEQ ID NO: 371051 - protein, 14 aa, Homo sapiens
  CDR3 for alpha chain variable domain of TCR clone 185526 (TRAV29/DV5, TRAJ44)
CAAFLVGTASKLTF

SEQ ID NO: 371052 - protein, 12 aa, Homo sapiens
  CDR3 for beta chain variable domain of TCR clone 185526 (TRBV7-9, TRBJ2-7)
CASSLEGYEQYF

SEQ ID NO: 371053 - protein, 15 aa, Homo sapiens
  CDR3 for alpha chain variable domain of TCR clone 185527 (TRAV3, TRAJ37)
CAVIRSSSNTGKLIF

SEQ ID NO: 371054 - protein, 14 aa, Homo sapiens
  CDR3 for beta chain variable domain of TCR clone 185527 (TRBV19, TRBJ2-1)
CASPTFVLSGEQFF

SEQ ID NO: 371055 - protein, 14 aa, Homo sapiens
  CDR3 for alpha chain variable domain of TCR clone 185528 (TRAV12-2, TRAJ17)
CAVLFKASGNKLTF

SEQ ID NO: 371056 - protein, 14 aa, Homo sapiens
  CDR3 for beta chain variable domain of TCR clone 185528 (TRBV12-5, TRBJ2-5)
CASGSRTHQETQYF

SEQ ID NO: 371057 - protein, 13 aa, Homo sapiens
  CDR3 for alpha chain variable domain of TCR clone 185529 (TRAV16, TRAJ54)
CALKVRGAQKLVF

SEQ ID NO: 371058 - protein, 13 aa, Homo sapiens
  CDR3 for beta chain variable domain of TCR clone 185529 (TRBV20-1, TRBJ1-1)
CNARGGGNTEAFF

SEQ ID NO: 371059 - protein, 12 aa, Homo sapiens
  CDR3 for alpha chain variable domain of TCR clone 185530 (TRAV27, TRAJ42)
CAGGGSQGNLIF

SEQ ID NO: 371060 - protein, 13 aa, Homo sapiens
  CDR3 for beta chain variable domain of TCR clone 185530 (TRBV19, TRBJ2-7)
CASSIRSSYEQYF

SEQ ID NO: 371061 - protein, 15 aa, Homo sapiens
  CDR3 for alpha chain variable domain of TCR clone 185531 (TRAV2, TRAJ15)
CAVEDRGQAGTALIF

SEQ ID NO: 371062 - protein, 17 aa, Homo sapiens
  CDR3 for beta chain variable domain of TCR clone 185531 (TRBV19, TRBJ2-7)
CASSISFYDSYPYEQYF

SEQ ID NO: 371063 - protein, 11 aa, Homo sapiens
  CDR3 for alpha chain variable domain of TCR clone 185532 (TRAV12-1, TRAJ30)
CVVNGKDKIIF

SEQ ID NO: 371064 - protein, 12 aa, Homo sapiens
  CDR3 for beta chain variable domain of TCR clone 185532 (TRBV27, TRBJ2-2)
CASKLFTGELFF

SEQ ID NO: 371065 - protein, 17 aa, Homo sapiens
  CDR3 for alpha chain variable domain of TCR clone 185533 (TRAV35, TRAJ28)
CAGLQVYSGAGSYQLTF

SEQ ID NO: 371066 - protein, 13 aa, Homo sapiens
  CDR3 for beta chain variable domain of TCR clone 185533 (TRBV7-2, TRBJ2-7)
CASSSPSGSEQYF

SEQ ID NO: 371067 - protein, 14 aa, Homo sapiens
  CDR3 for alpha chain variable domain of TCR clone 185534 (TRAV1-2, TRAJ27)
CAVRSGTNAGTSTF

SEQ ID NO: 371068 - protein, 15 aa, Homo sapiens
  CDR3 for beta chain variable domain of TCR clone 185534 (TRBV18, TRBJ2-7)
CASSPLQGRTYEQYF

SEQ ID NO: 371069 - protein, 12 aa, Homo sapiens
  CDR3 for alpha chain variable domain of TCR clone 185535 (TRAV36/DV7, TRAJ54)
CAVVRGAQKLVF

SEQ ID NO: 371070 - protein, 13 aa, Homo sapiens
  CDR3 for beta chain variable domain of TCR clone 185535 (TRBV11-2, TRBJ2-1)
CASSLDLVNEQFF

SEQ ID NO: 371071 - protein, 15 aa, Homo sapiens
  CDR3 for alpha chain variable domain of TCR clone 185536 (TRAV39, TRAJ32)
CAVDMEGGATNKLIF

SEQ ID NO: 371072 - protein, 14 aa, Homo sapiens
  CDR3 for beta chain variable domain of TCR clone 185536 (TRBV7-3, TRBJ1-1)
CASSLKGGNTEAFF

SEQ ID NO: 371073 - protein, 15 aa, Homo sapiens
  CDR3 for alpha chain variable domain of TCR clone 185537 (TRAV2, TRAJ22)
CTVSSRGGSARQLTF

SEQ ID NO: 371074 - protein, 11 aa, Homo sapiens
  CDR3 for beta chain variable domain of TCR clone 185537 (TRBV27, TRBJ2-3)
CASSLGDTQYF

SEQ ID NO: 371075 - protein, 15 aa, Homo sapiens
  CDR3 for alpha chain variable domain of TCR clone 185538 (TRAV3, TRAJ5)
CAVGDRKTGRRALTF

SEQ ID NO: 371076 - protein, 15 aa, Homo sapiens
  CDR3 for beta chain variable domain of TCR clone 185538 (TRBV7-9, TRBJ2-2)
CASGPLDTFPGELFF

SEQ ID NO: 371077 - protein, 12 aa, Homo sapiens
  CDR3 for alpha chain variable domain of TCR clone 185539 (TRAV25, TRAJ11)
CAGASGYSTLTF

SEQ ID NO: 371078 - protein, 15 aa, Homo sapiens
  CDR3 for beta chain variable domain of TCR clone 185539 (TRBV28, TRBJ1-2)
CASSRDREGGYGYTF

SEQ ID NO: 371079 - protein, 15 aa, Homo sapiens
  CDR3 for alpha chain variable domain of TCR clone 185540 (TRAV2, TRAJ24)
CAVEALTDSWGKFQF

SEQ ID NO: 371080 - protein, 13 aa, Homo sapiens
  CDR3 for beta chain variable domain of TCR clone 185540 (TRBV10-2, TRBJ2-7)
CASGTSGGYEQYF

SEQ ID NO: 371081 - protein, 14 aa, Homo sapiens
  CDR3 for alpha chain variable domain of TCR clone 185541 (TRAV12-3, TRAJ10)
SHLPLTGGGNKLTF

SEQ ID NO: 371082 - protein, 12 aa, Homo sapiens
  CDR3 for beta chain variable domain of TCR clone 185541 (TRBV7-6, TRBJ2-3)
CQQLSRGRYAVF

SEQ ID NO: 371083 - protein, 20 aa, Homo sapiens
  CDR3 for alpha chain variable domain of TCR clone 185542 (TRAV13-1, TRAJ28)
CAASPVPILWGWELPTHFRE

SEQ ID NO: 371084 - protein, 13 aa, Homo sapiens
  CDR3 for beta chain variable domain of TCR clone 185542 (TRBV15, TRBJ2-7)
CATSTTGHYEQYF

SEQ ID NO: 371085 - protein, 17 aa, Homo sapiens
  CDR3 for alpha chain variable domain of TCR clone 185543 (TRAV3, TRAJ6)
CAVRDGTRAGGSYIPTF

SEQ ID NO: 371086 - protein, 15 aa, Homo sapiens
  CDR3 for beta chain variable domain of TCR clone 185543 (TRBV5-1, TRBJ2-7)
CASSLNGGPAREQYF

SEQ ID NO: 371087 - protein, 13 aa, Homo sapiens
  CDR3 for alpha chain variable domain of TCR clone 185544 (TRAV26-2, TRAJ43)
CILRAVNNNDMRF

SEQ ID NO: 371088 - protein, 14 aa, Homo sapiens
  CDR3 for beta chain variable domain of TCR clone 185544 (TRBV20-1, TRBJ1-1)
CSAQTRIEGTEAFF

SEQ ID NO: 371089 - protein, 16 aa, Homo sapiens
  CDR3 for alpha chain variable domain of TCR clone 185545 (TRAV30, TRAJ24)
CGTEIVDADSWGKFQF

SEQ ID NO: 371090 - protein, 16 aa, Homo sapiens
  CDR3 for beta chain variable domain of TCR clone 185545 (TRBV28, TRBJ1-3)
CASSPMTVYSGNTIYF

SEQ ID NO: 371091 - protein, 14 aa, Homo sapiens
  CDR3 for alpha chain variable domain of TCR clone 185546 (TRAV12-3, TRAJ42)
CAMNYGGSQGNLIF

SEQ ID NO: 371092 - protein, 15 aa, Homo sapiens
  CDR3 for beta chain variable domain of TCR clone 185546 (TRBV5-7, TRBJ1-5)
GASSYGKLWDQPQHF

SEQ ID NO: 371093 - protein, 10 aa, Homo sapiens
  CDR3 for alpha chain variable domain of TCR clone 185547 (TRAV13-1, TRAJ15)
INQAGTALIF

SEQ ID NO: 371094 - protein, 14 aa, Homo sapiens
  CDR3 for beta chain variable domain of TCR clone 185547 (TRBV7-9, TRBJ2-1)
CASSDNSRYNEQFF

SEQ ID NO: 371095 - protein, 14 aa, Homo sapiens
  CDR3 for alpha chain variable domain of TCR clone 185548 (TRAV8-2, TRAJ37)
CVVSISGNTGKLIF

SEQ ID NO: 371096 - protein, 17 aa, Homo sapiens
  CDR3 for beta chain variable domain of TCR clone 185548 (TRBV7-6, TRBJ2-5)
CASSSPQAGDPSETQYF

SEQ ID NO: 371097 - protein, 21 aa, Homo sapiens
  CDR3 for alpha chain variable domain of TCR clone 185549 (TRAV3, TRAJ22)
HLKKPFAQEEDSAMYLRQLTF

SEQ ID NO: 371098 - protein, 13 aa, Homo sapiens
  CDR3 for beta chain variable domain of TCR clone 185549 (TRBV7-3, TRBJ2-1)
CASSLDSYNEQFF

SEQ ID NO: 371099 - protein, 14 aa, Homo sapiens
  CDR3 for alpha chain variable domain of TCR clone 185550 (TRAV12-2, TRAJ44)
CAVNPAGTASKLTF

SEQ ID NO: 371100 - protein, 15 aa, Homo sapiens
  CDR3 for beta chain variable domain of TCR clone 185550 (TRBV27, TRBJ1-5)
CASSLGTGFDQPQHF

SEQ ID NO: 371101 - protein, 14 aa, Homo sapiens
  CDR3 for alpha chain variable domain of TCR clone 185551 (TRAV12-1, TRAJ12)
CVMNPMDSSYILIF

SEQ ID NO: 371102 - protein, 13 aa, Homo sapiens
  CDR3 for beta chain variable domain of TCR clone 185551 (TRBV28, TRBJ2-2)
CASVRESTGELFF

SEQ ID NO: 371103 - protein, 14 aa, Homo sapiens
  CDR3 for alpha chain variable domain of TCR clone 185552 (TRAV16, TRAJ42)
CALLAGGSQGNLIF

SEQ ID NO: 371104 - protein, 13 aa, Homo sapiens
  CDR3 for beta chain variable domain of TCR clone 185552 (TRBV7-9, TRBJ1-2)
CASSLKQTYGYTF

SEQ ID NO: 371105 - protein, 13 aa, Homo sapiens
  CDR3 for alpha chain variable domain of TCR clone 185553 (TRAV38-1, TRAJ42)
CARWGGSQGNLIF

SEQ ID NO: 371106 - protein, 17 aa, Homo sapiens
  CDR3 for beta chain variable domain of TCR clone 185553 (TRBV20-1, TRBJ2-1)
WSARDPLAGVWDNEQFF

SEQ ID NO: 371107 - protein, 12 aa, Homo sapiens
  CDR3 for alpha chain variable domain of TCR clone 185554 (TRAV13-1, TRAJ48)
CAANFGNEKLTF

SEQ ID NO: 371108 - protein, 13 aa, Homo sapiens
  CDR3 for beta chain variable domain of TCR clone 185554 (TRBV7-3, TRBJ1-1)
CASSQDWGAEASF

SEQ ID NO: 371109 - protein, 12 aa, Homo sapiens
  CDR3 for alpha chain variable domain of TCR clone 185555 (TRAV13-1, TRAJ3)
CAATGVQQCFQA

SEQ ID NO: 371110 - protein, 16 aa, Homo sapiens
  CDR3 for beta chain variable domain of TCR clone 185555 (TRBV7-3, TRBJ2-2)
CASSLKRGTLSGELFF

SEQ ID NO: 371111 - protein, 14 aa, Homo sapiens
  CDR3 for alpha chain variable domain of TCR clone 185556 (TRAV1-2, TRAJ16)
CAVNRFSDGQKLLF

SEQ ID NO: 371112 - protein, 14 aa, Homo sapiens
  CDR3 for beta chain variable domain of TCR clone 185556 (TRBV7-2, TRBJ2-1)
CASGPPGAPNEQFF

SEQ ID NO: 371113 - protein, 13 aa, Homo sapiens
  CDR3 for alpha chain variable domain of TCR clone 185557 (TRAV27, TRAJ41)
CAGEGNSGYALNF

SEQ ID NO: 371114 - protein, 12 aa, Homo sapiens
  CDR3 for beta chain variable domain of TCR clone 185557 (TRBV7-2, TRBJ2-2)
CATQIVTGELFF

SEQ ID NO: 371115 - protein, 20 aa, Homo sapiens
  CDR3 for alpha chain variable domain of TCR clone 185558 (TRAV27, TRAJ41)
CAVRTQIPDIQNPDPAVYQL

SEQ ID NO: 371116 - protein, 16 aa, Homo sapiens
  CDR3 for beta chain variable domain of TCR clone 185558 (TRBV5-1, TRBJ2-3)
CASSLGRAVYTDTLYF

SEQ ID NO: 371117 - protein, 15 aa, Homo sapiens
  CDR3 for alpha chain variable domain of TCR clone 185559 (TRAV17, TRAJ54)
CATEKLGQGAQKLVF

SEQ ID NO: 371118 - protein, 15 aa, Homo sapiens
  CDR3 for beta chain variable domain of TCR clone 185559 (TRBV7-6, TRBJ2-7)
CASSLGGAEPYEQYF

SEQ ID NO: 371119 - protein, 12 aa, Homo sapiens
  CDR3 for alpha chain variable domain of TCR clone 185560 (TRAV8-3, TRAJ15)
CAGNQAGTALIF

SEQ ID NO: 371120 - protein, 17 aa, Homo sapiens
  CDR3 for beta chain variable domain of TCR clone 185560 (TRBV7-3, TRBJ2-3)
CASSLMKRMRGADTQYF

SEQ ID NO: 371121 - protein, 16 aa, Homo sapiens
  CDR3 for alpha chain variable domain of TCR clone 185561 (TRAV12-3, TRAJ53)
CAMSPRSGGSNYKLTF

SEQ ID NO: 371122 - protein, 14 aa, Homo sapiens
  CDR3 for beta chain variable domain of TCR clone 185561 (TRBV4-2, TRBJ2-1)
CASGLDRAYNEQFF

SEQ ID NO: 371123 - protein, 12 aa, Homo sapiens
  CDR3 for alpha chain variable domain of TCR clone 185562 (TRAV25, TRAJ20)
CAGRSNDYKLSF

SEQ ID NO: 371124 - protein, 15 aa, Homo sapiens
  CDR3 for beta chain variable domain of TCR clone 185562 (TRBV7-6, TRBJ2-7)
CASSGRRDTFGEQYV

SEQ ID NO: 371125 - protein, 11 aa, Homo sapiens
  CDR3 for alpha chain variable domain of TCR clone 185563 (TRAV17, TRAJ36)
CAPTGANNLIF

SEQ ID NO: 371126 - protein, 13 aa, Homo sapiens
  CDR3 for beta chain variable domain of TCR clone 185563 (TRBV20-1, TRBJ1-1)
CSAPPGGHTEAFF

SEQ ID NO: 371127 - protein, 12 aa, Homo sapiens
  CDR3 for alpha chain variable domain of TCR clone 185564 (TRAV8-3, TRAJ26)
CAGDNYGQNFVF

SEQ ID NO: 371128 - protein, 16 aa, Homo sapiens
  CDR3 for beta chain variable domain of TCR clone 185564 (TRBV6-1, TRBJ2-2)
CASSFGQGANTGELFF

SEQ ID NO: 371129 - protein, 15 aa, Homo sapiens
  CDR3 for alpha chain variable domain of TCR clone 185565 (TRAV3, TRAJ22)
CAVRDRGGSARQLTF

SEQ ID NO: 371130 - protein, 15 aa, Homo sapiens
  CDR3 for beta chain variable domain of TCR clone 185565 (TRBV19, TRBJ2-4)
CASRGPRRGENIQYF

SEQ ID NO: 371131 - protein, 14 aa, Homo sapiens
  CDR3 for alpha chain variable domain of TCR clone 185566 (TRAV20, TRAJ16)
CAVRFFSDGQKLLF

SEQ ID NO: 371132 - protein, 15 aa, Homo sapiens
  CDR3 for beta chain variable domain of TCR clone 185566 (TRBV20-1, TRBJ2-5)
CSATRTSGSLETQYF

SEQ ID NO: 371133 - protein, 13 aa, Homo sapiens
  CDR3 for alpha chain variable domain of TCR clone 185567 (TRAV2, TRAJ15)
CAVASQAGTALIF

SEQ ID NO: 371134 - protein, 16 aa, Homo sapiens
  CDR3 for beta chain variable domain of TCR clone 185567 (TRBV7-8, TRBJ2-4)
CASSAERTLAKNIQYI

SEQ ID NO: 371135 - protein, 11 aa, Homo sapiens
  CDR3 for alpha chain variable domain of TCR clone 185568 (TRAV21, TRAJ39)
LLVNAGNMLTF

SEQ ID NO: 371136 - protein, 15 aa, Homo sapiens
  CDR3 for beta chain variable domain of TCR clone 185568 (TRBV7-8, TRBJ1-1)
CASSLGDSRNTEAFF

SEQ ID NO: 371137 - protein, 15 aa, Homo sapiens
  CDR3 for alpha chain variable domain of TCR clone 185569 (TRAV23/DV6, TRAJ18)
CAARYRGPTLGRLYF

SEQ ID NO: 371138 - protein, 13 aa, Homo sapiens
  CDR3 for beta chain variable domain of TCR clone 185569 (TRBV7-2, TRBJ2-7)
CASSSPSGSKQYF

SEQ ID NO: 371139 - protein, 16 aa, Homo sapiens
  CDR3 for alpha chain variable domain of TCR clone 185570 (TRAV1-2, TRAJ16)
CAVNRFSDGRSCSLRG

SEQ ID NO: 371140 - protein, 15 aa, Homo sapiens
  CDR3 for beta chain variable domain of TCR clone 185570 (TRBV9, TRBJ1-6)
CASSVAGTGDSPLHF

SEQ ID NO: 371141 - protein, 14 aa, Homo sapiens
  CDR3 for alpha chain variable domain of TCR clone 185571 (TRAV1-2, TRAJ16)
CAVNRFSDGQKLLF

SEQ ID NO: 371142 - protein, 16 aa, Homo sapiens
  CDR3 for beta chain variable domain of TCR clone 185571 (TRBV6-5, TRBJ2-2)
CASSLSGFWVTGELFF

SEQ ID NO: 371143 - protein, 13 aa, Homo sapiens
  CDR3 for alpha chain variable domain of TCR clone 185572 (TRAV20, TRAJ37)
CAGCSSNTGRLIF

SEQ ID NO: 371144 - protein, 15 aa, Homo sapiens
  CDR3 for beta chain variable domain of TCR clone 185572 (TRBV20-1, TRBJ2-7)
CSAESGTSGAYEQYF

SEQ ID NO: 371145 - protein, 15 aa, Homo sapiens
  CDR3 for alpha chain variable domain of TCR clone 185573 (TRAV21, TRAJ53)
FATLNSGGSNYKLTF

SEQ ID NO: 371146 - protein, 14 aa, Homo sapiens
  CDR3 for beta chain variable domain of TCR clone 185573 (TRBV15, TRBJ1-2)
CATSRASVNYGYTF

SEQ ID NO: 371147 - protein, 15 aa, Homo sapiens
  CDR3 for alpha chain variable domain of TCR clone 185574 (TRAV13-1, TRAJ36)
CAASIRQTGANNPFF

SEQ ID NO: 371148 - protein, 17 aa, Homo sapiens
  CDR3 for beta chain variable domain of TCR clone 185574 (TRBV20-1, TRBJ2-2)
CSARDRNSGRHTGELFF

SEQ ID NO: 371149 - protein, 11 aa, Homo sapiens
  CDR3 for alpha chain variable domain of TCR clone 185575 (TRAV2, TRAJ13)
CASGGYQKVTF

SEQ ID NO: 371150 - protein, 16 aa, Homo sapiens
  CDR3 for beta chain variable domain of TCR clone 185575 (TRBV2, TRBJ2-1)
CASSFGGSLSYNEQFF

SEQ ID NO: 371151 - protein, 13 aa, Homo sapiens
  CDR3 for alpha chain variable domain of TCR clone 185576 (TRAV30, TRAJ39)
CGTEKNAGNMLTF

SEQ ID NO: 371152 - protein, 12 aa, Homo sapiens
  CDR3 for beta chain variable domain of TCR clone 185576 (TRBV12-4, TRBJ2-1)
CASSSAQETQYF

SEQ ID NO: 371153 - protein, 13 aa, Homo sapiens
  CDR3 for alpha chain variable domain of TCR clone 185577 (TRAV2, TRAJ40)
CAVFTSGTYKYIF

SEQ ID NO: 371154 - protein, 13 aa, Homo sapiens
  CDR3 for beta chain variable domain of TCR clone 185577 (TRBV7-9, TRBJ2-5)
CASLPSGRETQYF

SEQ ID NO: 371155 - protein, 15 aa, Homo sapiens
  CDR3 for alpha chain variable domain of TCR clone 185578 (TRAV3, TRAJ22)
CAVRDRGGSARQLPF

SEQ ID NO: 371156 - protein, 12 aa, Homo sapiens
  CDR3 for beta chain variable domain of TCR clone 185578 (TRBV7-8, TRBJ2-1)
CASSLGHNEQFF

SEQ ID NO: 371157 - protein, 15 aa, Homo sapiens
  CDR3 for alpha chain variable domain of TCR clone 185579 (TRAV1-1, TRAJ20)
CAVRDNVANDYKLSF

SEQ ID NO: 371158 - protein, 13 aa, Homo sapiens
  CDR3 for beta chain variable domain of TCR clone 185579 (TRBV4-1, TRBJ2-2)
CASRQENTGELFF

SEQ ID NO: 371159 - protein, 18 aa, Homo sapiens
  CDR3 for alpha chain variable domain of TCR clone 185580 (TRAV21, TRAJ52)
CSVRPSPAGGTSYGKLTF

SEQ ID NO: 371160 - protein, 13 aa, Homo sapiens
  CDR3 for beta chain variable domain of TCR clone 185580 (TRBV4-1, TRBJ2-1)
CASSQAEGDEQFF

SEQ ID NO: 371161 - protein, 13 aa, Homo sapiens
  CDR3 for alpha chain variable domain of TCR clone 185581 (TRAV23/DV6, TRAJ47)
CAASMTRGNKLVF

SEQ ID NO: 371162 - protein, 17 aa, Homo sapiens
  CDR3 for beta chain variable domain of TCR clone 185581 (TRBV13, TRBJ2-3)
CASSLSRVAGGRNTQYF

SEQ ID NO: 371163 - protein, 15 aa, Homo sapiens
  CDR3 for alpha chain variable domain of TCR clone 185582 (TRAV27, TRAJ38)
CSARRNAGNNRKLIW

SEQ ID NO: 371164 - protein, 13 aa, Homo sapiens
  CDR3 for beta chain variable domain of TCR clone 185582 (TRBV12-5, TRBJ2-3)
CASGDRQSDTQYL

SEQ ID NO: 371165 - protein, 11 aa, Homo sapiens
  CDR3 for alpha chain variable domain of TCR clone 185583 (TRAV21, TRAJ34)
CAVTKTAKLIF

SEQ ID NO: 371166 - protein, 16 aa, Homo sapiens
  CDR3 for beta chain variable domain of TCR clone 185583 (TRBV18, TRBJ1-1)
CASSPGVGGRGGEAFF

SEQ ID NO: 371167 - protein, 14 aa, Homo sapiens
  CDR3 for alpha chain variable domain of TCR clone 185584 (TRAV16, TRAJ15)
CALSFNQAGTALIF

SEQ ID NO: 371168 - protein, 16 aa, Homo sapiens
  CDR3 for beta chain variable domain of TCR clone 185584 (TRBV9, TRBJ2-7)
CASSAGPDRFPYEQYF

SEQ ID NO: 371169 - protein, 15 aa, Homo sapiens
  CDR3 for alpha chain variable domain of TCR clone 185585 (TRAV8-6, TRAJ21)
CAVSPSSLNKFYLDL

SEQ ID NO: 371170 - protein, 14 aa, Homo sapiens
  CDR3 for beta chain variable domain of TCR clone 185585 (TRBV7-9, TRBJ2-5)
CASSLDTAQETQYF

SEQ ID NO: 371171 - protein, 14 aa, Homo sapiens
  CDR3 for alpha chain variable domain of TCR clone 185586 (TRAV12-2, TRAJ13)
CAVRKTGGYQKVTF

SEQ ID NO: 371172 - protein, 11 aa, Homo sapiens
  CDR3 for beta chain variable domain of TCR clone 185586 (TRBV19, TRBJ1-1)
CASSIGSEAFF

SEQ ID NO: 371173 - protein, 12 aa, Homo sapiens
  CDR3 for alpha chain variable domain of TCR clone 185587 (TRAV12-1, TRAJ40)
CVFYSGTYKYIF

SEQ ID NO: 371174 - protein, 12 aa, Homo sapiens
  CDR3 for beta chain variable domain of TCR clone 185587 (TRBV14, TRBJ2-7)
CASSLNQRGQYF

SEQ ID NO: 371175 - protein, 16 aa, Homo sapiens
  CDR3 for alpha chain variable domain of TCR clone 185588 (TRAV26-1, TRAJ31)
CIVRPPVLDNNARLMF

SEQ ID NO: 371176 - protein, 17 aa, Homo sapiens
  CDR3 for beta chain variable domain of TCR clone 185588 (TRBV5-1, TRBJ1-5)
CASSLVGREEGNQPQHF

SEQ ID NO: 371177 - protein, 13 aa, Homo sapiens
  CDR3 for alpha chain variable domain of TCR clone 185589 (TRAV3, TRAJ21)
CAVREPDFNKFYF

SEQ ID NO: 371178 - protein, 15 aa, Homo sapiens
  CDR3 for beta chain variable domain of TCR clone 185589 (TRBV3-1, TRBJ2-7)
FASSQAPSGSYEQYF

SEQ ID NO: 371179 - protein, 15 aa, Homo sapiens
  CDR3 for alpha chain variable domain of TCR clone 185590 (TRAV26-1, TRAJ29)
CNVRVEGSGNAPLVF

SEQ ID NO: 371180 - protein, 14 aa, Homo sapiens
  CDR3 for beta chain variable domain of TCR clone 185590 (TRBV18, TRBJ2-5)
CASSPGVSQETQYF

SEQ ID NO: 371181 - protein, 14 aa, Homo sapiens
  CDR3 for alpha chain variable domain of TCR clone 185591 (TRAV29/DV5, TRAJ36)
CAACRKTGANNLFF

SEQ ID NO: 371182 - protein, 13 aa, Homo sapiens
  CDR3 for beta chain variable domain of TCR clone 185591 (TRBV7-2, TRBJ2-5)
CASSQTSVETQYF

SEQ ID NO: 371183 - protein, 18 aa, Homo sapiens
  CDR3 for alpha chain variable domain of TCR clone 185592 (TRAV12-3, TRAJ52)
CAMSRTNAGGTSYGKLTF

SEQ ID NO: 371184 - protein, 17 aa, Homo sapiens
  CDR3 for beta chain variable domain of TCR clone 185592 (TRBV7-3, TRBJ2-3)
SASSLMKRMRGADTQYF

SEQ ID NO: 371185 - protein, 16 aa, Homo sapiens
  CDR3 for alpha chain variable domain of TCR clone 185593 (TRAV36/DV7, TRAJ30)
CAVETYGLDRDDKIIF

SEQ ID NO: 371186 - protein, 18 aa, Homo sapiens
  CDR3 for beta chain variable domain of TCR clone 185593 (TRBV11-2, TRBJ2-3)
CASSLGGASRGAPNTQYF

SEQ ID NO: 371187 - protein, 15 aa, Homo sapiens
  CDR3 for alpha chain variable domain of TCR clone 185594 (TRAV3, TRAJ4)
CAARDGTGGYNKLIF

SEQ ID NO: 371188 - protein, 16 aa, Homo sapiens
  CDR3 for beta chain variable domain of TCR clone 185594 (TRBV27, TRBJ2-2)
CASSSSGVSNTGELFF

SEQ ID NO: 371189 - protein, 13 aa, Homo sapiens
  CDR3 for alpha chain variable domain of TCR clone 185595 (TRAV38-1, TRAJ48)
CAFMKQGNEKLTF

SEQ ID NO: 371190 - protein, 18 aa, Homo sapiens
  CDR3 for beta chain variable domain of TCR clone 185595 (TRBV12-4, TRBJ1-3)
CASSLSRCGAFSGNTIYF

SEQ ID NO: 371191 - protein, 13 aa, Homo sapiens
  CDR3 for alpha chain variable domain of TCR clone 185596 (TRAV38-1, TRAJ52)
CAFRGTSSGKLTF

SEQ ID NO: 371192 - protein, 15 aa, Homo sapiens
  CDR3 for beta chain variable domain of TCR clone 185596 (TRBV7-8, TRBJ2-5)
CASSDAAGSQETQYF

SEQ ID NO: 371193 - protein, 10 aa, Homo sapiens
  CDR3 for alpha chain variable domain of TCR clone 185597 (TRAV25, TRAJ53)
CAGSNYKLTF

SEQ ID NO: 371194 - protein, 12 aa, Homo sapiens
  CDR3 for beta chain variable domain of TCR clone 185597 (TRBV5-1, TRBJ2-5)
CASSSGLETQYF

SEQ ID NO: 371195 - protein, 11 aa, Homo sapiens
  CDR3 for alpha chain variable domain of TCR clone 185598 (TRAV27, TRAJ20)
CSGLNDYKLSF

SEQ ID NO: 371196 - protein, 14 aa, Homo sapiens
  CDR3 for beta chain variable domain of TCR clone 185598 (TRBV6-1, TRBJ1-1)
CASTPLQMNTEAFF

SEQ ID NO: 371197 - protein, 14 aa, Homo sapiens
  CDR3 for alpha chain variable domain of TCR clone 185599 (TRAV17, TRAJ54)
CATDADQGAQKLVF

SEQ ID NO: 371198 - protein, 12 aa, Homo sapiens
  CDR3 for beta chain variable domain of TCR clone 185599 (TRBV6-3, TRBJ2-1)
CASSGAYNEQFF

SEQ ID NO: 371199 - protein, 16 aa, Homo sapiens
  CDR3 for alpha chain variable domain of TCR clone 185600 (TRAV30, TRAJ24)
CGTEIVDADSWVKCQF

SEQ ID NO: 371200 - protein, 14 aa, Homo sapiens
  CDR3 for beta chain variable domain of TCR clone 185600 (TRBV18, TRBJ2-7)
CASSPRGGAYEQYF

SEQ ID NO: 371201 - protein, 13 aa, Homo sapiens
  CDR3 for alpha chain variable domain of TCR clone 185601 (TRAV2, TRAJ15)
CAVASQAGTALVF

SEQ ID NO: 371202 - protein, 16 aa, Homo sapiens
  CDR3 for beta chain variable domain of TCR clone 185601 (TRBV5-1, TRBJ1-1)
CASSSGGNPLNTEAFF

SEQ ID NO: 371203 - protein, 13 aa, Homo sapiens
  CDR3 for alpha chain variable domain of TCR clone 185602 (TRAV21, TRAJ27)
CSARSGNAGKSTF

SEQ ID NO: 371204 - protein, 14 aa, Homo sapiens
  CDR3 for beta chain variable domain of TCR clone 185602 (TRBV7-6, TRBJ2-3)
CASSLGTVTDTQYF

SEQ ID NO: 371205 - protein, 11 aa, Homo sapiens
  CDR3 for alpha chain variable domain of TCR clone 185603 (TRAV3, TRAJ17)
CAEAAGNKLTF

SEQ ID NO: 371206 - protein, 14 aa, Homo sapiens
  CDR3 for beta chain variable domain of TCR clone 185603 (TRBV12-4, TRBJ2-7)
CQQFRFRWSYEQYF

SEQ ID NO: 371207 - protein, 15 aa, Homo sapiens
  CDR3 for alpha chain variable domain of TCR clone 185604 (TRAV17, TRAJ57)
CATGPSQGGSERLVF

SEQ ID NO: 371208 - protein, 14 aa, Homo sapiens
  CDR3 for beta chain variable domain of TCR clone 185604 (TRBV12-5, TRBJ2-5)
CASGSRTYQETQYF

SEQ ID NO: 371209 - protein, 14 aa, Homo sapiens
  CDR3 for alpha chain variable domain of TCR clone 185605 (TRAV1-2, TRAJ8)
CAGREYTGFQKLVF

SEQ ID NO: 371210 - protein, 15 aa, Homo sapiens
  CDR3 for beta chain variable domain of TCR clone 185605 (TRBV6-3, TRBJ2-7)
CASSSPGTVFYEQYF

SEQ ID NO: 371211 - protein, 11 aa, Homo sapiens
  CDR3 for alpha chain variable domain of TCR clone 185606 (TRAV8-4, TRAJ39)
CAVSDMATCPP

SEQ ID NO: 371212 - protein, 14 aa, Homo sapiens
  CDR3 for beta chain variable domain of TCR clone 185606 (TRBV18, TRBJ2-5)
CASSPPGHQETQYF

SEQ ID NO: 371213 - protein, 17 aa, Homo sapiens
  CDR3 for alpha chain variable domain of TCR clone 185607 (TRAV12-2, TRAJ42)
CAVNILNYGGSQGNLTF

SEQ ID NO: 371214 - protein, 13 aa, Homo sapiens
  CDR3 for beta chain variable domain of TCR clone 185607 (TRBV3-1, TRBJ1-5)
CASSQDLDQTQHF

SEQ ID NO: 371215 - protein, 15 aa, Homo sapiens
  CDR3 for alpha chain variable domain of TCR clone 185608 (TRAV23/DV6, TRAJ36)
CAALRAQTGANNLFF

SEQ ID NO: 371216 - protein, 13 aa, Homo sapiens
  CDR3 for beta chain variable domain of TCR clone 185608 (TRBV5-1, TRBJ1-2)
CASSIDRPEGYTF

SEQ ID NO: 371217 - protein, 14 aa, Homo sapiens
  CDR3 for alpha chain variable domain of TCR clone 185609 (TRAV2, TRAJ9)
CAVEDRSGGFKTIF

SEQ ID NO: 371218 - protein, 13 aa, Homo sapiens
  CDR3 for beta chain variable domain of TCR clone 185609 (TRBV5-1, TRBJ2-7)
CASSATGGNEQYF

SEQ ID NO: 371219 - protein, 14 aa, Homo sapiens
  CDR3 for alpha chain variable domain of TCR clone 185610 (TRAV8-3, TRAJ4)
CAVGASGGYNKLIF

SEQ ID NO: 371220 - protein, 20 aa, Homo sapiens
  CDR3 for beta chain variable domain of TCR clone 185610 (TRBV7-8, TRBJ2-2)
CSSSHLFPGPTIHITGELFF

SEQ ID NO: 371221 - protein, 11 aa, Homo sapiens
  CDR3 for alpha chain variable domain of TCR clone 185611 (TRAV21, TRAJ34)
CAVTNTDKLIF

SEQ ID NO: 371222 - protein, 13 aa, Homo sapiens
  CDR3 for beta chain variable domain of TCR clone 185611 (TRBV20-1, TRBJ1-5)
CSASPRANQPQHF

SEQ ID NO: 371223 - protein, 13 aa, Homo sapiens
  CDR3 for alpha chain variable domain of TCR clone 185612 (TRAV13-1, TRAJ10)
CAATAGGGNKLTF

SEQ ID NO: 371224 - protein, 14 aa, Homo sapiens
  CDR3 for beta chain variable domain of TCR clone 185612 (TRBV12-4, TRBJ2-7)
CASSPAGLNYEQYF

SEQ ID NO: 371225 - protein, 16 aa, Homo sapiens
  CDR3 for alpha chain variable domain of TCR clone 185613 (TRAV3, TRAJ10)
CAVRDMRAGGGNKLTF

SEQ ID NO: 371226 - protein, 15 aa, Homo sapiens
  CDR3 for beta chain variable domain of TCR clone 185613 (TRBV2, TRBJ2-2)
CASSRETVGTGELFF

SEQ ID NO: 371227 - protein, 18 aa, Homo sapiens
  CDR3 for alpha chain variable domain of TCR clone 185614 (TRAV16, TRAJ10)
CAPAREEETNSPLDRHSA

SEQ ID NO: 371228 - protein, 16 aa, Homo sapiens
  CDR3 for beta chain variable domain of TCR clone 185614 (TRBV7-2, TRBJ1-2)
CASSSNQDRRGHGYTF

SEQ ID NO: 371229 - protein, 16 aa, Homo sapiens
  CDR3 for alpha chain variable domain of TCR clone 185615 (TRAV16, TRAJ4)
CDISRMFSGGYNKLIF

SEQ ID NO: 371230 - protein, 16 aa, Homo sapiens
  CDR3 for beta chain variable domain of TCR clone 185615 (TRBV24-1, TRBJ2-3)
CATSDPGTGATDTQDF

SEQ ID NO: 371231 - protein, 13 aa, Homo sapiens
  CDR3 for alpha chain variable domain of TCR clone 185616 (TRAV26-2, TRAJ43)
CILRAVNNNDMRF

SEQ ID NO: 371232 - protein, 15 aa, Homo sapiens
  CDR3 for beta chain variable domain of TCR clone 185616 (TRBV7-2, TRBJ2-1)
YASTHGKGIYNEQFF

SEQ ID NO: 371233 - protein, 15 aa, Homo sapiens
  CDR3 for alpha chain variable domain of TCR clone 185617 (TRAV21, TRAJ32)
CAAAPYGGATNKLIF

SEQ ID NO: 371234 - protein, 13 aa, Homo sapiens
  CDR3 for beta chain variable domain of TCR clone 185617 (TRBV19, TRBJ1-2)
CASSVPGQDGYTS

SEQ ID NO: 371235 - protein, 13 aa, Homo sapiens
  CDR3 for alpha chain variable domain of TCR clone 185618 (TRAV13-2, TRAJ53)
CAENMGSNYKLTF

SEQ ID NO: 371236 - protein, 15 aa, Homo sapiens
  CDR3 for beta chain variable domain of TCR clone 185618 (TRBV7-9, TRBJ1-4)
CASSARTGGNEKLFF

SEQ ID NO: 371237 - protein, 15 aa, Homo sapiens
  CDR3 for alpha chain variable domain of TCR clone 185619 (TRAV29/DV5, TRAJ53)
CAASASGGSNYKLTF

SEQ ID NO: 371238 - protein, 19 aa, Homo sapiens
  CDR3 for beta chain variable domain of TCR clone 185619 (TRBV5-1, TRBJ2-3)
CASGLWLAGGITTTDTQYF

SEQ ID NO: 371239 - protein, 16 aa, Homo sapiens
  CDR3 for alpha chain variable domain of TCR clone 185620 (TRAV3, TRAJ37)
CALRVRGSGNTGKLIF

SEQ ID NO: 371240 - protein, 13 aa, Homo sapiens
  CDR3 for beta chain variable domain of TCR clone 185620 (TRBV14, TRBJ2-1)
CASSQDRRNEQFF

SEQ ID NO: 371241 - protein, 15 aa, Homo sapiens
  CDR3 for alpha chain variable domain of TCR clone 185621 (TRAV3, TRAJ36)
CAVSASQTGANNLFF

SEQ ID NO: 371242 - protein, 13 aa, Homo sapiens
  CDR3 for beta chain variable domain of TCR clone 185621 (TRBV10-3, TRBJ1-2)
CAISERDSYGYTF

SEQ ID NO: 371243 - protein, 12 aa, Homo sapiens
  CDR3 for alpha chain variable domain of TCR clone 185622 (TRAV4, TRAJ22)
CLVGDINYFFWF

SEQ ID NO: 371244 - protein, 14 aa, Homo sapiens
  CDR3 for beta chain variable domain of TCR clone 185622 (TRBV25-1, TRBJ1-1)
CASTHLGGNTEAFF

SEQ ID NO: 371245 - protein, 15 aa, Homo sapiens
  CDR3 for alpha chain variable domain of TCR clone 185623 (TRAV3, TRAJ36)
CAVRASQTGANNLFF

SEQ ID NO: 371246 - protein, 12 aa, Homo sapiens
  CDR3 for beta chain variable domain of TCR clone 185623 (TRBV28, TRBJ2-1)
CASSVQINEQFC

SEQ ID NO: 371247 - protein, 16 aa, Homo sapiens
  CDR3 for alpha chain variable domain of TCR clone 185624 (TRAV20, TRAJ28)
CAVRDPSGAGSYQLTF

SEQ ID NO: 371248 - protein, 13 aa, Homo sapiens
  CDR3 for beta chain variable domain of TCR clone 185624 (TRBV20-1, TRBJ2-7)
CSATHTSGYEQYF

SEQ ID NO: 371249 - protein, 14 aa, Homo sapiens
  CDR3 for alpha chain variable domain of TCR clone 185625 (TRAV8-1, TRAJ5)
CAVRTDTGRRALTF

SEQ ID NO: 371250 - protein, 14 aa, Homo sapiens
  CDR3 for beta chain variable domain of TCR clone 185625 (TRBV7-8, TRBJ2-3)
CASSFPDGQYTQYF

SEQ ID NO: 371251 - protein, 11 aa, Homo sapiens
  CDR3 for alpha chain variable domain of TCR clone 185626 (TRAV21, TRAJ31)
CAVRNNARLMF

SEQ ID NO: 371252 - protein, 15 aa, Homo sapiens
  CDR3 for beta chain variable domain of TCR clone 185626 (TRBV7-2, TRBJ2-1)
CASTHGTGIYNEQFF

SEQ ID NO: 371253 - protein, 12 aa, Homo sapiens
  CDR3 for alpha chain variable domain of TCR clone 185627 (TRAV13-1, TRAJ53)
CAAGGSNYKLTF

SEQ ID NO: 371254 - protein, 15 aa, Homo sapiens
  CDR3 for beta chain variable domain of TCR clone 185627 (TRBV7-3, TRBJ2-1)
CASSPTGGSRNEQFF

SEQ ID NO: 371255 - protein, 14 aa, Homo sapiens
  CDR3 for alpha chain variable domain of TCR clone 185628 (TRAV29/DV5, TRAJ36)
CAARRTTGANNLFL

SEQ ID NO: 371256 - protein, 14 aa, Homo sapiens
  CDR3 for beta chain variable domain of TCR clone 185628 (TRBV12-5, TRBJ2-5)
CASGSRTHQETQYF

SEQ ID NO: 371257 - protein, 18 aa, Homo sapiens
  CDR3 for alpha chain variable domain of TCR clone 185629 (TRAV21, TRAJ52)
CAVRPSPAGGTSYGKLTF

SEQ ID NO: 371258 - protein, 13 aa, Homo sapiens
  CDR3 for beta chain variable domain of TCR clone 185629 (TRBV2, TRBJ2-5)
CASGTPYQETQYF

SEQ ID NO: 371259 - protein, 12 aa, Homo sapiens
  CDR3 for alpha chain variable domain of TCR clone 185630 (TRAV4, TRAJ26)
CLVGDYGQNFVF

SEQ ID NO: 371260 - protein, 15 aa, Homo sapiens
  CDR3 for beta chain variable domain of TCR clone 185630 (TRBV5-1, TRBJ2-3)
CASSVTSGSTDTQYF

SEQ ID NO: 371261 - protein, 16 aa, Homo sapiens
  CDR3 for alpha chain variable domain of TCR clone 185631 (TRAV26-1, TRAJ38)
CIVRVERGGNNRKLIW

SEQ ID NO: 371262 - protein, 14 aa, Homo sapiens
  CDR3 for beta chain variable domain of TCR clone 185631 (TRBV5-1, TRBJ2-3)
CASSPGLAADTQYF

SEQ ID NO: 371263 - protein, 14 aa, Homo sapiens
  CDR3 for alpha chain variable domain of TCR clone 185632 (TRAV12-3, TRAJ22)
CAMSLFGSARQLTF

SEQ ID NO: 371264 - protein, 11 aa, Homo sapiens
  CDR3 for beta chain variable domain of TCR clone 185632 (TRBV12-4, TRBJ2-2)
CASSSGGELFF

SEQ ID NO: 371265 - protein, 14 aa, Homo sapiens
  CDR3 for alpha chain variable domain of TCR clone 185633 (TRAV13-1, TRAJ9)
GAASALTGGFKTIF

SEQ ID NO: 371266 - protein, 13 aa, Homo sapiens
  CDR3 for beta chain variable domain of TCR clone 185633 (TRBV20-1, TRBJ1-1)
CSAGTVGNTEAFF

SEQ ID NO: 371267 - protein, 14 aa, Homo sapiens
  CDR3 for alpha chain variable domain of TCR clone 185634 (TRAV35, TRAJ13)
CAGSPSGGYQKVTF

SEQ ID NO: 371268 - protein, 15 aa, Homo sapiens
  CDR3 for beta chain variable domain of TCR clone 185634 (TRBV20-1, TRBJ2-7)
CSARDRVSGMDEQYF

SEQ ID NO: 371269 - protein, 14 aa, Homo sapiens
  CDR3 for alpha chain variable domain of TCR clone 185635 (TRAV1-2, TRAJ16)
CAVNRFSDGQKLHF

SEQ ID NO: 371270 - protein, 15 aa, Homo sapiens
  CDR3 for beta chain variable domain of TCR clone 185635 (TRBV9, TRBJ1-6)
CASSVAGTGDSPLHV

SEQ ID NO: 371271 - protein, 13 aa, Homo sapiens
  CDR3 for alpha chain variable domain of TCR clone 185636 (TRAV21, TRAJ40)
FAVRPSRAYKYIF

SEQ ID NO: 371272 - protein, 12 aa, Homo sapiens
  CDR3 for beta chain variable domain of TCR clone 185636 (TRBV14, TRBJ2-5)
CASSQLKETQYF

SEQ ID NO: 371273 - protein, 13 aa, Homo sapiens
  CDR3 for alpha chain variable domain of TCR clone 185637 (TRAV22, TRAJ29)
CAVGGSGNTPLVF

SEQ ID NO: 371274 - protein, 14 aa, Homo sapiens
  CDR3 for beta chain variable domain of TCR clone 185637 (TRBV20-1, TRBJ2-3)
CSARGGTSTDTQYF

SEQ ID NO: 371275 - protein, 14 aa, Homo sapiens
  CDR3 for alpha chain variable domain of TCR clone 185638 (TRAV13-1, TRAJ40)
CAASMTSGTYKSIF

SEQ ID NO: 371276 - protein, 16 aa, Homo sapiens
  CDR3 for beta chain variable domain of TCR clone 185638 (TRBV19, TRBJ2-2)
CASRSPGTGATGELFF

SEQ ID NO: 371277 - protein, 10 aa, Homo sapiens
  CDR3 for alpha chain variable domain of TCR clone 185639 (TRAV26-1, TRAJ40)
CIAGTYKYIF

SEQ ID NO: 371278 - protein, 17 aa, Homo sapiens
  CDR3 for beta chain variable domain of TCR clone 185639 (TRBV11-2, TRBJ2-1)
CASSLYPPGVEYNEQFF

SEQ ID NO: 371279 - protein, 15 aa, Homo sapiens
  CDR3 for alpha chain variable domain of TCR clone 185640 (TRAV40, TRAJ45)
CLLGDLGGGADGLTF

SEQ ID NO: 371280 - protein, 13 aa, Homo sapiens
  CDR3 for beta chain variable domain of TCR clone 185640 (TRBV7-9, TRBJ1-2)
CASSLKENYGYTF

SEQ ID NO: 371281 - protein, 16 aa, Homo sapiens
  CDR3 for alpha chain variable domain of TCR clone 185641 (TRAV26-1, TRAJ48)
IASSDLSNFGNEKLTF

SEQ ID NO: 371282 - protein, 14 aa, Homo sapiens
  CDR3 for beta chain variable domain of TCR clone 185641 (TRBV13, TRBJ2-7)
CASSLKGASDEQYF

SEQ ID NO: 371283 - protein, 15 aa, Homo sapiens
  CDR3 for alpha chain variable domain of TCR clone 185642 (TRAV16, TRAJ20)
CALKGGLRADSKLSF

SEQ ID NO: 371284 - protein, 16 aa, Homo sapiens
  CDR3 for beta chain variable domain of TCR clone 185642 (TRBV11-3, TRBJ2-2)
CASSSRTSPGTGELFF

SEQ ID NO: 371285 - protein, 13 aa, Homo sapiens
  CDR3 for alpha chain variable domain of TCR clone 185643 (TRAV2, TRAJ40)
RAVVTSGTYKYIF

SEQ ID NO: 371286 - protein, 14 aa, Homo sapiens
  CDR3 for beta chain variable domain of TCR clone 185643 (TRBV19, TRBJ2-1)
CASPTFALSGEQFF

SEQ ID NO: 371287 - protein, 11 aa, Homo sapiens
  CDR3 for alpha chain variable domain of TCR clone 185644 (TRAV12-3, TRAJ6)
CAMSGSYIPTF

SEQ ID NO: 371288 - protein, 13 aa, Homo sapiens
  CDR3 for beta chain variable domain of TCR clone 185644 (TRBV20-1, TRBJ1-6)
CSAPLGVGSPLHF

SEQ ID NO: 371289 - protein, 20 aa, Homo sapiens
  CDR3 for alpha chain variable domain of TCR clone 185645 (TRAV25, TRAJ21)
TATQTTDVGTYHLSFNKFYF

SEQ ID NO: 371290 - protein, 14 aa, Homo sapiens
  CDR3 for beta chain variable domain of TCR clone 185645 (TRBV6-1, TRBJ2-1)
CASAKDGFYNGQFF

SEQ ID NO: 371291 - protein, 14 aa, Homo sapiens
  CDR3 for alpha chain variable domain of TCR clone 185646 (TRAV17, TRAJ22)
CATSPSGSARQLTY

SEQ ID NO: 371292 - protein, 15 aa, Homo sapiens
  CDR3 for beta chain variable domain of TCR clone 185646 (TRBV4-1, TRBJ2-5)
CASSQWDLYQETQYF

SEQ ID NO: 371293 - protein, 12 aa, Homo sapiens
  CDR3 for alpha chain variable domain of TCR clone 185647 (TRAV13-2, TRAJ8)
CAPWLGFQKLVL

SEQ ID NO: 371294 - protein, 18 aa, Homo sapiens
  CDR3 for beta chain variable domain of TCR clone 185647 (TRBV7-9, TRBJ2-6)
CASSFPGAGISGANVLTF

SEQ ID NO: 371295 - protein, 14 aa, Homo sapiens
  CDR3 for alpha chain variable domain of TCR clone 185648 (TRAV1-2, TRAJ16)
CAVNLFSDGQKLLF

SEQ ID NO: 371296 - protein, 14 aa, Homo sapiens
  CDR3 for beta chain variable domain of TCR clone 185648 (TRBV6-1, TRBJ1-3)
CASVQGGGGNTIYF

SEQ ID NO: 371297 - protein, 12 aa, Homo sapiens
  CDR3 for alpha chain variable domain of TCR clone 185649 (TRAV13-1, TRAJ40)
CAASWATYKYNF

SEQ ID NO: 371298 - protein, 15 aa, Homo sapiens
  CDR3 for beta chain variable domain of TCR clone 185649 (TRBV7-8, TRBJ2-1)
CASSSRLAAYNEQFF

SEQ ID NO: 371299 - protein, 19 aa, Homo sapiens
  CDR3 for alpha chain variable domain of TCR clone 185650 (TRAV2, TRAJ20)
ILQVREADAAVYRDCKLSF

SEQ ID NO: 371300 - protein, 15 aa, Homo sapiens
  CDR3 for beta chain variable domain of TCR clone 185650 (TRBV11-2, TRBJ2-1)
CASSKNRGLIYEQFF

SEQ ID NO: 371301 - protein, 23 aa, Homo sapiens
  CDR3 for alpha chain variable domain of TCR clone 185651 (TRAV13-2, TRAJ36)
CAETGQTTSSLGLERDSPLFPIS

SEQ ID NO: 371302 - protein, 13 aa, Homo sapiens
  CDR3 for beta chain variable domain of TCR clone 185651 (TRBV7-9, TRBJ2-4)
CATEGLAGNIQYF

SEQ ID NO: 371303 - protein, 13 aa, Homo sapiens
  CDR3 for alpha chain variable domain of TCR clone 185652 (TRAV12-3, TRAJ54)
WAMTLQGAQKLVF

SEQ ID NO: 371304 - protein, 14 aa, Homo sapiens
  CDR3 for beta chain variable domain of TCR clone 185652 (TRBV4-1, TRBJ2-2)
CASSQAVNTGELFF

SEQ ID NO: 371305 - protein, 15 aa, Homo sapiens
  CDR3 for alpha chain variable domain of TCR clone 185653 (TRAV12-1, TRAJ9)
CVVSFGDTGGFKTIF

SEQ ID NO: 371306 - protein, 13 aa, Homo sapiens
  CDR3 for beta chain variable domain of TCR clone 185653 (TRBV2, TRBJ1-4)
CAISERAGEKLFF

SEQ ID NO: 371307 - protein, 14 aa, Homo sapiens
  CDR3 for alpha chain variable domain of TCR clone 185654 (TRAV16, TRAJ53)
CSPPWWGSNYKLTF

SEQ ID NO: 371308 - protein, 13 aa, Homo sapiens
  CDR3 for beta chain variable domain of TCR clone 185654 (TRBV10-3, TRBJ2-7)
CASKLAVNYEQYF

SEQ ID NO: 371309 - protein, 15 aa, Homo sapiens
  CDR3 for alpha chain variable domain of TCR clone 185655 (TRAV2, TRAJ9)
CAVEDRGTGGFKTIF

SEQ ID NO: 371310 - protein, 14 aa, Homo sapiens
  CDR3 for beta chain variable domain of TCR clone 185655 (TRBV4-1, TRBJ2-2)
CACSQAVNTGELFF

SEQ ID NO: 371311 - protein, 16 aa, Homo sapiens
  CDR3 for alpha chain variable domain of TCR clone 185656 (TRAV30, TRAJ24)
CGTEIVDADSWGKFQF

SEQ ID NO: 371312 - protein, 16 aa, Homo sapiens
  CDR3 for beta chain variable domain of TCR clone 185656 (TRBV2, TRBJ2-5)
CASSTLRDRDRETQYF

SEQ ID NO: 371313 - protein, 15 aa, Homo sapiens
  CDR3 for alpha chain variable domain of TCR clone 185657 (TRAV35, TRAJ40)
CAGQLGTSGTYKYIF

SEQ ID NO: 371314 - protein, 16 aa, Homo sapiens
  CDR3 for beta chain variable domain of TCR clone 185657 (TRBV7-9, TRBJ1-2)
CASSLGFSSGEDGYTF

SEQ ID NO: 371315 - protein, 13 aa, Homo sapiens
  CDR3 for alpha chain variable domain of TCR clone 185658 (TRAV3, TRAJ27)
CALRPLGAGKSTF

SEQ ID NO: 371316 - protein, 13 aa, Homo sapiens
  CDR3 for beta chain variable domain of TCR clone 185658 (TRBV7-9, TRBJ2-3)
CVSSPGSTDTQYF

SEQ ID NO: 371317 - protein, 16 aa, Homo sapiens
  CDR3 for alpha chain variable domain of TCR clone 185659 (TRAV2, TRAJ15)
TTVLWIFNQAGTALIF

SEQ ID NO: 371318 - protein, 14 aa, Homo sapiens
  CDR3 for beta chain variable domain of TCR clone 185659 (TRBV19, TRBJ2-1)
CASPTFVLSGEQFF

SEQ ID NO: 371319 - protein, 13 aa, Homo sapiens
  CDR3 for alpha chain variable domain of TCR clone 185660 (TRAV27, TRAJ27)
CAGGITNAGKSTF

SEQ ID NO: 371320 - protein, 17 aa, Homo sapiens
  CDR3 for beta chain variable domain of TCR clone 185660 (TRBV2, TRBJ2-6)
CASSLQGRSSGANVLTF

SEQ ID NO: 371321 - protein, 15 aa, Homo sapiens
  CDR3 for alpha chain variable domain of TCR clone 185661 (TRAV13-1, TRAJ48)
CAPLGSNFGNEKLTF

SEQ ID NO: 371322 - protein, 13 aa, Homo sapiens
  CDR3 for beta chain variable domain of TCR clone 185661 (TRBV12-4, TRBJ1-2)
CASSLRQGKGYTF

SEQ ID NO: 371323 - protein, 15 aa, Homo sapiens
  CDR3 for alpha chain variable domain of TCR clone 185662 (TRAV35, TRAJ28)
CAGRRTGAGSYQLTF

SEQ ID NO: 371324 - protein, 13 aa, Homo sapiens
  CDR3 for beta chain variable domain of TCR clone 185662 (TRBV15, TRBJ1-6)
CATSGGLNSPLHF

SEQ ID NO: 371325 - protein, 14 aa, Homo sapiens
  CDR3 for alpha chain variable domain of TCR clone 185663 (TRAV27, TRAJ13)
CRSSNSGGYQKVTF

SEQ ID NO: 371326 - protein, 16 aa, Homo sapiens
  CDR3 for beta chain variable domain of TCR clone 185663 (TRBV7-6, TRBJ2-1)
CIAGPAAWGGADEQFF

SEQ ID NO: 371327 - protein, 15 aa, Homo sapiens
  CDR3 for alpha chain variable domain of TCR clone 185664 (TRAV21, TRAJ32)
CAVNSYGGATNKLIF

SEQ ID NO: 371328 - protein, 18 aa, Homo sapiens
  CDR3 for beta chain variable domain of TCR clone 185664 (TRBV7-9, TRBJ2-1)
CPSSTGLAEGSSYNEQFF

SEQ ID NO: 371329 - protein, 13 aa, Homo sapiens
  CDR3 for alpha chain variable domain of TCR clone 185665 (TRAV29/DV5, TRAJ49)
CAASTNTGNQFYF

SEQ ID NO: 371330 - protein, 15 aa, Homo sapiens
  CDR3 for beta chain variable domain of TCR clone 185665 (TRBV9, TRBJ1-6)
CASSVAGTGDSPLHF

SEQ ID NO: 371331 - protein, 17 aa, Homo sapiens
  CDR3 for alpha chain variable domain of TCR clone 185666 (TRAV27, TRAJ18)
CAGLHRGRGSTLGRLYF

SEQ ID NO: 371332 - protein, 14 aa, Homo sapiens
  CDR3 for beta chain variable domain of TCR clone 185666 (TRBV4-1, TRBJ2-2)
CASSHAVNTGELFF

SEQ ID NO: 371333 - protein, 16 aa, Homo sapiens
  CDR3 for alpha chain variable domain of TCR clone 185667 (TRAV3, TRAJ10)
CAVRDMRAGGGNKLTC

SEQ ID NO: 371334 - protein, 14 aa, Homo sapiens
  CDR3 for beta chain variable domain of TCR clone 185667 (TRBV25-1, TRBJ1-1)
CASTHLGGNTEALF

SEQ ID NO: 371335 - protein, 15 aa, Homo sapiens
  CDR3 for alpha chain variable domain of TCR clone 185668 (TRAV26-1, TRAJ40)
CIVRAVPSGTYKYIF

SEQ ID NO: 371336 - protein, 16 aa, Homo sapiens
  CDR3 for beta chain variable domain of TCR clone 185668 (TRBV19, TRBJ2-1)
ISVPVEDPGLANEQFF

SEQ ID NO: 371337 - protein, 15 aa, Homo sapiens
  CDR3 for alpha chain variable domain of TCR clone 185669 (TRAV26-1, TRAJ29)
CIVRVEGSGNTPLVF

SEQ ID NO: 371338 - protein, 13 aa, Homo sapiens
  CDR3 for beta chain variable domain of TCR clone 185669 (TRBV19, TRBJ2-7)
CASSIRSSYEQYF

SEQ ID NO: 371339 - protein, 11 aa, Homo sapiens
  CDR3 for alpha chain variable domain of TCR clone 185670 (TRAV12-1, TRAJ33)
CVVNSNYQLIW

SEQ ID NO: 371340 - protein, 12 aa, Homo sapiens
  CDR3 for beta chain variable domain of TCR clone 185670 (TRBV28, TRBJ2-3)
CASSLYRDTQYF

SEQ ID NO: 371341 - protein, 15 aa, Homo sapiens
  CDR3 for alpha chain variable domain of TCR clone 185671 (TRAV9-2, TRAJ49)
CALSPPDHTGNQFYF

SEQ ID NO: 371342 - protein, 14 aa, Homo sapiens
  CDR3 for beta chain variable domain of TCR clone 185671 (TRBV12-4, TRBJ1-1)
CDSSLGTGGTEAFF

SEQ ID NO: 371343 - protein, 22 aa, Homo sapiens
  CDR3 for alpha chain variable domain of TCR clone 185672 (TRAV4, )
CLVGPHNYDIQNPDPAVHQLRD

SEQ ID NO: 371344 - protein, 17 aa, Homo sapiens
  CDR3 for beta chain variable domain of TCR clone 185672 (TRBV24-1, TRBJ2-1)
CATSDVSTSGTYNEQFF

SEQ ID NO: 371345 - protein, 11 aa, Homo sapiens
  CDR3 for alpha chain variable domain of TCR clone 185673 (TRAV8-6, TRAJ20)
CAVSYDYKLSF

SEQ ID NO: 371346 - protein, 14 aa, Homo sapiens
  CDR3 for beta chain variable domain of TCR clone 185673 (TRBV10-2, TRBJ2-2)
CASSERCNTGELFF

SEQ ID NO: 371347 - protein, 12 aa, Homo sapiens
  CDR3 for alpha chain variable domain of TCR clone 185674 (TRAV8-3, TRAJ40)
CAVTSGTYKYIF

SEQ ID NO: 371348 - protein, 16 aa, Homo sapiens
  CDR3 for beta chain variable domain of TCR clone 185674 (TRBV20-1, TRBJ2-6)
CSASSQGYDGANVLTF

SEQ ID NO: 371349 - protein, 13 aa, Homo sapiens
  CDR3 for alpha chain variable domain of TCR clone 185675 (TRAV39, TRAJ49)
CAVDRNTGNQFYF

SEQ ID NO: 371350 - protein, 15 aa, Homo sapiens
  CDR3 for beta chain variable domain of TCR clone 185675 (TRBV6-6, TRBJ2-7)
CASSYSYGGSYEQYF

SEQ ID NO: 371351 - protein, 19 aa, Homo sapiens
  CDR3 for alpha chain variable domain of TCR clone 185676 (TRAV2, TRAJ20)
ILQVREADAAVYRDCKLSF

SEQ ID NO: 371352 - protein, 15 aa, Homo sapiens
  CDR3 for beta chain variable domain of TCR clone 185676 (TRBV7-2, TRBJ1-2)
CASSLVSGGDYGYTF

SEQ ID NO: 371353 - protein, 14 aa, Homo sapiens
  CDR3 for alpha chain variable domain of TCR clone 185677 (TRAV17, TRAJ57)
CATDPQGGSEKLVF

SEQ ID NO: 371354 - protein, 18 aa, Homo sapiens
  CDR3 for beta chain variable domain of TCR clone 185677 (TRBV6-6, TRBJ1-3)
CASSYSKWDSISGNSIYF

SEQ ID NO: 371355 - protein, 17 aa, Homo sapiens
  CDR3 for alpha chain variable domain of TCR clone 185678 (TRAV8-6, TRAJ58)
CAVSSWVGETSGSRSTF

SEQ ID NO: 371356 - protein, 15 aa, Homo sapiens
  CDR3 for beta chain variable domain of TCR clone 185678 (TRBV6-5, TRBJ2-1)
CASSYDAGAGNEQFF

SEQ ID NO: 371357 - protein, 11 aa, Homo sapiens
  CDR3 for alpha chain variable domain of TCR clone 185679 (TRAV39, TRAJ49)
CAVDISTQFYF

SEQ ID NO: 371358 - protein, 11 aa, Homo sapiens
  CDR3 for beta chain variable domain of TCR clone 185679 (TRBV7-8, TRBJ2-7)
CASSLFLEQYF

SEQ ID NO: 371359 - protein, 15 aa, Homo sapiens
  CDR3 for alpha chain variable domain of TCR clone 185680 (TRAV8-3, TRAJ27)
CAVGPSKTNAGKSTF

SEQ ID NO: 371360 - protein, 15 aa, Homo sapiens
  CDR3 for beta chain variable domain of TCR clone 185680 (TRBV4-1, TRBJ1-4)
CASSDTGGTNEKLFF

SEQ ID NO: 371361 - protein, 12 aa, Homo sapiens
  CDR3 for alpha chain variable domain of TCR clone 185681 (TRAV12-3, TRAJ20)
CAMVRGDYKLSF

SEQ ID NO: 371362 - protein, 16 aa, Homo sapiens
  CDR3 for beta chain variable domain of TCR clone 185681 (TRBV19, TRBJ1-2)
CASSIGSNRDGYGYTF

SEQ ID NO: 371363 - protein, 15 aa, Homo sapiens
  CDR3 for alpha chain variable domain of TCR clone 185682 (TRAV26-2, TRAJ28)
CILVESGAGSYQLTF

SEQ ID NO: 371364 - protein, 16 aa, Homo sapiens
  CDR3 for beta chain variable domain of TCR clone 185682 (TRBV4-2, TRBJ1-2)
CASSQEIGGASYGYTV

SEQ ID NO: 371365 - protein, 14 aa, Homo sapiens
  CDR3 for alpha chain variable domain of TCR clone 185683 (TRAV27, TRAJ23)
CAGAFDNQGGKLIF

SEQ ID NO: 371366 - protein, 15 aa, Homo sapiens
  CDR3 for beta chain variable domain of TCR clone 185683 (TRBV7-3, TRBJ2-7)
CASSITGQGKYEQYF

SEQ ID NO: 371367 - protein, 20 aa, Homo sapiens
  CDR3 for alpha chain variable domain of TCR clone 185684 (TRAV1-1, TRAJ4)
CLLLLRCEGFLSGGYNKLIF

SEQ ID NO: 371368 - protein, 18 aa, Homo sapiens
  CDR3 for beta chain variable domain of TCR clone 185684 (TRBV28, TRBJ1-4)
CASSPPYRGEVKNCFLAV

SEQ ID NO: 371369 - protein, 13 aa, Homo sapiens
  CDR3 for alpha chain variable domain of TCR clone 185685 (TRAV30, TRAJ34)
CGTVGYNTDKLIF

SEQ ID NO: 371370 - protein, 16 aa, Homo sapiens
  CDR3 for beta chain variable domain of TCR clone 185685 (TRBV7-9, TRBJ1-2)
CASSLGFSSGEDGYTS

SEQ ID NO: 371371 - protein, 16 aa, Homo sapiens
  CDR3 for alpha chain variable domain of TCR clone 185686 (TRAV30, TRAJ24)
CGTEFVDADSWGKFTF

SEQ ID NO: 371372 - protein, 14 aa, Homo sapiens
  CDR3 for beta chain variable domain of TCR clone 185686 (TRBV12-5, TRBJ2-5)
CASGSRTHQETQYF

SEQ ID NO: 371373 - protein, 13 aa, Homo sapiens
  CDR3 for alpha chain variable domain of TCR clone 185687 (TRAV8-6, TRAJ24)
CAVSSDSWGKLQF

SEQ ID NO: 371374 - protein, 11 aa, Homo sapiens
  CDR3 for beta chain variable domain of TCR clone 185687 (TRBV29-1, TRBJ2-5)
CSEDRTGTQYF

SEQ ID NO: 371375 - protein, 16 aa, Homo sapiens
  CDR3 for alpha chain variable domain of TCR clone 185688 (TRAV3, TRAJ37)
CAVRGKVSGNTGKLIF

SEQ ID NO: 371376 - protein, 15 aa, Homo sapiens
  CDR3 for beta chain variable domain of TCR clone 185688 (TRBV7-3, TRBJ2-2)
CASSETGQGTGELFF

SEQ ID NO: 371377 - protein, 14 aa, Homo sapiens
  CDR3 for alpha chain variable domain of TCR clone 185689 (TRAV1-2, TRAJ16)
CAVNRFSDGQKPLF

SEQ ID NO: 371378 - protein, 17 aa, Homo sapiens
  CDR3 for beta chain variable domain of TCR clone 185689 (TRBV28, TRBJ2-5)
CASSTPEGDALQETQYF

SEQ ID NO: 371379 - protein, 15 aa, Homo sapiens
  CDR3 for alpha chain variable domain of TCR clone 185690 (TRAV21, TRAJ53)
CATLNSGGSNYKLTF

SEQ ID NO: 371380 - protein, 18 aa, Homo sapiens
  CDR3 for beta chain variable domain of TCR clone 185690 (TRBV15, TRBJ2-3)
CATSRDGARSWDTDTQYF

SEQ ID NO: 371381 - protein, 14 aa, Homo sapiens
  CDR3 for alpha chain variable domain of TCR clone 185691 (TRAV21, TRAJ35)
CAVKPIGFGNVLHC

SEQ ID NO: 371382 - protein, 12 aa, Homo sapiens
  CDR3 for beta chain variable domain of TCR clone 185691 (TRBV7-9, TRBJ2-7)
CASSIKREEQYF

SEQ ID NO: 371383 - protein, 16 aa, Homo sapiens
  CDR3 for alpha chain variable domain of TCR clone 185692 (TRAV17, TRAJ54)
CATDSDIIQGAQKLVF

SEQ ID NO: 371384 - protein, 13 aa, Homo sapiens
  CDR3 for beta chain variable domain of TCR clone 185692 (TRBV12-5, TRBJ2-3)
CASGDRQSDTQYF

SEQ ID NO: 371385 - protein, 15 aa, Homo sapiens
  CDR3 for alpha chain variable domain of TCR clone 185693 (TRAV12-1, TRAJ4)
CVVNPFSGGYNKLIF

SEQ ID NO: 371386 - protein, 15 aa, Homo sapiens
  CDR3 for beta chain variable domain of TCR clone 185693 (TRBV28, TRBJ2-5)
CASSLGLGNQETQYF

SEQ ID NO: 371387 - protein, 13 aa, Homo sapiens
  CDR3 for alpha chain variable domain of TCR clone 185694 (TRAV2, TRAJ24)
CAVTTDSWGKLQF

SEQ ID NO: 371388 - protein, 14 aa, Homo sapiens
  CDR3 for beta chain variable domain of TCR clone 185694 (TRBV13, TRBJ2-5)
CASSLGRGQETQSF

SEQ ID NO: 371389 - protein, 15 aa, Homo sapiens
  CDR3 for alpha chain variable domain of TCR clone 185695 (TRAV3, TRAJ4)
CAVRDGTGGYNKLIF

SEQ ID NO: 371390 - protein, 17 aa, Homo sapiens
  CDR3 for beta chain variable domain of TCR clone 185695 (TRBV13, TRBJ2-3)
CASSLSRVVGGRNTQYF

SEQ ID NO: 371391 - protein, 14 aa, Homo sapiens
  CDR3 for alpha chain variable domain of TCR clone 185696 (TRAV2, TRAJ9)
CAVEDRSGGFKTIF

SEQ ID NO: 371392 - protein, 15 aa, Homo sapiens
  CDR3 for beta chain variable domain of TCR clone 185696 (TRBV19, TRBJ2-1)
CATSLETSGYNEQFF

SEQ ID NO: 371393 - protein, 13 aa, Homo sapiens
  CDR3 for alpha chain variable domain of TCR clone 185697 (TRAV8-4, TRAJ10)
CAAFTGGGNKLTF

SEQ ID NO: 371394 - protein, 16 aa, Homo sapiens
  CDR3 for beta chain variable domain of TCR clone 185697 (TRBV12-5, TRBJ2-5)
CASGPRTSGNQETQYF

SEQ ID NO: 371395 - protein, 15 aa, Homo sapiens
  CDR3 for alpha chain variable domain of TCR clone 185698 (TRAV26-1, TRAJ29)
CIVRVEGSGNTPLVF

SEQ ID NO: 371396 - protein, 15 aa, Homo sapiens
  CDR3 for beta chain variable domain of TCR clone 185698 (TRBV7-9, TRBJ2-2)
CASNSWGGRTGELFF

SEQ ID NO: 371397 - protein, 15 aa, Homo sapiens
  CDR3 for alpha chain variable domain of TCR clone 185699 (TRAV3, TRAJ32)
RAVSSYGGATNKLIF

SEQ ID NO: 371398 - protein, 13 aa, Homo sapiens
  CDR3 for beta chain variable domain of TCR clone 185699 (TRBV20-1, TRBJ2-7)
CSARPSTNYEQYF

SEQ ID NO: 371399 - protein, 13 aa, Homo sapiens
  CDR3 for alpha chain variable domain of TCR clone 185700 (TRAV21, TRAJ10)
CAVPTGGGNKLTF

SEQ ID NO: 371400 - protein, 15 aa, Homo sapiens
  CDR3 for beta chain variable domain of TCR clone 185700 (TRBV20-1, TRBJ1-1)
CSASRGVTGNTEAFF

SEQ ID NO: 371401 - protein, 12 aa, Homo sapiens
  CDR3 for alpha chain variable domain of TCR clone 185701 (TRAV17, TRAJ53)
CAFGGSNYELTF

SEQ ID NO: 371402 - protein, 16 aa, Homo sapiens
  CDR3 for beta chain variable domain of TCR clone 185701 (TRBV11-2, TRBJ2-4)
CASSQEGRGGLDIQYF

SEQ ID NO: 371403 - protein, 18 aa, Homo sapiens
  CDR3 for alpha chain variable domain of TCR clone 185702 (TRAV35, TRAJ52)
CAGLLRYPCGTSYGKLTF

SEQ ID NO: 371404 - protein, 13 aa, Homo sapiens
  CDR3 for beta chain variable domain of TCR clone 185702 (TRBV2, TRBJ2-5)
CASGTPYQETQYF

SEQ ID NO: 371405 - protein, 16 aa, Homo sapiens
  CDR3 for alpha chain variable domain of TCR clone 185703 (TRAV3, TRAJ37)
CAVRVRGSGNTGKLIF

SEQ ID NO: 371406 - protein, 13 aa, Homo sapiens
  CDR3 for beta chain variable domain of TCR clone 185703 (TRBV7-9, TRBJ1-2)
CASSLRQNYGYSF

SEQ ID NO: 371407 - protein, 13 aa, Homo sapiens
  CDR3 for alpha chain variable domain of TCR clone 185704 (TRAV12-3, TRAJ7)
CAMSASGNTDSLL

SEQ ID NO: 371408 - protein, 14 aa, Homo sapiens
  CDR3 for beta chain variable domain of TCR clone 185704 (TRBV13, TRBJ2-5)
CASSLGPRDETQYF

SEQ ID NO: 371409 - protein, 13 aa, Homo sapiens
  CDR3 for alpha chain variable domain of TCR clone 185705 (TRAV12-1, TRAJ26)
CVVRRNYGQNFVF

SEQ ID NO: 371410 - protein, 16 aa, Homo sapiens
  CDR3 for beta chain variable domain of TCR clone 185705 (TRBV6-4, TRBJ1-2)
CASSEAVGDPNYGYTF

SEQ ID NO: 371411 - protein, 17 aa, Homo sapiens
  CDR3 for alpha chain variable domain of TCR clone 185706 (TRAV12-2, TRAJ39)
CAVNNMLTFGGGTRLIV

SEQ ID NO: 371412 - protein, 16 aa, Homo sapiens
  CDR3 for beta chain variable domain of TCR clone 185706 (TRBV9, TRBJ2-7)
CASSAGPDRSPYEQYF

SEQ ID NO: 371413 - protein, 18 aa, Homo sapiens
  CDR3 for alpha chain variable domain of TCR clone 185707 (TRAV16, TRAJ52)
CALSGVDAGGTSYGKLTF

SEQ ID NO: 371414 - protein, 12 aa, Homo sapiens
  CDR3 for beta chain variable domain of TCR clone 185707 (TRBV11-2, TRBJ2-2)
CASSLGGGELFF

SEQ ID NO: 371415 - protein, 16 aa, Homo sapiens
  CDR3 for alpha chain variable domain of TCR clone 185708 (TRAV14/DV4, TRAJ53)
CAMREGGGGSSYKLTF

SEQ ID NO: 371416 - protein, 16 aa, Homo sapiens
  CDR3 for beta chain variable domain of TCR clone 185708 (TRBV7-9, TRBJ1-2)
CASSLGFSSGEDGYTF

SEQ ID NO: 371417 - protein, 10 aa, Homo sapiens
  CDR3 for alpha chain variable domain of TCR clone 185709 (TRAV8-4, TRAJ43)
CAVSADDMRF

SEQ ID NO: 371418 - protein, 19 aa, Homo sapiens
  CDR3 for beta chain variable domain of TCR clone 185709 (TRBV25-1, TRBJ2-2)
CAILVYRVDRGRKTGELFF

SEQ ID NO: 371419 - protein, 14 aa, Homo sapiens
  CDR3 for alpha chain variable domain of TCR clone 185710 (TRAV3, TRAJ7)
CAVREEEREQQTRF

SEQ ID NO: 371420 - protein, 12 aa, Homo sapiens
  CDR3 for beta chain variable domain of TCR clone 185710 (TRBV7-8, TRBJ2-7)
CASSLGDREHYF

SEQ ID NO: 371421 - protein, 14 aa, Homo sapiens
  CDR3 for alpha chain variable domain of TCR clone 185711 (TRAV12-1, TRAJ43)
CVVNGRSNNNDMRF

SEQ ID NO: 371422 - protein, 14 aa, Homo sapiens
  CDR3 for beta chain variable domain of TCR clone 185711 (TRBV19, TRBJ2-1)
CASPTFVLSGEQFF

SEQ ID NO: 371423 - protein, 14 aa, Homo sapiens
  CDR3 for alpha chain variable domain of TCR clone 185712 (TRAV16, TRAJ57)
CALPTQCGSERLVF

SEQ ID NO: 371424 - protein, 15 aa, Homo sapiens
  CDR3 for beta chain variable domain of TCR clone 185712 (TRBV28, TRBJ1-3)
CASWWGHLSGNTIYF

SEQ ID NO: 371425 - protein, 16 aa, Homo sapiens
  CDR3 for alpha chain variable domain of TCR clone 185713 (TRAV8-3, TRAJ42)
CAVGEGNGGSQGNLIF

SEQ ID NO: 371426 - protein, 14 aa, Homo sapiens
  CDR3 for beta chain variable domain of TCR clone 185713 (TRBV7-2, TRBJ2-1)
CASRRGGARNEQFF

SEQ ID NO: 371427 - protein, 15 aa, Homo sapiens
  CDR3 for alpha chain variable domain of TCR clone 185714 (TRAV2, TRAJ15)
CAVEDREQAGTALIF

SEQ ID NO: 371428 - protein, 14 aa, Homo sapiens
  CDR3 for beta chain variable domain of TCR clone 185714 (TRBV12-4, TRBJ2-2)
CASNQGANTGELFF

SEQ ID NO: 371429 - protein, 14 aa, Homo sapiens
  CDR3 for alpha chain variable domain of TCR clone 185715 (TRAV9-2, TRAJ39)
CALYIYNAGNMLTF

SEQ ID NO: 371430 - protein, 14 aa, Homo sapiens
  CDR3 for beta chain variable domain of TCR clone 185715 (TRBV12-5, TRBJ2-5)
CAGGSRTHQETQYF

SEQ ID NO: 371431 - protein, 17 aa, Homo sapiens
  CDR3 for alpha chain variable domain of TCR clone 185716 (TRAV3, TRAJ6)
CAVRDGPRAGGSYIPTF

SEQ ID NO: 371432 - protein, 17 aa, Homo sapiens
  CDR3 for beta chain variable domain of TCR clone 185716 (TRBV5-1, TRBJ2-3)
CASSLGASTSGTDTQYF

SEQ ID NO: 371433 - protein, 15 aa, Homo sapiens
  CDR3 for alpha chain variable domain of TCR clone 185717 (TRAV13-1, TRAJ44)
CAASRNTGTASKLTF

SEQ ID NO: 371434 - protein, 17 aa, Homo sapiens
  CDR3 for beta chain variable domain of TCR clone 185717 (TRBV13, TRBJ2-3)
CASSLSRVAGGRNTQYF

SEQ ID NO: 371435 - protein, 12 aa, Homo sapiens
  CDR3 for alpha chain variable domain of TCR clone 185718 (TRAV2, TRAJ5)
CALHTGRRALTF

SEQ ID NO: 371436 - protein, 15 aa, Homo sapiens
  CDR3 for beta chain variable domain of TCR clone 185718 (TRBV10-3, TRBJ2-1)
CAISDVQDRAYEQFF

SEQ ID NO: 371437 - protein, 13 aa, Homo sapiens
  CDR3 for alpha chain variable domain of TCR clone 185719 (TRAV27, TRAJ39)
CAGVNNAGNMLTF

SEQ ID NO: 371438 - protein, 19 aa, Homo sapiens
  CDR3 for beta chain variable domain of TCR clone 185719 (TRBV5-1, TRBJ2-3)
CAGSLWLAGGITTTDTQYF

SEQ ID NO: 371439 - protein, 15 aa, Homo sapiens
  CDR3 for alpha chain variable domain of TCR clone 185720 (TRAV20, TRAJ42)
CAVQARGGSQGNLIF

SEQ ID NO: 371440 - protein, 15 aa, Homo sapiens
  CDR3 for beta chain variable domain of TCR clone 185720 (TRBV7-9, TRBJ1-4)
CASSARTGGNEELFF

SEQ ID NO: 371441 - protein, 14 aa, Homo sapiens
  CDR3 for alpha chain variable domain of TCR clone 185721 (TRAV1-2, TRAJ16)
CAVNRFSDGQKLLF

SEQ ID NO: 371442 - protein, 15 aa, Homo sapiens
  CDR3 for beta chain variable domain of TCR clone 185721 (TRBV7-9, TRBJ1-6)
CASSSTGRGNSHLHF

SEQ ID NO: 371443 - protein, 14 aa, Homo sapiens
  CDR3 for alpha chain variable domain of TCR clone 185722 (TRAV17, TRAJ12)
CAILPMDSSYELIF

SEQ ID NO: 371444 - protein, 15 aa, Homo sapiens
  CDR3 for beta chain variable domain of TCR clone 185722 (TRBV5-1, TRBJ1-1)
CASSLGEGENTEAFF

SEQ ID NO: 371445 - protein, 14 aa, Homo sapiens
  CDR3 for alpha chain variable domain of TCR clone 185723 (TRAV12-2, TRAJ4)
CAEDLSGGHNKLIL

SEQ ID NO: 371446 - protein, 13 aa, Homo sapiens
  CDR3 for beta chain variable domain of TCR clone 185723 (TRBV7-9, TRBJ1-2)
CASSLKQNYGYTF

SEQ ID NO: 371447 - protein, 16 aa, Homo sapiens
  CDR3 for alpha chain variable domain of TCR clone 185724 (TRAV8-3, TRAJ13)
CAVGAYPSGGSQKVTF

SEQ ID NO: 371448 - protein, 14 aa, Homo sapiens
  CDR3 for beta chain variable domain of TCR clone 185724 (TRBV18, TRBJ2-5)
CTSSPRASSETQYF

SEQ ID NO: 371449 - protein, 15 aa, Homo sapiens
  CDR3 for alpha chain variable domain of TCR clone 185725 (TRAV20, TRAJ41)
CAVQANSNSGYALNF

SEQ ID NO: 371450 - protein, 16 aa, Homo sapiens
  CDR3 for beta chain variable domain of TCR clone 185725 (TRBV6-1, TRBJ2-5)
CASSETLDRGAETQYF

SEQ ID NO: 371451 - protein, 14 aa, Homo sapiens
  CDR3 for alpha chain variable domain of TCR clone 185726 (TRAV23/DV6, TRAJ22)
CASSVSGSARQLTF

SEQ ID NO: 371452 - protein, 16 aa, Homo sapiens
  CDR3 for beta chain variable domain of TCR clone 185726 (TRBV19, TRBJ2-2)
CASSFPGQGLAGELFF

SEQ ID NO: 371453 - protein, 16 aa, Homo sapiens
  CDR3 for alpha chain variable domain of TCR clone 185727 (TRAV3, TRAJ40)
CAVRDRIASGTYKYIF

SEQ ID NO: 371454 - protein, 16 aa, Homo sapiens
  CDR3 for beta chain variable domain of TCR clone 185727 (TRBV6-1, TRBJ1-2)
CASSEANSIINYRYTF

SEQ ID NO: 371455 - protein, 12 aa, Homo sapiens
  CDR3 for alpha chain variable domain of TCR clone 185728 (TRAV8-3, TRAJ26)
CAGDNDGQNFVF

SEQ ID NO: 371456 - protein, 18 aa, Homo sapiens
  CDR3 for beta chain variable domain of TCR clone 185728 (TRBV12-4, TRBJ2-2)
CASSLVAGTRGRTGELFF

SEQ ID NO: 371457 - protein, 13 aa, Homo sapiens
  CDR3 for alpha chain variable domain of TCR clone 185729 (TRAV12-2, TRAJ40)
CAVAPSGTYKYIF

SEQ ID NO: 371458 - protein, 17 aa, Homo sapiens
  CDR3 for beta chain variable domain of TCR clone 185729 (TRBV11-2, TRBJ2-1)
CASSLYPPGVEYNEQFF

SEQ ID NO: 371459 - protein, 16 aa, Homo sapiens
  CDR3 for alpha chain variable domain of TCR clone 185730 (TRAV13-1, TRAJ48)
CAASIFGNFGNEKFTF

SEQ ID NO: 371460 - protein, 14 aa, Homo sapiens
  CDR3 for beta chain variable domain of TCR clone 185730 (TRBV7-3, TRBJ1-1)
CASSLKGGNTEAFF

SEQ ID NO: 371461 - protein, 15 aa, Homo sapiens
  CDR3 for alpha chain variable domain of TCR clone 185731 (TRAV21, TRAJ32)
CAAAPYGCATHKLIF

SEQ ID NO: 371462 - protein, 17 aa, Homo sapiens
  CDR3 for beta chain variable domain of TCR clone 185731 (TRBV18, TRBJ2-3)
CASSPFGDGGFTDTQYF

SEQ ID NO: 371463 - protein, 15 aa, Homo sapiens
  CDR3 for alpha chain variable domain of TCR clone 185732 (TRAV17, TRAJ23)
CATDAEDNQGGKLIF

SEQ ID NO: 371464 - protein, 12 aa, Homo sapiens
  CDR3 for beta chain variable domain of TCR clone 185732 (TRBV2, TRBJ2-1)
CAKREGYNEQVF

SEQ ID NO: 371465 - protein, 23 aa, Homo sapiens
  CDR3 for alpha chain variable domain of TCR clone 185733 (TRAV26-1, TRAJ38)
CIADNAGNNHIQNPDPAVYQLRD

SEQ ID NO: 371466 - protein, 13 aa, Homo sapiens
  CDR3 for beta chain variable domain of TCR clone 185733 (TRBV5-4, TRBJ1-1)
CASSVDLGTEDFF

SEQ ID NO: 371467 - protein, 10 aa, Homo sapiens
  CDR3 for alpha chain variable domain of TCR clone 185734 (TRAV12-3, TRAJ49)
CAMNDDQFYF

SEQ ID NO: 371468 - protein, 13 aa, Homo sapiens
  CDR3 for beta chain variable domain of TCR clone 185734 (TRBV11-2, TRBJ2-5)
CASSSTGEETQYF

SEQ ID NO: 371469 - protein, 13 aa, Homo sapiens
  CDR3 for alpha chain variable domain of TCR clone 185735 (TRAV2, TRAJ40)
CAVVTSGTYKYIY

SEQ ID NO: 371470 - protein, 15 aa, Homo sapiens
  CDR3 for beta chain variable domain of TCR clone 185735 (TRBV11-3, TRBJ2-3)
CASLKDGREGDTQYF

SEQ ID NO: 371471 - protein, 19 aa, Homo sapiens
  CDR3 for alpha chain variable domain of TCR clone 185736 (TRAV13-1, TRAJ52)
CAASPYQNAGGTSYGKLTF

SEQ ID NO: 371472 - protein, 13 aa, Homo sapiens
  CDR3 for beta chain variable domain of TCR clone 185736 (TRBV7-3, TRBJ2-5)
CASSCRGGETQYF

SEQ ID NO: 371473 - protein, 13 aa, Homo sapiens
  CDR3 for alpha chain variable domain of TCR clone 185737 (TRAV1-1, TRAJ9)
CASKNTVGFKTIF

SEQ ID NO: 371474 - protein, 14 aa, Homo sapiens
  CDR3 for beta chain variable domain of TCR clone 185737 (TRBV20-1, TRBJ2-1)
CSAQIGGSANEQFF

SEQ ID NO: 371475 - protein, 15 aa, Homo sapiens
  CDR3 for alpha chain variable domain of TCR clone 185738 (TRAV12-3, TRAJ6)
CAMSATTGGSYIPTF

SEQ ID NO: 371476 - protein, 15 aa, Homo sapiens
  CDR3 for beta chain variable domain of TCR clone 185738 (TRBV6-1, TRBJ2-5)
CASPRWGTEGQTQYF

SEQ ID NO: 371477 - protein, 14 aa, Homo sapiens
  CDR3 for alpha chain variable domain of TCR clone 185739 (TRAV12-3, TRAJ10)
SHLPLTGGGNKLTF

SEQ ID NO: 371478 - protein, 17 aa, Homo sapiens
  CDR3 for beta chain variable domain of TCR clone 185739 (TRBV3-1, TRBJ2-2)
CASSQFRDKVDTGELFF

SEQ ID NO: 371479 - protein, 11 aa, Homo sapiens
  CDR3 for alpha chain variable domain of TCR clone 185740 (TRAV3, TRAJ49)
CAPITGNQFYF

SEQ ID NO: 371480 - protein, 16 aa, Homo sapiens
  CDR3 for beta chain variable domain of TCR clone 185740 (TRBV5-1, TRBJ2-3)
RASSVFPMSSTDTQYF

SEQ ID NO: 371481 - protein, 16 aa, Homo sapiens
  CDR3 for alpha chain variable domain of TCR clone 185741 (TRAV12-3, TRAJ53)
CAMSPGSGGSKYKLKF

SEQ ID NO: 371482 - protein, 11 aa, Homo sapiens
  CDR3 for beta chain variable domain of TCR clone 185741 (TRBV29-1, TRBJ2-5)
CSEDRTGTQYF

SEQ ID NO: 371483 - protein, 15 aa, Homo sapiens
  CDR3 for alpha chain variable domain of TCR clone 185742 (TRAV26-2, TRAJ28)
FILVESGAGSYQLTF

SEQ ID NO: 371484 - protein, 15 aa, Homo sapiens
  CDR3 for beta chain variable domain of TCR clone 185742 (TRBV2, TRBJ2-7)
CASSEGLARSYEQYF

SEQ ID NO: 371485 - protein, 15 aa, Homo sapiens
  CDR3 for alpha chain variable domain of TCR clone 185743 (TRAV8-3, TRAJ7)
CAVGSISYGNNRLAF

SEQ ID NO: 371486 - protein, 17 aa, Homo sapiens
  CDR3 for beta chain variable domain of TCR clone 185743 (TRBV20-1, TRBJ2-1)
CSASSSGLAGSYNEQFF

SEQ ID NO: 371487 - protein, 18 aa, Homo sapiens
  CDR3 for alpha chain variable domain of TCR clone 185744 (TRAV13-1, TRAJ52)
CAASKRSAGGTSYGKLTF

SEQ ID NO: 371488 - protein, 16 aa, Homo sapiens
  CDR3 for beta chain variable domain of TCR clone 185744 (TRBV4-3, TRBJ1-6)
CASSQDPGVYNSPLHF

SEQ ID NO: 371489 - protein, 14 aa, Homo sapiens
  CDR3 for alpha chain variable domain of TCR clone 185745 (TRAV12-1, TRAJ6)
CVVPTSGGSYIPTF

SEQ ID NO: 371490 - protein, 14 aa, Homo sapiens
  CDR3 for beta chain variable domain of TCR clone 185745 (TRBV7-3, TRBJ2-1)
CASSLAGGTNEQFF

SEQ ID NO: 371491 - protein, 11 aa, Homo sapiens
  CDR3 for alpha chain variable domain of TCR clone 185746 (TRAV17, TRAJ43)
CATPRSNDMRF

SEQ ID NO: 371492 - protein, 18 aa, Homo sapiens
  CDR3 for beta chain variable domain of TCR clone 185746 (TRBV7-9, TRBJ2-1)
CASSLAVSGTSGRNEQFF

SEQ ID NO: 371493 - protein, 13 aa, Homo sapiens
  CDR3 for alpha chain variable domain of TCR clone 185747 (TRAV27, TRAJ3)
ASLRGSSASKIIF

SEQ ID NO: 371494 - protein, 15 aa, Homo sapiens
  CDR3 for beta chain variable domain of TCR clone 185747 (TRBV28, TRBJ1-3)
CASSMGWDSGNTIDC

SEQ ID NO: 371495 - protein, 16 aa, Homo sapiens
  CDR3 for alpha chain variable domain of TCR clone 185748 (TRAV30, TRAJ24)
CGTEIVDADSWGKFQF

SEQ ID NO: 371496 - protein, 11 aa, Homo sapiens
  CDR3 for beta chain variable domain of TCR clone 185748 (TRBV7-3, TRBJ2-5)
CASSLSETQYF

SEQ ID NO: 371497 - protein, 14 aa, Homo sapiens
  CDR3 for alpha chain variable domain of TCR clone 185749 (TRAV12-3, TRAJ10)
SHLPQTGGGNKLTF

SEQ ID NO: 371498 - protein, 16 aa, Homo sapiens
  CDR3 for beta chain variable domain of TCR clone 185749 (TRBV19, TRBJ2-2)
CASTIGARAGAGELFF

SEQ ID NO: 371499 - protein, 12 aa, Homo sapiens
  CDR3 for alpha chain variable domain of TCR clone 185750 (TRAV12-3, TRAJ17)
CAMTLTGNKLTF

SEQ ID NO: 371500 - protein, 15 aa, Homo sapiens
  CDR3 for beta chain variable domain of TCR clone 185750 (TRBV11-3, TRBJ2-3)
CASRRDGREGDTQYF

SEQ ID NO: 371501 - protein, 15 aa, Homo sapiens
  CDR3 for alpha chain variable domain of TCR clone 185751 (TRAV38-2/DV8, TRAJ48)
CAYRSGGFANEKLTF

SEQ ID NO: 371502 - protein, 16 aa, Homo sapiens
  CDR3 for beta chain variable domain of TCR clone 185751 (TRBV28, TRBJ2-7)
CASSPWVATGDLSQYF

SEQ ID NO: 371503 - protein, 17 aa, Homo sapiens
  CDR3 for alpha chain variable domain of TCR clone 185752 (TRAV3, TRAJ6)
CAVRDGPRAGGSYIPTF

SEQ ID NO: 371504 - protein, 14 aa, Homo sapiens
  CDR3 for beta chain variable domain of TCR clone 185752 (TRBV15, TRBJ2-1)
CATSGVEDYNEQFF

SEQ ID NO: 371505 - protein, 12 aa, Homo sapiens
  CDR3 for alpha chain variable domain of TCR clone 185753 (TRAV12-3, TRAJ17)
CAMTLTGNKLTF

SEQ ID NO: 371506 - protein, 14 aa, Homo sapiens
  CDR3 for beta chain variable domain of TCR clone 185753 (TRBV12-4, TRBJ1-1)
SASSLGTGGTEAFF

SEQ ID NO: 371507 - protein, 15 aa, Homo sapiens
  CDR3 for alpha chain variable domain of TCR clone 185754 (TRAV17, TRAJ23)
CATDADDNQGGKRIF
